United States Patent Application Publication US 2005/0255487 A1 - sequence listing, part 25

SEQ ID NO: 671648 - RNA, 19 nt, Homo sapiens
  misc_RNA (1)...(19): siRNA sense strand
aagcuaaaguugguucucu

SEQ ID NO: 671649 - RNA, 19 nt, Homo sapiens
  misc_RNA (1)...(19): siRNA sense strand
gaagcaaaggcaccucacu

SEQ ID NO: 671650 - RNA, 19 nt, Homo sapiens
  misc_RNA (1)...(19): siRNA sense strand
aagaaaaggcccaagcuaa

SEQ ID NO: 671651 - RNA, 19 nt, Homo sapiens
  misc_RNA (1)...(19): siRNA sense strand
ccugaagaaugucaaaucc

SEQ ID NO: 671652 - RNA, 19 nt, Homo sapiens
  misc_RNA (1)...(19): siRNA sense strand
aaggugaacaagagaaaga

SEQ ID NO: 671653 - RNA, 19 nt, Homo sapiens
  misc_RNA (1)...(19): siRNA sense strand
gaccucagcaccgcuaaca

SEQ ID NO: 671654 - RNA, 19 nt, Homo sapiens
  misc_RNA (1)...(19): siRNA sense strand
cuaaaguugguucucuuga

SEQ ID NO: 671655 - RNA, 19 nt, Homo sapiens
  misc_RNA (1)...(19): siRNA sense strand
gaaaaggcccaagcuaaag

SEQ ID NO: 671656 - RNA, 19 nt, Homo sapiens
  misc_RNA (1)...(19): siRNA sense strand
ccuucucucucaacaguuc

SEQ ID NO: 671657 - RNA, 19 nt, Homo sapiens
  misc_RNA (1)...(19): siRNA sense strand
gaaagaagcucaacauaaa

SEQ ID NO: 671658 - RNA, 19 nt, Homo sapiens
  misc_RNA (1)...(19): siRNA sense strand
caaagucucugacggagua

SEQ ID NO: 671659 - RNA, 19 nt, Homo sapiens
  misc_RNA (1)...(19): siRNA sense strand
caacagacaacaucaaaua

SEQ ID NO: 671660 - RNA, 19 nt, Homo sapiens
  misc_RNA (1)...(19): siRNA sense strand
ggaggugucugcaaggaua

SEQ ID NO: 671661 - RNA, 19 nt, Homo sapiens
  misc_RNA (1)...(19): siRNA sense strand
gaagaaggucgccaucaua

SEQ ID NO: 671662 - RNA, 19 nt, Homo sapiens
  misc_RNA (1)...(19): siRNA sense strand
gaccucagcugacagagaa

SEQ ID NO: 671663 - RNA, 19 nt, Homo sapiens
  misc_RNA (1)...(19): siRNA sense strand
aaaguugguucucuugaua

SEQ ID NO: 671664 - RNA, 19 nt, Homo sapiens
  misc_RNA (1)...(19): siRNA sense strand
gagaaagaagcucaacaua

SEQ ID NO: 671665 - RNA, 19 nt, Homo sapiens
  misc_RNA (1)...(19): siRNA sense strand
agaaagaagcucaacauaa

SEQ ID NO: 671666 - RNA, 19 nt, Homo sapiens
  misc_RNA (1)...(19): siRNA sense strand
gggcugagaucauuacaca

SEQ ID NO: 671667 - RNA, 19 nt, Homo sapiens
  misc_RNA (1)...(19): siRNA sense strand
gcucgaaucuccucagcuu

SEQ ID NO: 671668 - RNA, 19 nt, Homo sapiens
  misc_RNA (1)...(19): siRNA sense strand
ugaagaaugucaaauccaa

SEQ ID NO: 671669 - RNA, 19 nt, Homo sapiens
  misc_RNA (1)...(19): siRNA sense strand
gaaaggugaacaagagaaa

SEQ ID NO: 671670 - RNA, 19 nt, Homo sapiens
  misc_RNA (1)...(19): siRNA sense strand
gaagagugguaccucaaca

SEQ ID NO: 671671 - RNA, 19 nt, Homo sapiens
  misc_RNA (1)...(19): siRNA sense strand
caccugagauuaaggauca

SEQ ID NO: 671672 - RNA, 19 nt, Homo sapiens
  misc_RNA (1)...(19): siRNA sense strand
aaauguggcucucugaaga

SEQ ID NO: 671673 - RNA, 19 nt, Homo sapiens
  misc_RNA (1)...(19): siRNA sense strand
gcaaggauaguucaaguag

SEQ ID NO: 671674 - RNA, 19 nt, Homo sapiens
  misc_RNA (1)...(19): siRNA sense strand
gcaucaaccugcucgaauc

SEQ ID NO: 671675 - RNA, 19 nt, Homo sapiens
  misc_RNA (1)...(19): siRNA sense strand
cccaagaccuuccuccauu

SEQ ID NO: 671676 - RNA, 19 nt, Homo sapiens
  misc_RNA (1)...(19): siRNA sense strand
ugccagaccugaagaaugu

SEQ ID NO: 671677 - RNA, 19 nt, Homo sapiens
  misc_RNA (1)...(19): siRNA sense strand
uaaaguugguucucuugau

SEQ ID NO: 671678 - RNA, 19 nt, Homo sapiens
  misc_RNA (1)...(19): siRNA sense strand
ucacauccaccugagauua

SEQ ID NO: 671679 - RNA, 19 nt, Homo sapiens
  misc_RNA (1)...(19): siRNA sense strand
ggaugaagagggugccuuu

SEQ ID NO: 671680 - RNA, 19 nt, Homo sapiens
  misc_RNA (1)...(19): siRNA sense strand
ugaagagggugccuuugga

SEQ ID NO: 671681 - RNA, 19 nt, Homo sapiens
  misc_RNA (1)...(19): siRNA sense strand
caacaguucuaucucuucu

SEQ ID NO: 671682 - RNA, 19 nt, Homo sapiens
  misc_RNA (1)...(19): siRNA sense strand
gaagaaugucaaauccaaa

SEQ ID NO: 671683 - RNA, 19 nt, Homo sapiens
  misc_RNA (1)...(19): siRNA sense strand
ccugaaaggugaacaagag

SEQ ID NO: 671684 - RNA, 19 nt, Homo sapiens
  misc_RNA (1)...(19): siRNA sense strand
cuccucagcuugccacuuu

SEQ ID NO: 671685 - RNA, 19 nt, Homo sapiens
  misc_RNA (1)...(19): siRNA sense strand
caaaggacaaagucucuga

SEQ ID NO: 671686 - RNA, 19 nt, Homo sapiens
  misc_RNA (1)...(19): siRNA sense strand
uuuagcagcugaagaaaca

SEQ ID NO: 671687 - RNA, 19 nt, Homo sapiens
  misc_RNA (1)...(19): siRNA sense strand
agaagaaggucgccaucau

SEQ ID NO: 671688 - RNA, 19 nt, Homo sapiens
  misc_RNA (1)...(19): siRNA sense strand
ccaagaccuuccuccauuc

SEQ ID NO: 671689 - RNA, 19 nt, Homo sapiens
  misc_RNA (1)...(19): siRNA sense strand
ggucacagggcaccuauuc

SEQ ID NO: 671690 - RNA, 19 nt, Homo sapiens
  misc_RNA (1)...(19): siRNA sense strand
ucaaauaccagccuaaagg

SEQ ID NO: 671691 - RNA, 19 nt, Homo sapiens
  misc_RNA (1)...(19): siRNA sense strand
ucacagggcaccuauucaa

SEQ ID NO: 671692 - RNA, 19 nt, Homo sapiens
  misc_RNA (1)...(19): siRNA sense strand
agaggcaucugcacacuca

SEQ ID NO: 671693 - RNA, 19 nt, Homo sapiens
  misc_RNA (1)...(19): siRNA sense strand
gaaggucgccaucauacgu

SEQ ID NO: 671694 - RNA, 19 nt, Homo sapiens
  misc_RNA (1)...(19): siRNA sense strand
aaggauaguucaaguaguc

SEQ ID NO: 671695 - RNA, 19 nt, Homo sapiens
  misc_RNA (1)...(19): siRNA sense strand
gaggaggugucugcaagga

SEQ ID NO: 671696 - RNA, 19 nt, Homo sapiens
  misc_RNA (1)...(19): siRNA sense strand
acaguucuaucucuucuuc

SEQ ID NO: 671697 - RNA, 19 nt, Homo sapiens
  misc_RNA (1)...(19): siRNA sense strand
aaauagaccuaagccaugu

SEQ ID NO: 671698 - RNA, 19 nt, Homo sapiens
  misc_RNA (1)...(19): siRNA sense strand
gaucaacagacaacaucaa

SEQ ID NO: 671699 - RNA, 19 nt, Homo sapiens
  misc_RNA (1)...(19): siRNA sense strand
gcugagaucauuacacagu

SEQ ID NO: 671700 - RNA, 19 nt, Homo sapiens
  misc_RNA (1)...(19): siRNA sense strand
ggagacagagaugagaauu

SEQ ID NO: 671701 - RNA, 19 nt, Homo sapiens
  misc_RNA (1)...(19): siRNA sense strand
ccaaagagaaugggaucaa

SEQ ID NO: 671702 - RNA, 19 nt, Homo sapiens
  misc_RNA (1)...(19): siRNA sense strand
caucaaauaccagccuaaa

SEQ ID NO: 671703 - RNA, 19 nt, Homo sapiens
  misc_RNA (1)...(19): siRNA sense strand
cagacaacaucaaauacca

SEQ ID NO: 671704 - RNA, 19 nt, Homo sapiens
  misc_RNA (1)...(19): siRNA sense strand
caaagagaaugggaucaac

SEQ ID NO: 671705 - RNA, 19 nt, Homo sapiens
  misc_RNA (1)...(19): siRNA sense strand
ucaaauaccaaagagaaug

SEQ ID NO: 671706 - RNA, 19 nt, Homo sapiens
  misc_RNA (1)...(19): siRNA sense strand
gcuaaaguugguucucuug

SEQ ID NO: 671707 - RNA, 19 nt, Homo sapiens
  misc_RNA (1)...(19): siRNA sense strand
gccuuuagcagcugaagaa

SEQ ID NO: 671708 - RNA, 19 nt, Homo sapiens
  misc_RNA (1)...(19): siRNA sense strand
ucagagagcaugcuaaagc

SEQ ID NO: 671709 - RNA, 19 nt, Homo sapiens
  misc_RNA (1)...(19): siRNA sense strand
cacauccaccugagauuaa

SEQ ID NO: 671710 - RNA, 19 nt, Homo sapiens
  misc_RNA (1)...(19): siRNA sense strand
gagaagaaggucgccauca

SEQ ID NO: 671711 - RNA, 19 nt, Homo sapiens
  misc_RNA (1)...(19): siRNA sense strand
ucaccugccucagaacaga

SEQ ID NO: 671712 - RNA, 19 nt, Homo sapiens
  misc_RNA (1)...(19): siRNA sense strand
cccaucaccugccucagaa

SEQ ID NO: 671713 - RNA, 19 nt, Homo sapiens
  misc_RNA (1)...(19): siRNA sense strand
ugaagaaacagcuaaucug

SEQ ID NO: 671714 - RNA, 19 nt, Homo sapiens
  misc_RNA (1)...(19): siRNA sense strand
caaggauaguucaaguagu

SEQ ID NO: 671715 - RNA, 19 nt, Homo sapiens
  misc_RNA (1)...(19): siRNA sense strand
ucucaacaguucuaucucu

SEQ ID NO: 671716 - RNA, 19 nt, Homo sapiens
  misc_RNA (1)...(19): siRNA sense strand
agacagagaugagaauucc

SEQ ID NO: 671717 - RNA, 19 nt, Homo sapiens
  misc_RNA (1)...(19): siRNA sense strand
ccucagcaccgcuaacaga

SEQ ID NO: 671718 - RNA, 19 nt, Homo sapiens
  misc_RNA (1)...(19): siRNA sense strand
gaacggaaagacgaagcaa

SEQ ID NO: 671719 - RNA, 19 nt, Homo sapiens
  misc_RNA (1)...(19): siRNA sense strand
caaauguggcucucugaag

SEQ ID NO: 671720 - RNA, 19 nt, Homo sapiens
  misc_RNA (1)...(19): siRNA sense strand
gagacagagaugagaauuc

SEQ ID NO: 671721 - RNA, 19 nt, Homo sapiens
  misc_RNA (1)...(19): siRNA sense strand
ggcuguagcaguccugaaa

SEQ ID NO: 671722 - RNA, 19 nt, Homo sapiens
  misc_RNA (1)...(19): siRNA sense strand
ccaaauguggcucucugaa

SEQ ID NO: 671723 - RNA, 19 nt, Homo sapiens
  misc_RNA (1)...(19): siRNA sense strand
ccgaagcgccaauggauuc

SEQ ID NO: 671724 - RNA, 19 nt, Homo sapiens
  misc_RNA (1)...(19): siRNA sense strand
aagaagcucaacauaaaga

SEQ ID NO: 671725 - RNA, 19 nt, Homo sapiens
  misc_RNA (1)...(19): siRNA sense strand
cuucagagagcaugcuaaa

SEQ ID NO: 671726 - RNA, 19 nt, Homo sapiens
  misc_RNA (1)...(19): siRNA sense strand
caaauaccaaagagaaugg

SEQ ID NO: 671727 - RNA, 19 nt, Homo sapiens
  misc_RNA (1)...(19): siRNA sense strand
ggugguaaugucaagauug

SEQ ID NO: 671728 - RNA, 19 nt, Homo sapiens
  misc_RNA (1)...(19): siRNA sense strand
guaaccaagagcccagaaa

SEQ ID NO: 671729 - RNA, 19 nt, Homo sapiens
  misc_RNA (1)...(19): siRNA sense strand
agagaaagaagcucaacau

SEQ ID NO: 671730 - RNA, 19 nt, Homo sapiens
  misc_RNA (1)...(19): siRNA sense strand
uaaacaggcaaaggacaaa

SEQ ID NO: 671731 - RNA, 19 nt, Homo sapiens
  misc_RNA (1)...(19): siRNA sense strand
ccacuuuggcugaggaugu

SEQ ID NO: 671732 - RNA, 19 nt, Homo sapiens
  misc_RNA (1)...(19): siRNA sense strand
gggaagagugguaccucaa

SEQ ID NO: 671733 - RNA, 19 nt, Homo sapiens
  misc_RNA (1)...(19): siRNA sense strand
cugcaaggauaguucaagu

SEQ ID NO: 671734 - RNA, 19 nt, Homo sapiens
  misc_RNA (1)...(19): siRNA sense strand
gauaaugcucaucauguac

SEQ ID NO: 671735 - RNA, 19 nt, Homo sapiens
  misc_RNA (1)...(19): siRNA sense strand
ccaucuuggugccgaguga

SEQ ID NO: 671736 - RNA, 19 nt, Homo sapiens
  misc_RNA (1)...(19): siRNA sense strand
ugaaaggugaacaagagaa

SEQ ID NO: 671737 - RNA, 19 nt, Homo sapiens
  misc_RNA (1)...(19): siRNA sense strand
acagggcaccuauucaaau

SEQ ID NO: 671738 - RNA, 19 nt, Homo sapiens
  misc_RNA (1)...(19): siRNA sense strand
uuaaacaggcaaaggacaa

SEQ ID NO: 671739 - RNA, 19 nt, Homo sapiens
  misc_RNA (1)...(19): siRNA sense strand
agaaaaggcccaagcuaaa

SEQ ID NO: 671740 - RNA, 19 nt, Homo sapiens
  misc_RNA (1)...(19): siRNA sense strand
ucacugcugcacucgcuaa

SEQ ID NO: 671741 - RNA, 19 nt, Homo sapiens
  misc_RNA (1)...(19): siRNA sense strand
cacagggcaccuauucaaa

SEQ ID NO: 671742 - RNA, 19 nt, Homo sapiens
  misc_RNA (1)...(19): siRNA sense strand
cgacgacucagcaaugucu

SEQ ID NO: 671743 - RNA, 19 nt, Homo sapiens
  misc_RNA (1)...(19): siRNA sense strand
gaggugguaaugucaagau

SEQ ID NO: 671744 - RNA, 19 nt, Homo sapiens
  misc_RNA (1)...(19): siRNA sense strand
guggcucucugaagaacau

SEQ ID NO: 671745 - RNA, 19 nt, Homo sapiens
  misc_RNA (1)...(19): siRNA sense strand
ggaagagugguaccucaac

SEQ ID NO: 671746 - RNA, 19 nt, Homo sapiens
  misc_RNA (1)...(19): siRNA sense strand
acagagaugagaauuccuu

SEQ ID NO: 671747 - RNA, 19 nt, Homo sapiens
  misc_RNA (1)...(19): siRNA sense strand
uauuuaaacaggcaaagga

SEQ ID NO: 671748 - RNA, 19 nt, Homo sapiens
  misc_RNA (1)...(19): siRNA sense strand
aagcuaaaguugguucucu

SEQ ID NO: 671749 - RNA, 19 nt, Homo sapiens
  misc_RNA (1)...(19): siRNA sense strand
gaagcaaaggcaccucacu

SEQ ID NO: 671750 - RNA, 19 nt, Homo sapiens
  misc_RNA (1)...(19): siRNA sense strand
aagaaaaggcccaagcuaa

SEQ ID NO: 671751 - RNA, 19 nt, Homo sapiens
  misc_RNA (1)...(19): siRNA sense strand
ccugaagaaugucaaaucc

SEQ ID NO: 671752 - RNA, 19 nt, Homo sapiens
  misc_RNA (1)...(19): siRNA sense strand
aaggugaacaagagaaaga

SEQ ID NO: 671753 - RNA, 19 nt, Homo sapiens
  misc_RNA (1)...(19): siRNA sense strand
gaccucagcaccgcuaaca

SEQ ID NO: 671754 - RNA, 19 nt, Homo sapiens
  misc_RNA (1)...(19): siRNA sense strand
cuaaaguugguucucuuga

SEQ ID NO: 671755 - RNA, 19 nt, Homo sapiens
  misc_RNA (1)...(19): siRNA sense strand
gaaaaggcccaagcuaaag

SEQ ID NO: 671756 - RNA, 19 nt, Homo sapiens
  misc_RNA (1)...(19): siRNA sense strand
ccuucucucucaacaguuc

SEQ ID NO: 671757 - RNA, 19 nt, Homo sapiens
  misc_RNA (1)...(19): siRNA sense strand
gaaagaagcucaacauaaa

SEQ ID NO: 671758 - RNA, 19 nt, Homo sapiens
  misc_RNA (1)...(19): siRNA sense strand
caaagucucugacggagua

SEQ ID NO: 671759 - RNA, 19 nt, Homo sapiens
  misc_RNA (1)...(19): siRNA sense strand
caacagacaacaucaaaua

SEQ ID NO: 671760 - RNA, 19 nt, Homo sapiens
  misc_RNA (1)...(19): siRNA sense strand
ggaggugucugcaaggaua

SEQ ID NO: 671761 - RNA, 19 nt, Homo sapiens
  misc_RNA (1)...(19): siRNA sense strand
gaagaaggucgccaucaua

SEQ ID NO: 671762 - RNA, 19 nt, Homo sapiens
  misc_RNA (1)...(19): siRNA sense strand
gaccucagcugacagagaa

SEQ ID NO: 671763 - RNA, 19 nt, Homo sapiens
  misc_RNA (1)...(19): siRNA sense strand
aaaguugguucucuugaua

SEQ ID NO: 671764 - RNA, 19 nt, Homo sapiens
  misc_RNA (1)...(19): siRNA sense strand
gagaaagaagcucaacaua

SEQ ID NO: 671765 - RNA, 19 nt, Homo sapiens
  misc_RNA (1)...(19): siRNA sense strand
agaaagaagcucaacauaa

SEQ ID NO: 671766 - RNA, 19 nt, Homo sapiens
  misc_RNA (1)...(19): siRNA sense strand
gggcugagaucauuacaca

SEQ ID NO: 671767 - RNA, 19 nt, Homo sapiens
  misc_RNA (1)...(19): siRNA sense strand
gcucgaaucuccucagcuu

SEQ ID NO: 671768 - RNA, 19 nt, Homo sapiens
  misc_RNA (1)...(19): siRNA sense strand
ugaagaaugucaaauccaa

SEQ ID NO: 671769 - RNA, 19 nt, Homo sapiens
  misc_RNA (1)...(19): siRNA sense strand
gaaaggugaacaagagaaa

SEQ ID NO: 671770 - RNA, 19 nt, Homo sapiens
  misc_RNA (1)...(19): siRNA sense strand
gaagagugguaccucaaca

SEQ ID NO: 671771 - RNA, 19 nt, Homo sapiens
  misc_RNA (1)...(19): siRNA sense strand
caccugagauuaaggauca

SEQ ID NO: 671772 - RNA, 19 nt, Homo sapiens
  misc_RNA (1)...(19): siRNA sense strand
aaauguggcucucugaaga

SEQ ID NO: 671773 - RNA, 19 nt, Homo sapiens
  misc_RNA (1)...(19): siRNA sense strand
gcaaggauaguucaaguag

SEQ ID NO: 671774 - RNA, 19 nt, Homo sapiens
  misc_RNA (1)...(19): siRNA sense strand
gcaucaaccugcucgaauc

SEQ ID NO: 671775 - RNA, 19 nt, Homo sapiens
  misc_RNA (1)...(19): siRNA sense strand
cccaagaccuuccuccauu

SEQ ID NO: 671776 - RNA, 19 nt, Homo sapiens
  misc_RNA (1)...(19): siRNA sense strand
ugccagaccugaagaaugu

SEQ ID NO: 671777 - RNA, 19 nt, Homo sapiens
  misc_RNA (1)...(19): siRNA sense strand
uaaaguugguucucuugau

SEQ ID NO: 671778 - RNA, 19 nt, Homo sapiens
  misc_RNA (1)...(19): siRNA sense strand
ucacauccaccugagauua

SEQ ID NO: 671779 - RNA, 19 nt, Homo sapiens
  misc_RNA (1)...(19): siRNA sense strand
ggaugaagagggugccuuu

SEQ ID NO: 671780 - RNA, 19 nt, Homo sapiens
  misc_RNA (1)...(19): siRNA sense strand
ugaagagggugccuuugga

SEQ ID NO: 671781 - RNA, 19 nt, Homo sapiens
  misc_RNA (1)...(19): siRNA sense strand
caacaguucuaucucuucu

SEQ ID NO: 671782 - RNA, 19 nt, Homo sapiens
  misc_RNA (1)...(19): siRNA sense strand
gaagaaugucaaauccaaa

SEQ ID NO: 671783 - RNA, 19 nt, Homo sapiens
  misc_RNA (1)...(19): siRNA sense strand
ccugaaaggugaacaagag

SEQ ID NO: 671784 - RNA, 19 nt, Homo sapiens
  misc_RNA (1)...(19): siRNA sense strand
cuccucagcuugccacuuu

SEQ ID NO: 671785 - RNA, 19 nt, Homo sapiens
  misc_RNA (1)...(19): siRNA sense strand
caaaggacaaagucucuga

SEQ ID NO: 671786 - RNA, 19 nt, Homo sapiens
  misc_RNA (1)...(19): siRNA sense strand
uuuagcagcugaagaaaca

SEQ ID NO: 671787 - RNA, 19 nt, Homo sapiens
  misc_RNA (1)...(19): siRNA sense strand
agaagaaggucgccaucau

SEQ ID NO: 671788 - RNA, 19 nt, Homo sapiens
  misc_RNA (1)...(19): siRNA sense strand
ccaagaccuuccuccauuc

SEQ ID NO: 671789 - RNA, 19 nt, Homo sapiens
  misc_RNA (1)...(19): siRNA sense strand
ggucacagggcaccuauuc

SEQ ID NO: 671790 - RNA, 19 nt, Homo sapiens
  misc_RNA (1)...(19): siRNA sense strand
ucaaauaccagccuaaagg

SEQ ID NO: 671791 - RNA, 19 nt, Homo sapiens
  misc_RNA (1)...(19): siRNA sense strand
ucacagggcaccuauucaa

SEQ ID NO: 671792 - RNA, 19 nt, Homo sapiens
  misc_RNA (1)...(19): siRNA sense strand
agaggcaucugcacacuca

SEQ ID NO: 671793 - RNA, 19 nt, Homo sapiens
  misc_RNA (1)...(19): siRNA sense strand
gaaggucgccaucauacgu

SEQ ID NO: 671794 - RNA, 19 nt, Homo sapiens
  misc_RNA (1)...(19): siRNA sense strand
aaggauaguucaaguaguc

SEQ ID NO: 671795 - RNA, 19 nt, Homo sapiens
  misc_RNA (1)...(19): siRNA sense strand
gaggaggugucugcaagga

SEQ ID NO: 671796 - RNA, 19 nt, Homo sapiens
  misc_RNA (1)...(19): siRNA sense strand
acaguucuaucucuucuuc

SEQ ID NO: 671797 - RNA, 19 nt, Homo sapiens
  misc_RNA (1)...(19): siRNA sense strand
aaauagaccuaagccaugu

SEQ ID NO: 671798 - RNA, 19 nt, Homo sapiens
  misc_RNA (1)...(19): siRNA sense strand
gaucaacagacaacaucaa

SEQ ID NO: 671799 - RNA, 19 nt, Homo sapiens
  misc_RNA (1)...(19): siRNA sense strand
gcugagaucauuacacagu

SEQ ID NO: 671800 - RNA, 19 nt, Homo sapiens
  misc_RNA (1)...(19): siRNA sense strand
ggagacagagaugagaauu

SEQ ID NO: 671801 - RNA, 19 nt, Homo sapiens
  misc_RNA (1)...(19): siRNA sense strand
ccaaagagaaugggaucaa

SEQ ID NO: 671802 - RNA, 19 nt, Homo sapiens
  misc_RNA (1)...(19): siRNA sense strand
caucaaauaccagccuaaa

SEQ ID NO: 671803 - RNA, 19 nt, Homo sapiens
  misc_RNA (1)...(19): siRNA sense strand
cagacaacaucaaauacca

SEQ ID NO: 671804 - RNA, 19 nt, Homo sapiens
  misc_RNA (1)...(19): siRNA sense strand
caaagagaaugggaucaac

SEQ ID NO: 671805 - RNA, 19 nt, Homo sapiens
  misc_RNA (1)...(19): siRNA sense strand
ucaaauaccaaagagaaug

SEQ ID NO: 671806 - RNA, 19 nt, Homo sapiens
  misc_RNA (1)...(19): siRNA sense strand
gcuaaaguugguucucuug

SEQ ID NO: 671807 - RNA, 19 nt, Homo sapiens
  misc_RNA (1)...(19): siRNA sense strand
gccuuuagcagcugaagaa

SEQ ID NO: 671808 - RNA, 19 nt, Homo sapiens
  misc_RNA (1)...(19): siRNA sense strand
ucagagagcaugcuaaagc

SEQ ID NO: 671809 - RNA, 19 nt, Homo sapiens
  misc_RNA (1)...(19): siRNA sense strand
cacauccaccugagauuaa

SEQ ID NO: 671810 - RNA, 19 nt, Homo sapiens
  misc_RNA (1)...(19): siRNA sense strand
gagaagaaggucgccauca

SEQ ID NO: 671811 - RNA, 19 nt, Homo sapiens
  misc_RNA (1)...(19): siRNA sense strand
ucaccugccucagaacaga

SEQ ID NO: 671812 - RNA, 19 nt, Homo sapiens
  misc_RNA (1)...(19): siRNA sense strand
cccaucaccugccucagaa

SEQ ID NO: 671813 - RNA, 19 nt, Homo sapiens
  misc_RNA (1)...(19): siRNA sense strand
ugaagaaacagcuaaucug

SEQ ID NO: 671814 - RNA, 19 nt, Homo sapiens
  misc_RNA (1)...(19): siRNA sense strand
caaggauaguucaaguagu

SEQ ID NO: 671815 - RNA, 19 nt, Homo sapiens
  misc_RNA (1)...(19): siRNA sense strand
ucucaacaguucuaucucu

SEQ ID NO: 671816 - RNA, 19 nt, Homo sapiens
  misc_RNA (1)...(19): siRNA sense strand
agacagagaugagaauucc

SEQ ID NO: 671817 - RNA, 19 nt, Homo sapiens
  misc_RNA (1)...(19): siRNA sense strand
ccucagcaccgcuaacaga

SEQ ID NO: 671818 - RNA, 19 nt, Homo sapiens
  misc_RNA (1)...(19): siRNA sense strand
gaacggaaagacgaagcaa

SEQ ID NO: 671819 - RNA, 19 nt, Homo sapiens
  misc_RNA (1)...(19): siRNA sense strand
caaauguggcucucugaag

SEQ ID NO: 671820 - RNA, 19 nt, Homo sapiens
  misc_RNA (1)...(19): siRNA sense strand
gagacagagaugagaauuc

SEQ ID NO: 671821 - RNA, 19 nt, Homo sapiens
  misc_RNA (1)...(19): siRNA sense strand
ggcuguagcaguccugaaa

SEQ ID NO: 671822 - RNA, 19 nt, Homo sapiens
  misc_RNA (1)...(19): siRNA sense strand
ccaaauguggcucucugaa

SEQ ID NO: 671823 - RNA, 19 nt, Homo sapiens
  misc_RNA (1)...(19): siRNA sense strand
ccgaagcgccaauggauuc

SEQ ID NO: 671824 - RNA, 19 nt, Homo sapiens
  misc_RNA (1)...(19): siRNA sense strand
aagaagcucaacauaaaga

SEQ ID NO: 671825 - RNA, 19 nt, Homo sapiens
  misc_RNA (1)...(19): siRNA sense strand
cuucagagagcaugcuaaa

SEQ ID NO: 671826 - RNA, 19 nt, Homo sapiens
  misc_RNA (1)...(19): siRNA sense strand
caaauaccaaagagaaugg

SEQ ID NO: 671827 - RNA, 19 nt, Homo sapiens
  misc_RNA (1)...(19): siRNA sense strand
ggugguaaugucaagauug

SEQ ID NO: 671828 - RNA, 19 nt, Homo sapiens
  misc_RNA (1)...(19): siRNA sense strand
guaaccaagagcccagaaa

SEQ ID NO: 671829 - RNA, 19 nt, Homo sapiens
  misc_RNA (1)...(19): siRNA sense strand
agagaaagaagcucaacau

SEQ ID NO: 671830 - RNA, 19 nt, Homo sapiens
  misc_RNA (1)...(19): siRNA sense strand
uaaacaggcaaaggacaaa

SEQ ID NO: 671831 - RNA, 19 nt, Homo sapiens
  misc_RNA (1)...(19): siRNA sense strand
ccacuuuggcugaggaugu

SEQ ID NO: 671832 - RNA, 19 nt, Homo sapiens
  misc_RNA (1)...(19): siRNA sense strand
gggaagagugguaccucaa

SEQ ID NO: 671833 - RNA, 19 nt, Homo sapiens
  misc_RNA (1)...(19): siRNA sense strand
cugcaaggauaguucaagu

SEQ ID NO: 671834 - RNA, 19 nt, Homo sapiens
  misc_RNA (1)...(19): siRNA sense strand
gauaaugcucaucauguac

SEQ ID NO: 671835 - RNA, 19 nt, Homo sapiens
  misc_RNA (1)...(19): siRNA sense strand
ccaucuuggugccgaguga

SEQ ID NO: 671836 - RNA, 19 nt, Homo sapiens
  misc_RNA (1)...(19): siRNA sense strand
ugaaaggugaacaagagaa

SEQ ID NO: 671837 - RNA, 19 nt, Homo sapiens
  misc_RNA (1)...(19): siRNA sense strand
acagggcaccuauucaaau

SEQ ID NO: 671838 - RNA, 19 nt, Homo sapiens
  misc_RNA (1)...(19): siRNA sense strand
uuaaacaggcaaaggacaa

SEQ ID NO: 671839 - RNA, 19 nt, Homo sapiens
  misc_RNA (1)...(19): siRNA sense strand
agaaaaggcccaagcuaaa

SEQ ID NO: 671840 - RNA, 19 nt, Homo sapiens
  misc_RNA (1)...(19): siRNA sense strand
ucacugcugcacucgcuaa

SEQ ID NO: 671841 - RNA, 19 nt, Homo sapiens
  misc_RNA (1)...(19): siRNA sense strand
cacagggcaccuauucaaa

SEQ ID NO: 671842 - RNA, 19 nt, Homo sapiens
  misc_RNA (1)...(19): siRNA sense strand
cgacgacucagcaaugucu

SEQ ID NO: 671843 - RNA, 19 nt, Homo sapiens
  misc_RNA (1)...(19): siRNA sense strand
gaggugguaaugucaagau

SEQ ID NO: 671844 - RNA, 19 nt, Homo sapiens
  misc_RNA (1)...(19): siRNA sense strand
guggcucucugaagaacau

SEQ ID NO: 671845 - RNA, 19 nt, Homo sapiens
  misc_RNA (1)...(19): siRNA sense strand
ggaagagugguaccucaac

SEQ ID NO: 671846 - RNA, 19 nt, Homo sapiens
  misc_RNA (1)...(19): siRNA sense strand
acagagaugagaauuccuu

SEQ ID NO: 671847 - RNA, 19 nt, Homo sapiens
  misc_RNA (1)...(19): siRNA sense strand
uauuuaaacaggcaaagga

SEQ ID NO: 671848 - RNA, 19 nt, Homo sapiens
  misc_RNA (1)...(19): siRNA sense strand
aagcuaaaguugguucucu

SEQ ID NO: 671849 - RNA, 19 nt, Homo sapiens
  misc_RNA (1)...(19): siRNA sense strand
gaagcaaaggcaccucacu

SEQ ID NO: 671850 - RNA, 19 nt, Homo sapiens
  misc_RNA (1)...(19): siRNA sense strand
aagaaaaggcccaagcuaa

SEQ ID NO: 671851 - RNA, 19 nt, Homo sapiens
  misc_RNA (1)...(19): siRNA sense strand
ccugaagaaugucaaaucc

SEQ ID NO: 671852 - RNA, 19 nt, Homo sapiens
  misc_RNA (1)...(19): siRNA sense strand
aaggugaacaagagaaaga

SEQ ID NO: 671853 - RNA, 19 nt, Homo sapiens
  misc_RNA (1)...(19): siRNA sense strand
gaccucagcaccgcuaaca

SEQ ID NO: 671854 - RNA, 19 nt, Homo sapiens
  misc_RNA (1)...(19): siRNA sense strand
cuaaaguugguucucuuga

SEQ ID NO: 671855 - RNA, 19 nt, Homo sapiens
  misc_RNA (1)...(19): siRNA sense strand
gaaaaggcccaagcuaaag

SEQ ID NO: 671856 - RNA, 19 nt, Homo sapiens
  misc_RNA (1)...(19): siRNA sense strand
ccuucucucucaacaguuc

SEQ ID NO: 671857 - RNA, 19 nt, Homo sapiens
  misc_RNA (1)...(19): siRNA sense strand
gaaagaagcucaacauaaa

SEQ ID NO: 671858 - RNA, 19 nt, Homo sapiens
  misc_RNA (1)...(19): siRNA sense strand
caaagucucugacggagua

SEQ ID NO: 671859 - RNA, 19 nt, Homo sapiens
  misc_RNA (1)...(19): siRNA sense strand
caacagacaacaucaaaua

SEQ ID NO: 671860 - RNA, 19 nt, Homo sapiens
  misc_RNA (1)...(19): siRNA sense strand
ggaggugucugcaaggaua

SEQ ID NO: 671861 - RNA, 19 nt, Homo sapiens
  misc_RNA (1)...(19): siRNA sense strand
gaagaaggucgccaucaua

SEQ ID NO: 671862 - RNA, 19 nt, Homo sapiens
  misc_RNA (1)...(19): siRNA sense strand
gaccucagcugacagagaa

SEQ ID NO: 671863 - RNA, 19 nt, Homo sapiens
  misc_RNA (1)...(19): siRNA sense strand
aaaguugguucucuugaua

SEQ ID NO: 671864 - RNA, 19 nt, Homo sapiens
  misc_RNA (1)...(19): siRNA sense strand
gagaaagaagcucaacaua

SEQ ID NO: 671865 - RNA, 19 nt, Homo sapiens
  misc_RNA (1)...(19): siRNA sense strand
agaaagaagcucaacauaa

SEQ ID NO: 671866 - RNA, 19 nt, Homo sapiens
  misc_RNA (1)...(19): siRNA sense strand
gggcugagaucauuacaca

SEQ ID NO: 671867 - RNA, 19 nt, Homo sapiens
  misc_RNA (1)...(19): siRNA sense strand
gcucgaaucuccucagcuu

SEQ ID NO: 671868 - RNA, 19 nt, Homo sapiens
  misc_RNA (1)...(19): siRNA sense strand
ugaagaaugucaaauccaa

SEQ ID NO: 671869 - RNA, 19 nt, Homo sapiens
  misc_RNA (1)...(19): siRNA sense strand
gaaaggugaacaagagaaa

SEQ ID NO: 671870 - RNA, 19 nt, Homo sapiens
  misc_RNA (1)...(19): siRNA sense strand
gaagagugguaccucaaca

SEQ ID NO: 671871 - RNA, 19 nt, Homo sapiens
  misc_RNA (1)...(19): siRNA sense strand
caccugagauuaaggauca

SEQ ID NO: 671872 - RNA, 19 nt, Homo sapiens
  misc_RNA (1)...(19): siRNA sense strand
aaauguggcucucugaaga

SEQ ID NO: 671873 - RNA, 19 nt, Homo sapiens
  misc_RNA (1)...(19): siRNA sense strand
gcaaggauaguucaaguag

SEQ ID NO: 671874 - RNA, 19 nt, Homo sapiens
  misc_RNA (1)...(19): siRNA sense strand
gcaucaaccugcucgaauc

SEQ ID NO: 671875 - RNA, 19 nt, Homo sapiens
  misc_RNA (1)...(19): siRNA sense strand
cccaagaccuuccuccauu

SEQ ID NO: 671876 - RNA, 19 nt, Homo sapiens
  misc_RNA (1)...(19): siRNA sense strand
ugccagaccugaagaaugu

SEQ ID NO: 671877 - RNA, 19 nt, Homo sapiens
  misc_RNA (1)...(19): siRNA sense strand
uaaaguugguucucuugau

SEQ ID NO: 671878 - RNA, 19 nt, Homo sapiens
  misc_RNA (1)...(19): siRNA sense strand
ucacauccaccugagauua

SEQ ID NO: 671879 - RNA, 19 nt, Homo sapiens
  misc_RNA (1)...(19): siRNA sense strand
ggaugaagagggugccuuu

SEQ ID NO: 671880 - RNA, 19 nt, Homo sapiens
  misc_RNA (1)...(19): siRNA sense strand
ugaagagggugccuuugga

SEQ ID NO: 671881 - RNA, 19 nt, Homo sapiens
  misc_RNA (1)...(19): siRNA sense strand
caacaguucuaucucuucu

SEQ ID NO: 671882 - RNA, 19 nt, Homo sapiens
  misc_RNA (1)...(19): siRNA sense strand
gaagaaugucaaauccaaa

SEQ ID NO: 671883 - RNA, 19 nt, Homo sapiens
  misc_RNA (1)...(19): siRNA sense strand
ccugaaaggugaacaagag

SEQ ID NO: 671884 - RNA, 19 nt, Homo sapiens
  misc_RNA (1)...(19): siRNA sense strand
cuccucagcuugccacuuu

SEQ ID NO: 671885 - RNA, 19 nt, Homo sapiens
  misc_RNA (1)...(19): siRNA sense strand
caaaggacaaagucucuga

SEQ ID NO: 671886 - RNA, 19 nt, Homo sapiens
  misc_RNA (1)...(19): siRNA sense strand
uuuagcagcugaagaaaca

SEQ ID NO: 671887 - RNA, 19 nt, Homo sapiens
  misc_RNA (1)...(19): siRNA sense strand
agaagaaggucgccaucau

SEQ ID NO: 671888 - RNA, 19 nt, Homo sapiens
  misc_RNA (1)...(19): siRNA sense strand
ccaagaccuuccuccauuc

SEQ ID NO: 671889 - RNA, 19 nt, Homo sapiens
  misc_RNA (1)...(19): siRNA sense strand
ggucacagggcaccuauuc

SEQ ID NO: 671890 - RNA, 19 nt, Homo sapiens
  misc_RNA (1)...(19): siRNA sense strand
ucaaauaccagccuaaagg

SEQ ID NO: 671891 - RNA, 19 nt, Homo sapiens
  misc_RNA (1)...(19): siRNA sense strand
ucacagggcaccuauucaa

SEQ ID NO: 671892 - RNA, 19 nt, Homo sapiens
  misc_RNA (1)...(19): siRNA sense strand
agaggcaucugcacacuca

SEQ ID NO: 671893 - RNA, 19 nt, Homo sapiens
  misc_RNA (1)...(19): siRNA sense strand
gaaggucgccaucauacgu

SEQ ID NO: 671894 - RNA, 19 nt, Homo sapiens
  misc_RNA (1)...(19): siRNA sense strand
aaggauaguucaaguaguc

SEQ ID NO: 671895 - RNA, 19 nt, Homo sapiens
  misc_RNA (1)...(19): siRNA sense strand
gaggaggugucugcaagga

SEQ ID NO: 671896 - RNA, 19 nt, Homo sapiens
  misc_RNA (1)...(19): siRNA sense strand
acaguucuaucucuucuuc

SEQ ID NO: 671897 - RNA, 19 nt, Homo sapiens
  misc_RNA (1)...(19): siRNA sense strand
aaauagaccuaagccaugu

SEQ ID NO: 671898 - RNA, 19 nt, Homo sapiens
  misc_RNA (1)...(19): siRNA sense strand
gaucaacagacaacaucaa

SEQ ID NO: 671899 - RNA, 19 nt, Homo sapiens
  misc_RNA (1)...(19): siRNA sense strand
gcugagaucauuacacagu

SEQ ID NO: 671900 - RNA, 19 nt, Homo sapiens
  misc_RNA (1)...(19): siRNA sense strand
ggagacagagaugagaauu

SEQ ID NO: 671901 - RNA, 19 nt, Homo sapiens
  misc_RNA (1)...(19): siRNA sense strand
ccaaagagaaugggaucaa

SEQ ID NO: 671902 - RNA, 19 nt, Homo sapiens
  misc_RNA (1)...(19): siRNA sense strand
caucaaauaccagccuaaa

SEQ ID NO: 671903 - RNA, 19 nt, Homo sapiens
  misc_RNA (1)...(19): siRNA sense strand
cagacaacaucaaauacca

SEQ ID NO: 671904 - RNA, 19 nt, Homo sapiens
  misc_RNA (1)...(19): siRNA sense strand
caaagagaaugggaucaac

SEQ ID NO: 671905 - RNA, 19 nt, Homo sapiens
  misc_RNA (1)...(19): siRNA sense strand
ucaaauaccaaagagaaug

SEQ ID NO: 671906 - RNA, 19 nt, Homo sapiens
  misc_RNA (1)...(19): siRNA sense strand
gcuaaaguugguucucuug

SEQ ID NO: 671907 - RNA, 19 nt, Homo sapiens
  misc_RNA (1)...(19): siRNA sense strand
gccuuuagcagcugaagaa

SEQ ID NO: 671908 - RNA, 19 nt, Homo sapiens
  misc_RNA (1)...(19): siRNA sense strand
ucagagagcaugcuaaagc

SEQ ID NO: 671909 - RNA, 19 nt, Homo sapiens
  misc_RNA (1)...(19): siRNA sense strand
cacauccaccugagauuaa

SEQ ID NO: 671910 - RNA, 19 nt, Homo sapiens
  misc_RNA (1)...(19): siRNA sense strand
gagaagaaggucgccauca

SEQ ID NO: 671911 - RNA, 19 nt, Homo sapiens
  misc_RNA (1)...(19): siRNA sense strand
ucaccugccucagaacaga

SEQ ID NO: 671912 - RNA, 19 nt, Homo sapiens
  misc_RNA (1)...(19): siRNA sense strand
cccaucaccugccucagaa

SEQ ID NO: 671913 - RNA, 19 nt, Homo sapiens
  misc_RNA (1)...(19): siRNA sense strand
ugaagaaacagcuaaucug

SEQ ID NO: 671914 - RNA, 19 nt, Homo sapiens
  misc_RNA (1)...(19): siRNA sense strand
caaggauaguucaaguagu

SEQ ID NO: 671915 - RNA, 19 nt, Homo sapiens
  misc_RNA (1)...(19): siRNA sense strand
ucucaacaguucuaucucu

SEQ ID NO: 671916 - RNA, 19 nt, Homo sapiens
  misc_RNA (1)...(19): siRNA sense strand
agacagagaugagaauucc

SEQ ID NO: 671917 - RNA, 19 nt, Homo sapiens
  misc_RNA (1)...(19): siRNA sense strand
ccucagcaccgcuaacaga

SEQ ID NO: 671918 - RNA, 19 nt, Homo sapiens
  misc_RNA (1)...(19): siRNA sense strand
gaacggaaagacgaagcaa

SEQ ID NO: 671919 - RNA, 19 nt, Homo sapiens
  misc_RNA (1)...(19): siRNA sense strand
caaauguggcucucugaag

SEQ ID NO: 671920 - RNA, 19 nt, Homo sapiens
  misc_RNA (1)...(19): siRNA sense strand
gagacagagaugagaauuc

SEQ ID NO: 671921 - RNA, 19 nt, Homo sapiens
  misc_RNA (1)...(19): siRNA sense strand
ggcuguagcaguccugaaa

SEQ ID NO: 671922 - RNA, 19 nt, Homo sapiens
  misc_RNA (1)...(19): siRNA sense strand
ccaaauguggcucucugaa

SEQ ID NO: 671923 - RNA, 19 nt, Homo sapiens
  misc_RNA (1)...(19): siRNA sense strand
ccgaagcgccaauggauuc

SEQ ID NO: 671924 - RNA, 19 nt, Homo sapiens
  misc_RNA (1)...(19): siRNA sense strand
aagaagcucaacauaaaga

SEQ ID NO: 671925 - RNA, 19 nt, Homo sapiens
  misc_RNA (1)...(19): siRNA sense strand
cuucagagagcaugcuaaa

SEQ ID NO: 671926 - RNA, 19 nt, Homo sapiens
  misc_RNA (1)...(19): siRNA sense strand
caaauaccaaagagaaugg

SEQ ID NO: 671927 - RNA, 19 nt, Homo sapiens
  misc_RNA (1)...(19): siRNA sense strand
ggugguaaugucaagauug

SEQ ID NO: 671928 - RNA, 19 nt, Homo sapiens
  misc_RNA (1)...(19): siRNA sense strand
guaaccaagagcccagaaa

SEQ ID NO: 671929 - RNA, 19 nt, Homo sapiens
  misc_RNA (1)...(19): siRNA sense strand
agagaaagaagcucaacau

SEQ ID NO: 671930 - RNA, 19 nt, Homo sapiens
  misc_RNA (1)...(19): siRNA sense strand
uaaacaggcaaaggacaaa

SEQ ID NO: 671931 - RNA, 19 nt, Homo sapiens
  misc_RNA (1)...(19): siRNA sense strand
ccacuuuggcugaggaugu

SEQ ID NO: 671932 - RNA, 19 nt, Homo sapiens
  misc_RNA (1)...(19): siRNA sense strand
gggaagagugguaccucaa

SEQ ID NO: 671933 - RNA, 19 nt, Homo sapiens
  misc_RNA (1)...(19): siRNA sense strand
cugcaaggauaguucaagu

SEQ ID NO: 671934 - RNA, 19 nt, Homo sapiens
  misc_RNA (1)...(19): siRNA sense strand
gauaaugcucaucauguac

SEQ ID NO: 671935 - RNA, 19 nt, Homo sapiens
  misc_RNA (1)...(19): siRNA sense strand
ccaucuuggugccgaguga

SEQ ID NO: 671936 - RNA, 19 nt, Homo sapiens
  misc_RNA (1)...(19): siRNA sense strand
ugaaaggugaacaagagaa

SEQ ID NO: 671937 - RNA, 19 nt, Homo sapiens
  misc_RNA (1)...(19): siRNA sense strand
acagggcaccuauucaaau

SEQ ID NO: 671938 - RNA, 19 nt, Homo sapiens
  misc_RNA (1)...(19): siRNA sense strand
uuaaacaggcaaaggacaa

SEQ ID NO: 671939 - RNA, 19 nt, Homo sapiens
  misc_RNA (1)...(19): siRNA sense strand
agaaaaggcccaagcuaaa

SEQ ID NO: 671940 - RNA, 19 nt, Homo sapiens
  misc_RNA (1)...(19): siRNA sense strand
ucacugcugcacucgcuaa

SEQ ID NO: 671941 - RNA, 19 nt, Homo sapiens
  misc_RNA (1)...(19): siRNA sense strand
cacagggcaccuauucaaa

SEQ ID NO: 671942 - RNA, 19 nt, Homo sapiens
  misc_RNA (1)...(19): siRNA sense strand
cgacgacucagcaaugucu

SEQ ID NO: 671943 - RNA, 19 nt, Homo sapiens
  misc_RNA (1)...(19): siRNA sense strand
gaggugguaaugucaagau

SEQ ID NO: 671944 - RNA, 19 nt, Homo sapiens
  misc_RNA (1)...(19): siRNA sense strand
guggcucucugaagaacau

SEQ ID NO: 671945 - RNA, 19 nt, Homo sapiens
  misc_RNA (1)...(19): siRNA sense strand
ggaagagugguaccucaac

SEQ ID NO: 671946 - RNA, 19 nt, Homo sapiens
  misc_RNA (1)...(19): siRNA sense strand
acagagaugagaauuccuu

SEQ ID NO: 671947 - RNA, 19 nt, Homo sapiens
  misc_RNA (1)...(19): siRNA sense strand
uauuuaaacaggcaaagga

SEQ ID NO: 671948 - RNA, 19 nt, Homo sapiens
  misc_RNA (1)...(19): siRNA sense strand
aagcuaaaguugguucucu

SEQ ID NO: 671949 - RNA, 19 nt, Homo sapiens
  misc_RNA (1)...(19): siRNA sense strand
gaagcaaaggcaccucacu

SEQ ID NO: 671950 - RNA, 19 nt, Homo sapiens
  misc_RNA (1)...(19): siRNA sense strand
aagaaaaggcccaagcuaa

SEQ ID NO: 671951 - RNA, 19 nt, Homo sapiens
  misc_RNA (1)...(19): siRNA sense strand
ccugaagaaugucaaaucc

SEQ ID NO: 671952 - RNA, 19 nt, Homo sapiens
  misc_RNA (1)...(19): siRNA sense strand
aaggugaacaagagaaaga

SEQ ID NO: 671953 - RNA, 19 nt, Homo sapiens
  misc_RNA (1)...(19): siRNA sense strand
gaccucagcaccgcuaaca

SEQ ID NO: 671954 - RNA, 19 nt, Homo sapiens
  misc_RNA (1)...(19): siRNA sense strand
cuaaaguugguucucuuga

SEQ ID NO: 671955 - RNA, 19 nt, Homo sapiens
  misc_RNA (1)...(19): siRNA sense strand
gaaaaggcccaagcuaaag

SEQ ID NO: 671956 - RNA, 19 nt, Homo sapiens
  misc_RNA (1)...(19): siRNA sense strand
ccuucucucucaacaguuc

SEQ ID NO: 671957 - RNA, 19 nt, Homo sapiens
  misc_RNA (1)...(19): siRNA sense strand
gaaagaagcucaacauaaa

SEQ ID NO: 671958 - RNA, 19 nt, Homo sapiens
  misc_RNA (1)...(19): siRNA sense strand
caaagucucugacggagua

SEQ ID NO: 671959 - RNA, 19 nt, Homo sapiens
  misc_RNA (1)...(19): siRNA sense strand
caacagacaacaucaaaua

SEQ ID NO: 671960 - RNA, 19 nt, Homo sapiens
  misc_RNA (1)...(19): siRNA sense strand
ggaggugucugcaaggaua

SEQ ID NO: 671961 - RNA, 19 nt, Homo sapiens
  misc_RNA (1)...(19): siRNA sense strand
gaagaaggucgccaucaua

SEQ ID NO: 671962 - RNA, 19 nt, Homo sapiens
  misc_RNA (1)...(19): siRNA sense strand
gaccucagcugacagagaa

SEQ ID NO: 671963 - RNA, 19 nt, Homo sapiens
  misc_RNA (1)...(19): siRNA sense strand
aaaguugguucucuugaua

SEQ ID NO: 671964 - RNA, 19 nt, Homo sapiens
  misc_RNA (1)...(19): siRNA sense strand
gagaaagaagcucaacaua

SEQ ID NO: 671965 - RNA, 19 nt, Homo sapiens
  misc_RNA (1)...(19): siRNA sense strand
agaaagaagcucaacauaa

SEQ ID NO: 671966 - RNA, 19 nt, Homo sapiens
  misc_RNA (1)...(19): siRNA sense strand
gggcugagaucauuacaca

SEQ ID NO: 671967 - RNA, 19 nt, Homo sapiens
  misc_RNA (1)...(19): siRNA sense strand
gcucgaaucuccucagcuu

SEQ ID NO: 671968 - RNA, 19 nt, Homo sapiens
  misc_RNA (1)...(19): siRNA sense strand
ugaagaaugucaaauccaa

SEQ ID NO: 671969 - RNA, 19 nt, Homo sapiens
  misc_RNA (1)...(19): siRNA sense strand
gaaaggugaacaagagaaa

SEQ ID NO: 671970 - RNA, 19 nt, Homo sapiens
  misc_RNA (1)...(19): siRNA sense strand
gaagagugguaccucaaca

SEQ ID NO: 671971 - RNA, 19 nt, Homo sapiens
  misc_RNA (1)...(19): siRNA sense strand
caccugagauuaaggauca

SEQ ID NO: 671972 - RNA, 19 nt, Homo sapiens
  misc_RNA (1)...(19): siRNA sense strand
aaauguggcucucugaaga

SEQ ID NO: 671973 - RNA, 19 nt, Homo sapiens
  misc_RNA (1)...(19): siRNA sense strand
gcaaggauaguucaaguag

SEQ ID NO: 671974 - RNA, 19 nt, Homo sapiens
  misc_RNA (1)...(19): siRNA sense strand
gcaucaaccugcucgaauc

SEQ ID NO: 671975 - RNA, 19 nt, Homo sapiens
  misc_RNA (1)...(19): siRNA sense strand
cccaagaccuuccuccauu

SEQ ID NO: 671976 - RNA, 19 nt, Homo sapiens
  misc_RNA (1)...(19): siRNA sense strand
ugccagaccugaagaaugu

SEQ ID NO: 671977 - RNA, 19 nt, Homo sapiens
  misc_RNA (1)...(19): siRNA sense strand
uaaaguugguucucuugau

SEQ ID NO: 671978 - RNA, 19 nt, Homo sapiens
  misc_RNA (1)...(19): siRNA sense strand
ucacauccaccugagauua

SEQ ID NO: 671979 - RNA, 19 nt, Homo sapiens
  misc_RNA (1)...(19): siRNA sense strand
ggaugaagagggugccuuu

SEQ ID NO: 671980 - RNA, 19 nt, Homo sapiens
  misc_RNA (1)...(19): siRNA sense strand
ugaagagggugccuuugga

SEQ ID NO: 671981 - RNA, 19 nt, Homo sapiens
  misc_RNA (1)...(19): siRNA sense strand
caacaguucuaucucuucu

SEQ ID NO: 671982 - RNA, 19 nt, Homo sapiens
  misc_RNA (1)...(19): siRNA sense strand
gaagaaugucaaauccaaa

SEQ ID NO: 671983 - RNA, 19 nt, Homo sapiens
  misc_RNA (1)...(19): siRNA sense strand
ccugaaaggugaacaagag

SEQ ID NO: 671984 - RNA, 19 nt, Homo sapiens
  misc_RNA (1)...(19): siRNA sense strand
cuccucagcuugccacuuu

SEQ ID NO: 671985 - RNA, 19 nt, Homo sapiens
  misc_RNA (1)...(19): siRNA sense strand
caaaggacaaagucucuga

SEQ ID NO: 671986 - RNA, 19 nt, Homo sapiens
  misc_RNA (1)...(19): siRNA sense strand
uuuagcagcugaagaaaca

SEQ ID NO: 671987 - RNA, 19 nt, Homo sapiens
  misc_RNA (1)...(19): siRNA sense strand
agaagaaggucgccaucau

SEQ ID NO: 671988 - RNA, 19 nt, Homo sapiens
  misc_RNA (1)...(19): siRNA sense strand
ccaagaccuuccuccauuc

SEQ ID NO: 671989 - RNA, 19 nt, Homo sapiens
  misc_RNA (1)...(19): siRNA sense strand
ggucacagggcaccuauuc

SEQ ID NO: 671990 - RNA, 19 nt, Homo sapiens
  misc_RNA (1)...(19): siRNA sense strand
ucaaauaccagccuaaagg

SEQ ID NO: 671991 - RNA, 19 nt, Homo sapiens
  misc_RNA (1)...(19): siRNA sense strand
ucacagggcaccuauucaa

SEQ ID NO: 671992 - RNA, 19 nt, Homo sapiens
  misc_RNA (1)...(19): siRNA sense strand
agaggcaucugcacacuca

SEQ ID NO: 671993 - RNA, 19 nt, Homo sapiens
  misc_RNA (1)...(19): siRNA sense strand
gaaggucgccaucauacgu

SEQ ID NO: 671994 - RNA, 19 nt, Homo sapiens
  misc_RNA (1)...(19): siRNA sense strand
aaggauaguucaaguaguc

SEQ ID NO: 671995 - RNA, 19 nt, Homo sapiens
  misc_RNA (1)...(19): siRNA sense strand
gaggaggugucugcaagga

SEQ ID NO: 671996 - RNA, 19 nt, Homo sapiens
  misc_RNA (1)...(19): siRNA sense strand
acaguucuaucucuucuuc

SEQ ID NO: 671997 - RNA, 19 nt, Homo sapiens
  misc_RNA (1)...(19): siRNA sense strand
aaauagaccuaagccaugu

SEQ ID NO: 671998 - RNA, 19 nt, Homo sapiens
  misc_RNA (1)...(19): siRNA sense strand
gaucaacagacaacaucaa

SEQ ID NO: 671999 - RNA, 19 nt, Homo sapiens
  misc_RNA (1)...(19): siRNA sense strand
gcugagaucauuacacagu

SEQ ID NO: 672000 - RNA, 19 nt, Homo sapiens
  misc_RNA (1)...(19): siRNA sense strand
ggagacagagaugagaauu

SEQ ID NO: 672001 - RNA, 19 nt, Homo sapiens
  misc_RNA (1)...(19): siRNA sense strand
ccaaagagaaugggaucaa

SEQ ID NO: 672002 - RNA, 19 nt, Homo sapiens
  misc_RNA (1)...(19): siRNA sense strand
caucaaauaccagccuaaa

SEQ ID NO: 672003 - RNA, 19 nt, Homo sapiens
  misc_RNA (1)...(19): siRNA sense strand
cagacaacaucaaauacca

SEQ ID NO: 672004 - RNA, 19 nt, Homo sapiens
  misc_RNA (1)...(19): siRNA sense strand
caaagagaaugggaucaac

SEQ ID NO: 672005 - RNA, 19 nt, Homo sapiens
  misc_RNA (1)...(19): siRNA sense strand
ucaaauaccaaagagaaug

SEQ ID NO: 672006 - RNA, 19 nt, Homo sapiens
  misc_RNA (1)...(19): siRNA sense strand
gcuaaaguugguucucuug

SEQ ID NO: 672007 - RNA, 19 nt, Homo sapiens
  misc_RNA (1)...(19): siRNA sense strand
gccuuuagcagcugaagaa

SEQ ID NO: 672008 - RNA, 19 nt, Homo sapiens
  misc_RNA (1)...(19): siRNA sense strand
ucagagagcaugcuaaagc

SEQ ID NO: 672009 - RNA, 19 nt, Homo sapiens
  misc_RNA (1)...(19): siRNA sense strand
cacauccaccugagauuaa

SEQ ID NO: 672010 - RNA, 19 nt, Homo sapiens
  misc_RNA (1)...(19): siRNA sense strand
gagaagaaggucgccauca

SEQ ID NO: 672011 - RNA, 19 nt, Homo sapiens
  misc_RNA (1)...(19): siRNA sense strand
ucaccugccucagaacaga

SEQ ID NO: 672012 - RNA, 19 nt, Homo sapiens
  misc_RNA (1)...(19): siRNA sense strand
cccaucaccugccucagaa

SEQ ID NO: 672013 - RNA, 19 nt, Homo sapiens
  misc_RNA (1)...(19): siRNA sense strand
ugaagaaacagcuaaucug

SEQ ID NO: 672014 - RNA, 19 nt, Homo sapiens
  misc_RNA (1)...(19): siRNA sense strand
caaggauaguucaaguagu

SEQ ID NO: 672015 - RNA, 19 nt, Homo sapiens
  misc_RNA (1)...(19): siRNA sense strand
ucucaacaguucuaucucu

SEQ ID NO: 672016 - RNA, 19 nt, Homo sapiens
  misc_RNA (1)...(19): siRNA sense strand
agacagagaugagaauucc

SEQ ID NO: 672017 - RNA, 19 nt, Homo sapiens
  misc_RNA (1)...(19): siRNA sense strand
ccucagcaccgcuaacaga

SEQ ID NO: 672018 - RNA, 19 nt, Homo sapiens
  misc_RNA (1)...(19): siRNA sense strand
gaacggaaagacgaagcaa

SEQ ID NO: 672019 - RNA, 19 nt, Homo sapiens
  misc_RNA (1)...(19): siRNA sense strand
caaauguggcucucugaag

SEQ ID NO: 672020 - RNA, 19 nt, Homo sapiens
  misc_RNA (1)...(19): siRNA sense strand
gagacagagaugagaauuc

SEQ ID NO: 672021 - RNA, 19 nt, Homo sapiens
  misc_RNA (1)...(19): siRNA sense strand
ggcuguagcaguccugaaa

SEQ ID NO: 672022 - RNA, 19 nt, Homo sapiens
  misc_RNA (1)...(19): siRNA sense strand
ccaaauguggcucucugaa

SEQ ID NO: 672023 - RNA, 19 nt, Homo sapiens
  misc_RNA (1)...(19): siRNA sense strand
ccgaagcgccaauggauuc

SEQ ID NO: 672024 - RNA, 19 nt, Homo sapiens
  misc_RNA (1)...(19): siRNA sense strand
aagaagcucaacauaaaga

SEQ ID NO: 672025 - RNA, 19 nt, Homo sapiens
  misc_RNA (1)...(19): siRNA sense strand
cuucagagagcaugcuaaa

SEQ ID NO: 672026 - RNA, 19 nt, Homo sapiens
  misc_RNA (1)...(19): siRNA sense strand
caaauaccaaagagaaugg

SEQ ID NO: 672027 - RNA, 19 nt, Homo sapiens
  misc_RNA (1)...(19): siRNA sense strand
ggugguaaugucaagauug

SEQ ID NO: 672028 - RNA, 19 nt, Homo sapiens
  misc_RNA (1)...(19): siRNA sense strand
guaaccaagagcccagaaa

SEQ ID NO: 672029 - RNA, 19 nt, Homo sapiens
  misc_RNA (1)...(19): siRNA sense strand
agagaaagaagcucaacau

SEQ ID NO: 672030 - RNA, 19 nt, Homo sapiens
  misc_RNA (1)...(19): siRNA sense strand
uaaacaggcaaaggacaaa

SEQ ID NO: 672031 - RNA, 19 nt, Homo sapiens
  misc_RNA (1)...(19): siRNA sense strand
ccacuuuggcugaggaugu

SEQ ID NO: 672032 - RNA, 19 nt, Homo sapiens
  misc_RNA (1)...(19): siRNA sense strand
gggaagagugguaccucaa

SEQ ID NO: 672033 - RNA, 19 nt, Homo sapiens
  misc_RNA (1)...(19): siRNA sense strand
cugcaaggauaguucaagu

SEQ ID NO: 672034 - RNA, 19 nt, Homo sapiens
  misc_RNA (1)...(19): siRNA sense strand
gauaaugcucaucauguac

SEQ ID NO: 672035 - RNA, 19 nt, Homo sapiens
  misc_RNA (1)...(19): siRNA sense strand
ccaucuuggugccgaguga

SEQ ID NO: 672036 - RNA, 19 nt, Homo sapiens
  misc_RNA (1)...(19): siRNA sense strand
ugaaaggugaacaagagaa

SEQ ID NO: 672037 - RNA, 19 nt, Homo sapiens
  misc_RNA (1)...(19): siRNA sense strand
acagggcaccuauucaaau

SEQ ID NO: 672038 - RNA, 19 nt, Homo sapiens
  misc_RNA (1)...(19): siRNA sense strand
uuaaacaggcaaaggacaa

SEQ ID NO: 672039 - RNA, 19 nt, Homo sapiens
  misc_RNA (1)...(19): siRNA sense strand
agaaaaggcccaagcuaaa

SEQ ID NO: 672040 - RNA, 19 nt, Homo sapiens
  misc_RNA (1)...(19): siRNA sense strand
ucacugcugcacucgcuaa

SEQ ID NO: 672041 - RNA, 19 nt, Homo sapiens
  misc_RNA (1)...(19): siRNA sense strand
cacagggcaccuauucaaa

SEQ ID NO: 672042 - RNA, 19 nt, Homo sapiens
  misc_RNA (1)...(19): siRNA sense strand
cgacgacucagcaaugucu

SEQ ID NO: 672043 - RNA, 19 nt, Homo sapiens
  misc_RNA (1)...(19): siRNA sense strand
gaggugguaaugucaagau

SEQ ID NO: 672044 - RNA, 19 nt, Homo sapiens
  misc_RNA (1)...(19): siRNA sense strand
guggcucucugaagaacau

SEQ ID NO: 672045 - RNA, 19 nt, Homo sapiens
  misc_RNA (1)...(19): siRNA sense strand
ggaagagugguaccucaac

SEQ ID NO: 672046 - RNA, 19 nt, Homo sapiens
  misc_RNA (1)...(19): siRNA sense strand
acagagaugagaauuccuu

SEQ ID NO: 672047 - RNA, 19 nt, Homo sapiens
  misc_RNA (1)...(19): siRNA sense strand
uauuuaaacaggcaaagga

SEQ ID NO: 672048 - RNA, 19 nt, Homo sapiens
  misc_RNA (1)...(19): siRNA sense strand
aagcuaaaguugguucucu

SEQ ID NO: 672049 - RNA, 19 nt, Homo sapiens
  misc_RNA (1)...(19): siRNA sense strand
gaagcaaaggcaccucacu

SEQ ID NO: 672050 - RNA, 19 nt, Homo sapiens
  misc_RNA (1)...(19): siRNA sense strand
aagaaaaggcccaagcuaa

SEQ ID NO: 672051 - RNA, 19 nt, Homo sapiens
  misc_RNA (1)...(19): siRNA sense strand
ccugaagaaugucaaaucc

SEQ ID NO: 672052 - RNA, 19 nt, Homo sapiens
  misc_RNA (1)...(19): siRNA sense strand
aaggugaacaagagaaaga

SEQ ID NO: 672053 - RNA, 19 nt, Homo sapiens
  misc_RNA (1)...(19): siRNA sense strand
gaccucagcaccgcuaaca

SEQ ID NO: 672054 - RNA, 19 nt, Homo sapiens
  misc_RNA (1)...(19): siRNA sense strand
cuaaaguugguucucuuga

SEQ ID NO: 672055 - RNA, 19 nt, Homo sapiens
  misc_RNA (1)...(19): siRNA sense strand
gaaaaggcccaagcuaaag

SEQ ID NO: 672056 - RNA, 19 nt, Homo sapiens
  misc_RNA (1)...(19): siRNA sense strand
ccuucucucucaacaguuc

SEQ ID NO: 672057 - RNA, 19 nt, Homo sapiens
  misc_RNA (1)...(19): siRNA sense strand
gaaagaagcucaacauaaa

SEQ ID NO: 672058 - RNA, 19 nt, Homo sapiens
  misc_RNA (1)...(19): siRNA sense strand
caaagucucugacggagua

SEQ ID NO: 672059 - RNA, 19 nt, Homo sapiens
  misc_RNA (1)...(19): siRNA sense strand
caacagacaacaucaaaua

SEQ ID NO: 672060 - RNA, 19 nt, Homo sapiens
  misc_RNA (1)...(19): siRNA sense strand
ggaggugucugcaaggaua

SEQ ID NO: 672061 - RNA, 19 nt, Homo sapiens
  misc_RNA (1)...(19): siRNA sense strand
gaagaaggucgccaucaua

SEQ ID NO: 672062 - RNA, 19 nt, Homo sapiens
  misc_RNA (1)...(19): siRNA sense strand
gaccucagcugacagagaa

SEQ ID NO: 672063 - RNA, 19 nt, Homo sapiens
  misc_RNA (1)...(19): siRNA sense strand
aaaguugguucucuugaua

SEQ ID NO: 672064 - RNA, 19 nt, Homo sapiens
  misc_RNA (1)...(19): siRNA sense strand
gagaaagaagcucaacaua

SEQ ID NO: 672065 - RNA, 19 nt, Homo sapiens
  misc_RNA (1)...(19): siRNA sense strand
agaaagaagcucaacauaa

SEQ ID NO: 672066 - RNA, 19 nt, Homo sapiens
  misc_RNA (1)...(19): siRNA sense strand
gggcugagaucauuacaca

SEQ ID NO: 672067 - RNA, 19 nt, Homo sapiens
  misc_RNA (1)...(19): siRNA sense strand
gcucgaaucuccucagcuu

SEQ ID NO: 672068 - RNA, 19 nt, Homo sapiens
  misc_RNA (1)...(19): siRNA sense strand
ugaagaaugucaaauccaa

SEQ ID NO: 672069 - RNA, 19 nt, Homo sapiens
  misc_RNA (1)...(19): siRNA sense strand
gaaaggugaacaagagaaa

SEQ ID NO: 672070 - RNA, 19 nt, Homo sapiens
  misc_RNA (1)...(19): siRNA sense strand
gaagagugguaccucaaca

SEQ ID NO: 672071 - RNA, 19 nt, Homo sapiens
  misc_RNA (1)...(19): siRNA sense strand
caccugagauuaaggauca

SEQ ID NO: 672072 - RNA, 19 nt, Homo sapiens
  misc_RNA (1)...(19): siRNA sense strand
aaauguggcucucugaaga

SEQ ID NO: 672073 - RNA, 19 nt, Homo sapiens
  misc_RNA (1)...(19): siRNA sense strand
gcaaggauaguucaaguag

SEQ ID NO: 672074 - RNA, 19 nt, Homo sapiens
  misc_RNA (1)...(19): siRNA sense strand
gcaucaaccugcucgaauc

SEQ ID NO: 672075 - RNA, 19 nt, Homo sapiens
  misc_RNA (1)...(19): siRNA sense strand
cccaagaccuuccuccauu

SEQ ID NO: 672076 - RNA, 19 nt, Homo sapiens
  misc_RNA (1)...(19): siRNA sense strand
ugccagaccugaagaaugu

SEQ ID NO: 672077 - RNA, 19 nt, Homo sapiens
  misc_RNA (1)...(19): siRNA sense strand
uaaaguugguucucuugau

SEQ ID NO: 672078 - RNA, 19 nt, Homo sapiens
  misc_RNA (1)...(19): siRNA sense strand
ucacauccaccugagauua

SEQ ID NO: 672079 - RNA, 19 nt, Homo sapiens
  misc_RNA (1)...(19): siRNA sense strand
ggaugaagagggugccuuu

SEQ ID NO: 672080 - RNA, 19 nt, Homo sapiens
  misc_RNA (1)...(19): siRNA sense strand
ugaagagggugccuuugga

SEQ ID NO: 672081 - RNA, 19 nt, Homo sapiens
  misc_RNA (1)...(19): siRNA sense strand
caacaguucuaucucuucu

SEQ ID NO: 672082 - RNA, 19 nt, Homo sapiens
  misc_RNA (1)...(19): siRNA sense strand
gaagaaugucaaauccaaa

SEQ ID NO: 672083 - RNA, 19 nt, Homo sapiens
  misc_RNA (1)...(19): siRNA sense strand
ccugaaaggugaacaagag

SEQ ID NO: 672084 - RNA, 19 nt, Homo sapiens
  misc_RNA (1)...(19): siRNA sense strand
cuccucagcuugccacuuu

SEQ ID NO: 672085 - RNA, 19 nt, Homo sapiens
  misc_RNA (1)...(19): siRNA sense strand
caaaggacaaagucucuga

SEQ ID NO: 672086 - RNA, 19 nt, Homo sapiens
  misc_RNA (1)...(19): siRNA sense strand
uuuagcagcugaagaaaca

SEQ ID NO: 672087 - RNA, 19 nt, Homo sapiens
  misc_RNA (1)...(19): siRNA sense strand
agaagaaggucgccaucau

SEQ ID NO: 672088 - RNA, 19 nt, Homo sapiens
  misc_RNA (1)...(19): siRNA sense strand
ccaagaccuuccuccauuc

SEQ ID NO: 672089 - RNA, 19 nt, Homo sapiens
  misc_RNA (1)...(19): siRNA sense strand
ggucacagggcaccuauuc

SEQ ID NO: 672090 - RNA, 19 nt, Homo sapiens
  misc_RNA (1)...(19): siRNA sense strand
ucaaauaccagccuaaagg

SEQ ID NO: 672091 - RNA, 19 nt, Homo sapiens
  misc_RNA (1)...(19): siRNA sense strand
ucacagggcaccuauucaa

SEQ ID NO: 672092 - RNA, 19 nt, Homo sapiens
  misc_RNA (1)...(19): siRNA sense strand
agaggcaucugcacacuca

SEQ ID NO: 672093 - RNA, 19 nt, Homo sapiens
  misc_RNA (1)...(19): siRNA sense strand
gaaggucgccaucauacgu

SEQ ID NO: 672094 - RNA, 19 nt, Homo sapiens
  misc_RNA (1)...(19): siRNA sense strand
aaggauaguucaaguaguc

SEQ ID NO: 672095 - RNA, 19 nt, Homo sapiens
  misc_RNA (1)...(19): siRNA sense strand
gaggaggugucugcaagga

SEQ ID NO: 672096 - RNA, 19 nt, Homo sapiens
  misc_RNA (1)...(19): siRNA sense strand
acaguucuaucucuucuuc

SEQ ID NO: 672097 - RNA, 19 nt, Homo sapiens
  misc_RNA (1)...(19): siRNA sense strand
aaauagaccuaagccaugu

SEQ ID NO: 672098 - RNA, 19 nt, Homo sapiens
  misc_RNA (1)...(19): siRNA sense strand
gaucaacagacaacaucaa

SEQ ID NO: 672099 - RNA, 19 nt, Homo sapiens
  misc_RNA (1)...(19): siRNA sense strand
gcugagaucauuacacagu

SEQ ID NO: 672100 - RNA, 19 nt, Homo sapiens
  misc_RNA (1)...(19): siRNA sense strand
ggagacagagaugagaauu

SEQ ID NO: 672101 - RNA, 19 nt, Homo sapiens
  misc_RNA (1)...(19): siRNA sense strand
ccaaagagaaugggaucaa

SEQ ID NO: 672102 - RNA, 19 nt, Homo sapiens
  misc_RNA (1)...(19): siRNA sense strand
caucaaauaccagccuaaa

SEQ ID NO: 672103 - RNA, 19 nt, Homo sapiens
  misc_RNA (1)...(19): siRNA sense strand
cagacaacaucaaauacca

SEQ ID NO: 672104 - RNA, 19 nt, Homo sapiens
  misc_RNA (1)...(19): siRNA sense strand
caaagagaaugggaucaac

SEQ ID NO: 672105 - RNA, 19 nt, Homo sapiens
  misc_RNA (1)...(19): siRNA sense strand
ucaaauaccaaagagaaug

SEQ ID NO: 672106 - RNA, 19 nt, Homo sapiens
  misc_RNA (1)...(19): siRNA sense strand
gcuaaaguugguucucuug

SEQ ID NO: 672107 - RNA, 19 nt, Homo sapiens
  misc_RNA (1)...(19): siRNA sense strand
gccuuuagcagcugaagaa

SEQ ID NO: 672108 - RNA, 19 nt, Homo sapiens
  misc_RNA (1)...(19): siRNA sense strand
ucagagagcaugcuaaagc

SEQ ID NO: 672109 - RNA, 19 nt, Homo sapiens
  misc_RNA (1)...(19): siRNA sense strand
cacauccaccugagauuaa

SEQ ID NO: 672110 - RNA, 19 nt, Homo sapiens
  misc_RNA (1)...(19): siRNA sense strand
gagaagaaggucgccauca

SEQ ID NO: 672111 - RNA, 19 nt, Homo sapiens
  misc_RNA (1)...(19): siRNA sense strand
ucaccugccucagaacaga

SEQ ID NO: 672112 - RNA, 19 nt, Homo sapiens
  misc_RNA (1)...(19): siRNA sense strand
cccaucaccugccucagaa

SEQ ID NO: 672113 - RNA, 19 nt, Homo sapiens
  misc_RNA (1)...(19): siRNA sense strand
ugaagaaacagcuaaucug

SEQ ID NO: 672114 - RNA, 19 nt, Homo sapiens
  misc_RNA (1)...(19): siRNA sense strand
caaggauaguucaaguagu

SEQ ID NO: 672115 - RNA, 19 nt, Homo sapiens
  misc_RNA (1)...(19): siRNA sense strand
ucucaacaguucuaucucu

SEQ ID NO: 672116 - RNA, 19 nt, Homo sapiens
  misc_RNA (1)...(19): siRNA sense strand
agacagagaugagaauucc

SEQ ID NO: 672117 - RNA, 19 nt, Homo sapiens
  misc_RNA (1)...(19): siRNA sense strand
ccucagcaccgcuaacaga

SEQ ID NO: 672118 - RNA, 19 nt, Homo sapiens
  misc_RNA (1)...(19): siRNA sense strand
gaacggaaagacgaagcaa

SEQ ID NO: 672119 - RNA, 19 nt, Homo sapiens
  misc_RNA (1)...(19): siRNA sense strand
caaauguggcucucugaag

SEQ ID NO: 672120 - RNA, 19 nt, Homo sapiens
  misc_RNA (1)...(19): siRNA sense strand
gagacagagaugagaauuc

SEQ ID NO: 672121 - RNA, 19 nt, Homo sapiens
  misc_RNA (1)...(19): siRNA sense strand
ggcuguagcaguccugaaa

SEQ ID NO: 672122 - RNA, 19 nt, Homo sapiens
  misc_RNA (1)...(19): siRNA sense strand
ccaaauguggcucucugaa

SEQ ID NO: 672123 - RNA, 19 nt, Homo sapiens
  misc_RNA (1)...(19): siRNA sense strand
ccgaagcgccaauggauuc

SEQ ID NO: 672124 - RNA, 19 nt, Homo sapiens
  misc_RNA (1)...(19): siRNA sense strand
aagaagcucaacauaaaga

SEQ ID NO: 672125 - RNA, 19 nt, Homo sapiens
  misc_RNA (1)...(19): siRNA sense strand
cuucagagagcaugcuaaa

SEQ ID NO: 672126 - RNA, 19 nt, Homo sapiens
  misc_RNA (1)...(19): siRNA sense strand
caaauaccaaagagaaugg

SEQ ID NO: 672127 - RNA, 19 nt, Homo sapiens
  misc_RNA (1)...(19): siRNA sense strand
ggugguaaugucaagauug

SEQ ID NO: 672128 - RNA, 19 nt, Homo sapiens
  misc_RNA (1)...(19): siRNA sense strand
guaaccaagagcccagaaa

SEQ ID NO: 672129 - RNA, 19 nt, Homo sapiens
  misc_RNA (1)...(19): siRNA sense strand
agagaaagaagcucaacau

SEQ ID NO: 672130 - RNA, 19 nt, Homo sapiens
  misc_RNA (1)...(19): siRNA sense strand
uaaacaggcaaaggacaaa

SEQ ID NO: 672131 - RNA, 19 nt, Homo sapiens
  misc_RNA (1)...(19): siRNA sense strand
ccacuuuggcugaggaugu

SEQ ID NO: 672132 - RNA, 19 nt, Homo sapiens
  misc_RNA (1)...(19): siRNA sense strand
gggaagagugguaccucaa

SEQ ID NO: 672133 - RNA, 19 nt, Homo sapiens
  misc_RNA (1)...(19): siRNA sense strand
cugcaaggauaguucaagu

SEQ ID NO: 672134 - RNA, 19 nt, Homo sapiens
  misc_RNA (1)...(19): siRNA sense strand
gauaaugcucaucauguac

SEQ ID NO: 672135 - RNA, 19 nt, Homo sapiens
  misc_RNA (1)...(19): siRNA sense strand
ccaucuuggugccgaguga

SEQ ID NO: 672136 - RNA, 19 nt, Homo sapiens
  misc_RNA (1)...(19): siRNA sense strand
ugaaaggugaacaagagaa

SEQ ID NO: 672137 - RNA, 19 nt, Homo sapiens
  misc_RNA (1)...(19): siRNA sense strand
acagggcaccuauucaaau

SEQ ID NO: 672138 - RNA, 19 nt, Homo sapiens
  misc_RNA (1)...(19): siRNA sense strand
uuaaacaggcaaaggacaa

SEQ ID NO: 672139 - RNA, 19 nt, Homo sapiens
  misc_RNA (1)...(19): siRNA sense strand
agaaaaggcccaagcuaaa

SEQ ID NO: 672140 - RNA, 19 nt, Homo sapiens
  misc_RNA (1)...(19): siRNA sense strand
ucacugcugcacucgcuaa

SEQ ID NO: 672141 - RNA, 19 nt, Homo sapiens
  misc_RNA (1)...(19): siRNA sense strand
cacagggcaccuauucaaa

SEQ ID NO: 672142 - RNA, 19 nt, Homo sapiens
  misc_RNA (1)...(19): siRNA sense strand
cgacgacucagcaaugucu

SEQ ID NO: 672143 - RNA, 19 nt, Homo sapiens
  misc_RNA (1)...(19): siRNA sense strand
gaggugguaaugucaagau

SEQ ID NO: 672144 - RNA, 19 nt, Homo sapiens
  misc_RNA (1)...(19): siRNA sense strand
guggcucucugaagaacau

SEQ ID NO: 672145 - RNA, 19 nt, Homo sapiens
  misc_RNA (1)...(19): siRNA sense strand
ggaagagugguaccucaac

SEQ ID NO: 672146 - RNA, 19 nt, Homo sapiens
  misc_RNA (1)...(19): siRNA sense strand
acagagaugagaauuccuu

SEQ ID NO: 672147 - RNA, 19 nt, Homo sapiens
  misc_RNA (1)...(19): siRNA sense strand
uauuuaaacaggcaaagga

SEQ ID NO: 672148 - RNA, 19 nt, Homo sapiens
  misc_RNA (1)...(19): siRNA sense strand
aagcuaaaguugguucucu

SEQ ID NO: 672149 - RNA, 19 nt, Homo sapiens
  misc_RNA (1)...(19): siRNA sense strand
gaagcaaaggcaccucacu

SEQ ID NO: 672150 - RNA, 19 nt, Homo sapiens
  misc_RNA (1)...(19): siRNA sense strand
aagaaaaggcccaagcuaa

SEQ ID NO: 672151 - RNA, 19 nt, Homo sapiens
  misc_RNA (1)...(19): siRNA sense strand
ccugaagaaugucaaaucc

SEQ ID NO: 672152 - RNA, 19 nt, Homo sapiens
  misc_RNA (1)...(19): siRNA sense strand
aaggugaacaagagaaaga

SEQ ID NO: 672153 - RNA, 19 nt, Homo sapiens
  misc_RNA (1)...(19): siRNA sense strand
gaccucagcaccgcuaaca

SEQ ID NO: 672154 - RNA, 19 nt, Homo sapiens
  misc_RNA (1)...(19): siRNA sense strand
cuaaaguugguucucuuga

SEQ ID NO: 672155 - RNA, 19 nt, Homo sapiens
  misc_RNA (1)...(19): siRNA sense strand
gaaaaggcccaagcuaaag

SEQ ID NO: 672156 - RNA, 19 nt, Homo sapiens
  misc_RNA (1)...(19): siRNA sense strand
ccuucucucucaacaguuc

SEQ ID NO: 672157 - RNA, 19 nt, Homo sapiens
  misc_RNA (1)...(19): siRNA sense strand
gaaagaagcucaacauaaa

SEQ ID NO: 672158 - RNA, 19 nt, Homo sapiens
  misc_RNA (1)...(19): siRNA sense strand
caaagucucugacggagua

SEQ ID NO: 672159 - RNA, 19 nt, Homo sapiens
  misc_RNA (1)...(19): siRNA sense strand
caacagacaacaucaaaua

SEQ ID NO: 672160 - RNA, 19 nt, Homo sapiens
  misc_RNA (1)...(19): siRNA sense strand
ggaggugucugcaaggaua

SEQ ID NO: 672161 - RNA, 19 nt, Homo sapiens
  misc_RNA (1)...(19): siRNA sense strand
gaagaaggucgccaucaua

SEQ ID NO: 672162 - RNA, 19 nt, Homo sapiens
  misc_RNA (1)...(19): siRNA sense strand
gaccucagcugacagagaa

SEQ ID NO: 672163 - RNA, 19 nt, Homo sapiens
  misc_RNA (1)...(19): siRNA sense strand
aaaguugguucucuugaua

SEQ ID NO: 672164 - RNA, 19 nt, Homo sapiens
  misc_RNA (1)...(19): siRNA sense strand
gagaaagaagcucaacaua

SEQ ID NO: 672165 - RNA, 19 nt, Homo sapiens
  misc_RNA (1)...(19): siRNA sense strand
agaaagaagcucaacauaa

SEQ ID NO: 672166 - RNA, 19 nt, Homo sapiens
  misc_RNA (1)...(19): siRNA sense strand
gggcugagaucauuacaca

SEQ ID NO: 672167 - RNA, 19 nt, Homo sapiens
  misc_RNA (1)...(19): siRNA sense strand
gcucgaaucuccucagcuu

SEQ ID NO: 672168 - RNA, 19 nt, Homo sapiens
  misc_RNA (1)...(19): siRNA sense strand
ugaagaaugucaaauccaa

SEQ ID NO: 672169 - RNA, 19 nt, Homo sapiens
  misc_RNA (1)...(19): siRNA sense strand
gaaaggugaacaagagaaa

SEQ ID NO: 672170 - RNA, 19 nt, Homo sapiens
  misc_RNA (1)...(19): siRNA sense strand
gaagagugguaccucaaca

SEQ ID NO: 672171 - RNA, 19 nt, Homo sapiens
  misc_RNA (1)...(19): siRNA sense strand
caccugagauuaaggauca

SEQ ID NO: 672172 - RNA, 19 nt, Homo sapiens
  misc_RNA (1)...(19): siRNA sense strand
aaauguggcucucugaaga

SEQ ID NO: 672173 - RNA, 19 nt, Homo sapiens
  misc_RNA (1)...(19): siRNA sense strand
gcaaggauaguucaaguag

SEQ ID NO: 672174 - RNA, 19 nt, Homo sapiens
  misc_RNA (1)...(19): siRNA sense strand
gcaucaaccugcucgaauc

SEQ ID NO: 672175 - RNA, 19 nt, Homo sapiens
  misc_RNA (1)...(19): siRNA sense strand
cccaagaccuuccuccauu

SEQ ID NO: 672176 - RNA, 19 nt, Homo sapiens
  misc_RNA (1)...(19): siRNA sense strand
ugccagaccugaagaaugu

SEQ ID NO: 672177 - RNA, 19 nt, Homo sapiens
  misc_RNA (1)...(19): siRNA sense strand
uaaaguugguucucuugau

SEQ ID NO: 672178 - RNA, 19 nt, Homo sapiens
  misc_RNA (1)...(19): siRNA sense strand
ucacauccaccugagauua

SEQ ID NO: 672179 - RNA, 19 nt, Homo sapiens
  misc_RNA (1)...(19): siRNA sense strand
ggaugaagagggugccuuu

SEQ ID NO: 672180 - RNA, 19 nt, Homo sapiens
  misc_RNA (1)...(19): siRNA sense strand
ugaagagggugccuuugga

SEQ ID NO: 672181 - RNA, 19 nt, Homo sapiens
  misc_RNA (1)...(19): siRNA sense strand
caacaguucuaucucuucu

SEQ ID NO: 672182 - RNA, 19 nt, Homo sapiens
  misc_RNA (1)...(19): siRNA sense strand
gaagaaugucaaauccaaa

SEQ ID NO: 672183 - RNA, 19 nt, Homo sapiens
  misc_RNA (1)...(19): siRNA sense strand
ccugaaaggugaacaagag

SEQ ID NO: 672184 - RNA, 19 nt, Homo sapiens
  misc_RNA (1)...(19): siRNA sense strand
cuccucagcuugccacuuu

SEQ ID NO: 672185 - RNA, 19 nt, Homo sapiens
  misc_RNA (1)...(19): siRNA sense strand
caaaggacaaagucucuga

SEQ ID NO: 672186 - RNA, 19 nt, Homo sapiens
  misc_RNA (1)...(19): siRNA sense strand
uuuagcagcugaagaaaca

SEQ ID NO: 672187 - RNA, 19 nt, Homo sapiens
  misc_RNA (1)...(19): siRNA sense strand
agaagaaggucgccaucau

SEQ ID NO: 672188 - RNA, 19 nt, Homo sapiens
  misc_RNA (1)...(19): siRNA sense strand
ccaagaccuuccuccauuc

SEQ ID NO: 672189 - RNA, 19 nt, Homo sapiens
  misc_RNA (1)...(19): siRNA sense strand
ggucacagggcaccuauuc

SEQ ID NO: 672190 - RNA, 19 nt, Homo sapiens
  misc_RNA (1)...(19): siRNA sense strand
ucaaauaccagccuaaagg

SEQ ID NO: 672191 - RNA, 19 nt, Homo sapiens
  misc_RNA (1)...(19): siRNA sense strand
ucacagggcaccuauucaa

SEQ ID NO: 672192 - RNA, 19 nt, Homo sapiens
  misc_RNA (1)...(19): siRNA sense strand
agaggcaucugcacacuca

SEQ ID NO: 672193 - RNA, 19 nt, Homo sapiens
  misc_RNA (1)...(19): siRNA sense strand
gaaggucgccaucauacgu

SEQ ID NO: 672194 - RNA, 19 nt, Homo sapiens
  misc_RNA (1)...(19): siRNA sense strand
aaggauaguucaaguaguc

SEQ ID NO: 672195 - RNA, 19 nt, Homo sapiens
  misc_RNA (1)...(19): siRNA sense strand
gaggaggugucugcaagga

SEQ ID NO: 672196 - RNA, 19 nt, Homo sapiens
  misc_RNA (1)...(19): siRNA sense strand
acaguucuaucucuucuuc

SEQ ID NO: 672197 - RNA, 19 nt, Homo sapiens
  misc_RNA (1)...(19): siRNA sense strand
aaauagaccuaagccaugu

SEQ ID NO: 672198 - RNA, 19 nt, Homo sapiens
  misc_RNA (1)...(19): siRNA sense strand
gaucaacagacaacaucaa

SEQ ID NO: 672199 - RNA, 19 nt, Homo sapiens
  misc_RNA (1)...(19): siRNA sense strand
gcugagaucauuacacagu

SEQ ID NO: 672200 - RNA, 19 nt, Homo sapiens
  misc_RNA (1)...(19): siRNA sense strand
ggagacagagaugagaauu

SEQ ID NO: 672201 - RNA, 19 nt, Homo sapiens
  misc_RNA (1)...(19): siRNA sense strand
ccaaagagaaugggaucaa

SEQ ID NO: 672202 - RNA, 19 nt, Homo sapiens
  misc_RNA (1)...(19): siRNA sense strand
caucaaauaccagccuaaa

SEQ ID NO: 672203 - RNA, 19 nt, Homo sapiens
  misc_RNA (1)...(19): siRNA sense strand
cagacaacaucaaauacca

SEQ ID NO: 672204 - RNA, 19 nt, Homo sapiens
  misc_RNA (1)...(19): siRNA sense strand
caaagagaaugggaucaac

SEQ ID NO: 672205 - RNA, 19 nt, Homo sapiens
  misc_RNA (1)...(19): siRNA sense strand
ucaaauaccaaagagaaug

SEQ ID NO: 672206 - RNA, 19 nt, Homo sapiens
  misc_RNA (1)...(19): siRNA sense strand
gcuaaaguugguucucuug

SEQ ID NO: 672207 - RNA, 19 nt, Homo sapiens
  misc_RNA (1)...(19): siRNA sense strand
gccuuuagcagcugaagaa

SEQ ID NO: 672208 - RNA, 19 nt, Homo sapiens
  misc_RNA (1)...(19): siRNA sense strand
ucagagagcaugcuaaagc

SEQ ID NO: 672209 - RNA, 19 nt, Homo sapiens
  misc_RNA (1)...(19): siRNA sense strand
cacauccaccugagauuaa

SEQ ID NO: 672210 - RNA, 19 nt, Homo sapiens
  misc_RNA (1)...(19): siRNA sense strand
gagaagaaggucgccauca

SEQ ID NO: 672211 - RNA, 19 nt, Homo sapiens
  misc_RNA (1)...(19): siRNA sense strand
ucaccugccucagaacaga

SEQ ID NO: 672212 - RNA, 19 nt, Homo sapiens
  misc_RNA (1)...(19): siRNA sense strand
cccaucaccugccucagaa

SEQ ID NO: 672213 - RNA, 19 nt, Homo sapiens
  misc_RNA (1)...(19): siRNA sense strand
ugaagaaacagcuaaucug

SEQ ID NO: 672214 - RNA, 19 nt, Homo sapiens
  misc_RNA (1)...(19): siRNA sense strand
caaggauaguucaaguagu

SEQ ID NO: 672215 - RNA, 19 nt, Homo sapiens
  misc_RNA (1)...(19): siRNA sense strand
ucucaacaguucuaucucu

SEQ ID NO: 672216 - RNA, 19 nt, Homo sapiens
  misc_RNA (1)...(19): siRNA sense strand
agacagagaugagaauucc

SEQ ID NO: 672217 - RNA, 19 nt, Homo sapiens
  misc_RNA (1)...(19): siRNA sense strand
ccucagcaccgcuaacaga

SEQ ID NO: 672218 - RNA, 19 nt, Homo sapiens
  misc_RNA (1)...(19): siRNA sense strand
gaacggaaagacgaagcaa

SEQ ID NO: 672219 - RNA, 19 nt, Homo sapiens
  misc_RNA (1)...(19): siRNA sense strand
caaauguggcucucugaag

SEQ ID NO: 672220 - RNA, 19 nt, Homo sapiens
  misc_RNA (1)...(19): siRNA sense strand
gagacagagaugagaauuc

SEQ ID NO: 672221 - RNA, 19 nt, Homo sapiens
  misc_RNA (1)...(19): siRNA sense strand
ggcuguagcaguccugaaa

SEQ ID NO: 672222 - RNA, 19 nt, Homo sapiens
  misc_RNA (1)...(19): siRNA sense strand
ccaaauguggcucucugaa

SEQ ID NO: 672223 - RNA, 19 nt, Homo sapiens
  misc_RNA (1)...(19): siRNA sense strand
ccgaagcgccaauggauuc

SEQ ID NO: 672224 - RNA, 19 nt, Homo sapiens
  misc_RNA (1)...(19): siRNA sense strand
aagaagcucaacauaaaga

SEQ ID NO: 672225 - RNA, 19 nt, Homo sapiens
  misc_RNA (1)...(19): siRNA sense strand
cuucagagagcaugcuaaa

SEQ ID NO: 672226 - RNA, 19 nt, Homo sapiens
  misc_RNA (1)...(19): siRNA sense strand
caaauaccaaagagaaugg

SEQ ID NO: 672227 - RNA, 19 nt, Homo sapiens
  misc_RNA (1)...(19): siRNA sense strand
ggugguaaugucaagauug

SEQ ID NO: 672228 - RNA, 19 nt, Homo sapiens
  misc_RNA (1)...(19): siRNA sense strand
guaaccaagagcccagaaa

SEQ ID NO: 672229 - RNA, 19 nt, Homo sapiens
  misc_RNA (1)...(19): siRNA sense strand
agagaaagaagcucaacau

SEQ ID NO: 672230 - RNA, 19 nt, Homo sapiens
  misc_RNA (1)...(19): siRNA sense strand
uaaacaggcaaaggacaaa

SEQ ID NO: 672231 - RNA, 19 nt, Homo sapiens
  misc_RNA (1)...(19): siRNA sense strand
ccacuuuggcugaggaugu

SEQ ID NO: 672232 - RNA, 19 nt, Homo sapiens
  misc_RNA (1)...(19): siRNA sense strand
gggaagagugguaccucaa

SEQ ID NO: 672233 - RNA, 19 nt, Homo sapiens
  misc_RNA (1)...(19): siRNA sense strand
cugcaaggauaguucaagu

SEQ ID NO: 672234 - RNA, 19 nt, Homo sapiens
  misc_RNA (1)...(19): siRNA sense strand
gauaaugcucaucauguac

SEQ ID NO: 672235 - RNA, 19 nt, Homo sapiens
  misc_RNA (1)...(19): siRNA sense strand
ccaucuuggugccgaguga

SEQ ID NO: 672236 - RNA, 19 nt, Homo sapiens
  misc_RNA (1)...(19): siRNA sense strand
ugaaaggugaacaagagaa

SEQ ID NO: 672237 - RNA, 19 nt, Homo sapiens
  misc_RNA (1)...(19): siRNA sense strand
acagggcaccuauucaaau

SEQ ID NO: 672238 - RNA, 19 nt, Homo sapiens
  misc_RNA (1)...(19): siRNA sense strand
uuaaacaggcaaaggacaa

SEQ ID NO: 672239 - RNA, 19 nt, Homo sapiens
  misc_RNA (1)...(19): siRNA sense strand
agaaaaggcccaagcuaaa

SEQ ID NO: 672240 - RNA, 19 nt, Homo sapiens
  misc_RNA (1)...(19): siRNA sense strand
ucacugcugcacucgcuaa

SEQ ID NO: 672241 - RNA, 19 nt, Homo sapiens
  misc_RNA (1)...(19): siRNA sense strand
cacagggcaccuauucaaa

SEQ ID NO: 672242 - RNA, 19 nt, Homo sapiens
  misc_RNA (1)...(19): siRNA sense strand
cgacgacucagcaaugucu

SEQ ID NO: 672243 - RNA, 19 nt, Homo sapiens
  misc_RNA (1)...(19): siRNA sense strand
gaggugguaaugucaagau

SEQ ID NO: 672244 - RNA, 19 nt, Homo sapiens
  misc_RNA (1)...(19): siRNA sense strand
guggcucucugaagaacau

SEQ ID NO: 672245 - RNA, 19 nt, Homo sapiens
  misc_RNA (1)...(19): siRNA sense strand
ggaagagugguaccucaac

SEQ ID NO: 672246 - RNA, 19 nt, Homo sapiens
  misc_RNA (1)...(19): siRNA sense strand
acagagaugagaauuccuu

SEQ ID NO: 672247 - RNA, 19 nt, Homo sapiens
  misc_RNA (1)...(19): siRNA sense strand
uauuuaaacaggcaaagga

SEQ ID NO: 672248 - RNA, 19 nt, Homo sapiens
  misc_RNA (1)...(19): siRNA sense strand
aagcuaaaguugguucucu

SEQ ID NO: 672249 - RNA, 19 nt, Homo sapiens
  misc_RNA (1)...(19): siRNA sense strand
gaagcaaaggcaccucacu

SEQ ID NO: 672250 - RNA, 19 nt, Homo sapiens
  misc_RNA (1)...(19): siRNA sense strand
aagaaaaggcccaagcuaa

SEQ ID NO: 672251 - RNA, 19 nt, Homo sapiens
  misc_RNA (1)...(19): siRNA sense strand
ccugaagaaugucaaaucc

SEQ ID NO: 672252 - RNA, 19 nt, Homo sapiens
  misc_RNA (1)...(19): siRNA sense strand
aaggugaacaagagaaaga

SEQ ID NO: 672253 - RNA, 19 nt, Homo sapiens
  misc_RNA (1)...(19): siRNA sense strand
gaccucagcaccgcuaaca

SEQ ID NO: 672254 - RNA, 19 nt, Homo sapiens
  misc_RNA (1)...(19): siRNA sense strand
cuaaaguugguucucuuga

SEQ ID NO: 672255 - RNA, 19 nt, Homo sapiens
  misc_RNA (1)...(19): siRNA sense strand
gaaaaggcccaagcuaaag

SEQ ID NO: 672256 - RNA, 19 nt, Homo sapiens
  misc_RNA (1)...(19): siRNA sense strand
ccuucucucucaacaguuc

SEQ ID NO: 672257 - RNA, 19 nt, Homo sapiens
  misc_RNA (1)...(19): siRNA sense strand
gaaagaagcucaacauaaa

SEQ ID NO: 672258 - RNA, 19 nt, Homo sapiens
  misc_RNA (1)...(19): siRNA sense strand
caaagucucugacggagua

SEQ ID NO: 672259 - RNA, 19 nt, Homo sapiens
  misc_RNA (1)...(19): siRNA sense strand
caacagacaacaucaaaua

SEQ ID NO: 672260 - RNA, 19 nt, Homo sapiens
  misc_RNA (1)...(19): siRNA sense strand
ggaggugucugcaaggaua

SEQ ID NO: 672261 - RNA, 19 nt, Homo sapiens
  misc_RNA (1)...(19): siRNA sense strand
gaagaaggucgccaucaua

SEQ ID NO: 672262 - RNA, 19 nt, Homo sapiens
  misc_RNA (1)...(19): siRNA sense strand
gaccucagcugacagagaa

SEQ ID NO: 672263 - RNA, 19 nt, Homo sapiens
  misc_RNA (1)...(19): siRNA sense strand
aaaguugguucucuugaua

SEQ ID NO: 672264 - RNA, 19 nt, Homo sapiens
  misc_RNA (1)...(19): siRNA sense strand
gagaaagaagcucaacaua

SEQ ID NO: 672265 - RNA, 19 nt, Homo sapiens
  misc_RNA (1)...(19): siRNA sense strand
agaaagaagcucaacauaa

SEQ ID NO: 672266 - RNA, 19 nt, Homo sapiens
  misc_RNA (1)...(19): siRNA sense strand
gggcugagaucauuacaca

SEQ ID NO: 672267 - RNA, 19 nt, Homo sapiens
  misc_RNA (1)...(19): siRNA sense strand
gcucgaaucuccucagcuu

SEQ ID NO: 672268 - RNA, 19 nt, Homo sapiens
  misc_RNA (1)...(19): siRNA sense strand
ugaagaaugucaaauccaa

SEQ ID NO: 672269 - RNA, 19 nt, Homo sapiens
  misc_RNA (1)...(19): siRNA sense strand
gaaaggugaacaagagaaa

SEQ ID NO: 672270 - RNA, 19 nt, Homo sapiens
  misc_RNA (1)...(19): siRNA sense strand
gaagagugguaccucaaca

SEQ ID NO: 672271 - RNA, 19 nt, Homo sapiens
  misc_RNA (1)...(19): siRNA sense strand
caccugagauuaaggauca

SEQ ID NO: 672272 - RNA, 19 nt, Homo sapiens
  misc_RNA (1)...(19): siRNA sense strand
aaauguggcucucugaaga

SEQ ID NO: 672273 - RNA, 19 nt, Homo sapiens
  misc_RNA (1)...(19): siRNA sense strand
gcaaggauaguucaaguag

SEQ ID NO: 672274 - RNA, 19 nt, Homo sapiens
  misc_RNA (1)...(19): siRNA sense strand
gcaucaaccugcucgaauc

SEQ ID NO: 672275 - RNA, 19 nt, Homo sapiens
  misc_RNA (1)...(19): siRNA sense strand
cccaagaccuuccuccauu

SEQ ID NO: 672276 - RNA, 19 nt, Homo sapiens
  misc_RNA (1)...(19): siRNA sense strand
ugccagaccugaagaaugu

SEQ ID NO: 672277 - RNA, 19 nt, Homo sapiens
  misc_RNA (1)...(19): siRNA sense strand
uaaaguugguucucuugau

SEQ ID NO: 672278 - RNA, 19 nt, Homo sapiens
  misc_RNA (1)...(19): siRNA sense strand
ucacauccaccugagauua

SEQ ID NO: 672279 - RNA, 19 nt, Homo sapiens
  misc_RNA (1)...(19): siRNA sense strand
ggaugaagagggugccuuu

SEQ ID NO: 672280 - RNA, 19 nt, Homo sapiens
  misc_RNA (1)...(19): siRNA sense strand
ugaagagggugccuuugga

SEQ ID NO: 672281 - RNA, 19 nt, Homo sapiens
  misc_RNA (1)...(19): siRNA sense strand
caacaguucuaucucuucu

SEQ ID NO: 672282 - RNA, 19 nt, Homo sapiens
  misc_RNA (1)...(19): siRNA sense strand
gaagaaugucaaauccaaa

SEQ ID NO: 672283 - RNA, 19 nt, Homo sapiens
  misc_RNA (1)...(19): siRNA sense strand
ccugaaaggugaacaagag

SEQ ID NO: 672284 - RNA, 19 nt, Homo sapiens
  misc_RNA (1)...(19): siRNA sense strand
cuccucagcuugccacuuu

SEQ ID NO: 672285 - RNA, 19 nt, Homo sapiens
  misc_RNA (1)...(19): siRNA sense strand
caaaggacaaagucucuga

SEQ ID NO: 672286 - RNA, 19 nt, Homo sapiens
  misc_RNA (1)...(19): siRNA sense strand
uuuagcagcugaagaaaca

SEQ ID NO: 672287 - RNA, 19 nt, Homo sapiens
  misc_RNA (1)...(19): siRNA sense strand
agaagaaggucgccaucau

SEQ ID NO: 672288 - RNA, 19 nt, Homo sapiens
  misc_RNA (1)...(19): siRNA sense strand
ccaagaccuuccuccauuc

SEQ ID NO: 672289 - RNA, 19 nt, Homo sapiens
  misc_RNA (1)...(19): siRNA sense strand
ggucacagggcaccuauuc

SEQ ID NO: 672290 - RNA, 19 nt, Homo sapiens
  misc_RNA (1)...(19): siRNA sense strand
ucaaauaccagccuaaagg

SEQ ID NO: 672291 - RNA, 19 nt, Homo sapiens
  misc_RNA (1)...(19): siRNA sense strand
ucacagggcaccuauucaa

SEQ ID NO: 672292 - RNA, 19 nt, Homo sapiens
  misc_RNA (1)...(19): siRNA sense strand
agaggcaucugcacacuca

SEQ ID NO: 672293 - RNA, 19 nt, Homo sapiens
  misc_RNA (1)...(19): siRNA sense strand
gaaggucgccaucauacgu

SEQ ID NO: 672294 - RNA, 19 nt, Homo sapiens
  misc_RNA (1)...(19): siRNA sense strand
aaggauaguucaaguaguc

SEQ ID NO: 672295 - RNA, 19 nt, Homo sapiens
  misc_RNA (1)...(19): siRNA sense strand
gaggaggugucugcaagga

SEQ ID NO: 672296 - RNA, 19 nt, Homo sapiens
  misc_RNA (1)...(19): siRNA sense strand
acaguucuaucucuucuuc

SEQ ID NO: 672297 - RNA, 19 nt, Homo sapiens
  misc_RNA (1)...(19): siRNA sense strand
aaauagaccuaagccaugu

SEQ ID NO: 672298 - RNA, 19 nt, Homo sapiens
  misc_RNA (1)...(19): siRNA sense strand
gaucaacagacaacaucaa

SEQ ID NO: 672299 - RNA, 19 nt, Homo sapiens
  misc_RNA (1)...(19): siRNA sense strand
gcugagaucauuacacagu

SEQ ID NO: 672300 - RNA, 19 nt, Homo sapiens
  misc_RNA (1)...(19): siRNA sense strand
ggagacagagaugagaauu

SEQ ID NO: 672301 - RNA, 19 nt, Homo sapiens
  misc_RNA (1)...(19): siRNA sense strand
ccaaagagaaugggaucaa

SEQ ID NO: 672302 - RNA, 19 nt, Homo sapiens
  misc_RNA (1)...(19): siRNA sense strand
caucaaauaccagccuaaa

SEQ ID NO: 672303 - RNA, 19 nt, Homo sapiens
  misc_RNA (1)...(19): siRNA sense strand
cagacaacaucaaauacca

SEQ ID NO: 672304 - RNA, 19 nt, Homo sapiens
  misc_RNA (1)...(19): siRNA sense strand
caaagagaaugggaucaac

SEQ ID NO: 672305 - RNA, 19 nt, Homo sapiens
  misc_RNA (1)...(19): siRNA sense strand
ucaaauaccaaagagaaug

SEQ ID NO: 672306 - RNA, 19 nt, Homo sapiens
  misc_RNA (1)...(19): siRNA sense strand
gcuaaaguugguucucuug

SEQ ID NO: 672307 - RNA, 19 nt, Homo sapiens
  misc_RNA (1)...(19): siRNA sense strand
gccuuuagcagcugaagaa

SEQ ID NO: 672308 - RNA, 19 nt, Homo sapiens
  misc_RNA (1)...(19): siRNA sense strand
ucagagagcaugcuaaagc

SEQ ID NO: 672309 - RNA, 19 nt, Homo sapiens
  misc_RNA (1)...(19): siRNA sense strand
cacauccaccugagauuaa

SEQ ID NO: 672310 - RNA, 19 nt, Homo sapiens
  misc_RNA (1)...(19): siRNA sense strand
gagaagaaggucgccauca

SEQ ID NO: 672311 - RNA, 19 nt, Homo sapiens
  misc_RNA (1)...(19): siRNA sense strand
ucaccugccucagaacaga

SEQ ID NO: 672312 - RNA, 19 nt, Homo sapiens
  misc_RNA (1)...(19): siRNA sense strand
cccaucaccugccucagaa

SEQ ID NO: 672313 - RNA, 19 nt, Homo sapiens
  misc_RNA (1)...(19): siRNA sense strand
ugaagaaacagcuaaucug

SEQ ID NO: 672314 - RNA, 19 nt, Homo sapiens
  misc_RNA (1)...(19): siRNA sense strand
caaggauaguucaaguagu

SEQ ID NO: 672315 - RNA, 19 nt, Homo sapiens
  misc_RNA (1)...(19): siRNA sense strand
ucucaacaguucuaucucu

SEQ ID NO: 672316 - RNA, 19 nt, Homo sapiens
  misc_RNA (1)...(19): siRNA sense strand
agacagagaugagaauucc

SEQ ID NO: 672317 - RNA, 19 nt, Homo sapiens
  misc_RNA (1)...(19): siRNA sense strand
ccucagcaccgcuaacaga

SEQ ID NO: 672318 - RNA, 19 nt, Homo sapiens
  misc_RNA (1)...(19): siRNA sense strand
gaacggaaagacgaagcaa

SEQ ID NO: 672319 - RNA, 19 nt, Homo sapiens
  misc_RNA (1)...(19): siRNA sense strand
caaauguggcucucugaag

SEQ ID NO: 672320 - RNA, 19 nt, Homo sapiens
  misc_RNA (1)...(19): siRNA sense strand
gagacagagaugagaauuc

SEQ ID NO: 672321 - RNA, 19 nt, Homo sapiens
  misc_RNA (1)...(19): siRNA sense strand
ggcuguagcaguccugaaa

SEQ ID NO: 672322 - RNA, 19 nt, Homo sapiens
  misc_RNA (1)...(19): siRNA sense strand
ccaaauguggcucucugaa

SEQ ID NO: 672323 - RNA, 19 nt, Homo sapiens
  misc_RNA (1)...(19): siRNA sense strand
ccgaagcgccaauggauuc

SEQ ID NO: 672324 - RNA, 19 nt, Homo sapiens
  misc_RNA (1)...(19): siRNA sense strand
aagaagcucaacauaaaga

SEQ ID NO: 672325 - RNA, 19 nt, Homo sapiens
  misc_RNA (1)...(19): siRNA sense strand
cuucagagagcaugcuaaa

SEQ ID NO: 672326 - RNA, 19 nt, Homo sapiens
  misc_RNA (1)...(19): siRNA sense strand
caaauaccaaagagaaugg

SEQ ID NO: 672327 - RNA, 19 nt, Homo sapiens
  misc_RNA (1)...(19): siRNA sense strand
ggugguaaugucaagauug

SEQ ID NO: 672328 - RNA, 19 nt, Homo sapiens
  misc_RNA (1)...(19): siRNA sense strand
guaaccaagagcccagaaa

SEQ ID NO: 672329 - RNA, 19 nt, Homo sapiens
  misc_RNA (1)...(19): siRNA sense strand
agagaaagaagcucaacau

SEQ ID NO: 672330 - RNA, 19 nt, Homo sapiens
  misc_RNA (1)...(19): siRNA sense strand
uaaacaggcaaaggacaaa

SEQ ID NO: 672331 - RNA, 19 nt, Homo sapiens
  misc_RNA (1)...(19): siRNA sense strand
ccacuuuggcugaggaugu

SEQ ID NO: 672332 - RNA, 19 nt, Homo sapiens
  misc_RNA (1)...(19): siRNA sense strand
gggaagagugguaccucaa

SEQ ID NO: 672333 - RNA, 19 nt, Homo sapiens
  misc_RNA (1)...(19): siRNA sense strand
cugcaaggauaguucaagu

SEQ ID NO: 672334 - RNA, 19 nt, Homo sapiens
  misc_RNA (1)...(19): siRNA sense strand
gauaaugcucaucauguac

SEQ ID NO: 672335 - RNA, 19 nt, Homo sapiens
  misc_RNA (1)...(19): siRNA sense strand
ccaucuuggugccgaguga

SEQ ID NO: 672336 - RNA, 19 nt, Homo sapiens
  misc_RNA (1)...(19): siRNA sense strand
ugaaaggugaacaagagaa

SEQ ID NO: 672337 - RNA, 19 nt, Homo sapiens
  misc_RNA (1)...(19): siRNA sense strand
acagggcaccuauucaaau

SEQ ID NO: 672338 - RNA, 19 nt, Homo sapiens
  misc_RNA (1)...(19): siRNA sense strand
uuaaacaggcaaaggacaa

SEQ ID NO: 672339 - RNA, 19 nt, Homo sapiens
  misc_RNA (1)...(19): siRNA sense strand
agaaaaggcccaagcuaaa

SEQ ID NO: 672340 - RNA, 19 nt, Homo sapiens
  misc_RNA (1)...(19): siRNA sense strand
ucacugcugcacucgcuaa

SEQ ID NO: 672341 - RNA, 19 nt, Homo sapiens
  misc_RNA (1)...(19): siRNA sense strand
cacagggcaccuauucaaa

SEQ ID NO: 672342 - RNA, 19 nt, Homo sapiens
  misc_RNA (1)...(19): siRNA sense strand
cgacgacucagcaaugucu

SEQ ID NO: 672343 - RNA, 19 nt, Homo sapiens
  misc_RNA (1)...(19): siRNA sense strand
gaggugguaaugucaagau

SEQ ID NO: 672344 - RNA, 19 nt, Homo sapiens
  misc_RNA (1)...(19): siRNA sense strand
guggcucucugaagaacau

SEQ ID NO: 672345 - RNA, 19 nt, Homo sapiens
  misc_RNA (1)...(19): siRNA sense strand
ggaagagugguaccucaac

SEQ ID NO: 672346 - RNA, 19 nt, Homo sapiens
  misc_RNA (1)...(19): siRNA sense strand
acagagaugagaauuccuu

SEQ ID NO: 672347 - RNA, 19 nt, Homo sapiens
  misc_RNA (1)...(19): siRNA sense strand
uauuuaaacaggcaaagga

SEQ ID NO: 672348 - RNA, 19 nt, Homo sapiens
  misc_RNA (1)...(19): siRNA sense strand
aagcuaaaguugguucucu

SEQ ID NO: 672349 - RNA, 19 nt, Homo sapiens
  misc_RNA (1)...(19): siRNA sense strand
gaagcaaaggcaccucacu

SEQ ID NO: 672350 - RNA, 19 nt, Homo sapiens
  misc_RNA (1)...(19): siRNA sense strand
aagaaaaggcccaagcuaa

SEQ ID NO: 672351 - RNA, 19 nt, Homo sapiens
  misc_RNA (1)...(19): siRNA sense strand
ccugaagaaugucaaaucc

SEQ ID NO: 672352 - RNA, 19 nt, Homo sapiens
  misc_RNA (1)...(19): siRNA sense strand
aaggugaacaagagaaaga

SEQ ID NO: 672353 - RNA, 19 nt, Homo sapiens
  misc_RNA (1)...(19): siRNA sense strand
gaccucagcaccgcuaaca

SEQ ID NO: 672354 - RNA, 19 nt, Homo sapiens
  misc_RNA (1)...(19): siRNA sense strand
cuaaaguugguucucuuga

SEQ ID NO: 672355 - RNA, 19 nt, Homo sapiens
  misc_RNA (1)...(19): siRNA sense strand
gaaaaggcccaagcuaaag

SEQ ID NO: 672356 - RNA, 19 nt, Homo sapiens
  misc_RNA (1)...(19): siRNA sense strand
ccuucucucucaacaguuc

SEQ ID NO: 672357 - RNA, 19 nt, Homo sapiens
  misc_RNA (1)...(19): siRNA sense strand
gaaagaagcucaacauaaa

SEQ ID NO: 672358 - RNA, 19 nt, Homo sapiens
  misc_RNA (1)...(19): siRNA sense strand
caaagucucugacggagua

SEQ ID NO: 672359 - RNA, 19 nt, Homo sapiens
  misc_RNA (1)...(19): siRNA sense strand
caacagacaacaucaaaua

SEQ ID NO: 672360 - RNA, 19 nt, Homo sapiens
  misc_RNA (1)...(19): siRNA sense strand
ggaggugucugcaaggaua

SEQ ID NO: 672361 - RNA, 19 nt, Homo sapiens
  misc_RNA (1)...(19): siRNA sense strand
gaagaaggucgccaucaua

SEQ ID NO: 672362 - RNA, 19 nt, Homo sapiens
  misc_RNA (1)...(19): siRNA sense strand
gaccucagcugacagagaa

SEQ ID NO: 672363 - RNA, 19 nt, Homo sapiens
  misc_RNA (1)...(19): siRNA sense strand
aaaguugguucucuugaua

SEQ ID NO: 672364 - RNA, 19 nt, Homo sapiens
  misc_RNA (1)...(19): siRNA sense strand
gagaaagaagcucaacaua

SEQ ID NO: 672365 - RNA, 19 nt, Homo sapiens
  misc_RNA (1)...(19): siRNA sense strand
agaaagaagcucaacauaa

SEQ ID NO: 672366 - RNA, 19 nt, Homo sapiens
  misc_RNA (1)...(19): siRNA sense strand
gggcugagaucauuacaca

SEQ ID NO: 672367 - RNA, 19 nt, Homo sapiens
  misc_RNA (1)...(19): siRNA sense strand
gcucgaaucuccucagcuu

SEQ ID NO: 672368 - RNA, 19 nt, Homo sapiens
  misc_RNA (1)...(19): siRNA sense strand
ugaagaaugucaaauccaa

SEQ ID NO: 672369 - RNA, 19 nt, Homo sapiens
  misc_RNA (1)...(19): siRNA sense strand
gaaaggugaacaagagaaa

SEQ ID NO: 672370 - RNA, 19 nt, Homo sapiens
  misc_RNA (1)...(19): siRNA sense strand
gaagagugguaccucaaca

SEQ ID NO: 672371 - RNA, 19 nt, Homo sapiens
  misc_RNA (1)...(19): siRNA sense strand
caccugagauuaaggauca

SEQ ID NO: 672372 - RNA, 19 nt, Homo sapiens
  misc_RNA (1)...(19): siRNA sense strand
aaauguggcucucugaaga

SEQ ID NO: 672373 - RNA, 19 nt, Homo sapiens
  misc_RNA (1)...(19): siRNA sense strand
gcaaggauaguucaaguag

SEQ ID NO: 672374 - RNA, 19 nt, Homo sapiens
  misc_RNA (1)...(19): siRNA sense strand
gcaucaaccugcucgaauc

SEQ ID NO: 672375 - RNA, 19 nt, Homo sapiens
  misc_RNA (1)...(19): siRNA sense strand
cccaagaccuuccuccauu

SEQ ID NO: 672376 - RNA, 19 nt, Homo sapiens
  misc_RNA (1)...(19): siRNA sense strand
ugccagaccugaagaaugu

SEQ ID NO: 672377 - RNA, 19 nt, Homo sapiens
  misc_RNA (1)...(19): siRNA sense strand
uaaaguugguucucuugau

SEQ ID NO: 672378 - RNA, 19 nt, Homo sapiens
  misc_RNA (1)...(19): siRNA sense strand
ucacauccaccugagauua

SEQ ID NO: 672379 - RNA, 19 nt, Homo sapiens
  misc_RNA (1)...(19): siRNA sense strand
ggaugaagagggugccuuu

SEQ ID NO: 672380 - RNA, 19 nt, Homo sapiens
  misc_RNA (1)...(19): siRNA sense strand
ugaagagggugccuuugga

SEQ ID NO: 672381 - RNA, 19 nt, Homo sapiens
  misc_RNA (1)...(19): siRNA sense strand
caacaguucuaucucuucu

SEQ ID NO: 672382 - RNA, 19 nt, Homo sapiens
  misc_RNA (1)...(19): siRNA sense strand
gaagaaugucaaauccaaa

SEQ ID NO: 672383 - RNA, 19 nt, Homo sapiens
  misc_RNA (1)...(19): siRNA sense strand
ccugaaaggugaacaagag

SEQ ID NO: 672384 - RNA, 19 nt, Homo sapiens
  misc_RNA (1)...(19): siRNA sense strand
cuccucagcuugccacuuu

SEQ ID NO: 672385 - RNA, 19 nt, Homo sapiens
  misc_RNA (1)...(19): siRNA sense strand
caaaggacaaagucucuga

SEQ ID NO: 672386 - RNA, 19 nt, Homo sapiens
  misc_RNA (1)...(19): siRNA sense strand
uuuagcagcugaagaaaca

SEQ ID NO: 672387 - RNA, 19 nt, Homo sapiens
  misc_RNA (1)...(19): siRNA sense strand
agaagaaggucgccaucau

SEQ ID NO: 672388 - RNA, 19 nt, Homo sapiens
  misc_RNA (1)...(19): siRNA sense strand
ccaagaccuuccuccauuc

SEQ ID NO: 672389 - RNA, 19 nt, Homo sapiens
  misc_RNA (1)...(19): siRNA sense strand
ggucacagggcaccuauuc

SEQ ID NO: 672390 - RNA, 19 nt, Homo sapiens
  misc_RNA (1)...(19): siRNA sense strand
ucaaauaccagccuaaagg

SEQ ID NO: 672391 - RNA, 19 nt, Homo sapiens
  misc_RNA (1)...(19): siRNA sense strand
ucacagggcaccuauucaa

SEQ ID NO: 672392 - RNA, 19 nt, Homo sapiens
  misc_RNA (1)...(19): siRNA sense strand
agaggcaucugcacacuca

SEQ ID NO: 672393 - RNA, 19 nt, Homo sapiens
  misc_RNA (1)...(19): siRNA sense strand
gaaggucgccaucauacgu

SEQ ID NO: 672394 - RNA, 19 nt, Homo sapiens
  misc_RNA (1)...(19): siRNA sense strand
aaggauaguucaaguaguc

SEQ ID NO: 672395 - RNA, 19 nt, Homo sapiens
  misc_RNA (1)...(19): siRNA sense strand
gaggaggugucugcaagga

SEQ ID NO: 672396 - RNA, 19 nt, Homo sapiens
  misc_RNA (1)...(19): siRNA sense strand
acaguucuaucucuucuuc

SEQ ID NO: 672397 - RNA, 19 nt, Homo sapiens
  misc_RNA (1)...(19): siRNA sense strand
aaauagaccuaagccaugu

SEQ ID NO: 672398 - RNA, 19 nt, Homo sapiens
  misc_RNA (1)...(19): siRNA sense strand
gaucaacagacaacaucaa

SEQ ID NO: 672399 - RNA, 19 nt, Homo sapiens
  misc_RNA (1)...(19): siRNA sense strand
gcugagaucauuacacagu

SEQ ID NO: 672400 - RNA, 19 nt, Homo sapiens
  misc_RNA (1)...(19): siRNA sense strand
ggagacagagaugagaauu

SEQ ID NO: 672401 - RNA, 19 nt, Homo sapiens
  misc_RNA (1)...(19): siRNA sense strand
ccaaagagaaugggaucaa

SEQ ID NO: 672402 - RNA, 19 nt, Homo sapiens
  misc_RNA (1)...(19): siRNA sense strand
caucaaauaccagccuaaa

SEQ ID NO: 672403 - RNA, 19 nt, Homo sapiens
  misc_RNA (1)...(19): siRNA sense strand
cagacaacaucaaauacca

SEQ ID NO: 672404 - RNA, 19 nt, Homo sapiens
  misc_RNA (1)...(19): siRNA sense strand
caaagagaaugggaucaac

SEQ ID NO: 672405 - RNA, 19 nt, Homo sapiens
  misc_RNA (1)...(19): siRNA sense strand
ucaaauaccaaagagaaug

SEQ ID NO: 672406 - RNA, 19 nt, Homo sapiens
  misc_RNA (1)...(19): siRNA sense strand
gcuaaaguugguucucuug

SEQ ID NO: 672407 - RNA, 19 nt, Homo sapiens
  misc_RNA (1)...(19): siRNA sense strand
gccuuuagcagcugaagaa

SEQ ID NO: 672408 - RNA, 19 nt, Homo sapiens
  misc_RNA (1)...(19): siRNA sense strand
ucagagagcaugcuaaagc

SEQ ID NO: 672409 - RNA, 19 nt, Homo sapiens
  misc_RNA (1)...(19): siRNA sense strand
cacauccaccugagauuaa

SEQ ID NO: 672410 - RNA, 19 nt, Homo sapiens
  misc_RNA (1)...(19): siRNA sense strand
gagaagaaggucgccauca

SEQ ID NO: 672411 - RNA, 19 nt, Homo sapiens
  misc_RNA (1)...(19): siRNA sense strand
ucaccugccucagaacaga

SEQ ID NO: 672412 - RNA, 19 nt, Homo sapiens
  misc_RNA (1)...(19): siRNA sense strand
cccaucaccugccucagaa

SEQ ID NO: 672413 - RNA, 19 nt, Homo sapiens
  misc_RNA (1)...(19): siRNA sense strand
ugaagaaacagcuaaucug

SEQ ID NO: 672414 - RNA, 19 nt, Homo sapiens
  misc_RNA (1)...(19): siRNA sense strand
caaggauaguucaaguagu

SEQ ID NO: 672415 - RNA, 19 nt, Homo sapiens
  misc_RNA (1)...(19): siRNA sense strand
ucucaacaguucuaucucu

SEQ ID NO: 672416 - RNA, 19 nt, Homo sapiens
  misc_RNA (1)...(19): siRNA sense strand
agacagagaugagaauucc

SEQ ID NO: 672417 - RNA, 19 nt, Homo sapiens
  misc_RNA (1)...(19): siRNA sense strand
ccucagcaccgcuaacaga

SEQ ID NO: 672418 - RNA, 19 nt, Homo sapiens
  misc_RNA (1)...(19): siRNA sense strand
gaacggaaagacgaagcaa

SEQ ID NO: 672419 - RNA, 19 nt, Homo sapiens
  misc_RNA (1)...(19): siRNA sense strand
caaauguggcucucugaag

SEQ ID NO: 672420 - RNA, 19 nt, Homo sapiens
  misc_RNA (1)...(19): siRNA sense strand
gagacagagaugagaauuc

SEQ ID NO: 672421 - RNA, 19 nt, Homo sapiens
  misc_RNA (1)...(19): siRNA sense strand
ggcuguagcaguccugaaa

SEQ ID NO: 672422 - RNA, 19 nt, Homo sapiens
  misc_RNA (1)...(19): siRNA sense strand
ccaaauguggcucucugaa

SEQ ID NO: 672423 - RNA, 19 nt, Homo sapiens
  misc_RNA (1)...(19): siRNA sense strand
ccgaagcgccaauggauuc

SEQ ID NO: 672424 - RNA, 19 nt, Homo sapiens
  misc_RNA (1)...(19): siRNA sense strand
aagaagcucaacauaaaga

SEQ ID NO: 672425 - RNA, 19 nt, Homo sapiens
  misc_RNA (1)...(19): siRNA sense strand
cuucagagagcaugcuaaa

SEQ ID NO: 672426 - RNA, 19 nt, Homo sapiens
  misc_RNA (1)...(19): siRNA sense strand
caaauaccaaagagaaugg

SEQ ID NO: 672427 - RNA, 19 nt, Homo sapiens
  misc_RNA (1)...(19): siRNA sense strand
ggugguaaugucaagauug

SEQ ID NO: 672428 - RNA, 19 nt, Homo sapiens
  misc_RNA (1)...(19): siRNA sense strand
guaaccaagagcccagaaa

SEQ ID NO: 672429 - RNA, 19 nt, Homo sapiens
  misc_RNA (1)...(19): siRNA sense strand
agagaaagaagcucaacau

SEQ ID NO: 672430 - RNA, 19 nt, Homo sapiens
  misc_RNA (1)...(19): siRNA sense strand
uaaacaggcaaaggacaaa

SEQ ID NO: 672431 - RNA, 19 nt, Homo sapiens
  misc_RNA (1)...(19): siRNA sense strand
ccacuuuggcugaggaugu

SEQ ID NO: 672432 - RNA, 19 nt, Homo sapiens
  misc_RNA (1)...(19): siRNA sense strand
gggaagagugguaccucaa

SEQ ID NO: 672433 - RNA, 19 nt, Homo sapiens
  misc_RNA (1)...(19): siRNA sense strand
cugcaaggauaguucaagu

SEQ ID NO: 672434 - RNA, 19 nt, Homo sapiens
  misc_RNA (1)...(19): siRNA sense strand
gauaaugcucaucauguac

SEQ ID NO: 672435 - RNA, 19 nt, Homo sapiens
  misc_RNA (1)...(19): siRNA sense strand
ccaucuuggugccgaguga

SEQ ID NO: 672436 - RNA, 19 nt, Homo sapiens
  misc_RNA (1)...(19): siRNA sense strand
ugaaaggugaacaagagaa

SEQ ID NO: 672437 - RNA, 19 nt, Homo sapiens
  misc_RNA (1)...(19): siRNA sense strand
acagggcaccuauucaaau

SEQ ID NO: 672438 - RNA, 19 nt, Homo sapiens
  misc_RNA (1)...(19): siRNA sense strand
uuaaacaggcaaaggacaa

SEQ ID NO: 672439 - RNA, 19 nt, Homo sapiens
  misc_RNA (1)...(19): siRNA sense strand
agaaaaggcccaagcuaaa

SEQ ID NO: 672440 - RNA, 19 nt, Homo sapiens
  misc_RNA (1)...(19): siRNA sense strand
ucacugcugcacucgcuaa

SEQ ID NO: 672441 - RNA, 19 nt, Homo sapiens
  misc_RNA (1)...(19): siRNA sense strand
cacagggcaccuauucaaa

SEQ ID NO: 672442 - RNA, 19 nt, Homo sapiens
  misc_RNA (1)...(19): siRNA sense strand
cgacgacucagcaaugucu

SEQ ID NO: 672443 - RNA, 19 nt, Homo sapiens
  misc_RNA (1)...(19): siRNA sense strand
gaggugguaaugucaagau

SEQ ID NO: 672444 - RNA, 19 nt, Homo sapiens
  misc_RNA (1)...(19): siRNA sense strand
guggcucucugaagaacau

SEQ ID NO: 672445 - RNA, 19 nt, Homo sapiens
  misc_RNA (1)...(19): siRNA sense strand
ggaagagugguaccucaac

SEQ ID NO: 672446 - RNA, 19 nt, Homo sapiens
  misc_RNA (1)...(19): siRNA sense strand
acagagaugagaauuccuu

SEQ ID NO: 672447 - RNA, 19 nt, Homo sapiens
  misc_RNA (1)...(19): siRNA sense strand
uauuuaaacaggcaaagga

SEQ ID NO: 672448 - RNA, 19 nt, Homo sapiens
  misc_RNA (1)...(19): siRNA sense strand
aagcuaaaguugguucucu

SEQ ID NO: 672449 - RNA, 19 nt, Homo sapiens
  misc_RNA (1)...(19): siRNA sense strand
gaagcaaaggcaccucacu

SEQ ID NO: 672450 - RNA, 19 nt, Homo sapiens
  misc_RNA (1)...(19): siRNA sense strand
aagaaaaggcccaagcuaa

SEQ ID NO: 672451 - RNA, 19 nt, Homo sapiens
  misc_RNA (1)...(19): siRNA sense strand
ccugaagaaugucaaaucc

SEQ ID NO: 672452 - RNA, 19 nt, Homo sapiens
  misc_RNA (1)...(19): siRNA sense strand
aaggugaacaagagaaaga

SEQ ID NO: 672453 - RNA, 19 nt, Homo sapiens
  misc_RNA (1)...(19): siRNA sense strand
gaccucagcaccgcuaaca

SEQ ID NO: 672454 - RNA, 19 nt, Homo sapiens
  misc_RNA (1)...(19): siRNA sense strand
cuaaaguugguucucuuga

SEQ ID NO: 672455 - RNA, 19 nt, Homo sapiens
  misc_RNA (1)...(19): siRNA sense strand
gaaaaggcccaagcuaaag

SEQ ID NO: 672456 - RNA, 19 nt, Homo sapiens
  misc_RNA (1)...(19): siRNA sense strand
ccuucucucucaacaguuc

SEQ ID NO: 672457 - RNA, 19 nt, Homo sapiens
  misc_RNA (1)...(19): siRNA sense strand
gaaagaagcucaacauaaa

SEQ ID NO: 672458 - RNA, 19 nt, Homo sapiens
  misc_RNA (1)...(19): siRNA sense strand
caaagucucugacggagua

SEQ ID NO: 672459 - RNA, 19 nt, Homo sapiens
  misc_RNA (1)...(19): siRNA sense strand
caacagacaacaucaaaua

SEQ ID NO: 672460 - RNA, 19 nt, Homo sapiens
  misc_RNA (1)...(19): siRNA sense strand
ggaggugucugcaaggaua

SEQ ID NO: 672461 - RNA, 19 nt, Homo sapiens
  misc_RNA (1)...(19): siRNA sense strand
gaagaaggucgccaucaua

SEQ ID NO: 672462 - RNA, 19 nt, Homo sapiens
  misc_RNA (1)...(19): siRNA sense strand
gaccucagcugacagagaa

SEQ ID NO: 672463 - RNA, 19 nt, Homo sapiens
  misc_RNA (1)...(19): siRNA sense strand
aaaguugguucucuugaua

SEQ ID NO: 672464 - RNA, 19 nt, Homo sapiens
  misc_RNA (1)...(19): siRNA sense strand
gagaaagaagcucaacaua

SEQ ID NO: 672465 - RNA, 19 nt, Homo sapiens
  misc_RNA (1)...(19): siRNA sense strand
agaaagaagcucaacauaa

SEQ ID NO: 672466 - RNA, 19 nt, Homo sapiens
  misc_RNA (1)...(19): siRNA sense strand
gggcugagaucauuacaca

SEQ ID NO: 672467 - RNA, 19 nt, Homo sapiens
  misc_RNA (1)...(19): siRNA sense strand
gcucgaaucuccucagcuu

SEQ ID NO: 672468 - RNA, 19 nt, Homo sapiens
  misc_RNA (1)...(19): siRNA sense strand
ugaagaaugucaaauccaa

SEQ ID NO: 672469 - RNA, 19 nt, Homo sapiens
  misc_RNA (1)...(19): siRNA sense strand
gaaaggugaacaagagaaa

SEQ ID NO: 672470 - RNA, 19 nt, Homo sapiens
  misc_RNA (1)...(19): siRNA sense strand
gaagagugguaccucaaca

SEQ ID NO: 672471 - RNA, 19 nt, Homo sapiens
  misc_RNA (1)...(19): siRNA sense strand
caccugagauuaaggauca

SEQ ID NO: 672472 - RNA, 19 nt, Homo sapiens
  misc_RNA (1)...(19): siRNA sense strand
aaauguggcucucugaaga

SEQ ID NO: 672473 - RNA, 19 nt, Homo sapiens
  misc_RNA (1)...(19): siRNA sense strand
gcaaggauaguucaaguag

SEQ ID NO: 672474 - RNA, 19 nt, Homo sapiens
  misc_RNA (1)...(19): siRNA sense strand
gcaucaaccugcucgaauc

SEQ ID NO: 672475 - RNA, 19 nt, Homo sapiens
  misc_RNA (1)...(19): siRNA sense strand
cccaagaccuuccuccauu

SEQ ID NO: 672476 - RNA, 19 nt, Homo sapiens
  misc_RNA (1)...(19): siRNA sense strand
ugccagaccugaagaaugu

SEQ ID NO: 672477 - RNA, 19 nt, Homo sapiens
  misc_RNA (1)...(19): siRNA sense strand
uaaaguugguucucuugau

SEQ ID NO: 672478 - RNA, 19 nt, Homo sapiens
  misc_RNA (1)...(19): siRNA sense strand
ucacauccaccugagauua

SEQ ID NO: 672479 - RNA, 19 nt, Homo sapiens
  misc_RNA (1)...(19): siRNA sense strand
ggaugaagagggugccuuu

SEQ ID NO: 672480 - RNA, 19 nt, Homo sapiens
  misc_RNA (1)...(19): siRNA sense strand
ugaagagggugccuuugga

SEQ ID NO: 672481 - RNA, 19 nt, Homo sapiens
  misc_RNA (1)...(19): siRNA sense strand
caacaguucuaucucuucu

SEQ ID NO: 672482 - RNA, 19 nt, Homo sapiens
  misc_RNA (1)...(19): siRNA sense strand
gaagaaugucaaauccaaa

SEQ ID NO: 672483 - RNA, 19 nt, Homo sapiens
  misc_RNA (1)...(19): siRNA sense strand
ccugaaaggugaacaagag

SEQ ID NO: 672484 - RNA, 19 nt, Homo sapiens
  misc_RNA (1)...(19): siRNA sense strand
cuccucagcuugccacuuu

SEQ ID NO: 672485 - RNA, 19 nt, Homo sapiens
  misc_RNA (1)...(19): siRNA sense strand
caaaggacaaagucucuga

SEQ ID NO: 672486 - RNA, 19 nt, Homo sapiens
  misc_RNA (1)...(19): siRNA sense strand
uuuagcagcugaagaaaca

SEQ ID NO: 672487 - RNA, 19 nt, Homo sapiens
  misc_RNA (1)...(19): siRNA sense strand
agaagaaggucgccaucau

SEQ ID NO: 672488 - RNA, 19 nt, Homo sapiens
  misc_RNA (1)...(19): siRNA sense strand
ccaagaccuuccuccauuc

SEQ ID NO: 672489 - RNA, 19 nt, Homo sapiens
  misc_RNA (1)...(19): siRNA sense strand
ggucacagggcaccuauuc

SEQ ID NO: 672490 - RNA, 19 nt, Homo sapiens
  misc_RNA (1)...(19): siRNA sense strand
ucaaauaccagccuaaagg

SEQ ID NO: 672491 - RNA, 19 nt, Homo sapiens
  misc_RNA (1)...(19): siRNA sense strand
ucacagggcaccuauucaa

SEQ ID NO: 672492 - RNA, 19 nt, Homo sapiens
  misc_RNA (1)...(19): siRNA sense strand
agaggcaucugcacacuca

SEQ ID NO: 672493 - RNA, 19 nt, Homo sapiens
  misc_RNA (1)...(19): siRNA sense strand
gaaggucgccaucauacgu

SEQ ID NO: 672494 - RNA, 19 nt, Homo sapiens
  misc_RNA (1)...(19): siRNA sense strand
aaggauaguucaaguaguc

SEQ ID NO: 672495 - RNA, 19 nt, Homo sapiens
  misc_RNA (1)...(19): siRNA sense strand
gaggaggugucugcaagga

SEQ ID NO: 672496 - RNA, 19 nt, Homo sapiens
  misc_RNA (1)...(19): siRNA sense strand
acaguucuaucucuucuuc

SEQ ID NO: 672497 - RNA, 19 nt, Homo sapiens
  misc_RNA (1)...(19): siRNA sense strand
aaauagaccuaagccaugu

SEQ ID NO: 672498 - RNA, 19 nt, Homo sapiens
  misc_RNA (1)...(19): siRNA sense strand
gaucaacagacaacaucaa

SEQ ID NO: 672499 - RNA, 19 nt, Homo sapiens
  misc_RNA (1)...(19): siRNA sense strand
gcugagaucauuacacagu

SEQ ID NO: 672500 - RNA, 19 nt, Homo sapiens
  misc_RNA (1)...(19): siRNA sense strand
ggagacagagaugagaauu

SEQ ID NO: 672501 - RNA, 19 nt, Homo sapiens
  misc_RNA (1)...(19): siRNA sense strand
ccaaagagaaugggaucaa

SEQ ID NO: 672502 - RNA, 19 nt, Homo sapiens
  misc_RNA (1)...(19): siRNA sense strand
caucaaauaccagccuaaa

SEQ ID NO: 672503 - RNA, 19 nt, Homo sapiens
  misc_RNA (1)...(19): siRNA sense strand
cagacaacaucaaauacca

SEQ ID NO: 672504 - RNA, 19 nt, Homo sapiens
  misc_RNA (1)...(19): siRNA sense strand
caaagagaaugggaucaac

SEQ ID NO: 672505 - RNA, 19 nt, Homo sapiens
  misc_RNA (1)...(19): siRNA sense strand
ucaaauaccaaagagaaug

SEQ ID NO: 672506 - RNA, 19 nt, Homo sapiens
  misc_RNA (1)...(19): siRNA sense strand
gcuaaaguugguucucuug

SEQ ID NO: 672507 - RNA, 19 nt, Homo sapiens
  misc_RNA (1)...(19): siRNA sense strand
gccuuuagcagcugaagaa

SEQ ID NO: 672508 - RNA, 19 nt, Homo sapiens
  misc_RNA (1)...(19): siRNA sense strand
ucagagagcaugcuaaagc

SEQ ID NO: 672509 - RNA, 19 nt, Homo sapiens
  misc_RNA (1)...(19): siRNA sense strand
cacauccaccugagauuaa

SEQ ID NO: 672510 - RNA, 19 nt, Homo sapiens
  misc_RNA (1)...(19): siRNA sense strand
gagaagaaggucgccauca

SEQ ID NO: 672511 - RNA, 19 nt, Homo sapiens
  misc_RNA (1)...(19): siRNA sense strand
ucaccugccucagaacaga

SEQ ID NO: 672512 - RNA, 19 nt, Homo sapiens
  misc_RNA (1)...(19): siRNA sense strand
cccaucaccugccucagaa

SEQ ID NO: 672513 - RNA, 19 nt, Homo sapiens
  misc_RNA (1)...(19): siRNA sense strand
ugaagaaacagcuaaucug

SEQ ID NO: 672514 - RNA, 19 nt, Homo sapiens
  misc_RNA (1)...(19): siRNA sense strand
caaggauaguucaaguagu

SEQ ID NO: 672515 - RNA, 19 nt, Homo sapiens
  misc_RNA (1)...(19): siRNA sense strand
ucucaacaguucuaucucu

SEQ ID NO: 672516 - RNA, 19 nt, Homo sapiens
  misc_RNA (1)...(19): siRNA sense strand
agacagagaugagaauucc

SEQ ID NO: 672517 - RNA, 19 nt, Homo sapiens
  misc_RNA (1)...(19): siRNA sense strand
ccucagcaccgcuaacaga

SEQ ID NO: 672518 - RNA, 19 nt, Homo sapiens
  misc_RNA (1)...(19): siRNA sense strand
gaacggaaagacgaagcaa

SEQ ID NO: 672519 - RNA, 19 nt, Homo sapiens
  misc_RNA (1)...(19): siRNA sense strand
caaauguggcucucugaag

SEQ ID NO: 672520 - RNA, 19 nt, Homo sapiens
  misc_RNA (1)...(19): siRNA sense strand
gagacagagaugagaauuc

SEQ ID NO: 672521 - RNA, 19 nt, Homo sapiens
  misc_RNA (1)...(19): siRNA sense strand
ggcuguagcaguccugaaa

SEQ ID NO: 672522 - RNA, 19 nt, Homo sapiens
  misc_RNA (1)...(19): siRNA sense strand
ccaaauguggcucucugaa

SEQ ID NO: 672523 - RNA, 19 nt, Homo sapiens
  misc_RNA (1)...(19): siRNA sense strand
ccgaagcgccaauggauuc

SEQ ID NO: 672524 - RNA, 19 nt, Homo sapiens
  misc_RNA (1)...(19): siRNA sense strand
aagaagcucaacauaaaga

SEQ ID NO: 672525 - RNA, 19 nt, Homo sapiens
  misc_RNA (1)...(19): siRNA sense strand
cuucagagagcaugcuaaa

SEQ ID NO: 672526 - RNA, 19 nt, Homo sapiens
  misc_RNA (1)...(19): siRNA sense strand
caaauaccaaagagaaugg

SEQ ID NO: 672527 - RNA, 19 nt, Homo sapiens
  misc_RNA (1)...(19): siRNA sense strand
ggugguaaugucaagauug

SEQ ID NO: 672528 - RNA, 19 nt, Homo sapiens
  misc_RNA (1)...(19): siRNA sense strand
guaaccaagagcccagaaa

SEQ ID NO: 672529 - RNA, 19 nt, Homo sapiens
  misc_RNA (1)...(19): siRNA sense strand
agagaaagaagcucaacau

SEQ ID NO: 672530 - RNA, 19 nt, Homo sapiens
  misc_RNA (1)...(19): siRNA sense strand
uaaacaggcaaaggacaaa

SEQ ID NO: 672531 - RNA, 19 nt, Homo sapiens
  misc_RNA (1)...(19): siRNA sense strand
ccacuuuggcugaggaugu

SEQ ID NO: 672532 - RNA, 19 nt, Homo sapiens
  misc_RNA (1)...(19): siRNA sense strand
gggaagagugguaccucaa

SEQ ID NO: 672533 - RNA, 19 nt, Homo sapiens
  misc_RNA (1)...(19): siRNA sense strand
cugcaaggauaguucaagu

SEQ ID NO: 672534 - RNA, 19 nt, Homo sapiens
  misc_RNA (1)...(19): siRNA sense strand
gauaaugcucaucauguac

SEQ ID NO: 672535 - RNA, 19 nt, Homo sapiens
  misc_RNA (1)...(19): siRNA sense strand
ccaucuuggugccgaguga

SEQ ID NO: 672536 - RNA, 19 nt, Homo sapiens
  misc_RNA (1)...(19): siRNA sense strand
ugaaaggugaacaagagaa

SEQ ID NO: 672537 - RNA, 19 nt, Homo sapiens
  misc_RNA (1)...(19): siRNA sense strand
acagggcaccuauucaaau

SEQ ID NO: 672538 - RNA, 19 nt, Homo sapiens
  misc_RNA (1)...(19): siRNA sense strand
uuaaacaggcaaaggacaa

SEQ ID NO: 672539 - RNA, 19 nt, Homo sapiens
  misc_RNA (1)...(19): siRNA sense strand
agaaaaggcccaagcuaaa

SEQ ID NO: 672540 - RNA, 19 nt, Homo sapiens
  misc_RNA (1)...(19): siRNA sense strand
ucacugcugcacucgcuaa

SEQ ID NO: 672541 - RNA, 19 nt, Homo sapiens
  misc_RNA (1)...(19): siRNA sense strand
cacagggcaccuauucaaa

SEQ ID NO: 672542 - RNA, 19 nt, Homo sapiens
  misc_RNA (1)...(19): siRNA sense strand
cgacgacucagcaaugucu

SEQ ID NO: 672543 - RNA, 19 nt, Homo sapiens
  misc_RNA (1)...(19): siRNA sense strand
gaggugguaaugucaagau

SEQ ID NO: 672544 - RNA, 19 nt, Homo sapiens
  misc_RNA (1)...(19): siRNA sense strand
guggcucucugaagaacau

SEQ ID NO: 672545 - RNA, 19 nt, Homo sapiens
  misc_RNA (1)...(19): siRNA sense strand
ggaagagugguaccucaac

SEQ ID NO: 672546 - RNA, 19 nt, Homo sapiens
  misc_RNA (1)...(19): siRNA sense strand
acagagaugagaauuccuu

SEQ ID NO: 672547 - RNA, 19 nt, Homo sapiens
  misc_RNA (1)...(19): siRNA sense strand
uauuuaaacaggcaaagga

SEQ ID NO: 672548 - RNA, 19 nt, Homo sapiens
  misc_RNA (1)...(19): siRNA sense strand
aagcuaaaguugguucucu

SEQ ID NO: 672549 - RNA, 19 nt, Homo sapiens
  misc_RNA (1)...(19): siRNA sense strand
gaagcaaaggcaccucacu

SEQ ID NO: 672550 - RNA, 19 nt, Homo sapiens
  misc_RNA (1)...(19): siRNA sense strand
aagaaaaggcccaagcuaa

SEQ ID NO: 672551 - RNA, 19 nt, Homo sapiens
  misc_RNA (1)...(19): siRNA sense strand
ccugaagaaugucaaaucc

SEQ ID NO: 672552 - RNA, 19 nt, Homo sapiens
  misc_RNA (1)...(19): siRNA sense strand
aaggugaacaagagaaaga

SEQ ID NO: 672553 - RNA, 19 nt, Homo sapiens
  misc_RNA (1)...(19): siRNA sense strand
gaccucagcaccgcuaaca

SEQ ID NO: 672554 - RNA, 19 nt, Homo sapiens
  misc_RNA (1)...(19): siRNA sense strand
cuaaaguugguucucuuga

SEQ ID NO: 672555 - RNA, 19 nt, Homo sapiens
  misc_RNA (1)...(19): siRNA sense strand
gaaaaggcccaagcuaaag

SEQ ID NO: 672556 - RNA, 19 nt, Homo sapiens
  misc_RNA (1)...(19): siRNA sense strand
ccuucucucucaacaguuc

SEQ ID NO: 672557 - RNA, 19 nt, Homo sapiens
  misc_RNA (1)...(19): siRNA sense strand
gaacaaagagugcugauuu

SEQ ID NO: 672558 - RNA, 19 nt, Homo sapiens
  misc_RNA (1)...(19): siRNA sense strand
caaauuccaucuuaaccua

SEQ ID NO: 672559 - RNA, 19 nt, Homo sapiens
  misc_RNA (1)...(19): siRNA sense strand
caaauugggcucuuauuaa

SEQ ID NO: 672560 - RNA, 19 nt, Homo sapiens
  misc_RNA (1)...(19): siRNA sense strand
gaacaacaguuaucagacu

SEQ ID NO: 672561 - RNA, 19 nt, Homo sapiens
  misc_RNA (1)...(19): siRNA sense strand
uaaacaaauugggcucuua

SEQ ID NO: 672562 - RNA, 19 nt, Homo sapiens
  misc_RNA (1)...(19): siRNA sense strand
aacaaagagugcugauuua

SEQ ID NO: 672563 - RNA, 19 nt, Homo sapiens
  misc_RNA (1)...(19): siRNA sense strand
uggcucaaauuccaucuua

SEQ ID NO: 672564 - RNA, 19 nt, Homo sapiens
  misc_RNA (1)...(19): siRNA sense strand
cgaacagucugaauacgaa

SEQ ID NO: 672565 - RNA, 19 nt, Homo sapiens
  misc_RNA (1)...(19): siRNA sense strand
acaaauugggcucuuauua

SEQ ID NO: 672566 - RNA, 19 nt, Homo sapiens
  misc_RNA (1)...(19): siRNA sense strand
aaagagugcugauuuacga

SEQ ID NO: 672567 - RNA, 19 nt, Homo sapiens
  misc_RNA (1)...(19): siRNA sense strand
ggagguaaaucugcagaau

SEQ ID NO: 672568 - RNA, 19 nt, Homo sapiens
  misc_RNA (1)...(19): siRNA sense strand
gacaacggaacaacaguua

SEQ ID NO: 672569 - RNA, 19 nt, Homo sapiens
  misc_RNA (1)...(19): siRNA sense strand
ugaagacgcucaauuuggu

SEQ ID NO: 672570 - RNA, 19 nt, Homo sapiens
  misc_RNA (1)...(19): siRNA sense strand
gauguuggcucaaauucca

SEQ ID NO: 672571 - RNA, 19 nt, Homo sapiens
  misc_RNA (1)...(19): siRNA sense strand
ggagguggccgacaugaau

SEQ ID NO: 672572 - RNA, 19 nt, Homo sapiens
  misc_RNA (1)...(19): siRNA sense strand
gggcaaaccugagcucaca

SEQ ID NO: 672573 - RNA, 19 nt, Homo sapiens
  misc_RNA (1)...(19): siRNA sense strand
agaacgcgcugguguccua

SEQ ID NO: 672574 - RNA, 19 nt, Homo sapiens
  misc_RNA (1)...(19): siRNA sense strand
gcagauguuggcucaaauu

SEQ ID NO: 672575 - RNA, 19 nt, Homo sapiens
  misc_RNA (1)...(19): siRNA sense strand
gaggauagauugggaaagc

SEQ ID NO: 672576 - RNA, 19 nt, Homo sapiens
  misc_RNA (1)...(19): siRNA sense strand
ugagggacauuaacgacaa

SEQ ID NO: 672577 - RNA, 19 nt, Homo sapiens
  misc_RNA (1)...(19): siRNA sense strand
uguccaccuucaagaauua

SEQ ID NO: 672578 - RNA, 19 nt, Homo sapiens
  misc_RNA (1)...(19): siRNA sense strand
aaagaaauccuuggacaga

SEQ ID NO: 672579 - RNA, 19 nt, Homo sapiens
  misc_RNA (1)...(19): siRNA sense strand
uaacgucccugagauagca

SEQ ID NO: 672580 - RNA, 19 nt, Homo sapiens
  misc_RNA (1)...(19): siRNA sense strand
gaaauacgggagaaauagu

SEQ ID NO: 672581 - RNA, 19 nt, Homo sapiens
  misc_RNA (1)...(19): siRNA sense strand
uagcauagaucgaaauacg

SEQ ID NO: 672582 - RNA, 19 nt, Homo sapiens
  misc_RNA (1)...(19): siRNA sense strand
agaaauccuuggacagaga

SEQ ID NO: 672583 - RNA, 19 nt, Homo sapiens
  misc_RNA (1)...(19): siRNA sense strand
gaagacgcucaauuuggua

SEQ ID NO: 672584 - RNA, 19 nt, Homo sapiens
  misc_RNA (1)...(19): siRNA sense strand
caucuuaaccuauaaacuc

SEQ ID NO: 672585 - RNA, 19 nt, Homo sapiens
  misc_RNA (1)...(19): siRNA sense strand
ugauaaugcucccacuuuc

SEQ ID NO: 672586 - RNA, 19 nt, Homo sapiens
  misc_RNA (1)...(19): siRNA sense strand
caacggaacaacaguuauc

SEQ ID NO: 672587 - RNA, 19 nt, Homo sapiens
  misc_RNA (1)...(19): siRNA sense strand
cgacaugaaugacaaugcu

SEQ ID NO: 672588 - RNA, 19 nt, Homo sapiens
  misc_RNA (1)...(19): siRNA sense strand
ucgaaauacgggagaaaua

SEQ ID NO: 672589 - RNA, 19 nt, Homo sapiens
  misc_RNA (1)...(19): siRNA sense strand
agauagcacugacuuccuu

SEQ ID NO: 672590 - RNA, 19 nt, Homo sapiens
  misc_RNA (1)...(19): siRNA sense strand
ugauaacgucccugagaua

SEQ ID NO: 672591 - RNA, 19 nt, Homo sapiens
  misc_RNA (1)...(19): siRNA sense strand
cgaaauacgggagaaauag

SEQ ID NO: 672592 - RNA, 19 nt, Homo sapiens
  misc_RNA (1)...(19): siRNA sense strand
gcacugacuuccuuauccu

SEQ ID NO: 672593 - RNA, 19 nt, Homo sapiens
  misc_RNA (1)...(19): siRNA sense strand
ggaacaaagagugcugauu

SEQ ID NO: 672594 - RNA, 19 nt, Homo sapiens
  misc_RNA (1)...(19): siRNA sense strand
gagguaaaucugcagaaug

SEQ ID NO: 672595 - RNA, 19 nt, Homo sapiens
  misc_RNA (1)...(19): siRNA sense strand
uugcagccaugguuauuga

SEQ ID NO: 672596 - RNA, 19 nt, Homo sapiens
  misc_RNA (1)...(19): siRNA sense strand
aaacaaauugggcucuuau

SEQ ID NO: 672597 - RNA, 19 nt, Homo sapiens
  misc_RNA (1)...(19): siRNA sense strand
ggaagcuccugcacacaac

SEQ ID NO: 672598 - RNA, 19 nt, Homo sapiens
  misc_RNA (1)...(19): siRNA sense strand
guacugucaucgcccuaau

SEQ ID NO: 672599 - RNA, 19 nt, Homo sapiens
  misc_RNA (1)...(19): siRNA sense strand
gcgggucauugcaccguuu

SEQ ID NO: 672600 - RNA, 19 nt, Homo sapiens
  misc_RNA (1)...(19): siRNA sense strand
agguaaaucugcagaaugg

SEQ ID NO: 672601 - RNA, 19 nt, Homo sapiens
  misc_RNA (1)...(19): siRNA sense strand
gauagcacugacuuccuua

SEQ ID NO: 672602 - RNA, 19 nt, Homo sapiens
  misc_RNA (1)...(19): siRNA sense strand
gcagacaacggaacaacag

SEQ ID NO: 672603 - RNA, 19 nt, Homo sapiens
  misc_RNA (1)...(19): siRNA sense strand
ucaauuugguacugucauc

SEQ ID NO: 672604 - RNA, 19 nt, Homo sapiens
  misc_RNA (1)...(19): siRNA sense strand
gauaacgucccugagauag

SEQ ID NO: 672605 - RNA, 19 nt, Homo sapiens
  misc_RNA (1)...(19): siRNA sense strand
guguccaccuucaagaauu

SEQ ID NO: 672606 - RNA, 19 nt, Homo sapiens
  misc_RNA (1)...(19): siRNA sense strand
acugucaucgcccuaauua

SEQ ID NO: 672607 - RNA, 19 nt, Homo sapiens
  misc_RNA (1)...(19): siRNA sense strand
ugcuggaugugaaugauaa

SEQ ID NO: 672608 - RNA, 19 nt, Homo sapiens
  misc_RNA (1)...(19): siRNA sense strand
gggcaauuucauauucuuu

SEQ ID NO: 672609 - RNA, 19 nt, Homo sapiens
  misc_RNA (1)...(19): siRNA sense strand
cggaacaacaguuaucaga

SEQ ID NO: 672610 - RNA, 19 nt, Homo sapiens
  misc_RNA (1)...(19): siRNA sense strand
ggaugugaaugauaaugcu

SEQ ID NO: 672611 - RNA, 19 nt, Homo sapiens
  misc_RNA (1)...(19): siRNA sense strand
ggauagauugggaaagcaa

SEQ ID NO: 672612 - RNA, 19 nt, Homo sapiens
  misc_RNA (1)...(19): siRNA sense strand
gcucaaauuccaucuuaac

SEQ ID NO: 672613 - RNA, 19 nt, Homo sapiens
  misc_RNA (1)...(19): siRNA sense strand
ucaagaauuacuacucguu

SEQ ID NO: 672614 - RNA, 19 nt, Homo sapiens
  misc_RNA (1)...(19): siRNA sense strand
gugaagacgcucaauuugg

SEQ ID NO: 672615 - RNA, 19 nt, Homo sapiens
  misc_RNA (1)...(19): siRNA sense strand
aaugauaacgucccugaga

SEQ ID NO: 672616 - RNA, 19 nt, Homo sapiens
  misc_RNA (1)...(19): siRNA sense strand
gaauacuucgggcuagaug

SEQ ID NO: 672617 - RNA, 19 nt, Homo sapiens
  misc_RNA (1)...(19): siRNA sense strand
gacaggccgcugcagguuu

SEQ ID NO: 672618 - RNA, 19 nt, Homo sapiens
  misc_RNA (1)...(19): siRNA sense strand
gaucgaaauacgggagaaa

SEQ ID NO: 672619 - RNA, 19 nt, Homo sapiens
  misc_RNA (1)...(19): siRNA sense strand
ggcucaaauuccaucuuaa

SEQ ID NO: 672620 - RNA, 19 nt, Homo sapiens
  misc_RNA (1)...(19): siRNA sense strand
acgugaagacgcucaauuu

SEQ ID NO: 672621 - RNA, 19 nt, Homo sapiens
  misc_RNA (1)...(19): siRNA sense strand
gggguaauuuggauuuuga

SEQ ID NO: 672622 - RNA, 19 nt, Homo sapiens
  misc_RNA (1)...(19): siRNA sense strand
augcagauguuggcucaaa

SEQ ID NO: 672623 - RNA, 19 nt, Homo sapiens
  misc_RNA (1)...(19): siRNA sense strand
cgugaagacgcucaauuug

SEQ ID NO: 672624 - RNA, 19 nt, Homo sapiens
  misc_RNA (1)...(19): siRNA sense strand
ggcuagaugugaaaauaaa

SEQ ID NO: 672625 - RNA, 19 nt, Homo sapiens
  misc_RNA (1)...(19): siRNA sense strand
gccuaugaguuggugguaa

SEQ ID NO: 672626 - RNA, 19 nt, Homo sapiens
  misc_RNA (1)...(19): siRNA sense strand
gugcuggaugugaaugaua

SEQ ID NO: 672627 - RNA, 19 nt, Homo sapiens
  misc_RNA (1)...(19): siRNA sense strand
gcauuuuguuugugaauuc

SEQ ID NO: 672628 - RNA, 19 nt, Homo sapiens
  misc_RNA (1)...(19): siRNA sense strand
agacaacggaacaacaguu

SEQ ID NO: 672629 - RNA, 19 nt, Homo sapiens
  misc_RNA (1)...(19): siRNA sense strand
uggccgacaugaaugacaa

SEQ ID NO: 672630 - RNA, 19 nt, Homo sapiens
  misc_RNA (1)...(19): siRNA sense strand
caggauggccuccaaagac

SEQ ID NO: 672631 - RNA, 19 nt, Homo sapiens
  misc_RNA (1)...(19): siRNA sense strand
ccuaugaguuggugguaac

SEQ ID NO: 672632 - RNA, 19 nt, Homo sapiens
  misc_RNA (1)...(19): siRNA sense strand
augauaaugcucccacuuu

SEQ ID NO: 672633 - RNA, 19 nt, Homo sapiens
  misc_RNA (1)...(19): siRNA sense strand
acagugaugacaauaaaca

SEQ ID NO: 672634 - RNA, 19 nt, Homo sapiens
  misc_RNA (1)...(19): siRNA sense strand
gaaaauaaacagugaugac

SEQ ID NO: 672635 - RNA, 19 nt, Homo sapiens
  misc_RNA (1)...(19): siRNA sense strand
ucaggauggccuccaaaga

SEQ ID NO: 672636 - RNA, 19 nt, Homo sapiens
  misc_RNA (1)...(19): siRNA sense strand
caaagagugcugauuuacg

SEQ ID NO: 672637 - RNA, 19 nt, Homo sapiens
  misc_RNA (1)...(19): siRNA sense strand
cgugucggccuaugaguug

SEQ ID NO: 672638 - RNA, 19 nt, Homo sapiens
  misc_RNA (1)...(19): siRNA sense strand
ccaccuucaagaauuacua

SEQ ID NO: 672639 - RNA, 19 nt, Homo sapiens
  misc_RNA (1)...(19): siRNA sense strand
ccaacgggcaggugaacug

SEQ ID NO: 672640 - RNA, 19 nt, Homo sapiens
  misc_RNA (1)...(19): siRNA sense strand
ugaccacuuuagcauagau

SEQ ID NO: 672641 - RNA, 19 nt, Homo sapiens
  misc_RNA (1)...(19): siRNA sense strand
uauugaccacuuuagcaua

SEQ ID NO: 672642 - RNA, 19 nt, Homo sapiens
  misc_RNA (1)...(19): siRNA sense strand
guuauugaccacuuuagca

SEQ ID NO: 672643 - RNA, 19 nt, Homo sapiens
  misc_RNA (1)...(19): siRNA sense strand
gauaaugcucccacuuucg

SEQ ID NO: 672644 - RNA, 19 nt, Homo sapiens
  misc_RNA (1)...(19): siRNA sense strand
acucaguucuagcgaauac

SEQ ID NO: 672645 - RNA, 19 nt, Homo sapiens
  misc_RNA (1)...(19): siRNA sense strand
gagguggccgacaugaaug

SEQ ID NO: 672646 - RNA, 19 nt, Homo sapiens
  misc_RNA (1)...(19): siRNA sense strand
gagagcgugucggccuaug

SEQ ID NO: 672647 - RNA, 19 nt, Homo sapiens
  misc_RNA (1)...(19): siRNA sense strand
guggaggugagggacauua

SEQ ID NO: 672648 - RNA, 19 nt, Homo sapiens
  misc_RNA (1)...(19): siRNA sense strand
auaaacaaauugggcucuu

SEQ ID NO: 672649 - RNA, 19 nt, Homo sapiens
  misc_RNA (1)...(19): siRNA sense strand
cgggcuagaugugaaaaua

SEQ ID NO: 672650 - RNA, 19 nt, Homo sapiens
  misc_RNA (1)...(19): siRNA sense strand
gaacaaagagugcugauuu

SEQ ID NO: 672651 - RNA, 19 nt, Homo sapiens
  misc_RNA (1)...(19): siRNA sense strand
caaauuccaucuuaaccua

SEQ ID NO: 672652 - RNA, 19 nt, Homo sapiens
  misc_RNA (1)...(19): siRNA sense strand
caaauugggcucuuauuaa

SEQ ID NO: 672653 - RNA, 19 nt, Homo sapiens
  misc_RNA (1)...(19): siRNA sense strand
gaacaacaguuaucagacu

SEQ ID NO: 672654 - RNA, 19 nt, Homo sapiens
  misc_RNA (1)...(19): siRNA sense strand
uaaacaaauugggcucuua

SEQ ID NO: 672655 - RNA, 19 nt, Homo sapiens
  misc_RNA (1)...(19): siRNA sense strand
aacaaagagugcugauuua

SEQ ID NO: 672656 - RNA, 19 nt, Homo sapiens
  misc_RNA (1)...(19): siRNA sense strand
uggcucaaauuccaucuua

SEQ ID NO: 672657 - RNA, 19 nt, Homo sapiens
  misc_RNA (1)...(19): siRNA sense strand
cgaacagucugaauacgaa

SEQ ID NO: 672658 - RNA, 19 nt, Homo sapiens
  misc_RNA (1)...(19): siRNA sense strand
acaaauugggcucuuauua

SEQ ID NO: 672659 - RNA, 19 nt, Homo sapiens
  misc_RNA (1)...(19): siRNA sense strand
aaagagugcugauuuacga

SEQ ID NO: 672660 - RNA, 19 nt, Homo sapiens
  misc_RNA (1)...(19): siRNA sense strand
ggagguaaaucugcagaau

SEQ ID NO: 672661 - RNA, 19 nt, Homo sapiens
  misc_RNA (1)...(19): siRNA sense strand
gacaacggaacaacaguua

SEQ ID NO: 672662 - RNA, 19 nt, Homo sapiens
  misc_RNA (1)...(19): siRNA sense strand
ugaagacgcucaauuuggu

SEQ ID NO: 672663 - RNA, 19 nt, Homo sapiens
  misc_RNA (1)...(19): siRNA sense strand
gauguuggcucaaauucca

SEQ ID NO: 672664 - RNA, 19 nt, Homo sapiens
  misc_RNA (1)...(19): siRNA sense strand
ggagguggccgacaugaau

SEQ ID NO: 672665 - RNA, 19 nt, Homo sapiens
  misc_RNA (1)...(19): siRNA sense strand
gggcaaaccugagcucaca

SEQ ID NO: 672666 - RNA, 19 nt, Homo sapiens
  misc_RNA (1)...(19): siRNA sense strand
agaacgcgcugguguccua

SEQ ID NO: 672667 - RNA, 19 nt, Homo sapiens
  misc_RNA (1)...(19): siRNA sense strand
gcagauguuggcucaaauu

SEQ ID NO: 672668 - RNA, 19 nt, Homo sapiens
  misc_RNA (1)...(19): siRNA sense strand
gaggauagauugggaaagc

SEQ ID NO: 672669 - RNA, 19 nt, Homo sapiens
  misc_RNA (1)...(19): siRNA sense strand
ugagggacauuaacgacaa

SEQ ID NO: 672670 - RNA, 19 nt, Homo sapiens
  misc_RNA (1)...(19): siRNA sense strand
uguccaccuucaagaauua

SEQ ID NO: 672671 - RNA, 19 nt, Homo sapiens
  misc_RNA (1)...(19): siRNA sense strand
aaagaaauccuuggacaga

SEQ ID NO: 672672 - RNA, 19 nt, Homo sapiens
  misc_RNA (1)...(19): siRNA sense strand
uaacgucccugagauagca

SEQ ID NO: 672673 - RNA, 19 nt, Homo sapiens
  misc_RNA (1)...(19): siRNA sense strand
gaaauacgggagaaauagu

SEQ ID NO: 672674 - RNA, 19 nt, Homo sapiens
  misc_RNA (1)...(19): siRNA sense strand
uagcauagaucgaaauacg

SEQ ID NO: 672675 - RNA, 19 nt, Homo sapiens
  misc_RNA (1)...(19): siRNA sense strand
agaaauccuuggacagaga

SEQ ID NO: 672676 - RNA, 19 nt, Homo sapiens
  misc_RNA (1)...(19): siRNA sense strand
gaagacgcucaauuuggua

SEQ ID NO: 672677 - RNA, 19 nt, Homo sapiens
  misc_RNA (1)...(19): siRNA sense strand
caucuuaaccuauaaacuc

SEQ ID NO: 672678 - RNA, 19 nt, Homo sapiens
  misc_RNA (1)...(19): siRNA sense strand
ugauaaugcucccacuuuc

SEQ ID NO: 672679 - RNA, 19 nt, Homo sapiens
  misc_RNA (1)...(19): siRNA sense strand
caacggaacaacaguuauc

SEQ ID NO: 672680 - RNA, 19 nt, Homo sapiens
  misc_RNA (1)...(19): siRNA sense strand
cgacaugaaugacaaugcu

SEQ ID NO: 672681 - RNA, 19 nt, Homo sapiens
  misc_RNA (1)...(19): siRNA sense strand
ucgaaauacgggagaaaua

SEQ ID NO: 672682 - RNA, 19 nt, Homo sapiens
  misc_RNA (1)...(19): siRNA sense strand
agauagcacugacuuccuu

SEQ ID NO: 672683 - RNA, 19 nt, Homo sapiens
  misc_RNA (1)...(19): siRNA sense strand
ugauaacgucccugagaua

SEQ ID NO: 672684 - RNA, 19 nt, Homo sapiens
  misc_RNA (1)...(19): siRNA sense strand
cgaaauacgggagaaauag

SEQ ID NO: 672685 - RNA, 19 nt, Homo sapiens
  misc_RNA (1)...(19): siRNA sense strand
gcacugacuuccuuauccu

SEQ ID NO: 672686 - RNA, 19 nt, Homo sapiens
  misc_RNA (1)...(19): siRNA sense strand
ggaacaaagagugcugauu

SEQ ID NO: 672687 - RNA, 19 nt, Homo sapiens
  misc_RNA (1)...(19): siRNA sense strand
gagguaaaucugcagaaug

SEQ ID NO: 672688 - RNA, 19 nt, Homo sapiens
  misc_RNA (1)...(19): siRNA sense strand
uugcagccaugguuauuga

SEQ ID NO: 672689 - RNA, 19 nt, Homo sapiens
  misc_RNA (1)...(19): siRNA sense strand
aaacaaauugggcucuuau

SEQ ID NO: 672690 - RNA, 19 nt, Homo sapiens
  misc_RNA (1)...(19): siRNA sense strand
ggaagcuccugcacacaac

SEQ ID NO: 672691 - RNA, 19 nt, Homo sapiens
  misc_RNA (1)...(19): siRNA sense strand
guacugucaucgcccuaau

SEQ ID NO: 672692 - RNA, 19 nt, Homo sapiens
  misc_RNA (1)...(19): siRNA sense strand
gcgggucauugcaccguuu

SEQ ID NO: 672693 - RNA, 19 nt, Homo sapiens
  misc_RNA (1)...(19): siRNA sense strand
agguaaaucugcagaaugg

SEQ ID NO: 672694 - RNA, 19 nt, Homo sapiens
  misc_RNA (1)...(19): siRNA sense strand
gauagcacugacuuccuua

SEQ ID NO: 672695 - RNA, 19 nt, Homo sapiens
  misc_RNA (1)...(19): siRNA sense strand
gcagacaacggaacaacag

SEQ ID NO: 672696 - RNA, 19 nt, Homo sapiens
  misc_RNA (1)...(19): siRNA sense strand
ucaauuugguacugucauc

SEQ ID NO: 672697 - RNA, 19 nt, Homo sapiens
  misc_RNA (1)...(19): siRNA sense strand
gauaacgucccugagauag

SEQ ID NO: 672698 - RNA, 19 nt, Homo sapiens
  misc_RNA (1)...(19): siRNA sense strand
guguccaccuucaagaauu

SEQ ID NO: 672699 - RNA, 19 nt, Homo sapiens
  misc_RNA (1)...(19): siRNA sense strand
acugucaucgcccuaauua

SEQ ID NO: 672700 - RNA, 19 nt, Homo sapiens
  misc_RNA (1)...(19): siRNA sense strand
ugcuggaugugaaugauaa

SEQ ID NO: 672701 - RNA, 19 nt, Homo sapiens
  misc_RNA (1)...(19): siRNA sense strand
gggcaauuucauauucuuu

SEQ ID NO: 672702 - RNA, 19 nt, Homo sapiens
  misc_RNA (1)...(19): siRNA sense strand
cggaacaacaguuaucaga

SEQ ID NO: 672703 - RNA, 19 nt, Homo sapiens
  misc_RNA (1)...(19): siRNA sense strand
ggaugugaaugauaaugcu

SEQ ID NO: 672704 - RNA, 19 nt, Homo sapiens
  misc_RNA (1)...(19): siRNA sense strand
ggauagauugggaaagcaa

SEQ ID NO: 672705 - RNA, 19 nt, Homo sapiens
  misc_RNA (1)...(19): siRNA sense strand
gcucaaauuccaucuuaac

SEQ ID NO: 672706 - RNA, 19 nt, Homo sapiens
  misc_RNA (1)...(19): siRNA sense strand
ucaagaauuacuacucguu

SEQ ID NO: 672707 - RNA, 19 nt, Homo sapiens
  misc_RNA (1)...(19): siRNA sense strand
gugaagacgcucaauuugg

SEQ ID NO: 672708 - RNA, 19 nt, Homo sapiens
  misc_RNA (1)...(19): siRNA sense strand
aaugauaacgucccugaga

SEQ ID NO: 672709 - RNA, 19 nt, Homo sapiens
  misc_RNA (1)...(19): siRNA sense strand
gaauacuucgggcuagaug

SEQ ID NO: 672710 - RNA, 19 nt, Homo sapiens
  misc_RNA (1)...(19): siRNA sense strand
gacaggccgcugcagguuu

SEQ ID NO: 672711 - RNA, 19 nt, Homo sapiens
  misc_RNA (1)...(19): siRNA sense strand
gaucgaaauacgggagaaa

SEQ ID NO: 672712 - RNA, 19 nt, Homo sapiens
  misc_RNA (1)...(19): siRNA sense strand
ggcucaaauuccaucuuaa

SEQ ID NO: 672713 - RNA, 19 nt, Homo sapiens
  misc_RNA (1)...(19): siRNA sense strand
acgugaagacgcucaauuu

SEQ ID NO: 672714 - RNA, 19 nt, Homo sapiens
  misc_RNA (1)...(19): siRNA sense strand
gggguaauuuggauuuuga

SEQ ID NO: 672715 - RNA, 19 nt, Homo sapiens
  misc_RNA (1)...(19): siRNA sense strand
augcagauguuggcucaaa

SEQ ID NO: 672716 - RNA, 19 nt, Homo sapiens
  misc_RNA (1)...(19): siRNA sense strand
cgugaagacgcucaauuug

SEQ ID NO: 672717 - RNA, 19 nt, Homo sapiens
  misc_RNA (1)...(19): siRNA sense strand
ggcuagaugugaaaauaaa

SEQ ID NO: 672718 - RNA, 19 nt, Homo sapiens
  misc_RNA (1)...(19): siRNA sense strand
gccuaugaguuggugguaa

SEQ ID NO: 672719 - RNA, 19 nt, Homo sapiens
  misc_RNA (1)...(19): siRNA sense strand
gugcuggaugugaaugaua

SEQ ID NO: 672720 - RNA, 19 nt, Homo sapiens
  misc_RNA (1)...(19): siRNA sense strand
gcauuuuguuugugaauuc

SEQ ID NO: 672721 - RNA, 19 nt, Homo sapiens
  misc_RNA (1)...(19): siRNA sense strand
agacaacggaacaacaguu

SEQ ID NO: 672722 - RNA, 19 nt, Homo sapiens
  misc_RNA (1)...(19): siRNA sense strand
uggccgacaugaaugacaa

SEQ ID NO: 672723 - RNA, 19 nt, Homo sapiens
  misc_RNA (1)...(19): siRNA sense strand
caggauggccuccaaagac

SEQ ID NO: 672724 - RNA, 19 nt, Homo sapiens
  misc_RNA (1)...(19): siRNA sense strand
ccuaugaguuggugguaac

SEQ ID NO: 672725 - RNA, 19 nt, Homo sapiens
  misc_RNA (1)...(19): siRNA sense strand
augauaaugcucccacuuu

SEQ ID NO: 672726 - RNA, 19 nt, Homo sapiens
  misc_RNA (1)...(19): siRNA sense strand
acagugaugacaauaaaca

SEQ ID NO: 672727 - RNA, 19 nt, Homo sapiens
  misc_RNA (1)...(19): siRNA sense strand
gaaaauaaacagugaugac

SEQ ID NO: 672728 - RNA, 19 nt, Homo sapiens
  misc_RNA (1)...(19): siRNA sense strand
ucaggauggccuccaaaga

SEQ ID NO: 672729 - RNA, 19 nt, Homo sapiens
  misc_RNA (1)...(19): siRNA sense strand
caaagagugcugauuuacg

SEQ ID NO: 672730 - RNA, 19 nt, Homo sapiens
  misc_RNA (1)...(19): siRNA sense strand
cgugucggccuaugaguug

SEQ ID NO: 672731 - RNA, 19 nt, Homo sapiens
  misc_RNA (1)...(19): siRNA sense strand
ccaccuucaagaauuacua

SEQ ID NO: 672732 - RNA, 19 nt, Homo sapiens
  misc_RNA (1)...(19): siRNA sense strand
ccaacgggcaggugaacug

SEQ ID NO: 672733 - RNA, 19 nt, Homo sapiens
  misc_RNA (1)...(19): siRNA sense strand
ugaccacuuuagcauagau

SEQ ID NO: 672734 - RNA, 19 nt, Homo sapiens
  misc_RNA (1)...(19): siRNA sense strand
uauugaccacuuuagcaua

SEQ ID NO: 672735 - RNA, 19 nt, Homo sapiens
  misc_RNA (1)...(19): siRNA sense strand
guuauugaccacuuuagca

SEQ ID NO: 672736 - RNA, 19 nt, Homo sapiens
  misc_RNA (1)...(19): siRNA sense strand
gauaaugcucccacuuucg

SEQ ID NO: 672737 - RNA, 19 nt, Homo sapiens
  misc_RNA (1)...(19): siRNA sense strand
acucaguucuagcgaauac

SEQ ID NO: 672738 - RNA, 19 nt, Homo sapiens
  misc_RNA (1)...(19): siRNA sense strand
gagguggccgacaugaaug

SEQ ID NO: 672739 - RNA, 19 nt, Homo sapiens
  misc_RNA (1)...(19): siRNA sense strand
gagagcgugucggccuaug

SEQ ID NO: 672740 - RNA, 19 nt, Homo sapiens
  misc_RNA (1)...(19): siRNA sense strand
guggaggugagggacauua

SEQ ID NO: 672741 - RNA, 19 nt, Homo sapiens
  misc_RNA (1)...(19): siRNA sense strand
auaaacaaauugggcucuu

SEQ ID NO: 672742 - RNA, 19 nt, Homo sapiens
  misc_RNA (1)...(19): siRNA sense strand
cgggcuagaugugaaaaua

SEQ ID NO: 672743 - RNA, 19 nt, Homo sapiens
  misc_RNA (1)...(19): siRNA sense strand
gaacaaagagugcugauuu

SEQ ID NO: 672744 - RNA, 19 nt, Homo sapiens
  misc_RNA (1)...(19): siRNA sense strand
caaauuccaucuuaaccua

SEQ ID NO: 672745 - RNA, 19 nt, Homo sapiens
  misc_RNA (1)...(19): siRNA sense strand
caaauugggcucuuauuaa

SEQ ID NO: 672746 - RNA, 19 nt, Homo sapiens
  misc_RNA (1)...(19): siRNA sense strand
gaacaacaguuaucagacu

SEQ ID NO: 672747 - RNA, 19 nt, Homo sapiens
  misc_RNA (1)...(19): siRNA sense strand
uaaacaaauugggcucuua

SEQ ID NO: 672748 - RNA, 19 nt, Homo sapiens
  misc_RNA (1)...(19): siRNA sense strand
aacaaagagugcugauuua

SEQ ID NO: 672749 - RNA, 19 nt, Homo sapiens
  misc_RNA (1)...(19): siRNA sense strand
uggcucaaauuccaucuua

SEQ ID NO: 672750 - RNA, 19 nt, Homo sapiens
  misc_RNA (1)...(19): siRNA sense strand
cgaacagucugaauacgaa

SEQ ID NO: 672751 - RNA, 19 nt, Homo sapiens
  misc_RNA (1)...(19): siRNA sense strand
acaaauugggcucuuauua

SEQ ID NO: 672752 - RNA, 19 nt, Homo sapiens
  misc_RNA (1)...(19): siRNA sense strand
aaagagugcugauuuacga

SEQ ID NO: 672753 - RNA, 19 nt, Homo sapiens
  misc_RNA (1)...(19): siRNA sense strand
ggagguaaaucugcagaau

SEQ ID NO: 672754 - RNA, 19 nt, Homo sapiens
  misc_RNA (1)...(19): siRNA sense strand
gacaacggaacaacaguua

SEQ ID NO: 672755 - RNA, 19 nt, Homo sapiens
  misc_RNA (1)...(19): siRNA sense strand
ugaagacgcucaauuuggu

SEQ ID NO: 672756 - RNA, 19 nt, Homo sapiens
  misc_RNA (1)...(19): siRNA sense strand
gauguuggcucaaauucca

SEQ ID NO: 672757 - RNA, 19 nt, Homo sapiens
  misc_RNA (1)...(19): siRNA sense strand
ggagguggccgacaugaau

SEQ ID NO: 672758 - RNA, 19 nt, Homo sapiens
  misc_RNA (1)...(19): siRNA sense strand
gggcaaaccugagcucaca

SEQ ID NO: 672759 - RNA, 19 nt, Homo sapiens
  misc_RNA (1)...(19): siRNA sense strand
agaacgcgcugguguccua

SEQ ID NO: 672760 - RNA, 19 nt, Homo sapiens
  misc_RNA (1)...(19): siRNA sense strand
gcagauguuggcucaaauu

SEQ ID NO: 672761 - RNA, 19 nt, Homo sapiens
  misc_RNA (1)...(19): siRNA sense strand
gaggauagauugggaaagc

SEQ ID NO: 672762 - RNA, 19 nt, Homo sapiens
  misc_RNA (1)...(19): siRNA sense strand
ugagggacauuaacgacaa

SEQ ID NO: 672763 - RNA, 19 nt, Homo sapiens
  misc_RNA (1)...(19): siRNA sense strand
uguccaccuucaagaauua

SEQ ID NO: 672764 - RNA, 19 nt, Homo sapiens
  misc_RNA (1)...(19): siRNA sense strand
aaagaaauccuuggacaga

SEQ ID NO: 672765 - RNA, 19 nt, Homo sapiens
  misc_RNA (1)...(19): siRNA sense strand
uaacgucccugagauagca

SEQ ID NO: 672766 - RNA, 19 nt, Homo sapiens
  misc_RNA (1)...(19): siRNA sense strand
gaaauacgggagaaauagu

SEQ ID NO: 672767 - RNA, 19 nt, Homo sapiens
  misc_RNA (1)...(19): siRNA sense strand
uagcauagaucgaaauacg

SEQ ID NO: 672768 - RNA, 19 nt, Homo sapiens
  misc_RNA (1)...(19): siRNA sense strand
agaaauccuuggacagaga

SEQ ID NO: 672769 - RNA, 19 nt, Homo sapiens
  misc_RNA (1)...(19): siRNA sense strand
gaagacgcucaauuuggua

SEQ ID NO: 672770 - RNA, 19 nt, Homo sapiens
  misc_RNA (1)...(19): siRNA sense strand
caucuuaaccuauaaacuc

SEQ ID NO: 672771 - RNA, 19 nt, Homo sapiens
  misc_RNA (1)...(19): siRNA sense strand
ugauaaugcucccacuuuc

SEQ ID NO: 672772 - RNA, 19 nt, Homo sapiens
  misc_RNA (1)...(19): siRNA sense strand
caacggaacaacaguuauc

SEQ ID NO: 672773 - RNA, 19 nt, Homo sapiens
  misc_RNA (1)...(19): siRNA sense strand
cgacaugaaugacaaugcu

SEQ ID NO: 672774 - RNA, 19 nt, Homo sapiens
  misc_RNA (1)...(19): siRNA sense strand
ucgaaauacgggagaaaua

SEQ ID NO: 672775 - RNA, 19 nt, Homo sapiens
  misc_RNA (1)...(19): siRNA sense strand
agauagcacugacuuccuu

SEQ ID NO: 672776 - RNA, 19 nt, Homo sapiens
  misc_RNA (1)...(19): siRNA sense strand
ugauaacgucccugagaua

SEQ ID NO: 672777 - RNA, 19 nt, Homo sapiens
  misc_RNA (1)...(19): siRNA sense strand
cgaaauacgggagaaauag

SEQ ID NO: 672778 - RNA, 19 nt, Homo sapiens
  misc_RNA (1)...(19): siRNA sense strand
gcacugacuuccuuauccu

SEQ ID NO: 672779 - RNA, 19 nt, Homo sapiens
  misc_RNA (1)...(19): siRNA sense strand
ggaacaaagagugcugauu

SEQ ID NO: 672780 - RNA, 19 nt, Homo sapiens
  misc_RNA (1)...(19): siRNA sense strand
gagguaaaucugcagaaug

SEQ ID NO: 672781 - RNA, 19 nt, Homo sapiens
  misc_RNA (1)...(19): siRNA sense strand
uugcagccaugguuauuga

SEQ ID NO: 672782 - RNA, 19 nt, Homo sapiens
  misc_RNA (1)...(19): siRNA sense strand
aaacaaauugggcucuuau

SEQ ID NO: 672783 - RNA, 19 nt, Homo sapiens
  misc_RNA (1)...(19): siRNA sense strand
ggaagcuccugcacacaac

SEQ ID NO: 672784 - RNA, 19 nt, Homo sapiens
  misc_RNA (1)...(19): siRNA sense strand
guacugucaucgcccuaau

SEQ ID NO: 672785 - RNA, 19 nt, Homo sapiens
  misc_RNA (1)...(19): siRNA sense strand
gcgggucauugcaccguuu

SEQ ID NO: 672786 - RNA, 19 nt, Homo sapiens
  misc_RNA (1)...(19): siRNA sense strand
agguaaaucugcagaaugg

SEQ ID NO: 672787 - RNA, 19 nt, Homo sapiens
  misc_RNA (1)...(19): siRNA sense strand
gauagcacugacuuccuua

SEQ ID NO: 672788 - RNA, 19 nt, Homo sapiens
  misc_RNA (1)...(19): siRNA sense strand
gcagacaacggaacaacag

SEQ ID NO: 672789 - RNA, 19 nt, Homo sapiens
  misc_RNA (1)...(19): siRNA sense strand
ucaauuugguacugucauc

SEQ ID NO: 672790 - RNA, 19 nt, Homo sapiens
  misc_RNA (1)...(19): siRNA sense strand
gauaacgucccugagauag

SEQ ID NO: 672791 - RNA, 19 nt, Homo sapiens
  misc_RNA (1)...(19): siRNA sense strand
guguccaccuucaagaauu

SEQ ID NO: 672792 - RNA, 19 nt, Homo sapiens
  misc_RNA (1)...(19): siRNA sense strand
acugucaucgcccuaauua

SEQ ID NO: 672793 - RNA, 19 nt, Homo sapiens
  misc_RNA (1)...(19): siRNA sense strand
ugcuggaugugaaugauaa

SEQ ID NO: 672794 - RNA, 19 nt, Homo sapiens
  misc_RNA (1)...(19): siRNA sense strand
gggcaauuucauauucuuu

SEQ ID NO: 672795 - RNA, 19 nt, Homo sapiens
  misc_RNA (1)...(19): siRNA sense strand
cggaacaacaguuaucaga

SEQ ID NO: 672796 - RNA, 19 nt, Homo sapiens
  misc_RNA (1)...(19): siRNA sense strand
ggaugugaaugauaaugcu

SEQ ID NO: 672797 - RNA, 19 nt, Homo sapiens
  misc_RNA (1)...(19): siRNA sense strand
ggauagauugggaaagcaa

SEQ ID NO: 672798 - RNA, 19 nt, Homo sapiens
  misc_RNA (1)...(19): siRNA sense strand
gcucaaauuccaucuuaac

SEQ ID NO: 672799 - RNA, 19 nt, Homo sapiens
  misc_RNA (1)...(19): siRNA sense strand
ucaagaauuacuacucguu

SEQ ID NO: 672800 - RNA, 19 nt, Homo sapiens
  misc_RNA (1)...(19): siRNA sense strand
gugaagacgcucaauuugg

SEQ ID NO: 672801 - RNA, 19 nt, Homo sapiens
  misc_RNA (1)...(19): siRNA sense strand
aaugauaacgucccugaga

SEQ ID NO: 672802 - RNA, 19 nt, Homo sapiens
  misc_RNA (1)...(19): siRNA sense strand
gaauacuucgggcuagaug

SEQ ID NO: 672803 - RNA, 19 nt, Homo sapiens
  misc_RNA (1)...(19): siRNA sense strand
gacaggccgcugcagguuu

SEQ ID NO: 672804 - RNA, 19 nt, Homo sapiens
  misc_RNA (1)...(19): siRNA sense strand
gaucgaaauacgggagaaa

SEQ ID NO: 672805 - RNA, 19 nt, Homo sapiens
  misc_RNA (1)...(19): siRNA sense strand
ggcucaaauuccaucuuaa

SEQ ID NO: 672806 - RNA, 19 nt, Homo sapiens
  misc_RNA (1)...(19): siRNA sense strand
acgugaagacgcucaauuu

SEQ ID NO: 672807 - RNA, 19 nt, Homo sapiens
  misc_RNA (1)...(19): siRNA sense strand
gggguaauuuggauuuuga

SEQ ID NO: 672808 - RNA, 19 nt, Homo sapiens
  misc_RNA (1)...(19): siRNA sense strand
augcagauguuggcucaaa

SEQ ID NO: 672809 - RNA, 19 nt, Homo sapiens
  misc_RNA (1)...(19): siRNA sense strand
cgugaagacgcucaauuug

SEQ ID NO: 672810 - RNA, 19 nt, Homo sapiens
  misc_RNA (1)...(19): siRNA sense strand
ggcuagaugugaaaauaaa

SEQ ID NO: 672811 - RNA, 19 nt, Homo sapiens
  misc_RNA (1)...(19): siRNA sense strand
gccuaugaguuggugguaa

SEQ ID NO: 672812 - RNA, 19 nt, Homo sapiens
  misc_RNA (1)...(19): siRNA sense strand
gugcuggaugugaaugaua

SEQ ID NO: 672813 - RNA, 19 nt, Homo sapiens
  misc_RNA (1)...(19): siRNA sense strand
gcauuuuguuugugaauuc

SEQ ID NO: 672814 - RNA, 19 nt, Homo sapiens
  misc_RNA (1)...(19): siRNA sense strand
agacaacggaacaacaguu

SEQ ID NO: 672815 - RNA, 19 nt, Homo sapiens
  misc_RNA (1)...(19): siRNA sense strand
uggccgacaugaaugacaa

SEQ ID NO: 672816 - RNA, 19 nt, Homo sapiens
  misc_RNA (1)...(19): siRNA sense strand
caggauggccuccaaagac

SEQ ID NO: 672817 - RNA, 19 nt, Homo sapiens
  misc_RNA (1)...(19): siRNA sense strand
ccuaugaguuggugguaac

SEQ ID NO: 672818 - RNA, 19 nt, Homo sapiens
  misc_RNA (1)...(19): siRNA sense strand
augauaaugcucccacuuu

SEQ ID NO: 672819 - RNA, 19 nt, Homo sapiens
  misc_RNA (1)...(19): siRNA sense strand
acagugaugacaauaaaca

SEQ ID NO: 672820 - RNA, 19 nt, Homo sapiens
  misc_RNA (1)...(19): siRNA sense strand
gaaaauaaacagugaugac

SEQ ID NO: 672821 - RNA, 19 nt, Homo sapiens
  misc_RNA (1)...(19): siRNA sense strand
ucaggauggccuccaaaga

SEQ ID NO: 672822 - RNA, 19 nt, Homo sapiens
  misc_RNA (1)...(19): siRNA sense strand
caaagagugcugauuuacg

SEQ ID NO: 672823 - RNA, 19 nt, Homo sapiens
  misc_RNA (1)...(19): siRNA sense strand
cgugucggccuaugaguug

SEQ ID NO: 672824 - RNA, 19 nt, Homo sapiens
  misc_RNA (1)...(19): siRNA sense strand
ccaccuucaagaauuacua

SEQ ID NO: 672825 - RNA, 19 nt, Homo sapiens
  misc_RNA (1)...(19): siRNA sense strand
ccaacgggcaggugaacug

SEQ ID NO: 672826 - RNA, 19 nt, Homo sapiens
  misc_RNA (1)...(19): siRNA sense strand
ugaccacuuuagcauagau

SEQ ID NO: 672827 - RNA, 19 nt, Homo sapiens
  misc_RNA (1)...(19): siRNA sense strand
uauugaccacuuuagcaua

SEQ ID NO: 672828 - RNA, 19 nt, Homo sapiens
  misc_RNA (1)...(19): siRNA sense strand
guuauugaccacuuuagca

SEQ ID NO: 672829 - RNA, 19 nt, Homo sapiens
  misc_RNA (1)...(19): siRNA sense strand
gauaaugcucccacuuucg

SEQ ID NO: 672830 - RNA, 19 nt, Homo sapiens
  misc_RNA (1)...(19): siRNA sense strand
acucaguucuagcgaauac

SEQ ID NO: 672831 - RNA, 19 nt, Homo sapiens
  misc_RNA (1)...(19): siRNA sense strand
gagguggccgacaugaaug

SEQ ID NO: 672832 - RNA, 19 nt, Homo sapiens
  misc_RNA (1)...(19): siRNA sense strand
gagagcgugucggccuaug

SEQ ID NO: 672833 - RNA, 19 nt, Homo sapiens
  misc_RNA (1)...(19): siRNA sense strand
guggaggugagggacauua

SEQ ID NO: 672834 - RNA, 19 nt, Homo sapiens
  misc_RNA (1)...(19): siRNA sense strand
auaaacaaauugggcucuu

SEQ ID NO: 672835 - RNA, 19 nt, Homo sapiens
  misc_RNA (1)...(19): siRNA sense strand
cgggcuagaugugaaaaua

SEQ ID NO: 672836 - RNA, 19 nt, Homo sapiens
  misc_RNA (1)...(19): siRNA sense strand
gaacaaagagugcugauuu

SEQ ID NO: 672837 - RNA, 19 nt, Homo sapiens
  misc_RNA (1)...(19): siRNA sense strand
caaauuccaucuuaaccua

SEQ ID NO: 672838 - RNA, 19 nt, Homo sapiens
  misc_RNA (1)...(19): siRNA sense strand
caaauugggcucuuauuaa

SEQ ID NO: 672839 - RNA, 19 nt, Homo sapiens
  misc_RNA (1)...(19): siRNA sense strand
gaacaacaguuaucagacu

SEQ ID NO: 672840 - RNA, 19 nt, Homo sapiens
  misc_RNA (1)...(19): siRNA sense strand
uaaacaaauugggcucuua

SEQ ID NO: 672841 - RNA, 19 nt, Homo sapiens
  misc_RNA (1)...(19): siRNA sense strand
aacaaagagugcugauuua

SEQ ID NO: 672842 - RNA, 19 nt, Homo sapiens
  misc_RNA (1)...(19): siRNA sense strand
uggcucaaauuccaucuua

SEQ ID NO: 672843 - RNA, 19 nt, Homo sapiens
  misc_RNA (1)...(19): siRNA sense strand
cgaacagucugaauacgaa

SEQ ID NO: 672844 - RNA, 19 nt, Homo sapiens
  misc_RNA (1)...(19): siRNA sense strand
acaaauugggcucuuauua

SEQ ID NO: 672845 - RNA, 19 nt, Homo sapiens
  misc_RNA (1)...(19): siRNA sense strand
aaagagugcugauuuacga

SEQ ID NO: 672846 - RNA, 19 nt, Homo sapiens
  misc_RNA (1)...(19): siRNA sense strand
ggagguaaaucugcagaau

SEQ ID NO: 672847 - RNA, 19 nt, Homo sapiens
  misc_RNA (1)...(19): siRNA sense strand
gacaacggaacaacaguua

SEQ ID NO: 672848 - RNA, 19 nt, Homo sapiens
  misc_RNA (1)...(19): siRNA sense strand
ugaagacgcucaauuuggu

SEQ ID NO: 672849 - RNA, 19 nt, Homo sapiens
  misc_RNA (1)...(19): siRNA sense strand
gauguuggcucaaauucca

SEQ ID NO: 672850 - RNA, 19 nt, Homo sapiens
  misc_RNA (1)...(19): siRNA sense strand
ggagguggccgacaugaau

SEQ ID NO: 672851 - RNA, 19 nt, Homo sapiens
  misc_RNA (1)...(19): siRNA sense strand
gggcaaaccugagcucaca

SEQ ID NO: 672852 - RNA, 19 nt, Homo sapiens
  misc_RNA (1)...(19): siRNA sense strand
agaacgcgcugguguccua

SEQ ID NO: 672853 - RNA, 19 nt, Homo sapiens
  misc_RNA (1)...(19): siRNA sense strand
gcagauguuggcucaaauu

SEQ ID NO: 672854 - RNA, 19 nt, Homo sapiens
  misc_RNA (1)...(19): siRNA sense strand
gaggauagauugggaaagc

SEQ ID NO: 672855 - RNA, 19 nt, Homo sapiens
  misc_RNA (1)...(19): siRNA sense strand
ugagggacauuaacgacaa

SEQ ID NO: 672856 - RNA, 19 nt, Homo sapiens
  misc_RNA (1)...(19): siRNA sense strand
uguccaccuucaagaauua

SEQ ID NO: 672857 - RNA, 19 nt, Homo sapiens
  misc_RNA (1)...(19): siRNA sense strand
aaagaaauccuuggacaga

SEQ ID NO: 672858 - RNA, 19 nt, Homo sapiens
  misc_RNA (1)...(19): siRNA sense strand
uaacgucccugagauagca

SEQ ID NO: 672859 - RNA, 19 nt, Homo sapiens
  misc_RNA (1)...(19): siRNA sense strand
gaaauacgggagaaauagu

SEQ ID NO: 672860 - RNA, 19 nt, Homo sapiens
  misc_RNA (1)...(19): siRNA sense strand
uagcauagaucgaaauacg

SEQ ID NO: 672861 - RNA, 19 nt, Homo sapiens
  misc_RNA (1)...(19): siRNA sense strand
agaaauccuuggacagaga

SEQ ID NO: 672862 - RNA, 19 nt, Homo sapiens
  misc_RNA (1)...(19): siRNA sense strand
gaagacgcucaauuuggua

SEQ ID NO: 672863 - RNA, 19 nt, Homo sapiens
  misc_RNA (1)...(19): siRNA sense strand
caucuuaaccuauaaacuc

SEQ ID NO: 672864 - RNA, 19 nt, Homo sapiens
  misc_RNA (1)...(19): siRNA sense strand
ugauaaugcucccacuuuc

SEQ ID NO: 672865 - RNA, 19 nt, Homo sapiens
  misc_RNA (1)...(19): siRNA sense strand
caacggaacaacaguuauc

SEQ ID NO: 672866 - RNA, 19 nt, Homo sapiens
  misc_RNA (1)...(19): siRNA sense strand
cgacaugaaugacaaugcu

SEQ ID NO: 672867 - RNA, 19 nt, Homo sapiens
  misc_RNA (1)...(19): siRNA sense strand
ucgaaauacgggagaaaua

SEQ ID NO: 672868 - RNA, 19 nt, Homo sapiens
  misc_RNA (1)...(19): siRNA sense strand
agauagcacugacuuccuu

SEQ ID NO: 672869 - RNA, 19 nt, Homo sapiens
  misc_RNA (1)...(19): siRNA sense strand
ugauaacgucccugagaua

SEQ ID NO: 672870 - RNA, 19 nt, Homo sapiens
  misc_RNA (1)...(19): siRNA sense strand
cgaaauacgggagaaauag

SEQ ID NO: 672871 - RNA, 19 nt, Homo sapiens
  misc_RNA (1)...(19): siRNA sense strand
gcacugacuuccuuauccu

SEQ ID NO: 672872 - RNA, 19 nt, Homo sapiens
  misc_RNA (1)...(19): siRNA sense strand
ggaacaaagagugcugauu

SEQ ID NO: 672873 - RNA, 19 nt, Homo sapiens
  misc_RNA (1)...(19): siRNA sense strand
gagguaaaucugcagaaug

SEQ ID NO: 672874 - RNA, 19 nt, Homo sapiens
  misc_RNA (1)...(19): siRNA sense strand
uugcagccaugguuauuga

SEQ ID NO: 672875 - RNA, 19 nt, Homo sapiens
  misc_RNA (1)...(19): siRNA sense strand
aaacaaauugggcucuuau

SEQ ID NO: 672876 - RNA, 19 nt, Homo sapiens
  misc_RNA (1)...(19): siRNA sense strand
ggaagcuccugcacacaac

SEQ ID NO: 672877 - RNA, 19 nt, Homo sapiens
  misc_RNA (1)...(19): siRNA sense strand
guacugucaucgcccuaau

SEQ ID NO: 672878 - RNA, 19 nt, Homo sapiens
  misc_RNA (1)...(19): siRNA sense strand
gcgggucauugcaccguuu

SEQ ID NO: 672879 - RNA, 19 nt, Homo sapiens
  misc_RNA (1)...(19): siRNA sense strand
agguaaaucugcagaaugg

SEQ ID NO: 672880 - RNA, 19 nt, Homo sapiens
  misc_RNA (1)...(19): siRNA sense strand
gauagcacugacuuccuua

SEQ ID NO: 672881 - RNA, 19 nt, Homo sapiens
  misc_RNA (1)...(19): siRNA sense strand
gcagacaacggaacaacag

SEQ ID NO: 672882 - RNA, 19 nt, Homo sapiens
  misc_RNA (1)...(19): siRNA sense strand
ucaauuugguacugucauc

SEQ ID NO: 672883 - RNA, 19 nt, Homo sapiens
  misc_RNA (1)...(19): siRNA sense strand
gauaacgucccugagauag

SEQ ID NO: 672884 - RNA, 19 nt, Homo sapiens
  misc_RNA (1)...(19): siRNA sense strand
guguccaccuucaagaauu

SEQ ID NO: 672885 - RNA, 19 nt, Homo sapiens
  misc_RNA (1)...(19): siRNA sense strand
acugucaucgcccuaauua

SEQ ID NO: 672886 - RNA, 19 nt, Homo sapiens
  misc_RNA (1)...(19): siRNA sense strand
ugcuggaugugaaugauaa

SEQ ID NO: 672887 - RNA, 19 nt, Homo sapiens
  misc_RNA (1)...(19): siRNA sense strand
gggcaauuucauauucuuu

SEQ ID NO: 672888 - RNA, 19 nt, Homo sapiens
  misc_RNA (1)...(19): siRNA sense strand
cggaacaacaguuaucaga

SEQ ID NO: 672889 - RNA, 19 nt, Homo sapiens
  misc_RNA (1)...(19): siRNA sense strand
ggaugugaaugauaaugcu

SEQ ID NO: 672890 - RNA, 19 nt, Homo sapiens
  misc_RNA (1)...(19): siRNA sense strand
ggauagauugggaaagcaa

SEQ ID NO: 672891 - RNA, 19 nt, Homo sapiens
  misc_RNA (1)...(19): siRNA sense strand
gcucaaauuccaucuuaac

SEQ ID NO: 672892 - RNA, 19 nt, Homo sapiens
  misc_RNA (1)...(19): siRNA sense strand
ucaagaauuacuacucguu

SEQ ID NO: 672893 - RNA, 19 nt, Homo sapiens
  misc_RNA (1)...(19): siRNA sense strand
gugaagacgcucaauuugg

SEQ ID NO: 672894 - RNA, 19 nt, Homo sapiens
  misc_RNA (1)...(19): siRNA sense strand
aaugauaacgucccugaga

SEQ ID NO: 672895 - RNA, 19 nt, Homo sapiens
  misc_RNA (1)...(19): siRNA sense strand
gaauacuucgggcuagaug

SEQ ID NO: 672896 - RNA, 19 nt, Homo sapiens
  misc_RNA (1)...(19): siRNA sense strand
gacaggccgcugcagguuu

SEQ ID NO: 672897 - RNA, 19 nt, Homo sapiens
  misc_RNA (1)...(19): siRNA sense strand
gaucgaaauacgggagaaa

SEQ ID NO: 672898 - RNA, 19 nt, Homo sapiens
  misc_RNA (1)...(19): siRNA sense strand
ggcucaaauuccaucuuaa

SEQ ID NO: 672899 - RNA, 19 nt, Homo sapiens
  misc_RNA (1)...(19): siRNA sense strand
acgugaagacgcucaauuu

SEQ ID NO: 672900 - RNA, 19 nt, Homo sapiens
  misc_RNA (1)...(19): siRNA sense strand
gggguaauuuggauuuuga

SEQ ID NO: 672901 - RNA, 19 nt, Homo sapiens
  misc_RNA (1)...(19): siRNA sense strand
augcagauguuggcucaaa

SEQ ID NO: 672902 - RNA, 19 nt, Homo sapiens
  misc_RNA (1)...(19): siRNA sense strand
cgugaagacgcucaauuug

SEQ ID NO: 672903 - RNA, 19 nt, Homo sapiens
  misc_RNA (1)...(19): siRNA sense strand
ggcuagaugugaaaauaaa

SEQ ID NO: 672904 - RNA, 19 nt, Homo sapiens
  misc_RNA (1)...(19): siRNA sense strand
gccuaugaguuggugguaa

SEQ ID NO: 672905 - RNA, 19 nt, Homo sapiens
  misc_RNA (1)...(19): siRNA sense strand
gugcuggaugugaaugaua

SEQ ID NO: 672906 - RNA, 19 nt, Homo sapiens
  misc_RNA (1)...(19): siRNA sense strand
gcauuuuguuugugaauuc

SEQ ID NO: 672907 - RNA, 19 nt, Homo sapiens
  misc_RNA (1)...(19): siRNA sense strand
agacaacggaacaacaguu

SEQ ID NO: 672908 - RNA, 19 nt, Homo sapiens
  misc_RNA (1)...(19): siRNA sense strand
uggccgacaugaaugacaa

SEQ ID NO: 672909 - RNA, 19 nt, Homo sapiens
  misc_RNA (1)...(19): siRNA sense strand
caggauggccuccaaagac

SEQ ID NO: 672910 - RNA, 19 nt, Homo sapiens
  misc_RNA (1)...(19): siRNA sense strand
ccuaugaguuggugguaac

SEQ ID NO: 672911 - RNA, 19 nt, Homo sapiens
  misc_RNA (1)...(19): siRNA sense strand
augauaaugcucccacuuu

SEQ ID NO: 672912 - RNA, 19 nt, Homo sapiens
  misc_RNA (1)...(19): siRNA sense strand
acagugaugacaauaaaca

SEQ ID NO: 672913 - RNA, 19 nt, Homo sapiens
  misc_RNA (1)...(19): siRNA sense strand
gaaaauaaacagugaugac

SEQ ID NO: 672914 - RNA, 19 nt, Homo sapiens
  misc_RNA (1)...(19): siRNA sense strand
ucaggauggccuccaaaga

SEQ ID NO: 672915 - RNA, 19 nt, Homo sapiens
  misc_RNA (1)...(19): siRNA sense strand
caaagagugcugauuuacg

SEQ ID NO: 672916 - RNA, 19 nt, Homo sapiens
  misc_RNA (1)...(19): siRNA sense strand
cgugucggccuaugaguug

SEQ ID NO: 672917 - RNA, 19 nt, Homo sapiens
  misc_RNA (1)...(19): siRNA sense strand
ccaccuucaagaauuacua

SEQ ID NO: 672918 - RNA, 19 nt, Homo sapiens
  misc_RNA (1)...(19): siRNA sense strand
ccaacgggcaggugaacug

SEQ ID NO: 672919 - RNA, 19 nt, Homo sapiens
  misc_RNA (1)...(19): siRNA sense strand
ugaccacuuuagcauagau

SEQ ID NO: 672920 - RNA, 19 nt, Homo sapiens
  misc_RNA (1)...(19): siRNA sense strand
uauugaccacuuuagcaua

SEQ ID NO: 672921 - RNA, 19 nt, Homo sapiens
  misc_RNA (1)...(19): siRNA sense strand
guuauugaccacuuuagca

SEQ ID NO: 672922 - RNA, 19 nt, Homo sapiens
  misc_RNA (1)...(19): siRNA sense strand
gauaaugcucccacuuucg

SEQ ID NO: 672923 - RNA, 19 nt, Homo sapiens
  misc_RNA (1)...(19): siRNA sense strand
acucaguucuagcgaauac

SEQ ID NO: 672924 - RNA, 19 nt, Homo sapiens
  misc_RNA (1)...(19): siRNA sense strand
gagguggccgacaugaaug

SEQ ID NO: 672925 - RNA, 19 nt, Homo sapiens
  misc_RNA (1)...(19): siRNA sense strand
gagagcgugucggccuaug

SEQ ID NO: 672926 - RNA, 19 nt, Homo sapiens
  misc_RNA (1)...(19): siRNA sense strand
guggaggugagggacauua

SEQ ID NO: 672927 - RNA, 19 nt, Homo sapiens
  misc_RNA (1)...(19): siRNA sense strand
auaaacaaauugggcucuu

SEQ ID NO: 672928 - RNA, 19 nt, Homo sapiens
  misc_RNA (1)...(19): siRNA sense strand
cgggcuagaugugaaaaua

SEQ ID NO: 672929 - RNA, 19 nt, Homo sapiens
  misc_RNA (1)...(19): siRNA sense strand
gaacaaagagugcugauuu

SEQ ID NO: 672930 - RNA, 19 nt, Homo sapiens
  misc_RNA (1)...(19): siRNA sense strand
caaauuccaucuuaaccua

SEQ ID NO: 672931 - RNA, 19 nt, Homo sapiens
  misc_RNA (1)...(19): siRNA sense strand
caaauugggcucuuauuaa

SEQ ID NO: 672932 - RNA, 19 nt, Homo sapiens
  misc_RNA (1)...(19): siRNA sense strand
gaacaacaguuaucagacu

SEQ ID NO: 672933 - RNA, 19 nt, Homo sapiens
  misc_RNA (1)...(19): siRNA sense strand
uaaacaaauugggcucuua

SEQ ID NO: 672934 - RNA, 19 nt, Homo sapiens
  misc_RNA (1)...(19): siRNA sense strand
aacaaagagugcugauuua

SEQ ID NO: 672935 - RNA, 19 nt, Homo sapiens
  misc_RNA (1)...(19): siRNA sense strand
uggcucaaauuccaucuua

SEQ ID NO: 672936 - RNA, 19 nt, Homo sapiens
  misc_RNA (1)...(19): siRNA sense strand
cgaacagucugaauacgaa

SEQ ID NO: 672937 - RNA, 19 nt, Homo sapiens
  misc_RNA (1)...(19): siRNA sense strand
acaaauugggcucuuauua

SEQ ID NO: 672938 - RNA, 19 nt, Homo sapiens
  misc_RNA (1)...(19): siRNA sense strand
aaagagugcugauuuacga

SEQ ID NO: 672939 - RNA, 19 nt, Homo sapiens
  misc_RNA (1)...(19): siRNA sense strand
ggagguaaaucugcagaau

SEQ ID NO: 672940 - RNA, 19 nt, Homo sapiens
  misc_RNA (1)...(19): siRNA sense strand
gacaacggaacaacaguua

SEQ ID NO: 672941 - RNA, 19 nt, Homo sapiens
  misc_RNA (1)...(19): siRNA sense strand
ugaagacgcucaauuuggu

SEQ ID NO: 672942 - RNA, 19 nt, Homo sapiens
  misc_RNA (1)...(19): siRNA sense strand
gauguuggcucaaauucca

SEQ ID NO: 672943 - RNA, 19 nt, Homo sapiens
  misc_RNA (1)...(19): siRNA sense strand
ggagguggccgacaugaau

SEQ ID NO: 672944 - RNA, 19 nt, Homo sapiens
  misc_RNA (1)...(19): siRNA sense strand
gggcaaaccugagcucaca

SEQ ID NO: 672945 - RNA, 19 nt, Homo sapiens
  misc_RNA (1)...(19): siRNA sense strand
agaacgcgcugguguccua

SEQ ID NO: 672946 - RNA, 19 nt, Homo sapiens
  misc_RNA (1)...(19): siRNA sense strand
gcagauguuggcucaaauu

SEQ ID NO: 672947 - RNA, 19 nt, Homo sapiens
  misc_RNA (1)...(19): siRNA sense strand
gaggauagauugggaaagc

SEQ ID NO: 672948 - RNA, 19 nt, Homo sapiens
  misc_RNA (1)...(19): siRNA sense strand
ugagggacauuaacgacaa

SEQ ID NO: 672949 - RNA, 19 nt, Homo sapiens
  misc_RNA (1)...(19): siRNA sense strand
uguccaccuucaagaauua

SEQ ID NO: 672950 - RNA, 19 nt, Homo sapiens
  misc_RNA (1)...(19): siRNA sense strand
aaagaaauccuuggacaga

SEQ ID NO: 672951 - RNA, 19 nt, Homo sapiens
  misc_RNA (1)...(19): siRNA sense strand
uaacgucccugagauagca

SEQ ID NO: 672952 - RNA, 19 nt, Homo sapiens
  misc_RNA (1)...(19): siRNA sense strand
gaaauacgggagaaauagu

SEQ ID NO: 672953 - RNA, 19 nt, Homo sapiens
  misc_RNA (1)...(19): siRNA sense strand
uagcauagaucgaaauacg

SEQ ID NO: 672954 - RNA, 19 nt, Homo sapiens
  misc_RNA (1)...(19): siRNA sense strand
agaaauccuuggacagaga

SEQ ID NO: 672955 - RNA, 19 nt, Homo sapiens
  misc_RNA (1)...(19): siRNA sense strand
gaagacgcucaauuuggua

SEQ ID NO: 672956 - RNA, 19 nt, Homo sapiens
  misc_RNA (1)...(19): siRNA sense strand
caucuuaaccuauaaacuc

SEQ ID NO: 672957 - RNA, 19 nt, Homo sapiens
  misc_RNA (1)...(19): siRNA sense strand
ugauaaugcucccacuuuc

SEQ ID NO: 672958 - RNA, 19 nt, Homo sapiens
  misc_RNA (1)...(19): siRNA sense strand
caacggaacaacaguuauc

SEQ ID NO: 672959 - RNA, 19 nt, Homo sapiens
  misc_RNA (1)...(19): siRNA sense strand
cgacaugaaugacaaugcu

SEQ ID NO: 672960 - RNA, 19 nt, Homo sapiens
  misc_RNA (1)...(19): siRNA sense strand
ucgaaauacgggagaaaua

SEQ ID NO: 672961 - RNA, 19 nt, Homo sapiens
  misc_RNA (1)...(19): siRNA sense strand
agauagcacugacuuccuu

SEQ ID NO: 672962 - RNA, 19 nt, Homo sapiens
  misc_RNA (1)...(19): siRNA sense strand
ugauaacgucccugagaua

SEQ ID NO: 672963 - RNA, 19 nt, Homo sapiens
  misc_RNA (1)...(19): siRNA sense strand
cgaaauacgggagaaauag

SEQ ID NO: 672964 - RNA, 19 nt, Homo sapiens
  misc_RNA (1)...(19): siRNA sense strand
gcacugacuuccuuauccu

SEQ ID NO: 672965 - RNA, 19 nt, Homo sapiens
  misc_RNA (1)...(19): siRNA sense strand
ggaacaaagagugcugauu

SEQ ID NO: 672966 - RNA, 19 nt, Homo sapiens
  misc_RNA (1)...(19): siRNA sense strand
gagguaaaucugcagaaug

SEQ ID NO: 672967 - RNA, 19 nt, Homo sapiens
  misc_RNA (1)...(19): siRNA sense strand
uugcagccaugguuauuga

SEQ ID NO: 672968 - RNA, 19 nt, Homo sapiens
  misc_RNA (1)...(19): siRNA sense strand
aaacaaauugggcucuuau

SEQ ID NO: 672969 - RNA, 19 nt, Homo sapiens
  misc_RNA (1)...(19): siRNA sense strand
ggaagcuccugcacacaac

SEQ ID NO: 672970 - RNA, 19 nt, Homo sapiens
  misc_RNA (1)...(19): siRNA sense strand
guacugucaucgcccuaau

SEQ ID NO: 672971 - RNA, 19 nt, Homo sapiens
  misc_RNA (1)...(19): siRNA sense strand
gcgggucauugcaccguuu

SEQ ID NO: 672972 - RNA, 19 nt, Homo sapiens
  misc_RNA (1)...(19): siRNA sense strand
agguaaaucugcagaaugg

SEQ ID NO: 672973 - RNA, 19 nt, Homo sapiens
  misc_RNA (1)...(19): siRNA sense strand
gauagcacugacuuccuua

SEQ ID NO: 672974 - RNA, 19 nt, Homo sapiens
  misc_RNA (1)...(19): siRNA sense strand
gcagacaacggaacaacag

SEQ ID NO: 672975 - RNA, 19 nt, Homo sapiens
  misc_RNA (1)...(19): siRNA sense strand
ucaauuugguacugucauc

SEQ ID NO: 672976 - RNA, 19 nt, Homo sapiens
  misc_RNA (1)...(19): siRNA sense strand
gauaacgucccugagauag

SEQ ID NO: 672977 - RNA, 19 nt, Homo sapiens
  misc_RNA (1)...(19): siRNA sense strand
guguccaccuucaagaauu

SEQ ID NO: 672978 - RNA, 19 nt, Homo sapiens
  misc_RNA (1)...(19): siRNA sense strand
acugucaucgcccuaauua

SEQ ID NO: 672979 - RNA, 19 nt, Homo sapiens
  misc_RNA (1)...(19): siRNA sense strand
ugcuggaugugaaugauaa

SEQ ID NO: 672980 - RNA, 19 nt, Homo sapiens
  misc_RNA (1)...(19): siRNA sense strand
gggcaauuucauauucuuu

SEQ ID NO: 672981 - RNA, 19 nt, Homo sapiens
  misc_RNA (1)...(19): siRNA sense strand
cggaacaacaguuaucaga

SEQ ID NO: 672982 - RNA, 19 nt, Homo sapiens
  misc_RNA (1)...(19): siRNA sense strand
ggaugugaaugauaaugcu

SEQ ID NO: 672983 - RNA, 19 nt, Homo sapiens
  misc_RNA (1)...(19): siRNA sense strand
ggauagauugggaaagcaa

SEQ ID NO: 672984 - RNA, 19 nt, Homo sapiens
  misc_RNA (1)...(19): siRNA sense strand
gcucaaauuccaucuuaac

SEQ ID NO: 672985 - RNA, 19 nt, Homo sapiens
  misc_RNA (1)...(19): siRNA sense strand
ucaagaauuacuacucguu

SEQ ID NO: 672986 - RNA, 19 nt, Homo sapiens
  misc_RNA (1)...(19): siRNA sense strand
gugaagacgcucaauuugg

SEQ ID NO: 672987 - RNA, 19 nt, Homo sapiens
  misc_RNA (1)...(19): siRNA sense strand
aaugauaacgucccugaga

SEQ ID NO: 672988 - RNA, 19 nt, Homo sapiens
  misc_RNA (1)...(19): siRNA sense strand
gaauacuucgggcuagaug

SEQ ID NO: 672989 - RNA, 19 nt, Homo sapiens
  misc_RNA (1)...(19): siRNA sense strand
gacaggccgcugcagguuu

SEQ ID NO: 672990 - RNA, 19 nt, Homo sapiens
  misc_RNA (1)...(19): siRNA sense strand
gaucgaaauacgggagaaa

SEQ ID NO: 672991 - RNA, 19 nt, Homo sapiens
  misc_RNA (1)...(19): siRNA sense strand
ggcucaaauuccaucuuaa

SEQ ID NO: 672992 - RNA, 19 nt, Homo sapiens
  misc_RNA (1)...(19): siRNA sense strand
acgugaagacgcucaauuu

SEQ ID NO: 672993 - RNA, 19 nt, Homo sapiens
  misc_RNA (1)...(19): siRNA sense strand
gggguaauuuggauuuuga

SEQ ID NO: 672994 - RNA, 19 nt, Homo sapiens
  misc_RNA (1)...(19): siRNA sense strand
augcagauguuggcucaaa

SEQ ID NO: 672995 - RNA, 19 nt, Homo sapiens
  misc_RNA (1)...(19): siRNA sense strand
cgugaagacgcucaauuug

SEQ ID NO: 672996 - RNA, 19 nt, Homo sapiens
  misc_RNA (1)...(19): siRNA sense strand
ggcuagaugugaaaauaaa

SEQ ID NO: 672997 - RNA, 19 nt, Homo sapiens
  misc_RNA (1)...(19): siRNA sense strand
gccuaugaguuggugguaa

SEQ ID NO: 672998 - RNA, 19 nt, Homo sapiens
  misc_RNA (1)...(19): siRNA sense strand
gugcuggaugugaaugaua

SEQ ID NO: 672999 - RNA, 19 nt, Homo sapiens
  misc_RNA (1)...(19): siRNA sense strand
gcauuuuguuugugaauuc

SEQ ID NO: 673000 - RNA, 19 nt, Homo sapiens
  misc_RNA (1)...(19): siRNA sense strand
agacaacggaacaacaguu

SEQ ID NO: 673001 - RNA, 19 nt, Homo sapiens
  misc_RNA (1)...(19): siRNA sense strand
uggccgacaugaaugacaa

SEQ ID NO: 673002 - RNA, 19 nt, Homo sapiens
  misc_RNA (1)...(19): siRNA sense strand
caggauggccuccaaagac

SEQ ID NO: 673003 - RNA, 19 nt, Homo sapiens
  misc_RNA (1)...(19): siRNA sense strand
ccuaugaguuggugguaac

SEQ ID NO: 673004 - RNA, 19 nt, Homo sapiens
  misc_RNA (1)...(19): siRNA sense strand
augauaaugcucccacuuu

SEQ ID NO: 673005 - RNA, 19 nt, Homo sapiens
  misc_RNA (1)...(19): siRNA sense strand
acagugaugacaauaaaca

SEQ ID NO: 673006 - RNA, 19 nt, Homo sapiens
  misc_RNA (1)...(19): siRNA sense strand
gaaaauaaacagugaugac

SEQ ID NO: 673007 - RNA, 19 nt, Homo sapiens
  misc_RNA (1)...(19): siRNA sense strand
ucaggauggccuccaaaga

SEQ ID NO: 673008 - RNA, 19 nt, Homo sapiens
  misc_RNA (1)...(19): siRNA sense strand
caaagagugcugauuuacg

SEQ ID NO: 673009 - RNA, 19 nt, Homo sapiens
  misc_RNA (1)...(19): siRNA sense strand
cgugucggccuaugaguug

SEQ ID NO: 673010 - RNA, 19 nt, Homo sapiens
  misc_RNA (1)...(19): siRNA sense strand
ccaccuucaagaauuacua

SEQ ID NO: 673011 - RNA, 19 nt, Homo sapiens
  misc_RNA (1)...(19): siRNA sense strand
ccaacgggcaggugaacug

SEQ ID NO: 673012 - RNA, 19 nt, Homo sapiens
  misc_RNA (1)...(19): siRNA sense strand
ugaccacuuuagcauagau

SEQ ID NO: 673013 - RNA, 19 nt, Homo sapiens
  misc_RNA (1)...(19): siRNA sense strand
uauugaccacuuuagcaua

SEQ ID NO: 673014 - RNA, 19 nt, Homo sapiens
  misc_RNA (1)...(19): siRNA sense strand
guuauugaccacuuuagca

SEQ ID NO: 673015 - RNA, 19 nt, Homo sapiens
  misc_RNA (1)...(19): siRNA sense strand
gauaaugcucccacuuucg

SEQ ID NO: 673016 - RNA, 19 nt, Homo sapiens
  misc_RNA (1)...(19): siRNA sense strand
acucaguucuagcgaauac

SEQ ID NO: 673017 - RNA, 19 nt, Homo sapiens
  misc_RNA (1)...(19): siRNA sense strand
gagguggccgacaugaaug

SEQ ID NO: 673018 - RNA, 19 nt, Homo sapiens
  misc_RNA (1)...(19): siRNA sense strand
gagagcgugucggccuaug

SEQ ID NO: 673019 - RNA, 19 nt, Homo sapiens
  misc_RNA (1)...(19): siRNA sense strand
guggaggugagggacauua

SEQ ID NO: 673020 - RNA, 19 nt, Homo sapiens
  misc_RNA (1)...(19): siRNA sense strand
auaaacaaauugggcucuu

SEQ ID NO: 673021 - RNA, 19 nt, Homo sapiens
  misc_RNA (1)...(19): siRNA sense strand
cgggcuagaugugaaaaua

SEQ ID NO: 673022 - RNA, 19 nt, Homo sapiens
  misc_RNA (1)...(19): siRNA sense strand
gaacaaagagugcugauuu

SEQ ID NO: 673023 - RNA, 19 nt, Homo sapiens
  misc_RNA (1)...(19): siRNA sense strand
caaauuccaucuuaaccua

SEQ ID NO: 673024 - RNA, 19 nt, Homo sapiens
  misc_RNA (1)...(19): siRNA sense strand
caaauugggcucuuauuaa

SEQ ID NO: 673025 - RNA, 19 nt, Homo sapiens
  misc_RNA (1)...(19): siRNA sense strand
gaacaacaguuaucagacu

SEQ ID NO: 673026 - RNA, 19 nt, Homo sapiens
  misc_RNA (1)...(19): siRNA sense strand
uaaacaaauugggcucuua

SEQ ID NO: 673027 - RNA, 19 nt, Homo sapiens
  misc_RNA (1)...(19): siRNA sense strand
aacaaagagugcugauuua

SEQ ID NO: 673028 - RNA, 19 nt, Homo sapiens
  misc_RNA (1)...(19): siRNA sense strand
uggcucaaauuccaucuua

SEQ ID NO: 673029 - RNA, 19 nt, Homo sapiens
  misc_RNA (1)...(19): siRNA sense strand
cgaacagucugaauacgaa

SEQ ID NO: 673030 - RNA, 19 nt, Homo sapiens
  misc_RNA (1)...(19): siRNA sense strand
acaaauugggcucuuauua

SEQ ID NO: 673031 - RNA, 19 nt, Homo sapiens
  misc_RNA (1)...(19): siRNA sense strand
aaagagugcugauuuacga

SEQ ID NO: 673032 - RNA, 19 nt, Homo sapiens
  misc_RNA (1)...(19): siRNA sense strand
ggagguaaaucugcagaau

SEQ ID NO: 673033 - RNA, 19 nt, Homo sapiens
  misc_RNA (1)...(19): siRNA sense strand
gacaacggaacaacaguua

SEQ ID NO: 673034 - RNA, 19 nt, Homo sapiens
  misc_RNA (1)...(19): siRNA sense strand
ugaagacgcucaauuuggu

SEQ ID NO: 673035 - RNA, 19 nt, Homo sapiens
  misc_RNA (1)...(19): siRNA sense strand
gauguuggcucaaauucca

SEQ ID NO: 673036 - RNA, 19 nt, Homo sapiens
  misc_RNA (1)...(19): siRNA sense strand
ggagguggccgacaugaau

SEQ ID NO: 673037 - RNA, 19 nt, Homo sapiens
  misc_RNA (1)...(19): siRNA sense strand
gggcaaaccugagcucaca

SEQ ID NO: 673038 - RNA, 19 nt, Homo sapiens
  misc_RNA (1)...(19): siRNA sense strand
agaacgcgcugguguccua

SEQ ID NO: 673039 - RNA, 19 nt, Homo sapiens
  misc_RNA (1)...(19): siRNA sense strand
gcagauguuggcucaaauu

SEQ ID NO: 673040 - RNA, 19 nt, Homo sapiens
  misc_RNA (1)...(19): siRNA sense strand
gaggauagauugggaaagc

SEQ ID NO: 673041 - RNA, 19 nt, Homo sapiens
  misc_RNA (1)...(19): siRNA sense strand
ugagggacauuaacgacaa

SEQ ID NO: 673042 - RNA, 19 nt, Homo sapiens
  misc_RNA (1)...(19): siRNA sense strand
uguccaccuucaagaauua

SEQ ID NO: 673043 - RNA, 19 nt, Homo sapiens
  misc_RNA (1)...(19): siRNA sense strand
aaagaaauccuuggacaga

SEQ ID NO: 673044 - RNA, 19 nt, Homo sapiens
  misc_RNA (1)...(19): siRNA sense strand
uaacgucccugagauagca

SEQ ID NO: 673045 - RNA, 19 nt, Homo sapiens
  misc_RNA (1)...(19): siRNA sense strand
gaaauacgggagaaauagu

SEQ ID NO: 673046 - RNA, 19 nt, Homo sapiens
  misc_RNA (1)...(19): siRNA sense strand
uagcauagaucgaaauacg

SEQ ID NO: 673047 - RNA, 19 nt, Homo sapiens
  misc_RNA (1)...(19): siRNA sense strand
agaaauccuuggacagaga

SEQ ID NO: 673048 - RNA, 19 nt, Homo sapiens
  misc_RNA (1)...(19): siRNA sense strand
gaagacgcucaauuuggua

SEQ ID NO: 673049 - RNA, 19 nt, Homo sapiens
  misc_RNA (1)...(19): siRNA sense strand
caucuuaaccuauaaacuc

SEQ ID NO: 673050 - RNA, 19 nt, Homo sapiens
  misc_RNA (1)...(19): siRNA sense strand
ugauaaugcucccacuuuc

SEQ ID NO: 673051 - RNA, 19 nt, Homo sapiens
  misc_RNA (1)...(19): siRNA sense strand
caacggaacaacaguuauc

SEQ ID NO: 673052 - RNA, 19 nt, Homo sapiens
  misc_RNA (1)...(19): siRNA sense strand
cgacaugaaugacaaugcu

SEQ ID NO: 673053 - RNA, 19 nt, Homo sapiens
  misc_RNA (1)...(19): siRNA sense strand
ucgaaauacgggagaaaua

SEQ ID NO: 673054 - RNA, 19 nt, Homo sapiens
  misc_RNA (1)...(19): siRNA sense strand
agauagcacugacuuccuu

SEQ ID NO: 673055 - RNA, 19 nt, Homo sapiens
  misc_RNA (1)...(19): siRNA sense strand
ugauaacgucccugagaua

SEQ ID NO: 673056 - RNA, 19 nt, Homo sapiens
  misc_RNA (1)...(19): siRNA sense strand
cgaaauacgggagaaauag

SEQ ID NO: 673057 - RNA, 19 nt, Homo sapiens
  misc_RNA (1)...(19): siRNA sense strand
gcacugacuuccuuauccu

SEQ ID NO: 673058 - RNA, 19 nt, Homo sapiens
  misc_RNA (1)...(19): siRNA sense strand
ggaacaaagagugcugauu

SEQ ID NO: 673059 - RNA, 19 nt, Homo sapiens
  misc_RNA (1)...(19): siRNA sense strand
gagguaaaucugcagaaug

SEQ ID NO: 673060 - RNA, 19 nt, Homo sapiens
  misc_RNA (1)...(19): siRNA sense strand
uugcagccaugguuauuga

SEQ ID NO: 673061 - RNA, 19 nt, Homo sapiens
  misc_RNA (1)...(19): siRNA sense strand
aaacaaauugggcucuuau

SEQ ID NO: 673062 - RNA, 19 nt, Homo sapiens
  misc_RNA (1)...(19): siRNA sense strand
ggaagcuccugcacacaac

SEQ ID NO: 673063 - RNA, 19 nt, Homo sapiens
  misc_RNA (1)...(19): siRNA sense strand
guacugucaucgcccuaau

SEQ ID NO: 673064 - RNA, 19 nt, Homo sapiens
  misc_RNA (1)...(19): siRNA sense strand
gcgggucauugcaccguuu

SEQ ID NO: 673065 - RNA, 19 nt, Homo sapiens
  misc_RNA (1)...(19): siRNA sense strand
agguaaaucugcagaaugg

SEQ ID NO: 673066 - RNA, 19 nt, Homo sapiens
  misc_RNA (1)...(19): siRNA sense strand
gauagcacugacuuccuua

SEQ ID NO: 673067 - RNA, 19 nt, Homo sapiens
  misc_RNA (1)...(19): siRNA sense strand
gcagacaacggaacaacag

SEQ ID NO: 673068 - RNA, 19 nt, Homo sapiens
  misc_RNA (1)...(19): siRNA sense strand
ucaauuugguacugucauc

SEQ ID NO: 673069 - RNA, 19 nt, Homo sapiens
  misc_RNA (1)...(19): siRNA sense strand
gauaacgucccugagauag

SEQ ID NO: 673070 - RNA, 19 nt, Homo sapiens
  misc_RNA (1)...(19): siRNA sense strand
guguccaccuucaagaauu

SEQ ID NO: 673071 - RNA, 19 nt, Homo sapiens
  misc_RNA (1)...(19): siRNA sense strand
acugucaucgcccuaauua

SEQ ID NO: 673072 - RNA, 19 nt, Homo sapiens
  misc_RNA (1)...(19): siRNA sense strand
ugcuggaugugaaugauaa

SEQ ID NO: 673073 - RNA, 19 nt, Homo sapiens
  misc_RNA (1)...(19): siRNA sense strand
gggcaauuucauauucuuu

SEQ ID NO: 673074 - RNA, 19 nt, Homo sapiens
  misc_RNA (1)...(19): siRNA sense strand
cggaacaacaguuaucaga

SEQ ID NO: 673075 - RNA, 19 nt, Homo sapiens
  misc_RNA (1)...(19): siRNA sense strand
ggaugugaaugauaaugcu

SEQ ID NO: 673076 - RNA, 19 nt, Homo sapiens
  misc_RNA (1)...(19): siRNA sense strand
ggauagauugggaaagcaa

SEQ ID NO: 673077 - RNA, 19 nt, Homo sapiens
  misc_RNA (1)...(19): siRNA sense strand
gcucaaauuccaucuuaac

SEQ ID NO: 673078 - RNA, 19 nt, Homo sapiens
  misc_RNA (1)...(19): siRNA sense strand
ucaagaauuacuacucguu

SEQ ID NO: 673079 - RNA, 19 nt, Homo sapiens
  misc_RNA (1)...(19): siRNA sense strand
gugaagacgcucaauuugg

SEQ ID NO: 673080 - RNA, 19 nt, Homo sapiens
  misc_RNA (1)...(19): siRNA sense strand
aaugauaacgucccugaga

SEQ ID NO: 673081 - RNA, 19 nt, Homo sapiens
  misc_RNA (1)...(19): siRNA sense strand
gaauacuucgggcuagaug

SEQ ID NO: 673082 - RNA, 19 nt, Homo sapiens
  misc_RNA (1)...(19): siRNA sense strand
gacaggccgcugcagguuu

SEQ ID NO: 673083 - RNA, 19 nt, Homo sapiens
  misc_RNA (1)...(19): siRNA sense strand
gaucgaaauacgggagaaa

SEQ ID NO: 673084 - RNA, 19 nt, Homo sapiens
  misc_RNA (1)...(19): siRNA sense strand
ggcucaaauuccaucuuaa

SEQ ID NO: 673085 - RNA, 19 nt, Homo sapiens
  misc_RNA (1)...(19): siRNA sense strand
acgugaagacgcucaauuu

SEQ ID NO: 673086 - RNA, 19 nt, Homo sapiens
  misc_RNA (1)...(19): siRNA sense strand
gggguaauuuggauuuuga

SEQ ID NO: 673087 - RNA, 19 nt, Homo sapiens
  misc_RNA (1)...(19): siRNA sense strand
augcagauguuggcucaaa

SEQ ID NO: 673088 - RNA, 19 nt, Homo sapiens
  misc_RNA (1)...(19): siRNA sense strand
cgugaagacgcucaauuug

SEQ ID NO: 673089 - RNA, 19 nt, Homo sapiens
  misc_RNA (1)...(19): siRNA sense strand
ggcuagaugugaaaauaaa

SEQ ID NO: 673090 - RNA, 19 nt, Homo sapiens
  misc_RNA (1)...(19): siRNA sense strand
gccuaugaguuggugguaa

SEQ ID NO: 673091 - RNA, 19 nt, Homo sapiens
  misc_RNA (1)...(19): siRNA sense strand
gugcuggaugugaaugaua

SEQ ID NO: 673092 - RNA, 19 nt, Homo sapiens
  misc_RNA (1)...(19): siRNA sense strand
gcauuuuguuugugaauuc

SEQ ID NO: 673093 - RNA, 19 nt, Homo sapiens
  misc_RNA (1)...(19): siRNA sense strand
agacaacggaacaacaguu

SEQ ID NO: 673094 - RNA, 19 nt, Homo sapiens
  misc_RNA (1)...(19): siRNA sense strand
uggccgacaugaaugacaa

SEQ ID NO: 673095 - RNA, 19 nt, Homo sapiens
  misc_RNA (1)...(19): siRNA sense strand
caggauggccuccaaagac

SEQ ID NO: 673096 - RNA, 19 nt, Homo sapiens
  misc_RNA (1)...(19): siRNA sense strand
ccuaugaguuggugguaac

SEQ ID NO: 673097 - RNA, 19 nt, Homo sapiens
  misc_RNA (1)...(19): siRNA sense strand
augauaaugcucccacuuu

SEQ ID NO: 673098 - RNA, 19 nt, Homo sapiens
  misc_RNA (1)...(19): siRNA sense strand
acagugaugacaauaaaca

SEQ ID NO: 673099 - RNA, 19 nt, Homo sapiens
  misc_RNA (1)...(19): siRNA sense strand
gaaaauaaacagugaugac

SEQ ID NO: 673100 - RNA, 19 nt, Homo sapiens
  misc_RNA (1)...(19): siRNA sense strand
ucaggauggccuccaaaga

SEQ ID NO: 673101 - RNA, 19 nt, Homo sapiens
  misc_RNA (1)...(19): siRNA sense strand
caaagagugcugauuuacg

SEQ ID NO: 673102 - RNA, 19 nt, Homo sapiens
  misc_RNA (1)...(19): siRNA sense strand
cgugucggccuaugaguug

SEQ ID NO: 673103 - RNA, 19 nt, Homo sapiens
  misc_RNA (1)...(19): siRNA sense strand
ccaccuucaagaauuacua

SEQ ID NO: 673104 - RNA, 19 nt, Homo sapiens
  misc_RNA (1)...(19): siRNA sense strand
ccaacgggcaggugaacug

SEQ ID NO: 673105 - RNA, 19 nt, Homo sapiens
  misc_RNA (1)...(19): siRNA sense strand
ugaccacuuuagcauagau

SEQ ID NO: 673106 - RNA, 19 nt, Homo sapiens
  misc_RNA (1)...(19): siRNA sense strand
uauugaccacuuuagcaua

SEQ ID NO: 673107 - RNA, 19 nt, Homo sapiens
  misc_RNA (1)...(19): siRNA sense strand
guuauugaccacuuuagca

SEQ ID NO: 673108 - RNA, 19 nt, Homo sapiens
  misc_RNA (1)...(19): siRNA sense strand
gauaaugcucccacuuucg

SEQ ID NO: 673109 - RNA, 19 nt, Homo sapiens
  misc_RNA (1)...(19): siRNA sense strand
acucaguucuagcgaauac

SEQ ID NO: 673110 - RNA, 19 nt, Homo sapiens
  misc_RNA (1)...(19): siRNA sense strand
gagguggccgacaugaaug

SEQ ID NO: 673111 - RNA, 19 nt, Homo sapiens
  misc_RNA (1)...(19): siRNA sense strand
gagagcgugucggccuaug

SEQ ID NO: 673112 - RNA, 19 nt, Homo sapiens
  misc_RNA (1)...(19): siRNA sense strand
guggaggugagggacauua

SEQ ID NO: 673113 - RNA, 19 nt, Homo sapiens
  misc_RNA (1)...(19): siRNA sense strand
auaaacaaauugggcucuu

SEQ ID NO: 673114 - RNA, 19 nt, Homo sapiens
  misc_RNA (1)...(19): siRNA sense strand
cgggcuagaugugaaaaua

SEQ ID NO: 673115 - RNA, 19 nt, Homo sapiens
  misc_RNA (1)...(19): siRNA sense strand
gaacaccaauauuacaguu

SEQ ID NO: 673116 - RNA, 19 nt, Homo sapiens
  misc_RNA (1)...(19): siRNA sense strand
gaauaccgcuggcccuuug

SEQ ID NO: 673117 - RNA, 19 nt, Homo sapiens
  misc_RNA (1)...(19): siRNA sense strand
acucaaaccuuucaacaaa

SEQ ID NO: 673118 - RNA, 19 nt, Homo sapiens
  misc_RNA (1)...(19): siRNA sense strand
gaacaaaccaagaaaugau

SEQ ID NO: 673119 - RNA, 19 nt, Homo sapiens
  misc_RNA (1)...(19): siRNA sense strand
auacgugacuguagaauug

SEQ ID NO: 673120 - RNA, 19 nt, Homo sapiens
  misc_RNA (1)...(19): siRNA sense strand
caucauacgugacuguaga

SEQ ID NO: 673121 - RNA, 19 nt, Homo sapiens
  misc_RNA (1)...(19): siRNA sense strand
ccaagaugauugucccaaa

SEQ ID NO: 673122 - RNA, 19 nt, Homo sapiens
  misc_RNA (1)...(19): siRNA sense strand
uauacuggguuuccuguuu

SEQ ID NO: 673123 - RNA, 19 nt, Homo sapiens
  misc_RNA (1)...(19): siRNA sense strand
gcuauaauccaucgaaaug

SEQ ID NO: 673124 - RNA, 19 nt, Homo sapiens
  misc_RNA (1)...(19): siRNA sense strand
ugucaugauuccuacuuua

SEQ ID NO: 673125 - RNA, 19 nt, Homo sapiens
  misc_RNA (1)...(19): siRNA sense strand
gaagaacaaaccaagaaau

SEQ ID NO: 673126 - RNA, 19 nt, Homo sapiens
  misc_RNA (1)...(19): siRNA sense strand
aaagucaccugcaucauca

SEQ ID NO: 673127 - RNA, 19 nt, Homo sapiens
  misc_RNA (1)...(19): siRNA sense strand
ggugauagucauuuacuuu

SEQ ID NO: 673128 - RNA, 19 nt, Homo sapiens
  misc_RNA (1)...(19): siRNA sense strand
uggaaggcauaauuacaua

SEQ ID NO: 673129 - RNA, 19 nt, Homo sapiens
  misc_RNA (1)...(19): siRNA sense strand
gcuaguguguuucuacuca

SEQ ID NO: 673130 - RNA, 19 nt, Homo sapiens
  misc_RNA (1)...(19): siRNA sense strand
ccuguacgcuaguguguuu

SEQ ID NO: 673131 - RNA, 19 nt, Homo sapiens
  misc_RNA (1)...(19): siRNA sense strand
ucacgugucucagcauuga

SEQ ID NO: 673132 - RNA, 19 nt, Homo sapiens
  misc_RNA (1)...(19): siRNA sense strand
acaccaauauuacaguuug

SEQ ID NO: 673133 - RNA, 19 nt, Homo sapiens
  misc_RNA (1)...(19): siRNA sense strand
cuaaagaaggcuuaugaaa

SEQ ID NO: 673134 - RNA, 19 nt, Homo sapiens
  misc_RNA (1)...(19): siRNA sense strand
cagaagaacaaaccaagaa

SEQ ID NO: 673135 - RNA, 19 nt, Homo sapiens
  misc_RNA (1)...(19): siRNA sense strand
ucucaacucuucuacugaa

SEQ ID NO: 673136 - RNA, 19 nt, Homo sapiens
  misc_RNA (1)...(19): siRNA sense strand
caaagucaccugcaucauc

SEQ ID NO: 673137 - RNA, 19 nt, Homo sapiens
  misc_RNA (1)...(19): siRNA sense strand
uuacugacuuugccacuau

SEQ ID NO: 673138 - RNA, 19 nt, Homo sapiens
  misc_RNA (1)...(19): siRNA sense strand
ucaccugcaucaucauuug

SEQ ID NO: 673139 - RNA, 19 nt, Homo sapiens
  misc_RNA (1)...(19): siRNA sense strand
caagaugauugucccaaag

SEQ ID NO: 673140 - RNA, 19 nt, Homo sapiens
  misc_RNA (1)...(19): siRNA sense strand
cuacacagcuauggaauac

SEQ ID NO: 673141 - RNA, 19 nt, Homo sapiens
  misc_RNA (1)...(19): siRNA sense strand
auaugaagcugaagacugu

SEQ ID NO: 673142 - RNA, 19 nt, Homo sapiens
  misc_RNA (1)...(19): siRNA sense strand
gaaacagcuugguggugau

SEQ ID NO: 673143 - RNA, 19 nt, Homo sapiens
  misc_RNA (1)...(19): siRNA sense strand
aagcuggaaggcauaauua

SEQ ID NO: 673144 - RNA, 19 nt, Homo sapiens
  misc_RNA (1)...(19): siRNA sense strand
cagcuauaauccaucgaaa

SEQ ID NO: 673145 - RNA, 19 nt, Homo sapiens
  misc_RNA (1)...(19): siRNA sense strand
caugauuccuacuuuauac

SEQ ID NO: 673146 - RNA, 19 nt, Homo sapiens
  misc_RNA (1)...(19): siRNA sense strand
gaucgauaccuggcuauug

SEQ ID NO: 673147 - RNA, 19 nt, Homo sapiens
  misc_RNA (1)...(19): siRNA sense strand
ggaauaccgcuggcccuuu

SEQ ID NO: 673148 - RNA, 19 nt, Homo sapiens
  misc_RNA (1)...(19): siRNA sense strand
guaagcucauccaccaaga

SEQ ID NO: 673149 - RNA, 19 nt, Homo sapiens
  misc_RNA (1)...(19): siRNA sense strand
caguuugugcuuuccauua

SEQ ID NO: 673150 - RNA, 19 nt, Homo sapiens
  misc_RNA (1)...(19): siRNA sense strand
gcuggcccuuuggcaauua

SEQ ID NO: 673151 - RNA, 19 nt, Homo sapiens
  misc_RNA (1)...(19): siRNA sense strand
acuaugggcugucuacaca

SEQ ID NO: 673152 - RNA, 19 nt, Homo sapiens
  misc_RNA (1)...(19): siRNA sense strand
aaaucccacucaaaccuuu

SEQ ID NO: 673153 - RNA, 19 nt, Homo sapiens
  misc_RNA (1)...(19): siRNA sense strand
gcaauugugcuuuucuuuu

SEQ ID NO: 673154 - RNA, 19 nt, Homo sapiens
  misc_RNA (1)...(19): siRNA sense strand
aagaacaaaccaagaaaug

SEQ ID NO: 673155 - RNA, 19 nt, Homo sapiens
  misc_RNA (1)...(19): siRNA sense strand
ggaaggcauaauuacauau

SEQ ID NO: 673156 - RNA, 19 nt, Homo sapiens
  misc_RNA (1)...(19): siRNA sense strand
cuacugaagaugguauuaa

SEQ ID NO: 673157 - RNA, 19 nt, Homo sapiens
  misc_RNA (1)...(19): siRNA sense strand
gugggaauauuuggaaaca

SEQ ID NO: 673158 - RNA, 19 nt, Homo sapiens
  misc_RNA (1)...(19): siRNA sense strand
agaacaaaccaagaaauga

SEQ ID NO: 673159 - RNA, 19 nt, Homo sapiens
  misc_RNA (1)...(19): siRNA sense strand
gaaauucagaagaacaaac

SEQ ID NO: 673160 - RNA, 19 nt, Homo sapiens
  misc_RNA (1)...(19): siRNA sense strand
gacuguagaauugcagaua

SEQ ID NO: 673161 - RNA, 19 nt, Homo sapiens
  misc_RNA (1)...(19): siRNA sense strand
uggguuuccuguuuccuuu

SEQ ID NO: 673162 - RNA, 19 nt, Homo sapiens
  misc_RNA (1)...(19): siRNA sense strand
ccacucaaaccuuucaaca

SEQ ID NO: 673163 - RNA, 19 nt, Homo sapiens
  misc_RNA (1)...(19): siRNA sense strand
cuguagaauugcagauauu

SEQ ID NO: 673164 - RNA, 19 nt, Homo sapiens
  misc_RNA (1)...(19): siRNA sense strand
caccaaauauucacuuuuc

SEQ ID NO: 673165 - RNA, 19 nt, Homo sapiens
  misc_RNA (1)...(19): siRNA sense strand
aaagcuggaaggcauaauu

SEQ ID NO: 673166 - RNA, 19 nt, Homo sapiens
  misc_RNA (1)...(19): siRNA sense strand
ugagaacaccaauauuaca

SEQ ID NO: 673167 - RNA, 19 nt, Homo sapiens
  misc_RNA (1)...(19): siRNA sense strand
cagauaauguaagcucauc

SEQ ID NO: 673168 - RNA, 19 nt, Homo sapiens
  misc_RNA (1)...(19): siRNA sense strand
caaaucccacucaaaccuu

SEQ ID NO: 673169 - RNA, 19 nt, Homo sapiens
  misc_RNA (1)...(19): siRNA sense strand
agaagaacaaaccaagaaa

SEQ ID NO: 673170 - RNA, 19 nt, Homo sapiens
  misc_RNA (1)...(19): siRNA sense strand
uauuacaguuugugcuuuc

SEQ ID NO: 673171 - RNA, 19 nt, Homo sapiens
  misc_RNA (1)...(19): siRNA sense strand
gagaacaccaauauuacag

SEQ ID NO: 673172 - RNA, 19 nt, Homo sapiens
  misc_RNA (1)...(19): siRNA sense strand
guacgcuaguguguuucua

SEQ ID NO: 673173 - RNA, 19 nt, Homo sapiens
  misc_RNA (1)...(19): siRNA sense strand
gccaaagucaccugcauca

SEQ ID NO: 673174 - RNA, 19 nt, Homo sapiens
  misc_RNA (1)...(19): siRNA sense strand
ugguggugauagucauuua

SEQ ID NO: 673175 - RNA, 19 nt, Homo sapiens
  misc_RNA (1)...(19): siRNA sense strand
uagaauugcagauauugug

SEQ ID NO: 673176 - RNA, 19 nt, Homo sapiens
  misc_RNA (1)...(19): siRNA sense strand
acuguagaauugcagauau

SEQ ID NO: 673177 - RNA, 19 nt, Homo sapiens
  misc_RNA (1)...(19): siRNA sense strand
gauucaacuaggcaucaua

SEQ ID NO: 673178 - RNA, 19 nt, Homo sapiens
  misc_RNA (1)...(19): siRNA sense strand
gcuggaaggcauaauuaca

SEQ ID NO: 673179 - RNA, 19 nt, Homo sapiens
  misc_RNA (1)...(19): siRNA sense strand
aaacagcuugguggugaua

SEQ ID NO: 673180 - RNA, 19 nt, Homo sapiens
  misc_RNA (1)...(19): siRNA sense strand
auacuggguuuccuguuuc

SEQ ID NO: 673181 - RNA, 19 nt, Homo sapiens
  misc_RNA (1)...(19): siRNA sense strand
ccaaagcuggaaggcauaa

SEQ ID NO: 673182 - RNA, 19 nt, Homo sapiens
  misc_RNA (1)...(19): siRNA sense strand
cccaccaaauauucacuuu

SEQ ID NO: 673183 - RNA, 19 nt, Homo sapiens
  misc_RNA (1)...(19): siRNA sense strand
ucagaagaacaaaccaaga

SEQ ID NO: 673184 - RNA, 19 nt, Homo sapiens
  misc_RNA (1)...(19): siRNA sense strand
cauuaugagucccaaaauu

SEQ ID NO: 673185 - RNA, 19 nt, Homo sapiens
  misc_RNA (1)...(19): siRNA sense strand
aguuugugcuuuccauuau

SEQ ID NO: 673186 - RNA, 19 nt, Homo sapiens
  misc_RNA (1)...(19): siRNA sense strand
cauacgugacuguagaauu

SEQ ID NO: 673187 - RNA, 19 nt, Homo sapiens
  misc_RNA (1)...(19): siRNA sense strand
ucacuuuucuggauguauu

SEQ ID NO: 673188 - RNA, 19 nt, Homo sapiens
  misc_RNA (1)...(19): siRNA sense strand
cccuaaagaaggcuuauga

SEQ ID NO: 673189 - RNA, 19 nt, Homo sapiens
  misc_RNA (1)...(19): siRNA sense strand
uuugugcuuuccauuauga

SEQ ID NO: 673190 - RNA, 19 nt, Homo sapiens
  misc_RNA (1)...(19): siRNA sense strand
ucuacacagcuauggaaua

SEQ ID NO: 673191 - RNA, 19 nt, Homo sapiens
  misc_RNA (1)...(19): siRNA sense strand
gauaauguaagcucaucca

SEQ ID NO: 673192 - RNA, 19 nt, Homo sapiens
  misc_RNA (1)...(19): siRNA sense strand
ccuaaagaaggcuuaugaa

SEQ ID NO: 673193 - RNA, 19 nt, Homo sapiens
  misc_RNA (1)...(19): siRNA sense strand
ccaguuugccagcuauaau

SEQ ID NO: 673194 - RNA, 19 nt, Homo sapiens
  misc_RNA (1)...(19): siRNA sense strand
gucaugauuccuacuuuau

SEQ ID NO: 673195 - RNA, 19 nt, Homo sapiens
  misc_RNA (1)...(19): siRNA sense strand
auucucaacucuucuacug

SEQ ID NO: 673196 - RNA, 19 nt, Homo sapiens
  misc_RNA (1)...(19): siRNA sense strand
guagaauugcagauauugu

SEQ ID NO: 673197 - RNA, 19 nt, Homo sapiens
  misc_RNA (1)...(19): siRNA sense strand
ccagcuauaauccaucgaa

SEQ ID NO: 673198 - RNA, 19 nt, Homo sapiens
  misc_RNA (1)...(19): siRNA sense strand
aucgauaccuggcuauugu

SEQ ID NO: 673199 - RNA, 19 nt, Homo sapiens
  misc_RNA (1)...(19): siRNA sense strand
acucacgugucucagcauu

SEQ ID NO: 673200 - RNA, 19 nt, Homo sapiens
  misc_RNA (1)...(19): siRNA sense strand
aagaaggcuuaugaaauuc

SEQ ID NO: 673201 - RNA, 19 nt, Homo sapiens
  misc_RNA (1)...(19): siRNA sense strand
ucucagcauugaucgauac

SEQ ID NO: 673202 - RNA, 19 nt, Homo sapiens
  misc_RNA (1)...(19): siRNA sense strand
uagccaaagucaccugcau

SEQ ID NO: 673203 - RNA, 19 nt, Homo sapiens
  misc_RNA (1)...(19): siRNA sense strand
gaauauuuggaaacagcuu

SEQ ID NO: 673204 - RNA, 19 nt, Homo sapiens
  misc_RNA (1)...(19): siRNA sense strand
uuuggaaggcccuaaagaa

SEQ ID NO: 673205 - RNA, 19 nt, Homo sapiens
  misc_RNA (1)...(19): siRNA sense strand
gggcugggccugaccaaaa

SEQ ID NO: 673206 - RNA, 19 nt, Homo sapiens
  misc_RNA (1)...(19): siRNA sense strand
gauuccuacuuuauacagu

SEQ ID NO: 673207 - RNA, 19 nt, Homo sapiens
  misc_RNA (1)...(19): siRNA sense strand
uaagcucauccaccaagaa

SEQ ID NO: 673208 - RNA, 19 nt, Homo sapiens
  misc_RNA (1)...(19): siRNA sense strand
ccaaaucccacucaaaccu

SEQ ID NO: 673209 - RNA, 19 nt, Homo sapiens
  misc_RNA (1)...(19): siRNA sense strand
uuuaacaauugccugaauc

SEQ ID NO: 673210 - RNA, 19 nt, Homo sapiens
  misc_RNA (1)...(19): siRNA sense strand
acaaaccaagaaaugauga

SEQ ID NO: 673211 - RNA, 19 nt, Homo sapiens
  misc_RNA (1)...(19): siRNA sense strand
ucugaucauucuuacaagu

SEQ ID NO: 673212 - RNA, 19 nt, Homo sapiens
  misc_RNA (1)...(19): siRNA sense strand
gcgucaguuucaaccugua

SEQ ID NO: 673213 - RNA, 19 nt, Homo sapiens
  misc_RNA (1)...(19): siRNA sense strand
guuugugcuuuccauuaug

SEQ ID NO: 673214 - RNA, 19 nt, Homo sapiens
  misc_RNA (1)...(19): siRNA sense strand
gaacaccaauauuacaguu

SEQ ID NO: 673215 - RNA, 19 nt, Homo sapiens
  misc_RNA (1)...(19): siRNA sense strand
gaauaccgcuggcccuuug

SEQ ID NO: 673216 - RNA, 19 nt, Homo sapiens
  misc_RNA (1)...(19): siRNA sense strand
acucaaaccuuucaacaaa

SEQ ID NO: 673217 - RNA, 19 nt, Homo sapiens
  misc_RNA (1)...(19): siRNA sense strand
gaacaaaccaagaaaugau

SEQ ID NO: 673218 - RNA, 19 nt, Homo sapiens
  misc_RNA (1)...(19): siRNA sense strand
auacgugacuguagaauug

SEQ ID NO: 673219 - RNA, 19 nt, Homo sapiens
  misc_RNA (1)...(19): siRNA sense strand
caucauacgugacuguaga

SEQ ID NO: 673220 - RNA, 19 nt, Homo sapiens
  misc_RNA (1)...(19): siRNA sense strand
ccaagaugauugucccaaa

SEQ ID NO: 673221 - RNA, 19 nt, Homo sapiens
  misc_RNA (1)...(19): siRNA sense strand
uauacuggguuuccuguuu

SEQ ID NO: 673222 - RNA, 19 nt, Homo sapiens
  misc_RNA (1)...(19): siRNA sense strand
gcuauaauccaucgaaaug

SEQ ID NO: 673223 - RNA, 19 nt, Homo sapiens
  misc_RNA (1)...(19): siRNA sense strand
ugucaugauuccuacuuua

SEQ ID NO: 673224 - RNA, 19 nt, Homo sapiens
  misc_RNA (1)...(19): siRNA sense strand
gaagaacaaaccaagaaau

SEQ ID NO: 673225 - RNA, 19 nt, Homo sapiens
  misc_RNA (1)...(19): siRNA sense strand
aaagucaccugcaucauca

SEQ ID NO: 673226 - RNA, 19 nt, Homo sapiens
  misc_RNA (1)...(19): siRNA sense strand
ggugauagucauuuacuuu

SEQ ID NO: 673227 - RNA, 19 nt, Homo sapiens
  misc_RNA (1)...(19): siRNA sense strand
uggaaggcauaauuacaua

SEQ ID NO: 673228 - RNA, 19 nt, Homo sapiens
  misc_RNA (1)...(19): siRNA sense strand
gcuaguguguuucuacuca

SEQ ID NO: 673229 - RNA, 19 nt, Homo sapiens
  misc_RNA (1)...(19): siRNA sense strand
ccuguacgcuaguguguuu

SEQ ID NO: 673230 - RNA, 19 nt, Homo sapiens
  misc_RNA (1)...(19): siRNA sense strand
ucacgugucucagcauuga

SEQ ID NO: 673231 - RNA, 19 nt, Homo sapiens
  misc_RNA (1)...(19): siRNA sense strand
acaccaauauuacaguuug

SEQ ID NO: 673232 - RNA, 19 nt, Homo sapiens
  misc_RNA (1)...(19): siRNA sense strand
cuaaagaaggcuuaugaaa

SEQ ID NO: 673233 - RNA, 19 nt, Homo sapiens
  misc_RNA (1)...(19): siRNA sense strand
cagaagaacaaaccaagaa

SEQ ID NO: 673234 - RNA, 19 nt, Homo sapiens
  misc_RNA (1)...(19): siRNA sense strand
ucucaacucuucuacugaa

SEQ ID NO: 673235 - RNA, 19 nt, Homo sapiens
  misc_RNA (1)...(19): siRNA sense strand
caaagucaccugcaucauc

SEQ ID NO: 673236 - RNA, 19 nt, Homo sapiens
  misc_RNA (1)...(19): siRNA sense strand
uuacugacuuugccacuau

SEQ ID NO: 673237 - RNA, 19 nt, Homo sapiens
  misc_RNA (1)...(19): siRNA sense strand
ucaccugcaucaucauuug

SEQ ID NO: 673238 - RNA, 19 nt, Homo sapiens
  misc_RNA (1)...(19): siRNA sense strand
caagaugauugucccaaag

SEQ ID NO: 673239 - RNA, 19 nt, Homo sapiens
  misc_RNA (1)...(19): siRNA sense strand
cuacacagcuauggaauac

SEQ ID NO: 673240 - RNA, 19 nt, Homo sapiens
  misc_RNA (1)...(19): siRNA sense strand
auaugaagcugaagacugu

SEQ ID NO: 673241 - RNA, 19 nt, Homo sapiens
  misc_RNA (1)...(19): siRNA sense strand
gaaacagcuugguggugau

SEQ ID NO: 673242 - RNA, 19 nt, Homo sapiens
  misc_RNA (1)...(19): siRNA sense strand
aagcuggaaggcauaauua

SEQ ID NO: 673243 - RNA, 19 nt, Homo sapiens
  misc_RNA (1)...(19): siRNA sense strand
cagcuauaauccaucgaaa

SEQ ID NO: 673244 - RNA, 19 nt, Homo sapiens
  misc_RNA (1)...(19): siRNA sense strand
caugauuccuacuuuauac

SEQ ID NO: 673245 - RNA, 19 nt, Homo sapiens
  misc_RNA (1)...(19): siRNA sense strand
gaucgauaccuggcuauug

SEQ ID NO: 673246 - RNA, 19 nt, Homo sapiens
  misc_RNA (1)...(19): siRNA sense strand
ggaauaccgcuggcccuuu

SEQ ID NO: 673247 - RNA, 19 nt, Homo sapiens
  misc_RNA (1)...(19): siRNA sense strand
guaagcucauccaccaaga

SEQ ID NO: 673248 - RNA, 19 nt, Homo sapiens
  misc_RNA (1)...(19): siRNA sense strand
caguuugugcuuuccauua

SEQ ID NO: 673249 - RNA, 19 nt, Homo sapiens
  misc_RNA (1)...(19): siRNA sense strand
gcuggcccuuuggcaauua

SEQ ID NO: 673250 - RNA, 19 nt, Homo sapiens
  misc_RNA (1)...(19): siRNA sense strand
acuaugggcugucuacaca

SEQ ID NO: 673251 - RNA, 19 nt, Homo sapiens
  misc_RNA (1)...(19): siRNA sense strand
aaaucccacucaaaccuuu

SEQ ID NO: 673252 - RNA, 19 nt, Homo sapiens
  misc_RNA (1)...(19): siRNA sense strand
gcaauugugcuuuucuuuu

SEQ ID NO: 673253 - RNA, 19 nt, Homo sapiens
  misc_RNA (1)...(19): siRNA sense strand
aagaacaaaccaagaaaug

SEQ ID NO: 673254 - RNA, 19 nt, Homo sapiens
  misc_RNA (1)...(19): siRNA sense strand
ggaaggcauaauuacauau

SEQ ID NO: 673255 - RNA, 19 nt, Homo sapiens
  misc_RNA (1)...(19): siRNA sense strand
cuacugaagaugguauuaa

SEQ ID NO: 673256 - RNA, 19 nt, Homo sapiens
  misc_RNA (1)...(19): siRNA sense strand
gugggaauauuuggaaaca

SEQ ID NO: 673257 - RNA, 19 nt, Homo sapiens
  misc_RNA (1)...(19): siRNA sense strand
agaacaaaccaagaaauga

SEQ ID NO: 673258 - RNA, 19 nt, Homo sapiens
  misc_RNA (1)...(19): siRNA sense strand
gaaauucagaagaacaaac

SEQ ID NO: 673259 - RNA, 19 nt, Homo sapiens
  misc_RNA (1)...(19): siRNA sense strand
gacuguagaauugcagaua

SEQ ID NO: 673260 - RNA, 19 nt, Homo sapiens
  misc_RNA (1)...(19): siRNA sense strand
uggguuuccuguuuccuuu

SEQ ID NO: 673261 - RNA, 19 nt, Homo sapiens
  misc_RNA (1)...(19): siRNA sense strand
ccacucaaaccuuucaaca

SEQ ID NO: 673262 - RNA, 19 nt, Homo sapiens
  misc_RNA (1)...(19): siRNA sense strand
cuguagaauugcagauauu

SEQ ID NO: 673263 - RNA, 19 nt, Homo sapiens
  misc_RNA (1)...(19): siRNA sense strand
caccaaauauucacuuuuc

SEQ ID NO: 673264 - RNA, 19 nt, Homo sapiens
  misc_RNA (1)...(19): siRNA sense strand
aaagcuggaaggcauaauu

SEQ ID NO: 673265 - RNA, 19 nt, Homo sapiens
  misc_RNA (1)...(19): siRNA sense strand
ugagaacaccaauauuaca

SEQ ID NO: 673266 - RNA, 19 nt, Homo sapiens
  misc_RNA (1)...(19): siRNA sense strand
cagauaauguaagcucauc

SEQ ID NO: 673267 - RNA, 19 nt, Homo sapiens
  misc_RNA (1)...(19): siRNA sense strand
caaaucccacucaaaccuu

SEQ ID NO: 673268 - RNA, 19 nt, Homo sapiens
  misc_RNA (1)...(19): siRNA sense strand
agaagaacaaaccaagaaa

SEQ ID NO: 673269 - RNA, 19 nt, Homo sapiens
  misc_RNA (1)...(19): siRNA sense strand
uauuacaguuugugcuuuc

SEQ ID NO: 673270 - RNA, 19 nt, Homo sapiens
  misc_RNA (1)...(19): siRNA sense strand
gagaacaccaauauuacag

SEQ ID NO: 673271 - RNA, 19 nt, Homo sapiens
  misc_RNA (1)...(19): siRNA sense strand
guacgcuaguguguuucua

SEQ ID NO: 673272 - RNA, 19 nt, Homo sapiens
  misc_RNA (1)...(19): siRNA sense strand
gccaaagucaccugcauca

SEQ ID NO: 673273 - RNA, 19 nt, Homo sapiens
  misc_RNA (1)...(19): siRNA sense strand
ugguggugauagucauuua

SEQ ID NO: 673274 - RNA, 19 nt, Homo sapiens
  misc_RNA (1)...(19): siRNA sense strand
uagaauugcagauauugug

SEQ ID NO: 673275 - RNA, 19 nt, Homo sapiens
  misc_RNA (1)...(19): siRNA sense strand
acuguagaauugcagauau

SEQ ID NO: 673276 - RNA, 19 nt, Homo sapiens
  misc_RNA (1)...(19): siRNA sense strand
gauucaacuaggcaucaua

SEQ ID NO: 673277 - RNA, 19 nt, Homo sapiens
  misc_RNA (1)...(19): siRNA sense strand
gcuggaaggcauaauuaca

SEQ ID NO: 673278 - RNA, 19 nt, Homo sapiens
  misc_RNA (1)...(19): siRNA sense strand
aaacagcuugguggugaua

SEQ ID NO: 673279 - RNA, 19 nt, Homo sapiens
  misc_RNA (1)...(19): siRNA sense strand
auacuggguuuccuguuuc

SEQ ID NO: 673280 - RNA, 19 nt, Homo sapiens
  misc_RNA (1)...(19): siRNA sense strand
ccaaagcuggaaggcauaa

SEQ ID NO: 673281 - RNA, 19 nt, Homo sapiens
  misc_RNA (1)...(19): siRNA sense strand
cccaccaaauauucacuuu

SEQ ID NO: 673282 - RNA, 19 nt, Homo sapiens
  misc_RNA (1)...(19): siRNA sense strand
ucagaagaacaaaccaaga

SEQ ID NO: 673283 - RNA, 19 nt, Homo sapiens
  misc_RNA (1)...(19): siRNA sense strand
cauuaugagucccaaaauu

SEQ ID NO: 673284 - RNA, 19 nt, Homo sapiens
  misc_RNA (1)...(19): siRNA sense strand
aguuugugcuuuccauuau

SEQ ID NO: 673285 - RNA, 19 nt, Homo sapiens
  misc_RNA (1)...(19): siRNA sense strand
cauacgugacuguagaauu

SEQ ID NO: 673286 - RNA, 19 nt, Homo sapiens
  misc_RNA (1)...(19): siRNA sense strand
ucacuuuucuggauguauu

SEQ ID NO: 673287 - RNA, 19 nt, Homo sapiens
  misc_RNA (1)...(19): siRNA sense strand
cccuaaagaaggcuuauga

SEQ ID NO: 673288 - RNA, 19 nt, Homo sapiens
  misc_RNA (1)...(19): siRNA sense strand
uuugugcuuuccauuauga

SEQ ID NO: 673289 - RNA, 19 nt, Homo sapiens
  misc_RNA (1)...(19): siRNA sense strand
ucuacacagcuauggaaua

SEQ ID NO: 673290 - RNA, 19 nt, Homo sapiens
  misc_RNA (1)...(19): siRNA sense strand
gauaauguaagcucaucca

SEQ ID NO: 673291 - RNA, 19 nt, Homo sapiens
  misc_RNA (1)...(19): siRNA sense strand
ccuaaagaaggcuuaugaa

SEQ ID NO: 673292 - RNA, 19 nt, Homo sapiens
  misc_RNA (1)...(19): siRNA sense strand
ccaguuugccagcuauaau

SEQ ID NO: 673293 - RNA, 19 nt, Homo sapiens
  misc_RNA (1)...(19): siRNA sense strand
gucaugauuccuacuuuau

SEQ ID NO: 673294 - RNA, 19 nt, Homo sapiens
  misc_RNA (1)...(19): siRNA sense strand
auucucaacucuucuacug

SEQ ID NO: 673295 - RNA, 19 nt, Homo sapiens
  misc_RNA (1)...(19): siRNA sense strand
guagaauugcagauauugu

SEQ ID NO: 673296 - RNA, 19 nt, Homo sapiens
  misc_RNA (1)...(19): siRNA sense strand
ccagcuauaauccaucgaa

SEQ ID NO: 673297 - RNA, 19 nt, Homo sapiens
  misc_RNA (1)...(19): siRNA sense strand
aucgauaccuggcuauugu

SEQ ID NO: 673298 - RNA, 19 nt, Homo sapiens
  misc_RNA (1)...(19): siRNA sense strand
acucacgugucucagcauu

SEQ ID NO: 673299 - RNA, 19 nt, Homo sapiens
  misc_RNA (1)...(19): siRNA sense strand
aagaaggcuuaugaaauuc

SEQ ID NO: 673300 - RNA, 19 nt, Homo sapiens
  misc_RNA (1)...(19): siRNA sense strand
ucucagcauugaucgauac

SEQ ID NO: 673301 - RNA, 19 nt, Homo sapiens
  misc_RNA (1)...(19): siRNA sense strand
uagccaaagucaccugcau

SEQ ID NO: 673302 - RNA, 19 nt, Homo sapiens
  misc_RNA (1)...(19): siRNA sense strand
gaauauuuggaaacagcuu

SEQ ID NO: 673303 - RNA, 19 nt, Homo sapiens
  misc_RNA (1)...(19): siRNA sense strand
uuuggaaggcccuaaagaa

SEQ ID NO: 673304 - RNA, 19 nt, Homo sapiens
  misc_RNA (1)...(19): siRNA sense strand
gggcugggccugaccaaaa

SEQ ID NO: 673305 - RNA, 19 nt, Homo sapiens
  misc_RNA (1)...(19): siRNA sense strand
gauuccuacuuuauacagu

SEQ ID NO: 673306 - RNA, 19 nt, Homo sapiens
  misc_RNA (1)...(19): siRNA sense strand
uaagcucauccaccaagaa

SEQ ID NO: 673307 - RNA, 19 nt, Homo sapiens
  misc_RNA (1)...(19): siRNA sense strand
ccaaaucccacucaaaccu

SEQ ID NO: 673308 - RNA, 19 nt, Homo sapiens
  misc_RNA (1)...(19): siRNA sense strand
uuuaacaauugccugaauc

SEQ ID NO: 673309 - RNA, 19 nt, Homo sapiens
  misc_RNA (1)...(19): siRNA sense strand
acaaaccaagaaaugauga

SEQ ID NO: 673310 - RNA, 19 nt, Homo sapiens
  misc_RNA (1)...(19): siRNA sense strand
ucugaucauucuuacaagu

SEQ ID NO: 673311 - RNA, 19 nt, Homo sapiens
  misc_RNA (1)...(19): siRNA sense strand
gcgucaguuucaaccugua

SEQ ID NO: 673312 - RNA, 19 nt, Homo sapiens
  misc_RNA (1)...(19): siRNA sense strand
guuugugcuuuccauuaug

SEQ ID NO: 673313 - RNA, 19 nt, Homo sapiens
  misc_RNA (1)...(19): siRNA sense strand
gaacaccaauauuacaguu

SEQ ID NO: 673314 - RNA, 19 nt, Homo sapiens
  misc_RNA (1)...(19): siRNA sense strand
gaauaccgcuggcccuuug

SEQ ID NO: 673315 - RNA, 19 nt, Homo sapiens
  misc_RNA (1)...(19): siRNA sense strand
acucaaaccuuucaacaaa

SEQ ID NO: 673316 - RNA, 19 nt, Homo sapiens
  misc_RNA (1)...(19): siRNA sense strand
gaacaaaccaagaaaugau

SEQ ID NO: 673317 - RNA, 19 nt, Homo sapiens
  misc_RNA (1)...(19): siRNA sense strand
auacgugacuguagaauug

SEQ ID NO: 673318 - RNA, 19 nt, Homo sapiens
  misc_RNA (1)...(19): siRNA sense strand
caucauacgugacuguaga

SEQ ID NO: 673319 - RNA, 19 nt, Homo sapiens
  misc_RNA (1)...(19): siRNA sense strand
ccaagaugauugucccaaa

SEQ ID NO: 673320 - RNA, 19 nt, Homo sapiens
  misc_RNA (1)...(19): siRNA sense strand
uauacuggguuuccuguuu

SEQ ID NO: 673321 - RNA, 19 nt, Homo sapiens
  misc_RNA (1)...(19): siRNA sense strand
gcuauaauccaucgaaaug

SEQ ID NO: 673322 - RNA, 19 nt, Homo sapiens
  misc_RNA (1)...(19): siRNA sense strand
ugucaugauuccuacuuua

SEQ ID NO: 673323 - RNA, 19 nt, Homo sapiens
  misc_RNA (1)...(19): siRNA sense strand
gaagaacaaaccaagaaau

SEQ ID NO: 673324 - RNA, 19 nt, Homo sapiens
  misc_RNA (1)...(19): siRNA sense strand
aaagucaccugcaucauca

SEQ ID NO: 673325 - RNA, 19 nt, Homo sapiens
  misc_RNA (1)...(19): siRNA sense strand
ggugauagucauuuacuuu

SEQ ID NO: 673326 - RNA, 19 nt, Homo sapiens
  misc_RNA (1)...(19): siRNA sense strand
uggaaggcauaauuacaua

SEQ ID NO: 673327 - RNA, 19 nt, Homo sapiens
  misc_RNA (1)...(19): siRNA sense strand
gcuaguguguuucuacuca

SEQ ID NO: 673328 - RNA, 19 nt, Homo sapiens
  misc_RNA (1)...(19): siRNA sense strand
ccuguacgcuaguguguuu

SEQ ID NO: 673329 - RNA, 19 nt, Homo sapiens
  misc_RNA (1)...(19): siRNA sense strand
ucacgugucucagcauuga

SEQ ID NO: 673330 - RNA, 19 nt, Homo sapiens
  misc_RNA (1)...(19): siRNA sense strand
acaccaauauuacaguuug

SEQ ID NO: 673331 - RNA, 19 nt, Homo sapiens
  misc_RNA (1)...(19): siRNA sense strand
cuaaagaaggcuuaugaaa

SEQ ID NO: 673332 - RNA, 19 nt, Homo sapiens
  misc_RNA (1)...(19): siRNA sense strand
cagaagaacaaaccaagaa

SEQ ID NO: 673333 - RNA, 19 nt, Homo sapiens
  misc_RNA (1)...(19): siRNA sense strand
ucucaacucuucuacugaa

SEQ ID NO: 673334 - RNA, 19 nt, Homo sapiens
  misc_RNA (1)...(19): siRNA sense strand
caaagucaccugcaucauc

SEQ ID NO: 673335 - RNA, 19 nt, Homo sapiens
  misc_RNA (1)...(19): siRNA sense strand
uuacugacuuugccacuau

SEQ ID NO: 673336 - RNA, 19 nt, Homo sapiens
  misc_RNA (1)...(19): siRNA sense strand
ucaccugcaucaucauuug

SEQ ID NO: 673337 - RNA, 19 nt, Homo sapiens
  misc_RNA (1)...(19): siRNA sense strand
caagaugauugucccaaag

SEQ ID NO: 673338 - RNA, 19 nt, Homo sapiens
  misc_RNA (1)...(19): siRNA sense strand
cuacacagcuauggaauac

SEQ ID NO: 673339 - RNA, 19 nt, Homo sapiens
  misc_RNA (1)...(19): siRNA sense strand
auaugaagcugaagacugu

SEQ ID NO: 673340 - RNA, 19 nt, Homo sapiens
  misc_RNA (1)...(19): siRNA sense strand
gaaacagcuugguggugau

SEQ ID NO: 673341 - RNA, 19 nt, Homo sapiens
  misc_RNA (1)...(19): siRNA sense strand
aagcuggaaggcauaauua

SEQ ID NO: 673342 - RNA, 19 nt, Homo sapiens
  misc_RNA (1)...(19): siRNA sense strand
cagcuauaauccaucgaaa

SEQ ID NO: 673343 - RNA, 19 nt, Homo sapiens
  misc_RNA (1)...(19): siRNA sense strand
caugauuccuacuuuauac

SEQ ID NO: 673344 - RNA, 19 nt, Homo sapiens
  misc_RNA (1)...(19): siRNA sense strand
gaucgauaccuggcuauug

SEQ ID NO: 673345 - RNA, 19 nt, Homo sapiens
  misc_RNA (1)...(19): siRNA sense strand
ggaauaccgcuggcccuuu

SEQ ID NO: 673346 - RNA, 19 nt, Homo sapiens
  misc_RNA (1)...(19): siRNA sense strand
guaagcucauccaccaaga

SEQ ID NO: 673347 - RNA, 19 nt, Homo sapiens
  misc_RNA (1)...(19): siRNA sense strand
caguuugugcuuuccauua

SEQ ID NO: 673348 - RNA, 19 nt, Homo sapiens
  misc_RNA (1)...(19): siRNA sense strand
gcuggcccuuuggcaauua

SEQ ID NO: 673349 - RNA, 19 nt, Homo sapiens
  misc_RNA (1)...(19): siRNA sense strand
acuaugggcugucuacaca

SEQ ID NO: 673350 - RNA, 19 nt, Homo sapiens
  misc_RNA (1)...(19): siRNA sense strand
aaaucccacucaaaccuuu

SEQ ID NO: 673351 - RNA, 19 nt, Homo sapiens
  misc_RNA (1)...(19): siRNA sense strand
gcaauugugcuuuucuuuu

SEQ ID NO: 673352 - RNA, 19 nt, Homo sapiens
  misc_RNA (1)...(19): siRNA sense strand
aagaacaaaccaagaaaug

SEQ ID NO: 673353 - RNA, 19 nt, Homo sapiens
  misc_RNA (1)...(19): siRNA sense strand
ggaaggcauaauuacauau

SEQ ID NO: 673354 - RNA, 19 nt, Homo sapiens
  misc_RNA (1)...(19): siRNA sense strand
cuacugaagaugguauuaa

SEQ ID NO: 673355 - RNA, 19 nt, Homo sapiens
  misc_RNA (1)...(19): siRNA sense strand
gugggaauauuuggaaaca

SEQ ID NO: 673356 - RNA, 19 nt, Homo sapiens
  misc_RNA (1)...(19): siRNA sense strand
agaacaaaccaagaaauga

SEQ ID NO: 673357 - RNA, 19 nt, Homo sapiens
  misc_RNA (1)...(19): siRNA sense strand
gaaauucagaagaacaaac

SEQ ID NO: 673358 - RNA, 19 nt, Homo sapiens
  misc_RNA (1)...(19): siRNA sense strand
gacuguagaauugcagaua

SEQ ID NO: 673359 - RNA, 19 nt, Homo sapiens
  misc_RNA (1)...(19): siRNA sense strand
uggguuuccuguuuccuuu

SEQ ID NO: 673360 - RNA, 19 nt, Homo sapiens
  misc_RNA (1)...(19): siRNA sense strand
ccacucaaaccuuucaaca

SEQ ID NO: 673361 - RNA, 19 nt, Homo sapiens
  misc_RNA (1)...(19): siRNA sense strand
cuguagaauugcagauauu

SEQ ID NO: 673362 - RNA, 19 nt, Homo sapiens
  misc_RNA (1)...(19): siRNA sense strand
caccaaauauucacuuuuc

SEQ ID NO: 673363 - RNA, 19 nt, Homo sapiens
  misc_RNA (1)...(19): siRNA sense strand
aaagcuggaaggcauaauu

SEQ ID NO: 673364 - RNA, 19 nt, Homo sapiens
  misc_RNA (1)...(19): siRNA sense strand
ugagaacaccaauauuaca

SEQ ID NO: 673365 - RNA, 19 nt, Homo sapiens
  misc_RNA (1)...(19): siRNA sense strand
cagauaauguaagcucauc

SEQ ID NO: 673366 - RNA, 19 nt, Homo sapiens
  misc_RNA (1)...(19): siRNA sense strand
caaaucccacucaaaccuu

SEQ ID NO: 673367 - RNA, 19 nt, Homo sapiens
  misc_RNA (1)...(19): siRNA sense strand
agaagaacaaaccaagaaa

SEQ ID NO: 673368 - RNA, 19 nt, Homo sapiens
  misc_RNA (1)...(19): siRNA sense strand
uauuacaguuugugcuuuc

SEQ ID NO: 673369 - RNA, 19 nt, Homo sapiens
  misc_RNA (1)...(19): siRNA sense strand
gagaacaccaauauuacag

SEQ ID NO: 673370 - RNA, 19 nt, Homo sapiens
  misc_RNA (1)...(19): siRNA sense strand
guacgcuaguguguuucua

SEQ ID NO: 673371 - RNA, 19 nt, Homo sapiens
  misc_RNA (1)...(19): siRNA sense strand
gccaaagucaccugcauca

SEQ ID NO: 673372 - RNA, 19 nt, Homo sapiens
  misc_RNA (1)...(19): siRNA sense strand
ugguggugauagucauuua

SEQ ID NO: 673373 - RNA, 19 nt, Homo sapiens
  misc_RNA (1)...(19): siRNA sense strand
uagaauugcagauauugug

SEQ ID NO: 673374 - RNA, 19 nt, Homo sapiens
  misc_RNA (1)...(19): siRNA sense strand
acuguagaauugcagauau

SEQ ID NO: 673375 - RNA, 19 nt, Homo sapiens
  misc_RNA (1)...(19): siRNA sense strand
gauucaacuaggcaucaua

SEQ ID NO: 673376 - RNA, 19 nt, Homo sapiens
  misc_RNA (1)...(19): siRNA sense strand
gcuggaaggcauaauuaca

SEQ ID NO: 673377 - RNA, 19 nt, Homo sapiens
  misc_RNA (1)...(19): siRNA sense strand
aaacagcuugguggugaua

SEQ ID NO: 673378 - RNA, 19 nt, Homo sapiens
  misc_RNA (1)...(19): siRNA sense strand
auacuggguuuccuguuuc

SEQ ID NO: 673379 - RNA, 19 nt, Homo sapiens
  misc_RNA (1)...(19): siRNA sense strand
ccaaagcuggaaggcauaa

SEQ ID NO: 673380 - RNA, 19 nt, Homo sapiens
  misc_RNA (1)...(19): siRNA sense strand
cccaccaaauauucacuuu

SEQ ID NO: 673381 - RNA, 19 nt, Homo sapiens
  misc_RNA (1)...(19): siRNA sense strand
ucagaagaacaaaccaaga

SEQ ID NO: 673382 - RNA, 19 nt, Homo sapiens
  misc_RNA (1)...(19): siRNA sense strand
cauuaugagucccaaaauu

SEQ ID NO: 673383 - RNA, 19 nt, Homo sapiens
  misc_RNA (1)...(19): siRNA sense strand
aguuugugcuuuccauuau

SEQ ID NO: 673384 - RNA, 19 nt, Homo sapiens
  misc_RNA (1)...(19): siRNA sense strand
cauacgugacuguagaauu

SEQ ID NO: 673385 - RNA, 19 nt, Homo sapiens
  misc_RNA (1)...(19): siRNA sense strand
ucacuuuucuggauguauu

SEQ ID NO: 673386 - RNA, 19 nt, Homo sapiens
  misc_RNA (1)...(19): siRNA sense strand
cccuaaagaaggcuuauga

SEQ ID NO: 673387 - RNA, 19 nt, Homo sapiens
  misc_RNA (1)...(19): siRNA sense strand
uuugugcuuuccauuauga

SEQ ID NO: 673388 - RNA, 19 nt, Homo sapiens
  misc_RNA (1)...(19): siRNA sense strand
ucuacacagcuauggaaua

SEQ ID NO: 673389 - RNA, 19 nt, Homo sapiens
  misc_RNA (1)...(19): siRNA sense strand
gauaauguaagcucaucca

SEQ ID NO: 673390 - RNA, 19 nt, Homo sapiens
  misc_RNA (1)...(19): siRNA sense strand
ccuaaagaaggcuuaugaa

SEQ ID NO: 673391 - RNA, 19 nt, Homo sapiens
  misc_RNA (1)...(19): siRNA sense strand
ccaguuugccagcuauaau

SEQ ID NO: 673392 - RNA, 19 nt, Homo sapiens
  misc_RNA (1)...(19): siRNA sense strand
gucaugauuccuacuuuau

SEQ ID NO: 673393 - RNA, 19 nt, Homo sapiens
  misc_RNA (1)...(19): siRNA sense strand
auucucaacucuucuacug

SEQ ID NO: 673394 - RNA, 19 nt, Homo sapiens
  misc_RNA (1)...(19): siRNA sense strand
guagaauugcagauauugu

SEQ ID NO: 673395 - RNA, 19 nt, Homo sapiens
  misc_RNA (1)...(19): siRNA sense strand
ccagcuauaauccaucgaa

SEQ ID NO: 673396 - RNA, 19 nt, Homo sapiens
  misc_RNA (1)...(19): siRNA sense strand
aucgauaccuggcuauugu

SEQ ID NO: 673397 - RNA, 19 nt, Homo sapiens
  misc_RNA (1)...(19): siRNA sense strand
acucacgugucucagcauu

SEQ ID NO: 673398 - RNA, 19 nt, Homo sapiens
  misc_RNA (1)...(19): siRNA sense strand
aagaaggcuuaugaaauuc

SEQ ID NO: 673399 - RNA, 19 nt, Homo sapiens
  misc_RNA (1)...(19): siRNA sense strand
ucucagcauugaucgauac

SEQ ID NO: 673400 - RNA, 19 nt, Homo sapiens
  misc_RNA (1)...(19): siRNA sense strand
uagccaaagucaccugcau

SEQ ID NO: 673401 - RNA, 19 nt, Homo sapiens
  misc_RNA (1)...(19): siRNA sense strand
gaauauuuggaaacagcuu

SEQ ID NO: 673402 - RNA, 19 nt, Homo sapiens
  misc_RNA (1)...(19): siRNA sense strand
uuuggaaggcccuaaagaa

SEQ ID NO: 673403 - RNA, 19 nt, Homo sapiens
  misc_RNA (1)...(19): siRNA sense strand
gggcugggccugaccaaaa

SEQ ID NO: 673404 - RNA, 19 nt, Homo sapiens
  misc_RNA (1)...(19): siRNA sense strand
gauuccuacuuuauacagu

SEQ ID NO: 673405 - RNA, 19 nt, Homo sapiens
  misc_RNA (1)...(19): siRNA sense strand
uaagcucauccaccaagaa

SEQ ID NO: 673406 - RNA, 19 nt, Homo sapiens
  misc_RNA (1)...(19): siRNA sense strand
ccaaaucccacucaaaccu

SEQ ID NO: 673407 - RNA, 19 nt, Homo sapiens
  misc_RNA (1)...(19): siRNA sense strand
uuuaacaauugccugaauc

SEQ ID NO: 673408 - RNA, 19 nt, Homo sapiens
  misc_RNA (1)...(19): siRNA sense strand
acaaaccaagaaaugauga

SEQ ID NO: 673409 - RNA, 19 nt, Homo sapiens
  misc_RNA (1)...(19): siRNA sense strand
ucugaucauucuuacaagu

SEQ ID NO: 673410 - RNA, 19 nt, Homo sapiens
  misc_RNA (1)...(19): siRNA sense strand
gcgucaguuucaaccugua

SEQ ID NO: 673411 - RNA, 19 nt, Homo sapiens
  misc_RNA (1)...(19): siRNA sense strand
guuugugcuuuccauuaug

SEQ ID NO: 673412 - RNA, 19 nt, Homo sapiens
  misc_RNA (1)...(19): siRNA sense strand
gaacaccaauauuacaguu

SEQ ID NO: 673413 - RNA, 19 nt, Homo sapiens
  misc_RNA (1)...(19): siRNA sense strand
gaauaccgcuggcccuuug

SEQ ID NO: 673414 - RNA, 19 nt, Homo sapiens
  misc_RNA (1)...(19): siRNA sense strand
acucaaaccuuucaacaaa

SEQ ID NO: 673415 - RNA, 19 nt, Homo sapiens
  misc_RNA (1)...(19): siRNA sense strand
gaacaaaccaagaaaugau

SEQ ID NO: 673416 - RNA, 19 nt, Homo sapiens
  misc_RNA (1)...(19): siRNA sense strand
auacgugacuguagaauug

SEQ ID NO: 673417 - RNA, 19 nt, Homo sapiens
  misc_RNA (1)...(19): siRNA sense strand
caucauacgugacuguaga

SEQ ID NO: 673418 - RNA, 19 nt, Homo sapiens
  misc_RNA (1)...(19): siRNA sense strand
ccaagaugauugucccaaa

SEQ ID NO: 673419 - RNA, 19 nt, Homo sapiens
  misc_RNA (1)...(19): siRNA sense strand
uauacuggguuuccuguuu

SEQ ID NO: 673420 - RNA, 19 nt, Homo sapiens
  misc_RNA (1)...(19): siRNA sense strand
gcuauaauccaucgaaaug

SEQ ID NO: 673421 - RNA, 19 nt, Homo sapiens
  misc_RNA (1)...(19): siRNA sense strand
ugucaugauuccuacuuua

SEQ ID NO: 673422 - RNA, 19 nt, Homo sapiens
  misc_RNA (1)...(19): siRNA sense strand
gaagaacaaaccaagaaau

SEQ ID NO: 673423 - RNA, 19 nt, Homo sapiens
  misc_RNA (1)...(19): siRNA sense strand
aaagucaccugcaucauca

SEQ ID NO: 673424 - RNA, 19 nt, Homo sapiens
  misc_RNA (1)...(19): siRNA sense strand
ggugauagucauuuacuuu

SEQ ID NO: 673425 - RNA, 19 nt, Homo sapiens
  misc_RNA (1)...(19): siRNA sense strand
uggaaggcauaauuacaua

SEQ ID NO: 673426 - RNA, 19 nt, Homo sapiens
  misc_RNA (1)...(19): siRNA sense strand
gcuaguguguuucuacuca

SEQ ID NO: 673427 - RNA, 19 nt, Homo sapiens
  misc_RNA (1)...(19): siRNA sense strand
ccuguacgcuaguguguuu

SEQ ID NO: 673428 - RNA, 19 nt, Homo sapiens
  misc_RNA (1)...(19): siRNA sense strand
ucacgugucucagcauuga

SEQ ID NO: 673429 - RNA, 19 nt, Homo sapiens
  misc_RNA (1)...(19): siRNA sense strand
acaccaauauuacaguuug

SEQ ID NO: 673430 - RNA, 19 nt, Homo sapiens
  misc_RNA (1)...(19): siRNA sense strand
cuaaagaaggcuuaugaaa

SEQ ID NO: 673431 - RNA, 19 nt, Homo sapiens
  misc_RNA (1)...(19): siRNA sense strand
cagaagaacaaaccaagaa

SEQ ID NO: 673432 - RNA, 19 nt, Homo sapiens
  misc_RNA (1)...(19): siRNA sense strand
ucucaacucuucuacugaa

SEQ ID NO: 673433 - RNA, 19 nt, Homo sapiens
  misc_RNA (1)...(19): siRNA sense strand
caaagucaccugcaucauc

SEQ ID NO: 673434 - RNA, 19 nt, Homo sapiens
  misc_RNA (1)...(19): siRNA sense strand
uuacugacuuugccacuau

SEQ ID NO: 673435 - RNA, 19 nt, Homo sapiens
  misc_RNA (1)...(19): siRNA sense strand
ucaccugcaucaucauuug

SEQ ID NO: 673436 - RNA, 19 nt, Homo sapiens
  misc_RNA (1)...(19): siRNA sense strand
caagaugauugucccaaag

SEQ ID NO: 673437 - RNA, 19 nt, Homo sapiens
  misc_RNA (1)...(19): siRNA sense strand
cuacacagcuauggaauac

SEQ ID NO: 673438 - RNA, 19 nt, Homo sapiens
  misc_RNA (1)...(19): siRNA sense strand
auaugaagcugaagacugu

SEQ ID NO: 673439 - RNA, 19 nt, Homo sapiens
  misc_RNA (1)...(19): siRNA sense strand
gaaacagcuugguggugau

SEQ ID NO: 673440 - RNA, 19 nt, Homo sapiens
  misc_RNA (1)...(19): siRNA sense strand
aagcuggaaggcauaauua

SEQ ID NO: 673441 - RNA, 19 nt, Homo sapiens
  misc_RNA (1)...(19): siRNA sense strand
cagcuauaauccaucgaaa

SEQ ID NO: 673442 - RNA, 19 nt, Homo sapiens
  misc_RNA (1)...(19): siRNA sense strand
caugauuccuacuuuauac

SEQ ID NO: 673443 - RNA, 19 nt, Homo sapiens
  misc_RNA (1)...(19): siRNA sense strand
gaucgauaccuggcuauug

SEQ ID NO: 673444 - RNA, 19 nt, Homo sapiens
  misc_RNA (1)...(19): siRNA sense strand
ggaauaccgcuggcccuuu

SEQ ID NO: 673445 - RNA, 19 nt, Homo sapiens
  misc_RNA (1)...(19): siRNA sense strand
guaagcucauccaccaaga

SEQ ID NO: 673446 - RNA, 19 nt, Homo sapiens
  misc_RNA (1)...(19): siRNA sense strand
caguuugugcuuuccauua

SEQ ID NO: 673447 - RNA, 19 nt, Homo sapiens
  misc_RNA (1)...(19): siRNA sense strand
gcuggcccuuuggcaauua

SEQ ID NO: 673448 - RNA, 19 nt, Homo sapiens
  misc_RNA (1)...(19): siRNA sense strand
acuaugggcugucuacaca

SEQ ID NO: 673449 - RNA, 19 nt, Homo sapiens
  misc_RNA (1)...(19): siRNA sense strand
aaaucccacucaaaccuuu

SEQ ID NO: 673450 - RNA, 19 nt, Homo sapiens
  misc_RNA (1)...(19): siRNA sense strand
gcaauugugcuuuucuuuu

SEQ ID NO: 673451 - RNA, 19 nt, Homo sapiens
  misc_RNA (1)...(19): siRNA sense strand
aagaacaaaccaagaaaug

SEQ ID NO: 673452 - RNA, 19 nt, Homo sapiens
  misc_RNA (1)...(19): siRNA sense strand
ggaaggcauaauuacauau

SEQ ID NO: 673453 - RNA, 19 nt, Homo sapiens
  misc_RNA (1)...(19): siRNA sense strand
cuacugaagaugguauuaa

SEQ ID NO: 673454 - RNA, 19 nt, Homo sapiens
  misc_RNA (1)...(19): siRNA sense strand
gugggaauauuuggaaaca

SEQ ID NO: 673455 - RNA, 19 nt, Homo sapiens
  misc_RNA (1)...(19): siRNA sense strand
agaacaaaccaagaaauga

SEQ ID NO: 673456 - RNA, 19 nt, Homo sapiens
  misc_RNA (1)...(19): siRNA sense strand
gaaauucagaagaacaaac

SEQ ID NO: 673457 - RNA, 19 nt, Homo sapiens
  misc_RNA (1)...(19): siRNA sense strand
gacuguagaauugcagaua

SEQ ID NO: 673458 - RNA, 19 nt, Homo sapiens
  misc_RNA (1)...(19): siRNA sense strand
uggguuuccuguuuccuuu

SEQ ID NO: 673459 - RNA, 19 nt, Homo sapiens
  misc_RNA (1)...(19): siRNA sense strand
ccacucaaaccuuucaaca

SEQ ID NO: 673460 - RNA, 19 nt, Homo sapiens
  misc_RNA (1)...(19): siRNA sense strand
cuguagaauugcagauauu

SEQ ID NO: 673461 - RNA, 19 nt, Homo sapiens
  misc_RNA (1)...(19): siRNA sense strand
caccaaauauucacuuuuc

SEQ ID NO: 673462 - RNA, 19 nt, Homo sapiens
  misc_RNA (1)...(19): siRNA sense strand
aaagcuggaaggcauaauu

SEQ ID NO: 673463 - RNA, 19 nt, Homo sapiens
  misc_RNA (1)...(19): siRNA sense strand
ugagaacaccaauauuaca

SEQ ID NO: 673464 - RNA, 19 nt, Homo sapiens
  misc_RNA (1)...(19): siRNA sense strand
cagauaauguaagcucauc

SEQ ID NO: 673465 - RNA, 19 nt, Homo sapiens
  misc_RNA (1)...(19): siRNA sense strand
caaaucccacucaaaccuu

SEQ ID NO: 673466 - RNA, 19 nt, Homo sapiens
  misc_RNA (1)...(19): siRNA sense strand
agaagaacaaaccaagaaa

SEQ ID NO: 673467 - RNA, 19 nt, Homo sapiens
  misc_RNA (1)...(19): siRNA sense strand
uauuacaguuugugcuuuc

SEQ ID NO: 673468 - RNA, 19 nt, Homo sapiens
  misc_RNA (1)...(19): siRNA sense strand
gagaacaccaauauuacag

SEQ ID NO: 673469 - RNA, 19 nt, Homo sapiens
  misc_RNA (1)...(19): siRNA sense strand
guacgcuaguguguuucua

SEQ ID NO: 673470 - RNA, 19 nt, Homo sapiens
  misc_RNA (1)...(19): siRNA sense strand
gccaaagucaccugcauca

SEQ ID NO: 673471 - RNA, 19 nt, Homo sapiens
  misc_RNA (1)...(19): siRNA sense strand
ugguggugauagucauuua

SEQ ID NO: 673472 - RNA, 19 nt, Homo sapiens
  misc_RNA (1)...(19): siRNA sense strand
uagaauugcagauauugug

SEQ ID NO: 673473 - RNA, 19 nt, Homo sapiens
  misc_RNA (1)...(19): siRNA sense strand
acuguagaauugcagauau

SEQ ID NO: 673474 - RNA, 19 nt, Homo sapiens
  misc_RNA (1)...(19): siRNA sense strand
gauucaacuaggcaucaua

SEQ ID NO: 673475 - RNA, 19 nt, Homo sapiens
  misc_RNA (1)...(19): siRNA sense strand
gcuggaaggcauaauuaca

SEQ ID NO: 673476 - RNA, 19 nt, Homo sapiens
  misc_RNA (1)...(19): siRNA sense strand
aaacagcuugguggugaua

SEQ ID NO: 673477 - RNA, 19 nt, Homo sapiens
  misc_RNA (1)...(19): siRNA sense strand
auacuggguuuccuguuuc

SEQ ID NO: 673478 - RNA, 19 nt, Homo sapiens
  misc_RNA (1)...(19): siRNA sense strand
ccaaagcuggaaggcauaa

SEQ ID NO: 673479 - RNA, 19 nt, Homo sapiens
  misc_RNA (1)...(19): siRNA sense strand
cccaccaaauauucacuuu

SEQ ID NO: 673480 - RNA, 19 nt, Homo sapiens
  misc_RNA (1)...(19): siRNA sense strand
ucagaagaacaaaccaaga

SEQ ID NO: 673481 - RNA, 19 nt, Homo sapiens
  misc_RNA (1)...(19): siRNA sense strand
cauuaugagucccaaaauu

SEQ ID NO: 673482 - RNA, 19 nt, Homo sapiens
  misc_RNA (1)...(19): siRNA sense strand
aguuugugcuuuccauuau

SEQ ID NO: 673483 - RNA, 19 nt, Homo sapiens
  misc_RNA (1)...(19): siRNA sense strand
cauacgugacuguagaauu

SEQ ID NO: 673484 - RNA, 19 nt, Homo sapiens
  misc_RNA (1)...(19): siRNA sense strand
ucacuuuucuggauguauu

SEQ ID NO: 673485 - RNA, 19 nt, Homo sapiens
  misc_RNA (1)...(19): siRNA sense strand
cccuaaagaaggcuuauga

SEQ ID NO: 673486 - RNA, 19 nt, Homo sapiens
  misc_RNA (1)...(19): siRNA sense strand
uuugugcuuuccauuauga

SEQ ID NO: 673487 - RNA, 19 nt, Homo sapiens
  misc_RNA (1)...(19): siRNA sense strand
ucuacacagcuauggaaua

SEQ ID NO: 673488 - RNA, 19 nt, Homo sapiens
  misc_RNA (1)...(19): siRNA sense strand
gauaauguaagcucaucca

SEQ ID NO: 673489 - RNA, 19 nt, Homo sapiens
  misc_RNA (1)...(19): siRNA sense strand
ccuaaagaaggcuuaugaa

SEQ ID NO: 673490 - RNA, 19 nt, Homo sapiens
  misc_RNA (1)...(19): siRNA sense strand
ccaguuugccagcuauaau

SEQ ID NO: 673491 - RNA, 19 nt, Homo sapiens
  misc_RNA (1)...(19): siRNA sense strand
gucaugauuccuacuuuau

SEQ ID NO: 673492 - RNA, 19 nt, Homo sapiens
  misc_RNA (1)...(19): siRNA sense strand
auucucaacucuucuacug

SEQ ID NO: 673493 - RNA, 19 nt, Homo sapiens
  misc_RNA (1)...(19): siRNA sense strand
guagaauugcagauauugu

SEQ ID NO: 673494 - RNA, 19 nt, Homo sapiens
  misc_RNA (1)...(19): siRNA sense strand
ccagcuauaauccaucgaa

SEQ ID NO: 673495 - RNA, 19 nt, Homo sapiens
  misc_RNA (1)...(19): siRNA sense strand
aucgauaccuggcuauugu

SEQ ID NO: 673496 - RNA, 19 nt, Homo sapiens
  misc_RNA (1)...(19): siRNA sense strand
acucacgugucucagcauu

SEQ ID NO: 673497 - RNA, 19 nt, Homo sapiens
  misc_RNA (1)...(19): siRNA sense strand
aagaaggcuuaugaaauuc

SEQ ID NO: 673498 - RNA, 19 nt, Homo sapiens
  misc_RNA (1)...(19): siRNA sense strand
ucucagcauugaucgauac

SEQ ID NO: 673499 - RNA, 19 nt, Homo sapiens
  misc_RNA (1)...(19): siRNA sense strand
uagccaaagucaccugcau

SEQ ID NO: 673500 - RNA, 19 nt, Homo sapiens
  misc_RNA (1)...(19): siRNA sense strand
gaauauuuggaaacagcuu

SEQ ID NO: 673501 - RNA, 19 nt, Homo sapiens
  misc_RNA (1)...(19): siRNA sense strand
uuuggaaggcccuaaagaa

SEQ ID NO: 673502 - RNA, 19 nt, Homo sapiens
  misc_RNA (1)...(19): siRNA sense strand
gggcugggccugaccaaaa

SEQ ID NO: 673503 - RNA, 19 nt, Homo sapiens
  misc_RNA (1)...(19): siRNA sense strand
gauuccuacuuuauacagu

SEQ ID NO: 673504 - RNA, 19 nt, Homo sapiens
  misc_RNA (1)...(19): siRNA sense strand
uaagcucauccaccaagaa

SEQ ID NO: 673505 - RNA, 19 nt, Homo sapiens
  misc_RNA (1)...(19): siRNA sense strand
ccaaaucccacucaaaccu

SEQ ID NO: 673506 - RNA, 19 nt, Homo sapiens
  misc_RNA (1)...(19): siRNA sense strand
uuuaacaauugccugaauc

SEQ ID NO: 673507 - RNA, 19 nt, Homo sapiens
  misc_RNA (1)...(19): siRNA sense strand
acaaaccaagaaaugauga

SEQ ID NO: 673508 - RNA, 19 nt, Homo sapiens
  misc_RNA (1)...(19): siRNA sense strand
ucugaucauucuuacaagu

SEQ ID NO: 673509 - RNA, 19 nt, Homo sapiens
  misc_RNA (1)...(19): siRNA sense strand
gcgucaguuucaaccugua

SEQ ID NO: 673510 - RNA, 19 nt, Homo sapiens
  misc_RNA (1)...(19): siRNA sense strand
guuugugcuuuccauuaug

SEQ ID NO: 673511 - RNA, 19 nt, Homo sapiens
  misc_RNA (1)...(19): siRNA sense strand
gaacaccaauauuacaguu

SEQ ID NO: 673512 - RNA, 19 nt, Homo sapiens
  misc_RNA (1)...(19): siRNA sense strand
gaauaccgcuggcccuuug

SEQ ID NO: 673513 - RNA, 19 nt, Homo sapiens
  misc_RNA (1)...(19): siRNA sense strand
acucaaaccuuucaacaaa

SEQ ID NO: 673514 - RNA, 19 nt, Homo sapiens
  misc_RNA (1)...(19): siRNA sense strand
gaacaaaccaagaaaugau

SEQ ID NO: 673515 - RNA, 19 nt, Homo sapiens
  misc_RNA (1)...(19): siRNA sense strand
auacgugacuguagaauug

SEQ ID NO: 673516 - RNA, 19 nt, Homo sapiens
  misc_RNA (1)...(19): siRNA sense strand
caucauacgugacuguaga

SEQ ID NO: 673517 - RNA, 19 nt, Homo sapiens
  misc_RNA (1)...(19): siRNA sense strand
ccaagaugauugucccaaa

SEQ ID NO: 673518 - RNA, 19 nt, Homo sapiens
  misc_RNA (1)...(19): siRNA sense strand
uauacuggguuuccuguuu

SEQ ID NO: 673519 - RNA, 19 nt, Homo sapiens
  misc_RNA (1)...(19): siRNA sense strand
gcuauaauccaucgaaaug

SEQ ID NO: 673520 - RNA, 19 nt, Homo sapiens
  misc_RNA (1)...(19): siRNA sense strand
ugucaugauuccuacuuua

SEQ ID NO: 673521 - RNA, 19 nt, Homo sapiens
  misc_RNA (1)...(19): siRNA sense strand
gaagaacaaaccaagaaau

SEQ ID NO: 673522 - RNA, 19 nt, Homo sapiens
  misc_RNA (1)...(19): siRNA sense strand
aaagucaccugcaucauca

SEQ ID NO: 673523 - RNA, 19 nt, Homo sapiens
  misc_RNA (1)...(19): siRNA sense strand
ggugauagucauuuacuuu

SEQ ID NO: 673524 - RNA, 19 nt, Homo sapiens
  misc_RNA (1)...(19): siRNA sense strand
uggaaggcauaauuacaua

SEQ ID NO: 673525 - RNA, 19 nt, Homo sapiens
  misc_RNA (1)...(19): siRNA sense strand
gcuaguguguuucuacuca

SEQ ID NO: 673526 - RNA, 19 nt, Homo sapiens
  misc_RNA (1)...(19): siRNA sense strand
ccuguacgcuaguguguuu

SEQ ID NO: 673527 - RNA, 19 nt, Homo sapiens
  misc_RNA (1)...(19): siRNA sense strand
ucacgugucucagcauuga

SEQ ID NO: 673528 - RNA, 19 nt, Homo sapiens
  misc_RNA (1)...(19): siRNA sense strand
acaccaauauuacaguuug

SEQ ID NO: 673529 - RNA, 19 nt, Homo sapiens
  misc_RNA (1)...(19): siRNA sense strand
cuaaagaaggcuuaugaaa

SEQ ID NO: 673530 - RNA, 19 nt, Homo sapiens
  misc_RNA (1)...(19): siRNA sense strand
cagaagaacaaaccaagaa

SEQ ID NO: 673531 - RNA, 19 nt, Homo sapiens
  misc_RNA (1)...(19): siRNA sense strand
ucucaacucuucuacugaa

SEQ ID NO: 673532 - RNA, 19 nt, Homo sapiens
  misc_RNA (1)...(19): siRNA sense strand
caaagucaccugcaucauc

SEQ ID NO: 673533 - RNA, 19 nt, Homo sapiens
  misc_RNA (1)...(19): siRNA sense strand
uuacugacuuugccacuau

SEQ ID NO: 673534 - RNA, 19 nt, Homo sapiens
  misc_RNA (1)...(19): siRNA sense strand
ucaccugcaucaucauuug

SEQ ID NO: 673535 - RNA, 19 nt, Homo sapiens
  misc_RNA (1)...(19): siRNA sense strand
caagaugauugucccaaag

SEQ ID NO: 673536 - RNA, 19 nt, Homo sapiens
  misc_RNA (1)...(19): siRNA sense strand
cuacacagcuauggaauac

SEQ ID NO: 673537 - RNA, 19 nt, Homo sapiens
  misc_RNA (1)...(19): siRNA sense strand
auaugaagcugaagacugu

SEQ ID NO: 673538 - RNA, 19 nt, Homo sapiens
  misc_RNA (1)...(19): siRNA sense strand
gaaacagcuugguggugau

SEQ ID NO: 673539 - RNA, 19 nt, Homo sapiens
  misc_RNA (1)...(19): siRNA sense strand
aagcuggaaggcauaauua

SEQ ID NO: 673540 - RNA, 19 nt, Homo sapiens
  misc_RNA (1)...(19): siRNA sense strand
cagcuauaauccaucgaaa

SEQ ID NO: 673541 - RNA, 19 nt, Homo sapiens
  misc_RNA (1)...(19): siRNA sense strand
caugauuccuacuuuauac

SEQ ID NO: 673542 - RNA, 19 nt, Homo sapiens
  misc_RNA (1)...(19): siRNA sense strand
gaucgauaccuggcuauug

SEQ ID NO: 673543 - RNA, 19 nt, Homo sapiens
  misc_RNA (1)...(19): siRNA sense strand
ggaauaccgcuggcccuuu

SEQ ID NO: 673544 - RNA, 19 nt, Homo sapiens
  misc_RNA (1)...(19): siRNA sense strand
guaagcucauccaccaaga

SEQ ID NO: 673545 - RNA, 19 nt, Homo sapiens
  misc_RNA (1)...(19): siRNA sense strand
caguuugugcuuuccauua

SEQ ID NO: 673546 - RNA, 19 nt, Homo sapiens
  misc_RNA (1)...(19): siRNA sense strand
gcuggcccuuuggcaauua

SEQ ID NO: 673547 - RNA, 19 nt, Homo sapiens
  misc_RNA (1)...(19): siRNA sense strand
acuaugggcugucuacaca

SEQ ID NO: 673548 - RNA, 19 nt, Homo sapiens
  misc_RNA (1)...(19): siRNA sense strand
aaaucccacucaaaccuuu

SEQ ID NO: 673549 - RNA, 19 nt, Homo sapiens
  misc_RNA (1)...(19): siRNA sense strand
gcaauugugcuuuucuuuu

SEQ ID NO: 673550 - RNA, 19 nt, Homo sapiens
  misc_RNA (1)...(19): siRNA sense strand
aagaacaaaccaagaaaug

SEQ ID NO: 673551 - RNA, 19 nt, Homo sapiens
  misc_RNA (1)...(19): siRNA sense strand
ggaaggcauaauuacauau

SEQ ID NO: 673552 - RNA, 19 nt, Homo sapiens
  misc_RNA (1)...(19): siRNA sense strand
cuacugaagaugguauuaa

SEQ ID NO: 673553 - RNA, 19 nt, Homo sapiens
  misc_RNA (1)...(19): siRNA sense strand
gugggaauauuuggaaaca

SEQ ID NO: 673554 - RNA, 19 nt, Homo sapiens
  misc_RNA (1)...(19): siRNA sense strand
agaacaaaccaagaaauga

SEQ ID NO: 673555 - RNA, 19 nt, Homo sapiens
  misc_RNA (1)...(19): siRNA sense strand
gaaauucagaagaacaaac

SEQ ID NO: 673556 - RNA, 19 nt, Homo sapiens
  misc_RNA (1)...(19): siRNA sense strand
gacuguagaauugcagaua

SEQ ID NO: 673557 - RNA, 19 nt, Homo sapiens
  misc_RNA (1)...(19): siRNA sense strand
uggguuuccuguuuccuuu

SEQ ID NO: 673558 - RNA, 19 nt, Homo sapiens
  misc_RNA (1)...(19): siRNA sense strand
ccacucaaaccuuucaaca

SEQ ID NO: 673559 - RNA, 19 nt, Homo sapiens
  misc_RNA (1)...(19): siRNA sense strand
cuguagaauugcagauauu

SEQ ID NO: 673560 - RNA, 19 nt, Homo sapiens
  misc_RNA (1)...(19): siRNA sense strand
caccaaauauucacuuuuc

SEQ ID NO: 673561 - RNA, 19 nt, Homo sapiens
  misc_RNA (1)...(19): siRNA sense strand
aaagcuggaaggcauaauu

SEQ ID NO: 673562 - RNA, 19 nt, Homo sapiens
  misc_RNA (1)...(19): siRNA sense strand
ugagaacaccaauauuaca

SEQ ID NO: 673563 - RNA, 19 nt, Homo sapiens
  misc_RNA (1)...(19): siRNA sense strand
cagauaauguaagcucauc

SEQ ID NO: 673564 - RNA, 19 nt, Homo sapiens
  misc_RNA (1)...(19): siRNA sense strand
caaaucccacucaaaccuu

SEQ ID NO: 673565 - RNA, 19 nt, Homo sapiens
  misc_RNA (1)...(19): siRNA sense strand
agaagaacaaaccaagaaa

SEQ ID NO: 673566 - RNA, 19 nt, Homo sapiens
  misc_RNA (1)...(19): siRNA sense strand
uauuacaguuugugcuuuc

SEQ ID NO: 673567 - RNA, 19 nt, Homo sapiens
  misc_RNA (1)...(19): siRNA sense strand
gagaacaccaauauuacag

SEQ ID NO: 673568 - RNA, 19 nt, Homo sapiens
  misc_RNA (1)...(19): siRNA sense strand
guacgcuaguguguuucua

SEQ ID NO: 673569 - RNA, 19 nt, Homo sapiens
  misc_RNA (1)...(19): siRNA sense strand
gccaaagucaccugcauca

SEQ ID NO: 673570 - RNA, 19 nt, Homo sapiens
  misc_RNA (1)...(19): siRNA sense strand
ugguggugauagucauuua

SEQ ID NO: 673571 - RNA, 19 nt, Homo sapiens
  misc_RNA (1)...(19): siRNA sense strand
uagaauugcagauauugug

SEQ ID NO: 673572 - RNA, 19 nt, Homo sapiens
  misc_RNA (1)...(19): siRNA sense strand
acuguagaauugcagauau

SEQ ID NO: 673573 - RNA, 19 nt, Homo sapiens
  misc_RNA (1)...(19): siRNA sense strand
gauucaacuaggcaucaua

SEQ ID NO: 673574 - RNA, 19 nt, Homo sapiens
  misc_RNA (1)...(19): siRNA sense strand
gcuggaaggcauaauuaca

SEQ ID NO: 673575 - RNA, 19 nt, Homo sapiens
  misc_RNA (1)...(19): siRNA sense strand
aaacagcuugguggugaua

SEQ ID NO: 673576 - RNA, 19 nt, Homo sapiens
  misc_RNA (1)...(19): siRNA sense strand
auacuggguuuccuguuuc

SEQ ID NO: 673577 - RNA, 19 nt, Homo sapiens
  misc_RNA (1)...(19): siRNA sense strand
ccaaagcuggaaggcauaa

SEQ ID NO: 673578 - RNA, 19 nt, Homo sapiens
  misc_RNA (1)...(19): siRNA sense strand
cccaccaaauauucacuuu

SEQ ID NO: 673579 - RNA, 19 nt, Homo sapiens
  misc_RNA (1)...(19): siRNA sense strand
ucagaagaacaaaccaaga

SEQ ID NO: 673580 - RNA, 19 nt, Homo sapiens
  misc_RNA (1)...(19): siRNA sense strand
cauuaugagucccaaaauu

SEQ ID NO: 673581 - RNA, 19 nt, Homo sapiens
  misc_RNA (1)...(19): siRNA sense strand
aguuugugcuuuccauuau

SEQ ID NO: 673582 - RNA, 19 nt, Homo sapiens
  misc_RNA (1)...(19): siRNA sense strand
cauacgugacuguagaauu

SEQ ID NO: 673583 - RNA, 19 nt, Homo sapiens
  misc_RNA (1)...(19): siRNA sense strand
ucacuuuucuggauguauu

SEQ ID NO: 673584 - RNA, 19 nt, Homo sapiens
  misc_RNA (1)...(19): siRNA sense strand
cccuaaagaaggcuuauga

SEQ ID NO: 673585 - RNA, 19 nt, Homo sapiens
  misc_RNA (1)...(19): siRNA sense strand
uuugugcuuuccauuauga

SEQ ID NO: 673586 - RNA, 19 nt, Homo sapiens
  misc_RNA (1)...(19): siRNA sense strand
ucuacacagcuauggaaua

SEQ ID NO: 673587 - RNA, 19 nt, Homo sapiens
  misc_RNA (1)...(19): siRNA sense strand
gauaauguaagcucaucca

SEQ ID NO: 673588 - RNA, 19 nt, Homo sapiens
  misc_RNA (1)...(19): siRNA sense strand
ccuaaagaaggcuuaugaa

SEQ ID NO: 673589 - RNA, 19 nt, Homo sapiens
  misc_RNA (1)...(19): siRNA sense strand
ccaguuugccagcuauaau

SEQ ID NO: 673590 - RNA, 19 nt, Homo sapiens
  misc_RNA (1)...(19): siRNA sense strand
gucaugauuccuacuuuau

SEQ ID NO: 673591 - RNA, 19 nt, Homo sapiens
  misc_RNA (1)...(19): siRNA sense strand
auucucaacucuucuacug

SEQ ID NO: 673592 - RNA, 19 nt, Homo sapiens
  misc_RNA (1)...(19): siRNA sense strand
guagaauugcagauauugu

SEQ ID NO: 673593 - RNA, 19 nt, Homo sapiens
  misc_RNA (1)...(19): siRNA sense strand
ccagcuauaauccaucgaa

SEQ ID NO: 673594 - RNA, 19 nt, Homo sapiens
  misc_RNA (1)...(19): siRNA sense strand
aucgauaccuggcuauugu

SEQ ID NO: 673595 - RNA, 19 nt, Homo sapiens
  misc_RNA (1)...(19): siRNA sense strand
acucacgugucucagcauu

SEQ ID NO: 673596 - RNA, 19 nt, Homo sapiens
  misc_RNA (1)...(19): siRNA sense strand
aagaaggcuuaugaaauuc

SEQ ID NO: 673597 - RNA, 19 nt, Homo sapiens
  misc_RNA (1)...(19): siRNA sense strand
ucucagcauugaucgauac

SEQ ID NO: 673598 - RNA, 19 nt, Homo sapiens
  misc_RNA (1)...(19): siRNA sense strand
uagccaaagucaccugcau

SEQ ID NO: 673599 - RNA, 19 nt, Homo sapiens
  misc_RNA (1)...(19): siRNA sense strand
gaauauuuggaaacagcuu

SEQ ID NO: 673600 - RNA, 19 nt, Homo sapiens
  misc_RNA (1)...(19): siRNA sense strand
uuuggaaggcccuaaagaa

SEQ ID NO: 673601 - RNA, 19 nt, Homo sapiens
  misc_RNA (1)...(19): siRNA sense strand
gggcugggccugaccaaaa

SEQ ID NO: 673602 - RNA, 19 nt, Homo sapiens
  misc_RNA (1)...(19): siRNA sense strand
gauuccuacuuuauacagu

SEQ ID NO: 673603 - RNA, 19 nt, Homo sapiens
  misc_RNA (1)...(19): siRNA sense strand
uaagcucauccaccaagaa

SEQ ID NO: 673604 - RNA, 19 nt, Homo sapiens
  misc_RNA (1)...(19): siRNA sense strand
ccaaaucccacucaaaccu

SEQ ID NO: 673605 - RNA, 19 nt, Homo sapiens
  misc_RNA (1)...(19): siRNA sense strand
uuuaacaauugccugaauc

SEQ ID NO: 673606 - RNA, 19 nt, Homo sapiens
  misc_RNA (1)...(19): siRNA sense strand
acaaaccaagaaaugauga

SEQ ID NO: 673607 - RNA, 19 nt, Homo sapiens
  misc_RNA (1)...(19): siRNA sense strand
ucugaucauucuuacaagu

SEQ ID NO: 673608 - RNA, 19 nt, Homo sapiens
  misc_RNA (1)...(19): siRNA sense strand
gcgucaguuucaaccugua

SEQ ID NO: 673609 - RNA, 19 nt, Homo sapiens
  misc_RNA (1)...(19): siRNA sense strand
guuugugcuuuccauuaug

SEQ ID NO: 673610 - RNA, 19 nt, Homo sapiens
  misc_RNA (1)...(19): siRNA sense strand
gaacaccaauauuacaguu

SEQ ID NO: 673611 - RNA, 19 nt, Homo sapiens
  misc_RNA (1)...(19): siRNA sense strand
gaauaccgcuggcccuuug

SEQ ID NO: 673612 - RNA, 19 nt, Homo sapiens
  misc_RNA (1)...(19): siRNA sense strand
acucaaaccuuucaacaaa

SEQ ID NO: 673613 - RNA, 19 nt, Homo sapiens
  misc_RNA (1)...(19): siRNA sense strand
gaacaaaccaagaaaugau

SEQ ID NO: 673614 - RNA, 19 nt, Homo sapiens
  misc_RNA (1)...(19): siRNA sense strand
auacgugacuguagaauug

SEQ ID NO: 673615 - RNA, 19 nt, Homo sapiens
  misc_RNA (1)...(19): siRNA sense strand
caucauacgugacuguaga

SEQ ID NO: 673616 - RNA, 19 nt, Homo sapiens
  misc_RNA (1)...(19): siRNA sense strand
ccaagaugauugucccaaa

SEQ ID NO: 673617 - RNA, 19 nt, Homo sapiens
  misc_RNA (1)...(19): siRNA sense strand
uauacuggguuuccuguuu

SEQ ID NO: 673618 - RNA, 19 nt, Homo sapiens
  misc_RNA (1)...(19): siRNA sense strand
gcuauaauccaucgaaaug

SEQ ID NO: 673619 - RNA, 19 nt, Homo sapiens
  misc_RNA (1)...(19): siRNA sense strand
ugucaugauuccuacuuua

SEQ ID NO: 673620 - RNA, 19 nt, Homo sapiens
  misc_RNA (1)...(19): siRNA sense strand
gaagaacaaaccaagaaau

SEQ ID NO: 673621 - RNA, 19 nt, Homo sapiens
  misc_RNA (1)...(19): siRNA sense strand
aaagucaccugcaucauca

SEQ ID NO: 673622 - RNA, 19 nt, Homo sapiens
  misc_RNA (1)...(19): siRNA sense strand
ggugauagucauuuacuuu

SEQ ID NO: 673623 - RNA, 19 nt, Homo sapiens
  misc_RNA (1)...(19): siRNA sense strand
uggaaggcauaauuacaua

SEQ ID NO: 673624 - RNA, 19 nt, Homo sapiens
  misc_RNA (1)...(19): siRNA sense strand
gcuaguguguuucuacuca

SEQ ID NO: 673625 - RNA, 19 nt, Homo sapiens
  misc_RNA (1)...(19): siRNA sense strand
ccuguacgcuaguguguuu

SEQ ID NO: 673626 - RNA, 19 nt, Homo sapiens
  misc_RNA (1)...(19): siRNA sense strand
ucacgugucucagcauuga

SEQ ID NO: 673627 - RNA, 19 nt, Homo sapiens
  misc_RNA (1)...(19): siRNA sense strand
acaccaauauuacaguuug

SEQ ID NO: 673628 - RNA, 19 nt, Homo sapiens
  misc_RNA (1)...(19): siRNA sense strand
cuaaagaaggcuuaugaaa

SEQ ID NO: 673629 - RNA, 19 nt, Homo sapiens
  misc_RNA (1)...(19): siRNA sense strand
cagaagaacaaaccaagaa

SEQ ID NO: 673630 - RNA, 19 nt, Homo sapiens
  misc_RNA (1)...(19): siRNA sense strand
ucucaacucuucuacugaa

SEQ ID NO: 673631 - RNA, 19 nt, Homo sapiens
  misc_RNA (1)...(19): siRNA sense strand
caaagucaccugcaucauc

SEQ ID NO: 673632 - RNA, 19 nt, Homo sapiens
  misc_RNA (1)...(19): siRNA sense strand
uuacugacuuugccacuau

SEQ ID NO: 673633 - RNA, 19 nt, Homo sapiens
  misc_RNA (1)...(19): siRNA sense strand
ucaccugcaucaucauuug

SEQ ID NO: 673634 - RNA, 19 nt, Homo sapiens
  misc_RNA (1)...(19): siRNA sense strand
caagaugauugucccaaag

SEQ ID NO: 673635 - RNA, 19 nt, Homo sapiens
  misc_RNA (1)...(19): siRNA sense strand
cuacacagcuauggaauac

SEQ ID NO: 673636 - RNA, 19 nt, Homo sapiens
  misc_RNA (1)...(19): siRNA sense strand
auaugaagcugaagacugu

SEQ ID NO: 673637 - RNA, 19 nt, Homo sapiens
  misc_RNA (1)...(19): siRNA sense strand
gaaacagcuugguggugau

SEQ ID NO: 673638 - RNA, 19 nt, Homo sapiens
  misc_RNA (1)...(19): siRNA sense strand
aagcuggaaggcauaauua

SEQ ID NO: 673639 - RNA, 19 nt, Homo sapiens
  misc_RNA (1)...(19): siRNA sense strand
cagcuauaauccaucgaaa

SEQ ID NO: 673640 - RNA, 19 nt, Homo sapiens
  misc_RNA (1)...(19): siRNA sense strand
caugauuccuacuuuauac

SEQ ID NO: 673641 - RNA, 19 nt, Homo sapiens
  misc_RNA (1)...(19): siRNA sense strand
gaucgauaccuggcuauug

SEQ ID NO: 673642 - RNA, 19 nt, Homo sapiens
  misc_RNA (1)...(19): siRNA sense strand
ggaauaccgcuggcccuuu

SEQ ID NO: 673643 - RNA, 19 nt, Homo sapiens
  misc_RNA (1)...(19): siRNA sense strand
guaagcucauccaccaaga

SEQ ID NO: 673644 - RNA, 19 nt, Homo sapiens
  misc_RNA (1)...(19): siRNA sense strand
caguuugugcuuuccauua

SEQ ID NO: 673645 - RNA, 19 nt, Homo sapiens
  misc_RNA (1)...(19): siRNA sense strand
gcuggcccuuuggcaauua

SEQ ID NO: 673646 - RNA, 19 nt, Homo sapiens
  misc_RNA (1)...(19): siRNA sense strand
acuaugggcugucuacaca

SEQ ID NO: 673647 - RNA, 19 nt, Homo sapiens
  misc_RNA (1)...(19): siRNA sense strand
aaaucccacucaaaccuuu

SEQ ID NO: 673648 - RNA, 19 nt, Homo sapiens
  misc_RNA (1)...(19): siRNA sense strand
gcaauugugcuuuucuuuu

SEQ ID NO: 673649 - RNA, 19 nt, Homo sapiens
  misc_RNA (1)...(19): siRNA sense strand
aagaacaaaccaagaaaug

SEQ ID NO: 673650 - RNA, 19 nt, Homo sapiens
  misc_RNA (1)...(19): siRNA sense strand
ggaaggcauaauuacauau

SEQ ID NO: 673651 - RNA, 19 nt, Homo sapiens
  misc_RNA (1)...(19): siRNA sense strand
cuacugaagaugguauuaa

SEQ ID NO: 673652 - RNA, 19 nt, Homo sapiens
  misc_RNA (1)...(19): siRNA sense strand
gugggaauauuuggaaaca

SEQ ID NO: 673653 - RNA, 19 nt, Homo sapiens
  misc_RNA (1)...(19): siRNA sense strand
agaacaaaccaagaaauga

SEQ ID NO: 673654 - RNA, 19 nt, Homo sapiens
  misc_RNA (1)...(19): siRNA sense strand
gaaauucagaagaacaaac

SEQ ID NO: 673655 - RNA, 19 nt, Homo sapiens
  misc_RNA (1)...(19): siRNA sense strand
gacuguagaauugcagaua

SEQ ID NO: 673656 - RNA, 19 nt, Homo sapiens
  misc_RNA (1)...(19): siRNA sense strand
uggguuuccuguuuccuuu

SEQ ID NO: 673657 - RNA, 19 nt, Homo sapiens
  misc_RNA (1)...(19): siRNA sense strand
ccacucaaaccuuucaaca

SEQ ID NO: 673658 - RNA, 19 nt, Homo sapiens
  misc_RNA (1)...(19): siRNA sense strand
cuguagaauugcagauauu

SEQ ID NO: 673659 - RNA, 19 nt, Homo sapiens
  misc_RNA (1)...(19): siRNA sense strand
caccaaauauucacuuuuc

SEQ ID NO: 673660 - RNA, 19 nt, Homo sapiens
  misc_RNA (1)...(19): siRNA sense strand
aaagcuggaaggcauaauu

SEQ ID NO: 673661 - RNA, 19 nt, Homo sapiens
  misc_RNA (1)...(19): siRNA sense strand
ugagaacaccaauauuaca

SEQ ID NO: 673662 - RNA, 19 nt, Homo sapiens
  misc_RNA (1)...(19): siRNA sense strand
cagauaauguaagcucauc

SEQ ID NO: 673663 - RNA, 19 nt, Homo sapiens
  misc_RNA (1)...(19): siRNA sense strand
caaaucccacucaaaccuu

SEQ ID NO: 673664 - RNA, 19 nt, Homo sapiens
  misc_RNA (1)...(19): siRNA sense strand
agaagaacaaaccaagaaa

SEQ ID NO: 673665 - RNA, 19 nt, Homo sapiens
  misc_RNA (1)...(19): siRNA sense strand
uauuacaguuugugcuuuc

SEQ ID NO: 673666 - RNA, 19 nt, Homo sapiens
  misc_RNA (1)...(19): siRNA sense strand
gagaacaccaauauuacag

SEQ ID NO: 673667 - RNA, 19 nt, Homo sapiens
  misc_RNA (1)...(19): siRNA sense strand
guacgcuaguguguuucua

SEQ ID NO: 673668 - RNA, 19 nt, Homo sapiens
  misc_RNA (1)...(19): siRNA sense strand
gccaaagucaccugcauca

SEQ ID NO: 673669 - RNA, 19 nt, Homo sapiens
  misc_RNA (1)...(19): siRNA sense strand
ugguggugauagucauuua

SEQ ID NO: 673670 - RNA, 19 nt, Homo sapiens
  misc_RNA (1)...(19): siRNA sense strand
uagaauugcagauauugug

SEQ ID NO: 673671 - RNA, 19 nt, Homo sapiens
  misc_RNA (1)...(19): siRNA sense strand
acuguagaauugcagauau

SEQ ID NO: 673672 - RNA, 19 nt, Homo sapiens
  misc_RNA (1)...(19): siRNA sense strand
gauucaacuaggcaucaua

SEQ ID NO: 673673 - RNA, 19 nt, Homo sapiens
  misc_RNA (1)...(19): siRNA sense strand
gcuggaaggcauaauuaca

SEQ ID NO: 673674 - RNA, 19 nt, Homo sapiens
  misc_RNA (1)...(19): siRNA sense strand
aaacagcuugguggugaua

SEQ ID NO: 673675 - RNA, 19 nt, Homo sapiens
  misc_RNA (1)...(19): siRNA sense strand
auacuggguuuccuguuuc

SEQ ID NO: 673676 - RNA, 19 nt, Homo sapiens
  misc_RNA (1)...(19): siRNA sense strand
ccaaagcuggaaggcauaa

SEQ ID NO: 673677 - RNA, 19 nt, Homo sapiens
  misc_RNA (1)...(19): siRNA sense strand
cccaccaaauauucacuuu

SEQ ID NO: 673678 - RNA, 19 nt, Homo sapiens
  misc_RNA (1)...(19): siRNA sense strand
ucagaagaacaaaccaaga

SEQ ID NO: 673679 - RNA, 19 nt, Homo sapiens
  misc_RNA (1)...(19): siRNA sense strand
cauuaugagucccaaaauu

SEQ ID NO: 673680 - RNA, 19 nt, Homo sapiens
  misc_RNA (1)...(19): siRNA sense strand
aguuugugcuuuccauuau

SEQ ID NO: 673681 - RNA, 19 nt, Homo sapiens
  misc_RNA (1)...(19): siRNA sense strand
cauacgugacuguagaauu

SEQ ID NO: 673682 - RNA, 19 nt, Homo sapiens
  misc_RNA (1)...(19): siRNA sense strand
ucacuuuucuggauguauu

SEQ ID NO: 673683 - RNA, 19 nt, Homo sapiens
  misc_RNA (1)...(19): siRNA sense strand
cccuaaagaaggcuuauga

SEQ ID NO: 673684 - RNA, 19 nt, Homo sapiens
  misc_RNA (1)...(19): siRNA sense strand
uuugugcuuuccauuauga

SEQ ID NO: 673685 - RNA, 19 nt, Homo sapiens
  misc_RNA (1)...(19): siRNA sense strand
ucuacacagcuauggaaua

SEQ ID NO: 673686 - RNA, 19 nt, Homo sapiens
  misc_RNA (1)...(19): siRNA sense strand
gauaauguaagcucaucca

SEQ ID NO: 673687 - RNA, 19 nt, Homo sapiens
  misc_RNA (1)...(19): siRNA sense strand
ccuaaagaaggcuuaugaa

SEQ ID NO: 673688 - RNA, 19 nt, Homo sapiens
  misc_RNA (1)...(19): siRNA sense strand
ccaguuugccagcuauaau

SEQ ID NO: 673689 - RNA, 19 nt, Homo sapiens
  misc_RNA (1)...(19): siRNA sense strand
gucaugauuccuacuuuau

SEQ ID NO: 673690 - RNA, 19 nt, Homo sapiens
  misc_RNA (1)...(19): siRNA sense strand
auucucaacucuucuacug

SEQ ID NO: 673691 - RNA, 19 nt, Homo sapiens
  misc_RNA (1)...(19): siRNA sense strand
guagaauugcagauauugu

SEQ ID NO: 673692 - RNA, 19 nt, Homo sapiens
  misc_RNA (1)...(19): siRNA sense strand
ccagcuauaauccaucgaa

SEQ ID NO: 673693 - RNA, 19 nt, Homo sapiens
  misc_RNA (1)...(19): siRNA sense strand
aucgauaccuggcuauugu

SEQ ID NO: 673694 - RNA, 19 nt, Homo sapiens
  misc_RNA (1)...(19): siRNA sense strand
acucacgugucucagcauu

SEQ ID NO: 673695 - RNA, 19 nt, Homo sapiens
  misc_RNA (1)...(19): siRNA sense strand
aagaaggcuuaugaaauuc

SEQ ID NO: 673696 - RNA, 19 nt, Homo sapiens
  misc_RNA (1)...(19): siRNA sense strand
ucucagcauugaucgauac

SEQ ID NO: 673697 - RNA, 19 nt, Homo sapiens
  misc_RNA (1)...(19): siRNA sense strand
uagccaaagucaccugcau

SEQ ID NO: 673698 - RNA, 19 nt, Homo sapiens
  misc_RNA (1)...(19): siRNA sense strand
gaauauuuggaaacagcuu

SEQ ID NO: 673699 - RNA, 19 nt, Homo sapiens
  misc_RNA (1)...(19): siRNA sense strand
uuuggaaggcccuaaagaa

SEQ ID NO: 673700 - RNA, 19 nt, Homo sapiens
  misc_RNA (1)...(19): siRNA sense strand
gggcugggccugaccaaaa

SEQ ID NO: 673701 - RNA, 19 nt, Homo sapiens
  misc_RNA (1)...(19): siRNA sense strand
gauuccuacuuuauacagu

SEQ ID NO: 673702 - RNA, 19 nt, Homo sapiens
  misc_RNA (1)...(19): siRNA sense strand
uaagcucauccaccaagaa

SEQ ID NO: 673703 - RNA, 19 nt, Homo sapiens
  misc_RNA (1)...(19): siRNA sense strand
ccaaaucccacucaaaccu

SEQ ID NO: 673704 - RNA, 19 nt, Homo sapiens
  misc_RNA (1)...(19): siRNA sense strand
uuuaacaauugccugaauc

SEQ ID NO: 673705 - RNA, 19 nt, Homo sapiens
  misc_RNA (1)...(19): siRNA sense strand
acaaaccaagaaaugauga

SEQ ID NO: 673706 - RNA, 19 nt, Homo sapiens
  misc_RNA (1)...(19): siRNA sense strand
ucugaucauucuuacaagu

SEQ ID NO: 673707 - RNA, 19 nt, Homo sapiens
  misc_RNA (1)...(19): siRNA sense strand
gcgucaguuucaaccugua

SEQ ID NO: 673708 - RNA, 19 nt, Homo sapiens
  misc_RNA (1)...(19): siRNA sense strand
guuugugcuuuccauuaug

SEQ ID NO: 673709 - RNA, 19 nt, Homo sapiens
  misc_RNA (1)...(19): siRNA sense strand
gaacaccaauauuacaguu

SEQ ID NO: 673710 - RNA, 19 nt, Homo sapiens
  misc_RNA (1)...(19): siRNA sense strand
gaauaccgcuggcccuuug

SEQ ID NO: 673711 - RNA, 19 nt, Homo sapiens
  misc_RNA (1)...(19): siRNA sense strand
acucaaaccuuucaacaaa

SEQ ID NO: 673712 - RNA, 19 nt, Homo sapiens
  misc_RNA (1)...(19): siRNA sense strand
gaacaaaccaagaaaugau

SEQ ID NO: 673713 - RNA, 19 nt, Homo sapiens
  misc_RNA (1)...(19): siRNA sense strand
auacgugacuguagaauug

SEQ ID NO: 673714 - RNA, 19 nt, Homo sapiens
  misc_RNA (1)...(19): siRNA sense strand
caucauacgugacuguaga

SEQ ID NO: 673715 - RNA, 19 nt, Homo sapiens
  misc_RNA (1)...(19): siRNA sense strand
ccaagaugauugucccaaa

SEQ ID NO: 673716 - RNA, 19 nt, Homo sapiens
  misc_RNA (1)...(19): siRNA sense strand
uauacuggguuuccuguuu

SEQ ID NO: 673717 - RNA, 19 nt, Homo sapiens
  misc_RNA (1)...(19): siRNA sense strand
gcuauaauccaucgaaaug

SEQ ID NO: 673718 - RNA, 19 nt, Homo sapiens
  misc_RNA (1)...(19): siRNA sense strand
ugucaugauuccuacuuua

SEQ ID NO: 673719 - RNA, 19 nt, Homo sapiens
  misc_RNA (1)...(19): siRNA sense strand
gaagaacaaaccaagaaau

SEQ ID NO: 673720 - RNA, 19 nt, Homo sapiens
  misc_RNA (1)...(19): siRNA sense strand
aaagucaccugcaucauca

SEQ ID NO: 673721 - RNA, 19 nt, Homo sapiens
  misc_RNA (1)...(19): siRNA sense strand
ggugauagucauuuacuuu

SEQ ID NO: 673722 - RNA, 19 nt, Homo sapiens
  misc_RNA (1)...(19): siRNA sense strand
uggaaggcauaauuacaua

SEQ ID NO: 673723 - RNA, 19 nt, Homo sapiens
  misc_RNA (1)...(19): siRNA sense strand
gcuaguguguuucuacuca

SEQ ID NO: 673724 - RNA, 19 nt, Homo sapiens
  misc_RNA (1)...(19): siRNA sense strand
ccuguacgcuaguguguuu

SEQ ID NO: 673725 - RNA, 19 nt, Homo sapiens
  misc_RNA (1)...(19): siRNA sense strand
ucacgugucucagcauuga

SEQ ID NO: 673726 - RNA, 19 nt, Homo sapiens
  misc_RNA (1)...(19): siRNA sense strand
acaccaauauuacaguuug

SEQ ID NO: 673727 - RNA, 19 nt, Homo sapiens
  misc_RNA (1)...(19): siRNA sense strand
cuaaagaaggcuuaugaaa

SEQ ID NO: 673728 - RNA, 19 nt, Homo sapiens
  misc_RNA (1)...(19): siRNA sense strand
cagaagaacaaaccaagaa

SEQ ID NO: 673729 - RNA, 19 nt, Homo sapiens
  misc_RNA (1)...(19): siRNA sense strand
ucucaacucuucuacugaa

SEQ ID NO: 673730 - RNA, 19 nt, Homo sapiens
  misc_RNA (1)...(19): siRNA sense strand
caaagucaccugcaucauc

SEQ ID NO: 673731 - RNA, 19 nt, Homo sapiens
  misc_RNA (1)...(19): siRNA sense strand
uuacugacuuugccacuau

SEQ ID NO: 673732 - RNA, 19 nt, Homo sapiens
  misc_RNA (1)...(19): siRNA sense strand
ucaccugcaucaucauuug

SEQ ID NO: 673733 - RNA, 19 nt, Homo sapiens
  misc_RNA (1)...(19): siRNA sense strand
caagaugauugucccaaag

SEQ ID NO: 673734 - RNA, 19 nt, Homo sapiens
  misc_RNA (1)...(19): siRNA sense strand
cuacacagcuauggaauac

SEQ ID NO: 673735 - RNA, 19 nt, Homo sapiens
  misc_RNA (1)...(19): siRNA sense strand
auaugaagcugaagacugu

SEQ ID NO: 673736 - RNA, 19 nt, Homo sapiens
  misc_RNA (1)...(19): siRNA sense strand
gaaacagcuugguggugau

SEQ ID NO: 673737 - RNA, 19 nt, Homo sapiens
  misc_RNA (1)...(19): siRNA sense strand
aagcuggaaggcauaauua

SEQ ID NO: 673738 - RNA, 19 nt, Homo sapiens
  misc_RNA (1)...(19): siRNA sense strand
cagcuauaauccaucgaaa

SEQ ID NO: 673739 - RNA, 19 nt, Homo sapiens
  misc_RNA (1)...(19): siRNA sense strand
caugauuccuacuuuauac

SEQ ID NO: 673740 - RNA, 19 nt, Homo sapiens
  misc_RNA (1)...(19): siRNA sense strand
gaucgauaccuggcuauug

SEQ ID NO: 673741 - RNA, 19 nt, Homo sapiens
  misc_RNA (1)...(19): siRNA sense strand
ggaauaccgcuggcccuuu

SEQ ID NO: 673742 - RNA, 19 nt, Homo sapiens
  misc_RNA (1)...(19): siRNA sense strand
guaagcucauccaccaaga

SEQ ID NO: 673743 - RNA, 19 nt, Homo sapiens
  misc_RNA (1)...(19): siRNA sense strand
caguuugugcuuuccauua

SEQ ID NO: 673744 - RNA, 19 nt, Homo sapiens
  misc_RNA (1)...(19): siRNA sense strand
gcuggcccuuuggcaauua

SEQ ID NO: 673745 - RNA, 19 nt, Homo sapiens
  misc_RNA (1)...(19): siRNA sense strand
acuaugggcugucuacaca

SEQ ID NO: 673746 - RNA, 19 nt, Homo sapiens
  misc_RNA (1)...(19): siRNA sense strand
aaaucccacucaaaccuuu

SEQ ID NO: 673747 - RNA, 19 nt, Homo sapiens
  misc_RNA (1)...(19): siRNA sense strand
gcaauugugcuuuucuuuu

SEQ ID NO: 673748 - RNA, 19 nt, Homo sapiens
  misc_RNA (1)...(19): siRNA sense strand
aagaacaaaccaagaaaug

SEQ ID NO: 673749 - RNA, 19 nt, Homo sapiens
  misc_RNA (1)...(19): siRNA sense strand
ggaaggcauaauuacauau

SEQ ID NO: 673750 - RNA, 19 nt, Homo sapiens
  misc_RNA (1)...(19): siRNA sense strand
cuacugaagaugguauuaa

SEQ ID NO: 673751 - RNA, 19 nt, Homo sapiens
  misc_RNA (1)...(19): siRNA sense strand
gugggaauauuuggaaaca

SEQ ID NO: 673752 - RNA, 19 nt, Homo sapiens
  misc_RNA (1)...(19): siRNA sense strand
agaacaaaccaagaaauga

SEQ ID NO: 673753 - RNA, 19 nt, Homo sapiens
  misc_RNA (1)...(19): siRNA sense strand
gaaauucagaagaacaaac

SEQ ID NO: 673754 - RNA, 19 nt, Homo sapiens
  misc_RNA (1)...(19): siRNA sense strand
gacuguagaauugcagaua

SEQ ID NO: 673755 - RNA, 19 nt, Homo sapiens
  misc_RNA (1)...(19): siRNA sense strand
uggguuuccuguuuccuuu

SEQ ID NO: 673756 - RNA, 19 nt, Homo sapiens
  misc_RNA (1)...(19): siRNA sense strand
ccacucaaaccuuucaaca

SEQ ID NO: 673757 - RNA, 19 nt, Homo sapiens
  misc_RNA (1)...(19): siRNA sense strand
cuguagaauugcagauauu

SEQ ID NO: 673758 - RNA, 19 nt, Homo sapiens
  misc_RNA (1)...(19): siRNA sense strand
caccaaauauucacuuuuc

SEQ ID NO: 673759 - RNA, 19 nt, Homo sapiens
  misc_RNA (1)...(19): siRNA sense strand
aaagcuggaaggcauaauu

SEQ ID NO: 673760 - RNA, 19 nt, Homo sapiens
  misc_RNA (1)...(19): siRNA sense strand
ugagaacaccaauauuaca

SEQ ID NO: 673761 - RNA, 19 nt, Homo sapiens
  misc_RNA (1)...(19): siRNA sense strand
cagauaauguaagcucauc

SEQ ID NO: 673762 - RNA, 19 nt, Homo sapiens
  misc_RNA (1)...(19): siRNA sense strand
caaaucccacucaaaccuu

SEQ ID NO: 673763 - RNA, 19 nt, Homo sapiens
  misc_RNA (1)...(19): siRNA sense strand
agaagaacaaaccaagaaa

SEQ ID NO: 673764 - RNA, 19 nt, Homo sapiens
  misc_RNA (1)...(19): siRNA sense strand
uauuacaguuugugcuuuc

SEQ ID NO: 673765 - RNA, 19 nt, Homo sapiens
  misc_RNA (1)...(19): siRNA sense strand
gagaacaccaauauuacag

SEQ ID NO: 673766 - RNA, 19 nt, Homo sapiens
  misc_RNA (1)...(19): siRNA sense strand
guacgcuaguguguuucua

SEQ ID NO: 673767 - RNA, 19 nt, Homo sapiens
  misc_RNA (1)...(19): siRNA sense strand
gccaaagucaccugcauca

SEQ ID NO: 673768 - RNA, 19 nt, Homo sapiens
  misc_RNA (1)...(19): siRNA sense strand
ugguggugauagucauuua

SEQ ID NO: 673769 - RNA, 19 nt, Homo sapiens
  misc_RNA (1)...(19): siRNA sense strand
uagaauugcagauauugug

SEQ ID NO: 673770 - RNA, 19 nt, Homo sapiens
  misc_RNA (1)...(19): siRNA sense strand
acuguagaauugcagauau

SEQ ID NO: 673771 - RNA, 19 nt, Homo sapiens
  misc_RNA (1)...(19): siRNA sense strand
gauucaacuaggcaucaua

SEQ ID NO: 673772 - RNA, 19 nt, Homo sapiens
  misc_RNA (1)...(19): siRNA sense strand
gcuggaaggcauaauuaca

SEQ ID NO: 673773 - RNA, 19 nt, Homo sapiens
  misc_RNA (1)...(19): siRNA sense strand
aaacagcuugguggugaua

SEQ ID NO: 673774 - RNA, 19 nt, Homo sapiens
  misc_RNA (1)...(19): siRNA sense strand
auacuggguuuccuguuuc

SEQ ID NO: 673775 - RNA, 19 nt, Homo sapiens
  misc_RNA (1)...(19): siRNA sense strand
ccaaagcuggaaggcauaa

SEQ ID NO: 673776 - RNA, 19 nt, Homo sapiens
  misc_RNA (1)...(19): siRNA sense strand
cccaccaaauauucacuuu

SEQ ID NO: 673777 - RNA, 19 nt, Homo sapiens
  misc_RNA (1)...(19): siRNA sense strand
ucagaagaacaaaccaaga

SEQ ID NO: 673778 - RNA, 19 nt, Homo sapiens
  misc_RNA (1)...(19): siRNA sense strand
cauuaugagucccaaaauu

SEQ ID NO: 673779 - RNA, 19 nt, Homo sapiens
  misc_RNA (1)...(19): siRNA sense strand
aguuugugcuuuccauuau

SEQ ID NO: 673780 - RNA, 19 nt, Homo sapiens
  misc_RNA (1)...(19): siRNA sense strand
cauacgugacuguagaauu

SEQ ID NO: 673781 - RNA, 19 nt, Homo sapiens
  misc_RNA (1)...(19): siRNA sense strand
ucacuuuucuggauguauu

SEQ ID NO: 673782 - RNA, 19 nt, Homo sapiens
  misc_RNA (1)...(19): siRNA sense strand
cccuaaagaaggcuuauga

SEQ ID NO: 673783 - RNA, 19 nt, Homo sapiens
  misc_RNA (1)...(19): siRNA sense strand
uuugugcuuuccauuauga

SEQ ID NO: 673784 - RNA, 19 nt, Homo sapiens
  misc_RNA (1)...(19): siRNA sense strand
ucuacacagcuauggaaua

SEQ ID NO: 673785 - RNA, 19 nt, Homo sapiens
  misc_RNA (1)...(19): siRNA sense strand
gauaauguaagcucaucca

SEQ ID NO: 673786 - RNA, 19 nt, Homo sapiens
  misc_RNA (1)...(19): siRNA sense strand
ccuaaagaaggcuuaugaa

SEQ ID NO: 673787 - RNA, 19 nt, Homo sapiens
  misc_RNA (1)...(19): siRNA sense strand
ccaguuugccagcuauaau

SEQ ID NO: 673788 - RNA, 19 nt, Homo sapiens
  misc_RNA (1)...(19): siRNA sense strand
gucaugauuccuacuuuau

SEQ ID NO: 673789 - RNA, 19 nt, Homo sapiens
  misc_RNA (1)...(19): siRNA sense strand
auucucaacucuucuacug

SEQ ID NO: 673790 - RNA, 19 nt, Homo sapiens
  misc_RNA (1)...(19): siRNA sense strand
guagaauugcagauauugu

SEQ ID NO: 673791 - RNA, 19 nt, Homo sapiens
  misc_RNA (1)...(19): siRNA sense strand
ccagcuauaauccaucgaa

SEQ ID NO: 673792 - RNA, 19 nt, Homo sapiens
  misc_RNA (1)...(19): siRNA sense strand
aucgauaccuggcuauugu

SEQ ID NO: 673793 - RNA, 19 nt, Homo sapiens
  misc_RNA (1)...(19): siRNA sense strand
acucacgugucucagcauu

SEQ ID NO: 673794 - RNA, 19 nt, Homo sapiens
  misc_RNA (1)...(19): siRNA sense strand
aagaaggcuuaugaaauuc

SEQ ID NO: 673795 - RNA, 19 nt, Homo sapiens
  misc_RNA (1)...(19): siRNA sense strand
ucucagcauugaucgauac

SEQ ID NO: 673796 - RNA, 19 nt, Homo sapiens
  misc_RNA (1)...(19): siRNA sense strand
uagccaaagucaccugcau

SEQ ID NO: 673797 - RNA, 19 nt, Homo sapiens
  misc_RNA (1)...(19): siRNA sense strand
gaauauuuggaaacagcuu

SEQ ID NO: 673798 - RNA, 19 nt, Homo sapiens
  misc_RNA (1)...(19): siRNA sense strand
uuuggaaggcccuaaagaa

SEQ ID NO: 673799 - RNA, 19 nt, Homo sapiens
  misc_RNA (1)...(19): siRNA sense strand
gggcugggccugaccaaaa

SEQ ID NO: 673800 - RNA, 19 nt, Homo sapiens
  misc_RNA (1)...(19): siRNA sense strand
gauuccuacuuuauacagu

SEQ ID NO: 673801 - RNA, 19 nt, Homo sapiens
  misc_RNA (1)...(19): siRNA sense strand
uaagcucauccaccaagaa

SEQ ID NO: 673802 - RNA, 19 nt, Homo sapiens
  misc_RNA (1)...(19): siRNA sense strand
ccaaaucccacucaaaccu

SEQ ID NO: 673803 - RNA, 19 nt, Homo sapiens
  misc_RNA (1)...(19): siRNA sense strand
uuuaacaauugccugaauc

SEQ ID NO: 673804 - RNA, 19 nt, Homo sapiens
  misc_RNA (1)...(19): siRNA sense strand
acaaaccaagaaaugauga

SEQ ID NO: 673805 - RNA, 19 nt, Homo sapiens
  misc_RNA (1)...(19): siRNA sense strand
ucugaucauucuuacaagu

SEQ ID NO: 673806 - RNA, 19 nt, Homo sapiens
  misc_RNA (1)...(19): siRNA sense strand
gcgucaguuucaaccugua

SEQ ID NO: 673807 - RNA, 19 nt, Homo sapiens
  misc_RNA (1)...(19): siRNA sense strand
guuugugcuuuccauuaug

SEQ ID NO: 673808 - RNA, 19 nt, Homo sapiens
  misc_RNA (1)...(19): siRNA sense strand
gaacaccaauauuacaguu

SEQ ID NO: 673809 - RNA, 19 nt, Homo sapiens
  misc_RNA (1)...(19): siRNA sense strand
gaauaccgcuggcccuuug

SEQ ID NO: 673810 - RNA, 19 nt, Homo sapiens
  misc_RNA (1)...(19): siRNA sense strand
acucaaaccuuucaacaaa

SEQ ID NO: 673811 - RNA, 19 nt, Homo sapiens
  misc_RNA (1)...(19): siRNA sense strand
gaacaaaccaagaaaugau

SEQ ID NO: 673812 - RNA, 19 nt, Homo sapiens
  misc_RNA (1)...(19): siRNA sense strand
auacgugacuguagaauug

SEQ ID NO: 673813 - RNA, 19 nt, Homo sapiens
  misc_RNA (1)...(19): siRNA sense strand
caucauacgugacuguaga

SEQ ID NO: 673814 - RNA, 19 nt, Homo sapiens
  misc_RNA (1)...(19): siRNA sense strand
ccaagaugauugucccaaa

SEQ ID NO: 673815 - RNA, 19 nt, Homo sapiens
  misc_RNA (1)...(19): siRNA sense strand
uauacuggguuuccuguuu

SEQ ID NO: 673816 - RNA, 19 nt, Homo sapiens
  misc_RNA (1)...(19): siRNA sense strand
gcuauaauccaucgaaaug

SEQ ID NO: 673817 - RNA, 19 nt, Homo sapiens
  misc_RNA (1)...(19): siRNA sense strand
ugucaugauuccuacuuua

SEQ ID NO: 673818 - RNA, 19 nt, Homo sapiens
  misc_RNA (1)...(19): siRNA sense strand
gaagaacaaaccaagaaau

SEQ ID NO: 673819 - RNA, 19 nt, Homo sapiens
  misc_RNA (1)...(19): siRNA sense strand
aaagucaccugcaucauca

SEQ ID NO: 673820 - RNA, 19 nt, Homo sapiens
  misc_RNA (1)...(19): siRNA sense strand
ggugauagucauuuacuuu

SEQ ID NO: 673821 - RNA, 19 nt, Homo sapiens
  misc_RNA (1)...(19): siRNA sense strand
uggaaggcauaauuacaua

SEQ ID NO: 673822 - RNA, 19 nt, Homo sapiens
  misc_RNA (1)...(19): siRNA sense strand
gcuaguguguuucuacuca

SEQ ID NO: 673823 - RNA, 19 nt, Homo sapiens
  misc_RNA (1)...(19): siRNA sense strand
ccuguacgcuaguguguuu

SEQ ID NO: 673824 - RNA, 19 nt, Homo sapiens
  misc_RNA (1)...(19): siRNA sense strand
ucacgugucucagcauuga

SEQ ID NO: 673825 - RNA, 19 nt, Homo sapiens
  misc_RNA (1)...(19): siRNA sense strand
acaccaauauuacaguuug

SEQ ID NO: 673826 - RNA, 19 nt, Homo sapiens
  misc_RNA (1)...(19): siRNA sense strand
cuaaagaaggcuuaugaaa

SEQ ID NO: 673827 - RNA, 19 nt, Homo sapiens
  misc_RNA (1)...(19): siRNA sense strand
cagaagaacaaaccaagaa

SEQ ID NO: 673828 - RNA, 19 nt, Homo sapiens
  misc_RNA (1)...(19): siRNA sense strand
ucucaacucuucuacugaa

SEQ ID NO: 673829 - RNA, 19 nt, Homo sapiens
  misc_RNA (1)...(19): siRNA sense strand
caaagucaccugcaucauc

SEQ ID NO: 673830 - RNA, 19 nt, Homo sapiens
  misc_RNA (1)...(19): siRNA sense strand
uuacugacuuugccacuau

SEQ ID NO: 673831 - RNA, 19 nt, Homo sapiens
  misc_RNA (1)...(19): siRNA sense strand
ucaccugcaucaucauuug

SEQ ID NO: 673832 - RNA, 19 nt, Homo sapiens
  misc_RNA (1)...(19): siRNA sense strand
caagaugauugucccaaag

SEQ ID NO: 673833 - RNA, 19 nt, Homo sapiens
  misc_RNA (1)...(19): siRNA sense strand
cuacacagcuauggaauac

SEQ ID NO: 673834 - RNA, 19 nt, Homo sapiens
  misc_RNA (1)...(19): siRNA sense strand
auaugaagcugaagacugu

SEQ ID NO: 673835 - RNA, 19 nt, Homo sapiens
  misc_RNA (1)...(19): siRNA sense strand
gaaacagcuugguggugau

SEQ ID NO: 673836 - RNA, 19 nt, Homo sapiens
  misc_RNA (1)...(19): siRNA sense strand
aagcuggaaggcauaauua

SEQ ID NO: 673837 - RNA, 19 nt, Homo sapiens
  misc_RNA (1)...(19): siRNA sense strand
cagcuauaauccaucgaaa

SEQ ID NO: 673838 - RNA, 19 nt, Homo sapiens
  misc_RNA (1)...(19): siRNA sense strand
caugauuccuacuuuauac

SEQ ID NO: 673839 - RNA, 19 nt, Homo sapiens
  misc_RNA (1)...(19): siRNA sense strand
gaucgauaccuggcuauug

SEQ ID NO: 673840 - RNA, 19 nt, Homo sapiens
  misc_RNA (1)...(19): siRNA sense strand
ggaauaccgcuggcccuuu

SEQ ID NO: 673841 - RNA, 19 nt, Homo sapiens
  misc_RNA (1)...(19): siRNA sense strand
guaagcucauccaccaaga

SEQ ID NO: 673842 - RNA, 19 nt, Homo sapiens
  misc_RNA (1)...(19): siRNA sense strand
caguuugugcuuuccauua

SEQ ID NO: 673843 - RNA, 19 nt, Homo sapiens
  misc_RNA (1)...(19): siRNA sense strand
gcuggcccuuuggcaauua

SEQ ID NO: 673844 - RNA, 19 nt, Homo sapiens
  misc_RNA (1)...(19): siRNA sense strand
acuaugggcugucuacaca

SEQ ID NO: 673845 - RNA, 19 nt, Homo sapiens
  misc_RNA (1)...(19): siRNA sense strand
aaaucccacucaaaccuuu

SEQ ID NO: 673846 - RNA, 19 nt, Homo sapiens
  misc_RNA (1)...(19): siRNA sense strand
gcaauugugcuuuucuuuu

SEQ ID NO: 673847 - RNA, 19 nt, Homo sapiens
  misc_RNA (1)...(19): siRNA sense strand
aagaacaaaccaagaaaug

SEQ ID NO: 673848 - RNA, 19 nt, Homo sapiens
  misc_RNA (1)...(19): siRNA sense strand
ggaaggcauaauuacauau

SEQ ID NO: 673849 - RNA, 19 nt, Homo sapiens
  misc_RNA (1)...(19): siRNA sense strand
cuacugaagaugguauuaa

SEQ ID NO: 673850 - RNA, 19 nt, Homo sapiens
  misc_RNA (1)...(19): siRNA sense strand
gugggaauauuuggaaaca

SEQ ID NO: 673851 - RNA, 19 nt, Homo sapiens
  misc_RNA (1)...(19): siRNA sense strand
agaacaaaccaagaaauga

SEQ ID NO: 673852 - RNA, 19 nt, Homo sapiens
  misc_RNA (1)...(19): siRNA sense strand
gaaauucagaagaacaaac

SEQ ID NO: 673853 - RNA, 19 nt, Homo sapiens
  misc_RNA (1)...(19): siRNA sense strand
gacuguagaauugcagaua

SEQ ID NO: 673854 - RNA, 19 nt, Homo sapiens
  misc_RNA (1)...(19): siRNA sense strand
uggguuuccuguuuccuuu

SEQ ID NO: 673855 - RNA, 19 nt, Homo sapiens
  misc_RNA (1)...(19): siRNA sense strand
ccacucaaaccuuucaaca

SEQ ID NO: 673856 - RNA, 19 nt, Homo sapiens
  misc_RNA (1)...(19): siRNA sense strand
cuguagaauugcagauauu

SEQ ID NO: 673857 - RNA, 19 nt, Homo sapiens
  misc_RNA (1)...(19): siRNA sense strand
caccaaauauucacuuuuc

SEQ ID NO: 673858 - RNA, 19 nt, Homo sapiens
  misc_RNA (1)...(19): siRNA sense strand
aaagcuggaaggcauaauu

SEQ ID NO: 673859 - RNA, 19 nt, Homo sapiens
  misc_RNA (1)...(19): siRNA sense strand
ugagaacaccaauauuaca

SEQ ID NO: 673860 - RNA, 19 nt, Homo sapiens
  misc_RNA (1)...(19): siRNA sense strand
cagauaauguaagcucauc

SEQ ID NO: 673861 - RNA, 19 nt, Homo sapiens
  misc_RNA (1)...(19): siRNA sense strand
caaaucccacucaaaccuu

SEQ ID NO: 673862 - RNA, 19 nt, Homo sapiens
  misc_RNA (1)...(19): siRNA sense strand
agaagaacaaaccaagaaa

SEQ ID NO: 673863 - RNA, 19 nt, Homo sapiens
  misc_RNA (1)...(19): siRNA sense strand
uauuacaguuugugcuuuc

SEQ ID NO: 673864 - RNA, 19 nt, Homo sapiens
  misc_RNA (1)...(19): siRNA sense strand
gagaacaccaauauuacag

SEQ ID NO: 673865 - RNA, 19 nt, Homo sapiens
  misc_RNA (1)...(19): siRNA sense strand
guacgcuaguguguuucua

SEQ ID NO: 673866 - RNA, 19 nt, Homo sapiens
  misc_RNA (1)...(19): siRNA sense strand
gccaaagucaccugcauca

SEQ ID NO: 673867 - RNA, 19 nt, Homo sapiens
  misc_RNA (1)...(19): siRNA sense strand
ugguggugauagucauuua

SEQ ID NO: 673868 - RNA, 19 nt, Homo sapiens
  misc_RNA (1)...(19): siRNA sense strand
uagaauugcagauauugug

SEQ ID NO: 673869 - RNA, 19 nt, Homo sapiens
  misc_RNA (1)...(19): siRNA sense strand
acuguagaauugcagauau

SEQ ID NO: 673870 - RNA, 19 nt, Homo sapiens
  misc_RNA (1)...(19): siRNA sense strand
gauucaacuaggcaucaua

SEQ ID NO: 673871 - RNA, 19 nt, Homo sapiens
  misc_RNA (1)...(19): siRNA sense strand
gcuggaaggcauaauuaca

SEQ ID NO: 673872 - RNA, 19 nt, Homo sapiens
  misc_RNA (1)...(19): siRNA sense strand
aaacagcuugguggugaua

SEQ ID NO: 673873 - RNA, 19 nt, Homo sapiens
  misc_RNA (1)...(19): siRNA sense strand
auacuggguuuccuguuuc

SEQ ID NO: 673874 - RNA, 19 nt, Homo sapiens
  misc_RNA (1)...(19): siRNA sense strand
ccaaagcuggaaggcauaa

SEQ ID NO: 673875 - RNA, 19 nt, Homo sapiens
  misc_RNA (1)...(19): siRNA sense strand
cccaccaaauauucacuuu

SEQ ID NO: 673876 - RNA, 19 nt, Homo sapiens
  misc_RNA (1)...(19): siRNA sense strand
ucagaagaacaaaccaaga

SEQ ID NO: 673877 - RNA, 19 nt, Homo sapiens
  misc_RNA (1)...(19): siRNA sense strand
cauuaugagucccaaaauu

SEQ ID NO: 673878 - RNA, 19 nt, Homo sapiens
  misc_RNA (1)...(19): siRNA sense strand
aguuugugcuuuccauuau

SEQ ID NO: 673879 - RNA, 19 nt, Homo sapiens
  misc_RNA (1)...(19): siRNA sense strand
cauacgugacuguagaauu

SEQ ID NO: 673880 - RNA, 19 nt, Homo sapiens
  misc_RNA (1)...(19): siRNA sense strand
ucacuuuucuggauguauu

SEQ ID NO: 673881 - RNA, 19 nt, Homo sapiens
  misc_RNA (1)...(19): siRNA sense strand
cccuaaagaaggcuuauga

SEQ ID NO: 673882 - RNA, 19 nt, Homo sapiens
  misc_RNA (1)...(19): siRNA sense strand
uuugugcuuuccauuauga

SEQ ID NO: 673883 - RNA, 19 nt, Homo sapiens
  misc_RNA (1)...(19): siRNA sense strand
ucuacacagcuauggaaua

SEQ ID NO: 673884 - RNA, 19 nt, Homo sapiens
  misc_RNA (1)...(19): siRNA sense strand
gauaauguaagcucaucca

SEQ ID NO: 673885 - RNA, 19 nt, Homo sapiens
  misc_RNA (1)...(19): siRNA sense strand
ccuaaagaaggcuuaugaa

SEQ ID NO: 673886 - RNA, 19 nt, Homo sapiens
  misc_RNA (1)...(19): siRNA sense strand
ccaguuugccagcuauaau

SEQ ID NO: 673887 - RNA, 19 nt, Homo sapiens
  misc_RNA (1)...(19): siRNA sense strand
gucaugauuccuacuuuau

SEQ ID NO: 673888 - RNA, 19 nt, Homo sapiens
  misc_RNA (1)...(19): siRNA sense strand
auucucaacucuucuacug

SEQ ID NO: 673889 - RNA, 19 nt, Homo sapiens
  misc_RNA (1)...(19): siRNA sense strand
guagaauugcagauauugu

SEQ ID NO: 673890 - RNA, 19 nt, Homo sapiens
  misc_RNA (1)...(19): siRNA sense strand
ccagcuauaauccaucgaa

SEQ ID NO: 673891 - RNA, 19 nt, Homo sapiens
  misc_RNA (1)...(19): siRNA sense strand
aucgauaccuggcuauugu

SEQ ID NO: 673892 - RNA, 19 nt, Homo sapiens
  misc_RNA (1)...(19): siRNA sense strand
acucacgugucucagcauu

SEQ ID NO: 673893 - RNA, 19 nt, Homo sapiens
  misc_RNA (1)...(19): siRNA sense strand
aagaaggcuuaugaaauuc

SEQ ID NO: 673894 - RNA, 19 nt, Homo sapiens
  misc_RNA (1)...(19): siRNA sense strand
ucucagcauugaucgauac

SEQ ID NO: 673895 - RNA, 19 nt, Homo sapiens
  misc_RNA (1)...(19): siRNA sense strand
uagccaaagucaccugcau

SEQ ID NO: 673896 - RNA, 19 nt, Homo sapiens
  misc_RNA (1)...(19): siRNA sense strand
gaauauuuggaaacagcuu

SEQ ID NO: 673897 - RNA, 19 nt, Homo sapiens
  misc_RNA (1)...(19): siRNA sense strand
uuuggaaggcccuaaagaa

SEQ ID NO: 673898 - RNA, 19 nt, Homo sapiens
  misc_RNA (1)...(19): siRNA sense strand
gggcugggccugaccaaaa

SEQ ID NO: 673899 - RNA, 19 nt, Homo sapiens
  misc_RNA (1)...(19): siRNA sense strand
gauuccuacuuuauacagu

SEQ ID NO: 673900 - RNA, 19 nt, Homo sapiens
  misc_RNA (1)...(19): siRNA sense strand
uaagcucauccaccaagaa

SEQ ID NO: 673901 - RNA, 19 nt, Homo sapiens
  misc_RNA (1)...(19): siRNA sense strand
ccaaaucccacucaaaccu

SEQ ID NO: 673902 - RNA, 19 nt, Homo sapiens
  misc_RNA (1)...(19): siRNA sense strand
uuuaacaauugccugaauc

SEQ ID NO: 673903 - RNA, 19 nt, Homo sapiens
  misc_RNA (1)...(19): siRNA sense strand
acaaaccaagaaaugauga

SEQ ID NO: 673904 - RNA, 19 nt, Homo sapiens
  misc_RNA (1)...(19): siRNA sense strand
ucugaucauucuuacaagu

SEQ ID NO: 673905 - RNA, 19 nt, Homo sapiens
  misc_RNA (1)...(19): siRNA sense strand
gcgucaguuucaaccugua

SEQ ID NO: 673906 - RNA, 19 nt, Homo sapiens
  misc_RNA (1)...(19): siRNA sense strand
guuugugcuuuccauuaug

SEQ ID NO: 673907 - RNA, 19 nt, Homo sapiens
  misc_RNA (1)...(19): siRNA sense strand
gaacaccaauauuacaguu

SEQ ID NO: 673908 - RNA, 19 nt, Homo sapiens
  misc_RNA (1)...(19): siRNA sense strand
gaauaccgcuggcccuuug

SEQ ID NO: 673909 - RNA, 19 nt, Homo sapiens
  misc_RNA (1)...(19): siRNA sense strand
acucaaaccuuucaacaaa

SEQ ID NO: 673910 - RNA, 19 nt, Homo sapiens
  misc_RNA (1)...(19): siRNA sense strand
gaacaaaccaagaaaugau

SEQ ID NO: 673911 - RNA, 19 nt, Homo sapiens
  misc_RNA (1)...(19): siRNA sense strand
auacgugacuguagaauug

SEQ ID NO: 673912 - RNA, 19 nt, Homo sapiens
  misc_RNA (1)...(19): siRNA sense strand
caucauacgugacuguaga

SEQ ID NO: 673913 - RNA, 19 nt, Homo sapiens
  misc_RNA (1)...(19): siRNA sense strand
ccaagaugauugucccaaa

SEQ ID NO: 673914 - RNA, 19 nt, Homo sapiens
  misc_RNA (1)...(19): siRNA sense strand
uauacuggguuuccuguuu

SEQ ID NO: 673915 - RNA, 19 nt, Homo sapiens
  misc_RNA (1)...(19): siRNA sense strand
gcuauaauccaucgaaaug

SEQ ID NO: 673916 - RNA, 19 nt, Homo sapiens
  misc_RNA (1)...(19): siRNA sense strand
ugucaugauuccuacuuua

SEQ ID NO: 673917 - RNA, 19 nt, Homo sapiens
  misc_RNA (1)...(19): siRNA sense strand
gaagaacaaaccaagaaau

SEQ ID NO: 673918 - RNA, 19 nt, Homo sapiens
  misc_RNA (1)...(19): siRNA sense strand
aaagucaccugcaucauca

SEQ ID NO: 673919 - RNA, 19 nt, Homo sapiens
  misc_RNA (1)...(19): siRNA sense strand
ggugauagucauuuacuuu

SEQ ID NO: 673920 - RNA, 19 nt, Homo sapiens
  misc_RNA (1)...(19): siRNA sense strand
uggaaggcauaauuacaua

SEQ ID NO: 673921 - RNA, 19 nt, Homo sapiens
  misc_RNA (1)...(19): siRNA sense strand
gcuaguguguuucuacuca

SEQ ID NO: 673922 - RNA, 19 nt, Homo sapiens
  misc_RNA (1)...(19): siRNA sense strand
ccuguacgcuaguguguuu

SEQ ID NO: 673923 - RNA, 19 nt, Homo sapiens
  misc_RNA (1)...(19): siRNA sense strand
ucacgugucucagcauuga

SEQ ID NO: 673924 - RNA, 19 nt, Homo sapiens
  misc_RNA (1)...(19): siRNA sense strand
acaccaauauuacaguuug

SEQ ID NO: 673925 - RNA, 19 nt, Homo sapiens
  misc_RNA (1)...(19): siRNA sense strand
cuaaagaaggcuuaugaaa

SEQ ID NO: 673926 - RNA, 19 nt, Homo sapiens
  misc_RNA (1)...(19): siRNA sense strand
cagaagaacaaaccaagaa

SEQ ID NO: 673927 - RNA, 19 nt, Homo sapiens
  misc_RNA (1)...(19): siRNA sense strand
ucucaacucuucuacugaa

SEQ ID NO: 673928 - RNA, 19 nt, Homo sapiens
  misc_RNA (1)...(19): siRNA sense strand
caaagucaccugcaucauc

SEQ ID NO: 673929 - RNA, 19 nt, Homo sapiens
  misc_RNA (1)...(19): siRNA sense strand
uuacugacuuugccacuau

SEQ ID NO: 673930 - RNA, 19 nt, Homo sapiens
  misc_RNA (1)...(19): siRNA sense strand
ucaccugcaucaucauuug

SEQ ID NO: 673931 - RNA, 19 nt, Homo sapiens
  misc_RNA (1)...(19): siRNA sense strand
caagaugauugucccaaag

SEQ ID NO: 673932 - RNA, 19 nt, Homo sapiens
  misc_RNA (1)...(19): siRNA sense strand
cuacacagcuauggaauac

SEQ ID NO: 673933 - RNA, 19 nt, Homo sapiens
  misc_RNA (1)...(19): siRNA sense strand
auaugaagcugaagacugu

SEQ ID NO: 673934 - RNA, 19 nt, Homo sapiens
  misc_RNA (1)...(19): siRNA sense strand
gaaacagcuugguggugau

SEQ ID NO: 673935 - RNA, 19 nt, Homo sapiens
  misc_RNA (1)...(19): siRNA sense strand
aagcuggaaggcauaauua

SEQ ID NO: 673936 - RNA, 19 nt, Homo sapiens
  misc_RNA (1)...(19): siRNA sense strand
cagcuauaauccaucgaaa

SEQ ID NO: 673937 - RNA, 19 nt, Homo sapiens
  misc_RNA (1)...(19): siRNA sense strand
caugauuccuacuuuauac

SEQ ID NO: 673938 - RNA, 19 nt, Homo sapiens
  misc_RNA (1)...(19): siRNA sense strand
gaucgauaccuggcuauug

SEQ ID NO: 673939 - RNA, 19 nt, Homo sapiens
  misc_RNA (1)...(19): siRNA sense strand
ggaauaccgcuggcccuuu

SEQ ID NO: 673940 - RNA, 19 nt, Homo sapiens
  misc_RNA (1)...(19): siRNA sense strand
guaagcucauccaccaaga

SEQ ID NO: 673941 - RNA, 19 nt, Homo sapiens
  misc_RNA (1)...(19): siRNA sense strand
caguuugugcuuuccauua

SEQ ID NO: 673942 - RNA, 19 nt, Homo sapiens
  misc_RNA (1)...(19): siRNA sense strand
gcuggcccuuuggcaauua

SEQ ID NO: 673943 - RNA, 19 nt, Homo sapiens
  misc_RNA (1)...(19): siRNA sense strand
acuaugggcugucuacaca

SEQ ID NO: 673944 - RNA, 19 nt, Homo sapiens
  misc_RNA (1)...(19): siRNA sense strand
aaaucccacucaaaccuuu

SEQ ID NO: 673945 - RNA, 19 nt, Homo sapiens
  misc_RNA (1)...(19): siRNA sense strand
gcaauugugcuuuucuuuu

SEQ ID NO: 673946 - RNA, 19 nt, Homo sapiens
  misc_RNA (1)...(19): siRNA sense strand
aagaacaaaccaagaaaug

SEQ ID NO: 673947 - RNA, 19 nt, Homo sapiens
  misc_RNA (1)...(19): siRNA sense strand
ggaaggcauaauuacauau

SEQ ID NO: 673948 - RNA, 19 nt, Homo sapiens
  misc_RNA (1)...(19): siRNA sense strand
cuacugaagaugguauuaa

SEQ ID NO: 673949 - RNA, 19 nt, Homo sapiens
  misc_RNA (1)...(19): siRNA sense strand
gugggaauauuuggaaaca

SEQ ID NO: 673950 - RNA, 19 nt, Homo sapiens
  misc_RNA (1)...(19): siRNA sense strand
agaacaaaccaagaaauga

SEQ ID NO: 673951 - RNA, 19 nt, Homo sapiens
  misc_RNA (1)...(19): siRNA sense strand
gaaauucagaagaacaaac

SEQ ID NO: 673952 - RNA, 19 nt, Homo sapiens
  misc_RNA (1)...(19): siRNA sense strand
gacuguagaauugcagaua

SEQ ID NO: 673953 - RNA, 19 nt, Homo sapiens
  misc_RNA (1)...(19): siRNA sense strand
uggguuuccuguuuccuuu

SEQ ID NO: 673954 - RNA, 19 nt, Homo sapiens
  misc_RNA (1)...(19): siRNA sense strand
ccacucaaaccuuucaaca

SEQ ID NO: 673955 - RNA, 19 nt, Homo sapiens
  misc_RNA (1)...(19): siRNA sense strand
cuguagaauugcagauauu

SEQ ID NO: 673956 - RNA, 19 nt, Homo sapiens
  misc_RNA (1)...(19): siRNA sense strand
caccaaauauucacuuuuc

SEQ ID NO: 673957 - RNA, 19 nt, Homo sapiens
  misc_RNA (1)...(19): siRNA sense strand
aaagcuggaaggcauaauu

SEQ ID NO: 673958 - RNA, 19 nt, Homo sapiens
  misc_RNA (1)...(19): siRNA sense strand
ugagaacaccaauauuaca

SEQ ID NO: 673959 - RNA, 19 nt, Homo sapiens
  misc_RNA (1)...(19): siRNA sense strand
cagauaauguaagcucauc

SEQ ID NO: 673960 - RNA, 19 nt, Homo sapiens
  misc_RNA (1)...(19): siRNA sense strand
caaaucccacucaaaccuu

SEQ ID NO: 673961 - RNA, 19 nt, Homo sapiens
  misc_RNA (1)...(19): siRNA sense strand
agaagaacaaaccaagaaa

SEQ ID NO: 673962 - RNA, 19 nt, Homo sapiens
  misc_RNA (1)...(19): siRNA sense strand
uauuacaguuugugcuuuc

SEQ ID NO: 673963 - RNA, 19 nt, Homo sapiens
  misc_RNA (1)...(19): siRNA sense strand
gagaacaccaauauuacag

SEQ ID NO: 673964 - RNA, 19 nt, Homo sapiens
  misc_RNA (1)...(19): siRNA sense strand
guacgcuaguguguuucua

SEQ ID NO: 673965 - RNA, 19 nt, Homo sapiens
  misc_RNA (1)...(19): siRNA sense strand
gccaaagucaccugcauca

SEQ ID NO: 673966 - RNA, 19 nt, Homo sapiens
  misc_RNA (1)...(19): siRNA sense strand
ugguggugauagucauuua

SEQ ID NO: 673967 - RNA, 19 nt, Homo sapiens
  misc_RNA (1)...(19): siRNA sense strand
uagaauugcagauauugug

SEQ ID NO: 673968 - RNA, 19 nt, Homo sapiens
  misc_RNA (1)...(19): siRNA sense strand
acuguagaauugcagauau

SEQ ID NO: 673969 - RNA, 19 nt, Homo sapiens
  misc_RNA (1)...(19): siRNA sense strand
gauucaacuaggcaucaua

SEQ ID NO: 673970 - RNA, 19 nt, Homo sapiens
  misc_RNA (1)...(19): siRNA sense strand
gcuggaaggcauaauuaca

SEQ ID NO: 673971 - RNA, 19 nt, Homo sapiens
  misc_RNA (1)...(19): siRNA sense strand
aaacagcuugguggugaua

SEQ ID NO: 673972 - RNA, 19 nt, Homo sapiens
  misc_RNA (1)...(19): siRNA sense strand
auacuggguuuccuguuuc

SEQ ID NO: 673973 - RNA, 19 nt, Homo sapiens
  misc_RNA (1)...(19): siRNA sense strand
ccaaagcuggaaggcauaa

SEQ ID NO: 673974 - RNA, 19 nt, Homo sapiens
  misc_RNA (1)...(19): siRNA sense strand
cccaccaaauauucacuuu

SEQ ID NO: 673975 - RNA, 19 nt, Homo sapiens
  misc_RNA (1)...(19): siRNA sense strand
ucagaagaacaaaccaaga

SEQ ID NO: 673976 - RNA, 19 nt, Homo sapiens
  misc_RNA (1)...(19): siRNA sense strand
cauuaugagucccaaaauu

SEQ ID NO: 673977 - RNA, 19 nt, Homo sapiens
  misc_RNA (1)...(19): siRNA sense strand
aguuugugcuuuccauuau

SEQ ID NO: 673978 - RNA, 19 nt, Homo sapiens
  misc_RNA (1)...(19): siRNA sense strand
cauacgugacuguagaauu

SEQ ID NO: 673979 - RNA, 19 nt, Homo sapiens
  misc_RNA (1)...(19): siRNA sense strand
ucacuuuucuggauguauu

SEQ ID NO: 673980 - RNA, 19 nt, Homo sapiens
  misc_RNA (1)...(19): siRNA sense strand
cccuaaagaaggcuuauga

SEQ ID NO: 673981 - RNA, 19 nt, Homo sapiens
  misc_RNA (1)...(19): siRNA sense strand
uuugugcuuuccauuauga

SEQ ID NO: 673982 - RNA, 19 nt, Homo sapiens
  misc_RNA (1)...(19): siRNA sense strand
ucuacacagcuauggaaua

SEQ ID NO: 673983 - RNA, 19 nt, Homo sapiens
  misc_RNA (1)...(19): siRNA sense strand
gauaauguaagcucaucca

SEQ ID NO: 673984 - RNA, 19 nt, Homo sapiens
  misc_RNA (1)...(19): siRNA sense strand
ccuaaagaaggcuuaugaa

SEQ ID NO: 673985 - RNA, 19 nt, Homo sapiens
  misc_RNA (1)...(19): siRNA sense strand
ccaguuugccagcuauaau

SEQ ID NO: 673986 - RNA, 19 nt, Homo sapiens
  misc_RNA (1)...(19): siRNA sense strand
gucaugauuccuacuuuau

SEQ ID NO: 673987 - RNA, 19 nt, Homo sapiens
  misc_RNA (1)...(19): siRNA sense strand
auucucaacucuucuacug

SEQ ID NO: 673988 - RNA, 19 nt, Homo sapiens
  misc_RNA (1)...(19): siRNA sense strand
guagaauugcagauauugu

SEQ ID NO: 673989 - RNA, 19 nt, Homo sapiens
  misc_RNA (1)...(19): siRNA sense strand
ccagcuauaauccaucgaa

SEQ ID NO: 673990 - RNA, 19 nt, Homo sapiens
  misc_RNA (1)...(19): siRNA sense strand
aucgauaccuggcuauugu

SEQ ID NO: 673991 - RNA, 19 nt, Homo sapiens
  misc_RNA (1)...(19): siRNA sense strand
acucacgugucucagcauu

SEQ ID NO: 673992 - RNA, 19 nt, Homo sapiens
  misc_RNA (1)...(19): siRNA sense strand
aagaaggcuuaugaaauuc

SEQ ID NO: 673993 - RNA, 19 nt, Homo sapiens
  misc_RNA (1)...(19): siRNA sense strand
ucucagcauugaucgauac

SEQ ID NO: 673994 - RNA, 19 nt, Homo sapiens
  misc_RNA (1)...(19): siRNA sense strand
uagccaaagucaccugcau

SEQ ID NO: 673995 - RNA, 19 nt, Homo sapiens
  misc_RNA (1)...(19): siRNA sense strand
gaauauuuggaaacagcuu

SEQ ID NO: 673996 - RNA, 19 nt, Homo sapiens
  misc_RNA (1)...(19): siRNA sense strand
uuuggaaggcccuaaagaa

SEQ ID NO: 673997 - RNA, 19 nt, Homo sapiens
  misc_RNA (1)...(19): siRNA sense strand
gggcugggccugaccaaaa

SEQ ID NO: 673998 - RNA, 19 nt, Homo sapiens
  misc_RNA (1)...(19): siRNA sense strand
gauuccuacuuuauacagu

SEQ ID NO: 673999 - RNA, 19 nt, Homo sapiens
  misc_RNA (1)...(19): siRNA sense strand
uaagcucauccaccaagaa

SEQ ID NO: 674000 - RNA, 19 nt, Homo sapiens
  misc_RNA (1)...(19): siRNA sense strand
ccaaaucccacucaaaccu

SEQ ID NO: 674001 - RNA, 19 nt, Homo sapiens
  misc_RNA (1)...(19): siRNA sense strand
uuuaacaauugccugaauc

SEQ ID NO: 674002 - RNA, 19 nt, Homo sapiens
  misc_RNA (1)...(19): siRNA sense strand
acaaaccaagaaaugauga

SEQ ID NO: 674003 - RNA, 19 nt, Homo sapiens
  misc_RNA (1)...(19): siRNA sense strand
ucugaucauucuuacaagu

SEQ ID NO: 674004 - RNA, 19 nt, Homo sapiens
  misc_RNA (1)...(19): siRNA sense strand
gcgucaguuucaaccugua

SEQ ID NO: 674005 - RNA, 19 nt, Homo sapiens
  misc_RNA (1)...(19): siRNA sense strand
guuugugcuuuccauuaug

SEQ ID NO: 674006 - RNA, 19 nt, Homo sapiens
  misc_RNA (1)...(19): siRNA sense strand
gaacaccaauauuacaguu

SEQ ID NO: 674007 - RNA, 19 nt, Homo sapiens
  misc_RNA (1)...(19): siRNA sense strand
gaauaccgcuggcccuuug

SEQ ID NO: 674008 - RNA, 19 nt, Homo sapiens
  misc_RNA (1)...(19): siRNA sense strand
acucaaaccuuucaacaaa

SEQ ID NO: 674009 - RNA, 19 nt, Homo sapiens
  misc_RNA (1)...(19): siRNA sense strand
gaacaaaccaagaaaugau

SEQ ID NO: 674010 - RNA, 19 nt, Homo sapiens
  misc_RNA (1)...(19): siRNA sense strand
auacgugacuguagaauug

SEQ ID NO: 674011 - RNA, 19 nt, Homo sapiens
  misc_RNA (1)...(19): siRNA sense strand
caucauacgugacuguaga

SEQ ID NO: 674012 - RNA, 19 nt, Homo sapiens
  misc_RNA (1)...(19): siRNA sense strand
ccaagaugauugucccaaa

SEQ ID NO: 674013 - RNA, 19 nt, Homo sapiens
  misc_RNA (1)...(19): siRNA sense strand
uauacuggguuuccuguuu

SEQ ID NO: 674014 - RNA, 19 nt, Homo sapiens
  misc_RNA (1)...(19): siRNA sense strand
gcuauaauccaucgaaaug

SEQ ID NO: 674015 - RNA, 19 nt, Homo sapiens
  misc_RNA (1)...(19): siRNA sense strand
ugucaugauuccuacuuua

SEQ ID NO: 674016 - RNA, 19 nt, Homo sapiens
  misc_RNA (1)...(19): siRNA sense strand
gaagaacaaaccaagaaau

SEQ ID NO: 674017 - RNA, 19 nt, Homo sapiens
  misc_RNA (1)...(19): siRNA sense strand
aaagucaccugcaucauca

SEQ ID NO: 674018 - RNA, 19 nt, Homo sapiens
  misc_RNA (1)...(19): siRNA sense strand
ggugauagucauuuacuuu

SEQ ID NO: 674019 - RNA, 19 nt, Homo sapiens
  misc_RNA (1)...(19): siRNA sense strand
uggaaggcauaauuacaua

SEQ ID NO: 674020 - RNA, 19 nt, Homo sapiens
  misc_RNA (1)...(19): siRNA sense strand
gcuaguguguuucuacuca

SEQ ID NO: 674021 - RNA, 19 nt, Homo sapiens
  misc_RNA (1)...(19): siRNA sense strand
ccuguacgcuaguguguuu

SEQ ID NO: 674022 - RNA, 19 nt, Homo sapiens
  misc_RNA (1)...(19): siRNA sense strand
ucacgugucucagcauuga

SEQ ID NO: 674023 - RNA, 19 nt, Homo sapiens
  misc_RNA (1)...(19): siRNA sense strand
acaccaauauuacaguuug

SEQ ID NO: 674024 - RNA, 19 nt, Homo sapiens
  misc_RNA (1)...(19): siRNA sense strand
cuaaagaaggcuuaugaaa

SEQ ID NO: 674025 - RNA, 19 nt, Homo sapiens
  misc_RNA (1)...(19): siRNA sense strand
cagaagaacaaaccaagaa

SEQ ID NO: 674026 - RNA, 19 nt, Homo sapiens
  misc_RNA (1)...(19): siRNA sense strand
ucucaacucuucuacugaa

SEQ ID NO: 674027 - RNA, 19 nt, Homo sapiens
  misc_RNA (1)...(19): siRNA sense strand
caaagucaccugcaucauc

SEQ ID NO: 674028 - RNA, 19 nt, Homo sapiens
  misc_RNA (1)...(19): siRNA sense strand
uuacugacuuugccacuau

SEQ ID NO: 674029 - RNA, 19 nt, Homo sapiens
  misc_RNA (1)...(19): siRNA sense strand
ucaccugcaucaucauuug

SEQ ID NO: 674030 - RNA, 19 nt, Homo sapiens
  misc_RNA (1)...(19): siRNA sense strand
caagaugauugucccaaag

SEQ ID NO: 674031 - RNA, 19 nt, Homo sapiens
  misc_RNA (1)...(19): siRNA sense strand
cuacacagcuauggaauac

SEQ ID NO: 674032 - RNA, 19 nt, Homo sapiens
  misc_RNA (1)...(19): siRNA sense strand
auaugaagcugaagacugu

SEQ ID NO: 674033 - RNA, 19 nt, Homo sapiens
  misc_RNA (1)...(19): siRNA sense strand
gaaacagcuugguggugau

SEQ ID NO: 674034 - RNA, 19 nt, Homo sapiens
  misc_RNA (1)...(19): siRNA sense strand
aagcuggaaggcauaauua

SEQ ID NO: 674035 - RNA, 19 nt, Homo sapiens
  misc_RNA (1)...(19): siRNA sense strand
cagcuauaauccaucgaaa

SEQ ID NO: 674036 - RNA, 19 nt, Homo sapiens
  misc_RNA (1)...(19): siRNA sense strand
caugauuccuacuuuauac

SEQ ID NO: 674037 - RNA, 19 nt, Homo sapiens
  misc_RNA (1)...(19): siRNA sense strand
gaucgauaccuggcuauug

SEQ ID NO: 674038 - RNA, 19 nt, Homo sapiens
  misc_RNA (1)...(19): siRNA sense strand
ggaauaccgcuggcccuuu

SEQ ID NO: 674039 - RNA, 19 nt, Homo sapiens
  misc_RNA (1)...(19): siRNA sense strand
guaagcucauccaccaaga

SEQ ID NO: 674040 - RNA, 19 nt, Homo sapiens
  misc_RNA (1)...(19): siRNA sense strand
caguuugugcuuuccauua

SEQ ID NO: 674041 - RNA, 19 nt, Homo sapiens
  misc_RNA (1)...(19): siRNA sense strand
gcuggcccuuuggcaauua

SEQ ID NO: 674042 - RNA, 19 nt, Homo sapiens
  misc_RNA (1)...(19): siRNA sense strand
acuaugggcugucuacaca

SEQ ID NO: 674043 - RNA, 19 nt, Homo sapiens
  misc_RNA (1)...(19): siRNA sense strand
aaaucccacucaaaccuuu

SEQ ID NO: 674044 - RNA, 19 nt, Homo sapiens
  misc_RNA (1)...(19): siRNA sense strand
gcaauugugcuuuucuuuu

SEQ ID NO: 674045 - RNA, 19 nt, Homo sapiens
  misc_RNA (1)...(19): siRNA sense strand
aagaacaaaccaagaaaug

SEQ ID NO: 674046 - RNA, 19 nt, Homo sapiens
  misc_RNA (1)...(19): siRNA sense strand
ggaaggcauaauuacauau

SEQ ID NO: 674047 - RNA, 19 nt, Homo sapiens
  misc_RNA (1)...(19): siRNA sense strand
cuacugaagaugguauuaa

SEQ ID NO: 674048 - RNA, 19 nt, Homo sapiens
  misc_RNA (1)...(19): siRNA sense strand
gugggaauauuuggaaaca

SEQ ID NO: 674049 - RNA, 19 nt, Homo sapiens
  misc_RNA (1)...(19): siRNA sense strand
agaacaaaccaagaaauga

SEQ ID NO: 674050 - RNA, 19 nt, Homo sapiens
  misc_RNA (1)...(19): siRNA sense strand
gaaauucagaagaacaaac

SEQ ID NO: 674051 - RNA, 19 nt, Homo sapiens
  misc_RNA (1)...(19): siRNA sense strand
gacuguagaauugcagaua

SEQ ID NO: 674052 - RNA, 19 nt, Homo sapiens
  misc_RNA (1)...(19): siRNA sense strand
uggguuuccuguuuccuuu

SEQ ID NO: 674053 - RNA, 19 nt, Homo sapiens
  misc_RNA (1)...(19): siRNA sense strand
ccacucaaaccuuucaaca

SEQ ID NO: 674054 - RNA, 19 nt, Homo sapiens
  misc_RNA (1)...(19): siRNA sense strand
cuguagaauugcagauauu

SEQ ID NO: 674055 - RNA, 19 nt, Homo sapiens
  misc_RNA (1)...(19): siRNA sense strand
caccaaauauucacuuuuc

SEQ ID NO: 674056 - RNA, 19 nt, Homo sapiens
  misc_RNA (1)...(19): siRNA sense strand
aaagcuggaaggcauaauu

SEQ ID NO: 674057 - RNA, 19 nt, Homo sapiens
  misc_RNA (1)...(19): siRNA sense strand
ugagaacaccaauauuaca

SEQ ID NO: 674058 - RNA, 19 nt, Homo sapiens
  misc_RNA (1)...(19): siRNA sense strand
cagauaauguaagcucauc

SEQ ID NO: 674059 - RNA, 19 nt, Homo sapiens
  misc_RNA (1)...(19): siRNA sense strand
caaaucccacucaaaccuu

SEQ ID NO: 674060 - RNA, 19 nt, Homo sapiens
  misc_RNA (1)...(19): siRNA sense strand
agaagaacaaaccaagaaa

SEQ ID NO: 674061 - RNA, 19 nt, Homo sapiens
  misc_RNA (1)...(19): siRNA sense strand
uauuacaguuugugcuuuc

SEQ ID NO: 674062 - RNA, 19 nt, Homo sapiens
  misc_RNA (1)...(19): siRNA sense strand
gagaacaccaauauuacag

SEQ ID NO: 674063 - RNA, 19 nt, Homo sapiens
  misc_RNA (1)...(19): siRNA sense strand
guacgcuaguguguuucua

SEQ ID NO: 674064 - RNA, 19 nt, Homo sapiens
  misc_RNA (1)...(19): siRNA sense strand
gccaaagucaccugcauca

SEQ ID NO: 674065 - RNA, 19 nt, Homo sapiens
  misc_RNA (1)...(19): siRNA sense strand
ugguggugauagucauuua

SEQ ID NO: 674066 - RNA, 19 nt, Homo sapiens
  misc_RNA (1)...(19): siRNA sense strand
uagaauugcagauauugug

SEQ ID NO: 674067 - RNA, 19 nt, Homo sapiens
  misc_RNA (1)...(19): siRNA sense strand
acuguagaauugcagauau

SEQ ID NO: 674068 - RNA, 19 nt, Homo sapiens
  misc_RNA (1)...(19): siRNA sense strand
gauucaacuaggcaucaua

SEQ ID NO: 674069 - RNA, 19 nt, Homo sapiens
  misc_RNA (1)...(19): siRNA sense strand
gcuggaaggcauaauuaca

SEQ ID NO: 674070 - RNA, 19 nt, Homo sapiens
  misc_RNA (1)...(19): siRNA sense strand
aaacagcuugguggugaua

SEQ ID NO: 674071 - RNA, 19 nt, Homo sapiens
  misc_RNA (1)...(19): siRNA sense strand
auacuggguuuccuguuuc

SEQ ID NO: 674072 - RNA, 19 nt, Homo sapiens
  misc_RNA (1)...(19): siRNA sense strand
ccaaagcuggaaggcauaa

SEQ ID NO: 674073 - RNA, 19 nt, Homo sapiens
  misc_RNA (1)...(19): siRNA sense strand
cccaccaaauauucacuuu

SEQ ID NO: 674074 - RNA, 19 nt, Homo sapiens
  misc_RNA (1)...(19): siRNA sense strand
ucagaagaacaaaccaaga

SEQ ID NO: 674075 - RNA, 19 nt, Homo sapiens
  misc_RNA (1)...(19): siRNA sense strand
cauuaugagucccaaaauu

SEQ ID NO: 674076 - RNA, 19 nt, Homo sapiens
  misc_RNA (1)...(19): siRNA sense strand
aguuugugcuuuccauuau

SEQ ID NO: 674077 - RNA, 19 nt, Homo sapiens
  misc_RNA (1)...(19): siRNA sense strand
cauacgugacuguagaauu

SEQ ID NO: 674078 - RNA, 19 nt, Homo sapiens
  misc_RNA (1)...(19): siRNA sense strand
ucacuuuucuggauguauu

SEQ ID NO: 674079 - RNA, 19 nt, Homo sapiens
  misc_RNA (1)...(19): siRNA sense strand
cccuaaagaaggcuuauga

SEQ ID NO: 674080 - RNA, 19 nt, Homo sapiens
  misc_RNA (1)...(19): siRNA sense strand
uuugugcuuuccauuauga

SEQ ID NO: 674081 - RNA, 19 nt, Homo sapiens
  misc_RNA (1)...(19): siRNA sense strand
ucuacacagcuauggaaua

SEQ ID NO: 674082 - RNA, 19 nt, Homo sapiens
  misc_RNA (1)...(19): siRNA sense strand
gauaauguaagcucaucca

SEQ ID NO: 674083 - RNA, 19 nt, Homo sapiens
  misc_RNA (1)...(19): siRNA sense strand
ccuaaagaaggcuuaugaa

SEQ ID NO: 674084 - RNA, 19 nt, Homo sapiens
  misc_RNA (1)...(19): siRNA sense strand
ccaguuugccagcuauaau

SEQ ID NO: 674085 - RNA, 19 nt, Homo sapiens
  misc_RNA (1)...(19): siRNA sense strand
gucaugauuccuacuuuau

SEQ ID NO: 674086 - RNA, 19 nt, Homo sapiens
  misc_RNA (1)...(19): siRNA sense strand
auucucaacucuucuacug

SEQ ID NO: 674087 - RNA, 19 nt, Homo sapiens
  misc_RNA (1)...(19): siRNA sense strand
guagaauugcagauauugu

SEQ ID NO: 674088 - RNA, 19 nt, Homo sapiens
  misc_RNA (1)...(19): siRNA sense strand
ccagcuauaauccaucgaa

SEQ ID NO: 674089 - RNA, 19 nt, Homo sapiens
  misc_RNA (1)...(19): siRNA sense strand
aucgauaccuggcuauugu

SEQ ID NO: 674090 - RNA, 19 nt, Homo sapiens
  misc_RNA (1)...(19): siRNA sense strand
acucacgugucucagcauu

SEQ ID NO: 674091 - RNA, 19 nt, Homo sapiens
  misc_RNA (1)...(19): siRNA sense strand
aagaaggcuuaugaaauuc

SEQ ID NO: 674092 - RNA, 19 nt, Homo sapiens
  misc_RNA (1)...(19): siRNA sense strand
ucucagcauugaucgauac

SEQ ID NO: 674093 - RNA, 19 nt, Homo sapiens
  misc_RNA (1)...(19): siRNA sense strand
uagccaaagucaccugcau

SEQ ID NO: 674094 - RNA, 19 nt, Homo sapiens
  misc_RNA (1)...(19): siRNA sense strand
gaauauuuggaaacagcuu

SEQ ID NO: 674095 - RNA, 19 nt, Homo sapiens
  misc_RNA (1)...(19): siRNA sense strand
uuuggaaggcccuaaagaa

SEQ ID NO: 674096 - RNA, 19 nt, Homo sapiens
  misc_RNA (1)...(19): siRNA sense strand
gggcugggccugaccaaaa

SEQ ID NO: 674097 - RNA, 19 nt, Homo sapiens
  misc_RNA (1)...(19): siRNA sense strand
gauuccuacuuuauacagu

SEQ ID NO: 674098 - RNA, 19 nt, Homo sapiens
  misc_RNA (1)...(19): siRNA sense strand
uaagcucauccaccaagaa

SEQ ID NO: 674099 - RNA, 19 nt, Homo sapiens
  misc_RNA (1)...(19): siRNA sense strand
ccaaaucccacucaaaccu

SEQ ID NO: 674100 - RNA, 19 nt, Homo sapiens
  misc_RNA (1)...(19): siRNA sense strand
uuuaacaauugccugaauc

SEQ ID NO: 674101 - RNA, 19 nt, Homo sapiens
  misc_RNA (1)...(19): siRNA sense strand
acaaaccaagaaaugauga

SEQ ID NO: 674102 - RNA, 19 nt, Homo sapiens
  misc_RNA (1)...(19): siRNA sense strand
ucugaucauucuuacaagu

SEQ ID NO: 674103 - RNA, 19 nt, Homo sapiens
  misc_RNA (1)...(19): siRNA sense strand
gcgucaguuucaaccugua

SEQ ID NO: 674104 - RNA, 19 nt, Homo sapiens
  misc_RNA (1)...(19): siRNA sense strand
guuugugcuuuccauuaug

SEQ ID NO: 674105 - RNA, 19 nt, Homo sapiens
  misc_RNA (1)...(19): siRNA sense strand
gaacagcccuuagucuuua

SEQ ID NO: 674106 - RNA, 19 nt, Homo sapiens
  misc_RNA (1)...(19): siRNA sense strand
ggaacagcccuuagucuuu

SEQ ID NO: 674107 - RNA, 19 nt, Homo sapiens
  misc_RNA (1)...(19): siRNA sense strand
uaaaggugcuggacaagug

SEQ ID NO: 674108 - RNA, 19 nt, Homo sapiens
  misc_RNA (1)...(19): siRNA sense strand
agaaagaacucacgacuac

SEQ ID NO: 674109 - RNA, 19 nt, Homo sapiens
  misc_RNA (1)...(19): siRNA sense strand
gaaccagcgcuacaucuuu

SEQ ID NO: 674110 - RNA, 19 nt, Homo sapiens
  misc_RNA (1)...(19): siRNA sense strand
gcaagauccugugcacuga

SEQ ID NO: 674111 - RNA, 19 nt, Homo sapiens
  misc_RNA (1)...(19): siRNA sense strand
gagaagcaaucgcugaagu

SEQ ID NO: 674112 - RNA, 19 nt, Homo sapiens
  misc_RNA (1)...(19): siRNA sense strand
gaaaggaaccagcgcuaca

SEQ ID NO: 674113 - RNA, 19 nt, Homo sapiens
  misc_RNA (1)...(19): siRNA sense strand
agaaagaggugggcaagau

SEQ ID NO: 674114 - RNA, 19 nt, Homo sapiens
  misc_RNA (1)...(19): siRNA sense strand
gagacauucgcaucaaaua

SEQ ID NO: 674115 - RNA, 19 nt, Homo sapiens
  misc_RNA (1)...(19): siRNA sense strand
agcaaucgcugaaguguga

SEQ ID NO: 674116 - RNA, 19 nt, Homo sapiens
  misc_RNA (1)...(19): siRNA sense strand
ucaaccagcucuccugcaa

SEQ ID NO: 674117 - RNA, 19 nt, Homo sapiens
  misc_RNA (1)...(19): siRNA sense strand
gacauucgcaucaaauaug

SEQ ID NO: 674118 - RNA, 19 nt, Homo sapiens
  misc_RNA (1)...(19): siRNA sense strand
ggaaccagcgcuacaucuu

SEQ ID NO: 674119 - RNA, 19 nt, Homo sapiens
  misc_RNA (1)...(19): siRNA sense strand
ggaggcgucugcuacuaca

SEQ ID NO: 674120 - RNA, 19 nt, Homo sapiens
  misc_RNA (1)...(19): siRNA sense strand
gaaagaggugggcaagauc

SEQ ID NO: 674121 - RNA, 19 nt, Homo sapiens
  misc_RNA (1)...(19): siRNA sense strand
cagaaagaacucacgacua

SEQ ID NO: 674122 - RNA, 19 nt, Homo sapiens
  misc_RNA (1)...(19): siRNA sense strand
gugugucgcucgccugcua

SEQ ID NO: 674123 - RNA, 19 nt, Homo sapiens
  misc_RNA (1)...(19): siRNA sense strand
ggcccaaguugaagaagau

SEQ ID NO: 674124 - RNA, 19 nt, Homo sapiens
  misc_RNA (1)...(19): siRNA sense strand
gaagcaaucgcugaagugu

SEQ ID NO: 674125 - RNA, 19 nt, Homo sapiens
  misc_RNA (1)...(19): siRNA sense strand
gcaacgagacagccaaguc

SEQ ID NO: 674126 - RNA, 19 nt, Homo sapiens
  misc_RNA (1)...(19): siRNA sense strand
ccgagacauucgcaucaaa

SEQ ID NO: 674127 - RNA, 19 nt, Homo sapiens
  misc_RNA (1)...(19): siRNA sense strand
agacagccaaguccuauug

SEQ ID NO: 674128 - RNA, 19 nt, Homo sapiens
  misc_RNA (1)...(19): siRNA sense strand
caaccgcagccgagacauu

SEQ ID NO: 674129 - RNA, 19 nt, Homo sapiens
  misc_RNA (1)...(19): siRNA sense strand
ugguaaaggugcuggacaa

SEQ ID NO: 674130 - RNA, 19 nt, Homo sapiens
  misc_RNA (1)...(19): siRNA sense strand
gacuacaguucaacaaggu

SEQ ID NO: 674131 - RNA, 19 nt, Homo sapiens
  misc_RNA (1)...(19): siRNA sense strand
ggaggacgcuggggaguau

SEQ ID NO: 674132 - RNA, 19 nt, Homo sapiens
  misc_RNA (1)...(19): siRNA sense strand
ccacggaacagcccuuagu

SEQ ID NO: 674133 - RNA, 19 nt, Homo sapiens
  misc_RNA (1)...(19): siRNA sense strand
ccaaguugaagaagaugaa

SEQ ID NO: 674134 - RNA, 19 nt, Homo sapiens
  misc_RNA (1)...(19): siRNA sense strand
caacaacagcagcaucucu

SEQ ID NO: 674135 - RNA, 19 nt, Homo sapiens
  misc_RNA (1)...(19): siRNA sense strand
cggaacagcccuuagucuu

SEQ ID NO: 674136 - RNA, 19 nt, Homo sapiens
  misc_RNA (1)...(19): siRNA sense strand
gugugccgcucgaaaggaa

SEQ ID NO: 674137 - RNA, 19 nt, Homo sapiens
  misc_RNA (1)...(19): siRNA sense strand
gccgagacauucgcaucaa

SEQ ID NO: 674138 - RNA, 19 nt, Homo sapiens
  misc_RNA (1)...(19): siRNA sense strand
ggugguggagggcaaggua

SEQ ID NO: 674139 - RNA, 19 nt, Homo sapiens
  misc_RNA (1)...(19): siRNA sense strand
gugagaagcaaucgcugaa

SEQ ID NO: 674140 - RNA, 19 nt, Homo sapiens
  misc_RNA (1)...(19): siRNA sense strand
agacauucgcaucaaauau

SEQ ID NO: 674141 - RNA, 19 nt, Homo sapiens
  misc_RNA (1)...(19): siRNA sense strand
cgagacauucgcaucaaau

SEQ ID NO: 674142 - RNA, 19 nt, Homo sapiens
  misc_RNA (1)...(19): siRNA sense strand
cgagacagccaaguccuau

SEQ ID NO: 674143 - RNA, 19 nt, Homo sapiens
  misc_RNA (1)...(19): siRNA sense strand
cggcccaaguugaagaaga

SEQ ID NO: 674144 - RNA, 19 nt, Homo sapiens
  misc_RNA (1)...(19): siRNA sense strand
ggucggguggcguugguaa

SEQ ID NO: 674145 - RNA, 19 nt, Homo sapiens
  misc_RNA (1)...(19): siRNA sense strand
gaaagaacucacgacuaca

SEQ ID NO: 674146 - RNA, 19 nt, Homo sapiens
  misc_RNA (1)...(19): siRNA sense strand
guaaaggugcuggacaagu

SEQ ID NO: 674147 - RNA, 19 nt, Homo sapiens
  misc_RNA (1)...(19): siRNA sense strand
cgggacaggugggugagaa

SEQ ID NO: 674148 - RNA, 19 nt, Homo sapiens
  misc_RNA (1)...(19): siRNA sense strand
gagacagccaaguccuauu

SEQ ID NO: 674149 - RNA, 19 nt, Homo sapiens
  misc_RNA (1)...(19): siRNA sense strand
ucaauggaggcgucugcua

SEQ ID NO: 674150 - RNA, 19 nt, Homo sapiens
  misc_RNA (1)...(19): siRNA sense strand
uauggcaacggcagaaaga

SEQ ID NO: 674151 - RNA, 19 nt, Homo sapiens
  misc_RNA (1)...(19): siRNA sense strand
acaggugggugagaagcaa

SEQ ID NO: 674152 - RNA, 19 nt, Homo sapiens
  misc_RNA (1)...(19): siRNA sense strand
aaccagcgcuacaucuuuu

SEQ ID NO: 674153 - RNA, 19 nt, Homo sapiens
  misc_RNA (1)...(19): siRNA sense strand
acucacgacuacaguucaa

SEQ ID NO: 674154 - RNA, 19 nt, Homo sapiens
  misc_RNA (1)...(19): siRNA sense strand
aaagaacucacgacuacag

SEQ ID NO: 674155 - RNA, 19 nt, Homo sapiens
  misc_RNA (1)...(19): siRNA sense strand
gaacagcccuuagucuuua

SEQ ID NO: 674156 - RNA, 19 nt, Homo sapiens
  misc_RNA (1)...(19): siRNA sense strand
ggaacagcccuuagucuuu

SEQ ID NO: 674157 - RNA, 19 nt, Homo sapiens
  misc_RNA (1)...(19): siRNA sense strand
uaaaggugcuggacaagug

SEQ ID NO: 674158 - RNA, 19 nt, Homo sapiens
  misc_RNA (1)...(19): siRNA sense strand
agaaagaacucacgacuac

SEQ ID NO: 674159 - RNA, 19 nt, Homo sapiens
  misc_RNA (1)...(19): siRNA sense strand
gaaccagcgcuacaucuuu

SEQ ID NO: 674160 - RNA, 19 nt, Homo sapiens
  misc_RNA (1)...(19): siRNA sense strand
gcaagauccugugcacuga

SEQ ID NO: 674161 - RNA, 19 nt, Homo sapiens
  misc_RNA (1)...(19): siRNA sense strand
gagaagcaaucgcugaagu

SEQ ID NO: 674162 - RNA, 19 nt, Homo sapiens
  misc_RNA (1)...(19): siRNA sense strand
gaaaggaaccagcgcuaca

SEQ ID NO: 674163 - RNA, 19 nt, Homo sapiens
  misc_RNA (1)...(19): siRNA sense strand
agaaagaggugggcaagau

SEQ ID NO: 674164 - RNA, 19 nt, Homo sapiens
  misc_RNA (1)...(19): siRNA sense strand
gagacauucgcaucaaaua

SEQ ID NO: 674165 - RNA, 19 nt, Homo sapiens
  misc_RNA (1)...(19): siRNA sense strand
agcaaucgcugaaguguga

SEQ ID NO: 674166 - RNA, 19 nt, Homo sapiens
  misc_RNA (1)...(19): siRNA sense strand
ucaaccagcucuccugcaa

SEQ ID NO: 674167 - RNA, 19 nt, Homo sapiens
  misc_RNA (1)...(19): siRNA sense strand
gacauucgcaucaaauaug

SEQ ID NO: 674168 - RNA, 19 nt, Homo sapiens
  misc_RNA (1)...(19): siRNA sense strand
ggaaccagcgcuacaucuu

SEQ ID NO: 674169 - RNA, 19 nt, Homo sapiens
  misc_RNA (1)...(19): siRNA sense strand
ggaggcgucugcuacuaca

SEQ ID NO: 674170 - RNA, 19 nt, Homo sapiens
  misc_RNA (1)...(19): siRNA sense strand
gaaagaggugggcaagauc

SEQ ID NO: 674171 - RNA, 19 nt, Homo sapiens
  misc_RNA (1)...(19): siRNA sense strand
cagaaagaacucacgacua

SEQ ID NO: 674172 - RNA, 19 nt, Homo sapiens
  misc_RNA (1)...(19): siRNA sense strand
gugugucgcucgccugcua

SEQ ID NO: 674173 - RNA, 19 nt, Homo sapiens
  misc_RNA (1)...(19): siRNA sense strand
ggcccaaguugaagaagau

SEQ ID NO: 674174 - RNA, 19 nt, Homo sapiens
  misc_RNA (1)...(19): siRNA sense strand
gaagcaaucgcugaagugu

SEQ ID NO: 674175 - RNA, 19 nt, Homo sapiens
  misc_RNA (1)...(19): siRNA sense strand
gcaacgagacagccaaguc

SEQ ID NO: 674176 - RNA, 19 nt, Homo sapiens
  misc_RNA (1)...(19): siRNA sense strand
ccgagacauucgcaucaaa

SEQ ID NO: 674177 - RNA, 19 nt, Homo sapiens
  misc_RNA (1)...(19): siRNA sense strand
agacagccaaguccuauug

SEQ ID NO: 674178 - RNA, 19 nt, Homo sapiens
  misc_RNA (1)...(19): siRNA sense strand
caaccgcagccgagacauu

SEQ ID NO: 674179 - RNA, 19 nt, Homo sapiens
  misc_RNA (1)...(19): siRNA sense strand
ugguaaaggugcuggacaa

SEQ ID NO: 674180 - RNA, 19 nt, Homo sapiens
  misc_RNA (1)...(19): siRNA sense strand
gacuacaguucaacaaggu

SEQ ID NO: 674181 - RNA, 19 nt, Homo sapiens
  misc_RNA (1)...(19): siRNA sense strand
ggaggacgcuggggaguau

SEQ ID NO: 674182 - RNA, 19 nt, Homo sapiens
  misc_RNA (1)...(19): siRNA sense strand
ccacggaacagcccuuagu

SEQ ID NO: 674183 - RNA, 19 nt, Homo sapiens
  misc_RNA (1)...(19): siRNA sense strand
ccaaguugaagaagaugaa

SEQ ID NO: 674184 - RNA, 19 nt, Homo sapiens
  misc_RNA (1)...(19): siRNA sense strand
caacaacagcagcaucucu

SEQ ID NO: 674185 - RNA, 19 nt, Homo sapiens
  misc_RNA (1)...(19): siRNA sense strand
cggaacagcccuuagucuu

SEQ ID NO: 674186 - RNA, 19 nt, Homo sapiens
  misc_RNA (1)...(19): siRNA sense strand
gugugccgcucgaaaggaa

SEQ ID NO: 674187 - RNA, 19 nt, Homo sapiens
  misc_RNA (1)...(19): siRNA sense strand
gccgagacauucgcaucaa

SEQ ID NO: 674188 - RNA, 19 nt, Homo sapiens
  misc_RNA (1)...(19): siRNA sense strand
ggugguggagggcaaggua

SEQ ID NO: 674189 - RNA, 19 nt, Homo sapiens
  misc_RNA (1)...(19): siRNA sense strand
gugagaagcaaucgcugaa

SEQ ID NO: 674190 - RNA, 19 nt, Homo sapiens
  misc_RNA (1)...(19): siRNA sense strand
agacauucgcaucaaauau

SEQ ID NO: 674191 - RNA, 19 nt, Homo sapiens
  misc_RNA (1)...(19): siRNA sense strand
cgagacauucgcaucaaau

SEQ ID NO: 674192 - RNA, 19 nt, Homo sapiens
  misc_RNA (1)...(19): siRNA sense strand
cgagacagccaaguccuau

SEQ ID NO: 674193 - RNA, 19 nt, Homo sapiens
  misc_RNA (1)...(19): siRNA sense strand
cggcccaaguugaagaaga

SEQ ID NO: 674194 - RNA, 19 nt, Homo sapiens
  misc_RNA (1)...(19): siRNA sense strand
ggucggguggcguugguaa

SEQ ID NO: 674195 - RNA, 19 nt, Homo sapiens
  misc_RNA (1)...(19): siRNA sense strand
gaaagaacucacgacuaca

SEQ ID NO: 674196 - RNA, 19 nt, Homo sapiens
  misc_RNA (1)...(19): siRNA sense strand
guaaaggugcuggacaagu

SEQ ID NO: 674197 - RNA, 19 nt, Homo sapiens
  misc_RNA (1)...(19): siRNA sense strand
cgggacaggugggugagaa

SEQ ID NO: 674198 - RNA, 19 nt, Homo sapiens
  misc_RNA (1)...(19): siRNA sense strand
gagacagccaaguccuauu

SEQ ID NO: 674199 - RNA, 19 nt, Homo sapiens
  misc_RNA (1)...(19): siRNA sense strand
ucaauggaggcgucugcua

SEQ ID NO: 674200 - RNA, 19 nt, Homo sapiens
  misc_RNA (1)...(19): siRNA sense strand
uauggcaacggcagaaaga

SEQ ID NO: 674201 - RNA, 19 nt, Homo sapiens
  misc_RNA (1)...(19): siRNA sense strand
acaggugggugagaagcaa

SEQ ID NO: 674202 - RNA, 19 nt, Homo sapiens
  misc_RNA (1)...(19): siRNA sense strand
aaccagcgcuacaucuuuu

SEQ ID NO: 674203 - RNA, 19 nt, Homo sapiens
  misc_RNA (1)...(19): siRNA sense strand
acucacgacuacaguucaa

SEQ ID NO: 674204 - RNA, 19 nt, Homo sapiens
  misc_RNA (1)...(19): siRNA sense strand
aaagaacucacgacuacag

SEQ ID NO: 674205 - RNA, 19 nt, Homo sapiens
  misc_RNA (1)...(19): siRNA sense strand
gaacagcccuuagucuuua

SEQ ID NO: 674206 - RNA, 19 nt, Homo sapiens
  misc_RNA (1)...(19): siRNA sense strand
ggaacagcccuuagucuuu

SEQ ID NO: 674207 - RNA, 19 nt, Homo sapiens
  misc_RNA (1)...(19): siRNA sense strand
uaaaggugcuggacaagug

SEQ ID NO: 674208 - RNA, 19 nt, Homo sapiens
  misc_RNA (1)...(19): siRNA sense strand
agaaagaacucacgacuac

SEQ ID NO: 674209 - RNA, 19 nt, Homo sapiens
  misc_RNA (1)...(19): siRNA sense strand
gaaccagcgcuacaucuuu

SEQ ID NO: 674210 - RNA, 19 nt, Homo sapiens
  misc_RNA (1)...(19): siRNA sense strand
gcaagauccugugcacuga

SEQ ID NO: 674211 - RNA, 19 nt, Homo sapiens
  misc_RNA (1)...(19): siRNA sense strand
gagaagcaaucgcugaagu

SEQ ID NO: 674212 - RNA, 19 nt, Homo sapiens
  misc_RNA (1)...(19): siRNA sense strand
gaaaggaaccagcgcuaca

SEQ ID NO: 674213 - RNA, 19 nt, Homo sapiens
  misc_RNA (1)...(19): siRNA sense strand
agaaagaggugggcaagau

SEQ ID NO: 674214 - RNA, 19 nt, Homo sapiens
  misc_RNA (1)...(19): siRNA sense strand
gagacauucgcaucaaaua

SEQ ID NO: 674215 - RNA, 19 nt, Homo sapiens
  misc_RNA (1)...(19): siRNA sense strand
agcaaucgcugaaguguga

SEQ ID NO: 674216 - RNA, 19 nt, Homo sapiens
  misc_RNA (1)...(19): siRNA sense strand
ucaaccagcucuccugcaa

SEQ ID NO: 674217 - RNA, 19 nt, Homo sapiens
  misc_RNA (1)...(19): siRNA sense strand
gacauucgcaucaaauaug

SEQ ID NO: 674218 - RNA, 19 nt, Homo sapiens
  misc_RNA (1)...(19): siRNA sense strand
ggaaccagcgcuacaucuu

SEQ ID NO: 674219 - RNA, 19 nt, Homo sapiens
  misc_RNA (1)...(19): siRNA sense strand
ggaggcgucugcuacuaca

SEQ ID NO: 674220 - RNA, 19 nt, Homo sapiens
  misc_RNA (1)...(19): siRNA sense strand
gaaagaggugggcaagauc

SEQ ID NO: 674221 - RNA, 19 nt, Homo sapiens
  misc_RNA (1)...(19): siRNA sense strand
cagaaagaacucacgacua

SEQ ID NO: 674222 - RNA, 19 nt, Homo sapiens
  misc_RNA (1)...(19): siRNA sense strand
gugugucgcucgccugcua

SEQ ID NO: 674223 - RNA, 19 nt, Homo sapiens
  misc_RNA (1)...(19): siRNA sense strand
ggcccaaguugaagaagau

SEQ ID NO: 674224 - RNA, 19 nt, Homo sapiens
  misc_RNA (1)...(19): siRNA sense strand
gaagcaaucgcugaagugu

SEQ ID NO: 674225 - RNA, 19 nt, Homo sapiens
  misc_RNA (1)...(19): siRNA sense strand
gcaacgagacagccaaguc

SEQ ID NO: 674226 - RNA, 19 nt, Homo sapiens
  misc_RNA (1)...(19): siRNA sense strand
ccgagacauucgcaucaaa

SEQ ID NO: 674227 - RNA, 19 nt, Homo sapiens
  misc_RNA (1)...(19): siRNA sense strand
agacagccaaguccuauug

SEQ ID NO: 674228 - RNA, 19 nt, Homo sapiens
  misc_RNA (1)...(19): siRNA sense strand
caaccgcagccgagacauu

SEQ ID NO: 674229 - RNA, 19 nt, Homo sapiens
  misc_RNA (1)...(19): siRNA sense strand
ugguaaaggugcuggacaa

SEQ ID NO: 674230 - RNA, 19 nt, Homo sapiens
  misc_RNA (1)...(19): siRNA sense strand
gacuacaguucaacaaggu

SEQ ID NO: 674231 - RNA, 19 nt, Homo sapiens
  misc_RNA (1)...(19): siRNA sense strand
ggaggacgcuggggaguau

SEQ ID NO: 674232 - RNA, 19 nt, Homo sapiens
  misc_RNA (1)...(19): siRNA sense strand
ccacggaacagcccuuagu

SEQ ID NO: 674233 - RNA, 19 nt, Homo sapiens
  misc_RNA (1)...(19): siRNA sense strand
ccaaguugaagaagaugaa

SEQ ID NO: 674234 - RNA, 19 nt, Homo sapiens
  misc_RNA (1)...(19): siRNA sense strand
caacaacagcagcaucucu

SEQ ID NO: 674235 - RNA, 19 nt, Homo sapiens
  misc_RNA (1)...(19): siRNA sense strand
cggaacagcccuuagucuu

SEQ ID NO: 674236 - RNA, 19 nt, Homo sapiens
  misc_RNA (1)...(19): siRNA sense strand
gugugccgcucgaaaggaa

SEQ ID NO: 674237 - RNA, 19 nt, Homo sapiens
  misc_RNA (1)...(19): siRNA sense strand
gccgagacauucgcaucaa

SEQ ID NO: 674238 - RNA, 19 nt, Homo sapiens
  misc_RNA (1)...(19): siRNA sense strand
ggugguggagggcaaggua

SEQ ID NO: 674239 - RNA, 19 nt, Homo sapiens
  misc_RNA (1)...(19): siRNA sense strand
gugagaagcaaucgcugaa

SEQ ID NO: 674240 - RNA, 19 nt, Homo sapiens
  misc_RNA (1)...(19): siRNA sense strand
agacauucgcaucaaauau

SEQ ID NO: 674241 - RNA, 19 nt, Homo sapiens
  misc_RNA (1)...(19): siRNA sense strand
cgagacauucgcaucaaau

SEQ ID NO: 674242 - RNA, 19 nt, Homo sapiens
  misc_RNA (1)...(19): siRNA sense strand
cgagacagccaaguccuau

SEQ ID NO: 674243 - RNA, 19 nt, Homo sapiens
  misc_RNA (1)...(19): siRNA sense strand
cggcccaaguugaagaaga

SEQ ID NO: 674244 - RNA, 19 nt, Homo sapiens
  misc_RNA (1)...(19): siRNA sense strand
ggucggguggcguugguaa

SEQ ID NO: 674245 - RNA, 19 nt, Homo sapiens
  misc_RNA (1)...(19): siRNA sense strand
gaaagaacucacgacuaca

SEQ ID NO: 674246 - RNA, 19 nt, Homo sapiens
  misc_RNA (1)...(19): siRNA sense strand
guaaaggugcuggacaagu

SEQ ID NO: 674247 - RNA, 19 nt, Homo sapiens
  misc_RNA (1)...(19): siRNA sense strand
cgggacaggugggugagaa

SEQ ID NO: 674248 - RNA, 19 nt, Homo sapiens
  misc_RNA (1)...(19): siRNA sense strand
gagacagccaaguccuauu

SEQ ID NO: 674249 - RNA, 19 nt, Homo sapiens
  misc_RNA (1)...(19): siRNA sense strand
ucaauggaggcgucugcua

SEQ ID NO: 674250 - RNA, 19 nt, Homo sapiens
  misc_RNA (1)...(19): siRNA sense strand
uauggcaacggcagaaaga

SEQ ID NO: 674251 - RNA, 19 nt, Homo sapiens
  misc_RNA (1)...(19): siRNA sense strand
acaggugggugagaagcaa

SEQ ID NO: 674252 - RNA, 19 nt, Homo sapiens
  misc_RNA (1)...(19): siRNA sense strand
aaccagcgcuacaucuuuu

SEQ ID NO: 674253 - RNA, 19 nt, Homo sapiens
  misc_RNA (1)...(19): siRNA sense strand
acucacgacuacaguucaa

SEQ ID NO: 674254 - RNA, 19 nt, Homo sapiens
  misc_RNA (1)...(19): siRNA sense strand
aaagaacucacgacuacag

SEQ ID NO: 674255 - RNA, 19 nt, Homo sapiens
  misc_RNA (1)...(19): siRNA sense strand
gaacagcccuuagucuuua

SEQ ID NO: 674256 - RNA, 19 nt, Homo sapiens
  misc_RNA (1)...(19): siRNA sense strand
ggaacagcccuuagucuuu

SEQ ID NO: 674257 - RNA, 19 nt, Homo sapiens
  misc_RNA (1)...(19): siRNA sense strand
uaaaggugcuggacaagug

SEQ ID NO: 674258 - RNA, 19 nt, Homo sapiens
  misc_RNA (1)...(19): siRNA sense strand
agaaagaacucacgacuac

SEQ ID NO: 674259 - RNA, 19 nt, Homo sapiens
  misc_RNA (1)...(19): siRNA sense strand
gaaccagcgcuacaucuuu

SEQ ID NO: 674260 - RNA, 19 nt, Homo sapiens
  misc_RNA (1)...(19): siRNA sense strand
gcaagauccugugcacuga

SEQ ID NO: 674261 - RNA, 19 nt, Homo sapiens
  misc_RNA (1)...(19): siRNA sense strand
gagaagcaaucgcugaagu

SEQ ID NO: 674262 - RNA, 19 nt, Homo sapiens
  misc_RNA (1)...(19): siRNA sense strand
gaaaggaaccagcgcuaca

SEQ ID NO: 674263 - RNA, 19 nt, Homo sapiens
  misc_RNA (1)...(19): siRNA sense strand
agaaagaggugggcaagau

SEQ ID NO: 674264 - RNA, 19 nt, Homo sapiens
  misc_RNA (1)...(19): siRNA sense strand
gagacauucgcaucaaaua

SEQ ID NO: 674265 - RNA, 19 nt, Homo sapiens
  misc_RNA (1)...(19): siRNA sense strand
agcaaucgcugaaguguga

SEQ ID NO: 674266 - RNA, 19 nt, Homo sapiens
  misc_RNA (1)...(19): siRNA sense strand
ucaaccagcucuccugcaa

SEQ ID NO: 674267 - RNA, 19 nt, Homo sapiens
  misc_RNA (1)...(19): siRNA sense strand
gacauucgcaucaaauaug

SEQ ID NO: 674268 - RNA, 19 nt, Homo sapiens
  misc_RNA (1)...(19): siRNA sense strand
ggaaccagcgcuacaucuu

SEQ ID NO: 674269 - RNA, 19 nt, Homo sapiens
  misc_RNA (1)...(19): siRNA sense strand
ggaggcgucugcuacuaca

SEQ ID NO: 674270 - RNA, 19 nt, Homo sapiens
  misc_RNA (1)...(19): siRNA sense strand
gaaagaggugggcaagauc

SEQ ID NO: 674271 - RNA, 19 nt, Homo sapiens
  misc_RNA (1)...(19): siRNA sense strand
cagaaagaacucacgacua

SEQ ID NO: 674272 - RNA, 19 nt, Homo sapiens
  misc_RNA (1)...(19): siRNA sense strand
gugugucgcucgccugcua

SEQ ID NO: 674273 - RNA, 19 nt, Homo sapiens
  misc_RNA (1)...(19): siRNA sense strand
ggcccaaguugaagaagau

SEQ ID NO: 674274 - RNA, 19 nt, Homo sapiens
  misc_RNA (1)...(19): siRNA sense strand
gaagcaaucgcugaagugu

SEQ ID NO: 674275 - RNA, 19 nt, Homo sapiens
  misc_RNA (1)...(19): siRNA sense strand
gcaacgagacagccaaguc

SEQ ID NO: 674276 - RNA, 19 nt, Homo sapiens
  misc_RNA (1)...(19): siRNA sense strand
ccgagacauucgcaucaaa

SEQ ID NO: 674277 - RNA, 19 nt, Homo sapiens
  misc_RNA (1)...(19): siRNA sense strand
agacagccaaguccuauug

SEQ ID NO: 674278 - RNA, 19 nt, Homo sapiens
  misc_RNA (1)...(19): siRNA sense strand
caaccgcagccgagacauu

SEQ ID NO: 674279 - RNA, 19 nt, Homo sapiens
  misc_RNA (1)...(19): siRNA sense strand
ugguaaaggugcuggacaa

SEQ ID NO: 674280 - RNA, 19 nt, Homo sapiens
  misc_RNA (1)...(19): siRNA sense strand
gacuacaguucaacaaggu

SEQ ID NO: 674281 - RNA, 19 nt, Homo sapiens
  misc_RNA (1)...(19): siRNA sense strand
ggaggacgcuggggaguau

SEQ ID NO: 674282 - RNA, 19 nt, Homo sapiens
  misc_RNA (1)...(19): siRNA sense strand
ccacggaacagcccuuagu

SEQ ID NO: 674283 - RNA, 19 nt, Homo sapiens
  misc_RNA (1)...(19): siRNA sense strand
ccaaguugaagaagaugaa

SEQ ID NO: 674284 - RNA, 19 nt, Homo sapiens
  misc_RNA (1)...(19): siRNA sense strand
caacaacagcagcaucucu

SEQ ID NO: 674285 - RNA, 19 nt, Homo sapiens
  misc_RNA (1)...(19): siRNA sense strand
cggaacagcccuuagucuu

SEQ ID NO: 674286 - RNA, 19 nt, Homo sapiens
  misc_RNA (1)...(19): siRNA sense strand
gugugccgcucgaaaggaa

SEQ ID NO: 674287 - RNA, 19 nt, Homo sapiens
  misc_RNA (1)...(19): siRNA sense strand
gccgagacauucgcaucaa

SEQ ID NO: 674288 - RNA, 19 nt, Homo sapiens
  misc_RNA (1)...(19): siRNA sense strand
ggugguggagggcaaggua

SEQ ID NO: 674289 - RNA, 19 nt, Homo sapiens
  misc_RNA (1)...(19): siRNA sense strand
gugagaagcaaucgcugaa

SEQ ID NO: 674290 - RNA, 19 nt, Homo sapiens
  misc_RNA (1)...(19): siRNA sense strand
agacauucgcaucaaauau

SEQ ID NO: 674291 - RNA, 19 nt, Homo sapiens
  misc_RNA (1)...(19): siRNA sense strand
cgagacauucgcaucaaau

SEQ ID NO: 674292 - RNA, 19 nt, Homo sapiens
  misc_RNA (1)...(19): siRNA sense strand
cgagacagccaaguccuau

SEQ ID NO: 674293 - RNA, 19 nt, Homo sapiens
  misc_RNA (1)...(19): siRNA sense strand
cggcccaaguugaagaaga

SEQ ID NO: 674294 - RNA, 19 nt, Homo sapiens
  misc_RNA (1)...(19): siRNA sense strand
ggucggguggcguugguaa

SEQ ID NO: 674295 - RNA, 19 nt, Homo sapiens
  misc_RNA (1)...(19): siRNA sense strand
gaaagaacucacgacuaca

SEQ ID NO: 674296 - RNA, 19 nt, Homo sapiens
  misc_RNA (1)...(19): siRNA sense strand
guaaaggugcuggacaagu

SEQ ID NO: 674297 - RNA, 19 nt, Homo sapiens
  misc_RNA (1)...(19): siRNA sense strand
cgggacaggugggugagaa

SEQ ID NO: 674298 - RNA, 19 nt, Homo sapiens
  misc_RNA (1)...(19): siRNA sense strand
gagacagccaaguccuauu

SEQ ID NO: 674299 - RNA, 19 nt, Homo sapiens
  misc_RNA (1)...(19): siRNA sense strand
ucaauggaggcgucugcua

SEQ ID NO: 674300 - RNA, 19 nt, Homo sapiens
  misc_RNA (1)...(19): siRNA sense strand
uauggcaacggcagaaaga

SEQ ID NO: 674301 - RNA, 19 nt, Homo sapiens
  misc_RNA (1)...(19): siRNA sense strand
acaggugggugagaagcaa

SEQ ID NO: 674302 - RNA, 19 nt, Homo sapiens
  misc_RNA (1)...(19): siRNA sense strand
aaccagcgcuacaucuuuu

SEQ ID NO: 674303 - RNA, 19 nt, Homo sapiens
  misc_RNA (1)...(19): siRNA sense strand
acucacgacuacaguucaa

SEQ ID NO: 674304 - RNA, 19 nt, Homo sapiens
  misc_RNA (1)...(19): siRNA sense strand
aaagaacucacgacuacag

SEQ ID NO: 674305 - RNA, 19 nt, Homo sapiens
  misc_RNA (1)...(19): siRNA sense strand
gaacagcccuuagucuuua

SEQ ID NO: 674306 - RNA, 19 nt, Homo sapiens
  misc_RNA (1)...(19): siRNA sense strand
ggaacagcccuuagucuuu

SEQ ID NO: 674307 - RNA, 19 nt, Homo sapiens
  misc_RNA (1)...(19): siRNA sense strand
uaaaggugcuggacaagug

SEQ ID NO: 674308 - RNA, 19 nt, Homo sapiens
  misc_RNA (1)...(19): siRNA sense strand
agaaagaacucacgacuac

SEQ ID NO: 674309 - RNA, 19 nt, Homo sapiens
  misc_RNA (1)...(19): siRNA sense strand
gaaccagcgcuacaucuuu

SEQ ID NO: 674310 - RNA, 19 nt, Homo sapiens
  misc_RNA (1)...(19): siRNA sense strand
gcaagauccugugcacuga

SEQ ID NO: 674311 - RNA, 19 nt, Homo sapiens
  misc_RNA (1)...(19): siRNA sense strand
gagaagcaaucgcugaagu

SEQ ID NO: 674312 - RNA, 19 nt, Homo sapiens
  misc_RNA (1)...(19): siRNA sense strand
gaaaggaaccagcgcuaca

SEQ ID NO: 674313 - RNA, 19 nt, Homo sapiens
  misc_RNA (1)...(19): siRNA sense strand
agaaagaggugggcaagau

SEQ ID NO: 674314 - RNA, 19 nt, Homo sapiens
  misc_RNA (1)...(19): siRNA sense strand
gagacauucgcaucaaaua

SEQ ID NO: 674315 - RNA, 19 nt, Homo sapiens
  misc_RNA (1)...(19): siRNA sense strand
agcaaucgcugaaguguga

SEQ ID NO: 674316 - RNA, 19 nt, Homo sapiens
  misc_RNA (1)...(19): siRNA sense strand
ucaaccagcucuccugcaa

SEQ ID NO: 674317 - RNA, 19 nt, Homo sapiens
  misc_RNA (1)...(19): siRNA sense strand
gacauucgcaucaaauaug

SEQ ID NO: 674318 - RNA, 19 nt, Homo sapiens
  misc_RNA (1)...(19): siRNA sense strand
ggaaccagcgcuacaucuu

SEQ ID NO: 674319 - RNA, 19 nt, Homo sapiens
  misc_RNA (1)...(19): siRNA sense strand
ggaggcgucugcuacuaca

SEQ ID NO: 674320 - RNA, 19 nt, Homo sapiens
  misc_RNA (1)...(19): siRNA sense strand
gaaagaggugggcaagauc

SEQ ID NO: 674321 - RNA, 19 nt, Homo sapiens
  misc_RNA (1)...(19): siRNA sense strand
cagaaagaacucacgacua

SEQ ID NO: 674322 - RNA, 19 nt, Homo sapiens
  misc_RNA (1)...(19): siRNA sense strand
gugugucgcucgccugcua

SEQ ID NO: 674323 - RNA, 19 nt, Homo sapiens
  misc_RNA (1)...(19): siRNA sense strand
ggcccaaguugaagaagau

SEQ ID NO: 674324 - RNA, 19 nt, Homo sapiens
  misc_RNA (1)...(19): siRNA sense strand
gaagcaaucgcugaagugu

SEQ ID NO: 674325 - RNA, 19 nt, Homo sapiens
  misc_RNA (1)...(19): siRNA sense strand
gcaacgagacagccaaguc

SEQ ID NO: 674326 - RNA, 19 nt, Homo sapiens
  misc_RNA (1)...(19): siRNA sense strand
ccgagacauucgcaucaaa

SEQ ID NO: 674327 - RNA, 19 nt, Homo sapiens
  misc_RNA (1)...(19): siRNA sense strand
agacagccaaguccuauug

SEQ ID NO: 674328 - RNA, 19 nt, Homo sapiens
  misc_RNA (1)...(19): siRNA sense strand
caaccgcagccgagacauu

SEQ ID NO: 674329 - RNA, 19 nt, Homo sapiens
  misc_RNA (1)...(19): siRNA sense strand
ugguaaaggugcuggacaa

SEQ ID NO: 674330 - RNA, 19 nt, Homo sapiens
  misc_RNA (1)...(19): siRNA sense strand
gacuacaguucaacaaggu

SEQ ID NO: 674331 - RNA, 19 nt, Homo sapiens
  misc_RNA (1)...(19): siRNA sense strand
ggaggacgcuggggaguau

SEQ ID NO: 674332 - RNA, 19 nt, Homo sapiens
  misc_RNA (1)...(19): siRNA sense strand
ccacggaacagcccuuagu

SEQ ID NO: 674333 - RNA, 19 nt, Homo sapiens
  misc_RNA (1)...(19): siRNA sense strand
ccaaguugaagaagaugaa

SEQ ID NO: 674334 - RNA, 19 nt, Homo sapiens
  misc_RNA (1)...(19): siRNA sense strand
caacaacagcagcaucucu

SEQ ID NO: 674335 - RNA, 19 nt, Homo sapiens
  misc_RNA (1)...(19): siRNA sense strand
cggaacagcccuuagucuu

SEQ ID NO: 674336 - RNA, 19 nt, Homo sapiens
  misc_RNA (1)...(19): siRNA sense strand
gugugccgcucgaaaggaa

SEQ ID NO: 674337 - RNA, 19 nt, Homo sapiens
  misc_RNA (1)...(19): siRNA sense strand
gccgagacauucgcaucaa

SEQ ID NO: 674338 - RNA, 19 nt, Homo sapiens
  misc_RNA (1)...(19): siRNA sense strand
ggugguggagggcaaggua

SEQ ID NO: 674339 - RNA, 19 nt, Homo sapiens
  misc_RNA (1)...(19): siRNA sense strand
gugagaagcaaucgcugaa

SEQ ID NO: 674340 - RNA, 19 nt, Homo sapiens
  misc_RNA (1)...(19): siRNA sense strand
agacauucgcaucaaauau

SEQ ID NO: 674341 - RNA, 19 nt, Homo sapiens
  misc_RNA (1)...(19): siRNA sense strand
cgagacauucgcaucaaau

SEQ ID NO: 674342 - RNA, 19 nt, Homo sapiens
  misc_RNA (1)...(19): siRNA sense strand
cgagacagccaaguccuau

SEQ ID NO: 674343 - RNA, 19 nt, Homo sapiens
  misc_RNA (1)...(19): siRNA sense strand
cggcccaaguugaagaaga

SEQ ID NO: 674344 - RNA, 19 nt, Homo sapiens
  misc_RNA (1)...(19): siRNA sense strand
ggucggguggcguugguaa

SEQ ID NO: 674345 - RNA, 19 nt, Homo sapiens
  misc_RNA (1)...(19): siRNA sense strand
gaaagaacucacgacuaca

SEQ ID NO: 674346 - RNA, 19 nt, Homo sapiens
  misc_RNA (1)...(19): siRNA sense strand
guaaaggugcuggacaagu

SEQ ID NO: 674347 - RNA, 19 nt, Homo sapiens
  misc_RNA (1)...(19): siRNA sense strand
cgggacaggugggugagaa

SEQ ID NO: 674348 - RNA, 19 nt, Homo sapiens
  misc_RNA (1)...(19): siRNA sense strand
gagacagccaaguccuauu

SEQ ID NO: 674349 - RNA, 19 nt, Homo sapiens
  misc_RNA (1)...(19): siRNA sense strand
ucaauggaggcgucugcua

SEQ ID NO: 674350 - RNA, 19 nt, Homo sapiens
  misc_RNA (1)...(19): siRNA sense strand
uauggcaacggcagaaaga

SEQ ID NO: 674351 - RNA, 19 nt, Homo sapiens
  misc_RNA (1)...(19): siRNA sense strand
acaggugggugagaagcaa

SEQ ID NO: 674352 - RNA, 19 nt, Homo sapiens
  misc_RNA (1)...(19): siRNA sense strand
aaccagcgcuacaucuuuu

SEQ ID NO: 674353 - RNA, 19 nt, Homo sapiens
  misc_RNA (1)...(19): siRNA sense strand
acucacgacuacaguucaa

SEQ ID NO: 674354 - RNA, 19 nt, Homo sapiens
  misc_RNA (1)...(19): siRNA sense strand
aaagaacucacgacuacag

SEQ ID NO: 674355 - RNA, 19 nt, Homo sapiens
  misc_RNA (1)...(19): siRNA sense strand
gaacagcccuuagucuuua

SEQ ID NO: 674356 - RNA, 19 nt, Homo sapiens
  misc_RNA (1)...(19): siRNA sense strand
ggaacagcccuuagucuuu

SEQ ID NO: 674357 - RNA, 19 nt, Homo sapiens
  misc_RNA (1)...(19): siRNA sense strand
uaaaggugcuggacaagug

SEQ ID NO: 674358 - RNA, 19 nt, Homo sapiens
  misc_RNA (1)...(19): siRNA sense strand
agaaagaacucacgacuac

SEQ ID NO: 674359 - RNA, 19 nt, Homo sapiens
  misc_RNA (1)...(19): siRNA sense strand
gaaccagcgcuacaucuuu

SEQ ID NO: 674360 - RNA, 19 nt, Homo sapiens
  misc_RNA (1)...(19): siRNA sense strand
gcaagauccugugcacuga

SEQ ID NO: 674361 - RNA, 19 nt, Homo sapiens
  misc_RNA (1)...(19): siRNA sense strand
gagaagcaaucgcugaagu

SEQ ID NO: 674362 - RNA, 19 nt, Homo sapiens
  misc_RNA (1)...(19): siRNA sense strand
gaaaggaaccagcgcuaca

SEQ ID NO: 674363 - RNA, 19 nt, Homo sapiens
  misc_RNA (1)...(19): siRNA sense strand
agaaagaggugggcaagau

SEQ ID NO: 674364 - RNA, 19 nt, Homo sapiens
  misc_RNA (1)...(19): siRNA sense strand
gagacauucgcaucaaaua

SEQ ID NO: 674365 - RNA, 19 nt, Homo sapiens
  misc_RNA (1)...(19): siRNA sense strand
agcaaucgcugaaguguga

SEQ ID NO: 674366 - RNA, 19 nt, Homo sapiens
  misc_RNA (1)...(19): siRNA sense strand
ucaaccagcucuccugcaa

SEQ ID NO: 674367 - RNA, 19 nt, Homo sapiens
  misc_RNA (1)...(19): siRNA sense strand
gacauucgcaucaaauaug

SEQ ID NO: 674368 - RNA, 19 nt, Homo sapiens
  misc_RNA (1)...(19): siRNA sense strand
ggaaccagcgcuacaucuu

SEQ ID NO: 674369 - RNA, 19 nt, Homo sapiens
  misc_RNA (1)...(19): siRNA sense strand
ggaggcgucugcuacuaca

SEQ ID NO: 674370 - RNA, 19 nt, Homo sapiens
  misc_RNA (1)...(19): siRNA sense strand
gaaagaggugggcaagauc

SEQ ID NO: 674371 - RNA, 19 nt, Homo sapiens
  misc_RNA (1)...(19): siRNA sense strand
cagaaagaacucacgacua

SEQ ID NO: 674372 - RNA, 19 nt, Homo sapiens
  misc_RNA (1)...(19): siRNA sense strand
gugugucgcucgccugcua

SEQ ID NO: 674373 - RNA, 19 nt, Homo sapiens
  misc_RNA (1)...(19): siRNA sense strand
ggcccaaguugaagaagau

SEQ ID NO: 674374 - RNA, 19 nt, Homo sapiens
  misc_RNA (1)...(19): siRNA sense strand
gaagcaaucgcugaagugu

SEQ ID NO: 674375 - RNA, 19 nt, Homo sapiens
  misc_RNA (1)...(19): siRNA sense strand
gcaacgagacagccaaguc

SEQ ID NO: 674376 - RNA, 19 nt, Homo sapiens
  misc_RNA (1)...(19): siRNA sense strand
ccgagacauucgcaucaaa

SEQ ID NO: 674377 - RNA, 19 nt, Homo sapiens
  misc_RNA (1)...(19): siRNA sense strand
agacagccaaguccuauug

SEQ ID NO: 674378 - RNA, 19 nt, Homo sapiens
  misc_RNA (1)...(19): siRNA sense strand
caaccgcagccgagacauu

SEQ ID NO: 674379 - RNA, 19 nt, Homo sapiens
  misc_RNA (1)...(19): siRNA sense strand
ugguaaaggugcuggacaa

SEQ ID NO: 674380 - RNA, 19 nt, Homo sapiens
  misc_RNA (1)...(19): siRNA sense strand
gacuacaguucaacaaggu

SEQ ID NO: 674381 - RNA, 19 nt, Homo sapiens
  misc_RNA (1)...(19): siRNA sense strand
ggaggacgcuggggaguau

SEQ ID NO: 674382 - RNA, 19 nt, Homo sapiens
  misc_RNA (1)...(19): siRNA sense strand
ccacggaacagcccuuagu

SEQ ID NO: 674383 - RNA, 19 nt, Homo sapiens
  misc_RNA (1)...(19): siRNA sense strand
ccaaguugaagaagaugaa

SEQ ID NO: 674384 - RNA, 19 nt, Homo sapiens
  misc_RNA (1)...(19): siRNA sense strand
caacaacagcagcaucucu

SEQ ID NO: 674385 - RNA, 19 nt, Homo sapiens
  misc_RNA (1)...(19): siRNA sense strand
cggaacagcccuuagucuu

SEQ ID NO: 674386 - RNA, 19 nt, Homo sapiens
  misc_RNA (1)...(19): siRNA sense strand
gugugccgcucgaaaggaa

SEQ ID NO: 674387 - RNA, 19 nt, Homo sapiens
  misc_RNA (1)...(19): siRNA sense strand
gccgagacauucgcaucaa

SEQ ID NO: 674388 - RNA, 19 nt, Homo sapiens
  misc_RNA (1)...(19): siRNA sense strand
ggugguggagggcaaggua

SEQ ID NO: 674389 - RNA, 19 nt, Homo sapiens
  misc_RNA (1)...(19): siRNA sense strand
gugagaagcaaucgcugaa

SEQ ID NO: 674390 - RNA, 19 nt, Homo sapiens
  misc_RNA (1)...(19): siRNA sense strand
agacauucgcaucaaauau

SEQ ID NO: 674391 - RNA, 19 nt, Homo sapiens
  misc_RNA (1)...(19): siRNA sense strand
cgagacauucgcaucaaau

SEQ ID NO: 674392 - RNA, 19 nt, Homo sapiens
  misc_RNA (1)...(19): siRNA sense strand
cgagacagccaaguccuau

SEQ ID NO: 674393 - RNA, 19 nt, Homo sapiens
  misc_RNA (1)...(19): siRNA sense strand
cggcccaaguugaagaaga

SEQ ID NO: 674394 - RNA, 19 nt, Homo sapiens
  misc_RNA (1)...(19): siRNA sense strand
ggucggguggcguugguaa

SEQ ID NO: 674395 - RNA, 19 nt, Homo sapiens
  misc_RNA (1)...(19): siRNA sense strand
gaaagaacucacgacuaca

SEQ ID NO: 674396 - RNA, 19 nt, Homo sapiens
  misc_RNA (1)...(19): siRNA sense strand
guaaaggugcuggacaagu

SEQ ID NO: 674397 - RNA, 19 nt, Homo sapiens
  misc_RNA (1)...(19): siRNA sense strand
cgggacaggugggugagaa

SEQ ID NO: 674398 - RNA, 19 nt, Homo sapiens
  misc_RNA (1)...(19): siRNA sense strand
gagacagccaaguccuauu

SEQ ID NO: 674399 - RNA, 19 nt, Homo sapiens
  misc_RNA (1)...(19): siRNA sense strand
ucaauggaggcgucugcua

SEQ ID NO: 674400 - RNA, 19 nt, Homo sapiens
  misc_RNA (1)...(19): siRNA sense strand
uauggcaacggcagaaaga

SEQ ID NO: 674401 - RNA, 19 nt, Homo sapiens
  misc_RNA (1)...(19): siRNA sense strand
acaggugggugagaagcaa

SEQ ID NO: 674402 - RNA, 19 nt, Homo sapiens
  misc_RNA (1)...(19): siRNA sense strand
aaccagcgcuacaucuuuu

SEQ ID NO: 674403 - RNA, 19 nt, Homo sapiens
  misc_RNA (1)...(19): siRNA sense strand
acucacgacuacaguucaa

SEQ ID NO: 674404 - RNA, 19 nt, Homo sapiens
  misc_RNA (1)...(19): siRNA sense strand
aaagaacucacgacuacag

SEQ ID NO: 674405 - RNA, 19 nt, Homo sapiens
  misc_RNA (1)...(19): siRNA sense strand
gaacagcccuuagucuuua

SEQ ID NO: 674406 - RNA, 19 nt, Homo sapiens
  misc_RNA (1)...(19): siRNA sense strand
ggaacagcccuuagucuuu

SEQ ID NO: 674407 - RNA, 19 nt, Homo sapiens
  misc_RNA (1)...(19): siRNA sense strand
uaaaggugcuggacaagug

SEQ ID NO: 674408 - RNA, 19 nt, Homo sapiens
  misc_RNA (1)...(19): siRNA sense strand
agaaagaacucacgacuac

SEQ ID NO: 674409 - RNA, 19 nt, Homo sapiens
  misc_RNA (1)...(19): siRNA sense strand
gaaccagcgcuacaucuuu

SEQ ID NO: 674410 - RNA, 19 nt, Homo sapiens
  misc_RNA (1)...(19): siRNA sense strand
gcaagauccugugcacuga

SEQ ID NO: 674411 - RNA, 19 nt, Homo sapiens
  misc_RNA (1)...(19): siRNA sense strand
gagaagcaaucgcugaagu

SEQ ID NO: 674412 - RNA, 19 nt, Homo sapiens
  misc_RNA (1)...(19): siRNA sense strand
gaaaggaaccagcgcuaca

SEQ ID NO: 674413 - RNA, 19 nt, Homo sapiens
  misc_RNA (1)...(19): siRNA sense strand
agaaagaggugggcaagau

SEQ ID NO: 674414 - RNA, 19 nt, Homo sapiens
  misc_RNA (1)...(19): siRNA sense strand
gagacauucgcaucaaaua

SEQ ID NO: 674415 - RNA, 19 nt, Homo sapiens
  misc_RNA (1)...(19): siRNA sense strand
agcaaucgcugaaguguga

SEQ ID NO: 674416 - RNA, 19 nt, Homo sapiens
  misc_RNA (1)...(19): siRNA sense strand
ucaaccagcucuccugcaa

SEQ ID NO: 674417 - RNA, 19 nt, Homo sapiens
  misc_RNA (1)...(19): siRNA sense strand
gacauucgcaucaaauaug

SEQ ID NO: 674418 - RNA, 19 nt, Homo sapiens
  misc_RNA (1)...(19): siRNA sense strand
ggaaccagcgcuacaucuu

SEQ ID NO: 674419 - RNA, 19 nt, Homo sapiens
  misc_RNA (1)...(19): siRNA sense strand
ggaggcgucugcuacuaca

SEQ ID NO: 674420 - RNA, 19 nt, Homo sapiens
  misc_RNA (1)...(19): siRNA sense strand
gaaagaggugggcaagauc

SEQ ID NO: 674421 - RNA, 19 nt, Homo sapiens
  misc_RNA (1)...(19): siRNA sense strand
cagaaagaacucacgacua

SEQ ID NO: 674422 - RNA, 19 nt, Homo sapiens
  misc_RNA (1)...(19): siRNA sense strand
gugugucgcucgccugcua

SEQ ID NO: 674423 - RNA, 19 nt, Homo sapiens
  misc_RNA (1)...(19): siRNA sense strand
ggcccaaguugaagaagau

SEQ ID NO: 674424 - RNA, 19 nt, Homo sapiens
  misc_RNA (1)...(19): siRNA sense strand
gaagcaaucgcugaagugu

SEQ ID NO: 674425 - RNA, 19 nt, Homo sapiens
  misc_RNA (1)...(19): siRNA sense strand
gcaacgagacagccaaguc

SEQ ID NO: 674426 - RNA, 19 nt, Homo sapiens
  misc_RNA (1)...(19): siRNA sense strand
ccgagacauucgcaucaaa

SEQ ID NO: 674427 - RNA, 19 nt, Homo sapiens
  misc_RNA (1)...(19): siRNA sense strand
agacagccaaguccuauug

SEQ ID NO: 674428 - RNA, 19 nt, Homo sapiens
  misc_RNA (1)...(19): siRNA sense strand
caaccgcagccgagacauu

SEQ ID NO: 674429 - RNA, 19 nt, Homo sapiens
  misc_RNA (1)...(19): siRNA sense strand
ugguaaaggugcuggacaa

SEQ ID NO: 674430 - RNA, 19 nt, Homo sapiens
  misc_RNA (1)...(19): siRNA sense strand
gacuacaguucaacaaggu

SEQ ID NO: 674431 - RNA, 19 nt, Homo sapiens
  misc_RNA (1)...(19): siRNA sense strand
ggaggacgcuggggaguau

SEQ ID NO: 674432 - RNA, 19 nt, Homo sapiens
  misc_RNA (1)...(19): siRNA sense strand
ccacggaacagcccuuagu

SEQ ID NO: 674433 - RNA, 19 nt, Homo sapiens
  misc_RNA (1)...(19): siRNA sense strand
ccaaguugaagaagaugaa

SEQ ID NO: 674434 - RNA, 19 nt, Homo sapiens
  misc_RNA (1)...(19): siRNA sense strand
caacaacagcagcaucucu

SEQ ID NO: 674435 - RNA, 19 nt, Homo sapiens
  misc_RNA (1)...(19): siRNA sense strand
cggaacagcccuuagucuu

SEQ ID NO: 674436 - RNA, 19 nt, Homo sapiens
  misc_RNA (1)...(19): siRNA sense strand
gugugccgcucgaaaggaa

SEQ ID NO: 674437 - RNA, 19 nt, Homo sapiens
  misc_RNA (1)...(19): siRNA sense strand
gccgagacauucgcaucaa

SEQ ID NO: 674438 - RNA, 19 nt, Homo sapiens
  misc_RNA (1)...(19): siRNA sense strand
ggugguggagggcaaggua

SEQ ID NO: 674439 - RNA, 19 nt, Homo sapiens
  misc_RNA (1)...(19): siRNA sense strand
gugagaagcaaucgcugaa

SEQ ID NO: 674440 - RNA, 19 nt, Homo sapiens
  misc_RNA (1)...(19): siRNA sense strand
agacauucgcaucaaauau

SEQ ID NO: 674441 - RNA, 19 nt, Homo sapiens
  misc_RNA (1)...(19): siRNA sense strand
cgagacauucgcaucaaau

SEQ ID NO: 674442 - RNA, 19 nt, Homo sapiens
  misc_RNA (1)...(19): siRNA sense strand
cgagacagccaaguccuau

SEQ ID NO: 674443 - RNA, 19 nt, Homo sapiens
  misc_RNA (1)...(19): siRNA sense strand
cggcccaaguugaagaaga

SEQ ID NO: 674444 - RNA, 19 nt, Homo sapiens
  misc_RNA (1)...(19): siRNA sense strand
ggucggguggcguugguaa

SEQ ID NO: 674445 - RNA, 19 nt, Homo sapiens
  misc_RNA (1)...(19): siRNA sense strand
gaaagaacucacgacuaca

SEQ ID NO: 674446 - RNA, 19 nt, Homo sapiens
  misc_RNA (1)...(19): siRNA sense strand
guaaaggugcuggacaagu

SEQ ID NO: 674447 - RNA, 19 nt, Homo sapiens
  misc_RNA (1)...(19): siRNA sense strand
cgggacaggugggugagaa

SEQ ID NO: 674448 - RNA, 19 nt, Homo sapiens
  misc_RNA (1)...(19): siRNA sense strand
gagacagccaaguccuauu

SEQ ID NO: 674449 - RNA, 19 nt, Homo sapiens
  misc_RNA (1)...(19): siRNA sense strand
ucaauggaggcgucugcua

SEQ ID NO: 674450 - RNA, 19 nt, Homo sapiens
  misc_RNA (1)...(19): siRNA sense strand
uauggcaacggcagaaaga

SEQ ID NO: 674451 - RNA, 19 nt, Homo sapiens
  misc_RNA (1)...(19): siRNA sense strand
acaggugggugagaagcaa

SEQ ID NO: 674452 - RNA, 19 nt, Homo sapiens
  misc_RNA (1)...(19): siRNA sense strand
aaccagcgcuacaucuuuu

SEQ ID NO: 674453 - RNA, 19 nt, Homo sapiens
  misc_RNA (1)...(19): siRNA sense strand
acucacgacuacaguucaa

SEQ ID NO: 674454 - RNA, 19 nt, Homo sapiens
  misc_RNA (1)...(19): siRNA sense strand
aaagaacucacgacuacag

SEQ ID NO: 674455 - RNA, 19 nt, Homo sapiens
  misc_RNA (1)...(19): siRNA sense strand
gaacagcccuuagucuuua

SEQ ID NO: 674456 - RNA, 19 nt, Homo sapiens
  misc_RNA (1)...(19): siRNA sense strand
ggaacagcccuuagucuuu

SEQ ID NO: 674457 - RNA, 19 nt, Homo sapiens
  misc_RNA (1)...(19): siRNA sense strand
uaaaggugcuggacaagug

SEQ ID NO: 674458 - RNA, 19 nt, Homo sapiens
  misc_RNA (1)...(19): siRNA sense strand
agaaagaacucacgacuac

SEQ ID NO: 674459 - RNA, 19 nt, Homo sapiens
  misc_RNA (1)...(19): siRNA sense strand
gaaccagcgcuacaucuuu

SEQ ID NO: 674460 - RNA, 19 nt, Homo sapiens
  misc_RNA (1)...(19): siRNA sense strand
gcaagauccugugcacuga

SEQ ID NO: 674461 - RNA, 19 nt, Homo sapiens
  misc_RNA (1)...(19): siRNA sense strand
gagaagcaaucgcugaagu

SEQ ID NO: 674462 - RNA, 19 nt, Homo sapiens
  misc_RNA (1)...(19): siRNA sense strand
gaaaggaaccagcgcuaca

SEQ ID NO: 674463 - RNA, 19 nt, Homo sapiens
  misc_RNA (1)...(19): siRNA sense strand
agaaagaggugggcaagau

SEQ ID NO: 674464 - RNA, 19 nt, Homo sapiens
  misc_RNA (1)...(19): siRNA sense strand
gagacauucgcaucaaaua

SEQ ID NO: 674465 - RNA, 19 nt, Homo sapiens
  misc_RNA (1)...(19): siRNA sense strand
agcaaucgcugaaguguga

SEQ ID NO: 674466 - RNA, 19 nt, Homo sapiens
  misc_RNA (1)...(19): siRNA sense strand
ucaaccagcucuccugcaa

SEQ ID NO: 674467 - RNA, 19 nt, Homo sapiens
  misc_RNA (1)...(19): siRNA sense strand
gacauucgcaucaaauaug

SEQ ID NO: 674468 - RNA, 19 nt, Homo sapiens
  misc_RNA (1)...(19): siRNA sense strand
ggaaccagcgcuacaucuu

SEQ ID NO: 674469 - RNA, 19 nt, Homo sapiens
  misc_RNA (1)...(19): siRNA sense strand
ggaggcgucugcuacuaca

SEQ ID NO: 674470 - RNA, 19 nt, Homo sapiens
  misc_RNA (1)...(19): siRNA sense strand
gaaagaggugggcaagauc

SEQ ID NO: 674471 - RNA, 19 nt, Homo sapiens
  misc_RNA (1)...(19): siRNA sense strand
cagaaagaacucacgacua

SEQ ID NO: 674472 - RNA, 19 nt, Homo sapiens
  misc_RNA (1)...(19): siRNA sense strand
gugugucgcucgccugcua

SEQ ID NO: 674473 - RNA, 19 nt, Homo sapiens
  misc_RNA (1)...(19): siRNA sense strand
ggcccaaguugaagaagau

SEQ ID NO: 674474 - RNA, 19 nt, Homo sapiens
  misc_RNA (1)...(19): siRNA sense strand
gaagcaaucgcugaagugu

SEQ ID NO: 674475 - RNA, 19 nt, Homo sapiens
  misc_RNA (1)...(19): siRNA sense strand
gcaacgagacagccaaguc

SEQ ID NO: 674476 - RNA, 19 nt, Homo sapiens
  misc_RNA (1)...(19): siRNA sense strand
ccgagacauucgcaucaaa

SEQ ID NO: 674477 - RNA, 19 nt, Homo sapiens
  misc_RNA (1)...(19): siRNA sense strand
agacagccaaguccuauug

SEQ ID NO: 674478 - RNA, 19 nt, Homo sapiens
  misc_RNA (1)...(19): siRNA sense strand
caaccgcagccgagacauu

SEQ ID NO: 674479 - RNA, 19 nt, Homo sapiens
  misc_RNA (1)...(19): siRNA sense strand
ugguaaaggugcuggacaa

SEQ ID NO: 674480 - RNA, 19 nt, Homo sapiens
  misc_RNA (1)...(19): siRNA sense strand
gacuacaguucaacaaggu

SEQ ID NO: 674481 - RNA, 19 nt, Homo sapiens
  misc_RNA (1)...(19): siRNA sense strand
ggaggacgcuggggaguau

SEQ ID NO: 674482 - RNA, 19 nt, Homo sapiens
  misc_RNA (1)...(19): siRNA sense strand
ccacggaacagcccuuagu

SEQ ID NO: 674483 - RNA, 19 nt, Homo sapiens
  misc_RNA (1)...(19): siRNA sense strand
ccaaguugaagaagaugaa

SEQ ID NO: 674484 - RNA, 19 nt, Homo sapiens
  misc_RNA (1)...(19): siRNA sense strand
caacaacagcagcaucucu

SEQ ID NO: 674485 - RNA, 19 nt, Homo sapiens
  misc_RNA (1)...(19): siRNA sense strand
cggaacagcccuuagucuu

SEQ ID NO: 674486 - RNA, 19 nt, Homo sapiens
  misc_RNA (1)...(19): siRNA sense strand
gugugccgcucgaaaggaa

SEQ ID NO: 674487 - RNA, 19 nt, Homo sapiens
  misc_RNA (1)...(19): siRNA sense strand
gccgagacauucgcaucaa

SEQ ID NO: 674488 - RNA, 19 nt, Homo sapiens
  misc_RNA (1)...(19): siRNA sense strand
ggugguggagggcaaggua

SEQ ID NO: 674489 - RNA, 19 nt, Homo sapiens
  misc_RNA (1)...(19): siRNA sense strand
gugagaagcaaucgcugaa

SEQ ID NO: 674490 - RNA, 19 nt, Homo sapiens
  misc_RNA (1)...(19): siRNA sense strand
agacauucgcaucaaauau

SEQ ID NO: 674491 - RNA, 19 nt, Homo sapiens
  misc_RNA (1)...(19): siRNA sense strand
cgagacauucgcaucaaau

SEQ ID NO: 674492 - RNA, 19 nt, Homo sapiens
  misc_RNA (1)...(19): siRNA sense strand
cgagacagccaaguccuau

SEQ ID NO: 674493 - RNA, 19 nt, Homo sapiens
  misc_RNA (1)...(19): siRNA sense strand
cggcccaaguugaagaaga

SEQ ID NO: 674494 - RNA, 19 nt, Homo sapiens
  misc_RNA (1)...(19): siRNA sense strand
ggucggguggcguugguaa

SEQ ID NO: 674495 - RNA, 19 nt, Homo sapiens
  misc_RNA (1)...(19): siRNA sense strand
gaaagaacucacgacuaca

SEQ ID NO: 674496 - RNA, 19 nt, Homo sapiens
  misc_RNA (1)...(19): siRNA sense strand
guaaaggugcuggacaagu

SEQ ID NO: 674497 - RNA, 19 nt, Homo sapiens
  misc_RNA (1)...(19): siRNA sense strand
cgggacaggugggugagaa

SEQ ID NO: 674498 - RNA, 19 nt, Homo sapiens
  misc_RNA (1)...(19): siRNA sense strand
gagacagccaaguccuauu

SEQ ID NO: 674499 - RNA, 19 nt, Homo sapiens
  misc_RNA (1)...(19): siRNA sense strand
ucaauggaggcgucugcua

SEQ ID NO: 674500 - RNA, 19 nt, Homo sapiens
  misc_RNA (1)...(19): siRNA sense strand
uauggcaacggcagaaaga

SEQ ID NO: 674501 - RNA, 19 nt, Homo sapiens
  misc_RNA (1)...(19): siRNA sense strand
acaggugggugagaagcaa

SEQ ID NO: 674502 - RNA, 19 nt, Homo sapiens
  misc_RNA (1)...(19): siRNA sense strand
aaccagcgcuacaucuuuu

SEQ ID NO: 674503 - RNA, 19 nt, Homo sapiens
  misc_RNA (1)...(19): siRNA sense strand
acucacgacuacaguucaa

SEQ ID NO: 674504 - RNA, 19 nt, Homo sapiens
  misc_RNA (1)...(19): siRNA sense strand
aaagaacucacgacuacag

SEQ ID NO: 674505 - RNA, 19 nt, Homo sapiens
  misc_RNA (1)...(19): siRNA sense strand
gaacagcccuuagucuuua

SEQ ID NO: 674506 - RNA, 19 nt, Homo sapiens
  misc_RNA (1)...(19): siRNA sense strand
ggaacagcccuuagucuuu

SEQ ID NO: 674507 - RNA, 19 nt, Homo sapiens
  misc_RNA (1)...(19): siRNA sense strand
uaaaggugcuggacaagug

SEQ ID NO: 674508 - RNA, 19 nt, Homo sapiens
  misc_RNA (1)...(19): siRNA sense strand
agaaagaacucacgacuac

SEQ ID NO: 674509 - RNA, 19 nt, Homo sapiens
  misc_RNA (1)...(19): siRNA sense strand
gaaccagcgcuacaucuuu

SEQ ID NO: 674510 - RNA, 19 nt, Homo sapiens
  misc_RNA (1)...(19): siRNA sense strand
gcaagauccugugcacuga

SEQ ID NO: 674511 - RNA, 19 nt, Homo sapiens
  misc_RNA (1)...(19): siRNA sense strand
gagaagcaaucgcugaagu

SEQ ID NO: 674512 - RNA, 19 nt, Homo sapiens
  misc_RNA (1)...(19): siRNA sense strand
gaaaggaaccagcgcuaca

SEQ ID NO: 674513 - RNA, 19 nt, Homo sapiens
  misc_RNA (1)...(19): siRNA sense strand
agaaagaggugggcaagau

SEQ ID NO: 674514 - RNA, 19 nt, Homo sapiens
  misc_RNA (1)...(19): siRNA sense strand
gagacauucgcaucaaaua

SEQ ID NO: 674515 - RNA, 19 nt, Homo sapiens
  misc_RNA (1)...(19): siRNA sense strand
agcaaucgcugaaguguga

SEQ ID NO: 674516 - RNA, 19 nt, Homo sapiens
  misc_RNA (1)...(19): siRNA sense strand
ucaaccagcucuccugcaa

SEQ ID NO: 674517 - RNA, 19 nt, Homo sapiens
  misc_RNA (1)...(19): siRNA sense strand
gacauucgcaucaaauaug

SEQ ID NO: 674518 - RNA, 19 nt, Homo sapiens
  misc_RNA (1)...(19): siRNA sense strand
ggaaccagcgcuacaucuu

SEQ ID NO: 674519 - RNA, 19 nt, Homo sapiens
  misc_RNA (1)...(19): siRNA sense strand
ggaggcgucugcuacuaca

SEQ ID NO: 674520 - RNA, 19 nt, Homo sapiens
  misc_RNA (1)...(19): siRNA sense strand
gaaagaggugggcaagauc

SEQ ID NO: 674521 - RNA, 19 nt, Homo sapiens
  misc_RNA (1)...(19): siRNA sense strand
cagaaagaacucacgacua

SEQ ID NO: 674522 - RNA, 19 nt, Homo sapiens
  misc_RNA (1)...(19): siRNA sense strand
gugugucgcucgccugcua

SEQ ID NO: 674523 - RNA, 19 nt, Homo sapiens
  misc_RNA (1)...(19): siRNA sense strand
ggcccaaguugaagaagau

SEQ ID NO: 674524 - RNA, 19 nt, Homo sapiens
  misc_RNA (1)...(19): siRNA sense strand
gaagcaaucgcugaagugu

SEQ ID NO: 674525 - RNA, 19 nt, Homo sapiens
  misc_RNA (1)...(19): siRNA sense strand
gcaacgagacagccaaguc

SEQ ID NO: 674526 - RNA, 19 nt, Homo sapiens
  misc_RNA (1)...(19): siRNA sense strand
ccgagacauucgcaucaaa

SEQ ID NO: 674527 - RNA, 19 nt, Homo sapiens
  misc_RNA (1)...(19): siRNA sense strand
agacagccaaguccuauug

SEQ ID NO: 674528 - RNA, 19 nt, Homo sapiens
  misc_RNA (1)...(19): siRNA sense strand
caaccgcagccgagacauu

SEQ ID NO: 674529 - RNA, 19 nt, Homo sapiens
  misc_RNA (1)...(19): siRNA sense strand
ugguaaaggugcuggacaa

SEQ ID NO: 674530 - RNA, 19 nt, Homo sapiens
  misc_RNA (1)...(19): siRNA sense strand
gacuacaguucaacaaggu

SEQ ID NO: 674531 - RNA, 19 nt, Homo sapiens
  misc_RNA (1)...(19): siRNA sense strand
ggaggacgcuggggaguau

SEQ ID NO: 674532 - RNA, 19 nt, Homo sapiens
  misc_RNA (1)...(19): siRNA sense strand
ccacggaacagcccuuagu

SEQ ID NO: 674533 - RNA, 19 nt, Homo sapiens
  misc_RNA (1)...(19): siRNA sense strand
ccaaguugaagaagaugaa

SEQ ID NO: 674534 - RNA, 19 nt, Homo sapiens
  misc_RNA (1)...(19): siRNA sense strand
caacaacagcagcaucucu

SEQ ID NO: 674535 - RNA, 19 nt, Homo sapiens
  misc_RNA (1)...(19): siRNA sense strand
cggaacagcccuuagucuu

SEQ ID NO: 674536 - RNA, 19 nt, Homo sapiens
  misc_RNA (1)...(19): siRNA sense strand
gugugccgcucgaaaggaa

SEQ ID NO: 674537 - RNA, 19 nt, Homo sapiens
  misc_RNA (1)...(19): siRNA sense strand
gccgagacauucgcaucaa

SEQ ID NO: 674538 - RNA, 19 nt, Homo sapiens
  misc_RNA (1)...(19): siRNA sense strand
ggugguggagggcaaggua

SEQ ID NO: 674539 - RNA, 19 nt, Homo sapiens
  misc_RNA (1)...(19): siRNA sense strand
gugagaagcaaucgcugaa

SEQ ID NO: 674540 - RNA, 19 nt, Homo sapiens
  misc_RNA (1)...(19): siRNA sense strand
agacauucgcaucaaauau

SEQ ID NO: 674541 - RNA, 19 nt, Homo sapiens
  misc_RNA (1)...(19): siRNA sense strand
cgagacauucgcaucaaau

SEQ ID NO: 674542 - RNA, 19 nt, Homo sapiens
  misc_RNA (1)...(19): siRNA sense strand
cgagacagccaaguccuau

SEQ ID NO: 674543 - RNA, 19 nt, Homo sapiens
  misc_RNA (1)...(19): siRNA sense strand
cggcccaaguugaagaaga

SEQ ID NO: 674544 - RNA, 19 nt, Homo sapiens
  misc_RNA (1)...(19): siRNA sense strand
ggucggguggcguugguaa

SEQ ID NO: 674545 - RNA, 19 nt, Homo sapiens
  misc_RNA (1)...(19): siRNA sense strand
gaaagaacucacgacuaca

SEQ ID NO: 674546 - RNA, 19 nt, Homo sapiens
  misc_RNA (1)...(19): siRNA sense strand
guaaaggugcuggacaagu

SEQ ID NO: 674547 - RNA, 19 nt, Homo sapiens
  misc_RNA (1)...(19): siRNA sense strand
cgggacaggugggugagaa

SEQ ID NO: 674548 - RNA, 19 nt, Homo sapiens
  misc_RNA (1)...(19): siRNA sense strand
gagacagccaaguccuauu

SEQ ID NO: 674549 - RNA, 19 nt, Homo sapiens
  misc_RNA (1)...(19): siRNA sense strand
ucaauggaggcgucugcua

SEQ ID NO: 674550 - RNA, 19 nt, Homo sapiens
  misc_RNA (1)...(19): siRNA sense strand
uauggcaacggcagaaaga

SEQ ID NO: 674551 - RNA, 19 nt, Homo sapiens
  misc_RNA (1)...(19): siRNA sense strand
acaggugggugagaagcaa

SEQ ID NO: 674552 - RNA, 19 nt, Homo sapiens
  misc_RNA (1)...(19): siRNA sense strand
aaccagcgcuacaucuuuu

SEQ ID NO: 674553 - RNA, 19 nt, Homo sapiens
  misc_RNA (1)...(19): siRNA sense strand
acucacgacuacaguucaa

SEQ ID NO: 674554 - RNA, 19 nt, Homo sapiens
  misc_RNA (1)...(19): siRNA sense strand
aaagaacucacgacuacag

SEQ ID NO: 674555 - RNA, 19 nt, Homo sapiens
  misc_RNA (1)...(19): siRNA sense strand
gaacagcccuuagucuuua

SEQ ID NO: 674556 - RNA, 19 nt, Homo sapiens
  misc_RNA (1)...(19): siRNA sense strand
ggaacagcccuuagucuuu

SEQ ID NO: 674557 - RNA, 19 nt, Homo sapiens
  misc_RNA (1)...(19): siRNA sense strand
uaaaggugcuggacaagug

SEQ ID NO: 674558 - RNA, 19 nt, Homo sapiens
  misc_RNA (1)...(19): siRNA sense strand
agaaagaacucacgacuac

SEQ ID NO: 674559 - RNA, 19 nt, Homo sapiens
  misc_RNA (1)...(19): siRNA sense strand
gaaccagcgcuacaucuuu

SEQ ID NO: 674560 - RNA, 19 nt, Homo sapiens
  misc_RNA (1)...(19): siRNA sense strand
gcaagauccugugcacuga

SEQ ID NO: 674561 - RNA, 19 nt, Homo sapiens
  misc_RNA (1)...(19): siRNA sense strand
gagaagcaaucgcugaagu

SEQ ID NO: 674562 - RNA, 19 nt, Homo sapiens
  misc_RNA (1)...(19): siRNA sense strand
gaaaggaaccagcgcuaca

SEQ ID NO: 674563 - RNA, 19 nt, Homo sapiens
  misc_RNA (1)...(19): siRNA sense strand
agaaagaggugggcaagau

SEQ ID NO: 674564 - RNA, 19 nt, Homo sapiens
  misc_RNA (1)...(19): siRNA sense strand
gagacauucgcaucaaaua

SEQ ID NO: 674565 - RNA, 19 nt, Homo sapiens
  misc_RNA (1)...(19): siRNA sense strand
agcaaucgcugaaguguga

SEQ ID NO: 674566 - RNA, 19 nt, Homo sapiens
  misc_RNA (1)...(19): siRNA sense strand
ucaaccagcucuccugcaa

SEQ ID NO: 674567 - RNA, 19 nt, Homo sapiens
  misc_RNA (1)...(19): siRNA sense strand
gacauucgcaucaaauaug

SEQ ID NO: 674568 - RNA, 19 nt, Homo sapiens
  misc_RNA (1)...(19): siRNA sense strand
ggaaccagcgcuacaucuu

SEQ ID NO: 674569 - RNA, 19 nt, Homo sapiens
  misc_RNA (1)...(19): siRNA sense strand
ggaggcgucugcuacuaca

SEQ ID NO: 674570 - RNA, 19 nt, Homo sapiens
  misc_RNA (1)...(19): siRNA sense strand
gaaagaggugggcaagauc

SEQ ID NO: 674571 - RNA, 19 nt, Homo sapiens
  misc_RNA (1)...(19): siRNA sense strand
cagaaagaacucacgacua

SEQ ID NO: 674572 - RNA, 19 nt, Homo sapiens
  misc_RNA (1)...(19): siRNA sense strand
gugugucgcucgccugcua

SEQ ID NO: 674573 - RNA, 19 nt, Homo sapiens
  misc_RNA (1)...(19): siRNA sense strand
ggcccaaguugaagaagau

SEQ ID NO: 674574 - RNA, 19 nt, Homo sapiens
  misc_RNA (1)...(19): siRNA sense strand
gaagcaaucgcugaagugu

SEQ ID NO: 674575 - RNA, 19 nt, Homo sapiens
  misc_RNA (1)...(19): siRNA sense strand
gcaacgagacagccaaguc

SEQ ID NO: 674576 - RNA, 19 nt, Homo sapiens
  misc_RNA (1)...(19): siRNA sense strand
ccgagacauucgcaucaaa

SEQ ID NO: 674577 - RNA, 19 nt, Homo sapiens
  misc_RNA (1)...(19): siRNA sense strand
agacagccaaguccuauug

SEQ ID NO: 674578 - RNA, 19 nt, Homo sapiens
  misc_RNA (1)...(19): siRNA sense strand
caaccgcagccgagacauu

SEQ ID NO: 674579 - RNA, 19 nt, Homo sapiens
  misc_RNA (1)...(19): siRNA sense strand
ugguaaaggugcuggacaa

SEQ ID NO: 674580 - RNA, 19 nt, Homo sapiens
  misc_RNA (1)...(19): siRNA sense strand
gacuacaguucaacaaggu

SEQ ID NO: 674581 - RNA, 19 nt, Homo sapiens
  misc_RNA (1)...(19): siRNA sense strand
ggaggacgcuggggaguau

SEQ ID NO: 674582 - RNA, 19 nt, Homo sapiens
  misc_RNA (1)...(19): siRNA sense strand
ccacggaacagcccuuagu

SEQ ID NO: 674583 - RNA, 19 nt, Homo sapiens
  misc_RNA (1)...(19): siRNA sense strand
ccaaguugaagaagaugaa

SEQ ID NO: 674584 - RNA, 19 nt, Homo sapiens
  misc_RNA (1)...(19): siRNA sense strand
caacaacagcagcaucucu

SEQ ID NO: 674585 - RNA, 19 nt, Homo sapiens
  misc_RNA (1)...(19): siRNA sense strand
cggaacagcccuuagucuu

SEQ ID NO: 674586 - RNA, 19 nt, Homo sapiens
  misc_RNA (1)...(19): siRNA sense strand
gugugccgcucgaaaggaa

SEQ ID NO: 674587 - RNA, 19 nt, Homo sapiens
  misc_RNA (1)...(19): siRNA sense strand
gccgagacauucgcaucaa

SEQ ID NO: 674588 - RNA, 19 nt, Homo sapiens
  misc_RNA (1)...(19): siRNA sense strand
ggugguggagggcaaggua

SEQ ID NO: 674589 - RNA, 19 nt, Homo sapiens
  misc_RNA (1)...(19): siRNA sense strand
gugagaagcaaucgcugaa

SEQ ID NO: 674590 - RNA, 19 nt, Homo sapiens
  misc_RNA (1)...(19): siRNA sense strand
agacauucgcaucaaauau

SEQ ID NO: 674591 - RNA, 19 nt, Homo sapiens
  misc_RNA (1)...(19): siRNA sense strand
cgagacauucgcaucaaau

SEQ ID NO: 674592 - RNA, 19 nt, Homo sapiens
  misc_RNA (1)...(19): siRNA sense strand
cgagacagccaaguccuau

SEQ ID NO: 674593 - RNA, 19 nt, Homo sapiens
  misc_RNA (1)...(19): siRNA sense strand
cggcccaaguugaagaaga

SEQ ID NO: 674594 - RNA, 19 nt, Homo sapiens
  misc_RNA (1)...(19): siRNA sense strand
ggucggguggcguugguaa

SEQ ID NO: 674595 - RNA, 19 nt, Homo sapiens
  misc_RNA (1)...(19): siRNA sense strand
gaaagaacucacgacuaca

SEQ ID NO: 674596 - RNA, 19 nt, Homo sapiens
  misc_RNA (1)...(19): siRNA sense strand
guaaaggugcuggacaagu

SEQ ID NO: 674597 - RNA, 19 nt, Homo sapiens
  misc_RNA (1)...(19): siRNA sense strand
cgggacaggugggugagaa

SEQ ID NO: 674598 - RNA, 19 nt, Homo sapiens
  misc_RNA (1)...(19): siRNA sense strand
gagacagccaaguccuauu

SEQ ID NO: 674599 - RNA, 19 nt, Homo sapiens
  misc_RNA (1)...(19): siRNA sense strand
ucaauggaggcgucugcua

SEQ ID NO: 674600 - RNA, 19 nt, Homo sapiens
  misc_RNA (1)...(19): siRNA sense strand
uauggcaacggcagaaaga

SEQ ID NO: 674601 - RNA, 19 nt, Homo sapiens
  misc_RNA (1)...(19): siRNA sense strand
acaggugggugagaagcaa

SEQ ID NO: 674602 - RNA, 19 nt, Homo sapiens
  misc_RNA (1)...(19): siRNA sense strand
aaccagcgcuacaucuuuu

SEQ ID NO: 674603 - RNA, 19 nt, Homo sapiens
  misc_RNA (1)...(19): siRNA sense strand
acucacgacuacaguucaa

SEQ ID NO: 674604 - RNA, 19 nt, Homo sapiens
  misc_RNA (1)...(19): siRNA sense strand
aaagaacucacgacuacag

SEQ ID NO: 674605 - RNA, 19 nt, Homo sapiens
  misc_RNA (1)...(19): siRNA sense strand
gaacagcccuuagucuuua

SEQ ID NO: 674606 - RNA, 19 nt, Homo sapiens
  misc_RNA (1)...(19): siRNA sense strand
ggaacagcccuuagucuuu

SEQ ID NO: 674607 - RNA, 19 nt, Homo sapiens
  misc_RNA (1)...(19): siRNA sense strand
uaaaggugcuggacaagug

SEQ ID NO: 674608 - RNA, 19 nt, Homo sapiens
  misc_RNA (1)...(19): siRNA sense strand
agaaagaacucacgacuac

SEQ ID NO: 674609 - RNA, 19 nt, Homo sapiens
  misc_RNA (1)...(19): siRNA sense strand
gaaccagcgcuacaucuuu

SEQ ID NO: 674610 - RNA, 19 nt, Homo sapiens
  misc_RNA (1)...(19): siRNA sense strand
gcaagauccugugcacuga

SEQ ID NO: 674611 - RNA, 19 nt, Homo sapiens
  misc_RNA (1)...(19): siRNA sense strand
gagaagcaaucgcugaagu

SEQ ID NO: 674612 - RNA, 19 nt, Homo sapiens
  misc_RNA (1)...(19): siRNA sense strand
gaaaggaaccagcgcuaca

SEQ ID NO: 674613 - RNA, 19 nt, Homo sapiens
  misc_RNA (1)...(19): siRNA sense strand
agaaagaggugggcaagau

SEQ ID NO: 674614 - RNA, 19 nt, Homo sapiens
  misc_RNA (1)...(19): siRNA sense strand
gagacauucgcaucaaaua

SEQ ID NO: 674615 - RNA, 19 nt, Homo sapiens
  misc_RNA (1)...(19): siRNA sense strand
agcaaucgcugaaguguga

SEQ ID NO: 674616 - RNA, 19 nt, Homo sapiens
  misc_RNA (1)...(19): siRNA sense strand
ucaaccagcucuccugcaa

SEQ ID NO: 674617 - RNA, 19 nt, Homo sapiens
  misc_RNA (1)...(19): siRNA sense strand
gacauucgcaucaaauaug

SEQ ID NO: 674618 - RNA, 19 nt, Homo sapiens
  misc_RNA (1)...(19): siRNA sense strand
ggaaccagcgcuacaucuu

SEQ ID NO: 674619 - RNA, 19 nt, Homo sapiens
  misc_RNA (1)...(19): siRNA sense strand
ggaggcgucugcuacuaca

SEQ ID NO: 674620 - RNA, 19 nt, Homo sapiens
  misc_RNA (1)...(19): siRNA sense strand
gaaagaggugggcaagauc

SEQ ID NO: 674621 - RNA, 19 nt, Homo sapiens
  misc_RNA (1)...(19): siRNA sense strand
cagaaagaacucacgacua

SEQ ID NO: 674622 - RNA, 19 nt, Homo sapiens
  misc_RNA (1)...(19): siRNA sense strand
gugugucgcucgccugcua

SEQ ID NO: 674623 - RNA, 19 nt, Homo sapiens
  misc_RNA (1)...(19): siRNA sense strand
ggcccaaguugaagaagau

SEQ ID NO: 674624 - RNA, 19 nt, Homo sapiens
  misc_RNA (1)...(19): siRNA sense strand
gaagcaaucgcugaagugu

SEQ ID NO: 674625 - RNA, 19 nt, Homo sapiens
  misc_RNA (1)...(19): siRNA sense strand
gcaacgagacagccaaguc

SEQ ID NO: 674626 - RNA, 19 nt, Homo sapiens
  misc_RNA (1)...(19): siRNA sense strand
ccgagacauucgcaucaaa

SEQ ID NO: 674627 - RNA, 19 nt, Homo sapiens
  misc_RNA (1)...(19): siRNA sense strand
agacagccaaguccuauug

SEQ ID NO: 674628 - RNA, 19 nt, Homo sapiens
  misc_RNA (1)...(19): siRNA sense strand
caaccgcagccgagacauu

SEQ ID NO: 674629 - RNA, 19 nt, Homo sapiens
  misc_RNA (1)...(19): siRNA sense strand
ugguaaaggugcuggacaa

SEQ ID NO: 674630 - RNA, 19 nt, Homo sapiens
  misc_RNA (1)...(19): siRNA sense strand
gacuacaguucaacaaggu

SEQ ID NO: 674631 - RNA, 19 nt, Homo sapiens
  misc_RNA (1)...(19): siRNA sense strand
ggaggacgcuggggaguau

SEQ ID NO: 674632 - RNA, 19 nt, Homo sapiens
  misc_RNA (1)...(19): siRNA sense strand
ccacggaacagcccuuagu

SEQ ID NO: 674633 - RNA, 19 nt, Homo sapiens
  misc_RNA (1)...(19): siRNA sense strand
ccaaguugaagaagaugaa

SEQ ID NO: 674634 - RNA, 19 nt, Homo sapiens
  misc_RNA (1)...(19): siRNA sense strand
caacaacagcagcaucucu

SEQ ID NO: 674635 - RNA, 19 nt, Homo sapiens
  misc_RNA (1)...(19): siRNA sense strand
cggaacagcccuuagucuu

SEQ ID NO: 674636 - RNA, 19 nt, Homo sapiens
  misc_RNA (1)...(19): siRNA sense strand
gugugccgcucgaaaggaa

SEQ ID NO: 674637 - RNA, 19 nt, Homo sapiens
  misc_RNA (1)...(19): siRNA sense strand
gccgagacauucgcaucaa

SEQ ID NO: 674638 - RNA, 19 nt, Homo sapiens
  misc_RNA (1)...(19): siRNA sense strand
ggugguggagggcaaggua

SEQ ID NO: 674639 - RNA, 19 nt, Homo sapiens
  misc_RNA (1)...(19): siRNA sense strand
gugagaagcaaucgcugaa

SEQ ID NO: 674640 - RNA, 19 nt, Homo sapiens
  misc_RNA (1)...(19): siRNA sense strand
agacauucgcaucaaauau

SEQ ID NO: 674641 - RNA, 19 nt, Homo sapiens
  misc_RNA (1)...(19): siRNA sense strand
cgagacauucgcaucaaau

SEQ ID NO: 674642 - RNA, 19 nt, Homo sapiens
  misc_RNA (1)...(19): siRNA sense strand
cgagacagccaaguccuau

SEQ ID NO: 674643 - RNA, 19 nt, Homo sapiens
  misc_RNA (1)...(19): siRNA sense strand
cggcccaaguugaagaaga

SEQ ID NO: 674644 - RNA, 19 nt, Homo sapiens
  misc_RNA (1)...(19): siRNA sense strand
ggucggguggcguugguaa

SEQ ID NO: 674645 - RNA, 19 nt, Homo sapiens
  misc_RNA (1)...(19): siRNA sense strand
gaaagaacucacgacuaca

SEQ ID NO: 674646 - RNA, 19 nt, Homo sapiens
  misc_RNA (1)...(19): siRNA sense strand
guaaaggugcuggacaagu

SEQ ID NO: 674647 - RNA, 19 nt, Homo sapiens
  misc_RNA (1)...(19): siRNA sense strand
cgggacaggugggugagaa

SEQ ID NO: 674648 - RNA, 19 nt, Homo sapiens
  misc_RNA (1)...(19): siRNA sense strand
gagacagccaaguccuauu

SEQ ID NO: 674649 - RNA, 19 nt, Homo sapiens
  misc_RNA (1)...(19): siRNA sense strand
ucaauggaggcgucugcua

SEQ ID NO: 674650 - RNA, 19 nt, Homo sapiens
  misc_RNA (1)...(19): siRNA sense strand
uauggcaacggcagaaaga

SEQ ID NO: 674651 - RNA, 19 nt, Homo sapiens
  misc_RNA (1)...(19): siRNA sense strand
acaggugggugagaagcaa

SEQ ID NO: 674652 - RNA, 19 nt, Homo sapiens
  misc_RNA (1)...(19): siRNA sense strand
aaccagcgcuacaucuuuu

SEQ ID NO: 674653 - RNA, 19 nt, Homo sapiens
  misc_RNA (1)...(19): siRNA sense strand
acucacgacuacaguucaa

SEQ ID NO: 674654 - RNA, 19 nt, Homo sapiens
  misc_RNA (1)...(19): siRNA sense strand
aaagaacucacgacuacag

SEQ ID NO: 674655 - RNA, 19 nt, Homo sapiens
  misc_RNA (1)...(19): siRNA sense strand
gaacagcccuuagucuuua

SEQ ID NO: 674656 - RNA, 19 nt, Homo sapiens
  misc_RNA (1)...(19): siRNA sense strand
ggaacagcccuuagucuuu

SEQ ID NO: 674657 - RNA, 19 nt, Homo sapiens
  misc_RNA (1)...(19): siRNA sense strand
uaaaggugcuggacaagug

SEQ ID NO: 674658 - RNA, 19 nt, Homo sapiens
  misc_RNA (1)...(19): siRNA sense strand
agaaagaacucacgacuac

SEQ ID NO: 674659 - RNA, 19 nt, Homo sapiens
  misc_RNA (1)...(19): siRNA sense strand
gaaccagcgcuacaucuuu

SEQ ID NO: 674660 - RNA, 19 nt, Homo sapiens
  misc_RNA (1)...(19): siRNA sense strand
gcaagauccugugcacuga

SEQ ID NO: 674661 - RNA, 19 nt, Homo sapiens
  misc_RNA (1)...(19): siRNA sense strand
gagaagcaaucgcugaagu

SEQ ID NO: 674662 - RNA, 19 nt, Homo sapiens
  misc_RNA (1)...(19): siRNA sense strand
gaaaggaaccagcgcuaca

SEQ ID NO: 674663 - RNA, 19 nt, Homo sapiens
  misc_RNA (1)...(19): siRNA sense strand
agaaagaggugggcaagau

SEQ ID NO: 674664 - RNA, 19 nt, Homo sapiens
  misc_RNA (1)...(19): siRNA sense strand
gagacauucgcaucaaaua

SEQ ID NO: 674665 - RNA, 19 nt, Homo sapiens
  misc_RNA (1)...(19): siRNA sense strand
agcaaucgcugaaguguga

SEQ ID NO: 674666 - RNA, 19 nt, Homo sapiens
  misc_RNA (1)...(19): siRNA sense strand
ucaaccagcucuccugcaa

SEQ ID NO: 674667 - RNA, 19 nt, Homo sapiens
  misc_RNA (1)...(19): siRNA sense strand
gacauucgcaucaaauaug

SEQ ID NO: 674668 - RNA, 19 nt, Homo sapiens
  misc_RNA (1)...(19): siRNA sense strand
ggaaccagcgcuacaucuu

SEQ ID NO: 674669 - RNA, 19 nt, Homo sapiens
  misc_RNA (1)...(19): siRNA sense strand
ggaggcgucugcuacuaca

SEQ ID NO: 674670 - RNA, 19 nt, Homo sapiens
  misc_RNA (1)...(19): siRNA sense strand
gaaagaggugggcaagauc

SEQ ID NO: 674671 - RNA, 19 nt, Homo sapiens
  misc_RNA (1)...(19): siRNA sense strand
cagaaagaacucacgacua

SEQ ID NO: 674672 - RNA, 19 nt, Homo sapiens
  misc_RNA (1)...(19): siRNA sense strand
gugugucgcucgccugcua

SEQ ID NO: 674673 - RNA, 19 nt, Homo sapiens
  misc_RNA (1)...(19): siRNA sense strand
ggcccaaguugaagaagau

SEQ ID NO: 674674 - RNA, 19 nt, Homo sapiens
  misc_RNA (1)...(19): siRNA sense strand
gaagcaaucgcugaagugu

SEQ ID NO: 674675 - RNA, 19 nt, Homo sapiens
  misc_RNA (1)...(19): siRNA sense strand
gcaacgagacagccaaguc

SEQ ID NO: 674676 - RNA, 19 nt, Homo sapiens
  misc_RNA (1)...(19): siRNA sense strand
ccgagacauucgcaucaaa

SEQ ID NO: 674677 - RNA, 19 nt, Homo sapiens
  misc_RNA (1)...(19): siRNA sense strand
agacagccaaguccuauug

SEQ ID NO: 674678 - RNA, 19 nt, Homo sapiens
  misc_RNA (1)...(19): siRNA sense strand
caaccgcagccgagacauu

SEQ ID NO: 674679 - RNA, 19 nt, Homo sapiens
  misc_RNA (1)...(19): siRNA sense strand
ugguaaaggugcuggacaa

SEQ ID NO: 674680 - RNA, 19 nt, Homo sapiens
  misc_RNA (1)...(19): siRNA sense strand
gacuacaguucaacaaggu

SEQ ID NO: 674681 - RNA, 19 nt, Homo sapiens
  misc_RNA (1)...(19): siRNA sense strand
ggaggacgcuggggaguau

SEQ ID NO: 674682 - RNA, 19 nt, Homo sapiens
  misc_RNA (1)...(19): siRNA sense strand
ccacggaacagcccuuagu

SEQ ID NO: 674683 - RNA, 19 nt, Homo sapiens
  misc_RNA (1)...(19): siRNA sense strand
ccaaguugaagaagaugaa

SEQ ID NO: 674684 - RNA, 19 nt, Homo sapiens
  misc_RNA (1)...(19): siRNA sense strand
caacaacagcagcaucucu

SEQ ID NO: 674685 - RNA, 19 nt, Homo sapiens
  misc_RNA (1)...(19): siRNA sense strand
cggaacagcccuuagucuu

SEQ ID NO: 674686 - RNA, 19 nt, Homo sapiens
  misc_RNA (1)...(19): siRNA sense strand
gugugccgcucgaaaggaa

SEQ ID NO: 674687 - RNA, 19 nt, Homo sapiens
  misc_RNA (1)...(19): siRNA sense strand
gccgagacauucgcaucaa

SEQ ID NO: 674688 - RNA, 19 nt, Homo sapiens
  misc_RNA (1)...(19): siRNA sense strand
ggugguggagggcaaggua

SEQ ID NO: 674689 - RNA, 19 nt, Homo sapiens
  misc_RNA (1)...(19): siRNA sense strand
gugagaagcaaucgcugaa

SEQ ID NO: 674690 - RNA, 19 nt, Homo sapiens
  misc_RNA (1)...(19): siRNA sense strand
agacauucgcaucaaauau

SEQ ID NO: 674691 - RNA, 19 nt, Homo sapiens
  misc_RNA (1)...(19): siRNA sense strand
cgagacauucgcaucaaau

SEQ ID NO: 674692 - RNA, 19 nt, Homo sapiens
  misc_RNA (1)...(19): siRNA sense strand
cgagacagccaaguccuau

SEQ ID NO: 674693 - RNA, 19 nt, Homo sapiens
  misc_RNA (1)...(19): siRNA sense strand
cggcccaaguugaagaaga

SEQ ID NO: 674694 - RNA, 19 nt, Homo sapiens
  misc_RNA (1)...(19): siRNA sense strand
ggucggguggcguugguaa

SEQ ID NO: 674695 - RNA, 19 nt, Homo sapiens
  misc_RNA (1)...(19): siRNA sense strand
gaaagaacucacgacuaca

SEQ ID NO: 674696 - RNA, 19 nt, Homo sapiens
  misc_RNA (1)...(19): siRNA sense strand
guaaaggugcuggacaagu

SEQ ID NO: 674697 - RNA, 19 nt, Homo sapiens
  misc_RNA (1)...(19): siRNA sense strand
cgggacaggugggugagaa

SEQ ID NO: 674698 - RNA, 19 nt, Homo sapiens
  misc_RNA (1)...(19): siRNA sense strand
gagacagccaaguccuauu

SEQ ID NO: 674699 - RNA, 19 nt, Homo sapiens
  misc_RNA (1)...(19): siRNA sense strand
ucaauggaggcgucugcua

SEQ ID NO: 674700 - RNA, 19 nt, Homo sapiens
  misc_RNA (1)...(19): siRNA sense strand
uauggcaacggcagaaaga

SEQ ID NO: 674701 - RNA, 19 nt, Homo sapiens
  misc_RNA (1)...(19): siRNA sense strand
acaggugggugagaagcaa

SEQ ID NO: 674702 - RNA, 19 nt, Homo sapiens
  misc_RNA (1)...(19): siRNA sense strand
aaccagcgcuacaucuuuu

SEQ ID NO: 674703 - RNA, 19 nt, Homo sapiens
  misc_RNA (1)...(19): siRNA sense strand
acucacgacuacaguucaa

SEQ ID NO: 674704 - RNA, 19 nt, Homo sapiens
  misc_RNA (1)...(19): siRNA sense strand
aaagaacucacgacuacag

SEQ ID NO: 674705 - RNA, 19 nt, Homo sapiens
  misc_RNA (1)...(19): siRNA sense strand
gaaaguagagcacacaaga

SEQ ID NO: 674706 - RNA, 19 nt, Homo sapiens
  misc_RNA (1)...(19): siRNA sense strand
ugacaaugcuccacaguug

SEQ ID NO: 674707 - RNA, 19 nt, Homo sapiens
  misc_RNA (1)...(19): siRNA sense strand
caucuacugcuguuuauua

SEQ ID NO: 674708 - RNA, 19 nt, Homo sapiens
  misc_RNA (1)...(19): siRNA sense strand
cgacaucuacugcuguuua

SEQ ID NO: 674709 - RNA, 19 nt, Homo sapiens
  misc_RNA (1)...(19): siRNA sense strand
agaacgcccugcucacuua

SEQ ID NO: 674710 - RNA, 19 nt, Homo sapiens
  misc_RNA (1)...(19): siRNA sense strand
ggagucaacggacagguua

SEQ ID NO: 674711 - RNA, 19 nt, Homo sapiens
  misc_RNA (1)...(19): siRNA sense strand
gaaaggccgcugcagguuu

SEQ ID NO: 674712 - RNA, 19 nt, Homo sapiens
  misc_RNA (1)...(19): siRNA sense strand
guacaguucuuguggaagu

SEQ ID NO: 674713 - RNA, 19 nt, Homo sapiens
  misc_RNA (1)...(19): siRNA sense strand
ugaaggacauuaacgacaa

SEQ ID NO: 674714 - RNA, 19 nt, Homo sapiens
  misc_RNA (1)...(19): siRNA sense strand
ggagguaaaucugcagaau

SEQ ID NO: 674715 - RNA, 19 nt, Homo sapiens
  misc_RNA (1)...(19): siRNA sense strand
ggacuuguauuacggaaac

SEQ ID NO: 674716 - RNA, 19 nt, Homo sapiens
  misc_RNA (1)...(19): siRNA sense strand
acgcguggcuuucguauga

SEQ ID NO: 674717 - RNA, 19 nt, Homo sapiens
  misc_RNA (1)...(19): siRNA sense strand
cuccggagcuucauuuauu

SEQ ID NO: 674718 - RNA, 19 nt, Homo sapiens
  misc_RNA (1)...(19): siRNA sense strand
ugauguuucuccagauaua

SEQ ID NO: 674719 - RNA, 19 nt, Homo sapiens
  misc_RNA (1)...(19): siRNA sense strand
gacuggcaccguucaauua

SEQ ID NO: 674720 - RNA, 19 nt, Homo sapiens
  misc_RNA (1)...(19): siRNA sense strand
gaagguacgugcaguugac

SEQ ID NO: 674721 - RNA, 19 nt, Homo sapiens
  misc_RNA (1)...(19): siRNA sense strand
agaccgagcugguggaugu

SEQ ID NO: 674722 - RNA, 19 nt, Homo sapiens
  misc_RNA (1)...(19): siRNA sense strand
cgacaacccuccgguguuc

SEQ ID NO: 674723 - RNA, 19 nt, Homo sapiens
  misc_RNA (1)...(19): siRNA sense strand
gaaauuaccagaaaacguu

SEQ ID NO: 674724 - RNA, 19 nt, Homo sapiens
  misc_RNA (1)...(19): siRNA sense strand
gggcgcauguaguuuggua

SEQ ID NO: 674725 - RNA, 19 nt, Homo sapiens
  misc_RNA (1)...(19): siRNA sense strand
agaacgcgcugguguccua

SEQ ID NO: 674726 - RNA, 19 nt, Homo sapiens
  misc_RNA (1)...(19): siRNA sense strand
gacaucuacugcuguuuau

SEQ ID NO: 674727 - RNA, 19 nt, Homo sapiens
  misc_RNA (1)...(19): siRNA sense strand
ccuaugagcuggugguuac

SEQ ID NO: 674728 - RNA, 19 nt, Homo sapiens
  misc_RNA (1)...(19): siRNA sense strand
uguccaccuucaagaauua

SEQ ID NO: 674729 - RNA, 19 nt, Homo sapiens
  misc_RNA (1)...(19): siRNA sense strand
ucacgguacuggacaacaa

SEQ ID NO: 674730 - RNA, 19 nt, Homo sapiens
  misc_RNA (1)...(19): siRNA sense strand
gguaaaaccucuuggacuu

SEQ ID NO: 674731 - RNA, 19 nt, Homo sapiens
  misc_RNA (1)...(19): siRNA sense strand
ucggaacgcuggugauuca

SEQ ID NO: 674732 - RNA, 19 nt, Homo sapiens
  misc_RNA (1)...(19): siRNA sense strand
gcuguacacuggugagauc

SEQ ID NO: 674733 - RNA, 19 nt, Homo sapiens
  misc_RNA (1)...(19): siRNA sense strand
ugauaggacauauggauuu

SEQ ID NO: 674734 - RNA, 19 nt, Homo sapiens
  misc_RNA (1)...(19): siRNA sense strand
cagguaccgucaucacauu

SEQ ID NO: 674735 - RNA, 19 nt, Homo sapiens
  misc_RNA (1)...(19): siRNA sense strand
agaagaaacuccggagcuu

SEQ ID NO: 674736 - RNA, 19 nt, Homo sapiens
  misc_RNA (1)...(19): siRNA sense strand
ggcuaaacauggcaacuuc

SEQ ID NO: 674737 - RNA, 19 nt, Homo sapiens
  misc_RNA (1)...(19): siRNA sense strand
ggauguaaaugacaaugcu

SEQ ID NO: 674738 - RNA, 19 nt, Homo sapiens
  misc_RNA (1)...(19): siRNA sense strand
gggauauuauuuacuccuu

SEQ ID NO: 674739 - RNA, 19 nt, Homo sapiens
  misc_RNA (1)...(19): siRNA sense strand
gaagaaaguagagcacaca

SEQ ID NO: 674740 - RNA, 19 nt, Homo sapiens
  misc_RNA (1)...(19): siRNA sense strand
gggaucuucuggagguaaa

SEQ ID NO: 674741 - RNA, 19 nt, Homo sapiens
  misc_RNA (1)...(19): siRNA sense strand
ggaaaggccgcugcagguu

SEQ ID NO: 674742 - RNA, 19 nt, Homo sapiens
  misc_RNA (1)...(19): siRNA sense strand
gaggccagcuccacuacuc

SEQ ID NO: 674743 - RNA, 19 nt, Homo sapiens
  misc_RNA (1)...(19): siRNA sense strand
ggaaguuguggauguaaau

SEQ ID NO: 674744 - RNA, 19 nt, Homo sapiens
  misc_RNA (1)...(19): siRNA sense strand
acggugaaauuaccagaaa

SEQ ID NO: 674745 - RNA, 19 nt, Homo sapiens
  misc_RNA (1)...(19): siRNA sense strand
agugauguuucuccagaua

SEQ ID NO: 674746 - RNA, 19 nt, Homo sapiens
  misc_RNA (1)...(19): siRNA sense strand
ucacauugauuagcguguu

SEQ ID NO: 674747 - RNA, 19 nt, Homo sapiens
  misc_RNA (1)...(19): siRNA sense strand
gcuccacaguugacucuca

SEQ ID NO: 674748 - RNA, 19 nt, Homo sapiens
  misc_RNA (1)...(19): siRNA sense strand
gaaggacauuaacgacaac

SEQ ID NO: 674749 - RNA, 19 nt, Homo sapiens
  misc_RNA (1)...(19): siRNA sense strand
gagguaaaucugcagaaug

SEQ ID NO: 674750 - RNA, 19 nt, Homo sapiens
  misc_RNA (1)...(19): siRNA sense strand
gauaggacauauggauuuu

SEQ ID NO: 674751 - RNA, 19 nt, Homo sapiens
  misc_RNA (1)...(19): siRNA sense strand
aaacuccggagcuucauuu

SEQ ID NO: 674752 - RNA, 19 nt, Homo sapiens
  misc_RNA (1)...(19): siRNA sense strand
gaaacuccggagcuucauu

SEQ ID NO: 674753 - RNA, 19 nt, Homo sapiens
  misc_RNA (1)...(19): siRNA sense strand
gagaacgcccugcucacuu

SEQ ID NO: 674754 - RNA, 19 nt, Homo sapiens
  misc_RNA (1)...(19): siRNA sense strand
cgacacgagcccuagauga

SEQ ID NO: 674755 - RNA, 19 nt, Homo sapiens
  misc_RNA (1)...(19): siRNA sense strand
gcgcauguaguuugguaaa

SEQ ID NO: 674756 - RNA, 19 nt, Homo sapiens
  misc_RNA (1)...(19): siRNA sense strand
acaaaggaaucuguucauc

SEQ ID NO: 674757 - RNA, 19 nt, Homo sapiens
  misc_RNA (1)...(19): siRNA sense strand
agguaaaucugcagaaugg

SEQ ID NO: 674758 - RNA, 19 nt, Homo sapiens
  misc_RNA (1)...(19): siRNA sense strand
cacauugauuagcguguuu

SEQ ID NO: 674759 - RNA, 19 nt, Homo sapiens
  misc_RNA (1)...(19): siRNA sense strand
gcuggucauuguacaguuc

SEQ ID NO: 674760 - RNA, 19 nt, Homo sapiens
  misc_RNA (1)...(19): siRNA sense strand
ugacuggcaccguucaauu

SEQ ID NO: 674761 - RNA, 19 nt, Homo sapiens
  misc_RNA (1)...(19): siRNA sense strand
ccgcuugacucucgguuuc

SEQ ID NO: 674762 - RNA, 19 nt, Homo sapiens
  misc_RNA (1)...(19): siRNA sense strand
gaggacgcccaaccaggua

SEQ ID NO: 674763 - RNA, 19 nt, Homo sapiens
  misc_RNA (1)...(19): siRNA sense strand
gcauguaguuugguaaagc

SEQ ID NO: 674764 - RNA, 19 nt, Homo sapiens
  misc_RNA (1)...(19): siRNA sense strand
gccgacaucuacugcuguu

SEQ ID NO: 674765 - RNA, 19 nt, Homo sapiens
  misc_RNA (1)...(19): siRNA sense strand
gagaguguguccgccuaug

SEQ ID NO: 674766 - RNA, 19 nt, Homo sapiens
  misc_RNA (1)...(19): siRNA sense strand
guguccaccuucaagaauu

SEQ ID NO: 674767 - RNA, 19 nt, Homo sapiens
  misc_RNA (1)...(19): siRNA sense strand
ugccucagauuuagacgaa

SEQ ID NO: 674768 - RNA, 19 nt, Homo sapiens
  misc_RNA (1)...(19): siRNA sense strand
cgacacaaaggaaucuguu

SEQ ID NO: 674769 - RNA, 19 nt, Homo sapiens
  misc_RNA (1)...(19): siRNA sense strand
uggaaguuguggauguaaa

SEQ ID NO: 674770 - RNA, 19 nt, Homo sapiens
  misc_RNA (1)...(19): siRNA sense strand
uguggaaguuguggaugua

SEQ ID NO: 674771 - RNA, 19 nt, Homo sapiens
  misc_RNA (1)...(19): siRNA sense strand
ccaaccagguaccgucauc

SEQ ID NO: 674772 - RNA, 19 nt, Homo sapiens
  misc_RNA (1)...(19): siRNA sense strand
gacaaugcuccacaguuga

SEQ ID NO: 674773 - RNA, 19 nt, Homo sapiens
  misc_RNA (1)...(19): siRNA sense strand
gaaguuguggauguaaaug

SEQ ID NO: 674774 - RNA, 19 nt, Homo sapiens
  misc_RNA (1)...(19): siRNA sense strand
aguauacgguguucgugaa

SEQ ID NO: 674775 - RNA, 19 nt, Homo sapiens
  misc_RNA (1)...(19): siRNA sense strand
gguccauccucuacagaca

SEQ ID NO: 674776 - RNA, 19 nt, Homo sapiens
  misc_RNA (1)...(19): siRNA sense strand
gaaagcggccaggcaccaa

SEQ ID NO: 674777 - RNA, 19 nt, Homo sapiens
  misc_RNA (1)...(19): siRNA sense strand
acacaaaggaaucuguuca

SEQ ID NO: 674778 - RNA, 19 nt, Homo sapiens
  misc_RNA (1)...(19): siRNA sense strand
ugagggcgcauguaguuug

SEQ ID NO: 674779 - RNA, 19 nt, Homo sapiens
  misc_RNA (1)...(19): siRNA sense strand
gcacgacacgagcccuaga

SEQ ID NO: 674780 - RNA, 19 nt, Homo sapiens
  misc_RNA (1)...(19): siRNA sense strand
ggagaacgcccugcucacu

SEQ ID NO: 674781 - RNA, 19 nt, Homo sapiens
  misc_RNA (1)...(19): siRNA sense strand
cccaaugccucagauuuag

SEQ ID NO: 674782 - RNA, 19 nt, Homo sapiens
  misc_RNA (1)...(19): siRNA sense strand
gacacgagcccuagaugag

SEQ ID NO: 674783 - RNA, 19 nt, Homo sapiens
  misc_RNA (1)...(19): siRNA sense strand
gcgaagguacgugcaguug

SEQ ID NO: 674784 - RNA, 19 nt, Homo sapiens
  misc_RNA (1)...(19): siRNA sense strand
gcugccacaucuucacugu

SEQ ID NO: 674785 - RNA, 19 nt, Homo sapiens
  misc_RNA (1)...(19): siRNA sense strand
ccagcaaccagcagguaaa

SEQ ID NO: 674786 - RNA, 19 nt, Homo sapiens
  misc_RNA (1)...(19): siRNA sense strand
gugauaggacauauggauu

SEQ ID NO: 674787 - RNA, 19 nt, Homo sapiens
  misc_RNA (1)...(19): siRNA sense strand
gauguuucuccagauauaa

SEQ ID NO: 674788 - RNA, 19 nt, Homo sapiens
  misc_RNA (1)...(19): siRNA sense strand
gaauggggauauuauuuac

SEQ ID NO: 674789 - RNA, 19 nt, Homo sapiens
  misc_RNA (1)...(19): siRNA sense strand
guacuggacaacaaugaca

SEQ ID NO: 674790 - RNA, 19 nt, Homo sapiens
  misc_RNA (1)...(19): siRNA sense strand
ugguggaugucaacgugua

SEQ ID NO: 674791 - RNA, 19 nt, Homo sapiens
  misc_RNA (1)...(19): siRNA sense strand
gagggcgcauguaguuugg

SEQ ID NO: 674792 - RNA, 19 nt, Homo sapiens
  misc_RNA (1)...(19): siRNA sense strand
ucugagggcgcauguaguu

SEQ ID NO: 674793 - RNA, 19 nt, Homo sapiens
  misc_RNA (1)...(19): siRNA sense strand
gacucucgguuuccacuag

SEQ ID NO: 674794 - RNA, 19 nt, Homo sapiens
  misc_RNA (1)...(19): siRNA sense strand
cgaagguacgugcaguuga

SEQ ID NO: 674795 - RNA, 19 nt, Homo sapiens
  misc_RNA (1)...(19): siRNA sense strand
gcauuuuguuugugaauuc

SEQ ID NO: 674796 - RNA, 19 nt, Homo sapiens
  misc_RNA (1)...(19): siRNA sense strand
aaaggccgcugcagguuuu

SEQ ID NO: 674797 - RNA, 19 nt, Homo sapiens
  misc_RNA (1)...(19): siRNA sense strand
aagaaacuccggagcuuca

SEQ ID NO: 674798 - RNA, 19 nt, Homo sapiens
  misc_RNA (1)...(19): siRNA sense strand
uccagucuguuggugcuua

SEQ ID NO: 674799 - RNA, 19 nt, Homo sapiens
  misc_RNA (1)...(19): siRNA sense strand
uaggacauauggauuuuga

SEQ ID NO: 674800 - RNA, 19 nt, Homo sapiens
  misc_RNA (1)...(19): siRNA sense strand
uaucggaacgcuggugauu

SEQ ID NO: 674801 - RNA, 19 nt, Homo sapiens
  misc_RNA (1)...(19): siRNA sense strand
ccuguauacggugaaauua

SEQ ID NO: 674802 - RNA, 19 nt, Homo sapiens
  misc_RNA (1)...(19): siRNA sense strand
caacguguaccugaucauc

SEQ ID NO: 674803 - RNA, 19 nt, Homo sapiens
  misc_RNA (1)...(19): siRNA sense strand
gguaccgucaucacauuga

SEQ ID NO: 674804 - RNA, 19 nt, Homo sapiens
  misc_RNA (1)...(19): siRNA sense strand
ccaccuucaagaauuacua

SEQ ID NO: 674805 - RNA, 19 nt, Homo sapiens
  misc_RNA (1)...(19): siRNA sense strand
gaaaguagagcacacaaga

SEQ ID NO: 674806 - RNA, 19 nt, Homo sapiens
  misc_RNA (1)...(19): siRNA sense strand
ugacaaugcuccacaguug

SEQ ID NO: 674807 - RNA, 19 nt, Homo sapiens
  misc_RNA (1)...(19): siRNA sense strand
caucuacugcuguuuauua

SEQ ID NO: 674808 - RNA, 19 nt, Homo sapiens
  misc_RNA (1)...(19): siRNA sense strand
cgacaucuacugcuguuua

SEQ ID NO: 674809 - RNA, 19 nt, Homo sapiens
  misc_RNA (1)...(19): siRNA sense strand
agaacgcccugcucacuua

SEQ ID NO: 674810 - RNA, 19 nt, Homo sapiens
  misc_RNA (1)...(19): siRNA sense strand
ggagucaacggacagguua

SEQ ID NO: 674811 - RNA, 19 nt, Homo sapiens
  misc_RNA (1)...(19): siRNA sense strand
gaaaggccgcugcagguuu

SEQ ID NO: 674812 - RNA, 19 nt, Homo sapiens
  misc_RNA (1)...(19): siRNA sense strand
guacaguucuuguggaagu

SEQ ID NO: 674813 - RNA, 19 nt, Homo sapiens
  misc_RNA (1)...(19): siRNA sense strand
ugaaggacauuaacgacaa

SEQ ID NO: 674814 - RNA, 19 nt, Homo sapiens
  misc_RNA (1)...(19): siRNA sense strand
ggagguaaaucugcagaau

SEQ ID NO: 674815 - RNA, 19 nt, Homo sapiens
  misc_RNA (1)...(19): siRNA sense strand
ggacuuguauuacggaaac

SEQ ID NO: 674816 - RNA, 19 nt, Homo sapiens
  misc_RNA (1)...(19): siRNA sense strand
acgcguggcuuucguauga

SEQ ID NO: 674817 - RNA, 19 nt, Homo sapiens
  misc_RNA (1)...(19): siRNA sense strand
cuccggagcuucauuuauu

SEQ ID NO: 674818 - RNA, 19 nt, Homo sapiens
  misc_RNA (1)...(19): siRNA sense strand
ugauguuucuccagauaua

SEQ ID NO: 674819 - RNA, 19 nt, Homo sapiens
  misc_RNA (1)...(19): siRNA sense strand
gacuggcaccguucaauua

SEQ ID NO: 674820 - RNA, 19 nt, Homo sapiens
  misc_RNA (1)...(19): siRNA sense strand
gaagguacgugcaguugac

SEQ ID NO: 674821 - RNA, 19 nt, Homo sapiens
  misc_RNA (1)...(19): siRNA sense strand
agaccgagcugguggaugu

SEQ ID NO: 674822 - RNA, 19 nt, Homo sapiens
  misc_RNA (1)...(19): siRNA sense strand
cgacaacccuccgguguuc

SEQ ID NO: 674823 - RNA, 19 nt, Homo sapiens
  misc_RNA (1)...(19): siRNA sense strand
gaaauuaccagaaaacguu

SEQ ID NO: 674824 - RNA, 19 nt, Homo sapiens
  misc_RNA (1)...(19): siRNA sense strand
gggcgcauguaguuuggua

SEQ ID NO: 674825 - RNA, 19 nt, Homo sapiens
  misc_RNA (1)...(19): siRNA sense strand
agaacgcgcugguguccua

SEQ ID NO: 674826 - RNA, 19 nt, Homo sapiens
  misc_RNA (1)...(19): siRNA sense strand
gacaucuacugcuguuuau

SEQ ID NO: 674827 - RNA, 19 nt, Homo sapiens
  misc_RNA (1)...(19): siRNA sense strand
ccuaugagcuggugguuac

SEQ ID NO: 674828 - RNA, 19 nt, Homo sapiens
  misc_RNA (1)...(19): siRNA sense strand
uguccaccuucaagaauua

SEQ ID NO: 674829 - RNA, 19 nt, Homo sapiens
  misc_RNA (1)...(19): siRNA sense strand
ucacgguacuggacaacaa

SEQ ID NO: 674830 - RNA, 19 nt, Homo sapiens
  misc_RNA (1)...(19): siRNA sense strand
gguaaaaccucuuggacuu

SEQ ID NO: 674831 - RNA, 19 nt, Homo sapiens
  misc_RNA (1)...(19): siRNA sense strand
ucggaacgcuggugauuca

SEQ ID NO: 674832 - RNA, 19 nt, Homo sapiens
  misc_RNA (1)...(19): siRNA sense strand
gcuguacacuggugagauc

SEQ ID NO: 674833 - RNA, 19 nt, Homo sapiens
  misc_RNA (1)...(19): siRNA sense strand
ugauaggacauauggauuu

SEQ ID NO: 674834 - RNA, 19 nt, Homo sapiens
  misc_RNA (1)...(19): siRNA sense strand
cagguaccgucaucacauu

SEQ ID NO: 674835 - RNA, 19 nt, Homo sapiens
  misc_RNA (1)...(19): siRNA sense strand
agaagaaacuccggagcuu

SEQ ID NO: 674836 - RNA, 19 nt, Homo sapiens
  misc_RNA (1)...(19): siRNA sense strand
ggcuaaacauggcaacuuc

SEQ ID NO: 674837 - RNA, 19 nt, Homo sapiens
  misc_RNA (1)...(19): siRNA sense strand
ggauguaaaugacaaugcu

SEQ ID NO: 674838 - RNA, 19 nt, Homo sapiens
  misc_RNA (1)...(19): siRNA sense strand
gggauauuauuuacuccuu

SEQ ID NO: 674839 - RNA, 19 nt, Homo sapiens
  misc_RNA (1)...(19): siRNA sense strand
gaagaaaguagagcacaca

SEQ ID NO: 674840 - RNA, 19 nt, Homo sapiens
  misc_RNA (1)...(19): siRNA sense strand
gggaucuucuggagguaaa

SEQ ID NO: 674841 - RNA, 19 nt, Homo sapiens
  misc_RNA (1)...(19): siRNA sense strand
ggaaaggccgcugcagguu

SEQ ID NO: 674842 - RNA, 19 nt, Homo sapiens
  misc_RNA (1)...(19): siRNA sense strand
gaggccagcuccacuacuc

SEQ ID NO: 674843 - RNA, 19 nt, Homo sapiens
  misc_RNA (1)...(19): siRNA sense strand
ggaaguuguggauguaaau

SEQ ID NO: 674844 - RNA, 19 nt, Homo sapiens
  misc_RNA (1)...(19): siRNA sense strand
acggugaaauuaccagaaa

SEQ ID NO: 674845 - RNA, 19 nt, Homo sapiens
  misc_RNA (1)...(19): siRNA sense strand
agugauguuucuccagaua

SEQ ID NO: 674846 - RNA, 19 nt, Homo sapiens
  misc_RNA (1)...(19): siRNA sense strand
ucacauugauuagcguguu

SEQ ID NO: 674847 - RNA, 19 nt, Homo sapiens
  misc_RNA (1)...(19): siRNA sense strand
gcuccacaguugacucuca

SEQ ID NO: 674848 - RNA, 19 nt, Homo sapiens
  misc_RNA (1)...(19): siRNA sense strand
gaaggacauuaacgacaac

SEQ ID NO: 674849 - RNA, 19 nt, Homo sapiens
  misc_RNA (1)...(19): siRNA sense strand
gagguaaaucugcagaaug

SEQ ID NO: 674850 - RNA, 19 nt, Homo sapiens
  misc_RNA (1)...(19): siRNA sense strand
gauaggacauauggauuuu

SEQ ID NO: 674851 - RNA, 19 nt, Homo sapiens
  misc_RNA (1)...(19): siRNA sense strand
aaacuccggagcuucauuu

SEQ ID NO: 674852 - RNA, 19 nt, Homo sapiens
  misc_RNA (1)...(19): siRNA sense strand
gaaacuccggagcuucauu

SEQ ID NO: 674853 - RNA, 19 nt, Homo sapiens
  misc_RNA (1)...(19): siRNA sense strand
gagaacgcccugcucacuu

SEQ ID NO: 674854 - RNA, 19 nt, Homo sapiens
  misc_RNA (1)...(19): siRNA sense strand
cgacacgagcccuagauga

SEQ ID NO: 674855 - RNA, 19 nt, Homo sapiens
  misc_RNA (1)...(19): siRNA sense strand
gcgcauguaguuugguaaa

SEQ ID NO: 674856 - RNA, 19 nt, Homo sapiens
  misc_RNA (1)...(19): siRNA sense strand
acaaaggaaucuguucauc

SEQ ID NO: 674857 - RNA, 19 nt, Homo sapiens
  misc_RNA (1)...(19): siRNA sense strand
agguaaaucugcagaaugg

SEQ ID NO: 674858 - RNA, 19 nt, Homo sapiens
  misc_RNA (1)...(19): siRNA sense strand
cacauugauuagcguguuu

SEQ ID NO: 674859 - RNA, 19 nt, Homo sapiens
  misc_RNA (1)...(19): siRNA sense strand
gcuggucauuguacaguuc

SEQ ID NO: 674860 - RNA, 19 nt, Homo sapiens
  misc_RNA (1)...(19): siRNA sense strand
ugacuggcaccguucaauu

SEQ ID NO: 674861 - RNA, 19 nt, Homo sapiens
  misc_RNA (1)...(19): siRNA sense strand
ccgcuugacucucgguuuc

SEQ ID NO: 674862 - RNA, 19 nt, Homo sapiens
  misc_RNA (1)...(19): siRNA sense strand
gaggacgcccaaccaggua

SEQ ID NO: 674863 - RNA, 19 nt, Homo sapiens
  misc_RNA (1)...(19): siRNA sense strand
gcauguaguuugguaaagc

SEQ ID NO: 674864 - RNA, 19 nt, Homo sapiens
  misc_RNA (1)...(19): siRNA sense strand
gccgacaucuacugcuguu

SEQ ID NO: 674865 - RNA, 19 nt, Homo sapiens
  misc_RNA (1)...(19): siRNA sense strand
gagaguguguccgccuaug

SEQ ID NO: 674866 - RNA, 19 nt, Homo sapiens
  misc_RNA (1)...(19): siRNA sense strand
guguccaccuucaagaauu

SEQ ID NO: 674867 - RNA, 19 nt, Homo sapiens
  misc_RNA (1)...(19): siRNA sense strand
ugccucagauuuagacgaa

SEQ ID NO: 674868 - RNA, 19 nt, Homo sapiens
  misc_RNA (1)...(19): siRNA sense strand
cgacacaaaggaaucuguu

SEQ ID NO: 674869 - RNA, 19 nt, Homo sapiens
  misc_RNA (1)...(19): siRNA sense strand
uggaaguuguggauguaaa

SEQ ID NO: 674870 - RNA, 19 nt, Homo sapiens
  misc_RNA (1)...(19): siRNA sense strand
uguggaaguuguggaugua

SEQ ID NO: 674871 - RNA, 19 nt, Homo sapiens
  misc_RNA (1)...(19): siRNA sense strand
ccaaccagguaccgucauc

SEQ ID NO: 674872 - RNA, 19 nt, Homo sapiens
  misc_RNA (1)...(19): siRNA sense strand
gacaaugcuccacaguuga

SEQ ID NO: 674873 - RNA, 19 nt, Homo sapiens
  misc_RNA (1)...(19): siRNA sense strand
gaaguuguggauguaaaug

SEQ ID NO: 674874 - RNA, 19 nt, Homo sapiens
  misc_RNA (1)...(19): siRNA sense strand
aguauacgguguucgugaa

SEQ ID NO: 674875 - RNA, 19 nt, Homo sapiens
  misc_RNA (1)...(19): siRNA sense strand
gguccauccucuacagaca

SEQ ID NO: 674876 - RNA, 19 nt, Homo sapiens
  misc_RNA (1)...(19): siRNA sense strand
gaaagcggccaggcaccaa

SEQ ID NO: 674877 - RNA, 19 nt, Homo sapiens
  misc_RNA (1)...(19): siRNA sense strand
acacaaaggaaucuguuca

SEQ ID NO: 674878 - RNA, 19 nt, Homo sapiens
  misc_RNA (1)...(19): siRNA sense strand
ugagggcgcauguaguuug

SEQ ID NO: 674879 - RNA, 19 nt, Homo sapiens
  misc_RNA (1)...(19): siRNA sense strand
gcacgacacgagcccuaga

SEQ ID NO: 674880 - RNA, 19 nt, Homo sapiens
  misc_RNA (1)...(19): siRNA sense strand
ggagaacgcccugcucacu

SEQ ID NO: 674881 - RNA, 19 nt, Homo sapiens
  misc_RNA (1)...(19): siRNA sense strand
cccaaugccucagauuuag

SEQ ID NO: 674882 - RNA, 19 nt, Homo sapiens
  misc_RNA (1)...(19): siRNA sense strand
gacacgagcccuagaugag

SEQ ID NO: 674883 - RNA, 19 nt, Homo sapiens
  misc_RNA (1)...(19): siRNA sense strand
gcgaagguacgugcaguug

SEQ ID NO: 674884 - RNA, 19 nt, Homo sapiens
  misc_RNA (1)...(19): siRNA sense strand
gcugccacaucuucacugu

SEQ ID NO: 674885 - RNA, 19 nt, Homo sapiens
  misc_RNA (1)...(19): siRNA sense strand
ccagcaaccagcagguaaa

SEQ ID NO: 674886 - RNA, 19 nt, Homo sapiens
  misc_RNA (1)...(19): siRNA sense strand
gugauaggacauauggauu

SEQ ID NO: 674887 - RNA, 19 nt, Homo sapiens
  misc_RNA (1)...(19): siRNA sense strand
gauguuucuccagauauaa

SEQ ID NO: 674888 - RNA, 19 nt, Homo sapiens
  misc_RNA (1)...(19): siRNA sense strand
gaauggggauauuauuuac

SEQ ID NO: 674889 - RNA, 19 nt, Homo sapiens
  misc_RNA (1)...(19): siRNA sense strand
guacuggacaacaaugaca

SEQ ID NO: 674890 - RNA, 19 nt, Homo sapiens
  misc_RNA (1)...(19): siRNA sense strand
ugguggaugucaacgugua

SEQ ID NO: 674891 - RNA, 19 nt, Homo sapiens
  misc_RNA (1)...(19): siRNA sense strand
gagggcgcauguaguuugg

SEQ ID NO: 674892 - RNA, 19 nt, Homo sapiens
  misc_RNA (1)...(19): siRNA sense strand
ucugagggcgcauguaguu

SEQ ID NO: 674893 - RNA, 19 nt, Homo sapiens
  misc_RNA (1)...(19): siRNA sense strand
gacucucgguuuccacuag

SEQ ID NO: 674894 - RNA, 19 nt, Homo sapiens
  misc_RNA (1)...(19): siRNA sense strand
cgaagguacgugcaguuga

SEQ ID NO: 674895 - RNA, 19 nt, Homo sapiens
  misc_RNA (1)...(19): siRNA sense strand
gcauuuuguuugugaauuc

SEQ ID NO: 674896 - RNA, 19 nt, Homo sapiens
  misc_RNA (1)...(19): siRNA sense strand
aaaggccgcugcagguuuu

SEQ ID NO: 674897 - RNA, 19 nt, Homo sapiens
  misc_RNA (1)...(19): siRNA sense strand
aagaaacuccggagcuuca

SEQ ID NO: 674898 - RNA, 19 nt, Homo sapiens
  misc_RNA (1)...(19): siRNA sense strand
uccagucuguuggugcuua

SEQ ID NO: 674899 - RNA, 19 nt, Homo sapiens
  misc_RNA (1)...(19): siRNA sense strand
uaggacauauggauuuuga

SEQ ID NO: 674900 - RNA, 19 nt, Homo sapiens
  misc_RNA (1)...(19): siRNA sense strand
uaucggaacgcuggugauu

SEQ ID NO: 674901 - RNA, 19 nt, Homo sapiens
  misc_RNA (1)...(19): siRNA sense strand
ccuguauacggugaaauua

SEQ ID NO: 674902 - RNA, 19 nt, Homo sapiens
  misc_RNA (1)...(19): siRNA sense strand
caacguguaccugaucauc

SEQ ID NO: 674903 - RNA, 19 nt, Homo sapiens
  misc_RNA (1)...(19): siRNA sense strand
gguaccgucaucacauuga

SEQ ID NO: 674904 - RNA, 19 nt, Homo sapiens
  misc_RNA (1)...(19): siRNA sense strand
ccaccuucaagaauuacua

SEQ ID NO: 674905 - RNA, 19 nt, Homo sapiens
  misc_RNA (1)...(19): siRNA sense strand
gagcaagauuuaaauguug

SEQ ID NO: 674906 - RNA, 19 nt, Homo sapiens
  misc_RNA (1)...(19): siRNA sense strand
caaagaacgaugagaauaa

SEQ ID NO: 674907 - RNA, 19 nt, Homo sapiens
  misc_RNA (1)...(19): siRNA sense strand
gcgaagagcaagauuuaaa

SEQ ID NO: 674908 - RNA, 19 nt, Homo sapiens
  misc_RNA (1)...(19): siRNA sense strand
aggcuuagcucucaugauu

SEQ ID NO: 674909 - RNA, 19 nt, Homo sapiens
  misc_RNA (1)...(19): siRNA sense strand
ugaaggauguuaaugacaa

SEQ ID NO: 674910 - RNA, 19 nt, Homo sapiens
  misc_RNA (1)...(19): siRNA sense strand
cgaacagucugaauacgaa

SEQ ID NO: 674911 - RNA, 19 nt, Homo sapiens
  misc_RNA (1)...(19): siRNA sense strand
gacaacggaacaacaguua

SEQ ID NO: 674912 - RNA, 19 nt, Homo sapiens
  misc_RNA (1)...(19): siRNA sense strand
gaagagcaagauuuaaaug

SEQ ID NO: 674913 - RNA, 19 nt, Homo sapiens
  misc_RNA (1)...(19): siRNA sense strand
guguuaaccuacaggcuua

SEQ ID NO: 674914 - RNA, 19 nt, Homo sapiens
  misc_RNA (1)...(19): siRNA sense strand
ggugaaggaucauggugaa

SEQ ID NO: 674915 - RNA, 19 nt, Homo sapiens
  misc_RNA (1)...(19): siRNA sense strand
acgcguggcuuucguauga

SEQ ID NO: 674916 - RNA, 19 nt, Homo sapiens
  misc_RNA (1)...(19): siRNA sense strand
ugaagacgcucaauuuggu

SEQ ID NO: 674917 - RNA, 19 nt, Homo sapiens
  misc_RNA (1)...(19): siRNA sense strand
gggcaaaccugagcucaca

SEQ ID NO: 674918 - RNA, 19 nt, Homo sapiens
  misc_RNA (1)...(19): siRNA sense strand
ucaaagaacgaugagaaua

SEQ ID NO: 674919 - RNA, 19 nt, Homo sapiens
  misc_RNA (1)...(19): siRNA sense strand
gaaaauccuuggacagaga

SEQ ID NO: 674920 - RNA, 19 nt, Homo sapiens
  misc_RNA (1)...(19): siRNA sense strand
agaacgcgcugguguccua

SEQ ID NO: 674921 - RNA, 19 nt, Homo sapiens
  misc_RNA (1)...(19): siRNA sense strand
uguccaccuucaagaauua

SEQ ID NO: 674922 - RNA, 19 nt, Homo sapiens
  misc_RNA (1)...(19): siRNA sense strand
uaaacugguugagcucgua

SEQ ID NO: 674923 - RNA, 19 nt, Homo sapiens
  misc_RNA (1)...(19): siRNA sense strand
gcuuagcucucaugauuac

SEQ ID NO: 674924 - RNA, 19 nt, Homo sapiens
  misc_RNA (1)...(19): siRNA sense strand
uaacgucccugagauagca

SEQ ID NO: 674925 - RNA, 19 nt, Homo sapiens
  misc_RNA (1)...(19): siRNA sense strand
gaaauacgggagaaauagu

SEQ ID NO: 674926 - RNA, 19 nt, Homo sapiens
  misc_RNA (1)...(19): siRNA sense strand
uagcauagaucgaaauacg

SEQ ID NO: 674927 - RNA, 19 nt, Homo sapiens
  misc_RNA (1)...(19): siRNA sense strand
gaagacgcucaauuuggua

SEQ ID NO: 674928 - RNA, 19 nt, Homo sapiens
  misc_RNA (1)...(19): siRNA sense strand
ugauaaugcucccacuuuc

SEQ ID NO: 674929 - RNA, 19 nt, Homo sapiens
  misc_RNA (1)...(19): siRNA sense strand
aggcgaagagcaagauuua

SEQ ID NO: 674930 - RNA, 19 nt, Homo sapiens
  misc_RNA (1)...(19): siRNA sense strand
caaacugaaugcuucugau

SEQ ID NO: 674931 - RNA, 19 nt, Homo sapiens
  misc_RNA (1)...(19): siRNA sense strand
caacggaacaacaguuauc

SEQ ID NO: 674932 - RNA, 19 nt, Homo sapiens
  misc_RNA (1)...(19): siRNA sense strand
cggaacaacaguuaucaaa

SEQ ID NO: 674933 - RNA, 19 nt, Homo sapiens
  misc_RNA (1)...(19): siRNA sense strand
ggugaaggauguuaaugac

SEQ ID NO: 674934 - RNA, 19 nt, Homo sapiens
  misc_RNA (1)...(19): siRNA sense strand
uuaauagccuuguugaaac

SEQ ID NO: 674935 - RNA, 19 nt, Homo sapiens
  misc_RNA (1)...(19): siRNA sense strand
ucgaaauacgggagaaaua

SEQ ID NO: 674936 - RNA, 19 nt, Homo sapiens
  misc_RNA (1)...(19): siRNA sense strand
gcagucggcuggcguuuug

SEQ ID NO: 674937 - RNA, 19 nt, Homo sapiens
  misc_RNA (1)...(19): siRNA sense strand
agauagcacugacuuccuu

SEQ ID NO: 674938 - RNA, 19 nt, Homo sapiens
  misc_RNA (1)...(19): siRNA sense strand
ugauaacgucccugagaua

SEQ ID NO: 674939 - RNA, 19 nt, Homo sapiens
  misc_RNA (1)...(19): siRNA sense strand
guugagcucguauuaagaa

SEQ ID NO: 674940 - RNA, 19 nt, Homo sapiens
  misc_RNA (1)...(19): siRNA sense strand
cgaagagcaagauuuaaau

SEQ ID NO: 674941 - RNA, 19 nt, Homo sapiens
  misc_RNA (1)...(19): siRNA sense strand
gcacugacuuccuuauccu

SEQ ID NO: 674942 - RNA, 19 nt, Homo sapiens
  misc_RNA (1)...(19): siRNA sense strand
cgaaauacgggagaaauag

SEQ ID NO: 674943 - RNA, 19 nt, Homo sapiens
  misc_RNA (1)...(19): siRNA sense strand
gaaggauguuaaugacaac

SEQ ID NO: 674944 - RNA, 19 nt, Homo sapiens
  misc_RNA (1)...(19): siRNA sense strand
gaacgaugagaauaaacug

SEQ ID NO: 674945 - RNA, 19 nt, Homo sapiens
  misc_RNA (1)...(19): siRNA sense strand
ugaauucaaagaacgauga

SEQ ID NO: 674946 - RNA, 19 nt, Homo sapiens
  misc_RNA (1)...(19): siRNA sense strand
caugcuagaugugaauuca

SEQ ID NO: 674947 - RNA, 19 nt, Homo sapiens
  misc_RNA (1)...(19): siRNA sense strand
guacugucaucgcccuaau

SEQ ID NO: 674948 - RNA, 19 nt, Homo sapiens
  misc_RNA (1)...(19): siRNA sense strand
gcgggucauugcaccguuu

SEQ ID NO: 674949 - RNA, 19 nt, Homo sapiens
  misc_RNA (1)...(19): siRNA sense strand
ugcuagaugugaauucaaa

SEQ ID NO: 674950 - RNA, 19 nt, Homo sapiens
  misc_RNA (1)...(19): siRNA sense strand
gauagcacugacuuccuua

SEQ ID NO: 674951 - RNA, 19 nt, Homo sapiens
  misc_RNA (1)...(19): siRNA sense strand
ugacaacccgccaguguuc

SEQ ID NO: 674952 - RNA, 19 nt, Homo sapiens
  misc_RNA (1)...(19): siRNA sense strand
ggucauacucgcaacaaca

SEQ ID NO: 674953 - RNA, 19 nt, Homo sapiens
  misc_RNA (1)...(19): siRNA sense strand
ucaauuugguacugucauc

SEQ ID NO: 674954 - RNA, 19 nt, Homo sapiens
  misc_RNA (1)...(19): siRNA sense strand
gcagacaacggaacaacag

SEQ ID NO: 674955 - RNA, 19 nt, Homo sapiens
  misc_RNA (1)...(19): siRNA sense strand
ugguugagcucguauuaag

SEQ ID NO: 674956 - RNA, 19 nt, Homo sapiens
  misc_RNA (1)...(19): siRNA sense strand
aaagcuguuuguuucagaa

SEQ ID NO: 674957 - RNA, 19 nt, Homo sapiens
  misc_RNA (1)...(19): siRNA sense strand
gagagagugucggccuaug

SEQ ID NO: 674958 - RNA, 19 nt, Homo sapiens
  misc_RNA (1)...(19): siRNA sense strand
ggaggugaaggauguuaau

SEQ ID NO: 674959 - RNA, 19 nt, Homo sapiens
  misc_RNA (1)...(19): siRNA sense strand
guguccaccuucaagaauu

SEQ ID NO: 674960 - RNA, 19 nt, Homo sapiens
  misc_RNA (1)...(19): siRNA sense strand
acugucaucgcccuaauua

SEQ ID NO: 674961 - RNA, 19 nt, Homo sapiens
  misc_RNA (1)...(19): siRNA sense strand
gauaacgucccugagauag

SEQ ID NO: 674962 - RNA, 19 nt, Homo sapiens
  misc_RNA (1)...(19): siRNA sense strand
uaauagccuuguugaaacu

SEQ ID NO: 674963 - RNA, 19 nt, Homo sapiens
  misc_RNA (1)...(19): siRNA sense strand
cgaugagaauaaacugguu

SEQ ID NO: 674964 - RNA, 19 nt, Homo sapiens
  misc_RNA (1)...(19): siRNA sense strand
ugcuggaugugaaugauaa

SEQ ID NO: 674965 - RNA, 19 nt, Homo sapiens
  misc_RNA (1)...(19): siRNA sense strand
gaaggaucauggugaaccu

SEQ ID NO: 674966 - RNA, 19 nt, Homo sapiens
  misc_RNA (1)...(19): siRNA sense strand
gggcaauuucauauucuuu

SEQ ID NO: 674967 - RNA, 19 nt, Homo sapiens
  misc_RNA (1)...(19): siRNA sense strand
ggaacaacaguuaucaaac

SEQ ID NO: 674968 - RNA, 19 nt, Homo sapiens
  misc_RNA (1)...(19): siRNA sense strand
ggaugugaaugauaaugcu

SEQ ID NO: 674969 - RNA, 19 nt, Homo sapiens
  misc_RNA (1)...(19): siRNA sense strand
gagcucguauuaagaaaau

SEQ ID NO: 674970 - RNA, 19 nt, Homo sapiens
  misc_RNA (1)...(19): siRNA sense strand
aaugauaacgucccugaga

SEQ ID NO: 674971 - RNA, 19 nt, Homo sapiens
  misc_RNA (1)...(19): siRNA sense strand
ucaagaauuacuacucguu

SEQ ID NO: 674972 - RNA, 19 nt, Homo sapiens
  misc_RNA (1)...(19): siRNA sense strand
gugaagacgcucaauuugg

SEQ ID NO: 674973 - RNA, 19 nt, Homo sapiens
  misc_RNA (1)...(19): siRNA sense strand
ccuacaggcuuagcucuca

SEQ ID NO: 674974 - RNA, 19 nt, Homo sapiens
  misc_RNA (1)...(19): siRNA sense strand
gagugucggccuaugaguu

SEQ ID NO: 674975 - RNA, 19 nt, Homo sapiens
  misc_RNA (1)...(19): siRNA sense strand
gacaggccgcugcagguuu

SEQ ID NO: 674976 - RNA, 19 nt, Homo sapiens
  misc_RNA (1)...(19): siRNA sense strand
gaucgaaauacgggagaaa

SEQ ID NO: 674977 - RNA, 19 nt, Homo sapiens
  misc_RNA (1)...(19): siRNA sense strand
ucaaacugaaugcuucuga

SEQ ID NO: 674978 - RNA, 19 nt, Homo sapiens
  misc_RNA (1)...(19): siRNA sense strand
augcagauguuggagcuaa

SEQ ID NO: 674979 - RNA, 19 nt, Homo sapiens
  misc_RNA (1)...(19): siRNA sense strand
acgugaagacgcucaauuu

SEQ ID NO: 674980 - RNA, 19 nt, Homo sapiens
  misc_RNA (1)...(19): siRNA sense strand
gggguaauuuggauuuuga

SEQ ID NO: 674981 - RNA, 19 nt, Homo sapiens
  misc_RNA (1)...(19): siRNA sense strand
cgugaagacgcucaauuug

SEQ ID NO: 674982 - RNA, 19 nt, Homo sapiens
  misc_RNA (1)...(19): siRNA sense strand
gcugggauccuggcgacua

SEQ ID NO: 674983 - RNA, 19 nt, Homo sapiens
  misc_RNA (1)...(19): siRNA sense strand
ccgccaguguuccggguaa

SEQ ID NO: 674984 - RNA, 19 nt, Homo sapiens
  misc_RNA (1)...(19): siRNA sense strand
ugguggaugucaacgugua

SEQ ID NO: 674985 - RNA, 19 nt, Homo sapiens
  misc_RNA (1)...(19): siRNA sense strand
gccuaugaguuggugguaa

SEQ ID NO: 674986 - RNA, 19 nt, Homo sapiens
  misc_RNA (1)...(19): siRNA sense strand
gugcuggaugugaaugaua

SEQ ID NO: 674987 - RNA, 19 nt, Homo sapiens
  misc_RNA (1)...(19): siRNA sense strand
gcauuuuguuugugaauuc

SEQ ID NO: 674988 - RNA, 19 nt, Homo sapiens
  misc_RNA (1)...(19): siRNA sense strand
agacaacggaacaacaguu

SEQ ID NO: 674989 - RNA, 19 nt, Homo sapiens
  misc_RNA (1)...(19): siRNA sense strand
ugauguaggcgaagagcaa

SEQ ID NO: 674990 - RNA, 19 nt, Homo sapiens
  misc_RNA (1)...(19): siRNA sense strand
guuaucaaacugaaugcuu

SEQ ID NO: 674991 - RNA, 19 nt, Homo sapiens
  misc_RNA (1)...(19): siRNA sense strand
ggcuuagcucucaugauua

SEQ ID NO: 674992 - RNA, 19 nt, Homo sapiens
  misc_RNA (1)...(19): siRNA sense strand
caacguguaccugaucauc

SEQ ID NO: 674993 - RNA, 19 nt, Homo sapiens
  misc_RNA (1)...(19): siRNA sense strand
ccuaugaguuggugguaac

SEQ ID NO: 674994 - RNA, 19 nt, Homo sapiens
  misc_RNA (1)...(19): siRNA sense strand
aaacugaaugcuucugauc

SEQ ID NO: 674995 - RNA, 19 nt, Homo sapiens
  misc_RNA (1)...(19): siRNA sense strand
augauaaugcucccacuuu

SEQ ID NO: 674996 - RNA, 19 nt, Homo sapiens
  misc_RNA (1)...(19): siRNA sense strand
uagcucucaugauuacuuc

SEQ ID NO: 674997 - RNA, 19 nt, Homo sapiens
  misc_RNA (1)...(19): siRNA sense strand
ggacguggaggugaaggau

SEQ ID NO: 674998 - RNA, 19 nt, Homo sapiens
  misc_RNA (1)...(19): siRNA sense strand
agagagugucggccuauga

SEQ ID NO: 674999 - RNA, 19 nt, Homo sapiens
  misc_RNA (1)...(19): siRNA sense strand
guugaaacuaugguuauug

SEQ ID NO: 675000 - RNA, 19 nt, Homo sapiens
  misc_RNA (1)...(19): siRNA sense strand
aaacgcagacaacggaaca

SEQ ID NO: 675001 - RNA, 19 nt, Homo sapiens
  misc_RNA (1)...(19): siRNA sense strand
auucaaagaacgaugagaa

SEQ ID NO: 675002 - RNA, 19 nt, Homo sapiens
  misc_RNA (1)...(19): siRNA sense strand
cuagaugugaauucaaaga

SEQ ID NO: 675003 - RNA, 19 nt, Homo sapiens
  misc_RNA (1)...(19): siRNA sense strand
ccaccuucaagaauuacua

SEQ ID NO: 675004 - RNA, 19 nt, Homo sapiens
  misc_RNA (1)...(19): siRNA sense strand
gagagugucggccuaugag

SEQ ID NO: 675005 - RNA, 19 nt, Homo sapiens
  misc_RNA (1)...(19): siRNA sense strand
gagcaagauuuaaauguug

SEQ ID NO: 675006 - RNA, 19 nt, Homo sapiens
  misc_RNA (1)...(19): siRNA sense strand
caaagaacgaugagaauaa

SEQ ID NO: 675007 - RNA, 19 nt, Homo sapiens
  misc_RNA (1)...(19): siRNA sense strand
gcgaagagcaagauuuaaa

SEQ ID NO: 675008 - RNA, 19 nt, Homo sapiens
  misc_RNA (1)...(19): siRNA sense strand
aggcuuagcucucaugauu

SEQ ID NO: 675009 - RNA, 19 nt, Homo sapiens
  misc_RNA (1)...(19): siRNA sense strand
ugaaggauguuaaugacaa

SEQ ID NO: 675010 - RNA, 19 nt, Homo sapiens
  misc_RNA (1)...(19): siRNA sense strand
cgaacagucugaauacgaa

SEQ ID NO: 675011 - RNA, 19 nt, Homo sapiens
  misc_RNA (1)...(19): siRNA sense strand
gacaacggaacaacaguua

SEQ ID NO: 675012 - RNA, 19 nt, Homo sapiens
  misc_RNA (1)...(19): siRNA sense strand
gaagagcaagauuuaaaug

SEQ ID NO: 675013 - RNA, 19 nt, Homo sapiens
  misc_RNA (1)...(19): siRNA sense strand
guguuaaccuacaggcuua

SEQ ID NO: 675014 - RNA, 19 nt, Homo sapiens
  misc_RNA (1)...(19): siRNA sense strand
ggugaaggaucauggugaa

SEQ ID NO: 675015 - RNA, 19 nt, Homo sapiens
  misc_RNA (1)...(19): siRNA sense strand
acgcguggcuuucguauga

SEQ ID NO: 675016 - RNA, 19 nt, Homo sapiens
  misc_RNA (1)...(19): siRNA sense strand
ugaagacgcucaauuuggu

SEQ ID NO: 675017 - RNA, 19 nt, Homo sapiens
  misc_RNA (1)...(19): siRNA sense strand
gggcaaaccugagcucaca

SEQ ID NO: 675018 - RNA, 19 nt, Homo sapiens
  misc_RNA (1)...(19): siRNA sense strand
ucaaagaacgaugagaaua

SEQ ID NO: 675019 - RNA, 19 nt, Homo sapiens
  misc_RNA (1)...(19): siRNA sense strand
gaaaauccuuggacagaga

SEQ ID NO: 675020 - RNA, 19 nt, Homo sapiens
  misc_RNA (1)...(19): siRNA sense strand
agaacgcgcugguguccua

SEQ ID NO: 675021 - RNA, 19 nt, Homo sapiens
  misc_RNA (1)...(19): siRNA sense strand
uguccaccuucaagaauua

SEQ ID NO: 675022 - RNA, 19 nt, Homo sapiens
  misc_RNA (1)...(19): siRNA sense strand
uaaacugguugagcucgua

SEQ ID NO: 675023 - RNA, 19 nt, Homo sapiens
  misc_RNA (1)...(19): siRNA sense strand
gcuuagcucucaugauuac

SEQ ID NO: 675024 - RNA, 19 nt, Homo sapiens
  misc_RNA (1)...(19): siRNA sense strand
uaacgucccugagauagca

SEQ ID NO: 675025 - RNA, 19 nt, Homo sapiens
  misc_RNA (1)...(19): siRNA sense strand
gaaauacgggagaaauagu

SEQ ID NO: 675026 - RNA, 19 nt, Homo sapiens
  misc_RNA (1)...(19): siRNA sense strand
uagcauagaucgaaauacg

SEQ ID NO: 675027 - RNA, 19 nt, Homo sapiens
  misc_RNA (1)...(19): siRNA sense strand
gaagacgcucaauuuggua

SEQ ID NO: 675028 - RNA, 19 nt, Homo sapiens
  misc_RNA (1)...(19): siRNA sense strand
ugauaaugcucccacuuuc

SEQ ID NO: 675029 - RNA, 19 nt, Homo sapiens
  misc_RNA (1)...(19): siRNA sense strand
aggcgaagagcaagauuua

SEQ ID NO: 675030 - RNA, 19 nt, Homo sapiens
  misc_RNA (1)...(19): siRNA sense strand
caaacugaaugcuucugau

SEQ ID NO: 675031 - RNA, 19 nt, Homo sapiens
  misc_RNA (1)...(19): siRNA sense strand
caacggaacaacaguuauc

SEQ ID NO: 675032 - RNA, 19 nt, Homo sapiens
  misc_RNA (1)...(19): siRNA sense strand
cggaacaacaguuaucaaa

SEQ ID NO: 675033 - RNA, 19 nt, Homo sapiens
  misc_RNA (1)...(19): siRNA sense strand
ggugaaggauguuaaugac

SEQ ID NO: 675034 - RNA, 19 nt, Homo sapiens
  misc_RNA (1)...(19): siRNA sense strand
uuaauagccuuguugaaac

SEQ ID NO: 675035 - RNA, 19 nt, Homo sapiens
  misc_RNA (1)...(19): siRNA sense strand
ucgaaauacgggagaaaua

SEQ ID NO: 675036 - RNA, 19 nt, Homo sapiens
  misc_RNA (1)...(19): siRNA sense strand
gcagucggcuggcguuuug

SEQ ID NO: 675037 - RNA, 19 nt, Homo sapiens
  misc_RNA (1)...(19): siRNA sense strand
agauagcacugacuuccuu

SEQ ID NO: 675038 - RNA, 19 nt, Homo sapiens
  misc_RNA (1)...(19): siRNA sense strand
ugauaacgucccugagaua

SEQ ID NO: 675039 - RNA, 19 nt, Homo sapiens
  misc_RNA (1)...(19): siRNA sense strand
guugagcucguauuaagaa

SEQ ID NO: 675040 - RNA, 19 nt, Homo sapiens
  misc_RNA (1)...(19): siRNA sense strand
cgaagagcaagauuuaaau

SEQ ID NO: 675041 - RNA, 19 nt, Homo sapiens
  misc_RNA (1)...(19): siRNA sense strand
gcacugacuuccuuauccu

SEQ ID NO: 675042 - RNA, 19 nt, Homo sapiens
  misc_RNA (1)...(19): siRNA sense strand
cgaaauacgggagaaauag

SEQ ID NO: 675043 - RNA, 19 nt, Homo sapiens
  misc_RNA (1)...(19): siRNA sense strand
gaaggauguuaaugacaac

SEQ ID NO: 675044 - RNA, 19 nt, Homo sapiens
  misc_RNA (1)...(19): siRNA sense strand
gaacgaugagaauaaacug

SEQ ID NO: 675045 - RNA, 19 nt, Homo sapiens
  misc_RNA (1)...(19): siRNA sense strand
ugaauucaaagaacgauga

SEQ ID NO: 675046 - RNA, 19 nt, Homo sapiens
  misc_RNA (1)...(19): siRNA sense strand
caugcuagaugugaauuca

SEQ ID NO: 675047 - RNA, 19 nt, Homo sapiens
  misc_RNA (1)...(19): siRNA sense strand
guacugucaucgcccuaau

SEQ ID NO: 675048 - RNA, 19 nt, Homo sapiens
  misc_RNA (1)...(19): siRNA sense strand
gcgggucauugcaccguuu

SEQ ID NO: 675049 - RNA, 19 nt, Homo sapiens
  misc_RNA (1)...(19): siRNA sense strand
ugcuagaugugaauucaaa

SEQ ID NO: 675050 - RNA, 19 nt, Homo sapiens
  misc_RNA (1)...(19): siRNA sense strand
gauagcacugacuuccuua

SEQ ID NO: 675051 - RNA, 19 nt, Homo sapiens
  misc_RNA (1)...(19): siRNA sense strand
ugacaacccgccaguguuc

SEQ ID NO: 675052 - RNA, 19 nt, Homo sapiens
  misc_RNA (1)...(19): siRNA sense strand
ggucauacucgcaacaaca

SEQ ID NO: 675053 - RNA, 19 nt, Homo sapiens
  misc_RNA (1)...(19): siRNA sense strand
ucaauuugguacugucauc

SEQ ID NO: 675054 - RNA, 19 nt, Homo sapiens
  misc_RNA (1)...(19): siRNA sense strand
gcagacaacggaacaacag

SEQ ID NO: 675055 - RNA, 19 nt, Homo sapiens
  misc_RNA (1)...(19): siRNA sense strand
ugguugagcucguauuaag

SEQ ID NO: 675056 - RNA, 19 nt, Homo sapiens
  misc_RNA (1)...(19): siRNA sense strand
aaagcuguuuguuucagaa

SEQ ID NO: 675057 - RNA, 19 nt, Homo sapiens
  misc_RNA (1)...(19): siRNA sense strand
gagagagugucggccuaug

SEQ ID NO: 675058 - RNA, 19 nt, Homo sapiens
  misc_RNA (1)...(19): siRNA sense strand
ggaggugaaggauguuaau

SEQ ID NO: 675059 - RNA, 19 nt, Homo sapiens
  misc_RNA (1)...(19): siRNA sense strand
guguccaccuucaagaauu

SEQ ID NO: 675060 - RNA, 19 nt, Homo sapiens
  misc_RNA (1)...(19): siRNA sense strand
acugucaucgcccuaauua

SEQ ID NO: 675061 - RNA, 19 nt, Homo sapiens
  misc_RNA (1)...(19): siRNA sense strand
gauaacgucccugagauag

SEQ ID NO: 675062 - RNA, 19 nt, Homo sapiens
  misc_RNA (1)...(19): siRNA sense strand
uaauagccuuguugaaacu

SEQ ID NO: 675063 - RNA, 19 nt, Homo sapiens
  misc_RNA (1)...(19): siRNA sense strand
cgaugagaauaaacugguu

SEQ ID NO: 675064 - RNA, 19 nt, Homo sapiens
  misc_RNA (1)...(19): siRNA sense strand
ugcuggaugugaaugauaa

SEQ ID NO: 675065 - RNA, 19 nt, Homo sapiens
  misc_RNA (1)...(19): siRNA sense strand
gaaggaucauggugaaccu

SEQ ID NO: 675066 - RNA, 19 nt, Homo sapiens
  misc_RNA (1)...(19): siRNA sense strand
gggcaauuucauauucuuu

SEQ ID NO: 675067 - RNA, 19 nt, Homo sapiens
  misc_RNA (1)...(19): siRNA sense strand
ggaacaacaguuaucaaac

SEQ ID NO: 675068 - RNA, 19 nt, Homo sapiens
  misc_RNA (1)...(19): siRNA sense strand
ggaugugaaugauaaugcu

SEQ ID NO: 675069 - RNA, 19 nt, Homo sapiens
  misc_RNA (1)...(19): siRNA sense strand
gagcucguauuaagaaaau

SEQ ID NO: 675070 - RNA, 19 nt, Homo sapiens
  misc_RNA (1)...(19): siRNA sense strand
aaugauaacgucccugaga

SEQ ID NO: 675071 - RNA, 19 nt, Homo sapiens
  misc_RNA (1)...(19): siRNA sense strand
ucaagaauuacuacucguu

SEQ ID NO: 675072 - RNA, 19 nt, Homo sapiens
  misc_RNA (1)...(19): siRNA sense strand
gugaagacgcucaauuugg

SEQ ID NO: 675073 - RNA, 19 nt, Homo sapiens
  misc_RNA (1)...(19): siRNA sense strand
ccuacaggcuuagcucuca

SEQ ID NO: 675074 - RNA, 19 nt, Homo sapiens
  misc_RNA (1)...(19): siRNA sense strand
gagugucggccuaugaguu

SEQ ID NO: 675075 - RNA, 19 nt, Homo sapiens
  misc_RNA (1)...(19): siRNA sense strand
gacaggccgcugcagguuu

SEQ ID NO: 675076 - RNA, 19 nt, Homo sapiens
  misc_RNA (1)...(19): siRNA sense strand
gaucgaaauacgggagaaa

SEQ ID NO: 675077 - RNA, 19 nt, Homo sapiens
  misc_RNA (1)...(19): siRNA sense strand
ucaaacugaaugcuucuga

SEQ ID NO: 675078 - RNA, 19 nt, Homo sapiens
  misc_RNA (1)...(19): siRNA sense strand
augcagauguuggagcuaa

SEQ ID NO: 675079 - RNA, 19 nt, Homo sapiens
  misc_RNA (1)...(19): siRNA sense strand
acgugaagacgcucaauuu

SEQ ID NO: 675080 - RNA, 19 nt, Homo sapiens
  misc_RNA (1)...(19): siRNA sense strand
gggguaauuuggauuuuga

SEQ ID NO: 675081 - RNA, 19 nt, Homo sapiens
  misc_RNA (1)...(19): siRNA sense strand
cgugaagacgcucaauuug

SEQ ID NO: 675082 - RNA, 19 nt, Homo sapiens
  misc_RNA (1)...(19): siRNA sense strand
gcugggauccuggcgacua

SEQ ID NO: 675083 - RNA, 19 nt, Homo sapiens
  misc_RNA (1)...(19): siRNA sense strand
ccgccaguguuccggguaa

SEQ ID NO: 675084 - RNA, 19 nt, Homo sapiens
  misc_RNA (1)...(19): siRNA sense strand
ugguggaugucaacgugua

SEQ ID NO: 675085 - RNA, 19 nt, Homo sapiens
  misc_RNA (1)...(19): siRNA sense strand
gccuaugaguuggugguaa

SEQ ID NO: 675086 - RNA, 19 nt, Homo sapiens
  misc_RNA (1)...(19): siRNA sense strand
gugcuggaugugaaugaua

SEQ ID NO: 675087 - RNA, 19 nt, Homo sapiens
  misc_RNA (1)...(19): siRNA sense strand
gcauuuuguuugugaauuc

SEQ ID NO: 675088 - RNA, 19 nt, Homo sapiens
  misc_RNA (1)...(19): siRNA sense strand
agacaacggaacaacaguu

SEQ ID NO: 675089 - RNA, 19 nt, Homo sapiens
  misc_RNA (1)...(19): siRNA sense strand
ugauguaggcgaagagcaa

SEQ ID NO: 675090 - RNA, 19 nt, Homo sapiens
  misc_RNA (1)...(19): siRNA sense strand
guuaucaaacugaaugcuu

SEQ ID NO: 675091 - RNA, 19 nt, Homo sapiens
  misc_RNA (1)...(19): siRNA sense strand
ggcuuagcucucaugauua

SEQ ID NO: 675092 - RNA, 19 nt, Homo sapiens
  misc_RNA (1)...(19): siRNA sense strand
caacguguaccugaucauc

SEQ ID NO: 675093 - RNA, 19 nt, Homo sapiens
  misc_RNA (1)...(19): siRNA sense strand
ccuaugaguuggugguaac

SEQ ID NO: 675094 - RNA, 19 nt, Homo sapiens
  misc_RNA (1)...(19): siRNA sense strand
aaacugaaugcuucugauc

SEQ ID NO: 675095 - RNA, 19 nt, Homo sapiens
  misc_RNA (1)...(19): siRNA sense strand
augauaaugcucccacuuu

SEQ ID NO: 675096 - RNA, 19 nt, Homo sapiens
  misc_RNA (1)...(19): siRNA sense strand
uagcucucaugauuacuuc

SEQ ID NO: 675097 - RNA, 19 nt, Homo sapiens
  misc_RNA (1)...(19): siRNA sense strand
ggacguggaggugaaggau

SEQ ID NO: 675098 - RNA, 19 nt, Homo sapiens
  misc_RNA (1)...(19): siRNA sense strand
agagagugucggccuauga

SEQ ID NO: 675099 - RNA, 19 nt, Homo sapiens
  misc_RNA (1)...(19): siRNA sense strand
guugaaacuaugguuauug

SEQ ID NO: 675100 - RNA, 19 nt, Homo sapiens
  misc_RNA (1)...(19): siRNA sense strand
aaacgcagacaacggaaca

SEQ ID NO: 675101 - RNA, 19 nt, Homo sapiens
  misc_RNA (1)...(19): siRNA sense strand
auucaaagaacgaugagaa

SEQ ID NO: 675102 - RNA, 19 nt, Homo sapiens
  misc_RNA (1)...(19): siRNA sense strand
cuagaugugaauucaaaga

SEQ ID NO: 675103 - RNA, 19 nt, Homo sapiens
  misc_RNA (1)...(19): siRNA sense strand
ccaccuucaagaauuacua

SEQ ID NO: 675104 - RNA, 19 nt, Homo sapiens
  misc_RNA (1)...(19): siRNA sense strand
gagagugucggccuaugag

SEQ ID NO: 675105 - RNA, 19 nt, Homo sapiens
  misc_RNA (1)...(19): siRNA sense strand
gaaaguagagcacacaaga

SEQ ID NO: 675106 - RNA, 19 nt, Homo sapiens
  misc_RNA (1)...(19): siRNA sense strand
ugacaaugcuccacaguug

SEQ ID NO: 675107 - RNA, 19 nt, Homo sapiens
  misc_RNA (1)...(19): siRNA sense strand
cgacaacccuccaguguuc

SEQ ID NO: 675108 - RNA, 19 nt, Homo sapiens
  misc_RNA (1)...(19): siRNA sense strand
agaacgcccugcucacuua

SEQ ID NO: 675109 - RNA, 19 nt, Homo sapiens
  misc_RNA (1)...(19): siRNA sense strand
cuacugcucucgcuucuga

SEQ ID NO: 675110 - RNA, 19 nt, Homo sapiens
  misc_RNA (1)...(19): siRNA sense strand
ugaaggacauuaacgacaa

SEQ ID NO: 675111 - RNA, 19 nt, Homo sapiens
  misc_RNA (1)...(19): siRNA sense strand
ggagguaaaucugcagaau

SEQ ID NO: 675112 - RNA, 19 nt, Homo sapiens
  misc_RNA (1)...(19): siRNA sense strand
ggacuuguauuacggaaac

SEQ ID NO: 675113 - RNA, 19 nt, Homo sapiens
  misc_RNA (1)...(19): siRNA sense strand
gcagaagaccgaccucaug

SEQ ID NO: 675114 - RNA, 19 nt, Homo sapiens
  misc_RNA (1)...(19): siRNA sense strand
cuccggagcuucauuuauu

SEQ ID NO: 675115 - RNA, 19 nt, Homo sapiens
  misc_RNA (1)...(19): siRNA sense strand
ugauguuucuccagauaua

SEQ ID NO: 675116 - RNA, 19 nt, Homo sapiens
  misc_RNA (1)...(19): siRNA sense strand
gacuggcaccguucaauua

SEQ ID NO: 675117 - RNA, 19 nt, Homo sapiens
  misc_RNA (1)...(19): siRNA sense strand
gaaauuaccagaaaacguu

SEQ ID NO: 675118 - RNA, 19 nt, Homo sapiens
  misc_RNA (1)...(19): siRNA sense strand
ggacaguuauugcccugau

SEQ ID NO: 675119 - RNA, 19 nt, Homo sapiens
  misc_RNA (1)...(19): siRNA sense strand
gguaaaaccucuuggacuu

SEQ ID NO: 675120 - RNA, 19 nt, Homo sapiens
  misc_RNA (1)...(19): siRNA sense strand
gcuccacaguugacuauca

SEQ ID NO: 675121 - RNA, 19 nt, Homo sapiens
  misc_RNA (1)...(19): siRNA sense strand
ucacgguacuggacaacaa

SEQ ID NO: 675122 - RNA, 19 nt, Homo sapiens
  misc_RNA (1)...(19): siRNA sense strand
ucggaacgcuggugauuca

SEQ ID NO: 675123 - RNA, 19 nt, Homo sapiens
  misc_RNA (1)...(19): siRNA sense strand
ugauaggacauauggauuu

SEQ ID NO: 675124 - RNA, 19 nt, Homo sapiens
  misc_RNA (1)...(19): siRNA sense strand
ccaccuacaagaauuacua

SEQ ID NO: 675125 - RNA, 19 nt, Homo sapiens
  misc_RNA (1)...(19): siRNA sense strand
agaagaaacuccggagcuu

SEQ ID NO: 675126 - RNA, 19 nt, Homo sapiens
  misc_RNA (1)...(19): siRNA sense strand
ggauguaaaugacaaugcu

SEQ ID NO: 675127 - RNA, 19 nt, Homo sapiens
  misc_RNA (1)...(19): siRNA sense strand
gggauauuauuuacuccuu

SEQ ID NO: 675128 - RNA, 19 nt, Homo sapiens
  misc_RNA (1)...(19): siRNA sense strand
gaagaaaguagagcacaca

SEQ ID NO: 675129 - RNA, 19 nt, Homo sapiens
  misc_RNA (1)...(19): siRNA sense strand
agaacgcccugguguccua

SEQ ID NO: 675130 - RNA, 19 nt, Homo sapiens
  misc_RNA (1)...(19): siRNA sense strand
acggugaaauuaccagaaa

SEQ ID NO: 675131 - RNA, 19 nt, Homo sapiens
  misc_RNA (1)...(19): siRNA sense strand
ggaaguuguggauguaaau

SEQ ID NO: 675132 - RNA, 19 nt, Homo sapiens
  misc_RNA (1)...(19): siRNA sense strand
agugauguuucuccagaua

SEQ ID NO: 675133 - RNA, 19 nt, Homo sapiens
  misc_RNA (1)...(19): siRNA sense strand
acaguuauugcccugauua

SEQ ID NO: 675134 - RNA, 19 nt, Homo sapiens
  misc_RNA (1)...(19): siRNA sense strand
gacaguuauugcccugauu

SEQ ID NO: 675135 - RNA, 19 nt, Homo sapiens
  misc_RNA (1)...(19): siRNA sense strand
gaaggacauuaacgacaac

SEQ ID NO: 675136 - RNA, 19 nt, Homo sapiens
  misc_RNA (1)...(19): siRNA sense strand
gauaggacauauggauuuu

SEQ ID NO: 675137 - RNA, 19 nt, Homo sapiens
  misc_RNA (1)...(19): siRNA sense strand
gagguaaaucugcagaaug

SEQ ID NO: 675138 - RNA, 19 nt, Homo sapiens
  misc_RNA (1)...(19): siRNA sense strand
aaacuccggagcuucauuu

SEQ ID NO: 675139 - RNA, 19 nt, Homo sapiens
  misc_RNA (1)...(19): siRNA sense strand
gaaacuccggagcuucauu

SEQ ID NO: 675140 - RNA, 19 nt, Homo sapiens
  misc_RNA (1)...(19): siRNA sense strand
gagaacgcccugcucacuu

SEQ ID NO: 675141 - RNA, 19 nt, Homo sapiens
  misc_RNA (1)...(19): siRNA sense strand
guuauugcccugauuagug

SEQ ID NO: 675142 - RNA, 19 nt, Homo sapiens
  misc_RNA (1)...(19): siRNA sense strand
ccgcuugacucucgguuuc

SEQ ID NO: 675143 - RNA, 19 nt, Homo sapiens
  misc_RNA (1)...(19): siRNA sense strand
acgcguggcuuucauacga

SEQ ID NO: 675144 - RNA, 19 nt, Homo sapiens
  misc_RNA (1)...(19): siRNA sense strand
agguaaaucugcagaaugg

SEQ ID NO: 675145 - RNA, 19 nt, Homo sapiens
  misc_RNA (1)...(19): siRNA sense strand
gcuggucauuguacacuuc

SEQ ID NO: 675146 - RNA, 19 nt, Homo sapiens
  misc_RNA (1)...(19): siRNA sense strand
ugacuggcaccguucaauu

SEQ ID NO: 675147 - RNA, 19 nt, Homo sapiens
  misc_RNA (1)...(19): siRNA sense strand
ccuacgagcuggugguuac

SEQ ID NO: 675148 - RNA, 19 nt, Homo sapiens
  misc_RNA (1)...(19): siRNA sense strand
ugccucagauuuagacgaa

SEQ ID NO: 675149 - RNA, 19 nt, Homo sapiens
  misc_RNA (1)...(19): siRNA sense strand
uuauugcccugauuagugu

SEQ ID NO: 675150 - RNA, 19 nt, Homo sapiens
  misc_RNA (1)...(19): siRNA sense strand
uggaaguuguggauguaaa

SEQ ID NO: 675151 - RNA, 19 nt, Homo sapiens
  misc_RNA (1)...(19): siRNA sense strand
uguggaaguuguggaugua

SEQ ID NO: 675152 - RNA, 19 nt, Homo sapiens
  misc_RNA (1)...(19): siRNA sense strand
gacaaugcuccacaguuga

SEQ ID NO: 675153 - RNA, 19 nt, Homo sapiens
  misc_RNA (1)...(19): siRNA sense strand
gaaguuguggauguaaaug

SEQ ID NO: 675154 - RNA, 19 nt, Homo sapiens
  misc_RNA (1)...(19): siRNA sense strand
ggucauuguacacuucuug

SEQ ID NO: 675155 - RNA, 19 nt, Homo sapiens
  misc_RNA (1)...(19): siRNA sense strand
ggagaacgcccugcucacu

SEQ ID NO: 675156 - RNA, 19 nt, Homo sapiens
  misc_RNA (1)...(19): siRNA sense strand
gacaggccgcugcagguuu

SEQ ID NO: 675157 - RNA, 19 nt, Homo sapiens
  misc_RNA (1)...(19): siRNA sense strand
cccaaugccucagauuuag

SEQ ID NO: 675158 - RNA, 19 nt, Homo sapiens
  misc_RNA (1)...(19): siRNA sense strand
ggagaacccucugcuuccu

SEQ ID NO: 675159 - RNA, 19 nt, Homo sapiens
  misc_RNA (1)...(19): siRNA sense strand
ccagcaaccagcagguaaa

SEQ ID NO: 675160 - RNA, 19 nt, Homo sapiens
  misc_RNA (1)...(19): siRNA sense strand
gugauaggacauauggauu

SEQ ID NO: 675161 - RNA, 19 nt, Homo sapiens
  misc_RNA (1)...(19): siRNA sense strand
gauguuucuccagauauaa

SEQ ID NO: 675162 - RNA, 19 nt, Homo sapiens
  misc_RNA (1)...(19): siRNA sense strand
gaauggggauauuauuuac

SEQ ID NO: 675163 - RNA, 19 nt, Homo sapiens
  misc_RNA (1)...(19): siRNA sense strand
guacuggacaacaaugaca

SEQ ID NO: 675164 - RNA, 19 nt, Homo sapiens
  misc_RNA (1)...(19): siRNA sense strand
cuacaacgcguggcuuuca

SEQ ID NO: 675165 - RNA, 19 nt, Homo sapiens
  misc_RNA (1)...(19): siRNA sense strand
ugguggaugucaacgugua

SEQ ID NO: 675166 - RNA, 19 nt, Homo sapiens
  misc_RNA (1)...(19): siRNA sense strand
gacucucgguuuccacuag

SEQ ID NO: 675167 - RNA, 19 nt, Homo sapiens
  misc_RNA (1)...(19): siRNA sense strand
agccgacgcugguguguuc

SEQ ID NO: 675168 - RNA, 19 nt, Homo sapiens
  misc_RNA (1)...(19): siRNA sense strand
uacuggugcuggugaaaga

SEQ ID NO: 675169 - RNA, 19 nt, Homo sapiens
  misc_RNA (1)...(19): siRNA sense strand
gcucucgguuccuguaaaa

SEQ ID NO: 675170 - RNA, 19 nt, Homo sapiens
  misc_RNA (1)...(19): siRNA sense strand
gcauuuuguuugugaauuc

SEQ ID NO: 675171 - RNA, 19 nt, Homo sapiens
  misc_RNA (1)...(19): siRNA sense strand
aagaaacuccggagcuuca

SEQ ID NO: 675172 - RNA, 19 nt, Homo sapiens
  misc_RNA (1)...(19): siRNA sense strand
acaagaauuacuacucguu

SEQ ID NO: 675173 - RNA, 19 nt, Homo sapiens
  misc_RNA (1)...(19): siRNA sense strand
auacucaagucgaggagau

SEQ ID NO: 675174 - RNA, 19 nt, Homo sapiens
  misc_RNA (1)...(19): siRNA sense strand
uaggacauauggauuuuga

SEQ ID NO: 675175 - RNA, 19 nt, Homo sapiens
  misc_RNA (1)...(19): siRNA sense strand
uaucggaacgcuggugauu

SEQ ID NO: 675176 - RNA, 19 nt, Homo sapiens
  misc_RNA (1)...(19): siRNA sense strand
ccuguauacggugaaauua

SEQ ID NO: 675177 - RNA, 19 nt, Homo sapiens
  misc_RNA (1)...(19): siRNA sense strand
caacguguaccugaucauc

SEQ ID NO: 675178 - RNA, 19 nt, Homo sapiens
  misc_RNA (1)...(19): siRNA sense strand
guguccaccuacaagaauu

SEQ ID NO: 675179 - RNA, 19 nt, Homo sapiens
  misc_RNA (1)...(19): siRNA sense strand
uuagugugaucgaccuaga

SEQ ID NO: 675180 - RNA, 19 nt, Homo sapiens
  misc_RNA (1)...(19): siRNA sense strand
acaacgcguggcuuucaua

SEQ ID NO: 675181 - RNA, 19 nt, Homo sapiens
  misc_RNA (1)...(19): siRNA sense strand
ugucuagccuguugguucu

SEQ ID NO: 675182 - RNA, 19 nt, Homo sapiens
  misc_RNA (1)...(19): siRNA sense strand
gcgcguccgaugcagauau

SEQ ID NO: 675183 - RNA, 19 nt, Homo sapiens
  misc_RNA (1)...(19): siRNA sense strand
ccaaugccucagauuuaga

SEQ ID NO: 675184 - RNA, 19 nt, Homo sapiens
  misc_RNA (1)...(19): siRNA sense strand
aaguagagcacacaagauc

SEQ ID NO: 675185 - RNA, 19 nt, Homo sapiens
  misc_RNA (1)...(19): siRNA sense strand
uccggagcuucauuuauug

SEQ ID NO: 675186 - RNA, 19 nt, Homo sapiens
  misc_RNA (1)...(19): siRNA sense strand
cgacgcugguguguucuag

SEQ ID NO: 675187 - RNA, 19 nt, Homo sapiens
  misc_RNA (1)...(19): siRNA sense strand
cugcugacaccucggauga

SEQ ID NO: 675188 - RNA, 19 nt, Homo sapiens
  misc_RNA (1)...(19): siRNA sense strand
uguccaccuacaagaauua

SEQ ID NO: 675189 - RNA, 19 nt, Homo sapiens
  misc_RNA (1)...(19): siRNA sense strand
gaaaguagagcacacaaga

SEQ ID NO: 675190 - RNA, 19 nt, Homo sapiens
  misc_RNA (1)...(19): siRNA sense strand
ugacaaugcuccacaguug

SEQ ID NO: 675191 - RNA, 19 nt, Homo sapiens
  misc_RNA (1)...(19): siRNA sense strand
cgacaacccuccaguguuc

SEQ ID NO: 675192 - RNA, 19 nt, Homo sapiens
  misc_RNA (1)...(19): siRNA sense strand
agaacgcccugcucacuua

SEQ ID NO: 675193 - RNA, 19 nt, Homo sapiens
  misc_RNA (1)...(19): siRNA sense strand
cuacugcucucgcuucuga

SEQ ID NO: 675194 - RNA, 19 nt, Homo sapiens
  misc_RNA (1)...(19): siRNA sense strand
ugaaggacauuaacgacaa

SEQ ID NO: 675195 - RNA, 19 nt, Homo sapiens
  misc_RNA (1)...(19): siRNA sense strand
ggagguaaaucugcagaau

SEQ ID NO: 675196 - RNA, 19 nt, Homo sapiens
  misc_RNA (1)...(19): siRNA sense strand
ggacuuguauuacggaaac

SEQ ID NO: 675197 - RNA, 19 nt, Homo sapiens
  misc_RNA (1)...(19): siRNA sense strand
gcagaagaccgaccucaug

SEQ ID NO: 675198 - RNA, 19 nt, Homo sapiens
  misc_RNA (1)...(19): siRNA sense strand
cuccggagcuucauuuauu

SEQ ID NO: 675199 - RNA, 19 nt, Homo sapiens
  misc_RNA (1)...(19): siRNA sense strand
ugauguuucuccagauaua

SEQ ID NO: 675200 - RNA, 19 nt, Homo sapiens
  misc_RNA (1)...(19): siRNA sense strand
gacuggcaccguucaauua

SEQ ID NO: 675201 - RNA, 19 nt, Homo sapiens
  misc_RNA (1)...(19): siRNA sense strand
gaaauuaccagaaaacguu

SEQ ID NO: 675202 - RNA, 19 nt, Homo sapiens
  misc_RNA (1)...(19): siRNA sense strand
ggacaguuauugcccugau

SEQ ID NO: 675203 - RNA, 19 nt, Homo sapiens
  misc_RNA (1)...(19): siRNA sense strand
gguaaaaccucuuggacuu

SEQ ID NO: 675204 - RNA, 19 nt, Homo sapiens
  misc_RNA (1)...(19): siRNA sense strand
gcuccacaguugacuauca

SEQ ID NO: 675205 - RNA, 19 nt, Homo sapiens
  misc_RNA (1)...(19): siRNA sense strand
ucacgguacuggacaacaa

SEQ ID NO: 675206 - RNA, 19 nt, Homo sapiens
  misc_RNA (1)...(19): siRNA sense strand
ucggaacgcuggugauuca

SEQ ID NO: 675207 - RNA, 19 nt, Homo sapiens
  misc_RNA (1)...(19): siRNA sense strand
ugauaggacauauggauuu

SEQ ID NO: 675208 - RNA, 19 nt, Homo sapiens
  misc_RNA (1)...(19): siRNA sense strand
ccaccuacaagaauuacua

SEQ ID NO: 675209 - RNA, 19 nt, Homo sapiens
  misc_RNA (1)...(19): siRNA sense strand
agaagaaacuccggagcuu

SEQ ID NO: 675210 - RNA, 19 nt, Homo sapiens
  misc_RNA (1)...(19): siRNA sense strand
ggauguaaaugacaaugcu

SEQ ID NO: 675211 - RNA, 19 nt, Homo sapiens
  misc_RNA (1)...(19): siRNA sense strand
gggauauuauuuacuccuu

SEQ ID NO: 675212 - RNA, 19 nt, Homo sapiens
  misc_RNA (1)...(19): siRNA sense strand
gaagaaaguagagcacaca

SEQ ID NO: 675213 - RNA, 19 nt, Homo sapiens
  misc_RNA (1)...(19): siRNA sense strand
agaacgcccugguguccua

SEQ ID NO: 675214 - RNA, 19 nt, Homo sapiens
  misc_RNA (1)...(19): siRNA sense strand
acggugaaauuaccagaaa

SEQ ID NO: 675215 - RNA, 19 nt, Homo sapiens
  misc_RNA (1)...(19): siRNA sense strand
ggaaguuguggauguaaau

SEQ ID NO: 675216 - RNA, 19 nt, Homo sapiens
  misc_RNA (1)...(19): siRNA sense strand
agugauguuucuccagaua

SEQ ID NO: 675217 - RNA, 19 nt, Homo sapiens
  misc_RNA (1)...(19): siRNA sense strand
acaguuauugcccugauua

SEQ ID NO: 675218 - RNA, 19 nt, Homo sapiens
  misc_RNA (1)...(19): siRNA sense strand
gacaguuauugcccugauu

SEQ ID NO: 675219 - RNA, 19 nt, Homo sapiens
  misc_RNA (1)...(19): siRNA sense strand
gaaggacauuaacgacaac

SEQ ID NO: 675220 - RNA, 19 nt, Homo sapiens
  misc_RNA (1)...(19): siRNA sense strand
gauaggacauauggauuuu

SEQ ID NO: 675221 - RNA, 19 nt, Homo sapiens
  misc_RNA (1)...(19): siRNA sense strand
gagguaaaucugcagaaug

SEQ ID NO: 675222 - RNA, 19 nt, Homo sapiens
  misc_RNA (1)...(19): siRNA sense strand
aaacuccggagcuucauuu

SEQ ID NO: 675223 - RNA, 19 nt, Homo sapiens
  misc_RNA (1)...(19): siRNA sense strand
gaaacuccggagcuucauu

SEQ ID NO: 675224 - RNA, 19 nt, Homo sapiens
  misc_RNA (1)...(19): siRNA sense strand
gagaacgcccugcucacuu

SEQ ID NO: 675225 - RNA, 19 nt, Homo sapiens
  misc_RNA (1)...(19): siRNA sense strand
guuauugcccugauuagug

SEQ ID NO: 675226 - RNA, 19 nt, Homo sapiens
  misc_RNA (1)...(19): siRNA sense strand
ccgcuugacucucgguuuc

SEQ ID NO: 675227 - RNA, 19 nt, Homo sapiens
  misc_RNA (1)...(19): siRNA sense strand
acgcguggcuuucauacga

SEQ ID NO: 675228 - RNA, 19 nt, Homo sapiens
  misc_RNA (1)...(19): siRNA sense strand
agguaaaucugcagaaugg

SEQ ID NO: 675229 - RNA, 19 nt, Homo sapiens
  misc_RNA (1)...(19): siRNA sense strand
gcuggucauuguacacuuc

SEQ ID NO: 675230 - RNA, 19 nt, Homo sapiens
  misc_RNA (1)...(19): siRNA sense strand
ugacuggcaccguucaauu

SEQ ID NO: 675231 - RNA, 19 nt, Homo sapiens
  misc_RNA (1)...(19): siRNA sense strand
ccuacgagcuggugguuac

SEQ ID NO: 675232 - RNA, 19 nt, Homo sapiens
  misc_RNA (1)...(19): siRNA sense strand
ugccucagauuuagacgaa

SEQ ID NO: 675233 - RNA, 19 nt, Homo sapiens
  misc_RNA (1)...(19): siRNA sense strand
uuauugcccugauuagugu

SEQ ID NO: 675234 - RNA, 19 nt, Homo sapiens
  misc_RNA (1)...(19): siRNA sense strand
uggaaguuguggauguaaa

SEQ ID NO: 675235 - RNA, 19 nt, Homo sapiens
  misc_RNA (1)...(19): siRNA sense strand
uguggaaguuguggaugua

SEQ ID NO: 675236 - RNA, 19 nt, Homo sapiens
  misc_RNA (1)...(19): siRNA sense strand
gacaaugcuccacaguuga

SEQ ID NO: 675237 - RNA, 19 nt, Homo sapiens
  misc_RNA (1)...(19): siRNA sense strand
gaaguuguggauguaaaug

SEQ ID NO: 675238 - RNA, 19 nt, Homo sapiens
  misc_RNA (1)...(19): siRNA sense strand
ggucauuguacacuucuug

SEQ ID NO: 675239 - RNA, 19 nt, Homo sapiens
  misc_RNA (1)...(19): siRNA sense strand
ggagaacgcccugcucacu

SEQ ID NO: 675240 - RNA, 19 nt, Homo sapiens
  misc_RNA (1)...(19): siRNA sense strand
gacaggccgcugcagguuu

SEQ ID NO: 675241 - RNA, 19 nt, Homo sapiens
  misc_RNA (1)...(19): siRNA sense strand
cccaaugccucagauuuag

SEQ ID NO: 675242 - RNA, 19 nt, Homo sapiens
  misc_RNA (1)...(19): siRNA sense strand
ggagaacccucugcuuccu

SEQ ID NO: 675243 - RNA, 19 nt, Homo sapiens
  misc_RNA (1)...(19): siRNA sense strand
ccagcaaccagcagguaaa

SEQ ID NO: 675244 - RNA, 19 nt, Homo sapiens
  misc_RNA (1)...(19): siRNA sense strand
gugauaggacauauggauu

SEQ ID NO: 675245 - RNA, 19 nt, Homo sapiens
  misc_RNA (1)...(19): siRNA sense strand
gauguuucuccagauauaa

SEQ ID NO: 675246 - RNA, 19 nt, Homo sapiens
  misc_RNA (1)...(19): siRNA sense strand
gaauggggauauuauuuac

SEQ ID NO: 675247 - RNA, 19 nt, Homo sapiens
  misc_RNA (1)...(19): siRNA sense strand
guacuggacaacaaugaca

SEQ ID NO: 675248 - RNA, 19 nt, Homo sapiens
  misc_RNA (1)...(19): siRNA sense strand
cuacaacgcguggcuuuca

SEQ ID NO: 675249 - RNA, 19 nt, Homo sapiens
  misc_RNA (1)...(19): siRNA sense strand
ugguggaugucaacgugua

SEQ ID NO: 675250 - RNA, 19 nt, Homo sapiens
  misc_RNA (1)...(19): siRNA sense strand
gacucucgguuuccacuag

SEQ ID NO: 675251 - RNA, 19 nt, Homo sapiens
  misc_RNA (1)...(19): siRNA sense strand
agccgacgcugguguguuc

SEQ ID NO: 675252 - RNA, 19 nt, Homo sapiens
  misc_RNA (1)...(19): siRNA sense strand
uacuggugcuggugaaaga

SEQ ID NO: 675253 - RNA, 19 nt, Homo sapiens
  misc_RNA (1)...(19): siRNA sense strand
gcucucgguuccuguaaaa

SEQ ID NO: 675254 - RNA, 19 nt, Homo sapiens
  misc_RNA (1)...(19): siRNA sense strand
gcauuuuguuugugaauuc

SEQ ID NO: 675255 - RNA, 19 nt, Homo sapiens
  misc_RNA (1)...(19): siRNA sense strand
aagaaacuccggagcuuca

SEQ ID NO: 675256 - RNA, 19 nt, Homo sapiens
  misc_RNA (1)...(19): siRNA sense strand
acaagaauuacuacucguu

SEQ ID NO: 675257 - RNA, 19 nt, Homo sapiens
  misc_RNA (1)...(19): siRNA sense strand
auacucaagucgaggagau

SEQ ID NO: 675258 - RNA, 19 nt, Homo sapiens
  misc_RNA (1)...(19): siRNA sense strand
uaggacauauggauuuuga

SEQ ID NO: 675259 - RNA, 19 nt, Homo sapiens
  misc_RNA (1)...(19): siRNA sense strand
uaucggaacgcuggugauu

SEQ ID NO: 675260 - RNA, 19 nt, Homo sapiens
  misc_RNA (1)...(19): siRNA sense strand
ccuguauacggugaaauua

SEQ ID NO: 675261 - RNA, 19 nt, Homo sapiens
  misc_RNA (1)...(19): siRNA sense strand
caacguguaccugaucauc

SEQ ID NO: 675262 - RNA, 19 nt, Homo sapiens
  misc_RNA (1)...(19): siRNA sense strand
guguccaccuacaagaauu

SEQ ID NO: 675263 - RNA, 19 nt, Homo sapiens
  misc_RNA (1)...(19): siRNA sense strand
uuagugugaucgaccuaga

SEQ ID NO: 675264 - RNA, 19 nt, Homo sapiens
  misc_RNA (1)...(19): siRNA sense strand
acaacgcguggcuuucaua

SEQ ID NO: 675265 - RNA, 19 nt, Homo sapiens
  misc_RNA (1)...(19): siRNA sense strand
ugucuagccuguugguucu

SEQ ID NO: 675266 - RNA, 19 nt, Homo sapiens
  misc_RNA (1)...(19): siRNA sense strand
gcgcguccgaugcagauau

SEQ ID NO: 675267 - RNA, 19 nt, Homo sapiens
  misc_RNA (1)...(19): siRNA sense strand
ccaaugccucagauuuaga

SEQ ID NO: 675268 - RNA, 19 nt, Homo sapiens
  misc_RNA (1)...(19): siRNA sense strand
aaguagagcacacaagauc

SEQ ID NO: 675269 - RNA, 19 nt, Homo sapiens
  misc_RNA (1)...(19): siRNA sense strand
uccggagcuucauuuauug

SEQ ID NO: 675270 - RNA, 19 nt, Homo sapiens
  misc_RNA (1)...(19): siRNA sense strand
cgacgcugguguguucuag

SEQ ID NO: 675271 - RNA, 19 nt, Homo sapiens
  misc_RNA (1)...(19): siRNA sense strand
cugcugacaccucggauga

SEQ ID NO: 675272 - RNA, 19 nt, Homo sapiens
  misc_RNA (1)...(19): siRNA sense strand
uguccaccuacaagaauua

SEQ ID NO: 675273 - RNA, 19 nt, Homo sapiens
  misc_RNA (1)...(19): siRNA sense strand
gaaauaagcuggcagugau

SEQ ID NO: 675274 - RNA, 19 nt, Homo sapiens
  misc_RNA (1)...(19): siRNA sense strand
ucaaagaugucuccuugua

SEQ ID NO: 675275 - RNA, 19 nt, Homo sapiens
  misc_RNA (1)...(19): siRNA sense strand
gaaacuuggugagaaauaa

SEQ ID NO: 675276 - RNA, 19 nt, Homo sapiens
  misc_RNA (1)...(19): siRNA sense strand
gauagaaucugccuacaag

SEQ ID NO: 675277 - RNA, 19 nt, Homo sapiens
  misc_RNA (1)...(19): siRNA sense strand
gcagugagauucuuguagu

SEQ ID NO: 675278 - RNA, 19 nt, Homo sapiens
  misc_RNA (1)...(19): siRNA sense strand
gcaaggaacgggaaauaga

SEQ ID NO: 675279 - RNA, 19 nt, Homo sapiens
  misc_RNA (1)...(19): siRNA sense strand
aauaagggaucaucucauu

SEQ ID NO: 675280 - RNA, 19 nt, Homo sapiens
  misc_RNA (1)...(19): siRNA sense strand
guccaugggucuccaagua

SEQ ID NO: 675281 - RNA, 19 nt, Homo sapiens
  misc_RNA (1)...(19): siRNA sense strand
ccaggcagauccucaaaga

SEQ ID NO: 675282 - RNA, 19 nt, Homo sapiens
  misc_RNA (1)...(19): siRNA sense strand
caagagaguccagaugaua

SEQ ID NO: 675283 - RNA, 19 nt, Homo sapiens
  misc_RNA (1)...(19): siRNA sense strand
ggugaccucucaucuuuga

SEQ ID NO: 675284 - RNA, 19 nt, Homo sapiens
  misc_RNA (1)...(19): siRNA sense strand
gggcuuacauccugagguu

SEQ ID NO: 675285 - RNA, 19 nt, Homo sapiens
  misc_RNA (1)...(19): siRNA sense strand
ggugggacaucacaucuug

SEQ ID NO: 675286 - RNA, 19 nt, Homo sapiens
  misc_RNA (1)...(19): siRNA sense strand
uguggcagcucaaauguuu

SEQ ID NO: 675287 - RNA, 19 nt, Homo sapiens
  misc_RNA (1)...(19): siRNA sense strand
gaaauagaaaccuccaaga

SEQ ID NO: 675288 - RNA, 19 nt, Homo sapiens
  misc_RNA (1)...(19): siRNA sense strand
caaauauagucaacagugu

SEQ ID NO: 675289 - RNA, 19 nt, Homo sapiens
  misc_RNA (1)...(19): siRNA sense strand
acaucuagauucacaauga

SEQ ID NO: 675290 - RNA, 19 nt, Homo sapiens
  misc_RNA (1)...(19): siRNA sense strand
uaccagaaguggcagauga

SEQ ID NO: 675291 - RNA, 19 nt, Homo sapiens
  misc_RNA (1)...(19): siRNA sense strand
gaaucugccuacaagaaau

SEQ ID NO: 675292 - RNA, 19 nt, Homo sapiens
  misc_RNA (1)...(19): siRNA sense strand
ugaggagagugacaagaaa

SEQ ID NO: 675293 - RNA, 19 nt, Homo sapiens
  misc_RNA (1)...(19): siRNA sense strand
ccacaggccuggacugcau

SEQ ID NO: 675294 - RNA, 19 nt, Homo sapiens
  misc_RNA (1)...(19): siRNA sense strand
ccaugggucuccaaguaaa

SEQ ID NO: 675295 - RNA, 19 nt, Homo sapiens
  misc_RNA (1)...(19): siRNA sense strand
caaggaacgggaaauagaa

SEQ ID NO: 675296 - RNA, 19 nt, Homo sapiens
  misc_RNA (1)...(19): siRNA sense strand
ggugcaacaucuagauuca

SEQ ID NO: 675297 - RNA, 19 nt, Homo sapiens
  misc_RNA (1)...(19): siRNA sense strand
ugacugcgguuacccuugu

SEQ ID NO: 675298 - RNA, 19 nt, Homo sapiens
  misc_RNA (1)...(19): siRNA sense strand
ccaagagaguccagaugau

SEQ ID NO: 675299 - RNA, 19 nt, Homo sapiens
  misc_RNA (1)...(19): siRNA sense strand
gaagguggaggccgucaug

SEQ ID NO: 675300 - RNA, 19 nt, Homo sapiens
  misc_RNA (1)...(19): siRNA sense strand
uaagggaucaucucauuag

SEQ ID NO: 675301 - RNA, 19 nt, Homo sapiens
  misc_RNA (1)...(19): siRNA sense strand
ugaaacaccugaaaacguu

SEQ ID NO: 675302 - RNA, 19 nt, Homo sapiens
  misc_RNA (1)...(19): siRNA sense strand
cuaaggucaugcuguuuga

SEQ ID NO: 675303 - RNA, 19 nt, Homo sapiens
  misc_RNA (1)...(19): siRNA sense strand
agaaucugaucauggguuu

SEQ ID NO: 675304 - RNA, 19 nt, Homo sapiens
  misc_RNA (1)...(19): siRNA sense strand
aauagaaaccuccaagaga

SEQ ID NO: 675305 - RNA, 19 nt, Homo sapiens
  misc_RNA (1)...(19): siRNA sense strand
gcugaacgcugugaaucug

SEQ ID NO: 675306 - RNA, 19 nt, Homo sapiens
  misc_RNA (1)...(19): siRNA sense strand
gaucaugugcauccuagga

SEQ ID NO: 675307 - RNA, 19 nt, Homo sapiens
  misc_RNA (1)...(19): siRNA sense strand
uagaaucugccuacaagaa

SEQ ID NO: 675308 - RNA, 19 nt, Homo sapiens
  misc_RNA (1)...(19): siRNA sense strand
gcgagacgcugcacuacac

SEQ ID NO: 675309 - RNA, 19 nt, Homo sapiens
  misc_RNA (1)...(19): siRNA sense strand
cacaaugaacuuucugauu

SEQ ID NO: 675310 - RNA, 19 nt, Homo sapiens
  misc_RNA (1)...(19): siRNA sense strand
caacaucuagauucacaau

SEQ ID NO: 675311 - RNA, 19 nt, Homo sapiens
  misc_RNA (1)...(19): siRNA sense strand
gacaacuaauccaaugugu

SEQ ID NO: 675312 - RNA, 19 nt, Homo sapiens
  misc_RNA (1)...(19): siRNA sense strand
ccucagaaacauacaagaa

SEQ ID NO: 675313 - RNA, 19 nt, Homo sapiens
  misc_RNA (1)...(19): siRNA sense strand
ccgcguaggucuccuuuac

SEQ ID NO: 675314 - RNA, 19 nt, Homo sapiens
  misc_RNA (1)...(19): siRNA sense strand
uuacgcgucuccuucagaa

SEQ ID NO: 675315 - RNA, 19 nt, Homo sapiens
  misc_RNA (1)...(19): siRNA sense strand
cuacaagaaaucagcaauu

SEQ ID NO: 675316 - RNA, 19 nt, Homo sapiens
  misc_RNA (1)...(19): siRNA sense strand
gcagaucaugugcauccua

SEQ ID NO: 675317 - RNA, 19 nt, Homo sapiens
  misc_RNA (1)...(19): siRNA sense strand
agaaauaagcuggcaguga

SEQ ID NO: 675318 - RNA, 19 nt, Homo sapiens
  misc_RNA (1)...(19): siRNA sense strand
ggcagauccucaaagaugu

SEQ ID NO: 675319 - RNA, 19 nt, Homo sapiens
  misc_RNA (1)...(19): siRNA sense strand
gaguccagaugauagaauc

SEQ ID NO: 675320 - RNA, 19 nt, Homo sapiens
  misc_RNA (1)...(19): siRNA sense strand
ugugacaacuaauccaaug

SEQ ID NO: 675321 - RNA, 19 nt, Homo sapiens
  misc_RNA (1)...(19): siRNA sense strand
gugaauuucuaacucuugu

SEQ ID NO: 675322 - RNA, 19 nt, Homo sapiens
  misc_RNA (1)...(19): siRNA sense strand
ucaaauguuucugugacaa

SEQ ID NO: 675323 - RNA, 19 nt, Homo sapiens
  misc_RNA (1)...(19): siRNA sense strand
gcucuugucauccuaggaa

SEQ ID NO: 675324 - RNA, 19 nt, Homo sapiens
  misc_RNA (1)...(19): siRNA sense strand
gcguaggucuccuuuacca

SEQ ID NO: 675325 - RNA, 19 nt, Homo sapiens
  misc_RNA (1)...(19): siRNA sense strand
gaacgcugugaaucuguuu

SEQ ID NO: 675326 - RNA, 19 nt, Homo sapiens
  misc_RNA (1)...(19): siRNA sense strand
guggagagcgggcagauca

SEQ ID NO: 675327 - RNA, 19 nt, Homo sapiens
  misc_RNA (1)...(19): siRNA sense strand
ugaacgcugugaaucuguu

SEQ ID NO: 675328 - RNA, 19 nt, Homo sapiens
  misc_RNA (1)...(19): siRNA sense strand
agaaucugccuacaagaaa

SEQ ID NO: 675329 - RNA, 19 nt, Homo sapiens
  misc_RNA (1)...(19): siRNA sense strand
aggcagauccucaaagaug

SEQ ID NO: 675330 - RNA, 19 nt, Homo sapiens
  misc_RNA (1)...(19): siRNA sense strand
aagcaaggaacgggaaaua

SEQ ID NO: 675331 - RNA, 19 nt, Homo sapiens
  misc_RNA (1)...(19): siRNA sense strand
gugagauucuuguagucaa

SEQ ID NO: 675332 - RNA, 19 nt, Homo sapiens
  misc_RNA (1)...(19): siRNA sense strand
agaaacuuggugagaaaua

SEQ ID NO: 675333 - RNA, 19 nt, Homo sapiens
  misc_RNA (1)...(19): siRNA sense strand
ggaccaggcagauccucaa

SEQ ID NO: 675334 - RNA, 19 nt, Homo sapiens
  misc_RNA (1)...(19): siRNA sense strand
guuguugccaccaugauuu

SEQ ID NO: 675335 - RNA, 19 nt, Homo sapiens
  misc_RNA (1)...(19): siRNA sense strand
ugagauucuuguagucaau

SEQ ID NO: 675336 - RNA, 19 nt, Homo sapiens
  misc_RNA (1)...(19): siRNA sense strand
cguccaaaauccaaauaua

SEQ ID NO: 675337 - RNA, 19 nt, Homo sapiens
  misc_RNA (1)...(19): siRNA sense strand
gagguugcccgauuuggau

SEQ ID NO: 675338 - RNA, 19 nt, Homo sapiens
  misc_RNA (1)...(19): siRNA sense strand
cagaaacauacaagaaaug

SEQ ID NO: 675339 - RNA, 19 nt, Homo sapiens
  misc_RNA (1)...(19): siRNA sense strand
gcucgcaggaaccgaauug

SEQ ID NO: 675340 - RNA, 19 nt, Homo sapiens
  misc_RNA (1)...(19): siRNA sense strand
gcgggcagaucaugugcau

SEQ ID NO: 675341 - RNA, 19 nt, Homo sapiens
  misc_RNA (1)...(19): siRNA sense strand
ggagagcgggcagaucaug

SEQ ID NO: 675342 - RNA, 19 nt, Homo sapiens
  misc_RNA (1)...(19): siRNA sense strand
aauaagcuggcagugauua

SEQ ID NO: 675343 - RNA, 19 nt, Homo sapiens
  misc_RNA (1)...(19): siRNA sense strand
ccuaaggucaugcuguuug

SEQ ID NO: 675344 - RNA, 19 nt, Homo sapiens
  misc_RNA (1)...(19): siRNA sense strand
aagaaugaaacaccugaaa

SEQ ID NO: 675345 - RNA, 19 nt, Homo sapiens
  misc_RNA (1)...(19): siRNA sense strand
uccaagagaguccagauga

SEQ ID NO: 675346 - RNA, 19 nt, Homo sapiens
  misc_RNA (1)...(19): siRNA sense strand
aaauugccauccugagcuu

SEQ ID NO: 675347 - RNA, 19 nt, Homo sapiens
  misc_RNA (1)...(19): siRNA sense strand
uggacugcaugacugcuaa

SEQ ID NO: 675348 - RNA, 19 nt, Homo sapiens
  misc_RNA (1)...(19): siRNA sense strand
caaagcaaggaacgggaaa

SEQ ID NO: 675349 - RNA, 19 nt, Homo sapiens
  misc_RNA (1)...(19): siRNA sense strand
ugcaacaucuagauucaca

SEQ ID NO: 675350 - RNA, 19 nt, Homo sapiens
  misc_RNA (1)...(19): siRNA sense strand
ugacaacuaauccaaugug

SEQ ID NO: 675351 - RNA, 19 nt, Homo sapiens
  misc_RNA (1)...(19): siRNA sense strand
aaauagaaaccuccaagag

SEQ ID NO: 675352 - RNA, 19 nt, Homo sapiens
  misc_RNA (1)...(19): siRNA sense strand
gcaugacugcuaaucagau

SEQ ID NO: 675353 - RNA, 19 nt, Homo sapiens
  misc_RNA (1)...(19): siRNA sense strand
auaagggaucaucucauua

SEQ ID NO: 675354 - RNA, 19 nt, Homo sapiens
  misc_RNA (1)...(19): siRNA sense strand
uauuccagcucuugucauc

SEQ ID NO: 675355 - RNA, 19 nt, Homo sapiens
  misc_RNA (1)...(19): siRNA sense strand
cuacuggacgcugggcuua

SEQ ID NO: 675356 - RNA, 19 nt, Homo sapiens
  misc_RNA (1)...(19): siRNA sense strand
ggagagugacaagaaacuu

SEQ ID NO: 675357 - RNA, 19 nt, Homo sapiens
  misc_RNA (1)...(19): siRNA sense strand
ugauagaaucugccuacaa

SEQ ID NO: 675358 - RNA, 19 nt, Homo sapiens
  misc_RNA (1)...(19): siRNA sense strand
cugaggagagugacaagaa

SEQ ID NO: 675359 - RNA, 19 nt, Homo sapiens
  misc_RNA (1)...(19): siRNA sense strand
caaugugugccuucacuca

SEQ ID NO: 675360 - RNA, 19 nt, Homo sapiens
  misc_RNA (1)...(19): siRNA sense strand
cucagaaacauacaagaaa

SEQ ID NO: 675361 - RNA, 19 nt, Homo sapiens
  misc_RNA (1)...(19): siRNA sense strand
gaccaggcagauccucaaa

SEQ ID NO: 675362 - RNA, 19 nt, Homo sapiens
  misc_RNA (1)...(19): siRNA sense strand
ggugaauuucuaacucuug

SEQ ID NO: 675363 - RNA, 19 nt, Homo sapiens
  misc_RNA (1)...(19): siRNA sense strand
caaagaugucuccuuguac

SEQ ID NO: 675364 - RNA, 19 nt, Homo sapiens
  misc_RNA (1)...(19): siRNA sense strand
gcccauuccuuuuaaaauc

SEQ ID NO: 675365 - RNA, 19 nt, Homo sapiens
  misc_RNA (1)...(19): siRNA sense strand
gcagcucaaauguuucugu

SEQ ID NO: 675366 - RNA, 19 nt, Homo sapiens
  misc_RNA (1)...(19): siRNA sense strand
ggucuccuuuaccaguuug

SEQ ID NO: 675367 - RNA, 19 nt, Homo sapiens
  misc_RNA (1)...(19): siRNA sense strand
ggacggccucuaccagaag

SEQ ID NO: 675368 - RNA, 19 nt, Homo sapiens
  misc_RNA (1)...(19): siRNA sense strand
uaggucuccuuuaccaguu

SEQ ID NO: 675369 - RNA, 19 nt, Homo sapiens
  misc_RNA (1)...(19): siRNA sense strand
cgguuacccuuguccugaa

SEQ ID NO: 675370 - RNA, 19 nt, Homo sapiens
  misc_RNA (1)...(19): siRNA sense strand
cauccuaggaauaguuguu

SEQ ID NO: 675371 - RNA, 19 nt, Homo sapiens
  misc_RNA (1)...(19): siRNA sense strand
gagagcgggcagaucaugu

SEQ ID NO: 675372 - RNA, 19 nt, Homo sapiens
  misc_RNA (1)...(19): siRNA sense strand
ucucuaaacuggguguucu

SEQ ID NO: 675373 - RNA, 19 nt, Homo sapiens
  misc_RNA (1)...(19): siRNA sense strand
gaaaugggauucugugaca

SEQ ID NO: 675374 - RNA, 19 nt, Homo sapiens
  misc_RNA (1)...(19): siRNA sense strand
ggaguggauuuaccaguua

SEQ ID NO: 675375 - RNA, 19 nt, Homo sapiens
  misc_RNA (1)...(19): siRNA sense strand
gaacguauacuucccauug

SEQ ID NO: 675376 - RNA, 19 nt, Homo sapiens
  misc_RNA (1)...(19): siRNA sense strand
gaagagcuaugaccacuca

SEQ ID NO: 675377 - RNA, 19 nt, Homo sapiens
  misc_RNA (1)...(19): siRNA sense strand
agaaacagguugauaagaa

SEQ ID NO: 675378 - RNA, 19 nt, Homo sapiens
  misc_RNA (1)...(19): siRNA sense strand
gaagagguauccaucaaca

SEQ ID NO: 675379 - RNA, 19 nt, Homo sapiens
  misc_RNA (1)...(19): siRNA sense strand
gaagagagcccugauaaca

SEQ ID NO: 675380 - RNA, 19 nt, Homo sapiens
  misc_RNA (1)...(19): siRNA sense strand
gaggaaggcugagaacauu

SEQ ID NO: 675381 - RNA, 19 nt, Homo sapiens
  misc_RNA (1)...(19): siRNA sense strand
agaagccacuugcacauua

SEQ ID NO: 675382 - RNA, 19 nt, Homo sapiens
  misc_RNA (1)...(19): siRNA sense strand
acacaaagcucaaguucau

SEQ ID NO: 675383 - RNA, 19 nt, Homo sapiens
  misc_RNA (1)...(19): siRNA sense strand
auucaaagcuuucugguuu

SEQ ID NO: 675384 - RNA, 19 nt, Homo sapiens
  misc_RNA (1)...(19): siRNA sense strand
gaacaagugguuaacgaaa

SEQ ID NO: 675385 - RNA, 19 nt, Homo sapiens
  misc_RNA (1)...(19): siRNA sense strand
gagaacaagugguuaacga

SEQ ID NO: 675386 - RNA, 19 nt, Homo sapiens
  misc_RNA (1)...(19): siRNA sense strand
aggaugagcucaaagauga

SEQ ID NO: 675387 - RNA, 19 nt, Homo sapiens
  misc_RNA (1)...(19): siRNA sense strand
ggacccaguuuguguguga

SEQ ID NO: 675388 - RNA, 19 nt, Homo sapiens
  misc_RNA (1)...(19): siRNA sense strand
gaugagaauuugccugaug

SEQ ID NO: 675389 - RNA, 19 nt, Homo sapiens
  misc_RNA (1)...(19): siRNA sense strand
ucacaaaggccagcaauuu

SEQ ID NO: 675390 - RNA, 19 nt, Homo sapiens
  misc_RNA (1)...(19): siRNA sense strand
caagcuaccuggagacguu

SEQ ID NO: 675391 - RNA, 19 nt, Homo sapiens
  misc_RNA (1)...(19): siRNA sense strand
guaaacagcagacagaaga

SEQ ID NO: 675392 - RNA, 19 nt, Homo sapiens
  misc_RNA (1)...(19): siRNA sense strand
agagagcccugauaacauu

SEQ ID NO: 675393 - RNA, 19 nt, Homo sapiens
  misc_RNA (1)...(19): siRNA sense strand
ggauuuaccaguuaccaua

SEQ ID NO: 675394 - RNA, 19 nt, Homo sapiens
  misc_RNA (1)...(19): siRNA sense strand
gaaaugagaaggaggagau

SEQ ID NO: 675395 - RNA, 19 nt, Homo sapiens
  misc_RNA (1)...(19): siRNA sense strand
uuaaagcacuuccugauuc

SEQ ID NO: 675396 - RNA, 19 nt, Homo sapiens
  misc_RNA (1)...(19): siRNA sense strand
ccacaugacaguccuuuaa

SEQ ID NO: 675397 - RNA, 19 nt, Homo sapiens
  misc_RNA (1)...(19): siRNA sense strand
gcagauagaggaagagaau

SEQ ID NO: 675398 - RNA, 19 nt, Homo sapiens
  misc_RNA (1)...(19): siRNA sense strand
ggaggaggaugagcucaaa

SEQ ID NO: 675399 - RNA, 19 nt, Homo sapiens
  misc_RNA (1)...(19): siRNA sense strand
caguucagcuggcauauug

SEQ ID NO: 675400 - RNA, 19 nt, Homo sapiens
  misc_RNA (1)...(19): siRNA sense strand
cagaaguccuugcagauga

SEQ ID NO: 675401 - RNA, 19 nt, Homo sapiens
  misc_RNA (1)...(19): siRNA sense strand
gggcugauaucgaagcuau

SEQ ID NO: 675402 - RNA, 19 nt, Homo sapiens
  misc_RNA (1)...(19): siRNA sense strand
gaagaaacaacguaaagca

SEQ ID NO: 675403 - RNA, 19 nt, Homo sapiens
  misc_RNA (1)...(19): siRNA sense strand
ccauaucgcugaggaagaa

SEQ ID NO: 675404 - RNA, 19 nt, Homo sapiens
  misc_RNA (1)...(19): siRNA sense strand
caucaacagucaaggagaa

SEQ ID NO: 675405 - RNA, 19 nt, Homo sapiens
  misc_RNA (1)...(19): siRNA sense strand
guacagcucugcgcucuca

SEQ ID NO: 675406 - RNA, 19 nt, Homo sapiens
  misc_RNA (1)...(19): siRNA sense strand
acaguaauccgaucccuua

SEQ ID NO: 675407 - RNA, 19 nt, Homo sapiens
  misc_RNA (1)...(19): siRNA sense strand
gaaacagguugauaagaac

SEQ ID NO: 675408 - RNA, 19 nt, Homo sapiens
  misc_RNA (1)...(19): siRNA sense strand
uugagaagcuugaacagaa

SEQ ID NO: 675409 - RNA, 19 nt, Homo sapiens
  misc_RNA (1)...(19): siRNA sense strand
gccaauaauuucugaagau

SEQ ID NO: 675410 - RNA, 19 nt, Homo sapiens
  misc_RNA (1)...(19): siRNA sense strand
caaagucaguccucugcuu

SEQ ID NO: 675411 - RNA, 19 nt, Homo sapiens
  misc_RNA (1)...(19): siRNA sense strand
acaugacaguccuuuaaua

SEQ ID NO: 675412 - RNA, 19 nt, Homo sapiens
  misc_RNA (1)...(19): siRNA sense strand
ucaaggagaauaugaagaa

SEQ ID NO: 675413 - RNA, 19 nt, Homo sapiens
  misc_RNA (1)...(19): siRNA sense strand
ccuuugagcuguuggauau

SEQ ID NO: 675414 - RNA, 19 nt, Homo sapiens
  misc_RNA (1)...(19): siRNA sense strand
ugaagaagcgcuuaagaug

SEQ ID NO: 675415 - RNA, 19 nt, Homo sapiens
  misc_RNA (1)...(19): siRNA sense strand
gaagcuugaacagaaauua

SEQ ID NO: 675416 - RNA, 19 nt, Homo sapiens
  misc_RNA (1)...(19): siRNA sense strand
gcagaggucaaggaacuua

SEQ ID NO: 675417 - RNA, 19 nt, Homo sapiens
  misc_RNA (1)...(19): siRNA sense strand
gacuuuggcuuccacagaa

SEQ ID NO: 675418 - RNA, 19 nt, Homo sapiens
  misc_RNA (1)...(19): siRNA sense strand
ugagaagcuugaacagaaa

SEQ ID NO: 675419 - RNA, 19 nt, Homo sapiens
  misc_RNA (1)...(19): siRNA sense strand
gagcacagcauaagugaca

SEQ ID NO: 675420 - RNA, 19 nt, Homo sapiens
  misc_RNA (1)...(19): siRNA sense strand
aggaggagauuauccauau

SEQ ID NO: 675421 - RNA, 19 nt, Homo sapiens
  misc_RNA (1)...(19): siRNA sense strand
gagaagaaacaacguaaag

SEQ ID NO: 675422 - RNA, 19 nt, Homo sapiens
  misc_RNA (1)...(19): siRNA sense strand
gcagacagaagagcuauga

SEQ ID NO: 675423 - RNA, 19 nt, Homo sapiens
  misc_RNA (1)...(19): siRNA sense strand
ugacaguccuuuaauagag

SEQ ID NO: 675424 - RNA, 19 nt, Homo sapiens
  misc_RNA (1)...(19): siRNA sense strand
ccucgggucuggugcagua

SEQ ID NO: 675425 - RNA, 19 nt, Homo sapiens
  misc_RNA (1)...(19): siRNA sense strand
caucaggacuuguaaacag

SEQ ID NO: 675426 - RNA, 19 nt, Homo sapiens
  misc_RNA (1)...(19): siRNA sense strand
ugcaacaacugccaaagaa

SEQ ID NO: 675427 - RNA, 19 nt, Homo sapiens
  misc_RNA (1)...(19): siRNA sense strand
aaagacagcuuggugaagu

SEQ ID NO: 675428 - RNA, 19 nt, Homo sapiens
  misc_RNA (1)...(19): siRNA sense strand
gugcagcauuuguggauga

SEQ ID NO: 675429 - RNA, 19 nt, Homo sapiens
  misc_RNA (1)...(19): siRNA sense strand
gacaguccuuuaauagaga

SEQ ID NO: 675430 - RNA, 19 nt, Homo sapiens
  misc_RNA (1)...(19): siRNA sense strand
ccgaagagagcccugauaa

SEQ ID NO: 675431 - RNA, 19 nt, Homo sapiens
  misc_RNA (1)...(19): siRNA sense strand
caacagucaaggagaauau

SEQ ID NO: 675432 - RNA, 19 nt, Homo sapiens
  misc_RNA (1)...(19): siRNA sense strand
guacagccaacgcuauuga

SEQ ID NO: 675433 - RNA, 19 nt, Homo sapiens
  misc_RNA (1)...(19): siRNA sense strand
guugcgagcugagaagaaa

SEQ ID NO: 675434 - RNA, 19 nt, Homo sapiens
  misc_RNA (1)...(19): siRNA sense strand
cauauggccaugacacuaa

SEQ ID NO: 675435 - RNA, 19 nt, Homo sapiens
  misc_RNA (1)...(19): siRNA sense strand
uaaacaacaacgacuggua

SEQ ID NO: 675436 - RNA, 19 nt, Homo sapiens
  misc_RNA (1)...(19): siRNA sense strand
ccacaggagcacagcauaa

SEQ ID NO: 675437 - RNA, 19 nt, Homo sapiens
  misc_RNA (1)...(19): siRNA sense strand
aaagcuuucugguuucuga

SEQ ID NO: 675438 - RNA, 19 nt, Homo sapiens
  misc_RNA (1)...(19): siRNA sense strand
cagcauuuguggaugagaa

SEQ ID NO: 675439 - RNA, 19 nt, Homo sapiens
  misc_RNA (1)...(19): siRNA sense strand
gcgcuuaagauggcaguua

SEQ ID NO: 675440 - RNA, 19 nt, Homo sapiens
  misc_RNA (1)...(19): siRNA sense strand
ccaauaauuucugaagauc

SEQ ID NO: 675441 - RNA, 19 nt, Homo sapiens
  misc_RNA (1)...(19): siRNA sense strand
ggaggaagcagaagaagac

SEQ ID NO: 675442 - RNA, 19 nt, Homo sapiens
  misc_RNA (1)...(19): siRNA sense strand
ucagagaacaagugguuaa

SEQ ID NO: 675443 - RNA, 19 nt, Homo sapiens
  misc_RNA (1)...(19): siRNA sense strand
gaagaagccacuugcacau

SEQ ID NO: 675444 - RNA, 19 nt, Homo sapiens
  misc_RNA (1)...(19): siRNA sense strand
uaacgaaacgguugagaag

SEQ ID NO: 675445 - RNA, 19 nt, Homo sapiens
  misc_RNA (1)...(19): siRNA sense strand
gaaggaccacuuggaaaug

SEQ ID NO: 675446 - RNA, 19 nt, Homo sapiens
  misc_RNA (1)...(19): siRNA sense strand
gcagucguuuccacuuguu

SEQ ID NO: 675447 - RNA, 19 nt, Homo sapiens
  misc_RNA (1)...(19): siRNA sense strand
uaaagcagaggucaaggaa

SEQ ID NO: 675448 - RNA, 19 nt, Homo sapiens
  misc_RNA (1)...(19): siRNA sense strand
gguguccgcuaccagugua

SEQ ID NO: 675449 - RNA, 19 nt, Homo sapiens
  misc_RNA (1)...(19): siRNA sense strand
gaauaugaagaagcgcuua

SEQ ID NO: 675450 - RNA, 19 nt, Homo sapiens
  misc_RNA (1)...(19): siRNA sense strand
gaggaugagcucaaagaug

SEQ ID NO: 675451 - RNA, 19 nt, Homo sapiens
  misc_RNA (1)...(19): siRNA sense strand
ggaggaggaugaggaggau

SEQ ID NO: 675452 - RNA, 19 nt, Homo sapiens
  misc_RNA (1)...(19): siRNA sense strand
uaaagaggaaggcugagaa

SEQ ID NO: 675453 - RNA, 19 nt, Homo sapiens
  misc_RNA (1)...(19): siRNA sense strand
acacagaccagccucaaga

SEQ ID NO: 675454 - RNA, 19 nt, Homo sapiens
  misc_RNA (1)...(19): siRNA sense strand
gugcagucguuuccacuug

SEQ ID NO: 675455 - RNA, 19 nt, Homo sapiens
  misc_RNA (1)...(19): siRNA sense strand
gcagaugcaaguccacgaa

SEQ ID NO: 675456 - RNA, 19 nt, Homo sapiens
  misc_RNA (1)...(19): siRNA sense strand
ugaaggaccacuuggaaau

SEQ ID NO: 675457 - RNA, 19 nt, Homo sapiens
  misc_RNA (1)...(19): siRNA sense strand
uaaagcacuuccugauucu

SEQ ID NO: 675458 - RNA, 19 nt, Homo sapiens
  misc_RNA (1)...(19): siRNA sense strand
caacuugggcugauaucga

SEQ ID NO: 675459 - RNA, 19 nt, Homo sapiens
  misc_RNA (1)...(19): siRNA sense strand
ggucuggugcaguaucaua

SEQ ID NO: 675460 - RNA, 19 nt, Homo sapiens
  misc_RNA (1)...(19): siRNA sense strand
cagcuuaaacuccauagga

SEQ ID NO: 675461 - RNA, 19 nt, Homo sapiens
  misc_RNA (1)...(19): siRNA sense strand
aagcagaggucaaggaacu

SEQ ID NO: 675462 - RNA, 19 nt, Homo sapiens
  misc_RNA (1)...(19): siRNA sense strand
guaaagcagaggucaagga

SEQ ID NO: 675463 - RNA, 19 nt, Homo sapiens
  misc_RNA (1)...(19): siRNA sense strand
gaagccacuugcacauuac

SEQ ID NO: 675464 - RNA, 19 nt, Homo sapiens
  misc_RNA (1)...(19): siRNA sense strand
cagacugguucacaagcua

SEQ ID NO: 675465 - RNA, 19 nt, Homo sapiens
  misc_RNA (1)...(19): siRNA sense strand
gcacagccaauaauuucug

SEQ ID NO: 675466 - RNA, 19 nt, Homo sapiens
  misc_RNA (1)...(19): siRNA sense strand
uaaagaagaaagacagcuu

SEQ ID NO: 675467 - RNA, 19 nt, Homo sapiens
  misc_RNA (1)...(19): siRNA sense strand
guaccuccguuaugccaau

SEQ ID NO: 675468 - RNA, 19 nt, Homo sapiens
  misc_RNA (1)...(19): siRNA sense strand
ccaggaaccaaguuuauca

SEQ ID NO: 675469 - RNA, 19 nt, Homo sapiens
  misc_RNA (1)...(19): siRNA sense strand
caucaugggagcagcauug

SEQ ID NO: 675470 - RNA, 19 nt, Homo sapiens
  misc_RNA (1)...(19): siRNA sense strand
gagcucuccuuguguacau

SEQ ID NO: 675471 - RNA, 19 nt, Homo sapiens
  misc_RNA (1)...(19): siRNA sense strand
ggaggagauuauccauauc

SEQ ID NO: 675472 - RNA, 19 nt, Homo sapiens
  misc_RNA (1)...(19): siRNA sense strand
aaagaaggauguuuugguu

SEQ ID NO: 675473 - RNA, 19 nt, Homo sapiens
  misc_RNA (1)...(19): siRNA sense strand
gaaaugggauucugugaca

SEQ ID NO: 675474 - RNA, 19 nt, Homo sapiens
  misc_RNA (1)...(19): siRNA sense strand
ggaguggauuuaccaguua

SEQ ID NO: 675475 - RNA, 19 nt, Homo sapiens
  misc_RNA (1)...(19): siRNA sense strand
gaacguauacuucccauug

SEQ ID NO: 675476 - RNA, 19 nt, Homo sapiens
  misc_RNA (1)...(19): siRNA sense strand
gaagagcuaugaccacuca

SEQ ID NO: 675477 - RNA, 19 nt, Homo sapiens
  misc_RNA (1)...(19): siRNA sense strand
agaaacagguugauaagaa

SEQ ID NO: 675478 - RNA, 19 nt, Homo sapiens
  misc_RNA (1)...(19): siRNA sense strand
gaagagguauccaucaaca

SEQ ID NO: 675479 - RNA, 19 nt, Homo sapiens
  misc_RNA (1)...(19): siRNA sense strand
gaagagagcccugauaaca

SEQ ID NO: 675480 - RNA, 19 nt, Homo sapiens
  misc_RNA (1)...(19): siRNA sense strand
gaggaaggcugagaacauu

SEQ ID NO: 675481 - RNA, 19 nt, Homo sapiens
  misc_RNA (1)...(19): siRNA sense strand
agaagccacuugcacauua

SEQ ID NO: 675482 - RNA, 19 nt, Homo sapiens
  misc_RNA (1)...(19): siRNA sense strand
acacaaagcucaaguucau

SEQ ID NO: 675483 - RNA, 19 nt, Homo sapiens
  misc_RNA (1)...(19): siRNA sense strand
auucaaagcuuucugguuu

SEQ ID NO: 675484 - RNA, 19 nt, Homo sapiens
  misc_RNA (1)...(19): siRNA sense strand
gaacaagugguuaacgaaa

SEQ ID NO: 675485 - RNA, 19 nt, Homo sapiens
  misc_RNA (1)...(19): siRNA sense strand
gagaacaagugguuaacga

SEQ ID NO: 675486 - RNA, 19 nt, Homo sapiens
  misc_RNA (1)...(19): siRNA sense strand
aggaugagcucaaagauga

SEQ ID NO: 675487 - RNA, 19 nt, Homo sapiens
  misc_RNA (1)...(19): siRNA sense strand
ggacccaguuuguguguga

SEQ ID NO: 675488 - RNA, 19 nt, Homo sapiens
  misc_RNA (1)...(19): siRNA sense strand
gaugagaauuugccugaug

SEQ ID NO: 675489 - RNA, 19 nt, Homo sapiens
  misc_RNA (1)...(19): siRNA sense strand
ucacaaaggccagcaauuu

SEQ ID NO: 675490 - RNA, 19 nt, Homo sapiens
  misc_RNA (1)...(19): siRNA sense strand
caagcuaccuggagacguu

SEQ ID NO: 675491 - RNA, 19 nt, Homo sapiens
  misc_RNA (1)...(19): siRNA sense strand
guaaacagcagacagaaga

SEQ ID NO: 675492 - RNA, 19 nt, Homo sapiens
  misc_RNA (1)...(19): siRNA sense strand
agagagcccugauaacauu

SEQ ID NO: 675493 - RNA, 19 nt, Homo sapiens
  misc_RNA (1)...(19): siRNA sense strand
ggauuuaccaguuaccaua

SEQ ID NO: 675494 - RNA, 19 nt, Homo sapiens
  misc_RNA (1)...(19): siRNA sense strand
gaaaugagaaggaggagau

SEQ ID NO: 675495 - RNA, 19 nt, Homo sapiens
  misc_RNA (1)...(19): siRNA sense strand
uuaaagcacuuccugauuc

SEQ ID NO: 675496 - RNA, 19 nt, Homo sapiens
  misc_RNA (1)...(19): siRNA sense strand
ccacaugacaguccuuuaa

SEQ ID NO: 675497 - RNA, 19 nt, Homo sapiens
  misc_RNA (1)...(19): siRNA sense strand
gcagauagaggaagagaau

SEQ ID NO: 675498 - RNA, 19 nt, Homo sapiens
  misc_RNA (1)...(19): siRNA sense strand
ggaggaggaugagcucaaa

SEQ ID NO: 675499 - RNA, 19 nt, Homo sapiens
  misc_RNA (1)...(19): siRNA sense strand
caguucagcuggcauauug

SEQ ID NO: 675500 - RNA, 19 nt, Homo sapiens
  misc_RNA (1)...(19): siRNA sense strand
cagaaguccuugcagauga

SEQ ID NO: 675501 - RNA, 19 nt, Homo sapiens
  misc_RNA (1)...(19): siRNA sense strand
gggcugauaucgaagcuau

SEQ ID NO: 675502 - RNA, 19 nt, Homo sapiens
  misc_RNA (1)...(19): siRNA sense strand
gaagaaacaacguaaagca

SEQ ID NO: 675503 - RNA, 19 nt, Homo sapiens
  misc_RNA (1)...(19): siRNA sense strand
ccauaucgcugaggaagaa

SEQ ID NO: 675504 - RNA, 19 nt, Homo sapiens
  misc_RNA (1)...(19): siRNA sense strand
caucaacagucaaggagaa

SEQ ID NO: 675505 - RNA, 19 nt, Homo sapiens
  misc_RNA (1)...(19): siRNA sense strand
guacagcucugcgcucuca

SEQ ID NO: 675506 - RNA, 19 nt, Homo sapiens
  misc_RNA (1)...(19): siRNA sense strand
acaguaauccgaucccuua

SEQ ID NO: 675507 - RNA, 19 nt, Homo sapiens
  misc_RNA (1)...(19): siRNA sense strand
gaaacagguugauaagaac

SEQ ID NO: 675508 - RNA, 19 nt, Homo sapiens
  misc_RNA (1)...(19): siRNA sense strand
uugagaagcuugaacagaa

SEQ ID NO: 675509 - RNA, 19 nt, Homo sapiens
  misc_RNA (1)...(19): siRNA sense strand
gccaauaauuucugaagau

SEQ ID NO: 675510 - RNA, 19 nt, Homo sapiens
  misc_RNA (1)...(19): siRNA sense strand
caaagucaguccucugcuu

SEQ ID NO: 675511 - RNA, 19 nt, Homo sapiens
  misc_RNA (1)...(19): siRNA sense strand
acaugacaguccuuuaaua

SEQ ID NO: 675512 - RNA, 19 nt, Homo sapiens
  misc_RNA (1)...(19): siRNA sense strand
ucaaggagaauaugaagaa

SEQ ID NO: 675513 - RNA, 19 nt, Homo sapiens
  misc_RNA (1)...(19): siRNA sense strand
ccuuugagcuguuggauau

SEQ ID NO: 675514 - RNA, 19 nt, Homo sapiens
  misc_RNA (1)...(19): siRNA sense strand
ugaagaagcgcuuaagaug

SEQ ID NO: 675515 - RNA, 19 nt, Homo sapiens
  misc_RNA (1)...(19): siRNA sense strand
gaagcuugaacagaaauua

SEQ ID NO: 675516 - RNA, 19 nt, Homo sapiens
  misc_RNA (1)...(19): siRNA sense strand
gcagaggucaaggaacuua

SEQ ID NO: 675517 - RNA, 19 nt, Homo sapiens
  misc_RNA (1)...(19): siRNA sense strand
gacuuuggcuuccacagaa

SEQ ID NO: 675518 - RNA, 19 nt, Homo sapiens
  misc_RNA (1)...(19): siRNA sense strand
ugagaagcuugaacagaaa

SEQ ID NO: 675519 - RNA, 19 nt, Homo sapiens
  misc_RNA (1)...(19): siRNA sense strand
gagcacagcauaagugaca

SEQ ID NO: 675520 - RNA, 19 nt, Homo sapiens
  misc_RNA (1)...(19): siRNA sense strand
aggaggagauuauccauau

SEQ ID NO: 675521 - RNA, 19 nt, Homo sapiens
  misc_RNA (1)...(19): siRNA sense strand
gagaagaaacaacguaaag

SEQ ID NO: 675522 - RNA, 19 nt, Homo sapiens
  misc_RNA (1)...(19): siRNA sense strand
gcagacagaagagcuauga

SEQ ID NO: 675523 - RNA, 19 nt, Homo sapiens
  misc_RNA (1)...(19): siRNA sense strand
ugacaguccuuuaauagag

SEQ ID NO: 675524 - RNA, 19 nt, Homo sapiens
  misc_RNA (1)...(19): siRNA sense strand
ccucgggucuggugcagua

SEQ ID NO: 675525 - RNA, 19 nt, Homo sapiens
  misc_RNA (1)...(19): siRNA sense strand
caucaggacuuguaaacag

SEQ ID NO: 675526 - RNA, 19 nt, Homo sapiens
  misc_RNA (1)...(19): siRNA sense strand
ugcaacaacugccaaagaa

SEQ ID NO: 675527 - RNA, 19 nt, Homo sapiens
  misc_RNA (1)...(19): siRNA sense strand
aaagacagcuuggugaagu

SEQ ID NO: 675528 - RNA, 19 nt, Homo sapiens
  misc_RNA (1)...(19): siRNA sense strand
gugcagcauuuguggauga

SEQ ID NO: 675529 - RNA, 19 nt, Homo sapiens
  misc_RNA (1)...(19): siRNA sense strand
gacaguccuuuaauagaga

SEQ ID NO: 675530 - RNA, 19 nt, Homo sapiens
  misc_RNA (1)...(19): siRNA sense strand
ccgaagagagcccugauaa

SEQ ID NO: 675531 - RNA, 19 nt, Homo sapiens
  misc_RNA (1)...(19): siRNA sense strand
caacagucaaggagaauau

SEQ ID NO: 675532 - RNA, 19 nt, Homo sapiens
  misc_RNA (1)...(19): siRNA sense strand
guacagccaacgcuauuga

SEQ ID NO: 675533 - RNA, 19 nt, Homo sapiens
  misc_RNA (1)...(19): siRNA sense strand
guugcgagcugagaagaaa

SEQ ID NO: 675534 - RNA, 19 nt, Homo sapiens
  misc_RNA (1)...(19): siRNA sense strand
cauauggccaugacacuaa

SEQ ID NO: 675535 - RNA, 19 nt, Homo sapiens
  misc_RNA (1)...(19): siRNA sense strand
uaaacaacaacgacuggua

SEQ ID NO: 675536 - RNA, 19 nt, Homo sapiens
  misc_RNA (1)...(19): siRNA sense strand
ccacaggagcacagcauaa

SEQ ID NO: 675537 - RNA, 19 nt, Homo sapiens
  misc_RNA (1)...(19): siRNA sense strand
aaagcuuucugguuucuga

SEQ ID NO: 675538 - RNA, 19 nt, Homo sapiens
  misc_RNA (1)...(19): siRNA sense strand
cagcauuuguggaugagaa

SEQ ID NO: 675539 - RNA, 19 nt, Homo sapiens
  misc_RNA (1)...(19): siRNA sense strand
gcgcuuaagauggcaguua

SEQ ID NO: 675540 - RNA, 19 nt, Homo sapiens
  misc_RNA (1)...(19): siRNA sense strand
ccaauaauuucugaagauc

SEQ ID NO: 675541 - RNA, 19 nt, Homo sapiens
  misc_RNA (1)...(19): siRNA sense strand
ggaggaagcagaagaagac

SEQ ID NO: 675542 - RNA, 19 nt, Homo sapiens
  misc_RNA (1)...(19): siRNA sense strand
ucagagaacaagugguuaa

SEQ ID NO: 675543 - RNA, 19 nt, Homo sapiens
  misc_RNA (1)...(19): siRNA sense strand
gaagaagccacuugcacau

SEQ ID NO: 675544 - RNA, 19 nt, Homo sapiens
  misc_RNA (1)...(19): siRNA sense strand
uaacgaaacgguugagaag

SEQ ID NO: 675545 - RNA, 19 nt, Homo sapiens
  misc_RNA (1)...(19): siRNA sense strand
gaaggaccacuuggaaaug

SEQ ID NO: 675546 - RNA, 19 nt, Homo sapiens
  misc_RNA (1)...(19): siRNA sense strand
gcagucguuuccacuuguu

SEQ ID NO: 675547 - RNA, 19 nt, Homo sapiens
  misc_RNA (1)...(19): siRNA sense strand
uaaagcagaggucaaggaa

SEQ ID NO: 675548 - RNA, 19 nt, Homo sapiens
  misc_RNA (1)...(19): siRNA sense strand
gguguccgcuaccagugua

SEQ ID NO: 675549 - RNA, 19 nt, Homo sapiens
  misc_RNA (1)...(19): siRNA sense strand
gaauaugaagaagcgcuua

SEQ ID NO: 675550 - RNA, 19 nt, Homo sapiens
  misc_RNA (1)...(19): siRNA sense strand
gaggaugagcucaaagaug

SEQ ID NO: 675551 - RNA, 19 nt, Homo sapiens
  misc_RNA (1)...(19): siRNA sense strand
ggaggaggaugaggaggau

SEQ ID NO: 675552 - RNA, 19 nt, Homo sapiens
  misc_RNA (1)...(19): siRNA sense strand
uaaagaggaaggcugagaa

SEQ ID NO: 675553 - RNA, 19 nt, Homo sapiens
  misc_RNA (1)...(19): siRNA sense strand
acacagaccagccucaaga

SEQ ID NO: 675554 - RNA, 19 nt, Homo sapiens
  misc_RNA (1)...(19): siRNA sense strand
gugcagucguuuccacuug

SEQ ID NO: 675555 - RNA, 19 nt, Homo sapiens
  misc_RNA (1)...(19): siRNA sense strand
gcagaugcaaguccacgaa

SEQ ID NO: 675556 - RNA, 19 nt, Homo sapiens
  misc_RNA (1)...(19): siRNA sense strand
ugaaggaccacuuggaaau

SEQ ID NO: 675557 - RNA, 19 nt, Homo sapiens
  misc_RNA (1)...(19): siRNA sense strand
uaaagcacuuccugauucu

SEQ ID NO: 675558 - RNA, 19 nt, Homo sapiens
  misc_RNA (1)...(19): siRNA sense strand
caacuugggcugauaucga

SEQ ID NO: 675559 - RNA, 19 nt, Homo sapiens
  misc_RNA (1)...(19): siRNA sense strand
ggucuggugcaguaucaua

SEQ ID NO: 675560 - RNA, 19 nt, Homo sapiens
  misc_RNA (1)...(19): siRNA sense strand
cagcuuaaacuccauagga

SEQ ID NO: 675561 - RNA, 19 nt, Homo sapiens
  misc_RNA (1)...(19): siRNA sense strand
aagcagaggucaaggaacu

SEQ ID NO: 675562 - RNA, 19 nt, Homo sapiens
  misc_RNA (1)...(19): siRNA sense strand
guaaagcagaggucaagga

SEQ ID NO: 675563 - RNA, 19 nt, Homo sapiens
  misc_RNA (1)...(19): siRNA sense strand
gaagccacuugcacauuac

SEQ ID NO: 675564 - RNA, 19 nt, Homo sapiens
  misc_RNA (1)...(19): siRNA sense strand
cagacugguucacaagcua

SEQ ID NO: 675565 - RNA, 19 nt, Homo sapiens
  misc_RNA (1)...(19): siRNA sense strand
gcacagccaauaauuucug

SEQ ID NO: 675566 - RNA, 19 nt, Homo sapiens
  misc_RNA (1)...(19): siRNA sense strand
uaaagaagaaagacagcuu

SEQ ID NO: 675567 - RNA, 19 nt, Homo sapiens
  misc_RNA (1)...(19): siRNA sense strand
guaccuccguuaugccaau

SEQ ID NO: 675568 - RNA, 19 nt, Homo sapiens
  misc_RNA (1)...(19): siRNA sense strand
ccaggaaccaaguuuauca

SEQ ID NO: 675569 - RNA, 19 nt, Homo sapiens
  misc_RNA (1)...(19): siRNA sense strand
caucaugggagcagcauug

SEQ ID NO: 675570 - RNA, 19 nt, Homo sapiens
  misc_RNA (1)...(19): siRNA sense strand
gagcucuccuuguguacau

SEQ ID NO: 675571 - RNA, 19 nt, Homo sapiens
  misc_RNA (1)...(19): siRNA sense strand
ggaggagauuauccauauc

SEQ ID NO: 675572 - RNA, 19 nt, Homo sapiens
  misc_RNA (1)...(19): siRNA sense strand
aaagaaggauguuuugguu

SEQ ID NO: 675573 - RNA, 19 nt, Homo sapiens
  misc_RNA (1)...(19): siRNA sense strand
gaaaugggauucugugaca

SEQ ID NO: 675574 - RNA, 19 nt, Homo sapiens
  misc_RNA (1)...(19): siRNA sense strand
ggaguggauuuaccaguua

SEQ ID NO: 675575 - RNA, 19 nt, Homo sapiens
  misc_RNA (1)...(19): siRNA sense strand
gaacguauacuucccauug

SEQ ID NO: 675576 - RNA, 19 nt, Homo sapiens
  misc_RNA (1)...(19): siRNA sense strand
gaagagcuaugaccacuca

SEQ ID NO: 675577 - RNA, 19 nt, Homo sapiens
  misc_RNA (1)...(19): siRNA sense strand
agaaacagguugauaagaa

SEQ ID NO: 675578 - RNA, 19 nt, Homo sapiens
  misc_RNA (1)...(19): siRNA sense strand
gaagagguauccaucaaca

SEQ ID NO: 675579 - RNA, 19 nt, Homo sapiens
  misc_RNA (1)...(19): siRNA sense strand
gaagagagcccugauaaca

SEQ ID NO: 675580 - RNA, 19 nt, Homo sapiens
  misc_RNA (1)...(19): siRNA sense strand
gaggaaggcugagaacauu

SEQ ID NO: 675581 - RNA, 19 nt, Homo sapiens
  misc_RNA (1)...(19): siRNA sense strand
agaagccacuugcacauua

SEQ ID NO: 675582 - RNA, 19 nt, Homo sapiens
  misc_RNA (1)...(19): siRNA sense strand
acacaaagcucaaguucau

SEQ ID NO: 675583 - RNA, 19 nt, Homo sapiens
  misc_RNA (1)...(19): siRNA sense strand
auucaaagcuuucugguuu

SEQ ID NO: 675584 - RNA, 19 nt, Homo sapiens
  misc_RNA (1)...(19): siRNA sense strand
gaacaagugguuaacgaaa

SEQ ID NO: 675585 - RNA, 19 nt, Homo sapiens
  misc_RNA (1)...(19): siRNA sense strand
gagaacaagugguuaacga

SEQ ID NO: 675586 - RNA, 19 nt, Homo sapiens
  misc_RNA (1)...(19): siRNA sense strand
aggaugagcucaaagauga

SEQ ID NO: 675587 - RNA, 19 nt, Homo sapiens
  misc_RNA (1)...(19): siRNA sense strand
ggacccaguuuguguguga

SEQ ID NO: 675588 - RNA, 19 nt, Homo sapiens
  misc_RNA (1)...(19): siRNA sense strand
gaugagaauuugccugaug

SEQ ID NO: 675589 - RNA, 19 nt, Homo sapiens
  misc_RNA (1)...(19): siRNA sense strand
ucacaaaggccagcaauuu

SEQ ID NO: 675590 - RNA, 19 nt, Homo sapiens
  misc_RNA (1)...(19): siRNA sense strand
caagcuaccuggagacguu

SEQ ID NO: 675591 - RNA, 19 nt, Homo sapiens
  misc_RNA (1)...(19): siRNA sense strand
guaaacagcagacagaaga

SEQ ID NO: 675592 - RNA, 19 nt, Homo sapiens
  misc_RNA (1)...(19): siRNA sense strand
agagagcccugauaacauu

SEQ ID NO: 675593 - RNA, 19 nt, Homo sapiens
  misc_RNA (1)...(19): siRNA sense strand
ggauuuaccaguuaccaua

SEQ ID NO: 675594 - RNA, 19 nt, Homo sapiens
  misc_RNA (1)...(19): siRNA sense strand
gaaaugagaaggaggagau

SEQ ID NO: 675595 - RNA, 19 nt, Homo sapiens
  misc_RNA (1)...(19): siRNA sense strand
uuaaagcacuuccugauuc

SEQ ID NO: 675596 - RNA, 19 nt, Homo sapiens
  misc_RNA (1)...(19): siRNA sense strand
ccacaugacaguccuuuaa

SEQ ID NO: 675597 - RNA, 19 nt, Homo sapiens
  misc_RNA (1)...(19): siRNA sense strand
gcagauagaggaagagaau

SEQ ID NO: 675598 - RNA, 19 nt, Homo sapiens
  misc_RNA (1)...(19): siRNA sense strand
ggaggaggaugagcucaaa

SEQ ID NO: 675599 - RNA, 19 nt, Homo sapiens
  misc_RNA (1)...(19): siRNA sense strand
caguucagcuggcauauug

SEQ ID NO: 675600 - RNA, 19 nt, Homo sapiens
  misc_RNA (1)...(19): siRNA sense strand
cagaaguccuugcagauga

SEQ ID NO: 675601 - RNA, 19 nt, Homo sapiens
  misc_RNA (1)...(19): siRNA sense strand
gggcugauaucgaagcuau

SEQ ID NO: 675602 - RNA, 19 nt, Homo sapiens
  misc_RNA (1)...(19): siRNA sense strand
gaagaaacaacguaaagca

SEQ ID NO: 675603 - RNA, 19 nt, Homo sapiens
  misc_RNA (1)...(19): siRNA sense strand
ccauaucgcugaggaagaa

SEQ ID NO: 675604 - RNA, 19 nt, Homo sapiens
  misc_RNA (1)...(19): siRNA sense strand
caucaacagucaaggagaa

SEQ ID NO: 675605 - RNA, 19 nt, Homo sapiens
  misc_RNA (1)...(19): siRNA sense strand
guacagcucugcgcucuca

SEQ ID NO: 675606 - RNA, 19 nt, Homo sapiens
  misc_RNA (1)...(19): siRNA sense strand
acaguaauccgaucccuua

SEQ ID NO: 675607 - RNA, 19 nt, Homo sapiens
  misc_RNA (1)...(19): siRNA sense strand
gaaacagguugauaagaac

SEQ ID NO: 675608 - RNA, 19 nt, Homo sapiens
  misc_RNA (1)...(19): siRNA sense strand
uugagaagcuugaacagaa

SEQ ID NO: 675609 - RNA, 19 nt, Homo sapiens
  misc_RNA (1)...(19): siRNA sense strand
gccaauaauuucugaagau

SEQ ID NO: 675610 - RNA, 19 nt, Homo sapiens
  misc_RNA (1)...(19): siRNA sense strand
caaagucaguccucugcuu

SEQ ID NO: 675611 - RNA, 19 nt, Homo sapiens
  misc_RNA (1)...(19): siRNA sense strand
acaugacaguccuuuaaua

SEQ ID NO: 675612 - RNA, 19 nt, Homo sapiens
  misc_RNA (1)...(19): siRNA sense strand
ucaaggagaauaugaagaa

SEQ ID NO: 675613 - RNA, 19 nt, Homo sapiens
  misc_RNA (1)...(19): siRNA sense strand
ccuuugagcuguuggauau

SEQ ID NO: 675614 - RNA, 19 nt, Homo sapiens
  misc_RNA (1)...(19): siRNA sense strand
ugaagaagcgcuuaagaug

SEQ ID NO: 675615 - RNA, 19 nt, Homo sapiens
  misc_RNA (1)...(19): siRNA sense strand
gaagcuugaacagaaauua

SEQ ID NO: 675616 - RNA, 19 nt, Homo sapiens
  misc_RNA (1)...(19): siRNA sense strand
gcagaggucaaggaacuua

SEQ ID NO: 675617 - RNA, 19 nt, Homo sapiens
  misc_RNA (1)...(19): siRNA sense strand
gacuuuggcuuccacagaa

SEQ ID NO: 675618 - RNA, 19 nt, Homo sapiens
  misc_RNA (1)...(19): siRNA sense strand
ugagaagcuugaacagaaa

SEQ ID NO: 675619 - RNA, 19 nt, Homo sapiens
  misc_RNA (1)...(19): siRNA sense strand
gagcacagcauaagugaca

SEQ ID NO: 675620 - RNA, 19 nt, Homo sapiens
  misc_RNA (1)...(19): siRNA sense strand
aggaggagauuauccauau

SEQ ID NO: 675621 - RNA, 19 nt, Homo sapiens
  misc_RNA (1)...(19): siRNA sense strand
gagaagaaacaacguaaag

SEQ ID NO: 675622 - RNA, 19 nt, Homo sapiens
  misc_RNA (1)...(19): siRNA sense strand
gcagacagaagagcuauga

SEQ ID NO: 675623 - RNA, 19 nt, Homo sapiens
  misc_RNA (1)...(19): siRNA sense strand
ugacaguccuuuaauagag

SEQ ID NO: 675624 - RNA, 19 nt, Homo sapiens
  misc_RNA (1)...(19): siRNA sense strand
ccucgggucuggugcagua

SEQ ID NO: 675625 - RNA, 19 nt, Homo sapiens
  misc_RNA (1)...(19): siRNA sense strand
caucaggacuuguaaacag

SEQ ID NO: 675626 - RNA, 19 nt, Homo sapiens
  misc_RNA (1)...(19): siRNA sense strand
ugcaacaacugccaaagaa

SEQ ID NO: 675627 - RNA, 19 nt, Homo sapiens
  misc_RNA (1)...(19): siRNA sense strand
aaagacagcuuggugaagu

SEQ ID NO: 675628 - RNA, 19 nt, Homo sapiens
  misc_RNA (1)...(19): siRNA sense strand
gugcagcauuuguggauga

SEQ ID NO: 675629 - RNA, 19 nt, Homo sapiens
  misc_RNA (1)...(19): siRNA sense strand
gacaguccuuuaauagaga

SEQ ID NO: 675630 - RNA, 19 nt, Homo sapiens
  misc_RNA (1)...(19): siRNA sense strand
ccgaagagagcccugauaa

SEQ ID NO: 675631 - RNA, 19 nt, Homo sapiens
  misc_RNA (1)...(19): siRNA sense strand
caacagucaaggagaauau

SEQ ID NO: 675632 - RNA, 19 nt, Homo sapiens
  misc_RNA (1)...(19): siRNA sense strand
guacagccaacgcuauuga

SEQ ID NO: 675633 - RNA, 19 nt, Homo sapiens
  misc_RNA (1)...(19): siRNA sense strand
guugcgagcugagaagaaa

SEQ ID NO: 675634 - RNA, 19 nt, Homo sapiens
  misc_RNA (1)...(19): siRNA sense strand
cauauggccaugacacuaa

SEQ ID NO: 675635 - RNA, 19 nt, Homo sapiens
  misc_RNA (1)...(19): siRNA sense strand
uaaacaacaacgacuggua

SEQ ID NO: 675636 - RNA, 19 nt, Homo sapiens
  misc_RNA (1)...(19): siRNA sense strand
ccacaggagcacagcauaa

SEQ ID NO: 675637 - RNA, 19 nt, Homo sapiens
  misc_RNA (1)...(19): siRNA sense strand
aaagcuuucugguuucuga

SEQ ID NO: 675638 - RNA, 19 nt, Homo sapiens
  misc_RNA (1)...(19): siRNA sense strand
cagcauuuguggaugagaa

SEQ ID NO: 675639 - RNA, 19 nt, Homo sapiens
  misc_RNA (1)...(19): siRNA sense strand
gcgcuuaagauggcaguua

SEQ ID NO: 675640 - RNA, 19 nt, Homo sapiens
  misc_RNA (1)...(19): siRNA sense strand
ccaauaauuucugaagauc

SEQ ID NO: 675641 - RNA, 19 nt, Homo sapiens
  misc_RNA (1)...(19): siRNA sense strand
ggaggaagcagaagaagac

SEQ ID NO: 675642 - RNA, 19 nt, Homo sapiens
  misc_RNA (1)...(19): siRNA sense strand
ucagagaacaagugguuaa

SEQ ID NO: 675643 - RNA, 19 nt, Homo sapiens
  misc_RNA (1)...(19): siRNA sense strand
gaagaagccacuugcacau

SEQ ID NO: 675644 - RNA, 19 nt, Homo sapiens
  misc_RNA (1)...(19): siRNA sense strand
uaacgaaacgguugagaag

SEQ ID NO: 675645 - RNA, 19 nt, Homo sapiens
  misc_RNA (1)...(19): siRNA sense strand
gaaggaccacuuggaaaug

SEQ ID NO: 675646 - RNA, 19 nt, Homo sapiens
  misc_RNA (1)...(19): siRNA sense strand
gcagucguuuccacuuguu

SEQ ID NO: 675647 - RNA, 19 nt, Homo sapiens
  misc_RNA (1)...(19): siRNA sense strand
uaaagcagaggucaaggaa

SEQ ID NO: 675648 - RNA, 19 nt, Homo sapiens
  misc_RNA (1)...(19): siRNA sense strand
gguguccgcuaccagugua

SEQ ID NO: 675649 - RNA, 19 nt, Homo sapiens
  misc_RNA (1)...(19): siRNA sense strand
gaauaugaagaagcgcuua

SEQ ID NO: 675650 - RNA, 19 nt, Homo sapiens
  misc_RNA (1)...(19): siRNA sense strand
gaggaugagcucaaagaug

SEQ ID NO: 675651 - RNA, 19 nt, Homo sapiens
  misc_RNA (1)...(19): siRNA sense strand
ggaggaggaugaggaggau

SEQ ID NO: 675652 - RNA, 19 nt, Homo sapiens
  misc_RNA (1)...(19): siRNA sense strand
uaaagaggaaggcugagaa

SEQ ID NO: 675653 - RNA, 19 nt, Homo sapiens
  misc_RNA (1)...(19): siRNA sense strand
acacagaccagccucaaga

SEQ ID NO: 675654 - RNA, 19 nt, Homo sapiens
  misc_RNA (1)...(19): siRNA sense strand
gugcagucguuuccacuug

SEQ ID NO: 675655 - RNA, 19 nt, Homo sapiens
  misc_RNA (1)...(19): siRNA sense strand
gcagaugcaaguccacgaa

SEQ ID NO: 675656 - RNA, 19 nt, Homo sapiens
  misc_RNA (1)...(19): siRNA sense strand
ugaaggaccacuuggaaau

SEQ ID NO: 675657 - RNA, 19 nt, Homo sapiens
  misc_RNA (1)...(19): siRNA sense strand
uaaagcacuuccugauucu

SEQ ID NO: 675658 - RNA, 19 nt, Homo sapiens
  misc_RNA (1)...(19): siRNA sense strand
caacuugggcugauaucga

SEQ ID NO: 675659 - RNA, 19 nt, Homo sapiens
  misc_RNA (1)...(19): siRNA sense strand
ggucuggugcaguaucaua

SEQ ID NO: 675660 - RNA, 19 nt, Homo sapiens
  misc_RNA (1)...(19): siRNA sense strand
cagcuuaaacuccauagga

SEQ ID NO: 675661 - RNA, 19 nt, Homo sapiens
  misc_RNA (1)...(19): siRNA sense strand
aagcagaggucaaggaacu

SEQ ID NO: 675662 - RNA, 19 nt, Homo sapiens
  misc_RNA (1)...(19): siRNA sense strand
guaaagcagaggucaagga

SEQ ID NO: 675663 - RNA, 19 nt, Homo sapiens
  misc_RNA (1)...(19): siRNA sense strand
gaagccacuugcacauuac

SEQ ID NO: 675664 - RNA, 19 nt, Homo sapiens
  misc_RNA (1)...(19): siRNA sense strand
cagacugguucacaagcua

SEQ ID NO: 675665 - RNA, 19 nt, Homo sapiens
  misc_RNA (1)...(19): siRNA sense strand
gcacagccaauaauuucug

SEQ ID NO: 675666 - RNA, 19 nt, Homo sapiens
  misc_RNA (1)...(19): siRNA sense strand
uaaagaagaaagacagcuu

SEQ ID NO: 675667 - RNA, 19 nt, Homo sapiens
  misc_RNA (1)...(19): siRNA sense strand
guaccuccguuaugccaau

SEQ ID NO: 675668 - RNA, 19 nt, Homo sapiens
  misc_RNA (1)...(19): siRNA sense strand
ccaggaaccaaguuuauca

SEQ ID NO: 675669 - RNA, 19 nt, Homo sapiens
  misc_RNA (1)...(19): siRNA sense strand
caucaugggagcagcauug

SEQ ID NO: 675670 - RNA, 19 nt, Homo sapiens
  misc_RNA (1)...(19): siRNA sense strand
gagcucuccuuguguacau

SEQ ID NO: 675671 - RNA, 19 nt, Homo sapiens
  misc_RNA (1)...(19): siRNA sense strand
ggaggagauuauccauauc

SEQ ID NO: 675672 - RNA, 19 nt, Homo sapiens
  misc_RNA (1)...(19): siRNA sense strand
aaagaaggauguuuugguu

SEQ ID NO: 675673 - RNA, 19 nt, Homo sapiens
  misc_RNA (1)...(19): siRNA sense strand
gaaaugggauucugugaca

SEQ ID NO: 675674 - RNA, 19 nt, Homo sapiens
  misc_RNA (1)...(19): siRNA sense strand
ggaguggauuuaccaguua

SEQ ID NO: 675675 - RNA, 19 nt, Homo sapiens
  misc_RNA (1)...(19): siRNA sense strand
gaacguauacuucccauug

SEQ ID NO: 675676 - RNA, 19 nt, Homo sapiens
  misc_RNA (1)...(19): siRNA sense strand
gaagagcuaugaccacuca

SEQ ID NO: 675677 - RNA, 19 nt, Homo sapiens
  misc_RNA (1)...(19): siRNA sense strand
agaaacagguugauaagaa

SEQ ID NO: 675678 - RNA, 19 nt, Homo sapiens
  misc_RNA (1)...(19): siRNA sense strand
gaagagguauccaucaaca

SEQ ID NO: 675679 - RNA, 19 nt, Homo sapiens
  misc_RNA (1)...(19): siRNA sense strand
gaagagagcccugauaaca

SEQ ID NO: 675680 - RNA, 19 nt, Homo sapiens
  misc_RNA (1)...(19): siRNA sense strand
gaggaaggcugagaacauu

SEQ ID NO: 675681 - RNA, 19 nt, Homo sapiens
  misc_RNA (1)...(19): siRNA sense strand
agaagccacuugcacauua

SEQ ID NO: 675682 - RNA, 19 nt, Homo sapiens
  misc_RNA (1)...(19): siRNA sense strand
acacaaagcucaaguucau

SEQ ID NO: 675683 - RNA, 19 nt, Homo sapiens
  misc_RNA (1)...(19): siRNA sense strand
auucaaagcuuucugguuu

SEQ ID NO: 675684 - RNA, 19 nt, Homo sapiens
  misc_RNA (1)...(19): siRNA sense strand
gaacaagugguuaacgaaa

SEQ ID NO: 675685 - RNA, 19 nt, Homo sapiens
  misc_RNA (1)...(19): siRNA sense strand
gagaacaagugguuaacga

SEQ ID NO: 675686 - RNA, 19 nt, Homo sapiens
  misc_RNA (1)...(19): siRNA sense strand
aggaugagcucaaagauga

SEQ ID NO: 675687 - RNA, 19 nt, Homo sapiens
  misc_RNA (1)...(19): siRNA sense strand
ggacccaguuuguguguga

SEQ ID NO: 675688 - RNA, 19 nt, Homo sapiens
  misc_RNA (1)...(19): siRNA sense strand
gaugagaauuugccugaug

SEQ ID NO: 675689 - RNA, 19 nt, Homo sapiens
  misc_RNA (1)...(19): siRNA sense strand
ucacaaaggccagcaauuu

SEQ ID NO: 675690 - RNA, 19 nt, Homo sapiens
  misc_RNA (1)...(19): siRNA sense strand
caagcuaccuggagacguu

SEQ ID NO: 675691 - RNA, 19 nt, Homo sapiens
  misc_RNA (1)...(19): siRNA sense strand
guaaacagcagacagaaga

SEQ ID NO: 675692 - RNA, 19 nt, Homo sapiens
  misc_RNA (1)...(19): siRNA sense strand
agagagcccugauaacauu

SEQ ID NO: 675693 - RNA, 19 nt, Homo sapiens
  misc_RNA (1)...(19): siRNA sense strand
ggauuuaccaguuaccaua

SEQ ID NO: 675694 - RNA, 19 nt, Homo sapiens
  misc_RNA (1)...(19): siRNA sense strand
gaaaugagaaggaggagau

SEQ ID NO: 675695 - RNA, 19 nt, Homo sapiens
  misc_RNA (1)...(19): siRNA sense strand
uuaaagcacuuccugauuc

SEQ ID NO: 675696 - RNA, 19 nt, Homo sapiens
  misc_RNA (1)...(19): siRNA sense strand
ccacaugacaguccuuuaa

SEQ ID NO: 675697 - RNA, 19 nt, Homo sapiens
  misc_RNA (1)...(19): siRNA sense strand
gcagauagaggaagagaau

SEQ ID NO: 675698 - RNA, 19 nt, Homo sapiens
  misc_RNA (1)...(19): siRNA sense strand
ggaggaggaugagcucaaa

SEQ ID NO: 675699 - RNA, 19 nt, Homo sapiens
  misc_RNA (1)...(19): siRNA sense strand
caguucagcuggcauauug

SEQ ID NO: 675700 - RNA, 19 nt, Homo sapiens
  misc_RNA (1)...(19): siRNA sense strand
cagaaguccuugcagauga

SEQ ID NO: 675701 - RNA, 19 nt, Homo sapiens
  misc_RNA (1)...(19): siRNA sense strand
gggcugauaucgaagcuau

SEQ ID NO: 675702 - RNA, 19 nt, Homo sapiens
  misc_RNA (1)...(19): siRNA sense strand
gaagaaacaacguaaagca

SEQ ID NO: 675703 - RNA, 19 nt, Homo sapiens
  misc_RNA (1)...(19): siRNA sense strand
ccauaucgcugaggaagaa

SEQ ID NO: 675704 - RNA, 19 nt, Homo sapiens
  misc_RNA (1)...(19): siRNA sense strand
caucaacagucaaggagaa

SEQ ID NO: 675705 - RNA, 19 nt, Homo sapiens
  misc_RNA (1)...(19): siRNA sense strand
guacagcucugcgcucuca

SEQ ID NO: 675706 - RNA, 19 nt, Homo sapiens
  misc_RNA (1)...(19): siRNA sense strand
acaguaauccgaucccuua

SEQ ID NO: 675707 - RNA, 19 nt, Homo sapiens
  misc_RNA (1)...(19): siRNA sense strand
gaaacagguugauaagaac

SEQ ID NO: 675708 - RNA, 19 nt, Homo sapiens
  misc_RNA (1)...(19): siRNA sense strand
uugagaagcuugaacagaa

SEQ ID NO: 675709 - RNA, 19 nt, Homo sapiens
  misc_RNA (1)...(19): siRNA sense strand
gccaauaauuucugaagau

SEQ ID NO: 675710 - RNA, 19 nt, Homo sapiens
  misc_RNA (1)...(19): siRNA sense strand
caaagucaguccucugcuu

SEQ ID NO: 675711 - RNA, 19 nt, Homo sapiens
  misc_RNA (1)...(19): siRNA sense strand
acaugacaguccuuuaaua

SEQ ID NO: 675712 - RNA, 19 nt, Homo sapiens
  misc_RNA (1)...(19): siRNA sense strand
ucaaggagaauaugaagaa

SEQ ID NO: 675713 - RNA, 19 nt, Homo sapiens
  misc_RNA (1)...(19): siRNA sense strand
ccuuugagcuguuggauau

SEQ ID NO: 675714 - RNA, 19 nt, Homo sapiens
  misc_RNA (1)...(19): siRNA sense strand
ugaagaagcgcuuaagaug

SEQ ID NO: 675715 - RNA, 19 nt, Homo sapiens
  misc_RNA (1)...(19): siRNA sense strand
gaagcuugaacagaaauua

SEQ ID NO: 675716 - RNA, 19 nt, Homo sapiens
  misc_RNA (1)...(19): siRNA sense strand
gcagaggucaaggaacuua

SEQ ID NO: 675717 - RNA, 19 nt, Homo sapiens
  misc_RNA (1)...(19): siRNA sense strand
gacuuuggcuuccacagaa

SEQ ID NO: 675718 - RNA, 19 nt, Homo sapiens
  misc_RNA (1)...(19): siRNA sense strand
ugagaagcuugaacagaaa

SEQ ID NO: 675719 - RNA, 19 nt, Homo sapiens
  misc_RNA (1)...(19): siRNA sense strand
gagcacagcauaagugaca

SEQ ID NO: 675720 - RNA, 19 nt, Homo sapiens
  misc_RNA (1)...(19): siRNA sense strand
aggaggagauuauccauau

SEQ ID NO: 675721 - RNA, 19 nt, Homo sapiens
  misc_RNA (1)...(19): siRNA sense strand
gagaagaaacaacguaaag

SEQ ID NO: 675722 - RNA, 19 nt, Homo sapiens
  misc_RNA (1)...(19): siRNA sense strand
gcagacagaagagcuauga

SEQ ID NO: 675723 - RNA, 19 nt, Homo sapiens
  misc_RNA (1)...(19): siRNA sense strand
ugacaguccuuuaauagag

SEQ ID NO: 675724 - RNA, 19 nt, Homo sapiens
  misc_RNA (1)...(19): siRNA sense strand
ccucgggucuggugcagua

SEQ ID NO: 675725 - RNA, 19 nt, Homo sapiens
  misc_RNA (1)...(19): siRNA sense strand
caucaggacuuguaaacag

SEQ ID NO: 675726 - RNA, 19 nt, Homo sapiens
  misc_RNA (1)...(19): siRNA sense strand
ugcaacaacugccaaagaa

SEQ ID NO: 675727 - RNA, 19 nt, Homo sapiens
  misc_RNA (1)...(19): siRNA sense strand
aaagacagcuuggugaagu

SEQ ID NO: 675728 - RNA, 19 nt, Homo sapiens
  misc_RNA (1)...(19): siRNA sense strand
gugcagcauuuguggauga

SEQ ID NO: 675729 - RNA, 19 nt, Homo sapiens
  misc_RNA (1)...(19): siRNA sense strand
gacaguccuuuaauagaga

SEQ ID NO: 675730 - RNA, 19 nt, Homo sapiens
  misc_RNA (1)...(19): siRNA sense strand
ccgaagagagcccugauaa

SEQ ID NO: 675731 - RNA, 19 nt, Homo sapiens
  misc_RNA (1)...(19): siRNA sense strand
caacagucaaggagaauau

SEQ ID NO: 675732 - RNA, 19 nt, Homo sapiens
  misc_RNA (1)...(19): siRNA sense strand
guacagccaacgcuauuga

SEQ ID NO: 675733 - RNA, 19 nt, Homo sapiens
  misc_RNA (1)...(19): siRNA sense strand
guugcgagcugagaagaaa

SEQ ID NO: 675734 - RNA, 19 nt, Homo sapiens
  misc_RNA (1)...(19): siRNA sense strand
cauauggccaugacacuaa

SEQ ID NO: 675735 - RNA, 19 nt, Homo sapiens
  misc_RNA (1)...(19): siRNA sense strand
uaaacaacaacgacuggua

SEQ ID NO: 675736 - RNA, 19 nt, Homo sapiens
  misc_RNA (1)...(19): siRNA sense strand
ccacaggagcacagcauaa

SEQ ID NO: 675737 - RNA, 19 nt, Homo sapiens
  misc_RNA (1)...(19): siRNA sense strand
aaagcuuucugguuucuga

SEQ ID NO: 675738 - RNA, 19 nt, Homo sapiens
  misc_RNA (1)...(19): siRNA sense strand
cagcauuuguggaugagaa

SEQ ID NO: 675739 - RNA, 19 nt, Homo sapiens
  misc_RNA (1)...(19): siRNA sense strand
gcgcuuaagauggcaguua

SEQ ID NO: 675740 - RNA, 19 nt, Homo sapiens
  misc_RNA (1)...(19): siRNA sense strand
ccaauaauuucugaagauc

SEQ ID NO: 675741 - RNA, 19 nt, Homo sapiens
  misc_RNA (1)...(19): siRNA sense strand
ggaggaagcagaagaagac

SEQ ID NO: 675742 - RNA, 19 nt, Homo sapiens
  misc_RNA (1)...(19): siRNA sense strand
ucagagaacaagugguuaa

SEQ ID NO: 675743 - RNA, 19 nt, Homo sapiens
  misc_RNA (1)...(19): siRNA sense strand
gaagaagccacuugcacau

SEQ ID NO: 675744 - RNA, 19 nt, Homo sapiens
  misc_RNA (1)...(19): siRNA sense strand
uaacgaaacgguugagaag

SEQ ID NO: 675745 - RNA, 19 nt, Homo sapiens
  misc_RNA (1)...(19): siRNA sense strand
gaaggaccacuuggaaaug

SEQ ID NO: 675746 - RNA, 19 nt, Homo sapiens
  misc_RNA (1)...(19): siRNA sense strand
gcagucguuuccacuuguu

SEQ ID NO: 675747 - RNA, 19 nt, Homo sapiens
  misc_RNA (1)...(19): siRNA sense strand
uaaagcagaggucaaggaa

SEQ ID NO: 675748 - RNA, 19 nt, Homo sapiens
  misc_RNA (1)...(19): siRNA sense strand
gguguccgcuaccagugua

SEQ ID NO: 675749 - RNA, 19 nt, Homo sapiens
  misc_RNA (1)...(19): siRNA sense strand
gaauaugaagaagcgcuua

SEQ ID NO: 675750 - RNA, 19 nt, Homo sapiens
  misc_RNA (1)...(19): siRNA sense strand
gaggaugagcucaaagaug

SEQ ID NO: 675751 - RNA, 19 nt, Homo sapiens
  misc_RNA (1)...(19): siRNA sense strand
ggaggaggaugaggaggau

SEQ ID NO: 675752 - RNA, 19 nt, Homo sapiens
  misc_RNA (1)...(19): siRNA sense strand
uaaagaggaaggcugagaa

SEQ ID NO: 675753 - RNA, 19 nt, Homo sapiens
  misc_RNA (1)...(19): siRNA sense strand
acacagaccagccucaaga

SEQ ID NO: 675754 - RNA, 19 nt, Homo sapiens
  misc_RNA (1)...(19): siRNA sense strand
gugcagucguuuccacuug

SEQ ID NO: 675755 - RNA, 19 nt, Homo sapiens
  misc_RNA (1)...(19): siRNA sense strand
gcagaugcaaguccacgaa

SEQ ID NO: 675756 - RNA, 19 nt, Homo sapiens
  misc_RNA (1)...(19): siRNA sense strand
ugaaggaccacuuggaaau

SEQ ID NO: 675757 - RNA, 19 nt, Homo sapiens
  misc_RNA (1)...(19): siRNA sense strand
uaaagcacuuccugauucu

SEQ ID NO: 675758 - RNA, 19 nt, Homo sapiens
  misc_RNA (1)...(19): siRNA sense strand
caacuugggcugauaucga

SEQ ID NO: 675759 - RNA, 19 nt, Homo sapiens
  misc_RNA (1)...(19): siRNA sense strand
ggucuggugcaguaucaua

SEQ ID NO: 675760 - RNA, 19 nt, Homo sapiens
  misc_RNA (1)...(19): siRNA sense strand
cagcuuaaacuccauagga

SEQ ID NO: 675761 - RNA, 19 nt, Homo sapiens
  misc_RNA (1)...(19): siRNA sense strand
aagcagaggucaaggaacu

SEQ ID NO: 675762 - RNA, 19 nt, Homo sapiens
  misc_RNA (1)...(19): siRNA sense strand
guaaagcagaggucaagga

SEQ ID NO: 675763 - RNA, 19 nt, Homo sapiens
  misc_RNA (1)...(19): siRNA sense strand
gaagccacuugcacauuac

SEQ ID NO: 675764 - RNA, 19 nt, Homo sapiens
  misc_RNA (1)...(19): siRNA sense strand
cagacugguucacaagcua

SEQ ID NO: 675765 - RNA, 19 nt, Homo sapiens
  misc_RNA (1)...(19): siRNA sense strand
gcacagccaauaauuucug

SEQ ID NO: 675766 - RNA, 19 nt, Homo sapiens
  misc_RNA (1)...(19): siRNA sense strand
uaaagaagaaagacagcuu

SEQ ID NO: 675767 - RNA, 19 nt, Homo sapiens
  misc_RNA (1)...(19): siRNA sense strand
guaccuccguuaugccaau

SEQ ID NO: 675768 - RNA, 19 nt, Homo sapiens
  misc_RNA (1)...(19): siRNA sense strand
ccaggaaccaaguuuauca

SEQ ID NO: 675769 - RNA, 19 nt, Homo sapiens
  misc_RNA (1)...(19): siRNA sense strand
caucaugggagcagcauug

SEQ ID NO: 675770 - RNA, 19 nt, Homo sapiens
  misc_RNA (1)...(19): siRNA sense strand
gagcucuccuuguguacau

SEQ ID NO: 675771 - RNA, 19 nt, Homo sapiens
  misc_RNA (1)...(19): siRNA sense strand
ggaggagauuauccauauc

SEQ ID NO: 675772 - RNA, 19 nt, Homo sapiens
  misc_RNA (1)...(19): siRNA sense strand
aaagaaggauguuuugguu

SEQ ID NO: 675773 - RNA, 19 nt, Homo sapiens
  misc_RNA (1)...(19): siRNA sense strand
gaaaugggauucugugaca

SEQ ID NO: 675774 - RNA, 19 nt, Homo sapiens
  misc_RNA (1)...(19): siRNA sense strand
ggaguggauuuaccaguua

SEQ ID NO: 675775 - RNA, 19 nt, Homo sapiens
  misc_RNA (1)...(19): siRNA sense strand
gaacguauacuucccauug

SEQ ID NO: 675776 - RNA, 19 nt, Homo sapiens
  misc_RNA (1)...(19): siRNA sense strand
gaagagcuaugaccacuca

SEQ ID NO: 675777 - RNA, 19 nt, Homo sapiens
  misc_RNA (1)...(19): siRNA sense strand
agaaacagguugauaagaa

SEQ ID NO: 675778 - RNA, 19 nt, Homo sapiens
  misc_RNA (1)...(19): siRNA sense strand
gaagagguauccaucaaca

SEQ ID NO: 675779 - RNA, 19 nt, Homo sapiens
  misc_RNA (1)...(19): siRNA sense strand
gaagagagcccugauaaca

SEQ ID NO: 675780 - RNA, 19 nt, Homo sapiens
  misc_RNA (1)...(19): siRNA sense strand
gaggaaggcugagaacauu

SEQ ID NO: 675781 - RNA, 19 nt, Homo sapiens
  misc_RNA (1)...(19): siRNA sense strand
agaagccacuugcacauua

SEQ ID NO: 675782 - RNA, 19 nt, Homo sapiens
  misc_RNA (1)...(19): siRNA sense strand
acacaaagcucaaguucau

SEQ ID NO: 675783 - RNA, 19 nt, Homo sapiens
  misc_RNA (1)...(19): siRNA sense strand
auucaaagcuuucugguuu

SEQ ID NO: 675784 - RNA, 19 nt, Homo sapiens
  misc_RNA (1)...(19): siRNA sense strand
gaacaagugguuaacgaaa

SEQ ID NO: 675785 - RNA, 19 nt, Homo sapiens
  misc_RNA (1)...(19): siRNA sense strand
gagaacaagugguuaacga

SEQ ID NO: 675786 - RNA, 19 nt, Homo sapiens
  misc_RNA (1)...(19): siRNA sense strand
aggaugagcucaaagauga

SEQ ID NO: 675787 - RNA, 19 nt, Homo sapiens
  misc_RNA (1)...(19): siRNA sense strand
ggacccaguuuguguguga

SEQ ID NO: 675788 - RNA, 19 nt, Homo sapiens
  misc_RNA (1)...(19): siRNA sense strand
gaugagaauuugccugaug

SEQ ID NO: 675789 - RNA, 19 nt, Homo sapiens
  misc_RNA (1)...(19): siRNA sense strand
ucacaaaggccagcaauuu

SEQ ID NO: 675790 - RNA, 19 nt, Homo sapiens
  misc_RNA (1)...(19): siRNA sense strand
caagcuaccuggagacguu

SEQ ID NO: 675791 - RNA, 19 nt, Homo sapiens
  misc_RNA (1)...(19): siRNA sense strand
guaaacagcagacagaaga

SEQ ID NO: 675792 - RNA, 19 nt, Homo sapiens
  misc_RNA (1)...(19): siRNA sense strand
agagagcccugauaacauu

SEQ ID NO: 675793 - RNA, 19 nt, Homo sapiens
  misc_RNA (1)...(19): siRNA sense strand
ggauuuaccaguuaccaua

SEQ ID NO: 675794 - RNA, 19 nt, Homo sapiens
  misc_RNA (1)...(19): siRNA sense strand
gaaaugagaaggaggagau

SEQ ID NO: 675795 - RNA, 19 nt, Homo sapiens
  misc_RNA (1)...(19): siRNA sense strand
uuaaagcacuuccugauuc

SEQ ID NO: 675796 - RNA, 19 nt, Homo sapiens
  misc_RNA (1)...(19): siRNA sense strand
ccacaugacaguccuuuaa

SEQ ID NO: 675797 - RNA, 19 nt, Homo sapiens
  misc_RNA (1)...(19): siRNA sense strand
gcagauagaggaagagaau

SEQ ID NO: 675798 - RNA, 19 nt, Homo sapiens
  misc_RNA (1)...(19): siRNA sense strand
ggaggaggaugagcucaaa

SEQ ID NO: 675799 - RNA, 19 nt, Homo sapiens
  misc_RNA (1)...(19): siRNA sense strand
caguucagcuggcauauug

SEQ ID NO: 675800 - RNA, 19 nt, Homo sapiens
  misc_RNA (1)...(19): siRNA sense strand
cagaaguccuugcagauga

SEQ ID NO: 675801 - RNA, 19 nt, Homo sapiens
  misc_RNA (1)...(19): siRNA sense strand
gggcugauaucgaagcuau

SEQ ID NO: 675802 - RNA, 19 nt, Homo sapiens
  misc_RNA (1)...(19): siRNA sense strand
gaagaaacaacguaaagca

SEQ ID NO: 675803 - RNA, 19 nt, Homo sapiens
  misc_RNA (1)...(19): siRNA sense strand
ccauaucgcugaggaagaa

SEQ ID NO: 675804 - RNA, 19 nt, Homo sapiens
  misc_RNA (1)...(19): siRNA sense strand
caucaacagucaaggagaa

SEQ ID NO: 675805 - RNA, 19 nt, Homo sapiens
  misc_RNA (1)...(19): siRNA sense strand
guacagcucugcgcucuca

SEQ ID NO: 675806 - RNA, 19 nt, Homo sapiens
  misc_RNA (1)...(19): siRNA sense strand
acaguaauccgaucccuua

SEQ ID NO: 675807 - RNA, 19 nt, Homo sapiens
  misc_RNA (1)...(19): siRNA sense strand
gaaacagguugauaagaac

SEQ ID NO: 675808 - RNA, 19 nt, Homo sapiens
  misc_RNA (1)...(19): siRNA sense strand
uugagaagcuugaacagaa

SEQ ID NO: 675809 - RNA, 19 nt, Homo sapiens
  misc_RNA (1)...(19): siRNA sense strand
gccaauaauuucugaagau

SEQ ID NO: 675810 - RNA, 19 nt, Homo sapiens
  misc_RNA (1)...(19): siRNA sense strand
caaagucaguccucugcuu

SEQ ID NO: 675811 - RNA, 19 nt, Homo sapiens
  misc_RNA (1)...(19): siRNA sense strand
acaugacaguccuuuaaua

SEQ ID NO: 675812 - RNA, 19 nt, Homo sapiens
  misc_RNA (1)...(19): siRNA sense strand
ucaaggagaauaugaagaa

SEQ ID NO: 675813 - RNA, 19 nt, Homo sapiens
  misc_RNA (1)...(19): siRNA sense strand
ccuuugagcuguuggauau

SEQ ID NO: 675814 - RNA, 19 nt, Homo sapiens
  misc_RNA (1)...(19): siRNA sense strand
ugaagaagcgcuuaagaug

SEQ ID NO: 675815 - RNA, 19 nt, Homo sapiens
  misc_RNA (1)...(19): siRNA sense strand
gaagcuugaacagaaauua

SEQ ID NO: 675816 - RNA, 19 nt, Homo sapiens
  misc_RNA (1)...(19): siRNA sense strand
gcagaggucaaggaacuua

SEQ ID NO: 675817 - RNA, 19 nt, Homo sapiens
  misc_RNA (1)...(19): siRNA sense strand
gacuuuggcuuccacagaa

SEQ ID NO: 675818 - RNA, 19 nt, Homo sapiens
  misc_RNA (1)...(19): siRNA sense strand
ugagaagcuugaacagaaa

SEQ ID NO: 675819 - RNA, 19 nt, Homo sapiens
  misc_RNA (1)...(19): siRNA sense strand
gagcacagcauaagugaca

SEQ ID NO: 675820 - RNA, 19 nt, Homo sapiens
  misc_RNA (1)...(19): siRNA sense strand
aggaggagauuauccauau

SEQ ID NO: 675821 - RNA, 19 nt, Homo sapiens
  misc_RNA (1)...(19): siRNA sense strand
gagaagaaacaacguaaag

SEQ ID NO: 675822 - RNA, 19 nt, Homo sapiens
  misc_RNA (1)...(19): siRNA sense strand
gcagacagaagagcuauga

SEQ ID NO: 675823 - RNA, 19 nt, Homo sapiens
  misc_RNA (1)...(19): siRNA sense strand
ugacaguccuuuaauagag

SEQ ID NO: 675824 - RNA, 19 nt, Homo sapiens
  misc_RNA (1)...(19): siRNA sense strand
ccucgggucuggugcagua

SEQ ID NO: 675825 - RNA, 19 nt, Homo sapiens
  misc_RNA (1)...(19): siRNA sense strand
caucaggacuuguaaacag

SEQ ID NO: 675826 - RNA, 19 nt, Homo sapiens
  misc_RNA (1)...(19): siRNA sense strand
ugcaacaacugccaaagaa

SEQ ID NO: 675827 - RNA, 19 nt, Homo sapiens
  misc_RNA (1)...(19): siRNA sense strand
aaagacagcuuggugaagu

SEQ ID NO: 675828 - RNA, 19 nt, Homo sapiens
  misc_RNA (1)...(19): siRNA sense strand
gugcagcauuuguggauga

SEQ ID NO: 675829 - RNA, 19 nt, Homo sapiens
  misc_RNA (1)...(19): siRNA sense strand
gacaguccuuuaauagaga

SEQ ID NO: 675830 - RNA, 19 nt, Homo sapiens
  misc_RNA (1)...(19): siRNA sense strand
ccgaagagagcccugauaa

SEQ ID NO: 675831 - RNA, 19 nt, Homo sapiens
  misc_RNA (1)...(19): siRNA sense strand
caacagucaaggagaauau

SEQ ID NO: 675832 - RNA, 19 nt, Homo sapiens
  misc_RNA (1)...(19): siRNA sense strand
guacagccaacgcuauuga

SEQ ID NO: 675833 - RNA, 19 nt, Homo sapiens
  misc_RNA (1)...(19): siRNA sense strand
guugcgagcugagaagaaa

SEQ ID NO: 675834 - RNA, 19 nt, Homo sapiens
  misc_RNA (1)...(19): siRNA sense strand
cauauggccaugacacuaa

SEQ ID NO: 675835 - RNA, 19 nt, Homo sapiens
  misc_RNA (1)...(19): siRNA sense strand
uaaacaacaacgacuggua

SEQ ID NO: 675836 - RNA, 19 nt, Homo sapiens
  misc_RNA (1)...(19): siRNA sense strand
ccacaggagcacagcauaa

SEQ ID NO: 675837 - RNA, 19 nt, Homo sapiens
  misc_RNA (1)...(19): siRNA sense strand
aaagcuuucugguuucuga

SEQ ID NO: 675838 - RNA, 19 nt, Homo sapiens
  misc_RNA (1)...(19): siRNA sense strand
cagcauuuguggaugagaa

SEQ ID NO: 675839 - RNA, 19 nt, Homo sapiens
  misc_RNA (1)...(19): siRNA sense strand
gcgcuuaagauggcaguua

SEQ ID NO: 675840 - RNA, 19 nt, Homo sapiens
  misc_RNA (1)...(19): siRNA sense strand
ccaauaauuucugaagauc

SEQ ID NO: 675841 - RNA, 19 nt, Homo sapiens
  misc_RNA (1)...(19): siRNA sense strand
ggaggaagcagaagaagac

SEQ ID NO: 675842 - RNA, 19 nt, Homo sapiens
  misc_RNA (1)...(19): siRNA sense strand
ucagagaacaagugguuaa

SEQ ID NO: 675843 - RNA, 19 nt, Homo sapiens
  misc_RNA (1)...(19): siRNA sense strand
gaagaagccacuugcacau

SEQ ID NO: 675844 - RNA, 19 nt, Homo sapiens
  misc_RNA (1)...(19): siRNA sense strand
uaacgaaacgguugagaag

SEQ ID NO: 675845 - RNA, 19 nt, Homo sapiens
  misc_RNA (1)...(19): siRNA sense strand
gaaggaccacuuggaaaug

SEQ ID NO: 675846 - RNA, 19 nt, Homo sapiens
  misc_RNA (1)...(19): siRNA sense strand
gcagucguuuccacuuguu

SEQ ID NO: 675847 - RNA, 19 nt, Homo sapiens
  misc_RNA (1)...(19): siRNA sense strand
uaaagcagaggucaaggaa

SEQ ID NO: 675848 - RNA, 19 nt, Homo sapiens
  misc_RNA (1)...(19): siRNA sense strand
gguguccgcuaccagugua

SEQ ID NO: 675849 - RNA, 19 nt, Homo sapiens
  misc_RNA (1)...(19): siRNA sense strand
gaauaugaagaagcgcuua

SEQ ID NO: 675850 - RNA, 19 nt, Homo sapiens
  misc_RNA (1)...(19): siRNA sense strand
gaggaugagcucaaagaug

SEQ ID NO: 675851 - RNA, 19 nt, Homo sapiens
  misc_RNA (1)...(19): siRNA sense strand
ggaggaggaugaggaggau

SEQ ID NO: 675852 - RNA, 19 nt, Homo sapiens
  misc_RNA (1)...(19): siRNA sense strand
uaaagaggaaggcugagaa

SEQ ID NO: 675853 - RNA, 19 nt, Homo sapiens
  misc_RNA (1)...(19): siRNA sense strand
acacagaccagccucaaga

SEQ ID NO: 675854 - RNA, 19 nt, Homo sapiens
  misc_RNA (1)...(19): siRNA sense strand
gugcagucguuuccacuug

SEQ ID NO: 675855 - RNA, 19 nt, Homo sapiens
  misc_RNA (1)...(19): siRNA sense strand
gcagaugcaaguccacgaa

SEQ ID NO: 675856 - RNA, 19 nt, Homo sapiens
  misc_RNA (1)...(19): siRNA sense strand
ugaaggaccacuuggaaau

SEQ ID NO: 675857 - RNA, 19 nt, Homo sapiens
  misc_RNA (1)...(19): siRNA sense strand
uaaagcacuuccugauucu

SEQ ID NO: 675858 - RNA, 19 nt, Homo sapiens
  misc_RNA (1)...(19): siRNA sense strand
caacuugggcugauaucga

SEQ ID NO: 675859 - RNA, 19 nt, Homo sapiens
  misc_RNA (1)...(19): siRNA sense strand
ggucuggugcaguaucaua

SEQ ID NO: 675860 - RNA, 19 nt, Homo sapiens
  misc_RNA (1)...(19): siRNA sense strand
cagcuuaaacuccauagga

SEQ ID NO: 675861 - RNA, 19 nt, Homo sapiens
  misc_RNA (1)...(19): siRNA sense strand
aagcagaggucaaggaacu

SEQ ID NO: 675862 - RNA, 19 nt, Homo sapiens
  misc_RNA (1)...(19): siRNA sense strand
guaaagcagaggucaagga

SEQ ID NO: 675863 - RNA, 19 nt, Homo sapiens
  misc_RNA (1)...(19): siRNA sense strand
gaagccacuugcacauuac

SEQ ID NO: 675864 - RNA, 19 nt, Homo sapiens
  misc_RNA (1)...(19): siRNA sense strand
cagacugguucacaagcua

SEQ ID NO: 675865 - RNA, 19 nt, Homo sapiens
  misc_RNA (1)...(19): siRNA sense strand
gcacagccaauaauuucug

SEQ ID NO: 675866 - RNA, 19 nt, Homo sapiens
  misc_RNA (1)...(19): siRNA sense strand
uaaagaagaaagacagcuu

SEQ ID NO: 675867 - RNA, 19 nt, Homo sapiens
  misc_RNA (1)...(19): siRNA sense strand
guaccuccguuaugccaau

SEQ ID NO: 675868 - RNA, 19 nt, Homo sapiens
  misc_RNA (1)...(19): siRNA sense strand
ccaggaaccaaguuuauca

SEQ ID NO: 675869 - RNA, 19 nt, Homo sapiens
  misc_RNA (1)...(19): siRNA sense strand
caucaugggagcagcauug

SEQ ID NO: 675870 - RNA, 19 nt, Homo sapiens
  misc_RNA (1)...(19): siRNA sense strand
gagcucuccuuguguacau

SEQ ID NO: 675871 - RNA, 19 nt, Homo sapiens
  misc_RNA (1)...(19): siRNA sense strand
ggaggagauuauccauauc

SEQ ID NO: 675872 - RNA, 19 nt, Homo sapiens
  misc_RNA (1)...(19): siRNA sense strand
aaagaaggauguuuugguu

SEQ ID NO: 675873 - RNA, 19 nt, Homo sapiens
  misc_RNA (1)...(19): siRNA sense strand
gaaaugggauucugugaca

SEQ ID NO: 675874 - RNA, 19 nt, Homo sapiens
  misc_RNA (1)...(19): siRNA sense strand
ggaguggauuuaccaguua

SEQ ID NO: 675875 - RNA, 19 nt, Homo sapiens
  misc_RNA (1)...(19): siRNA sense strand
gaacguauacuucccauug

SEQ ID NO: 675876 - RNA, 19 nt, Homo sapiens
  misc_RNA (1)...(19): siRNA sense strand
gaagagcuaugaccacuca

SEQ ID NO: 675877 - RNA, 19 nt, Homo sapiens
  misc_RNA (1)...(19): siRNA sense strand
agaaacagguugauaagaa

SEQ ID NO: 675878 - RNA, 19 nt, Homo sapiens
  misc_RNA (1)...(19): siRNA sense strand
gaagagguauccaucaaca

SEQ ID NO: 675879 - RNA, 19 nt, Homo sapiens
  misc_RNA (1)...(19): siRNA sense strand
gaagagagcccugauaaca

SEQ ID NO: 675880 - RNA, 19 nt, Homo sapiens
  misc_RNA (1)...(19): siRNA sense strand
gaggaaggcugagaacauu

SEQ ID NO: 675881 - RNA, 19 nt, Homo sapiens
  misc_RNA (1)...(19): siRNA sense strand
agaagccacuugcacauua

SEQ ID NO: 675882 - RNA, 19 nt, Homo sapiens
  misc_RNA (1)...(19): siRNA sense strand
acacaaagcucaaguucau

SEQ ID NO: 675883 - RNA, 19 nt, Homo sapiens
  misc_RNA (1)...(19): siRNA sense strand
auucaaagcuuucugguuu

SEQ ID NO: 675884 - RNA, 19 nt, Homo sapiens
  misc_RNA (1)...(19): siRNA sense strand
gaacaagugguuaacgaaa

SEQ ID NO: 675885 - RNA, 19 nt, Homo sapiens
  misc_RNA (1)...(19): siRNA sense strand
gagaacaagugguuaacga

SEQ ID NO: 675886 - RNA, 19 nt, Homo sapiens
  misc_RNA (1)...(19): siRNA sense strand
aggaugagcucaaagauga

SEQ ID NO: 675887 - RNA, 19 nt, Homo sapiens
  misc_RNA (1)...(19): siRNA sense strand
ggacccaguuuguguguga

SEQ ID NO: 675888 - RNA, 19 nt, Homo sapiens
  misc_RNA (1)...(19): siRNA sense strand
gaugagaauuugccugaug

SEQ ID NO: 675889 - RNA, 19 nt, Homo sapiens
  misc_RNA (1)...(19): siRNA sense strand
ucacaaaggccagcaauuu

SEQ ID NO: 675890 - RNA, 19 nt, Homo sapiens
  misc_RNA (1)...(19): siRNA sense strand
caagcuaccuggagacguu

SEQ ID NO: 675891 - RNA, 19 nt, Homo sapiens
  misc_RNA (1)...(19): siRNA sense strand
guaaacagcagacagaaga

SEQ ID NO: 675892 - RNA, 19 nt, Homo sapiens
  misc_RNA (1)...(19): siRNA sense strand
agagagcccugauaacauu

SEQ ID NO: 675893 - RNA, 19 nt, Homo sapiens
  misc_RNA (1)...(19): siRNA sense strand
ggauuuaccaguuaccaua

SEQ ID NO: 675894 - RNA, 19 nt, Homo sapiens
  misc_RNA (1)...(19): siRNA sense strand
gaaaugagaaggaggagau

SEQ ID NO: 675895 - RNA, 19 nt, Homo sapiens
  misc_RNA (1)...(19): siRNA sense strand
uuaaagcacuuccugauuc

SEQ ID NO: 675896 - RNA, 19 nt, Homo sapiens
  misc_RNA (1)...(19): siRNA sense strand
ccacaugacaguccuuuaa

SEQ ID NO: 675897 - RNA, 19 nt, Homo sapiens
  misc_RNA (1)...(19): siRNA sense strand
gcagauagaggaagagaau

SEQ ID NO: 675898 - RNA, 19 nt, Homo sapiens
  misc_RNA (1)...(19): siRNA sense strand
ggaggaggaugagcucaaa

SEQ ID NO: 675899 - RNA, 19 nt, Homo sapiens
  misc_RNA (1)...(19): siRNA sense strand
caguucagcuggcauauug

SEQ ID NO: 675900 - RNA, 19 nt, Homo sapiens
  misc_RNA (1)...(19): siRNA sense strand
cagaaguccuugcagauga

SEQ ID NO: 675901 - RNA, 19 nt, Homo sapiens
  misc_RNA (1)...(19): siRNA sense strand
gggcugauaucgaagcuau

SEQ ID NO: 675902 - RNA, 19 nt, Homo sapiens
  misc_RNA (1)...(19): siRNA sense strand
gaagaaacaacguaaagca

SEQ ID NO: 675903 - RNA, 19 nt, Homo sapiens
  misc_RNA (1)...(19): siRNA sense strand
ccauaucgcugaggaagaa

SEQ ID NO: 675904 - RNA, 19 nt, Homo sapiens
  misc_RNA (1)...(19): siRNA sense strand
caucaacagucaaggagaa

SEQ ID NO: 675905 - RNA, 19 nt, Homo sapiens
  misc_RNA (1)...(19): siRNA sense strand
guacagcucugcgcucuca

SEQ ID NO: 675906 - RNA, 19 nt, Homo sapiens
  misc_RNA (1)...(19): siRNA sense strand
acaguaauccgaucccuua

SEQ ID NO: 675907 - RNA, 19 nt, Homo sapiens
  misc_RNA (1)...(19): siRNA sense strand
gaaacagguugauaagaac

SEQ ID NO: 675908 - RNA, 19 nt, Homo sapiens
  misc_RNA (1)...(19): siRNA sense strand
uugagaagcuugaacagaa

SEQ ID NO: 675909 - RNA, 19 nt, Homo sapiens
  misc_RNA (1)...(19): siRNA sense strand
gccaauaauuucugaagau

SEQ ID NO: 675910 - RNA, 19 nt, Homo sapiens
  misc_RNA (1)...(19): siRNA sense strand
caaagucaguccucugcuu

SEQ ID NO: 675911 - RNA, 19 nt, Homo sapiens
  misc_RNA (1)...(19): siRNA sense strand
acaugacaguccuuuaaua

SEQ ID NO: 675912 - RNA, 19 nt, Homo sapiens
  misc_RNA (1)...(19): siRNA sense strand
ucaaggagaauaugaagaa

SEQ ID NO: 675913 - RNA, 19 nt, Homo sapiens
  misc_RNA (1)...(19): siRNA sense strand
ccuuugagcuguuggauau

SEQ ID NO: 675914 - RNA, 19 nt, Homo sapiens
  misc_RNA (1)...(19): siRNA sense strand
ugaagaagcgcuuaagaug

SEQ ID NO: 675915 - RNA, 19 nt, Homo sapiens
  misc_RNA (1)...(19): siRNA sense strand
gaagcuugaacagaaauua

SEQ ID NO: 675916 - RNA, 19 nt, Homo sapiens
  misc_RNA (1)...(19): siRNA sense strand
gcagaggucaaggaacuua

SEQ ID NO: 675917 - RNA, 19 nt, Homo sapiens
  misc_RNA (1)...(19): siRNA sense strand
gacuuuggcuuccacagaa

SEQ ID NO: 675918 - RNA, 19 nt, Homo sapiens
  misc_RNA (1)...(19): siRNA sense strand
ugagaagcuugaacagaaa

SEQ ID NO: 675919 - RNA, 19 nt, Homo sapiens
  misc_RNA (1)...(19): siRNA sense strand
gagcacagcauaagugaca

SEQ ID NO: 675920 - RNA, 19 nt, Homo sapiens
  misc_RNA (1)...(19): siRNA sense strand
aggaggagauuauccauau

SEQ ID NO: 675921 - RNA, 19 nt, Homo sapiens
  misc_RNA (1)...(19): siRNA sense strand
gagaagaaacaacguaaag

SEQ ID NO: 675922 - RNA, 19 nt, Homo sapiens
  misc_RNA (1)...(19): siRNA sense strand
gcagacagaagagcuauga

SEQ ID NO: 675923 - RNA, 19 nt, Homo sapiens
  misc_RNA (1)...(19): siRNA sense strand
ugacaguccuuuaauagag

SEQ ID NO: 675924 - RNA, 19 nt, Homo sapiens
  misc_RNA (1)...(19): siRNA sense strand
ccucgggucuggugcagua

SEQ ID NO: 675925 - RNA, 19 nt, Homo sapiens
  misc_RNA (1)...(19): siRNA sense strand
caucaggacuuguaaacag

SEQ ID NO: 675926 - RNA, 19 nt, Homo sapiens
  misc_RNA (1)...(19): siRNA sense strand
ugcaacaacugccaaagaa

SEQ ID NO: 675927 - RNA, 19 nt, Homo sapiens
  misc_RNA (1)...(19): siRNA sense strand
aaagacagcuuggugaagu

SEQ ID NO: 675928 - RNA, 19 nt, Homo sapiens
  misc_RNA (1)...(19): siRNA sense strand
gugcagcauuuguggauga

SEQ ID NO: 675929 - RNA, 19 nt, Homo sapiens
  misc_RNA (1)...(19): siRNA sense strand
gacaguccuuuaauagaga

SEQ ID NO: 675930 - RNA, 19 nt, Homo sapiens
  misc_RNA (1)...(19): siRNA sense strand
ccgaagagagcccugauaa

SEQ ID NO: 675931 - RNA, 19 nt, Homo sapiens
  misc_RNA (1)...(19): siRNA sense strand
caacagucaaggagaauau

SEQ ID NO: 675932 - RNA, 19 nt, Homo sapiens
  misc_RNA (1)...(19): siRNA sense strand
guacagccaacgcuauuga

SEQ ID NO: 675933 - RNA, 19 nt, Homo sapiens
  misc_RNA (1)...(19): siRNA sense strand
guugcgagcugagaagaaa

SEQ ID NO: 675934 - RNA, 19 nt, Homo sapiens
  misc_RNA (1)...(19): siRNA sense strand
cauauggccaugacacuaa

SEQ ID NO: 675935 - RNA, 19 nt, Homo sapiens
  misc_RNA (1)...(19): siRNA sense strand
uaaacaacaacgacuggua

SEQ ID NO: 675936 - RNA, 19 nt, Homo sapiens
  misc_RNA (1)...(19): siRNA sense strand
ccacaggagcacagcauaa

SEQ ID NO: 675937 - RNA, 19 nt, Homo sapiens
  misc_RNA (1)...(19): siRNA sense strand
aaagcuuucugguuucuga

SEQ ID NO: 675938 - RNA, 19 nt, Homo sapiens
  misc_RNA (1)...(19): siRNA sense strand
cagcauuuguggaugagaa

SEQ ID NO: 675939 - RNA, 19 nt, Homo sapiens
  misc_RNA (1)...(19): siRNA sense strand
gcgcuuaagauggcaguua

SEQ ID NO: 675940 - RNA, 19 nt, Homo sapiens
  misc_RNA (1)...(19): siRNA sense strand
ccaauaauuucugaagauc

SEQ ID NO: 675941 - RNA, 19 nt, Homo sapiens
  misc_RNA (1)...(19): siRNA sense strand
ggaggaagcagaagaagac

SEQ ID NO: 675942 - RNA, 19 nt, Homo sapiens
  misc_RNA (1)...(19): siRNA sense strand
ucagagaacaagugguuaa

SEQ ID NO: 675943 - RNA, 19 nt, Homo sapiens
  misc_RNA (1)...(19): siRNA sense strand
gaagaagccacuugcacau

SEQ ID NO: 675944 - RNA, 19 nt, Homo sapiens
  misc_RNA (1)...(19): siRNA sense strand
uaacgaaacgguugagaag

SEQ ID NO: 675945 - RNA, 19 nt, Homo sapiens
  misc_RNA (1)...(19): siRNA sense strand
gaaggaccacuuggaaaug

SEQ ID NO: 675946 - RNA, 19 nt, Homo sapiens
  misc_RNA (1)...(19): siRNA sense strand
gcagucguuuccacuuguu

SEQ ID NO: 675947 - RNA, 19 nt, Homo sapiens
  misc_RNA (1)...(19): siRNA sense strand
uaaagcagaggucaaggaa

SEQ ID NO: 675948 - RNA, 19 nt, Homo sapiens
  misc_RNA (1)...(19): siRNA sense strand
gguguccgcuaccagugua

SEQ ID NO: 675949 - RNA, 19 nt, Homo sapiens
  misc_RNA (1)...(19): siRNA sense strand
gaauaugaagaagcgcuua

SEQ ID NO: 675950 - RNA, 19 nt, Homo sapiens
  misc_RNA (1)...(19): siRNA sense strand
gaggaugagcucaaagaug

SEQ ID NO: 675951 - RNA, 19 nt, Homo sapiens
  misc_RNA (1)...(19): siRNA sense strand
ggaggaggaugaggaggau

SEQ ID NO: 675952 - RNA, 19 nt, Homo sapiens
  misc_RNA (1)...(19): siRNA sense strand
uaaagaggaaggcugagaa

SEQ ID NO: 675953 - RNA, 19 nt, Homo sapiens
  misc_RNA (1)...(19): siRNA sense strand
acacagaccagccucaaga

SEQ ID NO: 675954 - RNA, 19 nt, Homo sapiens
  misc_RNA (1)...(19): siRNA sense strand
gugcagucguuuccacuug

SEQ ID NO: 675955 - RNA, 19 nt, Homo sapiens
  misc_RNA (1)...(19): siRNA sense strand
gcagaugcaaguccacgaa

SEQ ID NO: 675956 - RNA, 19 nt, Homo sapiens
  misc_RNA (1)...(19): siRNA sense strand
ugaaggaccacuuggaaau

SEQ ID NO: 675957 - RNA, 19 nt, Homo sapiens
  misc_RNA (1)...(19): siRNA sense strand
uaaagcacuuccugauucu

SEQ ID NO: 675958 - RNA, 19 nt, Homo sapiens
  misc_RNA (1)...(19): siRNA sense strand
caacuugggcugauaucga

SEQ ID NO: 675959 - RNA, 19 nt, Homo sapiens
  misc_RNA (1)...(19): siRNA sense strand
ggucuggugcaguaucaua

SEQ ID NO: 675960 - RNA, 19 nt, Homo sapiens
  misc_RNA (1)...(19): siRNA sense strand
cagcuuaaacuccauagga

SEQ ID NO: 675961 - RNA, 19 nt, Homo sapiens
  misc_RNA (1)...(19): siRNA sense strand
aagcagaggucaaggaacu

SEQ ID NO: 675962 - RNA, 19 nt, Homo sapiens
  misc_RNA (1)...(19): siRNA sense strand
guaaagcagaggucaagga

SEQ ID NO: 675963 - RNA, 19 nt, Homo sapiens
  misc_RNA (1)...(19): siRNA sense strand
gaagccacuugcacauuac

SEQ ID NO: 675964 - RNA, 19 nt, Homo sapiens
  misc_RNA (1)...(19): siRNA sense strand
cagacugguucacaagcua

SEQ ID NO: 675965 - RNA, 19 nt, Homo sapiens
  misc_RNA (1)...(19): siRNA sense strand
gcacagccaauaauuucug

SEQ ID NO: 675966 - RNA, 19 nt, Homo sapiens
  misc_RNA (1)...(19): siRNA sense strand
uaaagaagaaagacagcuu

SEQ ID NO: 675967 - RNA, 19 nt, Homo sapiens
  misc_RNA (1)...(19): siRNA sense strand
guaccuccguuaugccaau

SEQ ID NO: 675968 - RNA, 19 nt, Homo sapiens
  misc_RNA (1)...(19): siRNA sense strand
ccaggaaccaaguuuauca

SEQ ID NO: 675969 - RNA, 19 nt, Homo sapiens
  misc_RNA (1)...(19): siRNA sense strand
caucaugggagcagcauug

SEQ ID NO: 675970 - RNA, 19 nt, Homo sapiens
  misc_RNA (1)...(19): siRNA sense strand
gagcucuccuuguguacau

SEQ ID NO: 675971 - RNA, 19 nt, Homo sapiens
  misc_RNA (1)...(19): siRNA sense strand
ggaggagauuauccauauc

SEQ ID NO: 675972 - RNA, 19 nt, Homo sapiens
  misc_RNA (1)...(19): siRNA sense strand
aaagaaggauguuuugguu

SEQ ID NO: 675973 - RNA, 19 nt, Homo sapiens
  misc_RNA (1)...(19): siRNA sense strand
gaaagaagaugcucaagug

SEQ ID NO: 675974 - RNA, 19 nt, Homo sapiens
  misc_RNA (1)...(19): siRNA sense strand
ggagagaacgcauugcuua

SEQ ID NO: 675975 - RNA, 19 nt, Homo sapiens
  misc_RNA (1)...(19): siRNA sense strand
gaauuuaccggaucuguuu

SEQ ID NO: 675976 - RNA, 19 nt, Homo sapiens
  misc_RNA (1)...(19): siRNA sense strand
cgaaaggacgggagaaaua

SEQ ID NO: 675977 - RNA, 19 nt, Homo sapiens
  misc_RNA (1)...(19): siRNA sense strand
gaaaggacgggagaaauaa

SEQ ID NO: 675978 - RNA, 19 nt, Homo sapiens
  misc_RNA (1)...(19): siRNA sense strand
acaaggaaaugauguauuc

SEQ ID NO: 675979 - RNA, 19 nt, Homo sapiens
  misc_RNA (1)...(19): siRNA sense strand
cagcuaaaguuguuguuga

SEQ ID NO: 675980 - RNA, 19 nt, Homo sapiens
  misc_RNA (1)...(19): siRNA sense strand
ggaauaaacaaggaaauga

SEQ ID NO: 675981 - RNA, 19 nt, Homo sapiens
  misc_RNA (1)...(19): siRNA sense strand
ucaagugaaccaaacauua

SEQ ID NO: 675982 - RNA, 19 nt, Homo sapiens
  misc_RNA (1)...(19): siRNA sense strand
gagaacgcauugcuuacuu

SEQ ID NO: 675983 - RNA, 19 nt, Homo sapiens
  misc_RNA (1)...(19): siRNA sense strand
cuacaagaauuacuacuca

SEQ ID NO: 675984 - RNA, 19 nt, Homo sapiens
  misc_RNA (1)...(19): siRNA sense strand
gacaguaacacuuaugaaa

SEQ ID NO: 675985 - RNA, 19 nt, Homo sapiens
  misc_RNA (1)...(19): siRNA sense strand
ugaaggacauuaacgacaa

SEQ ID NO: 675986 - RNA, 19 nt, Homo sapiens
  misc_RNA (1)...(19): siRNA sense strand
gcucaacgcuucugauucg

SEQ ID NO: 675987 - RNA, 19 nt, Homo sapiens
  misc_RNA (1)...(19): siRNA sense strand
ggagguaaaucugcagaau

SEQ ID NO: 675988 - RNA, 19 nt, Homo sapiens
  misc_RNA (1)...(19): siRNA sense strand
ggaggcaaaccugaauuua

SEQ ID NO: 675989 - RNA, 19 nt, Homo sapiens
  misc_RNA (1)...(19): siRNA sense strand
gguguuagaugccaaugau

SEQ ID NO: 675990 - RNA, 19 nt, Homo sapiens
  misc_RNA (1)...(19): siRNA sense strand
agaacgcauugcuuacuua

SEQ ID NO: 675991 - RNA, 19 nt, Homo sapiens
  misc_RNA (1)...(19): siRNA sense strand
ugacagaccgguuuaugaa

SEQ ID NO: 675992 - RNA, 19 nt, Homo sapiens
  misc_RNA (1)...(19): siRNA sense strand
gaaggaauaaacaaggaaa

SEQ ID NO: 675993 - RNA, 19 nt, Homo sapiens
  misc_RNA (1)...(19): siRNA sense strand
gaacaaaagcucucaauac

SEQ ID NO: 675994 - RNA, 19 nt, Homo sapiens
  misc_RNA (1)...(19): siRNA sense strand
caagugaaccaaacauuag

SEQ ID NO: 675995 - RNA, 19 nt, Homo sapiens
  misc_RNA (1)...(19): siRNA sense strand
caagaauuacuacucauug

SEQ ID NO: 675996 - RNA, 19 nt, Homo sapiens
  misc_RNA (1)...(19): siRNA sense strand
gcugcuggaucgugaagaa

SEQ ID NO: 675997 - RNA, 19 nt, Homo sapiens
  misc_RNA (1)...(19): siRNA sense strand
acgcauugcuuacuuacaa

SEQ ID NO: 675998 - RNA, 19 nt, Homo sapiens
  misc_RNA (1)...(19): siRNA sense strand
gaagaaaauccucagcuaa

SEQ ID NO: 675999 - RNA, 19 nt, Homo sapiens
  misc_RNA (1)...(19): siRNA sense strand
gauugucacuucucugucu

SEQ ID NO: 676000 - RNA, 19 nt, Homo sapiens
  misc_RNA (1)...(19): siRNA sense strand
ggacaguaacacuuaugaa

SEQ ID NO: 676001 - RNA, 19 nt, Homo sapiens
  misc_RNA (1)...(19): siRNA sense strand
ccaccuacaagaauuacua

SEQ ID NO: 676002 - RNA, 19 nt, Homo sapiens
  misc_RNA (1)...(19): siRNA sense strand
gauaagggaaacccaccua

SEQ ID NO: 676003 - RNA, 19 nt, Homo sapiens
  misc_RNA (1)...(19): siRNA sense strand
agaacgcccugguguccua

SEQ ID NO: 676004 - RNA, 19 nt, Homo sapiens
  misc_RNA (1)...(19): siRNA sense strand
gaaaaucaagugaaccaaa

SEQ ID NO: 676005 - RNA, 19 nt, Homo sapiens
  misc_RNA (1)...(19): siRNA sense strand
ugaagaaaauccucagcua

SEQ ID NO: 676006 - RNA, 19 nt, Homo sapiens
  misc_RNA (1)...(19): siRNA sense strand
gaaggacauuaacgacaac

SEQ ID NO: 676007 - RNA, 19 nt, Homo sapiens
  misc_RNA (1)...(19): siRNA sense strand
gagguaaaucugcagaaug

SEQ ID NO: 676008 - RNA, 19 nt, Homo sapiens
  misc_RNA (1)...(19): siRNA sense strand
cugcuugacucucgauuuc

SEQ ID NO: 676009 - RNA, 19 nt, Homo sapiens
  misc_RNA (1)...(19): siRNA sense strand
gaggcaaaccugaauuuac

SEQ ID NO: 676010 - RNA, 19 nt, Homo sapiens
  misc_RNA (1)...(19): siRNA sense strand
ccgcccagguucuccguaa

SEQ ID NO: 676011 - RNA, 19 nt, Homo sapiens
  misc_RNA (1)...(19): siRNA sense strand
agguaaaucugcagaaugg

SEQ ID NO: 676012 - RNA, 19 nt, Homo sapiens
  misc_RNA (1)...(19): siRNA sense strand
caaauucccagugcuuguu

SEQ ID NO: 676013 - RNA, 19 nt, Homo sapiens
  misc_RNA (1)...(19): siRNA sense strand
gcaccgucauugcccuaau

SEQ ID NO: 676014 - RNA, 19 nt, Homo sapiens
  misc_RNA (1)...(19): siRNA sense strand
caagugggcaccgucauug

SEQ ID NO: 676015 - RNA, 19 nt, Homo sapiens
  misc_RNA (1)...(19): siRNA sense strand
ugaaagaagaugcucaagu

SEQ ID NO: 676016 - RNA, 19 nt, Homo sapiens
  misc_RNA (1)...(19): siRNA sense strand
gcacgguccuaguggaacu

SEQ ID NO: 676017 - RNA, 19 nt, Homo sapiens
  misc_RNA (1)...(19): siRNA sense strand
gugaaccaaacauuaguaa

SEQ ID NO: 676018 - RNA, 19 nt, Homo sapiens
  misc_RNA (1)...(19): siRNA sense strand
cagaccgguuuaugaaguu

SEQ ID NO: 676019 - RNA, 19 nt, Homo sapiens
  misc_RNA (1)...(19): siRNA sense strand
acagaccgguuuaugaagu

SEQ ID NO: 676020 - RNA, 19 nt, Homo sapiens
  misc_RNA (1)...(19): siRNA sense strand
uguuagaugccaaugauaa

SEQ ID NO: 676021 - RNA, 19 nt, Homo sapiens
  misc_RNA (1)...(19): siRNA sense strand
cagcguuucugaccaugau

SEQ ID NO: 676022 - RNA, 19 nt, Homo sapiens
  misc_RNA (1)...(19): siRNA sense strand
uugaggacaguaacacuua

SEQ ID NO: 676023 - RNA, 19 nt, Homo sapiens
  misc_RNA (1)...(19): siRNA sense strand
uaagggaaacccaccuaug

SEQ ID NO: 676024 - RNA, 19 nt, Homo sapiens
  misc_RNA (1)...(19): siRNA sense strand
ugaggacaguaacacuuau

SEQ ID NO: 676025 - RNA, 19 nt, Homo sapiens
  misc_RNA (1)...(19): siRNA sense strand
uacaaacucaguccaaaug

SEQ ID NO: 676026 - RNA, 19 nt, Homo sapiens
  misc_RNA (1)...(19): siRNA sense strand
ucaagugggcaccgucauu

SEQ ID NO: 676027 - RNA, 19 nt, Homo sapiens
  misc_RNA (1)...(19): siRNA sense strand
guauucauuuagcucuuug

SEQ ID NO: 676028 - RNA, 19 nt, Homo sapiens
  misc_RNA (1)...(19): siRNA sense strand
cugcugcucucgcuucuuc

SEQ ID NO: 676029 - RNA, 19 nt, Homo sapiens
  misc_RNA (1)...(19): siRNA sense strand
cuuacaaacucaguccaaa

SEQ ID NO: 676030 - RNA, 19 nt, Homo sapiens
  misc_RNA (1)...(19): siRNA sense strand
gagagggugucggccuaug

SEQ ID NO: 676031 - RNA, 19 nt, Homo sapiens
  misc_RNA (1)...(19): siRNA sense strand
gauggaggcaaaccugaau

SEQ ID NO: 676032 - RNA, 19 nt, Homo sapiens
  misc_RNA (1)...(19): siRNA sense strand
agaccgguuuaugaaguua

SEQ ID NO: 676033 - RNA, 19 nt, Homo sapiens
  misc_RNA (1)...(19): siRNA sense strand
gacaggccgcugcagguuu

SEQ ID NO: 676034 - RNA, 19 nt, Homo sapiens
  misc_RNA (1)...(19): siRNA sense strand
augaugcuauugacuuuga

SEQ ID NO: 676035 - RNA, 19 nt, Homo sapiens
  misc_RNA (1)...(19): siRNA sense strand
guuugugaauucucggauu

SEQ ID NO: 676036 - RNA, 19 nt, Homo sapiens
  misc_RNA (1)...(19): siRNA sense strand
ggaugaaggaauaaacaag

SEQ ID NO: 676037 - RNA, 19 nt, Homo sapiens
  misc_RNA (1)...(19): siRNA sense strand
gacucucgauuuccacuag

SEQ ID NO: 676038 - RNA, 19 nt, Homo sapiens
  misc_RNA (1)...(19): siRNA sense strand
ggaagugaaggacauuaac

SEQ ID NO: 676039 - RNA, 19 nt, Homo sapiens
  misc_RNA (1)...(19): siRNA sense strand
aagaauuacuacucauugg

SEQ ID NO: 676040 - RNA, 19 nt, Homo sapiens
  misc_RNA (1)...(19): siRNA sense strand
agacaaauucccagugcuu

SEQ ID NO: 676041 - RNA, 19 nt, Homo sapiens
  misc_RNA (1)...(19): siRNA sense strand
gaacgcauugcuuacuuac

SEQ ID NO: 676042 - RNA, 19 nt, Homo sapiens
  misc_RNA (1)...(19): siRNA sense strand
gaagugaaggacauuaacg

SEQ ID NO: 676043 - RNA, 19 nt, Homo sapiens
  misc_RNA (1)...(19): siRNA sense strand
ugaauuuaccggaucuguu

SEQ ID NO: 676044 - RNA, 19 nt, Homo sapiens
  misc_RNA (1)...(19): siRNA sense strand
uggaagugaaggacauuaa

SEQ ID NO: 676045 - RNA, 19 nt, Homo sapiens
  misc_RNA (1)...(19): siRNA sense strand
aaaggacgggagaaauaaa

SEQ ID NO: 676046 - RNA, 19 nt, Homo sapiens
  misc_RNA (1)...(19): siRNA sense strand
uuugugaauucucggauug

SEQ ID NO: 676047 - RNA, 19 nt, Homo sapiens
  misc_RNA (1)...(19): siRNA sense strand
gcauuuuguuugugaauuc

SEQ ID NO: 676048 - RNA, 19 nt, Homo sapiens
  misc_RNA (1)...(19): siRNA sense strand
gagagaacgcauugcuuac

SEQ ID NO: 676049 - RNA, 19 nt, Homo sapiens
  misc_RNA (1)...(19): siRNA sense strand
gaggacaguaacacuuaug

SEQ ID NO: 676050 - RNA, 19 nt, Homo sapiens
  misc_RNA (1)...(19): siRNA sense strand
cggcucaacgcuucugauu

SEQ ID NO: 676051 - RNA, 19 nt, Homo sapiens
  misc_RNA (1)...(19): siRNA sense strand
uggaggcaaaccugaauuu

SEQ ID NO: 676052 - RNA, 19 nt, Homo sapiens
  misc_RNA (1)...(19): siRNA sense strand
gcuugacucucgauuucca

SEQ ID NO: 676053 - RNA, 19 nt, Homo sapiens
  misc_RNA (1)...(19): siRNA sense strand
guguccaccuacaagaauu

SEQ ID NO: 676054 - RNA, 19 nt, Homo sapiens
  misc_RNA (1)...(19): siRNA sense strand
aggcaaaccugaauuuacc

SEQ ID NO: 676055 - RNA, 19 nt, Homo sapiens
  misc_RNA (1)...(19): siRNA sense strand
uuacaaacucaguccaaau

SEQ ID NO: 676056 - RNA, 19 nt, Homo sapiens
  misc_RNA (1)...(19): siRNA sense strand
caccgucauugcccuaauc

SEQ ID NO: 676057 - RNA, 19 nt, Homo sapiens
  misc_RNA (1)...(19): siRNA sense strand
cgcauugcuuacuuacaaa

SEQ ID NO: 676058 - RNA, 19 nt, Homo sapiens
  misc_RNA (1)...(19): siRNA sense strand
guaaaugaugcuauugacu

SEQ ID NO: 676059 - RNA, 19 nt, Homo sapiens
  misc_RNA (1)...(19): siRNA sense strand
cacgauaagaaggaaauuu

SEQ ID NO: 676060 - RNA, 19 nt, Homo sapiens
  misc_RNA (1)...(19): siRNA sense strand
ugaaggaauaaacaaggaa

SEQ ID NO: 676061 - RNA, 19 nt, Homo sapiens
  misc_RNA (1)...(19): siRNA sense strand
gaauccagacugcuugacu

SEQ ID NO: 676062 - RNA, 19 nt, Homo sapiens
  misc_RNA (1)...(19): siRNA sense strand
augaaggaauaaacaagga

SEQ ID NO: 676063 - RNA, 19 nt, Homo sapiens
  misc_RNA (1)...(19): siRNA sense strand
cagcuccacuacucagucu

SEQ ID NO: 676064 - RNA, 19 nt, Homo sapiens
  misc_RNA (1)...(19): siRNA sense strand
aagaaaauccucagcuaaa

SEQ ID NO: 676065 - RNA, 19 nt, Homo sapiens
  misc_RNA (1)...(19): siRNA sense strand
acaaacucaguccaaauga

SEQ ID NO: 676066 - RNA, 19 nt, Homo sapiens
  misc_RNA (1)...(19): siRNA sense strand
gaaaauccucagcuaaagu

SEQ ID NO: 676067 - RNA, 19 nt, Homo sapiens
  misc_RNA (1)...(19): siRNA sense strand
aagggaaacccaccuaugg

SEQ ID NO: 676068 - RNA, 19 nt, Homo sapiens
  misc_RNA (1)...(19): siRNA sense strand
uguccaccuacaagaauua

SEQ ID NO: 676069 - RNA, 19 nt, Homo sapiens
  misc_RNA (1)...(19): siRNA sense strand
gaaagaagaugcucaagug

SEQ ID NO: 676070 - RNA, 19 nt, Homo sapiens
  misc_RNA (1)...(19): siRNA sense strand
ggagagaacgcauugcuua

SEQ ID NO: 676071 - RNA, 19 nt, Homo sapiens
  misc_RNA (1)...(19): siRNA sense strand
gaauuuaccggaucuguuu

SEQ ID NO: 676072 - RNA, 19 nt, Homo sapiens
  misc_RNA (1)...(19): siRNA sense strand
cgaaaggacgggagaaaua

SEQ ID NO: 676073 - RNA, 19 nt, Homo sapiens
  misc_RNA (1)...(19): siRNA sense strand
gaaaggacgggagaaauaa

SEQ ID NO: 676074 - RNA, 19 nt, Homo sapiens
  misc_RNA (1)...(19): siRNA sense strand
acaaggaaaugauguauuc

SEQ ID NO: 676075 - RNA, 19 nt, Homo sapiens
  misc_RNA (1)...(19): siRNA sense strand
cagcuaaaguuguuguuga

SEQ ID NO: 676076 - RNA, 19 nt, Homo sapiens
  misc_RNA (1)...(19): siRNA sense strand
ggaauaaacaaggaaauga

SEQ ID NO: 676077 - RNA, 19 nt, Homo sapiens
  misc_RNA (1)...(19): siRNA sense strand
ucaagugaaccaaacauua

SEQ ID NO: 676078 - RNA, 19 nt, Homo sapiens
  misc_RNA (1)...(19): siRNA sense strand
gagaacgcauugcuuacuu

SEQ ID NO: 676079 - RNA, 19 nt, Homo sapiens
  misc_RNA (1)...(19): siRNA sense strand
cuacaagaauuacuacuca

SEQ ID NO: 676080 - RNA, 19 nt, Homo sapiens
  misc_RNA (1)...(19): siRNA sense strand
gacaguaacacuuaugaaa

SEQ ID NO: 676081 - RNA, 19 nt, Homo sapiens
  misc_RNA (1)...(19): siRNA sense strand
ugaaggacauuaacgacaa

SEQ ID NO: 676082 - RNA, 19 nt, Homo sapiens
  misc_RNA (1)...(19): siRNA sense strand
gcucaacgcuucugauucg

SEQ ID NO: 676083 - RNA, 19 nt, Homo sapiens
  misc_RNA (1)...(19): siRNA sense strand
ggagguaaaucugcagaau

SEQ ID NO: 676084 - RNA, 19 nt, Homo sapiens
  misc_RNA (1)...(19): siRNA sense strand
ggaggcaaaccugaauuua

SEQ ID NO: 676085 - RNA, 19 nt, Homo sapiens
  misc_RNA (1)...(19): siRNA sense strand
gguguuagaugccaaugau

SEQ ID NO: 676086 - RNA, 19 nt, Homo sapiens
  misc_RNA (1)...(19): siRNA sense strand
agaacgcauugcuuacuua

SEQ ID NO: 676087 - RNA, 19 nt, Homo sapiens
  misc_RNA (1)...(19): siRNA sense strand
ugacagaccgguuuaugaa

SEQ ID NO: 676088 - RNA, 19 nt, Homo sapiens
  misc_RNA (1)...(19): siRNA sense strand
gaaggaauaaacaaggaaa

SEQ ID NO: 676089 - RNA, 19 nt, Homo sapiens
  misc_RNA (1)...(19): siRNA sense strand
gaacaaaagcucucaauac

SEQ ID NO: 676090 - RNA, 19 nt, Homo sapiens
  misc_RNA (1)...(19): siRNA sense strand
caagugaaccaaacauuag

SEQ ID NO: 676091 - RNA, 19 nt, Homo sapiens
  misc_RNA (1)...(19): siRNA sense strand
caagaauuacuacucauug

SEQ ID NO: 676092 - RNA, 19 nt, Homo sapiens
  misc_RNA (1)...(19): siRNA sense strand
gcugcuggaucgugaagaa

SEQ ID NO: 676093 - RNA, 19 nt, Homo sapiens
  misc_RNA (1)...(19): siRNA sense strand
acgcauugcuuacuuacaa

SEQ ID NO: 676094 - RNA, 19 nt, Homo sapiens
  misc_RNA (1)...(19): siRNA sense strand
gaagaaaauccucagcuaa

SEQ ID NO: 676095 - RNA, 19 nt, Homo sapiens
  misc_RNA (1)...(19): siRNA sense strand
gauugucacuucucugucu

SEQ ID NO: 676096 - RNA, 19 nt, Homo sapiens
  misc_RNA (1)...(19): siRNA sense strand
ggacaguaacacuuaugaa

SEQ ID NO: 676097 - RNA, 19 nt, Homo sapiens
  misc_RNA (1)...(19): siRNA sense strand
ccaccuacaagaauuacua

SEQ ID NO: 676098 - RNA, 19 nt, Homo sapiens
  misc_RNA (1)...(19): siRNA sense strand
gauaagggaaacccaccua

SEQ ID NO: 676099 - RNA, 19 nt, Homo sapiens
  misc_RNA (1)...(19): siRNA sense strand
agaacgcccugguguccua

SEQ ID NO: 676100 - RNA, 19 nt, Homo sapiens
  misc_RNA (1)...(19): siRNA sense strand
gaaaaucaagugaaccaaa

SEQ ID NO: 676101 - RNA, 19 nt, Homo sapiens
  misc_RNA (1)...(19): siRNA sense strand
ugaagaaaauccucagcua

SEQ ID NO: 676102 - RNA, 19 nt, Homo sapiens
  misc_RNA (1)...(19): siRNA sense strand
gaaggacauuaacgacaac

SEQ ID NO: 676103 - RNA, 19 nt, Homo sapiens
  misc_RNA (1)...(19): siRNA sense strand
gagguaaaucugcagaaug

SEQ ID NO: 676104 - RNA, 19 nt, Homo sapiens
  misc_RNA (1)...(19): siRNA sense strand
cugcuugacucucgauuuc

SEQ ID NO: 676105 - RNA, 19 nt, Homo sapiens
  misc_RNA (1)...(19): siRNA sense strand
gaggcaaaccugaauuuac

SEQ ID NO: 676106 - RNA, 19 nt, Homo sapiens
  misc_RNA (1)...(19): siRNA sense strand
ccgcccagguucuccguaa

SEQ ID NO: 676107 - RNA, 19 nt, Homo sapiens
  misc_RNA (1)...(19): siRNA sense strand
agguaaaucugcagaaugg

SEQ ID NO: 676108 - RNA, 19 nt, Homo sapiens
  misc_RNA (1)...(19): siRNA sense strand
caaauucccagugcuuguu

SEQ ID NO: 676109 - RNA, 19 nt, Homo sapiens
  misc_RNA (1)...(19): siRNA sense strand
gcaccgucauugcccuaau

SEQ ID NO: 676110 - RNA, 19 nt, Homo sapiens
  misc_RNA (1)...(19): siRNA sense strand
caagugggcaccgucauug

SEQ ID NO: 676111 - RNA, 19 nt, Homo sapiens
  misc_RNA (1)...(19): siRNA sense strand
ugaaagaagaugcucaagu

SEQ ID NO: 676112 - RNA, 19 nt, Homo sapiens
  misc_RNA (1)...(19): siRNA sense strand
gcacgguccuaguggaacu

SEQ ID NO: 676113 - RNA, 19 nt, Homo sapiens
  misc_RNA (1)...(19): siRNA sense strand
gugaaccaaacauuaguaa

SEQ ID NO: 676114 - RNA, 19 nt, Homo sapiens
  misc_RNA (1)...(19): siRNA sense strand
cagaccgguuuaugaaguu

SEQ ID NO: 676115 - RNA, 19 nt, Homo sapiens
  misc_RNA (1)...(19): siRNA sense strand
acagaccgguuuaugaagu

SEQ ID NO: 676116 - RNA, 19 nt, Homo sapiens
  misc_RNA (1)...(19): siRNA sense strand
uguuagaugccaaugauaa

SEQ ID NO: 676117 - RNA, 19 nt, Homo sapiens
  misc_RNA (1)...(19): siRNA sense strand
cagcguuucugaccaugau

SEQ ID NO: 676118 - RNA, 19 nt, Homo sapiens
  misc_RNA (1)...(19): siRNA sense strand
uugaggacaguaacacuua

SEQ ID NO: 676119 - RNA, 19 nt, Homo sapiens
  misc_RNA (1)...(19): siRNA sense strand
uaagggaaacccaccuaug

SEQ ID NO: 676120 - RNA, 19 nt, Homo sapiens
  misc_RNA (1)...(19): siRNA sense strand
ugaggacaguaacacuuau

SEQ ID NO: 676121 - RNA, 19 nt, Homo sapiens
  misc_RNA (1)...(19): siRNA sense strand
uacaaacucaguccaaaug

SEQ ID NO: 676122 - RNA, 19 nt, Homo sapiens
  misc_RNA (1)...(19): siRNA sense strand
ucaagugggcaccgucauu

SEQ ID NO: 676123 - RNA, 19 nt, Homo sapiens
  misc_RNA (1)...(19): siRNA sense strand
guauucauuuagcucuuug

SEQ ID NO: 676124 - RNA, 19 nt, Homo sapiens
  misc_RNA (1)...(19): siRNA sense strand
cugcugcucucgcuucuuc

SEQ ID NO: 676125 - RNA, 19 nt, Homo sapiens
  misc_RNA (1)...(19): siRNA sense strand
cuuacaaacucaguccaaa

SEQ ID NO: 676126 - RNA, 19 nt, Homo sapiens
  misc_RNA (1)...(19): siRNA sense strand
gagagggugucggccuaug

SEQ ID NO: 676127 - RNA, 19 nt, Homo sapiens
  misc_RNA (1)...(19): siRNA sense strand
gauggaggcaaaccugaau

SEQ ID NO: 676128 - RNA, 19 nt, Homo sapiens
  misc_RNA (1)...(19): siRNA sense strand
agaccgguuuaugaaguua

SEQ ID NO: 676129 - RNA, 19 nt, Homo sapiens
  misc_RNA (1)...(19): siRNA sense strand
gacaggccgcugcagguuu

SEQ ID NO: 676130 - RNA, 19 nt, Homo sapiens
  misc_RNA (1)...(19): siRNA sense strand
augaugcuauugacuuuga

SEQ ID NO: 676131 - RNA, 19 nt, Homo sapiens
  misc_RNA (1)...(19): siRNA sense strand
guuugugaauucucggauu

SEQ ID NO: 676132 - RNA, 19 nt, Homo sapiens
  misc_RNA (1)...(19): siRNA sense strand
ggaugaaggaauaaacaag

SEQ ID NO: 676133 - RNA, 19 nt, Homo sapiens
  misc_RNA (1)...(19): siRNA sense strand
gacucucgauuuccacuag

SEQ ID NO: 676134 - RNA, 19 nt, Homo sapiens
  misc_RNA (1)...(19): siRNA sense strand
ggaagugaaggacauuaac

SEQ ID NO: 676135 - RNA, 19 nt, Homo sapiens
  misc_RNA (1)...(19): siRNA sense strand
aagaauuacuacucauugg

SEQ ID NO: 676136 - RNA, 19 nt, Homo sapiens
  misc_RNA (1)...(19): siRNA sense strand
agacaaauucccagugcuu

SEQ ID NO: 676137 - RNA, 19 nt, Homo sapiens
  misc_RNA (1)...(19): siRNA sense strand
gaacgcauugcuuacuuac

SEQ ID NO: 676138 - RNA, 19 nt, Homo sapiens
  misc_RNA (1)...(19): siRNA sense strand
gaagugaaggacauuaacg

SEQ ID NO: 676139 - RNA, 19 nt, Homo sapiens
  misc_RNA (1)...(19): siRNA sense strand
ugaauuuaccggaucuguu

SEQ ID NO: 676140 - RNA, 19 nt, Homo sapiens
  misc_RNA (1)...(19): siRNA sense strand
uggaagugaaggacauuaa

SEQ ID NO: 676141 - RNA, 19 nt, Homo sapiens
  misc_RNA (1)...(19): siRNA sense strand
aaaggacgggagaaauaaa

SEQ ID NO: 676142 - RNA, 19 nt, Homo sapiens
  misc_RNA (1)...(19): siRNA sense strand
uuugugaauucucggauug

SEQ ID NO: 676143 - RNA, 19 nt, Homo sapiens
  misc_RNA (1)...(19): siRNA sense strand
gcauuuuguuugugaauuc

SEQ ID NO: 676144 - RNA, 19 nt, Homo sapiens
  misc_RNA (1)...(19): siRNA sense strand
gagagaacgcauugcuuac

SEQ ID NO: 676145 - RNA, 19 nt, Homo sapiens
  misc_RNA (1)...(19): siRNA sense strand
gaggacaguaacacuuaug

SEQ ID NO: 676146 - RNA, 19 nt, Homo sapiens
  misc_RNA (1)...(19): siRNA sense strand
cggcucaacgcuucugauu

SEQ ID NO: 676147 - RNA, 19 nt, Homo sapiens
  misc_RNA (1)...(19): siRNA sense strand
uggaggcaaaccugaauuu

SEQ ID NO: 676148 - RNA, 19 nt, Homo sapiens
  misc_RNA (1)...(19): siRNA sense strand
gcuugacucucgauuucca

SEQ ID NO: 676149 - RNA, 19 nt, Homo sapiens
  misc_RNA (1)...(19): siRNA sense strand
guguccaccuacaagaauu

SEQ ID NO: 676150 - RNA, 19 nt, Homo sapiens
  misc_RNA (1)...(19): siRNA sense strand
aggcaaaccugaauuuacc

SEQ ID NO: 676151 - RNA, 19 nt, Homo sapiens
  misc_RNA (1)...(19): siRNA sense strand
uuacaaacucaguccaaau

SEQ ID NO: 676152 - RNA, 19 nt, Homo sapiens
  misc_RNA (1)...(19): siRNA sense strand
caccgucauugcccuaauc

SEQ ID NO: 676153 - RNA, 19 nt, Homo sapiens
  misc_RNA (1)...(19): siRNA sense strand
cgcauugcuuacuuacaaa

SEQ ID NO: 676154 - RNA, 19 nt, Homo sapiens
  misc_RNA (1)...(19): siRNA sense strand
guaaaugaugcuauugacu

SEQ ID NO: 676155 - RNA, 19 nt, Homo sapiens
  misc_RNA (1)...(19): siRNA sense strand
cacgauaagaaggaaauuu

SEQ ID NO: 676156 - RNA, 19 nt, Homo sapiens
  misc_RNA (1)...(19): siRNA sense strand
ugaaggaauaaacaaggaa

SEQ ID NO: 676157 - RNA, 19 nt, Homo sapiens
  misc_RNA (1)...(19): siRNA sense strand
gaauccagacugcuugacu

SEQ ID NO: 676158 - RNA, 19 nt, Homo sapiens
  misc_RNA (1)...(19): siRNA sense strand
augaaggaauaaacaagga

SEQ ID NO: 676159 - RNA, 19 nt, Homo sapiens
  misc_RNA (1)...(19): siRNA sense strand
cagcuccacuacucagucu

SEQ ID NO: 676160 - RNA, 19 nt, Homo sapiens
  misc_RNA (1)...(19): siRNA sense strand
aagaaaauccucagcuaaa

SEQ ID NO: 676161 - RNA, 19 nt, Homo sapiens
  misc_RNA (1)...(19): siRNA sense strand
acaaacucaguccaaauga

SEQ ID NO: 676162 - RNA, 19 nt, Homo sapiens
  misc_RNA (1)...(19): siRNA sense strand
gaaaauccucagcuaaagu

SEQ ID NO: 676163 - RNA, 19 nt, Homo sapiens
  misc_RNA (1)...(19): siRNA sense strand
aagggaaacccaccuaugg

SEQ ID NO: 676164 - RNA, 19 nt, Homo sapiens
  misc_RNA (1)...(19): siRNA sense strand
uguccaccuacaagaauua

SEQ ID NO: 676165 - RNA, 19 nt, Homo sapiens
  misc_RNA (1)...(19): siRNA sense strand
gaaagaagaugcucaagug

SEQ ID NO: 676166 - RNA, 19 nt, Homo sapiens
  misc_RNA (1)...(19): siRNA sense strand
ggagagaacgcauugcuua

SEQ ID NO: 676167 - RNA, 19 nt, Homo sapiens
  misc_RNA (1)...(19): siRNA sense strand
gaauuuaccggaucuguuu

SEQ ID NO: 676168 - RNA, 19 nt, Homo sapiens
  misc_RNA (1)...(19): siRNA sense strand
cgaaaggacgggagaaaua

SEQ ID NO: 676169 - RNA, 19 nt, Homo sapiens
  misc_RNA (1)...(19): siRNA sense strand
gaaaggacgggagaaauaa

SEQ ID NO: 676170 - RNA, 19 nt, Homo sapiens
  misc_RNA (1)...(19): siRNA sense strand
acaaggaaaugauguauuc

SEQ ID NO: 676171 - RNA, 19 nt, Homo sapiens
  misc_RNA (1)...(19): siRNA sense strand
cagcuaaaguuguuguuga

SEQ ID NO: 676172 - RNA, 19 nt, Homo sapiens
  misc_RNA (1)...(19): siRNA sense strand
ggaauaaacaaggaaauga

SEQ ID NO: 676173 - RNA, 19 nt, Homo sapiens
  misc_RNA (1)...(19): siRNA sense strand
ucaagugaaccaaacauua

SEQ ID NO: 676174 - RNA, 19 nt, Homo sapiens
  misc_RNA (1)...(19): siRNA sense strand
gagaacgcauugcuuacuu

SEQ ID NO: 676175 - RNA, 19 nt, Homo sapiens
  misc_RNA (1)...(19): siRNA sense strand
cuacaagaauuacuacuca

SEQ ID NO: 676176 - RNA, 19 nt, Homo sapiens
  misc_RNA (1)...(19): siRNA sense strand
gacaguaacacuuaugaaa

SEQ ID NO: 676177 - RNA, 19 nt, Homo sapiens
  misc_RNA (1)...(19): siRNA sense strand
ugaaggacauuaacgacaa

SEQ ID NO: 676178 - RNA, 19 nt, Homo sapiens
  misc_RNA (1)...(19): siRNA sense strand
gcucaacgcuucugauucg

SEQ ID NO: 676179 - RNA, 19 nt, Homo sapiens
  misc_RNA (1)...(19): siRNA sense strand
ggagguaaaucugcagaau

SEQ ID NO: 676180 - RNA, 19 nt, Homo sapiens
  misc_RNA (1)...(19): siRNA sense strand
ggaggcaaaccugaauuua

SEQ ID NO: 676181 - RNA, 19 nt, Homo sapiens
  misc_RNA (1)...(19): siRNA sense strand
gguguuagaugccaaugau

SEQ ID NO: 676182 - RNA, 19 nt, Homo sapiens
  misc_RNA (1)...(19): siRNA sense strand
agaacgcauugcuuacuua

SEQ ID NO: 676183 - RNA, 19 nt, Homo sapiens
  misc_RNA (1)...(19): siRNA sense strand
ugacagaccgguuuaugaa

SEQ ID NO: 676184 - RNA, 19 nt, Homo sapiens
  misc_RNA (1)...(19): siRNA sense strand
gaaggaauaaacaaggaaa

SEQ ID NO: 676185 - RNA, 19 nt, Homo sapiens
  misc_RNA (1)...(19): siRNA sense strand
gaacaaaagcucucaauac

SEQ ID NO: 676186 - RNA, 19 nt, Homo sapiens
  misc_RNA (1)...(19): siRNA sense strand
caagugaaccaaacauuag

SEQ ID NO: 676187 - RNA, 19 nt, Homo sapiens
  misc_RNA (1)...(19): siRNA sense strand
caagaauuacuacucauug

SEQ ID NO: 676188 - RNA, 19 nt, Homo sapiens
  misc_RNA (1)...(19): siRNA sense strand
gcugcuggaucgugaagaa

SEQ ID NO: 676189 - RNA, 19 nt, Homo sapiens
  misc_RNA (1)...(19): siRNA sense strand
acgcauugcuuacuuacaa

SEQ ID NO: 676190 - RNA, 19 nt, Homo sapiens
  misc_RNA (1)...(19): siRNA sense strand
gaagaaaauccucagcuaa

SEQ ID NO: 676191 - RNA, 19 nt, Homo sapiens
  misc_RNA (1)...(19): siRNA sense strand
gauugucacuucucugucu

SEQ ID NO: 676192 - RNA, 19 nt, Homo sapiens
  misc_RNA (1)...(19): siRNA sense strand
ggacaguaacacuuaugaa

SEQ ID NO: 676193 - RNA, 19 nt, Homo sapiens
  misc_RNA (1)...(19): siRNA sense strand
ccaccuacaagaauuacua

SEQ ID NO: 676194 - RNA, 19 nt, Homo sapiens
  misc_RNA (1)...(19): siRNA sense strand
gauaagggaaacccaccua

SEQ ID NO: 676195 - RNA, 19 nt, Homo sapiens
  misc_RNA (1)...(19): siRNA sense strand
agaacgcccugguguccua

SEQ ID NO: 676196 - RNA, 19 nt, Homo sapiens
  misc_RNA (1)...(19): siRNA sense strand
gaaaaucaagugaaccaaa

SEQ ID NO: 676197 - RNA, 19 nt, Homo sapiens
  misc_RNA (1)...(19): siRNA sense strand
ugaagaaaauccucagcua

SEQ ID NO: 676198 - RNA, 19 nt, Homo sapiens
  misc_RNA (1)...(19): siRNA sense strand
gaaggacauuaacgacaac

SEQ ID NO: 676199 - RNA, 19 nt, Homo sapiens
  misc_RNA (1)...(19): siRNA sense strand
gagguaaaucugcagaaug

SEQ ID NO: 676200 - RNA, 19 nt, Homo sapiens
  misc_RNA (1)...(19): siRNA sense strand
cugcuugacucucgauuuc

SEQ ID NO: 676201 - RNA, 19 nt, Homo sapiens
  misc_RNA (1)...(19): siRNA sense strand
gaggcaaaccugaauuuac

SEQ ID NO: 676202 - RNA, 19 nt, Homo sapiens
  misc_RNA (1)...(19): siRNA sense strand
ccgcccagguucuccguaa

SEQ ID NO: 676203 - RNA, 19 nt, Homo sapiens
  misc_RNA (1)...(19): siRNA sense strand
agguaaaucugcagaaugg

SEQ ID NO: 676204 - RNA, 19 nt, Homo sapiens
  misc_RNA (1)...(19): siRNA sense strand
caaauucccagugcuuguu

SEQ ID NO: 676205 - RNA, 19 nt, Homo sapiens
  misc_RNA (1)...(19): siRNA sense strand
gcaccgucauugcccuaau

SEQ ID NO: 676206 - RNA, 19 nt, Homo sapiens
  misc_RNA (1)...(19): siRNA sense strand
caagugggcaccgucauug

SEQ ID NO: 676207 - RNA, 19 nt, Homo sapiens
  misc_RNA (1)...(19): siRNA sense strand
ugaaagaagaugcucaagu

SEQ ID NO: 676208 - RNA, 19 nt, Homo sapiens
  misc_RNA (1)...(19): siRNA sense strand
gcacgguccuaguggaacu

SEQ ID NO: 676209 - RNA, 19 nt, Homo sapiens
  misc_RNA (1)...(19): siRNA sense strand
gugaaccaaacauuaguaa

SEQ ID NO: 676210 - RNA, 19 nt, Homo sapiens
  misc_RNA (1)...(19): siRNA sense strand
cagaccgguuuaugaaguu

SEQ ID NO: 676211 - RNA, 19 nt, Homo sapiens
  misc_RNA (1)...(19): siRNA sense strand
acagaccgguuuaugaagu

SEQ ID NO: 676212 - RNA, 19 nt, Homo sapiens
  misc_RNA (1)...(19): siRNA sense strand
uguuagaugccaaugauaa

SEQ ID NO: 676213 - RNA, 19 nt, Homo sapiens
  misc_RNA (1)...(19): siRNA sense strand
cagcguuucugaccaugau

SEQ ID NO: 676214 - RNA, 19 nt, Homo sapiens
  misc_RNA (1)...(19): siRNA sense strand
uugaggacaguaacacuua

SEQ ID NO: 676215 - RNA, 19 nt, Homo sapiens
  misc_RNA (1)...(19): siRNA sense strand
uaagggaaacccaccuaug

SEQ ID NO: 676216 - RNA, 19 nt, Homo sapiens
  misc_RNA (1)...(19): siRNA sense strand
ugaggacaguaacacuuau

SEQ ID NO: 676217 - RNA, 19 nt, Homo sapiens
  misc_RNA (1)...(19): siRNA sense strand
uacaaacucaguccaaaug

SEQ ID NO: 676218 - RNA, 19 nt, Homo sapiens
  misc_RNA (1)...(19): siRNA sense strand
ucaagugggcaccgucauu

SEQ ID NO: 676219 - RNA, 19 nt, Homo sapiens
  misc_RNA (1)...(19): siRNA sense strand
guauucauuuagcucuuug

SEQ ID NO: 676220 - RNA, 19 nt, Homo sapiens
  misc_RNA (1)...(19): siRNA sense strand
cugcugcucucgcuucuuc

SEQ ID NO: 676221 - RNA, 19 nt, Homo sapiens
  misc_RNA (1)...(19): siRNA sense strand
cuuacaaacucaguccaaa

SEQ ID NO: 676222 - RNA, 19 nt, Homo sapiens
  misc_RNA (1)...(19): siRNA sense strand
gagagggugucggccuaug

SEQ ID NO: 676223 - RNA, 19 nt, Homo sapiens
  misc_RNA (1)...(19): siRNA sense strand
gauggaggcaaaccugaau

SEQ ID NO: 676224 - RNA, 19 nt, Homo sapiens
  misc_RNA (1)...(19): siRNA sense strand
agaccgguuuaugaaguua

SEQ ID NO: 676225 - RNA, 19 nt, Homo sapiens
  misc_RNA (1)...(19): siRNA sense strand
gacaggccgcugcagguuu

SEQ ID NO: 676226 - RNA, 19 nt, Homo sapiens
  misc_RNA (1)...(19): siRNA sense strand
augaugcuauugacuuuga

SEQ ID NO: 676227 - RNA, 19 nt, Homo sapiens
  misc_RNA (1)...(19): siRNA sense strand
guuugugaauucucggauu

SEQ ID NO: 676228 - RNA, 19 nt, Homo sapiens
  misc_RNA (1)...(19): siRNA sense strand
ggaugaaggaauaaacaag

SEQ ID NO: 676229 - RNA, 19 nt, Homo sapiens
  misc_RNA (1)...(19): siRNA sense strand
gacucucgauuuccacuag

SEQ ID NO: 676230 - RNA, 19 nt, Homo sapiens
  misc_RNA (1)...(19): siRNA sense strand
ggaagugaaggacauuaac

SEQ ID NO: 676231 - RNA, 19 nt, Homo sapiens
  misc_RNA (1)...(19): siRNA sense strand
aagaauuacuacucauugg

SEQ ID NO: 676232 - RNA, 19 nt, Homo sapiens
  misc_RNA (1)...(19): siRNA sense strand
agacaaauucccagugcuu

SEQ ID NO: 676233 - RNA, 19 nt, Homo sapiens
  misc_RNA (1)...(19): siRNA sense strand
gaacgcauugcuuacuuac

SEQ ID NO: 676234 - RNA, 19 nt, Homo sapiens
  misc_RNA (1)...(19): siRNA sense strand
gaagugaaggacauuaacg

SEQ ID NO: 676235 - RNA, 19 nt, Homo sapiens
  misc_RNA (1)...(19): siRNA sense strand
ugaauuuaccggaucuguu

SEQ ID NO: 676236 - RNA, 19 nt, Homo sapiens
  misc_RNA (1)...(19): siRNA sense strand
uggaagugaaggacauuaa

SEQ ID NO: 676237 - RNA, 19 nt, Homo sapiens
  misc_RNA (1)...(19): siRNA sense strand
aaaggacgggagaaauaaa

SEQ ID NO: 676238 - RNA, 19 nt, Homo sapiens
  misc_RNA (1)...(19): siRNA sense strand
uuugugaauucucggauug

SEQ ID NO: 676239 - RNA, 19 nt, Homo sapiens
  misc_RNA (1)...(19): siRNA sense strand
gcauuuuguuugugaauuc

SEQ ID NO: 676240 - RNA, 19 nt, Homo sapiens
  misc_RNA (1)...(19): siRNA sense strand
gagagaacgcauugcuuac

SEQ ID NO: 676241 - RNA, 19 nt, Homo sapiens
  misc_RNA (1)...(19): siRNA sense strand
gaggacaguaacacuuaug

SEQ ID NO: 676242 - RNA, 19 nt, Homo sapiens
  misc_RNA (1)...(19): siRNA sense strand
cggcucaacgcuucugauu

SEQ ID NO: 676243 - RNA, 19 nt, Homo sapiens
  misc_RNA (1)...(19): siRNA sense strand
uggaggcaaaccugaauuu

SEQ ID NO: 676244 - RNA, 19 nt, Homo sapiens
  misc_RNA (1)...(19): siRNA sense strand
gcuugacucucgauuucca

SEQ ID NO: 676245 - RNA, 19 nt, Homo sapiens
  misc_RNA (1)...(19): siRNA sense strand
guguccaccuacaagaauu

SEQ ID NO: 676246 - RNA, 19 nt, Homo sapiens
  misc_RNA (1)...(19): siRNA sense strand
aggcaaaccugaauuuacc

SEQ ID NO: 676247 - RNA, 19 nt, Homo sapiens
  misc_RNA (1)...(19): siRNA sense strand
uuacaaacucaguccaaau

SEQ ID NO: 676248 - RNA, 19 nt, Homo sapiens
  misc_RNA (1)...(19): siRNA sense strand
caccgucauugcccuaauc

SEQ ID NO: 676249 - RNA, 19 nt, Homo sapiens
  misc_RNA (1)...(19): siRNA sense strand
cgcauugcuuacuuacaaa

SEQ ID NO: 676250 - RNA, 19 nt, Homo sapiens
  misc_RNA (1)...(19): siRNA sense strand
guaaaugaugcuauugacu

SEQ ID NO: 676251 - RNA, 19 nt, Homo sapiens
  misc_RNA (1)...(19): siRNA sense strand
cacgauaagaaggaaauuu

SEQ ID NO: 676252 - RNA, 19 nt, Homo sapiens
  misc_RNA (1)...(19): siRNA sense strand
ugaaggaauaaacaaggaa

SEQ ID NO: 676253 - RNA, 19 nt, Homo sapiens
  misc_RNA (1)...(19): siRNA sense strand
gaauccagacugcuugacu

SEQ ID NO: 676254 - RNA, 19 nt, Homo sapiens
  misc_RNA (1)...(19): siRNA sense strand
augaaggaauaaacaagga

SEQ ID NO: 676255 - RNA, 19 nt, Homo sapiens
  misc_RNA (1)...(19): siRNA sense strand
cagcuccacuacucagucu

SEQ ID NO: 676256 - RNA, 19 nt, Homo sapiens
  misc_RNA (1)...(19): siRNA sense strand
aagaaaauccucagcuaaa

SEQ ID NO: 676257 - RNA, 19 nt, Homo sapiens
  misc_RNA (1)...(19): siRNA sense strand
acaaacucaguccaaauga

SEQ ID NO: 676258 - RNA, 19 nt, Homo sapiens
  misc_RNA (1)...(19): siRNA sense strand
gaaaauccucagcuaaagu

SEQ ID NO: 676259 - RNA, 19 nt, Homo sapiens
  misc_RNA (1)...(19): siRNA sense strand
aagggaaacccaccuaugg

SEQ ID NO: 676260 - RNA, 19 nt, Homo sapiens
  misc_RNA (1)...(19): siRNA sense strand
uguccaccuacaagaauua

SEQ ID NO: 676261 - RNA, 19 nt, Homo sapiens
  misc_RNA (1)...(19): siRNA sense strand
gaaagaagaugcucaagug

SEQ ID NO: 676262 - RNA, 19 nt, Homo sapiens
  misc_RNA (1)...(19): siRNA sense strand
ggagagaacgcauugcuua

SEQ ID NO: 676263 - RNA, 19 nt, Homo sapiens
  misc_RNA (1)...(19): siRNA sense strand
gaauuuaccggaucuguuu

SEQ ID NO: 676264 - RNA, 19 nt, Homo sapiens
  misc_RNA (1)...(19): siRNA sense strand
cgaaaggacgggagaaaua

SEQ ID NO: 676265 - RNA, 19 nt, Homo sapiens
  misc_RNA (1)...(19): siRNA sense strand
gaaaggacgggagaaauaa

SEQ ID NO: 676266 - RNA, 19 nt, Homo sapiens
  misc_RNA (1)...(19): siRNA sense strand
acaaggaaaugauguauuc

SEQ ID NO: 676267 - RNA, 19 nt, Homo sapiens
  misc_RNA (1)...(19): siRNA sense strand
cagcuaaaguuguuguuga

SEQ ID NO: 676268 - RNA, 19 nt, Homo sapiens
  misc_RNA (1)...(19): siRNA sense strand
ggaauaaacaaggaaauga

SEQ ID NO: 676269 - RNA, 19 nt, Homo sapiens
  misc_RNA (1)...(19): siRNA sense strand
ucaagugaaccaaacauua

SEQ ID NO: 676270 - RNA, 19 nt, Homo sapiens
  misc_RNA (1)...(19): siRNA sense strand
gagaacgcauugcuuacuu

SEQ ID NO: 676271 - RNA, 19 nt, Homo sapiens
  misc_RNA (1)...(19): siRNA sense strand
cuacaagaauuacuacuca

SEQ ID NO: 676272 - RNA, 19 nt, Homo sapiens
  misc_RNA (1)...(19): siRNA sense strand
gacaguaacacuuaugaaa

SEQ ID NO: 676273 - RNA, 19 nt, Homo sapiens
  misc_RNA (1)...(19): siRNA sense strand
ugaaggacauuaacgacaa

SEQ ID NO: 676274 - RNA, 19 nt, Homo sapiens
  misc_RNA (1)...(19): siRNA sense strand
gcucaacgcuucugauucg

SEQ ID NO: 676275 - RNA, 19 nt, Homo sapiens
  misc_RNA (1)...(19): siRNA sense strand
ggagguaaaucugcagaau

SEQ ID NO: 676276 - RNA, 19 nt, Homo sapiens
  misc_RNA (1)...(19): siRNA sense strand
ggaggcaaaccugaauuua

SEQ ID NO: 676277 - RNA, 19 nt, Homo sapiens
  misc_RNA (1)...(19): siRNA sense strand
gguguuagaugccaaugau

SEQ ID NO: 676278 - RNA, 19 nt, Homo sapiens
  misc_RNA (1)...(19): siRNA sense strand
agaacgcauugcuuacuua

SEQ ID NO: 676279 - RNA, 19 nt, Homo sapiens
  misc_RNA (1)...(19): siRNA sense strand
ugacagaccgguuuaugaa

SEQ ID NO: 676280 - RNA, 19 nt, Homo sapiens
  misc_RNA (1)...(19): siRNA sense strand
gaaggaauaaacaaggaaa

SEQ ID NO: 676281 - RNA, 19 nt, Homo sapiens
  misc_RNA (1)...(19): siRNA sense strand
gaacaaaagcucucaauac

SEQ ID NO: 676282 - RNA, 19 nt, Homo sapiens
  misc_RNA (1)...(19): siRNA sense strand
caagugaaccaaacauuag

SEQ ID NO: 676283 - RNA, 19 nt, Homo sapiens
  misc_RNA (1)...(19): siRNA sense strand
caagaauuacuacucauug

SEQ ID NO: 676284 - RNA, 19 nt, Homo sapiens
  misc_RNA (1)...(19): siRNA sense strand
gcugcuggaucgugaagaa

SEQ ID NO: 676285 - RNA, 19 nt, Homo sapiens
  misc_RNA (1)...(19): siRNA sense strand
acgcauugcuuacuuacaa

SEQ ID NO: 676286 - RNA, 19 nt, Homo sapiens
  misc_RNA (1)...(19): siRNA sense strand
gaagaaaauccucagcuaa

SEQ ID NO: 676287 - RNA, 19 nt, Homo sapiens
  misc_RNA (1)...(19): siRNA sense strand
gauugucacuucucugucu

SEQ ID NO: 676288 - RNA, 19 nt, Homo sapiens
  misc_RNA (1)...(19): siRNA sense strand
ggacaguaacacuuaugaa

SEQ ID NO: 676289 - RNA, 19 nt, Homo sapiens
  misc_RNA (1)...(19): siRNA sense strand
ccaccuacaagaauuacua

SEQ ID NO: 676290 - RNA, 19 nt, Homo sapiens
  misc_RNA (1)...(19): siRNA sense strand
gauaagggaaacccaccua

SEQ ID NO: 676291 - RNA, 19 nt, Homo sapiens
  misc_RNA (1)...(19): siRNA sense strand
agaacgcccugguguccua

SEQ ID NO: 676292 - RNA, 19 nt, Homo sapiens
  misc_RNA (1)...(19): siRNA sense strand
gaaaaucaagugaaccaaa

SEQ ID NO: 676293 - RNA, 19 nt, Homo sapiens
  misc_RNA (1)...(19): siRNA sense strand
ugaagaaaauccucagcua

SEQ ID NO: 676294 - RNA, 19 nt, Homo sapiens
  misc_RNA (1)...(19): siRNA sense strand
gaaggacauuaacgacaac

SEQ ID NO: 676295 - RNA, 19 nt, Homo sapiens
  misc_RNA (1)...(19): siRNA sense strand
gagguaaaucugcagaaug

SEQ ID NO: 676296 - RNA, 19 nt, Homo sapiens
  misc_RNA (1)...(19): siRNA sense strand
cugcuugacucucgauuuc

SEQ ID NO: 676297 - RNA, 19 nt, Homo sapiens
  misc_RNA (1)...(19): siRNA sense strand
gaggcaaaccugaauuuac

SEQ ID NO: 676298 - RNA, 19 nt, Homo sapiens
  misc_RNA (1)...(19): siRNA sense strand
ccgcccagguucuccguaa

SEQ ID NO: 676299 - RNA, 19 nt, Homo sapiens
  misc_RNA (1)...(19): siRNA sense strand
agguaaaucugcagaaugg

SEQ ID NO: 676300 - RNA, 19 nt, Homo sapiens
  misc_RNA (1)...(19): siRNA sense strand
caaauucccagugcuuguu

SEQ ID NO: 676301 - RNA, 19 nt, Homo sapiens
  misc_RNA (1)...(19): siRNA sense strand
gcaccgucauugcccuaau

SEQ ID NO: 676302 - RNA, 19 nt, Homo sapiens
  misc_RNA (1)...(19): siRNA sense strand
caagugggcaccgucauug

SEQ ID NO: 676303 - RNA, 19 nt, Homo sapiens
  misc_RNA (1)...(19): siRNA sense strand
ugaaagaagaugcucaagu

SEQ ID NO: 676304 - RNA, 19 nt, Homo sapiens
  misc_RNA (1)...(19): siRNA sense strand
gcacgguccuaguggaacu

SEQ ID NO: 676305 - RNA, 19 nt, Homo sapiens
  misc_RNA (1)...(19): siRNA sense strand
gugaaccaaacauuaguaa

SEQ ID NO: 676306 - RNA, 19 nt, Homo sapiens
  misc_RNA (1)...(19): siRNA sense strand
cagaccgguuuaugaaguu

SEQ ID NO: 676307 - RNA, 19 nt, Homo sapiens
  misc_RNA (1)...(19): siRNA sense strand
acagaccgguuuaugaagu

SEQ ID NO: 676308 - RNA, 19 nt, Homo sapiens
  misc_RNA (1)...(19): siRNA sense strand
uguuagaugccaaugauaa

SEQ ID NO: 676309 - RNA, 19 nt, Homo sapiens
  misc_RNA (1)...(19): siRNA sense strand
cagcguuucugaccaugau

SEQ ID NO: 676310 - RNA, 19 nt, Homo sapiens
  misc_RNA (1)...(19): siRNA sense strand
uugaggacaguaacacuua

SEQ ID NO: 676311 - RNA, 19 nt, Homo sapiens
  misc_RNA (1)...(19): siRNA sense strand
uaagggaaacccaccuaug

SEQ ID NO: 676312 - RNA, 19 nt, Homo sapiens
  misc_RNA (1)...(19): siRNA sense strand
ugaggacaguaacacuuau

SEQ ID NO: 676313 - RNA, 19 nt, Homo sapiens
  misc_RNA (1)...(19): siRNA sense strand
uacaaacucaguccaaaug

SEQ ID NO: 676314 - RNA, 19 nt, Homo sapiens
  misc_RNA (1)...(19): siRNA sense strand
ucaagugggcaccgucauu

SEQ ID NO: 676315 - RNA, 19 nt, Homo sapiens
  misc_RNA (1)...(19): siRNA sense strand
guauucauuuagcucuuug

SEQ ID NO: 676316 - RNA, 19 nt, Homo sapiens
  misc_RNA (1)...(19): siRNA sense strand
cugcugcucucgcuucuuc

SEQ ID NO: 676317 - RNA, 19 nt, Homo sapiens
  misc_RNA (1)...(19): siRNA sense strand
cuuacaaacucaguccaaa

SEQ ID NO: 676318 - RNA, 19 nt, Homo sapiens
  misc_RNA (1)...(19): siRNA sense strand
gagagggugucggccuaug

SEQ ID NO: 676319 - RNA, 19 nt, Homo sapiens
  misc_RNA (1)...(19): siRNA sense strand
gauggaggcaaaccugaau

SEQ ID NO: 676320 - RNA, 19 nt, Homo sapiens
  misc_RNA (1)...(19): siRNA sense strand
agaccgguuuaugaaguua

SEQ ID NO: 676321 - RNA, 19 nt, Homo sapiens
  misc_RNA (1)...(19): siRNA sense strand
gacaggccgcugcagguuu

SEQ ID NO: 676322 - RNA, 19 nt, Homo sapiens
  misc_RNA (1)...(19): siRNA sense strand
augaugcuauugacuuuga

SEQ ID NO: 676323 - RNA, 19 nt, Homo sapiens
  misc_RNA (1)...(19): siRNA sense strand
guuugugaauucucggauu

SEQ ID NO: 676324 - RNA, 19 nt, Homo sapiens
  misc_RNA (1)...(19): siRNA sense strand
ggaugaaggaauaaacaag

SEQ ID NO: 676325 - RNA, 19 nt, Homo sapiens
  misc_RNA (1)...(19): siRNA sense strand
gacucucgauuuccacuag

SEQ ID NO: 676326 - RNA, 19 nt, Homo sapiens
  misc_RNA (1)...(19): siRNA sense strand
ggaagugaaggacauuaac

SEQ ID NO: 676327 - RNA, 19 nt, Homo sapiens
  misc_RNA (1)...(19): siRNA sense strand
aagaauuacuacucauugg

SEQ ID NO: 676328 - RNA, 19 nt, Homo sapiens
  misc_RNA (1)...(19): siRNA sense strand
agacaaauucccagugcuu

SEQ ID NO: 676329 - RNA, 19 nt, Homo sapiens
  misc_RNA (1)...(19): siRNA sense strand
gaacgcauugcuuacuuac

SEQ ID NO: 676330 - RNA, 19 nt, Homo sapiens
  misc_RNA (1)...(19): siRNA sense strand
gaagugaaggacauuaacg

SEQ ID NO: 676331 - RNA, 19 nt, Homo sapiens
  misc_RNA (1)...(19): siRNA sense strand
ugaauuuaccggaucuguu

SEQ ID NO: 676332 - RNA, 19 nt, Homo sapiens
  misc_RNA (1)...(19): siRNA sense strand
uggaagugaaggacauuaa

SEQ ID NO: 676333 - RNA, 19 nt, Homo sapiens
  misc_RNA (1)...(19): siRNA sense strand
aaaggacgggagaaauaaa

SEQ ID NO: 676334 - RNA, 19 nt, Homo sapiens
  misc_RNA (1)...(19): siRNA sense strand
uuugugaauucucggauug

SEQ ID NO: 676335 - RNA, 19 nt, Homo sapiens
  misc_RNA (1)...(19): siRNA sense strand
gcauuuuguuugugaauuc

SEQ ID NO: 676336 - RNA, 19 nt, Homo sapiens
  misc_RNA (1)...(19): siRNA sense strand
gagagaacgcauugcuuac

SEQ ID NO: 676337 - RNA, 19 nt, Homo sapiens
  misc_RNA (1)...(19): siRNA sense strand
gaggacaguaacacuuaug

SEQ ID NO: 676338 - RNA, 19 nt, Homo sapiens
  misc_RNA (1)...(19): siRNA sense strand
cggcucaacgcuucugauu

SEQ ID NO: 676339 - RNA, 19 nt, Homo sapiens
  misc_RNA (1)...(19): siRNA sense strand
uggaggcaaaccugaauuu

SEQ ID NO: 676340 - RNA, 19 nt, Homo sapiens
  misc_RNA (1)...(19): siRNA sense strand
gcuugacucucgauuucca

SEQ ID NO: 676341 - RNA, 19 nt, Homo sapiens
  misc_RNA (1)...(19): siRNA sense strand
guguccaccuacaagaauu

SEQ ID NO: 676342 - RNA, 19 nt, Homo sapiens
  misc_RNA (1)...(19): siRNA sense strand
aggcaaaccugaauuuacc

SEQ ID NO: 676343 - RNA, 19 nt, Homo sapiens
  misc_RNA (1)...(19): siRNA sense strand
uuacaaacucaguccaaau

SEQ ID NO: 676344 - RNA, 19 nt, Homo sapiens
  misc_RNA (1)...(19): siRNA sense strand
caccgucauugcccuaauc

SEQ ID NO: 676345 - RNA, 19 nt, Homo sapiens
  misc_RNA (1)...(19): siRNA sense strand
cgcauugcuuacuuacaaa

SEQ ID NO: 676346 - RNA, 19 nt, Homo sapiens
  misc_RNA (1)...(19): siRNA sense strand
guaaaugaugcuauugacu

SEQ ID NO: 676347 - RNA, 19 nt, Homo sapiens
  misc_RNA (1)...(19): siRNA sense strand
cacgauaagaaggaaauuu

SEQ ID NO: 676348 - RNA, 19 nt, Homo sapiens
  misc_RNA (1)...(19): siRNA sense strand
ugaaggaauaaacaaggaa

SEQ ID NO: 676349 - RNA, 19 nt, Homo sapiens
  misc_RNA (1)...(19): siRNA sense strand
gaauccagacugcuugacu

SEQ ID NO: 676350 - RNA, 19 nt, Homo sapiens
  misc_RNA (1)...(19): siRNA sense strand
augaaggaauaaacaagga

SEQ ID NO: 676351 - RNA, 19 nt, Homo sapiens
  misc_RNA (1)...(19): siRNA sense strand
cagcuccacuacucagucu

SEQ ID NO: 676352 - RNA, 19 nt, Homo sapiens
  misc_RNA (1)...(19): siRNA sense strand
aagaaaauccucagcuaaa

SEQ ID NO: 676353 - RNA, 19 nt, Homo sapiens
  misc_RNA (1)...(19): siRNA sense strand
acaaacucaguccaaauga

SEQ ID NO: 676354 - RNA, 19 nt, Homo sapiens
  misc_RNA (1)...(19): siRNA sense strand
gaaaauccucagcuaaagu

SEQ ID NO: 676355 - RNA, 19 nt, Homo sapiens
  misc_RNA (1)...(19): siRNA sense strand
aagggaaacccaccuaugg

SEQ ID NO: 676356 - RNA, 19 nt, Homo sapiens
  misc_RNA (1)...(19): siRNA sense strand
uguccaccuacaagaauua

SEQ ID NO: 676357 - RNA, 19 nt, Homo sapiens
  misc_RNA (1)...(19): siRNA sense strand
gaaagaagaugcucaagug

SEQ ID NO: 676358 - RNA, 19 nt, Homo sapiens
  misc_RNA (1)...(19): siRNA sense strand
ggagagaacgcauugcuua

SEQ ID NO: 676359 - RNA, 19 nt, Homo sapiens
  misc_RNA (1)...(19): siRNA sense strand
gaauuuaccggaucuguuu

SEQ ID NO: 676360 - RNA, 19 nt, Homo sapiens
  misc_RNA (1)...(19): siRNA sense strand
cgaaaggacgggagaaaua

SEQ ID NO: 676361 - RNA, 19 nt, Homo sapiens
  misc_RNA (1)...(19): siRNA sense strand
gaaaggacgggagaaauaa

SEQ ID NO: 676362 - RNA, 19 nt, Homo sapiens
  misc_RNA (1)...(19): siRNA sense strand
acaaggaaaugauguauuc

SEQ ID NO: 676363 - RNA, 19 nt, Homo sapiens
  misc_RNA (1)...(19): siRNA sense strand
cagcuaaaguuguuguuga

SEQ ID NO: 676364 - RNA, 19 nt, Homo sapiens
  misc_RNA (1)...(19): siRNA sense strand
ggaauaaacaaggaaauga

SEQ ID NO: 676365 - RNA, 19 nt, Homo sapiens
  misc_RNA (1)...(19): siRNA sense strand
ucaagugaaccaaacauua

SEQ ID NO: 676366 - RNA, 19 nt, Homo sapiens
  misc_RNA (1)...(19): siRNA sense strand
gagaacgcauugcuuacuu

SEQ ID NO: 676367 - RNA, 19 nt, Homo sapiens
  misc_RNA (1)...(19): siRNA sense strand
cuacaagaauuacuacuca

SEQ ID NO: 676368 - RNA, 19 nt, Homo sapiens
  misc_RNA (1)...(19): siRNA sense strand
gacaguaacacuuaugaaa

SEQ ID NO: 676369 - RNA, 19 nt, Homo sapiens
  misc_RNA (1)...(19): siRNA sense strand
ugaaggacauuaacgacaa

SEQ ID NO: 676370 - RNA, 19 nt, Homo sapiens
  misc_RNA (1)...(19): siRNA sense strand
gcucaacgcuucugauucg

SEQ ID NO: 676371 - RNA, 19 nt, Homo sapiens
  misc_RNA (1)...(19): siRNA sense strand
ggagguaaaucugcagaau

SEQ ID NO: 676372 - RNA, 19 nt, Homo sapiens
  misc_RNA (1)...(19): siRNA sense strand
ggaggcaaaccugaauuua

SEQ ID NO: 676373 - RNA, 19 nt, Homo sapiens
  misc_RNA (1)...(19): siRNA sense strand
gguguuagaugccaaugau

SEQ ID NO: 676374 - RNA, 19 nt, Homo sapiens
  misc_RNA (1)...(19): siRNA sense strand
agaacgcauugcuuacuua

SEQ ID NO: 676375 - RNA, 19 nt, Homo sapiens
  misc_RNA (1)...(19): siRNA sense strand
ugacagaccgguuuaugaa

SEQ ID NO: 676376 - RNA, 19 nt, Homo sapiens
  misc_RNA (1)...(19): siRNA sense strand
gaaggaauaaacaaggaaa

SEQ ID NO: 676377 - RNA, 19 nt, Homo sapiens
  misc_RNA (1)...(19): siRNA sense strand
gaacaaaagcucucaauac

SEQ ID NO: 676378 - RNA, 19 nt, Homo sapiens
  misc_RNA (1)...(19): siRNA sense strand
caagugaaccaaacauuag

SEQ ID NO: 676379 - RNA, 19 nt, Homo sapiens
  misc_RNA (1)...(19): siRNA sense strand
caagaauuacuacucauug

SEQ ID NO: 676380 - RNA, 19 nt, Homo sapiens
  misc_RNA (1)...(19): siRNA sense strand
gcugcuggaucgugaagaa

SEQ ID NO: 676381 - RNA, 19 nt, Homo sapiens
  misc_RNA (1)...(19): siRNA sense strand
acgcauugcuuacuuacaa

SEQ ID NO: 676382 - RNA, 19 nt, Homo sapiens
  misc_RNA (1)...(19): siRNA sense strand
gaagaaaauccucagcuaa

SEQ ID NO: 676383 - RNA, 19 nt, Homo sapiens
  misc_RNA (1)...(19): siRNA sense strand
gauugucacuucucugucu

SEQ ID NO: 676384 - RNA, 19 nt, Homo sapiens
  misc_RNA (1)...(19): siRNA sense strand
ggacaguaacacuuaugaa

SEQ ID NO: 676385 - RNA, 19 nt, Homo sapiens
  misc_RNA (1)...(19): siRNA sense strand
ccaccuacaagaauuacua

SEQ ID NO: 676386 - RNA, 19 nt, Homo sapiens
  misc_RNA (1)...(19): siRNA sense strand
gauaagggaaacccaccua

SEQ ID NO: 676387 - RNA, 19 nt, Homo sapiens
  misc_RNA (1)...(19): siRNA sense strand
agaacgcccugguguccua

SEQ ID NO: 676388 - RNA, 19 nt, Homo sapiens
  misc_RNA (1)...(19): siRNA sense strand
gaaaaucaagugaaccaaa

SEQ ID NO: 676389 - RNA, 19 nt, Homo sapiens
  misc_RNA (1)...(19): siRNA sense strand
ugaagaaaauccucagcua

SEQ ID NO: 676390 - RNA, 19 nt, Homo sapiens
  misc_RNA (1)...(19): siRNA sense strand
gaaggacauuaacgacaac

SEQ ID NO: 676391 - RNA, 19 nt, Homo sapiens
  misc_RNA (1)...(19): siRNA sense strand
gagguaaaucugcagaaug

SEQ ID NO: 676392 - RNA, 19 nt, Homo sapiens
  misc_RNA (1)...(19): siRNA sense strand
cugcuugacucucgauuuc

SEQ ID NO: 676393 - RNA, 19 nt, Homo sapiens
  misc_RNA (1)...(19): siRNA sense strand
gaggcaaaccugaauuuac

SEQ ID NO: 676394 - RNA, 19 nt, Homo sapiens
  misc_RNA (1)...(19): siRNA sense strand
ccgcccagguucuccguaa

SEQ ID NO: 676395 - RNA, 19 nt, Homo sapiens
  misc_RNA (1)...(19): siRNA sense strand
agguaaaucugcagaaugg

SEQ ID NO: 676396 - RNA, 19 nt, Homo sapiens
  misc_RNA (1)...(19): siRNA sense strand
caaauucccagugcuuguu

SEQ ID NO: 676397 - RNA, 19 nt, Homo sapiens
  misc_RNA (1)...(19): siRNA sense strand
gcaccgucauugcccuaau

SEQ ID NO: 676398 - RNA, 19 nt, Homo sapiens
  misc_RNA (1)...(19): siRNA sense strand
caagugggcaccgucauug

SEQ ID NO: 676399 - RNA, 19 nt, Homo sapiens
  misc_RNA (1)...(19): siRNA sense strand
ugaaagaagaugcucaagu

SEQ ID NO: 676400 - RNA, 19 nt, Homo sapiens
  misc_RNA (1)...(19): siRNA sense strand
gcacgguccuaguggaacu

SEQ ID NO: 676401 - RNA, 19 nt, Homo sapiens
  misc_RNA (1)...(19): siRNA sense strand
gugaaccaaacauuaguaa

SEQ ID NO: 676402 - RNA, 19 nt, Homo sapiens
  misc_RNA (1)...(19): siRNA sense strand
cagaccgguuuaugaaguu

SEQ ID NO: 676403 - RNA, 19 nt, Homo sapiens
  misc_RNA (1)...(19): siRNA sense strand
acagaccgguuuaugaagu

SEQ ID NO: 676404 - RNA, 19 nt, Homo sapiens
  misc_RNA (1)...(19): siRNA sense strand
uguuagaugccaaugauaa

SEQ ID NO: 676405 - RNA, 19 nt, Homo sapiens
  misc_RNA (1)...(19): siRNA sense strand
cagcguuucugaccaugau

SEQ ID NO: 676406 - RNA, 19 nt, Homo sapiens
  misc_RNA (1)...(19): siRNA sense strand
uugaggacaguaacacuua

SEQ ID NO: 676407 - RNA, 19 nt, Homo sapiens
  misc_RNA (1)...(19): siRNA sense strand
uaagggaaacccaccuaug

SEQ ID NO: 676408 - RNA, 19 nt, Homo sapiens
  misc_RNA (1)...(19): siRNA sense strand
ugaggacaguaacacuuau

SEQ ID NO: 676409 - RNA, 19 nt, Homo sapiens
  misc_RNA (1)...(19): siRNA sense strand
uacaaacucaguccaaaug

SEQ ID NO: 676410 - RNA, 19 nt, Homo sapiens
  misc_RNA (1)...(19): siRNA sense strand
ucaagugggcaccgucauu

SEQ ID NO: 676411 - RNA, 19 nt, Homo sapiens
  misc_RNA (1)...(19): siRNA sense strand
guauucauuuagcucuuug

SEQ ID NO: 676412 - RNA, 19 nt, Homo sapiens
  misc_RNA (1)...(19): siRNA sense strand
cugcugcucucgcuucuuc

SEQ ID NO: 676413 - RNA, 19 nt, Homo sapiens
  misc_RNA (1)...(19): siRNA sense strand
cuuacaaacucaguccaaa

SEQ ID NO: 676414 - RNA, 19 nt, Homo sapiens
  misc_RNA (1)...(19): siRNA sense strand
gagagggugucggccuaug

SEQ ID NO: 676415 - RNA, 19 nt, Homo sapiens
  misc_RNA (1)...(19): siRNA sense strand
gauggaggcaaaccugaau

SEQ ID NO: 676416 - RNA, 19 nt, Homo sapiens
  misc_RNA (1)...(19): siRNA sense strand
agaccgguuuaugaaguua

SEQ ID NO: 676417 - RNA, 19 nt, Homo sapiens
  misc_RNA (1)...(19): siRNA sense strand
gacaggccgcugcagguuu

SEQ ID NO: 676418 - RNA, 19 nt, Homo sapiens
  misc_RNA (1)...(19): siRNA sense strand
augaugcuauugacuuuga

SEQ ID NO: 676419 - RNA, 19 nt, Homo sapiens
  misc_RNA (1)...(19): siRNA sense strand
guuugugaauucucggauu

SEQ ID NO: 676420 - RNA, 19 nt, Homo sapiens
  misc_RNA (1)...(19): siRNA sense strand
ggaugaaggaauaaacaag

SEQ ID NO: 676421 - RNA, 19 nt, Homo sapiens
  misc_RNA (1)...(19): siRNA sense strand
gacucucgauuuccacuag

SEQ ID NO: 676422 - RNA, 19 nt, Homo sapiens
  misc_RNA (1)...(19): siRNA sense strand
ggaagugaaggacauuaac

SEQ ID NO: 676423 - RNA, 19 nt, Homo sapiens
  misc_RNA (1)...(19): siRNA sense strand
aagaauuacuacucauugg

SEQ ID NO: 676424 - RNA, 19 nt, Homo sapiens
  misc_RNA (1)...(19): siRNA sense strand
agacaaauucccagugcuu

SEQ ID NO: 676425 - RNA, 19 nt, Homo sapiens
  misc_RNA (1)...(19): siRNA sense strand
gaacgcauugcuuacuuac

SEQ ID NO: 676426 - RNA, 19 nt, Homo sapiens
  misc_RNA (1)...(19): siRNA sense strand
gaagugaaggacauuaacg

SEQ ID NO: 676427 - RNA, 19 nt, Homo sapiens
  misc_RNA (1)...(19): siRNA sense strand
ugaauuuaccggaucuguu

SEQ ID NO: 676428 - RNA, 19 nt, Homo sapiens
  misc_RNA (1)...(19): siRNA sense strand
uggaagugaaggacauuaa

SEQ ID NO: 676429 - RNA, 19 nt, Homo sapiens
  misc_RNA (1)...(19): siRNA sense strand
aaaggacgggagaaauaaa

SEQ ID NO: 676430 - RNA, 19 nt, Homo sapiens
  misc_RNA (1)...(19): siRNA sense strand
uuugugaauucucggauug

SEQ ID NO: 676431 - RNA, 19 nt, Homo sapiens
  misc_RNA (1)...(19): siRNA sense strand
gcauuuuguuugugaauuc

SEQ ID NO: 676432 - RNA, 19 nt, Homo sapiens
  misc_RNA (1)...(19): siRNA sense strand
gagagaacgcauugcuuac

SEQ ID NO: 676433 - RNA, 19 nt, Homo sapiens
  misc_RNA (1)...(19): siRNA sense strand
gaggacaguaacacuuaug

SEQ ID NO: 676434 - RNA, 19 nt, Homo sapiens
  misc_RNA (1)...(19): siRNA sense strand
cggcucaacgcuucugauu

SEQ ID NO: 676435 - RNA, 19 nt, Homo sapiens
  misc_RNA (1)...(19): siRNA sense strand
uggaggcaaaccugaauuu

SEQ ID NO: 676436 - RNA, 19 nt, Homo sapiens
  misc_RNA (1)...(19): siRNA sense strand
gcuugacucucgauuucca

SEQ ID NO: 676437 - RNA, 19 nt, Homo sapiens
  misc_RNA (1)...(19): siRNA sense strand
guguccaccuacaagaauu

SEQ ID NO: 676438 - RNA, 19 nt, Homo sapiens
  misc_RNA (1)...(19): siRNA sense strand
aggcaaaccugaauuuacc

SEQ ID NO: 676439 - RNA, 19 nt, Homo sapiens
  misc_RNA (1)...(19): siRNA sense strand
uuacaaacucaguccaaau

SEQ ID NO: 676440 - RNA, 19 nt, Homo sapiens
  misc_RNA (1)...(19): siRNA sense strand
caccgucauugcccuaauc

SEQ ID NO: 676441 - RNA, 19 nt, Homo sapiens
  misc_RNA (1)...(19): siRNA sense strand
cgcauugcuuacuuacaaa

SEQ ID NO: 676442 - RNA, 19 nt, Homo sapiens
  misc_RNA (1)...(19): siRNA sense strand
guaaaugaugcuauugacu

SEQ ID NO: 676443 - RNA, 19 nt, Homo sapiens
  misc_RNA (1)...(19): siRNA sense strand
cacgauaagaaggaaauuu

SEQ ID NO: 676444 - RNA, 19 nt, Homo sapiens
  misc_RNA (1)...(19): siRNA sense strand
ugaaggaauaaacaaggaa

SEQ ID NO: 676445 - RNA, 19 nt, Homo sapiens
  misc_RNA (1)...(19): siRNA sense strand
gaauccagacugcuugacu

SEQ ID NO: 676446 - RNA, 19 nt, Homo sapiens
  misc_RNA (1)...(19): siRNA sense strand
augaaggaauaaacaagga

SEQ ID NO: 676447 - RNA, 19 nt, Homo sapiens
  misc_RNA (1)...(19): siRNA sense strand
cagcuccacuacucagucu

SEQ ID NO: 676448 - RNA, 19 nt, Homo sapiens
  misc_RNA (1)...(19): siRNA sense strand
aagaaaauccucagcuaaa

SEQ ID NO: 676449 - RNA, 19 nt, Homo sapiens
  misc_RNA (1)...(19): siRNA sense strand
acaaacucaguccaaauga

SEQ ID NO: 676450 - RNA, 19 nt, Homo sapiens
  misc_RNA (1)...(19): siRNA sense strand
gaaaauccucagcuaaagu

SEQ ID NO: 676451 - RNA, 19 nt, Homo sapiens
  misc_RNA (1)...(19): siRNA sense strand
aagggaaacccaccuaugg

SEQ ID NO: 676452 - RNA, 19 nt, Homo sapiens
  misc_RNA (1)...(19): siRNA sense strand
uguccaccuacaagaauua

SEQ ID NO: 676453 - RNA, 19 nt, Homo sapiens
  misc_RNA (1)...(19): siRNA sense strand
gaaagaagaugcucaagug

SEQ ID NO: 676454 - RNA, 19 nt, Homo sapiens
  misc_RNA (1)...(19): siRNA sense strand
ggagagaacgcauugcuua

SEQ ID NO: 676455 - RNA, 19 nt, Homo sapiens
  misc_RNA (1)...(19): siRNA sense strand
gaauuuaccggaucuguuu

SEQ ID NO: 676456 - RNA, 19 nt, Homo sapiens
  misc_RNA (1)...(19): siRNA sense strand
cgaaaggacgggagaaaua

SEQ ID NO: 676457 - RNA, 19 nt, Homo sapiens
  misc_RNA (1)...(19): siRNA sense strand
gaaaggacgggagaaauaa

SEQ ID NO: 676458 - RNA, 19 nt, Homo sapiens
  misc_RNA (1)...(19): siRNA sense strand
acaaggaaaugauguauuc

SEQ ID NO: 676459 - RNA, 19 nt, Homo sapiens
  misc_RNA (1)...(19): siRNA sense strand
cagcuaaaguuguuguuga

SEQ ID NO: 676460 - RNA, 19 nt, Homo sapiens
  misc_RNA (1)...(19): siRNA sense strand
ggaauaaacaaggaaauga

SEQ ID NO: 676461 - RNA, 19 nt, Homo sapiens
  misc_RNA (1)...(19): siRNA sense strand
ucaagugaaccaaacauua

SEQ ID NO: 676462 - RNA, 19 nt, Homo sapiens
  misc_RNA (1)...(19): siRNA sense strand
gagaacgcauugcuuacuu

SEQ ID NO: 676463 - RNA, 19 nt, Homo sapiens
  misc_RNA (1)...(19): siRNA sense strand
cuacaagaauuacuacuca

SEQ ID NO: 676464 - RNA, 19 nt, Homo sapiens
  misc_RNA (1)...(19): siRNA sense strand
gacaguaacacuuaugaaa

SEQ ID NO: 676465 - RNA, 19 nt, Homo sapiens
  misc_RNA (1)...(19): siRNA sense strand
ugaaggacauuaacgacaa

SEQ ID NO: 676466 - RNA, 19 nt, Homo sapiens
  misc_RNA (1)...(19): siRNA sense strand
gcucaacgcuucugauucg

SEQ ID NO: 676467 - RNA, 19 nt, Homo sapiens
  misc_RNA (1)...(19): siRNA sense strand
ggagguaaaucugcagaau

SEQ ID NO: 676468 - RNA, 19 nt, Homo sapiens
  misc_RNA (1)...(19): siRNA sense strand
ggaggcaaaccugaauuua

SEQ ID NO: 676469 - RNA, 19 nt, Homo sapiens
  misc_RNA (1)...(19): siRNA sense strand
gguguuagaugccaaugau

SEQ ID NO: 676470 - RNA, 19 nt, Homo sapiens
  misc_RNA (1)...(19): siRNA sense strand
agaacgcauugcuuacuua

SEQ ID NO: 676471 - RNA, 19 nt, Homo sapiens
  misc_RNA (1)...(19): siRNA sense strand
ugacagaccgguuuaugaa

SEQ ID NO: 676472 - RNA, 19 nt, Homo sapiens
  misc_RNA (1)...(19): siRNA sense strand
gaaggaauaaacaaggaaa

SEQ ID NO: 676473 - RNA, 19 nt, Homo sapiens
  misc_RNA (1)...(19): siRNA sense strand
gaacaaaagcucucaauac

SEQ ID NO: 676474 - RNA, 19 nt, Homo sapiens
  misc_RNA (1)...(19): siRNA sense strand
caagugaaccaaacauuag

SEQ ID NO: 676475 - RNA, 19 nt, Homo sapiens
  misc_RNA (1)...(19): siRNA sense strand
caagaauuacuacucauug

SEQ ID NO: 676476 - RNA, 19 nt, Homo sapiens
  misc_RNA (1)...(19): siRNA sense strand
gcugcuggaucgugaagaa

SEQ ID NO: 676477 - RNA, 19 nt, Homo sapiens
  misc_RNA (1)...(19): siRNA sense strand
acgcauugcuuacuuacaa

SEQ ID NO: 676478 - RNA, 19 nt, Homo sapiens
  misc_RNA (1)...(19): siRNA sense strand
gaagaaaauccucagcuaa

SEQ ID NO: 676479 - RNA, 19 nt, Homo sapiens
  misc_RNA (1)...(19): siRNA sense strand
gauugucacuucucugucu

SEQ ID NO: 676480 - RNA, 19 nt, Homo sapiens
  misc_RNA (1)...(19): siRNA sense strand
ggacaguaacacuuaugaa

SEQ ID NO: 676481 - RNA, 19 nt, Homo sapiens
  misc_RNA (1)...(19): siRNA sense strand
ccaccuacaagaauuacua

SEQ ID NO: 676482 - RNA, 19 nt, Homo sapiens
  misc_RNA (1)...(19): siRNA sense strand
gauaagggaaacccaccua

SEQ ID NO: 676483 - RNA, 19 nt, Homo sapiens
  misc_RNA (1)...(19): siRNA sense strand
agaacgcccugguguccua

SEQ ID NO: 676484 - RNA, 19 nt, Homo sapiens
  misc_RNA (1)...(19): siRNA sense strand
gaaaaucaagugaaccaaa

SEQ ID NO: 676485 - RNA, 19 nt, Homo sapiens
  misc_RNA (1)...(19): siRNA sense strand
ugaagaaaauccucagcua

SEQ ID NO: 676486 - RNA, 19 nt, Homo sapiens
  misc_RNA (1)...(19): siRNA sense strand
gaaggacauuaacgacaac

SEQ ID NO: 676487 - RNA, 19 nt, Homo sapiens
  misc_RNA (1)...(19): siRNA sense strand
gagguaaaucugcagaaug

SEQ ID NO: 676488 - RNA, 19 nt, Homo sapiens
  misc_RNA (1)...(19): siRNA sense strand
cugcuugacucucgauuuc

SEQ ID NO: 676489 - RNA, 19 nt, Homo sapiens
  misc_RNA (1)...(19): siRNA sense strand
gaggcaaaccugaauuuac

SEQ ID NO: 676490 - RNA, 19 nt, Homo sapiens
  misc_RNA (1)...(19): siRNA sense strand
ccgcccagguucuccguaa

SEQ ID NO: 676491 - RNA, 19 nt, Homo sapiens
  misc_RNA (1)...(19): siRNA sense strand
agguaaaucugcagaaugg

SEQ ID NO: 676492 - RNA, 19 nt, Homo sapiens
  misc_RNA (1)...(19): siRNA sense strand
caaauucccagugcuuguu

SEQ ID NO: 676493 - RNA, 19 nt, Homo sapiens
  misc_RNA (1)...(19): siRNA sense strand
gcaccgucauugcccuaau

SEQ ID NO: 676494 - RNA, 19 nt, Homo sapiens
  misc_RNA (1)...(19): siRNA sense strand
caagugggcaccgucauug

SEQ ID NO: 676495 - RNA, 19 nt, Homo sapiens
  misc_RNA (1)...(19): siRNA sense strand
ugaaagaagaugcucaagu

SEQ ID NO: 676496 - RNA, 19 nt, Homo sapiens
  misc_RNA (1)...(19): siRNA sense strand
gcacgguccuaguggaacu

SEQ ID NO: 676497 - RNA, 19 nt, Homo sapiens
  misc_RNA (1)...(19): siRNA sense strand
gugaaccaaacauuaguaa

SEQ ID NO: 676498 - RNA, 19 nt, Homo sapiens
  misc_RNA (1)...(19): siRNA sense strand
cagaccgguuuaugaaguu

SEQ ID NO: 676499 - RNA, 19 nt, Homo sapiens
  misc_RNA (1)...(19): siRNA sense strand
acagaccgguuuaugaagu

SEQ ID NO: 676500 - RNA, 19 nt, Homo sapiens
  misc_RNA (1)...(19): siRNA sense strand
uguuagaugccaaugauaa

SEQ ID NO: 676501 - RNA, 19 nt, Homo sapiens
  misc_RNA (1)...(19): siRNA sense strand
cagcguuucugaccaugau

SEQ ID NO: 676502 - RNA, 19 nt, Homo sapiens
  misc_RNA (1)...(19): siRNA sense strand
uugaggacaguaacacuua

SEQ ID NO: 676503 - RNA, 19 nt, Homo sapiens
  misc_RNA (1)...(19): siRNA sense strand
uaagggaaacccaccuaug

SEQ ID NO: 676504 - RNA, 19 nt, Homo sapiens
  misc_RNA (1)...(19): siRNA sense strand
ugaggacaguaacacuuau

SEQ ID NO: 676505 - RNA, 19 nt, Homo sapiens
  misc_RNA (1)...(19): siRNA sense strand
uacaaacucaguccaaaug

SEQ ID NO: 676506 - RNA, 19 nt, Homo sapiens
  misc_RNA (1)...(19): siRNA sense strand
ucaagugggcaccgucauu

SEQ ID NO: 676507 - RNA, 19 nt, Homo sapiens
  misc_RNA (1)...(19): siRNA sense strand
guauucauuuagcucuuug

SEQ ID NO: 676508 - RNA, 19 nt, Homo sapiens
  misc_RNA (1)...(19): siRNA sense strand
cugcugcucucgcuucuuc

SEQ ID NO: 676509 - RNA, 19 nt, Homo sapiens
  misc_RNA (1)...(19): siRNA sense strand
cuuacaaacucaguccaaa

SEQ ID NO: 676510 - RNA, 19 nt, Homo sapiens
  misc_RNA (1)...(19): siRNA sense strand
gagagggugucggccuaug

SEQ ID NO: 676511 - RNA, 19 nt, Homo sapiens
  misc_RNA (1)...(19): siRNA sense strand
gauggaggcaaaccugaau

SEQ ID NO: 676512 - RNA, 19 nt, Homo sapiens
  misc_RNA (1)...(19): siRNA sense strand
agaccgguuuaugaaguua

SEQ ID NO: 676513 - RNA, 19 nt, Homo sapiens
  misc_RNA (1)...(19): siRNA sense strand
gacaggccgcugcagguuu

SEQ ID NO: 676514 - RNA, 19 nt, Homo sapiens
  misc_RNA (1)...(19): siRNA sense strand
augaugcuauugacuuuga

SEQ ID NO: 676515 - RNA, 19 nt, Homo sapiens
  misc_RNA (1)...(19): siRNA sense strand
guuugugaauucucggauu

SEQ ID NO: 676516 - RNA, 19 nt, Homo sapiens
  misc_RNA (1)...(19): siRNA sense strand
ggaugaaggaauaaacaag

SEQ ID NO: 676517 - RNA, 19 nt, Homo sapiens
  misc_RNA (1)...(19): siRNA sense strand
gacucucgauuuccacuag

SEQ ID NO: 676518 - RNA, 19 nt, Homo sapiens
  misc_RNA (1)...(19): siRNA sense strand
ggaagugaaggacauuaac

SEQ ID NO: 676519 - RNA, 19 nt, Homo sapiens
  misc_RNA (1)...(19): siRNA sense strand
aagaauuacuacucauugg

SEQ ID NO: 676520 - RNA, 19 nt, Homo sapiens
  misc_RNA (1)...(19): siRNA sense strand
agacaaauucccagugcuu

SEQ ID NO: 676521 - RNA, 19 nt, Homo sapiens
  misc_RNA (1)...(19): siRNA sense strand
gaacgcauugcuuacuuac

SEQ ID NO: 676522 - RNA, 19 nt, Homo sapiens
  misc_RNA (1)...(19): siRNA sense strand
gaagugaaggacauuaacg

SEQ ID NO: 676523 - RNA, 19 nt, Homo sapiens
  misc_RNA (1)...(19): siRNA sense strand
ugaauuuaccggaucuguu

SEQ ID NO: 676524 - RNA, 19 nt, Homo sapiens
  misc_RNA (1)...(19): siRNA sense strand
uggaagugaaggacauuaa

SEQ ID NO: 676525 - RNA, 19 nt, Homo sapiens
  misc_RNA (1)...(19): siRNA sense strand
aaaggacgggagaaauaaa

SEQ ID NO: 676526 - RNA, 19 nt, Homo sapiens
  misc_RNA (1)...(19): siRNA sense strand
uuugugaauucucggauug

SEQ ID NO: 676527 - RNA, 19 nt, Homo sapiens
  misc_RNA (1)...(19): siRNA sense strand
gcauuuuguuugugaauuc

SEQ ID NO: 676528 - RNA, 19 nt, Homo sapiens
  misc_RNA (1)...(19): siRNA sense strand
gagagaacgcauugcuuac

SEQ ID NO: 676529 - RNA, 19 nt, Homo sapiens
  misc_RNA (1)...(19): siRNA sense strand
gaggacaguaacacuuaug

SEQ ID NO: 676530 - RNA, 19 nt, Homo sapiens
  misc_RNA (1)...(19): siRNA sense strand
cggcucaacgcuucugauu

SEQ ID NO: 676531 - RNA, 19 nt, Homo sapiens
  misc_RNA (1)...(19): siRNA sense strand
uggaggcaaaccugaauuu

SEQ ID NO: 676532 - RNA, 19 nt, Homo sapiens
  misc_RNA (1)...(19): siRNA sense strand
gcuugacucucgauuucca

SEQ ID NO: 676533 - RNA, 19 nt, Homo sapiens
  misc_RNA (1)...(19): siRNA sense strand
guguccaccuacaagaauu

SEQ ID NO: 676534 - RNA, 19 nt, Homo sapiens
  misc_RNA (1)...(19): siRNA sense strand
aggcaaaccugaauuuacc

SEQ ID NO: 676535 - RNA, 19 nt, Homo sapiens
  misc_RNA (1)...(19): siRNA sense strand
uuacaaacucaguccaaau

SEQ ID NO: 676536 - RNA, 19 nt, Homo sapiens
  misc_RNA (1)...(19): siRNA sense strand
caccgucauugcccuaauc

SEQ ID NO: 676537 - RNA, 19 nt, Homo sapiens
  misc_RNA (1)...(19): siRNA sense strand
cgcauugcuuacuuacaaa

SEQ ID NO: 676538 - RNA, 19 nt, Homo sapiens
  misc_RNA (1)...(19): siRNA sense strand
guaaaugaugcuauugacu

SEQ ID NO: 676539 - RNA, 19 nt, Homo sapiens
  misc_RNA (1)...(19): siRNA sense strand
cacgauaagaaggaaauuu

SEQ ID NO: 676540 - RNA, 19 nt, Homo sapiens
  misc_RNA (1)...(19): siRNA sense strand
ugaaggaauaaacaaggaa

SEQ ID NO: 676541 - RNA, 19 nt, Homo sapiens
  misc_RNA (1)...(19): siRNA sense strand
gaauccagacugcuugacu

SEQ ID NO: 676542 - RNA, 19 nt, Homo sapiens
  misc_RNA (1)...(19): siRNA sense strand
augaaggaauaaacaagga

SEQ ID NO: 676543 - RNA, 19 nt, Homo sapiens
  misc_RNA (1)...(19): siRNA sense strand
cagcuccacuacucagucu

SEQ ID NO: 676544 - RNA, 19 nt, Homo sapiens
  misc_RNA (1)...(19): siRNA sense strand
aagaaaauccucagcuaaa

SEQ ID NO: 676545 - RNA, 19 nt, Homo sapiens
  misc_RNA (1)...(19): siRNA sense strand
acaaacucaguccaaauga

SEQ ID NO: 676546 - RNA, 19 nt, Homo sapiens
  misc_RNA (1)...(19): siRNA sense strand
gaaaauccucagcuaaagu

SEQ ID NO: 676547 - RNA, 19 nt, Homo sapiens
  misc_RNA (1)...(19): siRNA sense strand
aagggaaacccaccuaugg

SEQ ID NO: 676548 - RNA, 19 nt, Homo sapiens
  misc_RNA (1)...(19): siRNA sense strand
uguccaccuacaagaauua

SEQ ID NO: 676549 - RNA, 19 nt, Homo sapiens
  misc_RNA (1)...(19): siRNA sense strand
gaacuuaauuugcugcuaa

SEQ ID NO: 676550 - RNA, 19 nt, Homo sapiens
  misc_RNA (1)...(19): siRNA sense strand
cgacaaugauccagaguuu

SEQ ID NO: 676551 - RNA, 19 nt, Homo sapiens
  misc_RNA (1)...(19): siRNA sense strand
uuaaagaagucucuggaua

SEQ ID NO: 676552 - RNA, 19 nt, Homo sapiens
  misc_RNA (1)...(19): siRNA sense strand
gagggucaauggaacuuua

SEQ ID NO: 676553 - RNA, 19 nt, Homo sapiens
  misc_RNA (1)...(19): siRNA sense strand
ggaaaaugcugcuaaagaa

SEQ ID NO: 676554 - RNA, 19 nt, Homo sapiens
  misc_RNA (1)...(19): siRNA sense strand
gagguaacauacuccuuaa

SEQ ID NO: 676555 - RNA, 19 nt, Homo sapiens
  misc_RNA (1)...(19): siRNA sense strand
ggaagacacuuauuuacac

SEQ ID NO: 676556 - RNA, 19 nt, Homo sapiens
  misc_RNA (1)...(19): siRNA sense strand
gaaguacaggcuacagaua

SEQ ID NO: 676557 - RNA, 19 nt, Homo sapiens
  misc_RNA (1)...(19): siRNA sense strand
gaagugagggucaauggaa

SEQ ID NO: 676558 - RNA, 19 nt, Homo sapiens
  misc_RNA (1)...(19): siRNA sense strand
gaggagggcccaccuaaga

SEQ ID NO: 676559 - RNA, 19 nt, Homo sapiens
  misc_RNA (1)...(19): siRNA sense strand
ugaaggacauuaacgacaa

SEQ ID NO: 676560 - RNA, 19 nt, Homo sapiens
  misc_RNA (1)...(19): siRNA sense strand
acgcguggcuuucauauga

SEQ ID NO: 676561 - RNA, 19 nt, Homo sapiens
  misc_RNA (1)...(19): siRNA sense strand
ggagguaaaucugcagaau

SEQ ID NO: 676562 - RNA, 19 nt, Homo sapiens
  misc_RNA (1)...(19): siRNA sense strand
caaaugguaagcagauuaa

SEQ ID NO: 676563 - RNA, 19 nt, Homo sapiens
  misc_RNA (1)...(19): siRNA sense strand
gaacaaaagcugcugauug

SEQ ID NO: 676564 - RNA, 19 nt, Homo sapiens
  misc_RNA (1)...(19): siRNA sense strand
caauggaagacacuuauuu

SEQ ID NO: 676565 - RNA, 19 nt, Homo sapiens
  misc_RNA (1)...(19): siRNA sense strand
agaaugcucuauugaccua

SEQ ID NO: 676566 - RNA, 19 nt, Homo sapiens
  misc_RNA (1)...(19): siRNA sense strand
gguaacauacuccuuaaug

SEQ ID NO: 676567 - RNA, 19 nt, Homo sapiens
  misc_RNA (1)...(19): siRNA sense strand
aaagaagucucuggauaga

SEQ ID NO: 676568 - RNA, 19 nt, Homo sapiens
  misc_RNA (1)...(19): siRNA sense strand
agagguaacauacuccuua

SEQ ID NO: 676569 - RNA, 19 nt, Homo sapiens
  misc_RNA (1)...(19): siRNA sense strand
caacaaaugguaagcagau

SEQ ID NO: 676570 - RNA, 19 nt, Homo sapiens
  misc_RNA (1)...(19): siRNA sense strand
agaacgcgcugguguccua

SEQ ID NO: 676571 - RNA, 19 nt, Homo sapiens
  misc_RNA (1)...(19): siRNA sense strand
uaaagaagucucuggauag

SEQ ID NO: 676572 - RNA, 19 nt, Homo sapiens
  misc_RNA (1)...(19): siRNA sense strand
gaagacacuuauuuacacu

SEQ ID NO: 676573 - RNA, 19 nt, Homo sapiens
  misc_RNA (1)...(19): siRNA sense strand
cgauaacucuccugaaguc

SEQ ID NO: 676574 - RNA, 19 nt, Homo sapiens
  misc_RNA (1)...(19): siRNA sense strand
cuauugaccuacaggcuaa

SEQ ID NO: 676575 - RNA, 19 nt, Homo sapiens
  misc_RNA (1)...(19): siRNA sense strand
gaacgugugggccuaugaa

SEQ ID NO: 676576 - RNA, 19 nt, Homo sapiens
  misc_RNA (1)...(19): siRNA sense strand
acaaugauccagaguuuga

SEQ ID NO: 676577 - RNA, 19 nt, Homo sapiens
  misc_RNA (1)...(19): siRNA sense strand
uguccaccuucaagaauua

SEQ ID NO: 676578 - RNA, 19 nt, Homo sapiens
  misc_RNA (1)...(19): siRNA sense strand
gauccagaguuugauaaau

SEQ ID NO: 676579 - RNA, 19 nt, Homo sapiens
  misc_RNA (1)...(19): siRNA sense strand
ucaauuaagcccaauggaa

SEQ ID NO: 676580 - RNA, 19 nt, Homo sapiens
  misc_RNA (1)...(19): siRNA sense strand
acaaaugguaagcagauua

SEQ ID NO: 676581 - RNA, 19 nt, Homo sapiens
  misc_RNA (1)...(19): siRNA sense strand
ggaacuuaauuugcugcua

SEQ ID NO: 676582 - RNA, 19 nt, Homo sapiens
  misc_RNA (1)...(19): siRNA sense strand
ccaccaggcugccacaucu

SEQ ID NO: 676583 - RNA, 19 nt, Homo sapiens
  misc_RNA (1)...(19): siRNA sense strand
ucaauggagagguaacaua

SEQ ID NO: 676584 - RNA, 19 nt, Homo sapiens
  misc_RNA (1)...(19): siRNA sense strand
aaacuccggaacuuaauuu

SEQ ID NO: 676585 - RNA, 19 nt, Homo sapiens
  misc_RNA (1)...(19): siRNA sense strand
ucacgcugcugcuguauac

SEQ ID NO: 676586 - RNA, 19 nt, Homo sapiens
  misc_RNA (1)...(19): siRNA sense strand
gcuguacacgggcgagaua

SEQ ID NO: 676587 - RNA, 19 nt, Homo sapiens
  misc_RNA (1)...(19): siRNA sense strand
ugaccuacaggcuaaguaa

SEQ ID NO: 676588 - RNA, 19 nt, Homo sapiens
  misc_RNA (1)...(19): siRNA sense strand
gacaggagccagggucaaa

SEQ ID NO: 676589 - RNA, 19 nt, Homo sapiens
  misc_RNA (1)...(19): siRNA sense strand
gcaguuaacaagcuaguac

SEQ ID NO: 676590 - RNA, 19 nt, Homo sapiens
  misc_RNA (1)...(19): siRNA sense strand
gaaggacauuaacgacaac

SEQ ID NO: 676591 - RNA, 19 nt, Homo sapiens
  misc_RNA (1)...(19): siRNA sense strand
ggacaccaacgauaacucu

SEQ ID NO: 676592 - RNA, 19 nt, Homo sapiens
  misc_RNA (1)...(19): siRNA sense strand
gagguaaaucugcagaaug

SEQ ID NO: 676593 - RNA, 19 nt, Homo sapiens
  misc_RNA (1)...(19): siRNA sense strand
gaaaaugcugcuaaagaaa

SEQ ID NO: 676594 - RNA, 19 nt, Homo sapiens
  misc_RNA (1)...(19): siRNA sense strand
ccaccgacuucuaguacug

SEQ ID NO: 676595 - RNA, 19 nt, Homo sapiens
  misc_RNA (1)...(19): siRNA sense strand
ugccacaucuucacagugu

SEQ ID NO: 676596 - RNA, 19 nt, Homo sapiens
  misc_RNA (1)...(19): siRNA sense strand
aacgauaacucuccugaag

SEQ ID NO: 676597 - RNA, 19 nt, Homo sapiens
  misc_RNA (1)...(19): siRNA sense strand
agagggagcuucugaugcu

SEQ ID NO: 676598 - RNA, 19 nt, Homo sapiens
  misc_RNA (1)...(19): siRNA sense strand
gcacggucauugcccugau

SEQ ID NO: 676599 - RNA, 19 nt, Homo sapiens
  misc_RNA (1)...(19): siRNA sense strand
gucaauggaacuuuagauu

SEQ ID NO: 676600 - RNA, 19 nt, Homo sapiens
  misc_RNA (1)...(19): siRNA sense strand
agguaaaucugcagaaugg

SEQ ID NO: 676601 - RNA, 19 nt, Homo sapiens
  misc_RNA (1)...(19): siRNA sense strand
aggagucaauggagaggua

SEQ ID NO: 676602 - RNA, 19 nt, Homo sapiens
  misc_RNA (1)...(19): siRNA sense strand
agacacuuauuuacacuag

SEQ ID NO: 676603 - RNA, 19 nt, Homo sapiens
  misc_RNA (1)...(19): siRNA sense strand
gagaaaacuccggaacuua

SEQ ID NO: 676604 - RNA, 19 nt, Homo sapiens
  misc_RNA (1)...(19): siRNA sense strand
guguccaccuucaagaauu

SEQ ID NO: 676605 - RNA, 19 nt, Homo sapiens
  misc_RNA (1)...(19): siRNA sense strand
gcccaauggaagacacuua

SEQ ID NO: 676606 - RNA, 19 nt, Homo sapiens
  misc_RNA (1)...(19): siRNA sense strand
uggcaccguucggcuguua

SEQ ID NO: 676607 - RNA, 19 nt, Homo sapiens
  misc_RNA (1)...(19): siRNA sense strand
aggcugcgcugguggaugu

SEQ ID NO: 676608 - RNA, 19 nt, Homo sapiens
  misc_RNA (1)...(19): siRNA sense strand
gaaggugcgcgcaguggau

SEQ ID NO: 676609 - RNA, 19 nt, Homo sapiens
  misc_RNA (1)...(19): siRNA sense strand
aaguacaggcuacagauaa

SEQ ID NO: 676610 - RNA, 19 nt, Homo sapiens
  misc_RNA (1)...(19): siRNA sense strand
gagaagugagggucaaugg

SEQ ID NO: 676611 - RNA, 19 nt, Homo sapiens
  misc_RNA (1)...(19): siRNA sense strand
ggacucgcguuuuccacua

SEQ ID NO: 676612 - RNA, 19 nt, Homo sapiens
  misc_RNA (1)...(19): siRNA sense strand
gagaacgugugggccuaug

SEQ ID NO: 676613 - RNA, 19 nt, Homo sapiens
  misc_RNA (1)...(19): siRNA sense strand
augcugacauugaagagaa

SEQ ID NO: 676614 - RNA, 19 nt, Homo sapiens
  misc_RNA (1)...(19): siRNA sense strand
cucuaggucugaauaaaga

SEQ ID NO: 676615 - RNA, 19 nt, Homo sapiens
  misc_RNA (1)...(19): siRNA sense strand
ucaagaauuacuacucguu

SEQ ID NO: 676616 - RNA, 19 nt, Homo sapiens
  misc_RNA (1)...(19): siRNA sense strand
caauggagagguaacauac

SEQ ID NO: 676617 - RNA, 19 nt, Homo sapiens
  misc_RNA (1)...(19): siRNA sense strand
auccagaguuugauaaauc

SEQ ID NO: 676618 - RNA, 19 nt, Homo sapiens
  misc_RNA (1)...(19): siRNA sense strand
caacgcguggcuuucauau

SEQ ID NO: 676619 - RNA, 19 nt, Homo sapiens
  misc_RNA (1)...(19): siRNA sense strand
caacgauaacucuccugaa

SEQ ID NO: 676620 - RNA, 19 nt, Homo sapiens
  misc_RNA (1)...(19): siRNA sense strand
gacaggccgcugcagguuu

SEQ ID NO: 676621 - RNA, 19 nt, Homo sapiens
  misc_RNA (1)...(19): siRNA sense strand
ccaauggcaggucacugua

SEQ ID NO: 676622 - RNA, 19 nt, Homo sapiens
  misc_RNA (1)...(19): siRNA sense strand
uggaagacacuuauuuaca

SEQ ID NO: 676623 - RNA, 19 nt, Homo sapiens
  misc_RNA (1)...(19): siRNA sense strand
ccaauggaagacacuuauu

SEQ ID NO: 676624 - RNA, 19 nt, Homo sapiens
  misc_RNA (1)...(19): siRNA sense strand
guaagcagauuaaaagacu

SEQ ID NO: 676625 - RNA, 19 nt, Homo sapiens
  misc_RNA (1)...(19): siRNA sense strand
gggaggcgcaguuaacaag

SEQ ID NO: 676626 - RNA, 19 nt, Homo sapiens
  misc_RNA (1)...(19): siRNA sense strand
cuucugaugcugacauuga

SEQ ID NO: 676627 - RNA, 19 nt, Homo sapiens
  misc_RNA (1)...(19): siRNA sense strand
agacgaaggagucaaugga

SEQ ID NO: 676628 - RNA, 19 nt, Homo sapiens
  misc_RNA (1)...(19): siRNA sense strand
gaccuacaggcuaaguaaa

SEQ ID NO: 676629 - RNA, 19 nt, Homo sapiens
  misc_RNA (1)...(19): siRNA sense strand
ugguggaugucaacgugua

SEQ ID NO: 676630 - RNA, 19 nt, Homo sapiens
  misc_RNA (1)...(19): siRNA sense strand
cuacaacgcguggcuuuca

SEQ ID NO: 676631 - RNA, 19 nt, Homo sapiens
  misc_RNA (1)...(19): siRNA sense strand
agaaaacuccggaacuuaa

SEQ ID NO: 676632 - RNA, 19 nt, Homo sapiens
  misc_RNA (1)...(19): siRNA sense strand
gcauuuuguuugugaauuc

SEQ ID NO: 676633 - RNA, 19 nt, Homo sapiens
  misc_RNA (1)...(19): siRNA sense strand
gcgccaccgacuucuagua

SEQ ID NO: 676634 - RNA, 19 nt, Homo sapiens
  misc_RNA (1)...(19): siRNA sense strand
ggagaagugagggucaaug

SEQ ID NO: 676635 - RNA, 19 nt, Homo sapiens
  misc_RNA (1)...(19): siRNA sense strand
acucuugugcucaaacuaa

SEQ ID NO: 676636 - RNA, 19 nt, Homo sapiens
  misc_RNA (1)...(19): siRNA sense strand
gacuacagcucuggcuucu

SEQ ID NO: 676637 - RNA, 19 nt, Homo sapiens
  misc_RNA (1)...(19): siRNA sense strand
ugaaguacaggcuacagau

SEQ ID NO: 676638 - RNA, 19 nt, Homo sapiens
  misc_RNA (1)...(19): siRNA sense strand
uagauucaccaacaaaugg

SEQ ID NO: 676639 - RNA, 19 nt, Homo sapiens
  misc_RNA (1)...(19): siRNA sense strand
caacguguaccugaucauc

SEQ ID NO: 676640 - RNA, 19 nt, Homo sapiens
  misc_RNA (1)...(19): siRNA sense strand
cuagagggagcuucugaug

SEQ ID NO: 676641 - RNA, 19 nt, Homo sapiens
  misc_RNA (1)...(19): siRNA sense strand
ucaaaauaauggagaagug

SEQ ID NO: 676642 - RNA, 19 nt, Homo sapiens
  misc_RNA (1)...(19): siRNA sense strand
gacacuuauuuacacuaga

SEQ ID NO: 676643 - RNA, 19 nt, Homo sapiens
  misc_RNA (1)...(19): siRNA sense strand
acaacgcguggcuuucaua

SEQ ID NO: 676644 - RNA, 19 nt, Homo sapiens
  misc_RNA (1)...(19): siRNA sense strand
cauacuccuuaaugucaau

SEQ ID NO: 676645 - RNA, 19 nt, Homo sapiens
  misc_RNA (1)...(19): siRNA sense strand
uacucacgcugcugcugua

SEQ ID NO: 676646 - RNA, 19 nt, Homo sapiens
  misc_RNA (1)...(19): siRNA sense strand
gcugccacaucuucacagu

SEQ ID NO: 676647 - RNA, 19 nt, Homo sapiens
  misc_RNA (1)...(19): siRNA sense strand
ccaccuucaagaauuacua

SEQ ID NO: 676648 - RNA, 19 nt, Homo sapiens
  misc_RNA (1)...(19): siRNA sense strand
ggucaauggaacuuuagau

SEQ ID NO: 676649 - RNA, 19 nt, Homo sapiens
  misc_RNA (1)...(19): siRNA sense strand
gaacuuaauuugcugcuaa

SEQ ID NO: 676650 - RNA, 19 nt, Homo sapiens
  misc_RNA (1)...(19): siRNA sense strand
cgacaaugauccagaguuu

SEQ ID NO: 676651 - RNA, 19 nt, Homo sapiens
  misc_RNA (1)...(19): siRNA sense strand
uuaaagaagucucuggaua

SEQ ID NO: 676652 - RNA, 19 nt, Homo sapiens
  misc_RNA (1)...(19): siRNA sense strand
gagggucaauggaacuuua

SEQ ID NO: 676653 - RNA, 19 nt, Homo sapiens
  misc_RNA (1)...(19): siRNA sense strand
ggaaaaugcugcuaaagaa

SEQ ID NO: 676654 - RNA, 19 nt, Homo sapiens
  misc_RNA (1)...(19): siRNA sense strand
gagguaacauacuccuuaa

SEQ ID NO: 676655 - RNA, 19 nt, Homo sapiens
  misc_RNA (1)...(19): siRNA sense strand
ggaagacacuuauuuacac

SEQ ID NO: 676656 - RNA, 19 nt, Homo sapiens
  misc_RNA (1)...(19): siRNA sense strand
gaaguacaggcuacagaua

SEQ ID NO: 676657 - RNA, 19 nt, Homo sapiens
  misc_RNA (1)...(19): siRNA sense strand
gaagugagggucaauggaa

SEQ ID NO: 676658 - RNA, 19 nt, Homo sapiens
  misc_RNA (1)...(19): siRNA sense strand
gaggagggcccaccuaaga

SEQ ID NO: 676659 - RNA, 19 nt, Homo sapiens
  misc_RNA (1)...(19): siRNA sense strand
ugaaggacauuaacgacaa

SEQ ID NO: 676660 - RNA, 19 nt, Homo sapiens
  misc_RNA (1)...(19): siRNA sense strand
acgcguggcuuucauauga

SEQ ID NO: 676661 - RNA, 19 nt, Homo sapiens
  misc_RNA (1)...(19): siRNA sense strand
ggagguaaaucugcagaau

SEQ ID NO: 676662 - RNA, 19 nt, Homo sapiens
  misc_RNA (1)...(19): siRNA sense strand
caaaugguaagcagauuaa

SEQ ID NO: 676663 - RNA, 19 nt, Homo sapiens
  misc_RNA (1)...(19): siRNA sense strand
gaacaaaagcugcugauug

SEQ ID NO: 676664 - RNA, 19 nt, Homo sapiens
  misc_RNA (1)...(19): siRNA sense strand
caauggaagacacuuauuu

SEQ ID NO: 676665 - RNA, 19 nt, Homo sapiens
  misc_RNA (1)...(19): siRNA sense strand
agaaugcucuauugaccua

SEQ ID NO: 676666 - RNA, 19 nt, Homo sapiens
  misc_RNA (1)...(19): siRNA sense strand
gguaacauacuccuuaaug

SEQ ID NO: 676667 - RNA, 19 nt, Homo sapiens
  misc_RNA (1)...(19): siRNA sense strand
aaagaagucucuggauaga

SEQ ID NO: 676668 - RNA, 19 nt, Homo sapiens
  misc_RNA (1)...(19): siRNA sense strand
agagguaacauacuccuua

SEQ ID NO: 676669 - RNA, 19 nt, Homo sapiens
  misc_RNA (1)...(19): siRNA sense strand
caacaaaugguaagcagau

SEQ ID NO: 676670 - RNA, 19 nt, Homo sapiens
  misc_RNA (1)...(19): siRNA sense strand
agaacgcgcugguguccua

SEQ ID NO: 676671 - RNA, 19 nt, Homo sapiens
  misc_RNA (1)...(19): siRNA sense strand
uaaagaagucucuggauag

SEQ ID NO: 676672 - RNA, 19 nt, Homo sapiens
  misc_RNA (1)...(19): siRNA sense strand
gaagacacuuauuuacacu

SEQ ID NO: 676673 - RNA, 19 nt, Homo sapiens
  misc_RNA (1)...(19): siRNA sense strand
cgauaacucuccugaaguc

SEQ ID NO: 676674 - RNA, 19 nt, Homo sapiens
  misc_RNA (1)...(19): siRNA sense strand
cuauugaccuacaggcuaa

SEQ ID NO: 676675 - RNA, 19 nt, Homo sapiens
  misc_RNA (1)...(19): siRNA sense strand
gaacgugugggccuaugaa

SEQ ID NO: 676676 - RNA, 19 nt, Homo sapiens
  misc_RNA (1)...(19): siRNA sense strand
acaaugauccagaguuuga

SEQ ID NO: 676677 - RNA, 19 nt, Homo sapiens
  misc_RNA (1)...(19): siRNA sense strand
uguccaccuucaagaauua

SEQ ID NO: 676678 - RNA, 19 nt, Homo sapiens
  misc_RNA (1)...(19): siRNA sense strand
gauccagaguuugauaaau

SEQ ID NO: 676679 - RNA, 19 nt, Homo sapiens
  misc_RNA (1)...(19): siRNA sense strand
ucaauuaagcccaauggaa

SEQ ID NO: 676680 - RNA, 19 nt, Homo sapiens
  misc_RNA (1)...(19): siRNA sense strand
acaaaugguaagcagauua

SEQ ID NO: 676681 - RNA, 19 nt, Homo sapiens
  misc_RNA (1)...(19): siRNA sense strand
ggaacuuaauuugcugcua

SEQ ID NO: 676682 - RNA, 19 nt, Homo sapiens
  misc_RNA (1)...(19): siRNA sense strand
ccaccaggcugccacaucu

SEQ ID NO: 676683 - RNA, 19 nt, Homo sapiens
  misc_RNA (1)...(19): siRNA sense strand
ucaauggagagguaacaua

SEQ ID NO: 676684 - RNA, 19 nt, Homo sapiens
  misc_RNA (1)...(19): siRNA sense strand
aaacuccggaacuuaauuu

SEQ ID NO: 676685 - RNA, 19 nt, Homo sapiens
  misc_RNA (1)...(19): siRNA sense strand
ucacgcugcugcuguauac

SEQ ID NO: 676686 - RNA, 19 nt, Homo sapiens
  misc_RNA (1)...(19): siRNA sense strand
gcuguacacgggcgagaua

SEQ ID NO: 676687 - RNA, 19 nt, Homo sapiens
  misc_RNA (1)...(19): siRNA sense strand
ugaccuacaggcuaaguaa

SEQ ID NO: 676688 - RNA, 19 nt, Homo sapiens
  misc_RNA (1)...(19): siRNA sense strand
gacaggagccagggucaaa

SEQ ID NO: 676689 - RNA, 19 nt, Homo sapiens
  misc_RNA (1)...(19): siRNA sense strand
gcaguuaacaagcuaguac

SEQ ID NO: 676690 - RNA, 19 nt, Homo sapiens
  misc_RNA (1)...(19): siRNA sense strand
gaaggacauuaacgacaac

SEQ ID NO: 676691 - RNA, 19 nt, Homo sapiens
  misc_RNA (1)...(19): siRNA sense strand
ggacaccaacgauaacucu

SEQ ID NO: 676692 - RNA, 19 nt, Homo sapiens
  misc_RNA (1)...(19): siRNA sense strand
gagguaaaucugcagaaug

SEQ ID NO: 676693 - RNA, 19 nt, Homo sapiens
  misc_RNA (1)...(19): siRNA sense strand
gaaaaugcugcuaaagaaa

SEQ ID NO: 676694 - RNA, 19 nt, Homo sapiens
  misc_RNA (1)...(19): siRNA sense strand
ccaccgacuucuaguacug

SEQ ID NO: 676695 - RNA, 19 nt, Homo sapiens
  misc_RNA (1)...(19): siRNA sense strand
ugccacaucuucacagugu

SEQ ID NO: 676696 - RNA, 19 nt, Homo sapiens
  misc_RNA (1)...(19): siRNA sense strand
aacgauaacucuccugaag

SEQ ID NO: 676697 - RNA, 19 nt, Homo sapiens
  misc_RNA (1)...(19): siRNA sense strand
agagggagcuucugaugcu

SEQ ID NO: 676698 - RNA, 19 nt, Homo sapiens
  misc_RNA (1)...(19): siRNA sense strand
gcacggucauugcccugau

SEQ ID NO: 676699 - RNA, 19 nt, Homo sapiens
  misc_RNA (1)...(19): siRNA sense strand
gucaauggaacuuuagauu

SEQ ID NO: 676700 - RNA, 19 nt, Homo sapiens
  misc_RNA (1)...(19): siRNA sense strand
agguaaaucugcagaaugg

SEQ ID NO: 676701 - RNA, 19 nt, Homo sapiens
  misc_RNA (1)...(19): siRNA sense strand
aggagucaauggagaggua

SEQ ID NO: 676702 - RNA, 19 nt, Homo sapiens
  misc_RNA (1)...(19): siRNA sense strand
agacacuuauuuacacuag

SEQ ID NO: 676703 - RNA, 19 nt, Homo sapiens
  misc_RNA (1)...(19): siRNA sense strand
gagaaaacuccggaacuua

SEQ ID NO: 676704 - RNA, 19 nt, Homo sapiens
  misc_RNA (1)...(19): siRNA sense strand
guguccaccuucaagaauu

SEQ ID NO: 676705 - RNA, 19 nt, Homo sapiens
  misc_RNA (1)...(19): siRNA sense strand
gcccaauggaagacacuua

SEQ ID NO: 676706 - RNA, 19 nt, Homo sapiens
  misc_RNA (1)...(19): siRNA sense strand
uggcaccguucggcuguua

SEQ ID NO: 676707 - RNA, 19 nt, Homo sapiens
  misc_RNA (1)...(19): siRNA sense strand
aggcugcgcugguggaugu

SEQ ID NO: 676708 - RNA, 19 nt, Homo sapiens
  misc_RNA (1)...(19): siRNA sense strand
gaaggugcgcgcaguggau

SEQ ID NO: 676709 - RNA, 19 nt, Homo sapiens
  misc_RNA (1)...(19): siRNA sense strand
aaguacaggcuacagauaa

SEQ ID NO: 676710 - RNA, 19 nt, Homo sapiens
  misc_RNA (1)...(19): siRNA sense strand
gagaagugagggucaaugg

SEQ ID NO: 676711 - RNA, 19 nt, Homo sapiens
  misc_RNA (1)...(19): siRNA sense strand
ggacucgcguuuuccacua

SEQ ID NO: 676712 - RNA, 19 nt, Homo sapiens
  misc_RNA (1)...(19): siRNA sense strand
gagaacgugugggccuaug

SEQ ID NO: 676713 - RNA, 19 nt, Homo sapiens
  misc_RNA (1)...(19): siRNA sense strand
augcugacauugaagagaa

SEQ ID NO: 676714 - RNA, 19 nt, Homo sapiens
  misc_RNA (1)...(19): siRNA sense strand
cucuaggucugaauaaaga

SEQ ID NO: 676715 - RNA, 19 nt, Homo sapiens
  misc_RNA (1)...(19): siRNA sense strand
ucaagaauuacuacucguu

SEQ ID NO: 676716 - RNA, 19 nt, Homo sapiens
  misc_RNA (1)...(19): siRNA sense strand
caauggagagguaacauac

SEQ ID NO: 676717 - RNA, 19 nt, Homo sapiens
  misc_RNA (1)...(19): siRNA sense strand
auccagaguuugauaaauc

SEQ ID NO: 676718 - RNA, 19 nt, Homo sapiens
  misc_RNA (1)...(19): siRNA sense strand
caacgcguggcuuucauau

SEQ ID NO: 676719 - RNA, 19 nt, Homo sapiens
  misc_RNA (1)...(19): siRNA sense strand
caacgauaacucuccugaa

SEQ ID NO: 676720 - RNA, 19 nt, Homo sapiens
  misc_RNA (1)...(19): siRNA sense strand
gacaggccgcugcagguuu

SEQ ID NO: 676721 - RNA, 19 nt, Homo sapiens
  misc_RNA (1)...(19): siRNA sense strand
ccaauggcaggucacugua

SEQ ID NO: 676722 - RNA, 19 nt, Homo sapiens
  misc_RNA (1)...(19): siRNA sense strand
uggaagacacuuauuuaca

SEQ ID NO: 676723 - RNA, 19 nt, Homo sapiens
  misc_RNA (1)...(19): siRNA sense strand
ccaauggaagacacuuauu

SEQ ID NO: 676724 - RNA, 19 nt, Homo sapiens
  misc_RNA (1)...(19): siRNA sense strand
guaagcagauuaaaagacu

SEQ ID NO: 676725 - RNA, 19 nt, Homo sapiens
  misc_RNA (1)...(19): siRNA sense strand
gggaggcgcaguuaacaag

SEQ ID NO: 676726 - RNA, 19 nt, Homo sapiens
  misc_RNA (1)...(19): siRNA sense strand
cuucugaugcugacauuga

SEQ ID NO: 676727 - RNA, 19 nt, Homo sapiens
  misc_RNA (1)...(19): siRNA sense strand
agacgaaggagucaaugga

SEQ ID NO: 676728 - RNA, 19 nt, Homo sapiens
  misc_RNA (1)...(19): siRNA sense strand
gaccuacaggcuaaguaaa

SEQ ID NO: 676729 - RNA, 19 nt, Homo sapiens
  misc_RNA (1)...(19): siRNA sense strand
ugguggaugucaacgugua

SEQ ID NO: 676730 - RNA, 19 nt, Homo sapiens
  misc_RNA (1)...(19): siRNA sense strand
cuacaacgcguggcuuuca

SEQ ID NO: 676731 - RNA, 19 nt, Homo sapiens
  misc_RNA (1)...(19): siRNA sense strand
agaaaacuccggaacuuaa

SEQ ID NO: 676732 - RNA, 19 nt, Homo sapiens
  misc_RNA (1)...(19): siRNA sense strand
gcauuuuguuugugaauuc

SEQ ID NO: 676733 - RNA, 19 nt, Homo sapiens
  misc_RNA (1)...(19): siRNA sense strand
gcgccaccgacuucuagua

SEQ ID NO: 676734 - RNA, 19 nt, Homo sapiens
  misc_RNA (1)...(19): siRNA sense strand
ggagaagugagggucaaug

SEQ ID NO: 676735 - RNA, 19 nt, Homo sapiens
  misc_RNA (1)...(19): siRNA sense strand
acucuugugcucaaacuaa

SEQ ID NO: 676736 - RNA, 19 nt, Homo sapiens
  misc_RNA (1)...(19): siRNA sense strand
gacuacagcucuggcuucu

SEQ ID NO: 676737 - RNA, 19 nt, Homo sapiens
  misc_RNA (1)...(19): siRNA sense strand
ugaaguacaggcuacagau

SEQ ID NO: 676738 - RNA, 19 nt, Homo sapiens
  misc_RNA (1)...(19): siRNA sense strand
uagauucaccaacaaaugg

SEQ ID NO: 676739 - RNA, 19 nt, Homo sapiens
  misc_RNA (1)...(19): siRNA sense strand
caacguguaccugaucauc

SEQ ID NO: 676740 - RNA, 19 nt, Homo sapiens
  misc_RNA (1)...(19): siRNA sense strand
cuagagggagcuucugaug

SEQ ID NO: 676741 - RNA, 19 nt, Homo sapiens
  misc_RNA (1)...(19): siRNA sense strand
ucaaaauaauggagaagug

SEQ ID NO: 676742 - RNA, 19 nt, Homo sapiens
  misc_RNA (1)...(19): siRNA sense strand
gacacuuauuuacacuaga

SEQ ID NO: 676743 - RNA, 19 nt, Homo sapiens
  misc_RNA (1)...(19): siRNA sense strand
acaacgcguggcuuucaua

SEQ ID NO: 676744 - RNA, 19 nt, Homo sapiens
  misc_RNA (1)...(19): siRNA sense strand
cauacuccuuaaugucaau

SEQ ID NO: 676745 - RNA, 19 nt, Homo sapiens
  misc_RNA (1)...(19): siRNA sense strand
uacucacgcugcugcugua

SEQ ID NO: 676746 - RNA, 19 nt, Homo sapiens
  misc_RNA (1)...(19): siRNA sense strand
gcugccacaucuucacagu

SEQ ID NO: 676747 - RNA, 19 nt, Homo sapiens
  misc_RNA (1)...(19): siRNA sense strand
ccaccuucaagaauuacua

SEQ ID NO: 676748 - RNA, 19 nt, Homo sapiens
  misc_RNA (1)...(19): siRNA sense strand
ggucaauggaacuuuagau

SEQ ID NO: 676749 - RNA, 19 nt, Homo sapiens
  misc_RNA (1)...(19): siRNA sense strand
gaaaugggauucugugaca

SEQ ID NO: 676750 - RNA, 19 nt, Homo sapiens
  misc_RNA (1)...(19): siRNA sense strand
ggaguggauuuaccaguua

SEQ ID NO: 676751 - RNA, 19 nt, Homo sapiens
  misc_RNA (1)...(19): siRNA sense strand
gaacguauacuucccauug

SEQ ID NO: 676752 - RNA, 19 nt, Homo sapiens
  misc_RNA (1)...(19): siRNA sense strand
gaagagcuaugaccacuca

SEQ ID NO: 676753 - RNA, 19 nt, Homo sapiens
  misc_RNA (1)...(19): siRNA sense strand
agaaacagguugauaagaa

SEQ ID NO: 676754 - RNA, 19 nt, Homo sapiens
  misc_RNA (1)...(19): siRNA sense strand
gaagagguauccaucaaca

SEQ ID NO: 676755 - RNA, 19 nt, Homo sapiens
  misc_RNA (1)...(19): siRNA sense strand
gaagagagcccugauaaca

SEQ ID NO: 676756 - RNA, 19 nt, Homo sapiens
  misc_RNA (1)...(19): siRNA sense strand
gaggaaggcugagaacauu

SEQ ID NO: 676757 - RNA, 19 nt, Homo sapiens
  misc_RNA (1)...(19): siRNA sense strand
agaagccacuugcacauua

SEQ ID NO: 676758 - RNA, 19 nt, Homo sapiens
  misc_RNA (1)...(19): siRNA sense strand
acacaaagcucaaguucau

SEQ ID NO: 676759 - RNA, 19 nt, Homo sapiens
  misc_RNA (1)...(19): siRNA sense strand
auucaaagcuuucugguuu

SEQ ID NO: 676760 - RNA, 19 nt, Homo sapiens
  misc_RNA (1)...(19): siRNA sense strand
gaacaagugguuaacgaaa

SEQ ID NO: 676761 - RNA, 19 nt, Homo sapiens
  misc_RNA (1)...(19): siRNA sense strand
gagaacaagugguuaacga

SEQ ID NO: 676762 - RNA, 19 nt, Homo sapiens
  misc_RNA (1)...(19): siRNA sense strand
aggaugagcucaaagauga

SEQ ID NO: 676763 - RNA, 19 nt, Homo sapiens
  misc_RNA (1)...(19): siRNA sense strand
ggacccaguuuguguguga

SEQ ID NO: 676764 - RNA, 19 nt, Homo sapiens
  misc_RNA (1)...(19): siRNA sense strand
gaugagaauuugccugaug

SEQ ID NO: 676765 - RNA, 19 nt, Homo sapiens
  misc_RNA (1)...(19): siRNA sense strand
ucacaaaggccagcaauuu

SEQ ID NO: 676766 - RNA, 19 nt, Homo sapiens
  misc_RNA (1)...(19): siRNA sense strand
caagcuaccuggagacguu

SEQ ID NO: 676767 - RNA, 19 nt, Homo sapiens
  misc_RNA (1)...(19): siRNA sense strand
guaaacagcagacagaaga

SEQ ID NO: 676768 - RNA, 19 nt, Homo sapiens
  misc_RNA (1)...(19): siRNA sense strand
agagagcccugauaacauu

SEQ ID NO: 676769 - RNA, 19 nt, Homo sapiens
  misc_RNA (1)...(19): siRNA sense strand
ggauuuaccaguuaccaua

SEQ ID NO: 676770 - RNA, 19 nt, Homo sapiens
  misc_RNA (1)...(19): siRNA sense strand
gaaaugagaaggaggagau

SEQ ID NO: 676771 - RNA, 19 nt, Homo sapiens
  misc_RNA (1)...(19): siRNA sense strand
uuaaagcacuuccugauuc

SEQ ID NO: 676772 - RNA, 19 nt, Homo sapiens
  misc_RNA (1)...(19): siRNA sense strand
ccacaugacaguccuuuaa

SEQ ID NO: 676773 - RNA, 19 nt, Homo sapiens
  misc_RNA (1)...(19): siRNA sense strand
gcagauagaggaagagaau

SEQ ID NO: 676774 - RNA, 19 nt, Homo sapiens
  misc_RNA (1)...(19): siRNA sense strand
ggaggaggaugagcucaaa

SEQ ID NO: 676775 - RNA, 19 nt, Homo sapiens
  misc_RNA (1)...(19): siRNA sense strand
caguucagcuggcauauug

SEQ ID NO: 676776 - RNA, 19 nt, Homo sapiens
  misc_RNA (1)...(19): siRNA sense strand
cagaaguccuugcagauga

SEQ ID NO: 676777 - RNA, 19 nt, Homo sapiens
  misc_RNA (1)...(19): siRNA sense strand
gggcugauaucgaagcuau

SEQ ID NO: 676778 - RNA, 19 nt, Homo sapiens
  misc_RNA (1)...(19): siRNA sense strand
gaagaaacaacguaaagca

SEQ ID NO: 676779 - RNA, 19 nt, Homo sapiens
  misc_RNA (1)...(19): siRNA sense strand
ccauaucgcugaggaagaa

SEQ ID NO: 676780 - RNA, 19 nt, Homo sapiens
  misc_RNA (1)...(19): siRNA sense strand
caucaacagucaaggagaa

SEQ ID NO: 676781 - RNA, 19 nt, Homo sapiens
  misc_RNA (1)...(19): siRNA sense strand
guacagcucugcgcucuca

SEQ ID NO: 676782 - RNA, 19 nt, Homo sapiens
  misc_RNA (1)...(19): siRNA sense strand
acaguaauccgaucccuua

SEQ ID NO: 676783 - RNA, 19 nt, Homo sapiens
  misc_RNA (1)...(19): siRNA sense strand
gaaacagguugauaagaac

SEQ ID NO: 676784 - RNA, 19 nt, Homo sapiens
  misc_RNA (1)...(19): siRNA sense strand
uugagaagcuugaacagaa

SEQ ID NO: 676785 - RNA, 19 nt, Homo sapiens
  misc_RNA (1)...(19): siRNA sense strand
gccaauaauuucugaagau

SEQ ID NO: 676786 - RNA, 19 nt, Homo sapiens
  misc_RNA (1)...(19): siRNA sense strand
caaagucaguccucugcuu

SEQ ID NO: 676787 - RNA, 19 nt, Homo sapiens
  misc_RNA (1)...(19): siRNA sense strand
acaugacaguccuuuaaua

SEQ ID NO: 676788 - RNA, 19 nt, Homo sapiens
  misc_RNA (1)...(19): siRNA sense strand
ucaaggagaauaugaagaa

SEQ ID NO: 676789 - RNA, 19 nt, Homo sapiens
  misc_RNA (1)...(19): siRNA sense strand
ccuuugagcuguuggauau

SEQ ID NO: 676790 - RNA, 19 nt, Homo sapiens
  misc_RNA (1)...(19): siRNA sense strand
ugaagaagcgcuuaagaug

SEQ ID NO: 676791 - RNA, 19 nt, Homo sapiens
  misc_RNA (1)...(19): siRNA sense strand
gaagcuugaacagaaauua

SEQ ID NO: 676792 - RNA, 19 nt, Homo sapiens
  misc_RNA (1)...(19): siRNA sense strand
gcagaggucaaggaacuua

SEQ ID NO: 676793 - RNA, 19 nt, Homo sapiens
  misc_RNA (1)...(19): siRNA sense strand
gacuuuggcuuccacagaa

SEQ ID NO: 676794 - RNA, 19 nt, Homo sapiens
  misc_RNA (1)...(19): siRNA sense strand
ugagaagcuugaacagaaa

SEQ ID NO: 676795 - RNA, 19 nt, Homo sapiens
  misc_RNA (1)...(19): siRNA sense strand
gagcacagcauaagugaca

SEQ ID NO: 676796 - RNA, 19 nt, Homo sapiens
  misc_RNA (1)...(19): siRNA sense strand
aggaggagauuauccauau

SEQ ID NO: 676797 - RNA, 19 nt, Homo sapiens
  misc_RNA (1)...(19): siRNA sense strand
gagaagaaacaacguaaag

SEQ ID NO: 676798 - RNA, 19 nt, Homo sapiens
  misc_RNA (1)...(19): siRNA sense strand
gcagacagaagagcuauga

SEQ ID NO: 676799 - RNA, 19 nt, Homo sapiens
  misc_RNA (1)...(19): siRNA sense strand
ugacaguccuuuaauagag

SEQ ID NO: 676800 - RNA, 19 nt, Homo sapiens
  misc_RNA (1)...(19): siRNA sense strand
ccucgggucuggugcagua

SEQ ID NO: 676801 - RNA, 19 nt, Homo sapiens
  misc_RNA (1)...(19): siRNA sense strand
caucaggacuuguaaacag

SEQ ID NO: 676802 - RNA, 19 nt, Homo sapiens
  misc_RNA (1)...(19): siRNA sense strand
ugcaacaacugccaaagaa

SEQ ID NO: 676803 - RNA, 19 nt, Homo sapiens
  misc_RNA (1)...(19): siRNA sense strand
aaagacagcuuggugaagu

SEQ ID NO: 676804 - RNA, 19 nt, Homo sapiens
  misc_RNA (1)...(19): siRNA sense strand
gugcagcauuuguggauga

SEQ ID NO: 676805 - RNA, 19 nt, Homo sapiens
  misc_RNA (1)...(19): siRNA sense strand
gacaguccuuuaauagaga

SEQ ID NO: 676806 - RNA, 19 nt, Homo sapiens
  misc_RNA (1)...(19): siRNA sense strand
ccgaagagagcccugauaa

SEQ ID NO: 676807 - RNA, 19 nt, Homo sapiens
  misc_RNA (1)...(19): siRNA sense strand
caacagucaaggagaauau

SEQ ID NO: 676808 - RNA, 19 nt, Homo sapiens
  misc_RNA (1)...(19): siRNA sense strand
guacagccaacgcuauuga

SEQ ID NO: 676809 - RNA, 19 nt, Homo sapiens
  misc_RNA (1)...(19): siRNA sense strand
guugcgagcugagaagaaa

SEQ ID NO: 676810 - RNA, 19 nt, Homo sapiens
  misc_RNA (1)...(19): siRNA sense strand
cauauggccaugacacuaa

SEQ ID NO: 676811 - RNA, 19 nt, Homo sapiens
  misc_RNA (1)...(19): siRNA sense strand
uaaacaacaacgacuggua

SEQ ID NO: 676812 - RNA, 19 nt, Homo sapiens
  misc_RNA (1)...(19): siRNA sense strand
ccacaggagcacagcauaa

SEQ ID NO: 676813 - RNA, 19 nt, Homo sapiens
  misc_RNA (1)...(19): siRNA sense strand
aaagcuuucugguuucuga

SEQ ID NO: 676814 - RNA, 19 nt, Homo sapiens
  misc_RNA (1)...(19): siRNA sense strand
cagcauuuguggaugagaa

SEQ ID NO: 676815 - RNA, 19 nt, Homo sapiens
  misc_RNA (1)...(19): siRNA sense strand
gcgcuuaagauggcaguua

SEQ ID NO: 676816 - RNA, 19 nt, Homo sapiens
  misc_RNA (1)...(19): siRNA sense strand
ccaauaauuucugaagauc

SEQ ID NO: 676817 - RNA, 19 nt, Homo sapiens
  misc_RNA (1)...(19): siRNA sense strand
ggaggaagcagaagaagac

SEQ ID NO: 676818 - RNA, 19 nt, Homo sapiens
  misc_RNA (1)...(19): siRNA sense strand
ucagagaacaagugguuaa

SEQ ID NO: 676819 - RNA, 19 nt, Homo sapiens
  misc_RNA (1)...(19): siRNA sense strand
gaagaagccacuugcacau

SEQ ID NO: 676820 - RNA, 19 nt, Homo sapiens
  misc_RNA (1)...(19): siRNA sense strand
uaacgaaacgguugagaag

SEQ ID NO: 676821 - RNA, 19 nt, Homo sapiens
  misc_RNA (1)...(19): siRNA sense strand
gaaggaccacuuggaaaug

SEQ ID NO: 676822 - RNA, 19 nt, Homo sapiens
  misc_RNA (1)...(19): siRNA sense strand
gcagucguuuccacuuguu

SEQ ID NO: 676823 - RNA, 19 nt, Homo sapiens
  misc_RNA (1)...(19): siRNA sense strand
uaaagcagaggucaaggaa

SEQ ID NO: 676824 - RNA, 19 nt, Homo sapiens
  misc_RNA (1)...(19): siRNA sense strand
gguguccgcuaccagugua

SEQ ID NO: 676825 - RNA, 19 nt, Homo sapiens
  misc_RNA (1)...(19): siRNA sense strand
gaauaugaagaagcgcuua

SEQ ID NO: 676826 - RNA, 19 nt, Homo sapiens
  misc_RNA (1)...(19): siRNA sense strand
gaggaugagcucaaagaug

SEQ ID NO: 676827 - RNA, 19 nt, Homo sapiens
  misc_RNA (1)...(19): siRNA sense strand
ggaggaggaugaggaggau

SEQ ID NO: 676828 - RNA, 19 nt, Homo sapiens
  misc_RNA (1)...(19): siRNA sense strand
uaaagaggaaggcugagaa

SEQ ID NO: 676829 - RNA, 19 nt, Homo sapiens
  misc_RNA (1)...(19): siRNA sense strand
acacagaccagccucaaga

SEQ ID NO: 676830 - RNA, 19 nt, Homo sapiens
  misc_RNA (1)...(19): siRNA sense strand
gugcagucguuuccacuug

SEQ ID NO: 676831 - RNA, 19 nt, Homo sapiens
  misc_RNA (1)...(19): siRNA sense strand
gcagaugcaaguccacgaa

SEQ ID NO: 676832 - RNA, 19 nt, Homo sapiens
  misc_RNA (1)...(19): siRNA sense strand
ugaaggaccacuuggaaau

SEQ ID NO: 676833 - RNA, 19 nt, Homo sapiens
  misc_RNA (1)...(19): siRNA sense strand
uaaagcacuuccugauucu

SEQ ID NO: 676834 - RNA, 19 nt, Homo sapiens
  misc_RNA (1)...(19): siRNA sense strand
caacuugggcugauaucga

SEQ ID NO: 676835 - RNA, 19 nt, Homo sapiens
  misc_RNA (1)...(19): siRNA sense strand
ggucuggugcaguaucaua

SEQ ID NO: 676836 - RNA, 19 nt, Homo sapiens
  misc_RNA (1)...(19): siRNA sense strand
cagcuuaaacuccauagga

SEQ ID NO: 676837 - RNA, 19 nt, Homo sapiens
  misc_RNA (1)...(19): siRNA sense strand
aagcagaggucaaggaacu

SEQ ID NO: 676838 - RNA, 19 nt, Homo sapiens
  misc_RNA (1)...(19): siRNA sense strand
guaaagcagaggucaagga

SEQ ID NO: 676839 - RNA, 19 nt, Homo sapiens
  misc_RNA (1)...(19): siRNA sense strand
gaagccacuugcacauuac

SEQ ID NO: 676840 - RNA, 19 nt, Homo sapiens
  misc_RNA (1)...(19): siRNA sense strand
cagacugguucacaagcua

SEQ ID NO: 676841 - RNA, 19 nt, Homo sapiens
  misc_RNA (1)...(19): siRNA sense strand
gcacagccaauaauuucug

SEQ ID NO: 676842 - RNA, 19 nt, Homo sapiens
  misc_RNA (1)...(19): siRNA sense strand
uaaagaagaaagacagcuu

SEQ ID NO: 676843 - RNA, 19 nt, Homo sapiens
  misc_RNA (1)...(19): siRNA sense strand
guaccuccguuaugccaau

SEQ ID NO: 676844 - RNA, 19 nt, Homo sapiens
  misc_RNA (1)...(19): siRNA sense strand
ccaggaaccaaguuuauca

SEQ ID NO: 676845 - RNA, 19 nt, Homo sapiens
  misc_RNA (1)...(19): siRNA sense strand
caucaugggagcagcauug

SEQ ID NO: 676846 - RNA, 19 nt, Homo sapiens
  misc_RNA (1)...(19): siRNA sense strand
gagcucuccuuguguacau

SEQ ID NO: 676847 - RNA, 19 nt, Homo sapiens
  misc_RNA (1)...(19): siRNA sense strand
ggaggagauuauccauauc

SEQ ID NO: 676848 - RNA, 19 nt, Homo sapiens
  misc_RNA (1)...(19): siRNA sense strand
aaagaaggauguuuugguu

SEQ ID NO: 676849 - RNA, 19 nt, Homo sapiens
  misc_RNA (1)...(19): siRNA sense strand
gaaaugggauucugugaca

SEQ ID NO: 676850 - RNA, 19 nt, Homo sapiens
  misc_RNA (1)...(19): siRNA sense strand
ggaguggauuuaccaguua

SEQ ID NO: 676851 - RNA, 19 nt, Homo sapiens
  misc_RNA (1)...(19): siRNA sense strand
gaacguauacuucccauug

SEQ ID NO: 676852 - RNA, 19 nt, Homo sapiens
  misc_RNA (1)...(19): siRNA sense strand
gaagagcuaugaccacuca

SEQ ID NO: 676853 - RNA, 19 nt, Homo sapiens
  misc_RNA (1)...(19): siRNA sense strand
agaaacagguugauaagaa

SEQ ID NO: 676854 - RNA, 19 nt, Homo sapiens
  misc_RNA (1)...(19): siRNA sense strand
gaagagguauccaucaaca

SEQ ID NO: 676855 - RNA, 19 nt, Homo sapiens
  misc_RNA (1)...(19): siRNA sense strand
gaagagagcccugauaaca

SEQ ID NO: 676856 - RNA, 19 nt, Homo sapiens
  misc_RNA (1)...(19): siRNA sense strand
gaggaaggcugagaacauu

SEQ ID NO: 676857 - RNA, 19 nt, Homo sapiens
  misc_RNA (1)...(19): siRNA sense strand
agaagccacuugcacauua

SEQ ID NO: 676858 - RNA, 19 nt, Homo sapiens
  misc_RNA (1)...(19): siRNA sense strand
acacaaagcucaaguucau

SEQ ID NO: 676859 - RNA, 19 nt, Homo sapiens
  misc_RNA (1)...(19): siRNA sense strand
auucaaagcuuucugguuu

SEQ ID NO: 676860 - RNA, 19 nt, Homo sapiens
  misc_RNA (1)...(19): siRNA sense strand
gaacaagugguuaacgaaa

SEQ ID NO: 676861 - RNA, 19 nt, Homo sapiens
  misc_RNA (1)...(19): siRNA sense strand
gagaacaagugguuaacga

SEQ ID NO: 676862 - RNA, 19 nt, Homo sapiens
  misc_RNA (1)...(19): siRNA sense strand
aggaugagcucaaagauga

SEQ ID NO: 676863 - RNA, 19 nt, Homo sapiens
  misc_RNA (1)...(19): siRNA sense strand
ggacccaguuuguguguga

SEQ ID NO: 676864 - RNA, 19 nt, Homo sapiens
  misc_RNA (1)...(19): siRNA sense strand
gaugagaauuugccugaug

SEQ ID NO: 676865 - RNA, 19 nt, Homo sapiens
  misc_RNA (1)...(19): siRNA sense strand
ucacaaaggccagcaauuu

SEQ ID NO: 676866 - RNA, 19 nt, Homo sapiens
  misc_RNA (1)...(19): siRNA sense strand
caagcuaccuggagacguu

SEQ ID NO: 676867 - RNA, 19 nt, Homo sapiens
  misc_RNA (1)...(19): siRNA sense strand
guaaacagcagacagaaga

SEQ ID NO: 676868 - RNA, 19 nt, Homo sapiens
  misc_RNA (1)...(19): siRNA sense strand
agagagcccugauaacauu

SEQ ID NO: 676869 - RNA, 19 nt, Homo sapiens
  misc_RNA (1)...(19): siRNA sense strand
ggauuuaccaguuaccaua

SEQ ID NO: 676870 - RNA, 19 nt, Homo sapiens
  misc_RNA (1)...(19): siRNA sense strand
gaaaugagaaggaggagau

SEQ ID NO: 676871 - RNA, 19 nt, Homo sapiens
  misc_RNA (1)...(19): siRNA sense strand
uuaaagcacuuccugauuc

SEQ ID NO: 676872 - RNA, 19 nt, Homo sapiens
  misc_RNA (1)...(19): siRNA sense strand
ccacaugacaguccuuuaa

SEQ ID NO: 676873 - RNA, 19 nt, Homo sapiens
  misc_RNA (1)...(19): siRNA sense strand
gcagauagaggaagagaau

SEQ ID NO: 676874 - RNA, 19 nt, Homo sapiens
  misc_RNA (1)...(19): siRNA sense strand
ggaggaggaugagcucaaa

SEQ ID NO: 676875 - RNA, 19 nt, Homo sapiens
  misc_RNA (1)...(19): siRNA sense strand
caguucagcuggcauauug

SEQ ID NO: 676876 - RNA, 19 nt, Homo sapiens
  misc_RNA (1)...(19): siRNA sense strand
cagaaguccuugcagauga

SEQ ID NO: 676877 - RNA, 19 nt, Homo sapiens
  misc_RNA (1)...(19): siRNA sense strand
gggcugauaucgaagcuau

SEQ ID NO: 676878 - RNA, 19 nt, Homo sapiens
  misc_RNA (1)...(19): siRNA sense strand
gaagaaacaacguaaagca

SEQ ID NO: 676879 - RNA, 19 nt, Homo sapiens
  misc_RNA (1)...(19): siRNA sense strand
ccauaucgcugaggaagaa

SEQ ID NO: 676880 - RNA, 19 nt, Homo sapiens
  misc_RNA (1)...(19): siRNA sense strand
caucaacagucaaggagaa

SEQ ID NO: 676881 - RNA, 19 nt, Homo sapiens
  misc_RNA (1)...(19): siRNA sense strand
guacagcucugcgcucuca

SEQ ID NO: 676882 - RNA, 19 nt, Homo sapiens
  misc_RNA (1)...(19): siRNA sense strand
acaguaauccgaucccuua

SEQ ID NO: 676883 - RNA, 19 nt, Homo sapiens
  misc_RNA (1)...(19): siRNA sense strand
gaaacagguugauaagaac

SEQ ID NO: 676884 - RNA, 19 nt, Homo sapiens
  misc_RNA (1)...(19): siRNA sense strand
uugagaagcuugaacagaa

SEQ ID NO: 676885 - RNA, 19 nt, Homo sapiens
  misc_RNA (1)...(19): siRNA sense strand
gccaauaauuucugaagau

SEQ ID NO: 676886 - RNA, 19 nt, Homo sapiens
  misc_RNA (1)...(19): siRNA sense strand
caaagucaguccucugcuu

SEQ ID NO: 676887 - RNA, 19 nt, Homo sapiens
  misc_RNA (1)...(19): siRNA sense strand
acaugacaguccuuuaaua

SEQ ID NO: 676888 - RNA, 19 nt, Homo sapiens
  misc_RNA (1)...(19): siRNA sense strand
ucaaggagaauaugaagaa

SEQ ID NO: 676889 - RNA, 19 nt, Homo sapiens
  misc_RNA (1)...(19): siRNA sense strand
ccuuugagcuguuggauau

SEQ ID NO: 676890 - RNA, 19 nt, Homo sapiens
  misc_RNA (1)...(19): siRNA sense strand
ugaagaagcgcuuaagaug

SEQ ID NO: 676891 - RNA, 19 nt, Homo sapiens
  misc_RNA (1)...(19): siRNA sense strand
gaagcuugaacagaaauua

SEQ ID NO: 676892 - RNA, 19 nt, Homo sapiens
  misc_RNA (1)...(19): siRNA sense strand
gcagaggucaaggaacuua

SEQ ID NO: 676893 - RNA, 19 nt, Homo sapiens
  misc_RNA (1)...(19): siRNA sense strand
gacuuuggcuuccacagaa

SEQ ID NO: 676894 - RNA, 19 nt, Homo sapiens
  misc_RNA (1)...(19): siRNA sense strand
ugagaagcuugaacagaaa

SEQ ID NO: 676895 - RNA, 19 nt, Homo sapiens
  misc_RNA (1)...(19): siRNA sense strand
gagcacagcauaagugaca

SEQ ID NO: 676896 - RNA, 19 nt, Homo sapiens
  misc_RNA (1)...(19): siRNA sense strand
aggaggagauuauccauau

SEQ ID NO: 676897 - RNA, 19 nt, Homo sapiens
  misc_RNA (1)...(19): siRNA sense strand
gagaagaaacaacguaaag

SEQ ID NO: 676898 - RNA, 19 nt, Homo sapiens
  misc_RNA (1)...(19): siRNA sense strand
gcagacagaagagcuauga

SEQ ID NO: 676899 - RNA, 19 nt, Homo sapiens
  misc_RNA (1)...(19): siRNA sense strand
ugacaguccuuuaauagag

SEQ ID NO: 676900 - RNA, 19 nt, Homo sapiens
  misc_RNA (1)...(19): siRNA sense strand
ccucgggucuggugcagua

SEQ ID NO: 676901 - RNA, 19 nt, Homo sapiens
  misc_RNA (1)...(19): siRNA sense strand
caucaggacuuguaaacag

SEQ ID NO: 676902 - RNA, 19 nt, Homo sapiens
  misc_RNA (1)...(19): siRNA sense strand
ugcaacaacugccaaagaa

SEQ ID NO: 676903 - RNA, 19 nt, Homo sapiens
  misc_RNA (1)...(19): siRNA sense strand
aaagacagcuuggugaagu

SEQ ID NO: 676904 - RNA, 19 nt, Homo sapiens
  misc_RNA (1)...(19): siRNA sense strand
gugcagcauuuguggauga

SEQ ID NO: 676905 - RNA, 19 nt, Homo sapiens
  misc_RNA (1)...(19): siRNA sense strand
gacaguccuuuaauagaga

SEQ ID NO: 676906 - RNA, 19 nt, Homo sapiens
  misc_RNA (1)...(19): siRNA sense strand
ccgaagagagcccugauaa

SEQ ID NO: 676907 - RNA, 19 nt, Homo sapiens
  misc_RNA (1)...(19): siRNA sense strand
caacagucaaggagaauau

SEQ ID NO: 676908 - RNA, 19 nt, Homo sapiens
  misc_RNA (1)...(19): siRNA sense strand
guacagccaacgcuauuga

SEQ ID NO: 676909 - RNA, 19 nt, Homo sapiens
  misc_RNA (1)...(19): siRNA sense strand
guugcgagcugagaagaaa

SEQ ID NO: 676910 - RNA, 19 nt, Homo sapiens
  misc_RNA (1)...(19): siRNA sense strand
cauauggccaugacacuaa

SEQ ID NO: 676911 - RNA, 19 nt, Homo sapiens
  misc_RNA (1)...(19): siRNA sense strand
uaaacaacaacgacuggua

SEQ ID NO: 676912 - RNA, 19 nt, Homo sapiens
  misc_RNA (1)...(19): siRNA sense strand
ccacaggagcacagcauaa

SEQ ID NO: 676913 - RNA, 19 nt, Homo sapiens
  misc_RNA (1)...(19): siRNA sense strand
aaagcuuucugguuucuga

SEQ ID NO: 676914 - RNA, 19 nt, Homo sapiens
  misc_RNA (1)...(19): siRNA sense strand
cagcauuuguggaugagaa

SEQ ID NO: 676915 - RNA, 19 nt, Homo sapiens
  misc_RNA (1)...(19): siRNA sense strand
gcgcuuaagauggcaguua

SEQ ID NO: 676916 - RNA, 19 nt, Homo sapiens
  misc_RNA (1)...(19): siRNA sense strand
ccaauaauuucugaagauc

SEQ ID NO: 676917 - RNA, 19 nt, Homo sapiens
  misc_RNA (1)...(19): siRNA sense strand
ggaggaagcagaagaagac

SEQ ID NO: 676918 - RNA, 19 nt, Homo sapiens
  misc_RNA (1)...(19): siRNA sense strand
ucagagaacaagugguuaa

SEQ ID NO: 676919 - RNA, 19 nt, Homo sapiens
  misc_RNA (1)...(19): siRNA sense strand
gaagaagccacuugcacau

SEQ ID NO: 676920 - RNA, 19 nt, Homo sapiens
  misc_RNA (1)...(19): siRNA sense strand
uaacgaaacgguugagaag

SEQ ID NO: 676921 - RNA, 19 nt, Homo sapiens
  misc_RNA (1)...(19): siRNA sense strand
gaaggaccacuuggaaaug

SEQ ID NO: 676922 - RNA, 19 nt, Homo sapiens
  misc_RNA (1)...(19): siRNA sense strand
gcagucguuuccacuuguu

SEQ ID NO: 676923 - RNA, 19 nt, Homo sapiens
  misc_RNA (1)...(19): siRNA sense strand
uaaagcagaggucaaggaa

SEQ ID NO: 676924 - RNA, 19 nt, Homo sapiens
  misc_RNA (1)...(19): siRNA sense strand
gguguccgcuaccagugua

SEQ ID NO: 676925 - RNA, 19 nt, Homo sapiens
  misc_RNA (1)...(19): siRNA sense strand
gaauaugaagaagcgcuua

SEQ ID NO: 676926 - RNA, 19 nt, Homo sapiens
  misc_RNA (1)...(19): siRNA sense strand
gaggaugagcucaaagaug

SEQ ID NO: 676927 - RNA, 19 nt, Homo sapiens
  misc_RNA (1)...(19): siRNA sense strand
ggaggaggaugaggaggau

SEQ ID NO: 676928 - RNA, 19 nt, Homo sapiens
  misc_RNA (1)...(19): siRNA sense strand
uaaagaggaaggcugagaa

SEQ ID NO: 676929 - RNA, 19 nt, Homo sapiens
  misc_RNA (1)...(19): siRNA sense strand
acacagaccagccucaaga

SEQ ID NO: 676930 - RNA, 19 nt, Homo sapiens
  misc_RNA (1)...(19): siRNA sense strand
gugcagucguuuccacuug

SEQ ID NO: 676931 - RNA, 19 nt, Homo sapiens
  misc_RNA (1)...(19): siRNA sense strand
gcagaugcaaguccacgaa

SEQ ID NO: 676932 - RNA, 19 nt, Homo sapiens
  misc_RNA (1)...(19): siRNA sense strand
ugaaggaccacuuggaaau

SEQ ID NO: 676933 - RNA, 19 nt, Homo sapiens
  misc_RNA (1)...(19): siRNA sense strand
uaaagcacuuccugauucu

SEQ ID NO: 676934 - RNA, 19 nt, Homo sapiens
  misc_RNA (1)...(19): siRNA sense strand
caacuugggcugauaucga

SEQ ID NO: 676935 - RNA, 19 nt, Homo sapiens
  misc_RNA (1)...(19): siRNA sense strand
ggucuggugcaguaucaua

SEQ ID NO: 676936 - RNA, 19 nt, Homo sapiens
  misc_RNA (1)...(19): siRNA sense strand
cagcuuaaacuccauagga

SEQ ID NO: 676937 - RNA, 19 nt, Homo sapiens
  misc_RNA (1)...(19): siRNA sense strand
aagcagaggucaaggaacu

SEQ ID NO: 676938 - RNA, 19 nt, Homo sapiens
  misc_RNA (1)...(19): siRNA sense strand
guaaagcagaggucaagga

SEQ ID NO: 676939 - RNA, 19 nt, Homo sapiens
  misc_RNA (1)...(19): siRNA sense strand
gaagccacuugcacauuac

SEQ ID NO: 676940 - RNA, 19 nt, Homo sapiens
  misc_RNA (1)...(19): siRNA sense strand
cagacugguucacaagcua

SEQ ID NO: 676941 - RNA, 19 nt, Homo sapiens
  misc_RNA (1)...(19): siRNA sense strand
gcacagccaauaauuucug

SEQ ID NO: 676942 - RNA, 19 nt, Homo sapiens
  misc_RNA (1)...(19): siRNA sense strand
uaaagaagaaagacagcuu

SEQ ID NO: 676943 - RNA, 19 nt, Homo sapiens
  misc_RNA (1)...(19): siRNA sense strand
guaccuccguuaugccaau

SEQ ID NO: 676944 - RNA, 19 nt, Homo sapiens
  misc_RNA (1)...(19): siRNA sense strand
ccaggaaccaaguuuauca

SEQ ID NO: 676945 - RNA, 19 nt, Homo sapiens
  misc_RNA (1)...(19): siRNA sense strand
caucaugggagcagcauug

SEQ ID NO: 676946 - RNA, 19 nt, Homo sapiens
  misc_RNA (1)...(19): siRNA sense strand
gagcucuccuuguguacau

SEQ ID NO: 676947 - RNA, 19 nt, Homo sapiens
  misc_RNA (1)...(19): siRNA sense strand
ggaggagauuauccauauc

SEQ ID NO: 676948 - RNA, 19 nt, Homo sapiens
  misc_RNA (1)...(19): siRNA sense strand
aaagaaggauguuuugguu

SEQ ID NO: 676949 - RNA, 19 nt, Homo sapiens
  misc_RNA (1)...(19): siRNA sense strand
gaaaugggauucugugaca

SEQ ID NO: 676950 - RNA, 19 nt, Homo sapiens
  misc_RNA (1)...(19): siRNA sense strand
ggaguggauuuaccaguua

SEQ ID NO: 676951 - RNA, 19 nt, Homo sapiens
  misc_RNA (1)...(19): siRNA sense strand
gaacguauacuucccauug

SEQ ID NO: 676952 - RNA, 19 nt, Homo sapiens
  misc_RNA (1)...(19): siRNA sense strand
gaagagcuaugaccacuca

SEQ ID NO: 676953 - RNA, 19 nt, Homo sapiens
  misc_RNA (1)...(19): siRNA sense strand
agaaacagguugauaagaa

SEQ ID NO: 676954 - RNA, 19 nt, Homo sapiens
  misc_RNA (1)...(19): siRNA sense strand
gaagagguauccaucaaca

SEQ ID NO: 676955 - RNA, 19 nt, Homo sapiens
  misc_RNA (1)...(19): siRNA sense strand
gaagagagcccugauaaca

SEQ ID NO: 676956 - RNA, 19 nt, Homo sapiens
  misc_RNA (1)...(19): siRNA sense strand
gaggaaggcugagaacauu

SEQ ID NO: 676957 - RNA, 19 nt, Homo sapiens
  misc_RNA (1)...(19): siRNA sense strand
agaagccacuugcacauua

SEQ ID NO: 676958 - RNA, 19 nt, Homo sapiens
  misc_RNA (1)...(19): siRNA sense strand
acacaaagcucaaguucau

SEQ ID NO: 676959 - RNA, 19 nt, Homo sapiens
  misc_RNA (1)...(19): siRNA sense strand
auucaaagcuuucugguuu

SEQ ID NO: 676960 - RNA, 19 nt, Homo sapiens
  misc_RNA (1)...(19): siRNA sense strand
gaacaagugguuaacgaaa

SEQ ID NO: 676961 - RNA, 19 nt, Homo sapiens
  misc_RNA (1)...(19): siRNA sense strand
gagaacaagugguuaacga

SEQ ID NO: 676962 - RNA, 19 nt, Homo sapiens
  misc_RNA (1)...(19): siRNA sense strand
aggaugagcucaaagauga

SEQ ID NO: 676963 - RNA, 19 nt, Homo sapiens
  misc_RNA (1)...(19): siRNA sense strand
ggacccaguuuguguguga

SEQ ID NO: 676964 - RNA, 19 nt, Homo sapiens
  misc_RNA (1)...(19): siRNA sense strand
gaugagaauuugccugaug

SEQ ID NO: 676965 - RNA, 19 nt, Homo sapiens
  misc_RNA (1)...(19): siRNA sense strand
ucacaaaggccagcaauuu

SEQ ID NO: 676966 - RNA, 19 nt, Homo sapiens
  misc_RNA (1)...(19): siRNA sense strand
caagcuaccuggagacguu

SEQ ID NO: 676967 - RNA, 19 nt, Homo sapiens
  misc_RNA (1)...(19): siRNA sense strand
guaaacagcagacagaaga

SEQ ID NO: 676968 - RNA, 19 nt, Homo sapiens
  misc_RNA (1)...(19): siRNA sense strand
agagagcccugauaacauu

SEQ ID NO: 676969 - RNA, 19 nt, Homo sapiens
  misc_RNA (1)...(19): siRNA sense strand
ggauuuaccaguuaccaua

SEQ ID NO: 676970 - RNA, 19 nt, Homo sapiens
  misc_RNA (1)...(19): siRNA sense strand
gaaaugagaaggaggagau

SEQ ID NO: 676971 - RNA, 19 nt, Homo sapiens
  misc_RNA (1)...(19): siRNA sense strand
uuaaagcacuuccugauuc

SEQ ID NO: 676972 - RNA, 19 nt, Homo sapiens
  misc_RNA (1)...(19): siRNA sense strand
ccacaugacaguccuuuaa

SEQ ID NO: 676973 - RNA, 19 nt, Homo sapiens
  misc_RNA (1)...(19): siRNA sense strand
gcagauagaggaagagaau

SEQ ID NO: 676974 - RNA, 19 nt, Homo sapiens
  misc_RNA (1)...(19): siRNA sense strand
ggaggaggaugagcucaaa

SEQ ID NO: 676975 - RNA, 19 nt, Homo sapiens
  misc_RNA (1)...(19): siRNA sense strand
caguucagcuggcauauug

SEQ ID NO: 676976 - RNA, 19 nt, Homo sapiens
  misc_RNA (1)...(19): siRNA sense strand
cagaaguccuugcagauga

SEQ ID NO: 676977 - RNA, 19 nt, Homo sapiens
  misc_RNA (1)...(19): siRNA sense strand
gggcugauaucgaagcuau

SEQ ID NO: 676978 - RNA, 19 nt, Homo sapiens
  misc_RNA (1)...(19): siRNA sense strand
gaagaaacaacguaaagca

SEQ ID NO: 676979 - RNA, 19 nt, Homo sapiens
  misc_RNA (1)...(19): siRNA sense strand
ccauaucgcugaggaagaa

SEQ ID NO: 676980 - RNA, 19 nt, Homo sapiens
  misc_RNA (1)...(19): siRNA sense strand
caucaacagucaaggagaa

SEQ ID NO: 676981 - RNA, 19 nt, Homo sapiens
  misc_RNA (1)...(19): siRNA sense strand
guacagcucugcgcucuca

SEQ ID NO: 676982 - RNA, 19 nt, Homo sapiens
  misc_RNA (1)...(19): siRNA sense strand
acaguaauccgaucccuua

SEQ ID NO: 676983 - RNA, 19 nt, Homo sapiens
  misc_RNA (1)...(19): siRNA sense strand
gaaacagguugauaagaac

SEQ ID NO: 676984 - RNA, 19 nt, Homo sapiens
  misc_RNA (1)...(19): siRNA sense strand
uugagaagcuugaacagaa

SEQ ID NO: 676985 - RNA, 19 nt, Homo sapiens
  misc_RNA (1)...(19): siRNA sense strand
gccaauaauuucugaagau

SEQ ID NO: 676986 - RNA, 19 nt, Homo sapiens
  misc_RNA (1)...(19): siRNA sense strand
caaagucaguccucugcuu

SEQ ID NO: 676987 - RNA, 19 nt, Homo sapiens
  misc_RNA (1)...(19): siRNA sense strand
acaugacaguccuuuaaua

SEQ ID NO: 676988 - RNA, 19 nt, Homo sapiens
  misc_RNA (1)...(19): siRNA sense strand
ucaaggagaauaugaagaa

SEQ ID NO: 676989 - RNA, 19 nt, Homo sapiens
  misc_RNA (1)...(19): siRNA sense strand
ccuuugagcuguuggauau

SEQ ID NO: 676990 - RNA, 19 nt, Homo sapiens
  misc_RNA (1)...(19): siRNA sense strand
ugaagaagcgcuuaagaug

SEQ ID NO: 676991 - RNA, 19 nt, Homo sapiens
  misc_RNA (1)...(19): siRNA sense strand
gaagcuugaacagaaauua

SEQ ID NO: 676992 - RNA, 19 nt, Homo sapiens
  misc_RNA (1)...(19): siRNA sense strand
gcagaggucaaggaacuua

SEQ ID NO: 676993 - RNA, 19 nt, Homo sapiens
  misc_RNA (1)...(19): siRNA sense strand
gacuuuggcuuccacagaa

SEQ ID NO: 676994 - RNA, 19 nt, Homo sapiens
  misc_RNA (1)...(19): siRNA sense strand
ugagaagcuugaacagaaa

SEQ ID NO: 676995 - RNA, 19 nt, Homo sapiens
  misc_RNA (1)...(19): siRNA sense strand
gagcacagcauaagugaca

SEQ ID NO: 676996 - RNA, 19 nt, Homo sapiens
  misc_RNA (1)...(19): siRNA sense strand
aggaggagauuauccauau

SEQ ID NO: 676997 - RNA, 19 nt, Homo sapiens
  misc_RNA (1)...(19): siRNA sense strand
gagaagaaacaacguaaag

SEQ ID NO: 676998 - RNA, 19 nt, Homo sapiens
  misc_RNA (1)...(19): siRNA sense strand
gcagacagaagagcuauga

SEQ ID NO: 676999 - RNA, 19 nt, Homo sapiens
  misc_RNA (1)...(19): siRNA sense strand
ugacaguccuuuaauagag

SEQ ID NO: 677000 - RNA, 19 nt, Homo sapiens
  misc_RNA (1)...(19): siRNA sense strand
ccucgggucuggugcagua

SEQ ID NO: 677001 - RNA, 19 nt, Homo sapiens
  misc_RNA (1)...(19): siRNA sense strand
caucaggacuuguaaacag

SEQ ID NO: 677002 - RNA, 19 nt, Homo sapiens
  misc_RNA (1)...(19): siRNA sense strand
ugcaacaacugccaaagaa

SEQ ID NO: 677003 - RNA, 19 nt, Homo sapiens
  misc_RNA (1)...(19): siRNA sense strand
aaagacagcuuggugaagu

SEQ ID NO: 677004 - RNA, 19 nt, Homo sapiens
  misc_RNA (1)...(19): siRNA sense strand
gugcagcauuuguggauga

SEQ ID NO: 677005 - RNA, 19 nt, Homo sapiens
  misc_RNA (1)...(19): siRNA sense strand
gacaguccuuuaauagaga

SEQ ID NO: 677006 - RNA, 19 nt, Homo sapiens
  misc_RNA (1)...(19): siRNA sense strand
ccgaagagagcccugauaa

SEQ ID NO: 677007 - RNA, 19 nt, Homo sapiens
  misc_RNA (1)...(19): siRNA sense strand
caacagucaaggagaauau

SEQ ID NO: 677008 - RNA, 19 nt, Homo sapiens
  misc_RNA (1)...(19): siRNA sense strand
guacagccaacgcuauuga

SEQ ID NO: 677009 - RNA, 19 nt, Homo sapiens
  misc_RNA (1)...(19): siRNA sense strand
guugcgagcugagaagaaa

SEQ ID NO: 677010 - RNA, 19 nt, Homo sapiens
  misc_RNA (1)...(19): siRNA sense strand
cauauggccaugacacuaa

SEQ ID NO: 677011 - RNA, 19 nt, Homo sapiens
  misc_RNA (1)...(19): siRNA sense strand
uaaacaacaacgacuggua

SEQ ID NO: 677012 - RNA, 19 nt, Homo sapiens
  misc_RNA (1)...(19): siRNA sense strand
ccacaggagcacagcauaa

SEQ ID NO: 677013 - RNA, 19 nt, Homo sapiens
  misc_RNA (1)...(19): siRNA sense strand
aaagcuuucugguuucuga

SEQ ID NO: 677014 - RNA, 19 nt, Homo sapiens
  misc_RNA (1)...(19): siRNA sense strand
cagcauuuguggaugagaa

SEQ ID NO: 677015 - RNA, 19 nt, Homo sapiens
  misc_RNA (1)...(19): siRNA sense strand
gcgcuuaagauggcaguua

SEQ ID NO: 677016 - RNA, 19 nt, Homo sapiens
  misc_RNA (1)...(19): siRNA sense strand
ccaauaauuucugaagauc

SEQ ID NO: 677017 - RNA, 19 nt, Homo sapiens
  misc_RNA (1)...(19): siRNA sense strand
ggaggaagcagaagaagac

SEQ ID NO: 677018 - RNA, 19 nt, Homo sapiens
  misc_RNA (1)...(19): siRNA sense strand
ucagagaacaagugguuaa

SEQ ID NO: 677019 - RNA, 19 nt, Homo sapiens
  misc_RNA (1)...(19): siRNA sense strand
gaagaagccacuugcacau

SEQ ID NO: 677020 - RNA, 19 nt, Homo sapiens
  misc_RNA (1)...(19): siRNA sense strand
uaacgaaacgguugagaag

SEQ ID NO: 677021 - RNA, 19 nt, Homo sapiens
  misc_RNA (1)...(19): siRNA sense strand
gaaggaccacuuggaaaug

SEQ ID NO: 677022 - RNA, 19 nt, Homo sapiens
  misc_RNA (1)...(19): siRNA sense strand
gcagucguuuccacuuguu

SEQ ID NO: 677023 - RNA, 19 nt, Homo sapiens
  misc_RNA (1)...(19): siRNA sense strand
uaaagcagaggucaaggaa

SEQ ID NO: 677024 - RNA, 19 nt, Homo sapiens
  misc_RNA (1)...(19): siRNA sense strand
gguguccgcuaccagugua

SEQ ID NO: 677025 - RNA, 19 nt, Homo sapiens
  misc_RNA (1)...(19): siRNA sense strand
gaauaugaagaagcgcuua

SEQ ID NO: 677026 - RNA, 19 nt, Homo sapiens
  misc_RNA (1)...(19): siRNA sense strand
gaggaugagcucaaagaug

SEQ ID NO: 677027 - RNA, 19 nt, Homo sapiens
  misc_RNA (1)...(19): siRNA sense strand
ggaggaggaugaggaggau

SEQ ID NO: 677028 - RNA, 19 nt, Homo sapiens
  misc_RNA (1)...(19): siRNA sense strand
uaaagaggaaggcugagaa

SEQ ID NO: 677029 - RNA, 19 nt, Homo sapiens
  misc_RNA (1)...(19): siRNA sense strand
acacagaccagccucaaga

SEQ ID NO: 677030 - RNA, 19 nt, Homo sapiens
  misc_RNA (1)...(19): siRNA sense strand
gugcagucguuuccacuug

SEQ ID NO: 677031 - RNA, 19 nt, Homo sapiens
  misc_RNA (1)...(19): siRNA sense strand
gcagaugcaaguccacgaa

SEQ ID NO: 677032 - RNA, 19 nt, Homo sapiens
  misc_RNA (1)...(19): siRNA sense strand
ugaaggaccacuuggaaau

SEQ ID NO: 677033 - RNA, 19 nt, Homo sapiens
  misc_RNA (1)...(19): siRNA sense strand
uaaagcacuuccugauucu

SEQ ID NO: 677034 - RNA, 19 nt, Homo sapiens
  misc_RNA (1)...(19): siRNA sense strand
caacuugggcugauaucga

SEQ ID NO: 677035 - RNA, 19 nt, Homo sapiens
  misc_RNA (1)...(19): siRNA sense strand
ggucuggugcaguaucaua

SEQ ID NO: 677036 - RNA, 19 nt, Homo sapiens
  misc_RNA (1)...(19): siRNA sense strand
cagcuuaaacuccauagga

SEQ ID NO: 677037 - RNA, 19 nt, Homo sapiens
  misc_RNA (1)...(19): siRNA sense strand
aagcagaggucaaggaacu

SEQ ID NO: 677038 - RNA, 19 nt, Homo sapiens
  misc_RNA (1)...(19): siRNA sense strand
guaaagcagaggucaagga

SEQ ID NO: 677039 - RNA, 19 nt, Homo sapiens
  misc_RNA (1)...(19): siRNA sense strand
gaagccacuugcacauuac

SEQ ID NO: 677040 - RNA, 19 nt, Homo sapiens
  misc_RNA (1)...(19): siRNA sense strand
cagacugguucacaagcua

SEQ ID NO: 677041 - RNA, 19 nt, Homo sapiens
  misc_RNA (1)...(19): siRNA sense strand
gcacagccaauaauuucug

SEQ ID NO: 677042 - RNA, 19 nt, Homo sapiens
  misc_RNA (1)...(19): siRNA sense strand
uaaagaagaaagacagcuu

SEQ ID NO: 677043 - RNA, 19 nt, Homo sapiens
  misc_RNA (1)...(19): siRNA sense strand
guaccuccguuaugccaau

SEQ ID NO: 677044 - RNA, 19 nt, Homo sapiens
  misc_RNA (1)...(19): siRNA sense strand
ccaggaaccaaguuuauca

SEQ ID NO: 677045 - RNA, 19 nt, Homo sapiens
  misc_RNA (1)...(19): siRNA sense strand
caucaugggagcagcauug

SEQ ID NO: 677046 - RNA, 19 nt, Homo sapiens
  misc_RNA (1)...(19): siRNA sense strand
gagcucuccuuguguacau

SEQ ID NO: 677047 - RNA, 19 nt, Homo sapiens
  misc_RNA (1)...(19): siRNA sense strand
ggaggagauuauccauauc

SEQ ID NO: 677048 - RNA, 19 nt, Homo sapiens
  misc_RNA (1)...(19): siRNA sense strand
aaagaaggauguuuugguu

SEQ ID NO: 677049 - RNA, 19 nt, Homo sapiens
  misc_RNA (1)...(19): siRNA sense strand
gaacaucuccgcaacaaga

SEQ ID NO: 677050 - RNA, 19 nt, Homo sapiens
  misc_RNA (1)...(19): siRNA sense strand
ggaagaacgugaagaugau

SEQ ID NO: 677051 - RNA, 19 nt, Homo sapiens
  misc_RNA (1)...(19): siRNA sense strand
gaagaugauuguccuuauc

SEQ ID NO: 677052 - RNA, 19 nt, Homo sapiens
  misc_RNA (1)...(19): siRNA sense strand
ggagggaguuaagaauauu

SEQ ID NO: 677053 - RNA, 19 nt, Homo sapiens
  misc_RNA (1)...(19): siRNA sense strand
ccacuggugccuucucuua

SEQ ID NO: 677054 - RNA, 19 nt, Homo sapiens
  misc_RNA (1)...(19): siRNA sense strand
ugaagaugauuguccuuau

SEQ ID NO: 677055 - RNA, 19 nt, Homo sapiens
  misc_RNA (1)...(19): siRNA sense strand
ggaggaagccagugaaggu

SEQ ID NO: 677056 - RNA, 19 nt, Homo sapiens
  misc_RNA (1)...(19): siRNA sense strand
uggagggaguuaagaauau

SEQ ID NO: 677057 - RNA, 19 nt, Homo sapiens
  misc_RNA (1)...(19): siRNA sense strand
guccuuaucugcgugauug

SEQ ID NO: 677058 - RNA, 19 nt, Homo sapiens
  misc_RNA (1)...(19): siRNA sense strand
gaagguggaggaaaugauc

SEQ ID NO: 677059 - RNA, 19 nt, Homo sapiens
  misc_RNA (1)...(19): siRNA sense strand
gagggaguuaagaauauua

SEQ ID NO: 677060 - RNA, 19 nt, Homo sapiens
  misc_RNA (1)...(19): siRNA sense strand
guggagggaguuaagaaua

SEQ ID NO: 677061 - RNA, 19 nt, Homo sapiens
  misc_RNA (1)...(19): siRNA sense strand
uggaagaacgugaagauga

SEQ ID NO: 677062 - RNA, 19 nt, Homo sapiens
  misc_RNA (1)...(19): siRNA sense strand
cagugaagguggaggaaau

SEQ ID NO: 677063 - RNA, 19 nt, Homo sapiens
  misc_RNA (1)...(19): siRNA sense strand
gugaagaugauuguccuua

SEQ ID NO: 677064 - RNA, 19 nt, Homo sapiens
  misc_RNA (1)...(19): siRNA sense strand
agaauauuaugacccagaa

SEQ ID NO: 677065 - RNA, 19 nt, Homo sapiens
  misc_RNA (1)...(19): siRNA sense strand
gaagaacgugaagaugauu

SEQ ID NO: 677066 - RNA, 19 nt, Homo sapiens
  misc_RNA (1)...(19): siRNA sense strand
ugcggaaccugcaaaguga

SEQ ID NO: 677067 - RNA, 19 nt, Homo sapiens
  misc_RNA (1)...(19): siRNA sense strand
gcaacaagacagaggaucu

SEQ ID NO: 677068 - RNA, 19 nt, Homo sapiens
  misc_RNA (1)...(19): siRNA sense strand
gugcggaaccugcaaagug

SEQ ID NO: 677069 - RNA, 19 nt, Homo sapiens
  misc_RNA (1)...(19): siRNA sense strand
uggaacaucuccgcaacaa

SEQ ID NO: 677070 - RNA, 19 nt, Homo sapiens
  misc_RNA (1)...(19): siRNA sense strand
uaucaucauccucuucauu

SEQ ID NO: 677071 - RNA, 19 nt, Homo sapiens
  misc_RNA (1)...(19): siRNA sense strand
gguggaagaacgugaagau

SEQ ID NO: 677072 - RNA, 19 nt, Homo sapiens
  misc_RNA (1)...(19): siRNA sense strand
caucugagcacuucaagac

SEQ ID NO: 677073 - RNA, 19 nt, Homo sapiens
  misc_RNA (1)...(19): siRNA sense strand
ccucuucauugugcucuuu

SEQ ID NO: 677074 - RNA, 19 nt, Homo sapiens
  misc_RNA (1)...(19): siRNA sense strand
ucaagacgacaucgcagaa

SEQ ID NO: 677075 - RNA, 19 nt, Homo sapiens
  misc_RNA (1)...(19): siRNA sense strand
ccacaucugagcacuucaa

SEQ ID NO: 677076 - RNA, 19 nt, Homo sapiens
  misc_RNA (1)...(19): siRNA sense strand
aauauuaugacccagaaug

SEQ ID NO: 677077 - RNA, 19 nt, Homo sapiens
  misc_RNA (1)...(19): siRNA sense strand
ggggaaaacuuggaacauc

SEQ ID NO: 677078 - RNA, 19 nt, Homo sapiens
  misc_RNA (1)...(19): siRNA sense strand
gggaaaacuuggaacaucu

SEQ ID NO: 677079 - RNA, 19 nt, Homo sapiens
  misc_RNA (1)...(19): siRNA sense strand
gguggagggaguuaagaau

SEQ ID NO: 677080 - RNA, 19 nt, Homo sapiens
  misc_RNA (1)...(19): siRNA sense strand
caucauccucuucauugug

SEQ ID NO: 677081 - RNA, 19 nt, Homo sapiens
  misc_RNA (1)...(19): siRNA sense strand
ucaucauccucuucauugu

SEQ ID NO: 677082 - RNA, 19 nt, Homo sapiens
  misc_RNA (1)...(19): siRNA sense strand
gguaaucgauggcgguaaa

SEQ ID NO: 677083 - RNA, 19 nt, Homo sapiens
  misc_RNA (1)...(19): siRNA sense strand
caagagugauccaacuaaa

SEQ ID NO: 677084 - RNA, 19 nt, Homo sapiens
  misc_RNA (1)...(19): siRNA sense strand
agacacaggugaaauuaga

SEQ ID NO: 677085 - RNA, 19 nt, Homo sapiens
  misc_RNA (1)...(19): siRNA sense strand
caaugucccugaaguaaug

SEQ ID NO: 677086 - RNA, 19 nt, Homo sapiens
  misc_RNA (1)...(19): siRNA sense strand
aaagguaccuguuucugaa

SEQ ID NO: 677087 - RNA, 19 nt, Homo sapiens
  misc_RNA (1)...(19): siRNA sense strand
ugaaggacauuaacgacaa

SEQ ID NO: 677088 - RNA, 19 nt, Homo sapiens
  misc_RNA (1)...(19): siRNA sense strand
gagaauaaugccuaugaaa

SEQ ID NO: 677089 - RNA, 19 nt, Homo sapiens
  misc_RNA (1)...(19): siRNA sense strand
gaaauuuccuaugggauca

SEQ ID NO: 677090 - RNA, 19 nt, Homo sapiens
  misc_RNA (1)...(19): siRNA sense strand
ggacuuaauggagaaauuu

SEQ ID NO: 677091 - RNA, 19 nt, Homo sapiens
  misc_RNA (1)...(19): siRNA sense strand
aaaguaguguugucugaaa

SEQ ID NO: 677092 - RNA, 19 nt, Homo sapiens
  misc_RNA (1)...(19): siRNA sense strand
ggagguaaaucugcagaau

SEQ ID NO: 677093 - RNA, 19 nt, Homo sapiens
  misc_RNA (1)...(19): siRNA sense strand
ggaaguuauuggacagaga

SEQ ID NO: 677094 - RNA, 19 nt, Homo sapiens
  misc_RNA (1)...(19): siRNA sense strand
caggucaucugcucacuga

SEQ ID NO: 677095 - RNA, 19 nt, Homo sapiens
  misc_RNA (1)...(19): siRNA sense strand
ucaaauaaccguccuggau

SEQ ID NO: 677096 - RNA, 19 nt, Homo sapiens
  misc_RNA (1)...(19): siRNA sense strand
cagguuaacgccauugaua

SEQ ID NO: 677097 - RNA, 19 nt, Homo sapiens
  misc_RNA (1)...(19): siRNA sense strand
gauaagcccagcuauaaag

SEQ ID NO: 677098 - RNA, 19 nt, Homo sapiens
  misc_RNA (1)...(19): siRNA sense strand
agaacgcgcugguguccua

SEQ ID NO: 677099 - RNA, 19 nt, Homo sapiens
  misc_RNA (1)...(19): siRNA sense strand
cgaaggacuuaauggagaa

SEQ ID NO: 677100 - RNA, 19 nt, Homo sapiens
  misc_RNA (1)...(19): siRNA sense strand
ccagacacaggugaaauua

SEQ ID NO: 677101 - RNA, 19 nt, Homo sapiens
  misc_RNA (1)...(19): siRNA sense strand
gguuaacgccauugauaaa

SEQ ID NO: 677102 - RNA, 19 nt, Homo sapiens
  misc_RNA (1)...(19): siRNA sense strand
gcuauaaaguaguguuguc

SEQ ID NO: 677103 - RNA, 19 nt, Homo sapiens
  misc_RNA (1)...(19): siRNA sense strand
guuuaaauccucccaguga

SEQ ID NO: 677104 - RNA, 19 nt, Homo sapiens
  misc_RNA (1)...(19): siRNA sense strand
ugaagagaauaaugccuau

SEQ ID NO: 677105 - RNA, 19 nt, Homo sapiens
  misc_RNA (1)...(19): siRNA sense strand
auaaaguaguguugucuga

SEQ ID NO: 677106 - RNA, 19 nt, Homo sapiens
  misc_RNA (1)...(19): siRNA sense strand
ugacaaugguccggcguuu

SEQ ID NO: 677107 - RNA, 19 nt, Homo sapiens
  misc_RNA (1)...(19): siRNA sense strand
aagcggcucugguggauau

SEQ ID NO: 677108 - RNA, 19 nt, Homo sapiens
  misc_RNA (1)...(19): siRNA sense strand
ccaccuacaagaauuacua

SEQ ID NO: 677109 - RNA, 19 nt, Homo sapiens
  misc_RNA (1)...(19): siRNA sense strand
uugauaagcccagcuauaa

SEQ ID NO: 677110 - RNA, 19 nt, Homo sapiens
  misc_RNA (1)...(19): siRNA sense strand
gcuguacacuggcgagauc

SEQ ID NO: 677111 - RNA, 19 nt, Homo sapiens
  misc_RNA (1)...(19): siRNA sense strand
ucagguggguaccgucauu

SEQ ID NO: 677112 - RNA, 19 nt, Homo sapiens
  misc_RNA (1)...(19): siRNA sense strand
uaaacucucuuuugaccua

SEQ ID NO: 677113 - RNA, 19 nt, Homo sapiens
  misc_RNA (1)...(19): siRNA sense strand
gcccagcuauaaaguagug

SEQ ID NO: 677114 - RNA, 19 nt, Homo sapiens
  misc_RNA (1)...(19): siRNA sense strand
aaauaaccguccuggaugu

SEQ ID NO: 677115 - RNA, 19 nt, Homo sapiens
  misc_RNA (1)...(19): siRNA sense strand
cgccaaaacucaauuuauu

SEQ ID NO: 677116 - RNA, 19 nt, Homo sapiens
  misc_RNA (1)...(19): siRNA sense strand
uaaccguccuggaugugaa

SEQ ID NO: 677117 - RNA, 19 nt, Homo sapiens
  misc_RNA (1)...(19): siRNA sense strand
ucacugacaccucauguuc

SEQ ID NO: 677118 - RNA, 19 nt, Homo sapiens
  misc_RNA (1)...(19): siRNA sense strand
agagaauaaugccuaugaa

SEQ ID NO: 677119 - RNA, 19 nt, Homo sapiens
  misc_RNA (1)...(19): siRNA sense strand
ggauaucggcguaaacucu

SEQ ID NO: 677120 - RNA, 19 nt, Homo sapiens
  misc_RNA (1)...(19): siRNA sense strand
agagugauccaacuaaaug

SEQ ID NO: 677121 - RNA, 19 nt, Homo sapiens
  misc_RNA (1)...(19): siRNA sense strand
acaaugguccggcguuuga

SEQ ID NO: 677122 - RNA, 19 nt, Homo sapiens
  misc_RNA (1)...(19): siRNA sense strand
ggaugugaaugacaauggu

SEQ ID NO: 677123 - RNA, 19 nt, Homo sapiens
  misc_RNA (1)...(19): siRNA sense strand
cguuaagucuaaaugagaa

SEQ ID NO: 677124 - RNA, 19 nt, Homo sapiens
  misc_RNA (1)...(19): siRNA sense strand
gaaggacauuaacgacaac

SEQ ID NO: 677125 - RNA, 19 nt, Homo sapiens
  misc_RNA (1)...(19): siRNA sense strand
ucagcugucucgagaagau

SEQ ID NO: 677126 - RNA, 19 nt, Homo sapiens
  misc_RNA (1)...(19): siRNA sense strand
cggcucugguggauauuaa

SEQ ID NO: 677127 - RNA, 19 nt, Homo sapiens
  misc_RNA (1)...(19): siRNA sense strand
aagagaauaaugccuauga

SEQ ID NO: 677128 - RNA, 19 nt, Homo sapiens
  misc_RNA (1)...(19): siRNA sense strand
gagguaaaucugcagaaug

SEQ ID NO: 677129 - RNA, 19 nt, Homo sapiens
  misc_RNA (1)...(19): siRNA sense strand
guauauugccugaauuagu

SEQ ID NO: 677130 - RNA, 19 nt, Homo sapiens
  misc_RNA (1)...(19): siRNA sense strand
uagaauuuauggugaacug

SEQ ID NO: 677131 - RNA, 19 nt, Homo sapiens
  misc_RNA (1)...(19): siRNA sense strand
gagugagaaauguauguuu

SEQ ID NO: 677132 - RNA, 19 nt, Homo sapiens
  misc_RNA (1)...(19): siRNA sense strand
ggcguaaacucucuuuuga

SEQ ID NO: 677133 - RNA, 19 nt, Homo sapiens
  misc_RNA (1)...(19): siRNA sense strand
gcaugguccugguggaagu

SEQ ID NO: 677134 - RNA, 19 nt, Homo sapiens
  misc_RNA (1)...(19): siRNA sense strand
agguaaaucugcagaaugg

SEQ ID NO: 677135 - RNA, 19 nt, Homo sapiens
  misc_RNA (1)...(19): siRNA sense strand
acagagagcaaacgccaaa

SEQ ID NO: 677136 - RNA, 19 nt, Homo sapiens
  misc_RNA (1)...(19): siRNA sense strand
cgauggcgguaaaccagaa

SEQ ID NO: 677137 - RNA, 19 nt, Homo sapiens
  misc_RNA (1)...(19): siRNA sense strand
gauccagacgaaggacuua

SEQ ID NO: 677138 - RNA, 19 nt, Homo sapiens
  misc_RNA (1)...(19): siRNA sense strand
acaagagugauccaacuaa

SEQ ID NO: 677139 - RNA, 19 nt, Homo sapiens
  misc_RNA (1)...(19): siRNA sense strand
acacaagagugauccaacu

SEQ ID NO: 677140 - RNA, 19 nt, Homo sapiens
  misc_RNA (1)...(19): siRNA sense strand
ccagugagugagaaaugua

SEQ ID NO: 677141 - RNA, 19 nt, Homo sapiens
  misc_RNA (1)...(19): siRNA sense strand
uaacguguaccucaucauc

SEQ ID NO: 677142 - RNA, 19 nt, Homo sapiens
  misc_RNA (1)...(19): siRNA sense strand
gacgcugacuccggcuaua

SEQ ID NO: 677143 - RNA, 19 nt, Homo sapiens
  misc_RNA (1)...(19): siRNA sense strand
gcguuaagucuaaaugaga

SEQ ID NO: 677144 - RNA, 19 nt, Homo sapiens
  misc_RNA (1)...(19): siRNA sense strand
ugguggauauuaacgugua

SEQ ID NO: 677145 - RNA, 19 nt, Homo sapiens
  misc_RNA (1)...(19): siRNA sense strand
cgaagcggcucugguggau

SEQ ID NO: 677146 - RNA, 19 nt, Homo sapiens
  misc_RNA (1)...(19): siRNA sense strand
acgcuuggcuguccuacga

SEQ ID NO: 677147 - RNA, 19 nt, Homo sapiens
  misc_RNA (1)...(19): siRNA sense strand
gaacuggauuuugaagaga

SEQ ID NO: 677148 - RNA, 19 nt, Homo sapiens
  misc_RNA (1)...(19): siRNA sense strand
aagcccagcuauaaaguag

SEQ ID NO: 677149 - RNA, 19 nt, Homo sapiens
  misc_RNA (1)...(19): siRNA sense strand
uaagcccagcuauaaagua

SEQ ID NO: 677150 - RNA, 19 nt, Homo sapiens
  misc_RNA (1)...(19): siRNA sense strand
ugauaagcccagcuauaaa

SEQ ID NO: 677151 - RNA, 19 nt, Homo sapiens
  misc_RNA (1)...(19): siRNA sense strand
cuagagggcgcuucugaug

SEQ ID NO: 677152 - RNA, 19 nt, Homo sapiens
  misc_RNA (1)...(19): siRNA sense strand
uggaaguucuggacgugaa

SEQ ID NO: 677153 - RNA, 19 nt, Homo sapiens
  misc_RNA (1)...(19): siRNA sense strand
gccagugagugagaaaugu

SEQ ID NO: 677154 - RNA, 19 nt, Homo sapiens
  misc_RNA (1)...(19): siRNA sense strand
gaccuaugcguuaagucua

SEQ ID NO: 677155 - RNA, 19 nt, Homo sapiens
  misc_RNA (1)...(19): siRNA sense strand
agacgaaggacuuaaugga

SEQ ID NO: 677156 - RNA, 19 nt, Homo sapiens
  misc_RNA (1)...(19): siRNA sense strand
cacaagagugauccaacua

SEQ ID NO: 677157 - RNA, 19 nt, Homo sapiens
  misc_RNA (1)...(19): siRNA sense strand
gacaggccgcugcagguuu

SEQ ID NO: 677158 - RNA, 19 nt, Homo sapiens
  misc_RNA (1)...(19): siRNA sense strand
gagcaaacgccaaaacuca

SEQ ID NO: 677159 - RNA, 19 nt, Homo sapiens
  misc_RNA (1)...(19): siRNA sense strand
caccucauguucccuucaa

SEQ ID NO: 677160 - RNA, 19 nt, Homo sapiens
  misc_RNA (1)...(19): siRNA sense strand
uucaauaaauccagacaca

SEQ ID NO: 677161 - RNA, 19 nt, Homo sapiens
  misc_RNA (1)...(19): siRNA sense strand
uaaaguaguguugucugaa

SEQ ID NO: 677162 - RNA, 19 nt, Homo sapiens
  misc_RNA (1)...(19): siRNA sense strand
uggugucgcugguggagaa

SEQ ID NO: 677163 - RNA, 19 nt, Homo sapiens
  misc_RNA (1)...(19): siRNA sense strand
uuugauaagcccagcuaua

SEQ ID NO: 677164 - RNA, 19 nt, Homo sapiens
  misc_RNA (1)...(19): siRNA sense strand
uuuaaauccucccagugaa

SEQ ID NO: 677165 - RNA, 19 nt, Homo sapiens
  misc_RNA (1)...(19): siRNA sense strand
ggacgcugacuccggcuau

SEQ ID NO: 677166 - RNA, 19 nt, Homo sapiens
  misc_RNA (1)...(19): siRNA sense strand
gaagagaauaaugccuaug

SEQ ID NO: 677167 - RNA, 19 nt, Homo sapiens
  misc_RNA (1)...(19): siRNA sense strand
auggagaaauuuccuaugg

SEQ ID NO: 677168 - RNA, 19 nt, Homo sapiens
  misc_RNA (1)...(19): siRNA sense strand
ggcgguaaaccagaacuaa

SEQ ID NO: 677169 - RNA, 19 nt, Homo sapiens
  misc_RNA (1)...(19): siRNA sense strand
gcccaagacggaccucaug

SEQ ID NO: 677170 - RNA, 19 nt, Homo sapiens
  misc_RNA (1)...(19): siRNA sense strand
gcauuuuguuugugaauuc

SEQ ID NO: 677171 - RNA, 19 nt, Homo sapiens
  misc_RNA (1)...(19): siRNA sense strand
uaccgucauugcccugauu

SEQ ID NO: 677172 - RNA, 19 nt, Homo sapiens
  misc_RNA (1)...(19): siRNA sense strand
cgccauugauaaagggauu

SEQ ID NO: 677173 - RNA, 19 nt, Homo sapiens
  misc_RNA (1)...(19): siRNA sense strand
gugauuaucggaccaagag

SEQ ID NO: 677174 - RNA, 19 nt, Homo sapiens
  misc_RNA (1)...(19): siRNA sense strand
caaaacgacacaagaguga

SEQ ID NO: 677175 - RNA, 19 nt, Homo sapiens
  misc_RNA (1)...(19): siRNA sense strand
gcgcuucugaugcggauau

SEQ ID NO: 677176 - RNA, 19 nt, Homo sapiens
  misc_RNA (1)...(19): siRNA sense strand
acaagaauuacuacucguu

SEQ ID NO: 677177 - RNA, 19 nt, Homo sapiens
  misc_RNA (1)...(19): siRNA sense strand
ccagacgaaggacuuaaug

SEQ ID NO: 677178 - RNA, 19 nt, Homo sapiens
  misc_RNA (1)...(19): siRNA sense strand
accuaugcguuaagucuaa

SEQ ID NO: 677179 - RNA, 19 nt, Homo sapiens
  misc_RNA (1)...(19): siRNA sense strand
uuaacgccauugauaaagg

SEQ ID NO: 677180 - RNA, 19 nt, Homo sapiens
  misc_RNA (1)...(19): siRNA sense strand
gaagcggcucugguggaua

SEQ ID NO: 677181 - RNA, 19 nt, Homo sapiens
  misc_RNA (1)...(19): siRNA sense strand
guguccaccuacaagaauu

SEQ ID NO: 677182 - RNA, 19 nt, Homo sapiens
  misc_RNA (1)...(19): siRNA sense strand
gguaaucgauggcgguaaa

SEQ ID NO: 677183 - RNA, 19 nt, Homo sapiens
  misc_RNA (1)...(19): siRNA sense strand
caagagugauccaacuaaa

SEQ ID NO: 677184 - RNA, 19 nt, Homo sapiens
  misc_RNA (1)...(19): siRNA sense strand
agacacaggugaaauuaga

SEQ ID NO: 677185 - RNA, 19 nt, Homo sapiens
  misc_RNA (1)...(19): siRNA sense strand
caaugucccugaaguaaug

SEQ ID NO: 677186 - RNA, 19 nt, Homo sapiens
  misc_RNA (1)...(19): siRNA sense strand
aaagguaccuguuucugaa

SEQ ID NO: 677187 - RNA, 19 nt, Homo sapiens
  misc_RNA (1)...(19): siRNA sense strand
ugaaggacauuaacgacaa

SEQ ID NO: 677188 - RNA, 19 nt, Homo sapiens
  misc_RNA (1)...(19): siRNA sense strand
gagaauaaugccuaugaaa

SEQ ID NO: 677189 - RNA, 19 nt, Homo sapiens
  misc_RNA (1)...(19): siRNA sense strand
gaaauuuccuaugggauca

SEQ ID NO: 677190 - RNA, 19 nt, Homo sapiens
  misc_RNA (1)...(19): siRNA sense strand
ggacuuaauggagaaauuu

SEQ ID NO: 677191 - RNA, 19 nt, Homo sapiens
  misc_RNA (1)...(19): siRNA sense strand
aaaguaguguugucugaaa

SEQ ID NO: 677192 - RNA, 19 nt, Homo sapiens
  misc_RNA (1)...(19): siRNA sense strand
ggagguaaaucugcagaau

SEQ ID NO: 677193 - RNA, 19 nt, Homo sapiens
  misc_RNA (1)...(19): siRNA sense strand
ggaaguuauuggacagaga

SEQ ID NO: 677194 - RNA, 19 nt, Homo sapiens
  misc_RNA (1)...(19): siRNA sense strand
caggucaucugcucacuga

SEQ ID NO: 677195 - RNA, 19 nt, Homo sapiens
  misc_RNA (1)...(19): siRNA sense strand
ucaaauaaccguccuggau

SEQ ID NO: 677196 - RNA, 19 nt, Homo sapiens
  misc_RNA (1)...(19): siRNA sense strand
cagguuaacgccauugaua

SEQ ID NO: 677197 - RNA, 19 nt, Homo sapiens
  misc_RNA (1)...(19): siRNA sense strand
gauaagcccagcuauaaag

SEQ ID NO: 677198 - RNA, 19 nt, Homo sapiens
  misc_RNA (1)...(19): siRNA sense strand
agaacgcgcugguguccua

SEQ ID NO: 677199 - RNA, 19 nt, Homo sapiens
  misc_RNA (1)...(19): siRNA sense strand
cgaaggacuuaauggagaa

SEQ ID NO: 677200 - RNA, 19 nt, Homo sapiens
  misc_RNA (1)...(19): siRNA sense strand
ccagacacaggugaaauua

SEQ ID NO: 677201 - RNA, 19 nt, Homo sapiens
  misc_RNA (1)...(19): siRNA sense strand
gguuaacgccauugauaaa

SEQ ID NO: 677202 - RNA, 19 nt, Homo sapiens
  misc_RNA (1)...(19): siRNA sense strand
gcuauaaaguaguguuguc

SEQ ID NO: 677203 - RNA, 19 nt, Homo sapiens
  misc_RNA (1)...(19): siRNA sense strand
guuuaaauccucccaguga

SEQ ID NO: 677204 - RNA, 19 nt, Homo sapiens
  misc_RNA (1)...(19): siRNA sense strand
ugaagagaauaaugccuau

SEQ ID NO: 677205 - RNA, 19 nt, Homo sapiens
  misc_RNA (1)...(19): siRNA sense strand
auaaaguaguguugucuga

SEQ ID NO: 677206 - RNA, 19 nt, Homo sapiens
  misc_RNA (1)...(19): siRNA sense strand
ugacaaugguccggcguuu

SEQ ID NO: 677207 - RNA, 19 nt, Homo sapiens
  misc_RNA (1)...(19): siRNA sense strand
aagcggcucugguggauau

SEQ ID NO: 677208 - RNA, 19 nt, Homo sapiens
  misc_RNA (1)...(19): siRNA sense strand
ccaccuacaagaauuacua

SEQ ID NO: 677209 - RNA, 19 nt, Homo sapiens
  misc_RNA (1)...(19): siRNA sense strand
uugauaagcccagcuauaa

SEQ ID NO: 677210 - RNA, 19 nt, Homo sapiens
  misc_RNA (1)...(19): siRNA sense strand
gcuguacacuggcgagauc

SEQ ID NO: 677211 - RNA, 19 nt, Homo sapiens
  misc_RNA (1)...(19): siRNA sense strand
ucagguggguaccgucauu

SEQ ID NO: 677212 - RNA, 19 nt, Homo sapiens
  misc_RNA (1)...(19): siRNA sense strand
uaaacucucuuuugaccua

SEQ ID NO: 677213 - RNA, 19 nt, Homo sapiens
  misc_RNA (1)...(19): siRNA sense strand
gcccagcuauaaaguagug

SEQ ID NO: 677214 - RNA, 19 nt, Homo sapiens
  misc_RNA (1)...(19): siRNA sense strand
aaauaaccguccuggaugu

SEQ ID NO: 677215 - RNA, 19 nt, Homo sapiens
  misc_RNA (1)...(19): siRNA sense strand
cgccaaaacucaauuuauu

SEQ ID NO: 677216 - RNA, 19 nt, Homo sapiens
  misc_RNA (1)...(19): siRNA sense strand
uaaccguccuggaugugaa

SEQ ID NO: 677217 - RNA, 19 nt, Homo sapiens
  misc_RNA (1)...(19): siRNA sense strand
ucacugacaccucauguuc

SEQ ID NO: 677218 - RNA, 19 nt, Homo sapiens
  misc_RNA (1)...(19): siRNA sense strand
agagaauaaugccuaugaa

SEQ ID NO: 677219 - RNA, 19 nt, Homo sapiens
  misc_RNA (1)...(19): siRNA sense strand
ggauaucggcguaaacucu

SEQ ID NO: 677220 - RNA, 19 nt, Homo sapiens
  misc_RNA (1)...(19): siRNA sense strand
agagugauccaacuaaaug

SEQ ID NO: 677221 - RNA, 19 nt, Homo sapiens
  misc_RNA (1)...(19): siRNA sense strand
acaaugguccggcguuuga

SEQ ID NO: 677222 - RNA, 19 nt, Homo sapiens
  misc_RNA (1)...(19): siRNA sense strand
ggaugugaaugacaauggu

SEQ ID NO: 677223 - RNA, 19 nt, Homo sapiens
  misc_RNA (1)...(19): siRNA sense strand
cguuaagucuaaaugagaa

SEQ ID NO: 677224 - RNA, 19 nt, Homo sapiens
  misc_RNA (1)...(19): siRNA sense strand
gaaggacauuaacgacaac

SEQ ID NO: 677225 - RNA, 19 nt, Homo sapiens
  misc_RNA (1)...(19): siRNA sense strand
ucagcugucucgagaagau

SEQ ID NO: 677226 - RNA, 19 nt, Homo sapiens
  misc_RNA (1)...(19): siRNA sense strand
cggcucugguggauauuaa

SEQ ID NO: 677227 - RNA, 19 nt, Homo sapiens
  misc_RNA (1)...(19): siRNA sense strand
aagagaauaaugccuauga

SEQ ID NO: 677228 - RNA, 19 nt, Homo sapiens
  misc_RNA (1)...(19): siRNA sense strand
gagguaaaucugcagaaug

SEQ ID NO: 677229 - RNA, 19 nt, Homo sapiens
  misc_RNA (1)...(19): siRNA sense strand
guauauugccugaauuagu

SEQ ID NO: 677230 - RNA, 19 nt, Homo sapiens
  misc_RNA (1)...(19): siRNA sense strand
uagaauuuauggugaacug

SEQ ID NO: 677231 - RNA, 19 nt, Homo sapiens
  misc_RNA (1)...(19): siRNA sense strand
gagugagaaauguauguuu

SEQ ID NO: 677232 - RNA, 19 nt, Homo sapiens
  misc_RNA (1)...(19): siRNA sense strand
ggcguaaacucucuuuuga

SEQ ID NO: 677233 - RNA, 19 nt, Homo sapiens
  misc_RNA (1)...(19): siRNA sense strand
gcaugguccugguggaagu

SEQ ID NO: 677234 - RNA, 19 nt, Homo sapiens
  misc_RNA (1)...(19): siRNA sense strand
agguaaaucugcagaaugg

SEQ ID NO: 677235 - RNA, 19 nt, Homo sapiens
  misc_RNA (1)...(19): siRNA sense strand
acagagagcaaacgccaaa

SEQ ID NO: 677236 - RNA, 19 nt, Homo sapiens
  misc_RNA (1)...(19): siRNA sense strand
cgauggcgguaaaccagaa

SEQ ID NO: 677237 - RNA, 19 nt, Homo sapiens
  misc_RNA (1)...(19): siRNA sense strand
gauccagacgaaggacuua

SEQ ID NO: 677238 - RNA, 19 nt, Homo sapiens
  misc_RNA (1)...(19): siRNA sense strand
acaagagugauccaacuaa

SEQ ID NO: 677239 - RNA, 19 nt, Homo sapiens
  misc_RNA (1)...(19): siRNA sense strand
acacaagagugauccaacu

SEQ ID NO: 677240 - RNA, 19 nt, Homo sapiens
  misc_RNA (1)...(19): siRNA sense strand
ccagugagugagaaaugua

SEQ ID NO: 677241 - RNA, 19 nt, Homo sapiens
  misc_RNA (1)...(19): siRNA sense strand
uaacguguaccucaucauc

SEQ ID NO: 677242 - RNA, 19 nt, Homo sapiens
  misc_RNA (1)...(19): siRNA sense strand
gacgcugacuccggcuaua

SEQ ID NO: 677243 - RNA, 19 nt, Homo sapiens
  misc_RNA (1)...(19): siRNA sense strand
gcguuaagucuaaaugaga

SEQ ID NO: 677244 - RNA, 19 nt, Homo sapiens
  misc_RNA (1)...(19): siRNA sense strand
ugguggauauuaacgugua

SEQ ID NO: 677245 - RNA, 19 nt, Homo sapiens
  misc_RNA (1)...(19): siRNA sense strand
cgaagcggcucugguggau

SEQ ID NO: 677246 - RNA, 19 nt, Homo sapiens
  misc_RNA (1)...(19): siRNA sense strand
acgcuuggcuguccuacga

SEQ ID NO: 677247 - RNA, 19 nt, Homo sapiens
  misc_RNA (1)...(19): siRNA sense strand
gaacuggauuuugaagaga

SEQ ID NO: 677248 - RNA, 19 nt, Homo sapiens
  misc_RNA (1)...(19): siRNA sense strand
aagcccagcuauaaaguag

SEQ ID NO: 677249 - RNA, 19 nt, Homo sapiens
  misc_RNA (1)...(19): siRNA sense strand
uaagcccagcuauaaagua

SEQ ID NO: 677250 - RNA, 19 nt, Homo sapiens
  misc_RNA (1)...(19): siRNA sense strand
ugauaagcccagcuauaaa

SEQ ID NO: 677251 - RNA, 19 nt, Homo sapiens
  misc_RNA (1)...(19): siRNA sense strand
cuagagggcgcuucugaug

SEQ ID NO: 677252 - RNA, 19 nt, Homo sapiens
  misc_RNA (1)...(19): siRNA sense strand
uggaaguucuggacgugaa

SEQ ID NO: 677253 - RNA, 19 nt, Homo sapiens
  misc_RNA (1)...(19): siRNA sense strand
gccagugagugagaaaugu

SEQ ID NO: 677254 - RNA, 19 nt, Homo sapiens
  misc_RNA (1)...(19): siRNA sense strand
gaccuaugcguuaagucua

SEQ ID NO: 677255 - RNA, 19 nt, Homo sapiens
  misc_RNA (1)...(19): siRNA sense strand
agacgaaggacuuaaugga

SEQ ID NO: 677256 - RNA, 19 nt, Homo sapiens
  misc_RNA (1)...(19): siRNA sense strand
cacaagagugauccaacua

SEQ ID NO: 677257 - RNA, 19 nt, Homo sapiens
  misc_RNA (1)...(19): siRNA sense strand
gacaggccgcugcagguuu

SEQ ID NO: 677258 - RNA, 19 nt, Homo sapiens
  misc_RNA (1)...(19): siRNA sense strand
gagcaaacgccaaaacuca

SEQ ID NO: 677259 - RNA, 19 nt, Homo sapiens
  misc_RNA (1)...(19): siRNA sense strand
caccucauguucccuucaa

SEQ ID NO: 677260 - RNA, 19 nt, Homo sapiens
  misc_RNA (1)...(19): siRNA sense strand
uucaauaaauccagacaca

SEQ ID NO: 677261 - RNA, 19 nt, Homo sapiens
  misc_RNA (1)...(19): siRNA sense strand
uaaaguaguguugucugaa

SEQ ID NO: 677262 - RNA, 19 nt, Homo sapiens
  misc_RNA (1)...(19): siRNA sense strand
uggugucgcugguggagaa

SEQ ID NO: 677263 - RNA, 19 nt, Homo sapiens
  misc_RNA (1)...(19): siRNA sense strand
uuugauaagcccagcuaua

SEQ ID NO: 677264 - RNA, 19 nt, Homo sapiens
  misc_RNA (1)...(19): siRNA sense strand
uuuaaauccucccagugaa

SEQ ID NO: 677265 - RNA, 19 nt, Homo sapiens
  misc_RNA (1)...(19): siRNA sense strand
ggacgcugacuccggcuau

SEQ ID NO: 677266 - RNA, 19 nt, Homo sapiens
  misc_RNA (1)...(19): siRNA sense strand
gaagagaauaaugccuaug

SEQ ID NO: 677267 - RNA, 19 nt, Homo sapiens
  misc_RNA (1)...(19): siRNA sense strand
auggagaaauuuccuaugg

SEQ ID NO: 677268 - RNA, 19 nt, Homo sapiens
  misc_RNA (1)...(19): siRNA sense strand
ggcgguaaaccagaacuaa

SEQ ID NO: 677269 - RNA, 19 nt, Homo sapiens
  misc_RNA (1)...(19): siRNA sense strand
gcccaagacggaccucaug

SEQ ID NO: 677270 - RNA, 19 nt, Homo sapiens
  misc_RNA (1)...(19): siRNA sense strand
gcauuuuguuugugaauuc

SEQ ID NO: 677271 - RNA, 19 nt, Homo sapiens
  misc_RNA (1)...(19): siRNA sense strand
uaccgucauugcccugauu

SEQ ID NO: 677272 - RNA, 19 nt, Homo sapiens
  misc_RNA (1)...(19): siRNA sense strand
cgccauugauaaagggauu

SEQ ID NO: 677273 - RNA, 19 nt, Homo sapiens
  misc_RNA (1)...(19): siRNA sense strand
gugauuaucggaccaagag

SEQ ID NO: 677274 - RNA, 19 nt, Homo sapiens
  misc_RNA (1)...(19): siRNA sense strand
caaaacgacacaagaguga

SEQ ID NO: 677275 - RNA, 19 nt, Homo sapiens
  misc_RNA (1)...(19): siRNA sense strand
gcgcuucugaugcggauau

SEQ ID NO: 677276 - RNA, 19 nt, Homo sapiens
  misc_RNA (1)...(19): siRNA sense strand
acaagaauuacuacucguu

SEQ ID NO: 677277 - RNA, 19 nt, Homo sapiens
  misc_RNA (1)...(19): siRNA sense strand
ccagacgaaggacuuaaug

SEQ ID NO: 677278 - RNA, 19 nt, Homo sapiens
  misc_RNA (1)...(19): siRNA sense strand
accuaugcguuaagucuaa

SEQ ID NO: 677279 - RNA, 19 nt, Homo sapiens
  misc_RNA (1)...(19): siRNA sense strand
uuaacgccauugauaaagg

SEQ ID NO: 677280 - RNA, 19 nt, Homo sapiens
  misc_RNA (1)...(19): siRNA sense strand
gaagcggcucugguggaua

SEQ ID NO: 677281 - RNA, 19 nt, Homo sapiens
  misc_RNA (1)...(19): siRNA sense strand
guguccaccuacaagaauu

SEQ ID NO: 677282 - RNA, 19 nt, Homo sapiens
  misc_RNA (1)...(19): siRNA sense strand
gccgaaaccuccauaguca

SEQ ID NO: 677283 - RNA, 19 nt, Homo sapiens
  misc_RNA (1)...(19): siRNA sense strand
ccacuucacuucaccucuu

SEQ ID NO: 677284 - RNA, 19 nt, Homo sapiens
  misc_RNA (1)...(19): siRNA sense strand
cagaacaacuacuggaaag

SEQ ID NO: 677285 - RNA, 19 nt, Homo sapiens
  misc_RNA (1)...(19): siRNA sense strand
gaacaauauggucgaccua

SEQ ID NO: 677286 - RNA, 19 nt, Homo sapiens
  misc_RNA (1)...(19): siRNA sense strand
guggugaagcuacucaaua

SEQ ID NO: 677287 - RNA, 19 nt, Homo sapiens
  misc_RNA (1)...(19): siRNA sense strand
ggaaggugaaggugauuau

SEQ ID NO: 677288 - RNA, 19 nt, Homo sapiens
  misc_RNA (1)...(19): siRNA sense strand
uguaguaccucugcuguug

SEQ ID NO: 677289 - RNA, 19 nt, Homo sapiens
  misc_RNA (1)...(19): siRNA sense strand
ugaggaaggugaaggugau

SEQ ID NO: 677290 - RNA, 19 nt, Homo sapiens
  misc_RNA (1)...(19): siRNA sense strand
caauauggucgaccuauca

SEQ ID NO: 677291 - RNA, 19 nt, Homo sapiens
  misc_RNA (1)...(19): siRNA sense strand
ugaaggugauuaucuggau

SEQ ID NO: 677292 - RNA, 19 nt, Homo sapiens
  misc_RNA (1)...(19): siRNA sense strand
uggaugacagcaacaguua

SEQ ID NO: 677293 - RNA, 19 nt, Homo sapiens
  misc_RNA (1)...(19): siRNA sense strand
gaagcccagugaguuguug

SEQ ID NO: 677294 - RNA, 19 nt, Homo sapiens
  misc_RNA (1)...(19): siRNA sense strand
gaggugcgguucaaacacu

SEQ ID NO: 677295 - RNA, 19 nt, Homo sapiens
  misc_RNA (1)...(19): siRNA sense strand
ucaaacacucuuccacuga

SEQ ID NO: 677296 - RNA, 19 nt, Homo sapiens
  misc_RNA (1)...(19): siRNA sense strand
ucagaacaacuacuggaaa

SEQ ID NO: 677297 - RNA, 19 nt, Homo sapiens
  misc_RNA (1)...(19): siRNA sense strand
gggaagagugccacagugu

SEQ ID NO: 677298 - RNA, 19 nt, Homo sapiens
  misc_RNA (1)...(19): siRNA sense strand
ugucacaggagaacaauau

SEQ ID NO: 677299 - RNA, 19 nt, Homo sapiens
  misc_RNA (1)...(19): siRNA sense strand
caagucagaacaacuacug

SEQ ID NO: 677300 - RNA, 19 nt, Homo sapiens
  misc_RNA (1)...(19): siRNA sense strand
ggccgaaaccuccauaguc

SEQ ID NO: 677301 - RNA, 19 nt, Homo sapiens
  misc_RNA (1)...(19): siRNA sense strand
caugaagcccagugaguug

SEQ ID NO: 677302 - RNA, 19 nt, Homo sapiens
  misc_RNA (1)...(19): siRNA sense strand
uggugaagcuacucaauac

SEQ ID NO: 677303 - RNA, 19 nt, Homo sapiens
  misc_RNA (1)...(19): siRNA sense strand
uaguaccucugcuguuguu

SEQ ID NO: 677304 - RNA, 19 nt, Homo sapiens
  misc_RNA (1)...(19): siRNA sense strand
ugucaacacuggccgaaac

SEQ ID NO: 677305 - RNA, 19 nt, Homo sapiens
  misc_RNA (1)...(19): siRNA sense strand
ggcagaagcccaccaugca

SEQ ID NO: 677306 - RNA, 19 nt, Homo sapiens
  misc_RNA (1)...(19): siRNA sense strand
gagguacugcugucuguca

SEQ ID NO: 677307 - RNA, 19 nt, Homo sapiens
  misc_RNA (1)...(19): siRNA sense strand
ccauccggcugacacaugu

SEQ ID NO: 677308 - RNA, 19 nt, Homo sapiens
  misc_RNA (1)...(19): siRNA sense strand
gaaggcagaagcccaccau

SEQ ID NO: 677309 - RNA, 19 nt, Homo sapiens
  misc_RNA (1)...(19): siRNA sense strand
acaauauggucgaccuauc

SEQ ID NO: 677310 - RNA, 19 nt, Homo sapiens
  misc_RNA (1)...(19): siRNA sense strand
guagugggcagcagucagu

SEQ ID NO: 677311 - RNA, 19 nt, Homo sapiens
  misc_RNA (1)...(19): siRNA sense strand
ucaugaagcccagugaguu

SEQ ID NO: 677312 - RNA, 19 nt, Homo sapiens
  misc_RNA (1)...(19): siRNA sense strand
gaugacagcaacaguuacu

SEQ ID NO: 677313 - RNA, 19 nt, Homo sapiens
  misc_RNA (1)...(19): siRNA sense strand
gccugggugucguuacuug

SEQ ID NO: 677314 - RNA, 19 nt, Homo sapiens
  misc_RNA (1)...(19): siRNA sense strand
guggaugacagcaacaguu

SEQ ID NO: 677315 - RNA, 19 nt, Homo sapiens
  misc_RNA (1)...(19): siRNA sense strand
gaaggugaaggugauuauc

SEQ ID NO: 677316 - RNA, 19 nt, Homo sapiens
  misc_RNA (1)...(19): siRNA sense strand
cacuucacuucaccucuuu

SEQ ID NO: 677317 - RNA, 19 nt, Homo sapiens
  misc_RNA (1)...(19): siRNA sense strand
cauagucaccacuucacuu

SEQ ID NO: 677318 - RNA, 19 nt, Homo sapiens
  misc_RNA (1)...(19): siRNA sense strand
ggaagugagugcuuuuggu

SEQ ID NO: 677319 - RNA, 19 nt, Homo sapiens
  misc_RNA (1)...(19): siRNA sense strand
cgaccuaucagugggcaaa

SEQ ID NO: 677320 - RNA, 19 nt, Homo sapiens
  misc_RNA (1)...(19): siRNA sense strand
ucaauacgcgccacaacgu

SEQ ID NO: 677321 - RNA, 19 nt, Homo sapiens
  misc_RNA (1)...(19): siRNA sense strand
cugagguacugcugucugu

SEQ ID NO: 677322 - RNA, 19 nt, Homo sapiens
  misc_RNA (1)...(19): siRNA sense strand
caaacuagauuucgaagaa

SEQ ID NO: 677323 - RNA, 19 nt, Homo sapiens
  misc_RNA (1)...(19): siRNA sense strand
caagaacuacuacucauua

SEQ ID NO: 677324 - RNA, 19 nt, Homo sapiens
  misc_RNA (1)...(19): siRNA sense strand
gagaacgccuucaauggaa

SEQ ID NO: 677325 - RNA, 19 nt, Homo sapiens
  misc_RNA (1)...(19): siRNA sense strand
gaaagcaagaaacgaauaa

SEQ ID NO: 677326 - RNA, 19 nt, Homo sapiens
  misc_RNA (1)...(19): siRNA sense strand
gcagugguauaugcauuua

SEQ ID NO: 677327 - RNA, 19 nt, Homo sapiens
  misc_RNA (1)...(19): siRNA sense strand
ggacaggccucugcagguu

SEQ ID NO: 677328 - RNA, 19 nt, Homo sapiens
  misc_RNA (1)...(19): siRNA sense strand
gagaggaaauucaggaaca

SEQ ID NO: 677329 - RNA, 19 nt, Homo sapiens
  misc_RNA (1)...(19): siRNA sense strand
ggaugucaauguuuacuug

SEQ ID NO: 677330 - RNA, 19 nt, Homo sapiens
  misc_RNA (1)...(19): siRNA sense strand
gaacauuagugaucaagcu

SEQ ID NO: 677331 - RNA, 19 nt, Homo sapiens
  misc_RNA (1)...(19): siRNA sense strand
ggacucagaaugcuugaaa

SEQ ID NO: 677332 - RNA, 19 nt, Homo sapiens
  misc_RNA (1)...(19): siRNA sense strand
caacgauuauuucacuuug

SEQ ID NO: 677333 - RNA, 19 nt, Homo sapiens
  misc_RNA (1)...(19): siRNA sense strand
ggaggcaguugacaaagga

SEQ ID NO: 677334 - RNA, 19 nt, Homo sapiens
  misc_RNA (1)...(19): siRNA sense strand
cuacugcucuggcuucuga

SEQ ID NO: 677335 - RNA, 19 nt, Homo sapiens
  misc_RNA (1)...(19): siRNA sense strand
ggaaaacacuggacagaga

SEQ ID NO: 677336 - RNA, 19 nt, Homo sapiens
  misc_RNA (1)...(19): siRNA sense strand
gaauaaucauugcagaauc

SEQ ID NO: 677337 - RNA, 19 nt, Homo sapiens
  misc_RNA (1)...(19): siRNA sense strand
gacuggaucccaacgauua

SEQ ID NO: 677338 - RNA, 19 nt, Homo sapiens
  misc_RNA (1)...(19): siRNA sense strand
ggagguaaaucugcagaau

SEQ ID NO: 677339 - RNA, 19 nt, Homo sapiens
  misc_RNA (1)...(19): siRNA sense strand
gaaauucaggaacauaguu

SEQ ID NO: 677340 - RNA, 19 nt, Homo sapiens
  misc_RNA (1)...(19): siRNA sense strand
ggaaguacuagauguaaau

SEQ ID NO: 677341 - RNA, 19 nt, Homo sapiens
  misc_RNA (1)...(19): siRNA sense strand
gagcguaucagccuaugaa

SEQ ID NO: 677342 - RNA, 19 nt, Homo sapiens
  misc_RNA (1)...(19): siRNA sense strand
uaccaucacuucuuuguca

SEQ ID NO: 677343 - RNA, 19 nt, Homo sapiens
  misc_RNA (1)...(19): siRNA sense strand
ucacguugcugcuguauac

SEQ ID NO: 677344 - RNA, 19 nt, Homo sapiens
  misc_RNA (1)...(19): siRNA sense strand
gcugguggaugucaauguu

SEQ ID NO: 677345 - RNA, 19 nt, Homo sapiens
  misc_RNA (1)...(19): siRNA sense strand
gaaucuagaccuccggaaa

SEQ ID NO: 677346 - RNA, 19 nt, Homo sapiens
  misc_RNA (1)...(19): siRNA sense strand
ccaauccguuuauaaagug

SEQ ID NO: 677347 - RNA, 19 nt, Homo sapiens
  misc_RNA (1)...(19): siRNA sense strand
cgaugcagauauuggagua

SEQ ID NO: 677348 - RNA, 19 nt, Homo sapiens
  misc_RNA (1)...(19): siRNA sense strand
agaacgcgcuggucuccua

SEQ ID NO: 677349 - RNA, 19 nt, Homo sapiens
  misc_RNA (1)...(19): siRNA sense strand
gcaguugacaaaggaaaua

SEQ ID NO: 677350 - RNA, 19 nt, Homo sapiens
  misc_RNA (1)...(19): siRNA sense strand
ggaacauaguuuauuacug

SEQ ID NO: 677351 - RNA, 19 nt, Homo sapiens
  misc_RNA (1)...(19): siRNA sense strand
uguauggccugcaguggua

SEQ ID NO: 677352 - RNA, 19 nt, Homo sapiens
  misc_RNA (1)...(19): siRNA sense strand
caagcuaaaugccacagau

SEQ ID NO: 677353 - RNA, 19 nt, Homo sapiens
  misc_RNA (1)...(19): siRNA sense strand
cagccuagcgccauuauug

SEQ ID NO: 677354 - RNA, 19 nt, Homo sapiens
  misc_RNA (1)...(19): siRNA sense strand
ugagggacauuaacgacaa

SEQ ID NO: 677355 - RNA, 19 nt, Homo sapiens
  misc_RNA (1)...(19): siRNA sense strand
augcguggcuuucguauga

SEQ ID NO: 677356 - RNA, 19 nt, Homo sapiens
  misc_RNA (1)...(19): siRNA sense strand
ggacagagaggaaauucag

SEQ ID NO: 677357 - RNA, 19 nt, Homo sapiens
  misc_RNA (1)...(19): siRNA sense strand
ugaaagcaagaaacgaaua

SEQ ID NO: 677358 - RNA, 19 nt, Homo sapiens
  misc_RNA (1)...(19): siRNA sense strand
ugguggaugucaauguuua

SEQ ID NO: 677359 - RNA, 19 nt, Homo sapiens
  misc_RNA (1)...(19): siRNA sense strand
ugguacaaauggagauaua

SEQ ID NO: 677360 - RNA, 19 nt, Homo sapiens
  misc_RNA (1)...(19): siRNA sense strand
gcaagaaacgaauaaucau

SEQ ID NO: 677361 - RNA, 19 nt, Homo sapiens
  misc_RNA (1)...(19): siRNA sense strand
gaacaauggagaaauuagg

SEQ ID NO: 677362 - RNA, 19 nt, Homo sapiens
  misc_RNA (1)...(19): siRNA sense strand
gcuguacacuggcgagauc

SEQ ID NO: 677363 - RNA, 19 nt, Homo sapiens
  misc_RNA (1)...(19): siRNA sense strand
gaggaaauucaggaacaua

SEQ ID NO: 677364 - RNA, 19 nt, Homo sapiens
  misc_RNA (1)...(19): siRNA sense strand
gcauaagacggaccucaug

SEQ ID NO: 677365 - RNA, 19 nt, Homo sapiens
  misc_RNA (1)...(19): siRNA sense strand
gaucgugacucuggcucaa

SEQ ID NO: 677366 - RNA, 19 nt, Homo sapiens
  misc_RNA (1)...(19): siRNA sense strand
ccaacgauuauuucacuuu

SEQ ID NO: 677367 - RNA, 19 nt, Homo sapiens
  misc_RNA (1)...(19): siRNA sense strand
gcagggaguuggucguacu

SEQ ID NO: 677368 - RNA, 19 nt, Homo sapiens
  misc_RNA (1)...(19): siRNA sense strand
ccaccuacaagaacuacua

SEQ ID NO: 677369 - RNA, 19 nt, Homo sapiens
  misc_RNA (1)...(19): siRNA sense strand
gagguuaccaucacuucuu

SEQ ID NO: 677370 - RNA, 19 nt, Homo sapiens
  misc_RNA (1)...(19): siRNA sense strand
cgaauaaucauugcagaau

SEQ ID NO: 677371 - RNA, 19 nt, Homo sapiens
  misc_RNA (1)...(19): siRNA sense strand
gguggaaguacuagaugua

SEQ ID NO: 677372 - RNA, 19 nt, Homo sapiens
  misc_RNA (1)...(19): siRNA sense strand
guacaaauggagauauagu

SEQ ID NO: 677373 - RNA, 19 nt, Homo sapiens
  misc_RNA (1)...(19): siRNA sense strand
cuacaagaacuacuacuca

SEQ ID NO: 677374 - RNA, 19 nt, Homo sapiens
  misc_RNA (1)...(19): siRNA sense strand
uccgaacaauggagaaauu

SEQ ID NO: 677375 - RNA, 19 nt, Homo sapiens
  misc_RNA (1)...(19): siRNA sense strand
ggagauauaguuuacucau

SEQ ID NO: 677376 - RNA, 19 nt, Homo sapiens
  misc_RNA (1)...(19): siRNA sense strand
agagaacgccuucaaugga

SEQ ID NO: 677377 - RNA, 19 nt, Homo sapiens
  misc_RNA (1)...(19): siRNA sense strand
gggaggaggacucagaaug

SEQ ID NO: 677378 - RNA, 19 nt, Homo sapiens
  misc_RNA (1)...(19): siRNA sense strand
uaccauaaauccgaacaau

SEQ ID NO: 677379 - RNA, 19 nt, Homo sapiens
  misc_RNA (1)...(19): siRNA sense strand
gagguaaaucugcagaaug

SEQ ID NO: 677380 - RNA, 19 nt, Homo sapiens
  misc_RNA (1)...(19): siRNA sense strand
uggaaguacuagauguaaa

SEQ ID NO: 677381 - RNA, 19 nt, Homo sapiens
  misc_RNA (1)...(19): siRNA sense strand
ggaggaggacucagaaugc

SEQ ID NO: 677382 - RNA, 19 nt, Homo sapiens
  misc_RNA (1)...(19): siRNA sense strand
aaacagucuugagcaaaug

SEQ ID NO: 677383 - RNA, 19 nt, Homo sapiens
  misc_RNA (1)...(19): siRNA sense strand
agguaaaucugcagaaugg

SEQ ID NO: 677384 - RNA, 19 nt, Homo sapiens
  misc_RNA (1)...(19): siRNA sense strand
gcaaacuagauuucgaaga

SEQ ID NO: 677385 - RNA, 19 nt, Homo sapiens
  misc_RNA (1)...(19): siRNA sense strand
ggaaauucaggaacauagu

SEQ ID NO: 677386 - RNA, 19 nt, Homo sapiens
  misc_RNA (1)...(19): siRNA sense strand
ugaaggugagggacauuaa

SEQ ID NO: 677387 - RNA, 19 nt, Homo sapiens
  misc_RNA (1)...(19): siRNA sense strand
gaaguacuagauguaaaug

SEQ ID NO: 677388 - RNA, 19 nt, Homo sapiens
  misc_RNA (1)...(19): siRNA sense strand
uuagagaacgccuucaaug

SEQ ID NO: 677389 - RNA, 19 nt, Homo sapiens
  misc_RNA (1)...(19): siRNA sense strand
uaaacucggcauugaccua

SEQ ID NO: 677390 - RNA, 19 nt, Homo sapiens
  misc_RNA (1)...(19): siRNA sense strand
gaugguacaaauggagaua

SEQ ID NO: 677391 - RNA, 19 nt, Homo sapiens
  misc_RNA (1)...(19): siRNA sense strand
ccugaaagcaagaaacgaa

SEQ ID NO: 677392 - RNA, 19 nt, Homo sapiens
  misc_RNA (1)...(19): siRNA sense strand
uacaagaacuacuacucau

SEQ ID NO: 677393 - RNA, 19 nt, Homo sapiens
  misc_RNA (1)...(19): siRNA sense strand
gugaaggugagggacauua

SEQ ID NO: 677394 - RNA, 19 nt, Homo sapiens
  misc_RNA (1)...(19): siRNA sense strand
cguaucagccuaugaacug

SEQ ID NO: 677395 - RNA, 19 nt, Homo sapiens
  misc_RNA (1)...(19): siRNA sense strand
ccgaacaauggagaaauua

SEQ ID NO: 677396 - RNA, 19 nt, Homo sapiens
  misc_RNA (1)...(19): siRNA sense strand
ccgcccauauucccugaaa

SEQ ID NO: 677397 - RNA, 19 nt, Homo sapiens
  misc_RNA (1)...(19): siRNA sense strand
uuuauaaagugacgguguu

SEQ ID NO: 677398 - RNA, 19 nt, Homo sapiens
  misc_RNA (1)...(19): siRNA sense strand
aaacucgauuuccacuaga

SEQ ID NO: 677399 - RNA, 19 nt, Homo sapiens
  misc_RNA (1)...(19): siRNA sense strand
ucauuuagaaggccuguau

SEQ ID NO: 677400 - RNA, 19 nt, Homo sapiens
  misc_RNA (1)...(19): siRNA sense strand
acaagaacuacuacucauu

SEQ ID NO: 677401 - RNA, 19 nt, Homo sapiens
  misc_RNA (1)...(19): siRNA sense strand
aaagugacgguguuagaga

SEQ ID NO: 677402 - RNA, 19 nt, Homo sapiens
  misc_RNA (1)...(19): siRNA sense strand
gagggaggaggacucagaa

SEQ ID NO: 677403 - RNA, 19 nt, Homo sapiens
  misc_RNA (1)...(19): siRNA sense strand
guugacaaaggaaauauuc

SEQ ID NO: 677404 - RNA, 19 nt, Homo sapiens
  misc_RNA (1)...(19): siRNA sense strand
gaucccaacgauuauuuca

SEQ ID NO: 677405 - RNA, 19 nt, Homo sapiens
  misc_RNA (1)...(19): siRNA sense strand
gaggaggacucagaaugcu

SEQ ID NO: 677406 - RNA, 19 nt, Homo sapiens
  misc_RNA (1)...(19): siRNA sense strand
ggaccgcgagagcguauca

SEQ ID NO: 677407 - RNA, 19 nt, Homo sapiens
  misc_RNA (1)...(19): siRNA sense strand
guggaaguacuagauguaa

SEQ ID NO: 677408 - RNA, 19 nt, Homo sapiens
  misc_RNA (1)...(19): siRNA sense strand
ggacaaaaggcaaacuaga

SEQ ID NO: 677409 - RNA, 19 nt, Homo sapiens
  misc_RNA (1)...(19): siRNA sense strand
acgauuauuucacuuugga

SEQ ID NO: 677410 - RNA, 19 nt, Homo sapiens
  misc_RNA (1)...(19): siRNA sense strand
accaauccguuuauaaagu

SEQ ID NO: 677411 - RNA, 19 nt, Homo sapiens
  misc_RNA (1)...(19): siRNA sense strand
agcaagaaacgaauaauca

SEQ ID NO: 677412 - RNA, 19 nt, Homo sapiens
  misc_RNA (1)...(19): siRNA sense strand
aagugacgguguuagagaa

SEQ ID NO: 677413 - RNA, 19 nt, Homo sapiens
  misc_RNA (1)...(19): siRNA sense strand
aaaacagucuugagcaaau

SEQ ID NO: 677414 - RNA, 19 nt, Homo sapiens
  misc_RNA (1)...(19): siRNA sense strand
acaaugcguggcuuucgua

SEQ ID NO: 677415 - RNA, 19 nt, Homo sapiens
  misc_RNA (1)...(19): siRNA sense strand
gagagcguaucagccuaug

SEQ ID NO: 677416 - RNA, 19 nt, Homo sapiens
  misc_RNA (1)...(19): siRNA sense strand
gcaccuugacgccgcaugu

SEQ ID NO: 677417 - RNA, 19 nt, Homo sapiens
  misc_RNA (1)...(19): siRNA sense strand
ggccugcagugguauaugc

SEQ ID NO: 677418 - RNA, 19 nt, Homo sapiens
  misc_RNA (1)...(19): siRNA sense strand
ugccacagauccugaugau

SEQ ID NO: 677419 - RNA, 19 nt, Homo sapiens
  misc_RNA (1)...(19): siRNA sense strand
augcagauauuggaguaaa

SEQ ID NO: 677420 - RNA, 19 nt, Homo sapiens
  misc_RNA (1)...(19): siRNA sense strand
uagagaacgccuucaaugg

SEQ ID NO: 677421 - RNA, 19 nt, Homo sapiens
  misc_RNA (1)...(19): siRNA sense strand
gcacagugagcgagcugau

SEQ ID NO: 677422 - RNA, 19 nt, Homo sapiens
  misc_RNA (1)...(19): siRNA sense strand
caaacuagauuucgaagaa

SEQ ID NO: 677423 - RNA, 19 nt, Homo sapiens
  misc_RNA (1)...(19): siRNA sense strand
caagaacuacuacucauua

SEQ ID NO: 677424 - RNA, 19 nt, Homo sapiens
  misc_RNA (1)...(19): siRNA sense strand
gagaacgccuucaauggaa

SEQ ID NO: 677425 - RNA, 19 nt, Homo sapiens
  misc_RNA (1)...(19): siRNA sense strand
gaaagcaagaaacgaauaa

SEQ ID NO: 677426 - RNA, 19 nt, Homo sapiens
  misc_RNA (1)...(19): siRNA sense strand
gcagugguauaugcauuua

SEQ ID NO: 677427 - RNA, 19 nt, Homo sapiens
  misc_RNA (1)...(19): siRNA sense strand
ggacaggccucugcagguu

SEQ ID NO: 677428 - RNA, 19 nt, Homo sapiens
  misc_RNA (1)...(19): siRNA sense strand
gagaggaaauucaggaaca

SEQ ID NO: 677429 - RNA, 19 nt, Homo sapiens
  misc_RNA (1)...(19): siRNA sense strand
ggaugucaauguuuacuug

SEQ ID NO: 677430 - RNA, 19 nt, Homo sapiens
  misc_RNA (1)...(19): siRNA sense strand
gaacauuagugaucaagcu

SEQ ID NO: 677431 - RNA, 19 nt, Homo sapiens
  misc_RNA (1)...(19): siRNA sense strand
ggacucagaaugcuugaaa

SEQ ID NO: 677432 - RNA, 19 nt, Homo sapiens
  misc_RNA (1)...(19): siRNA sense strand
caacgauuauuucacuuug

SEQ ID NO: 677433 - RNA, 19 nt, Homo sapiens
  misc_RNA (1)...(19): siRNA sense strand
ggaggcaguugacaaagga

SEQ ID NO: 677434 - RNA, 19 nt, Homo sapiens
  misc_RNA (1)...(19): siRNA sense strand
cuacugcucuggcuucuga

SEQ ID NO: 677435 - RNA, 19 nt, Homo sapiens
  misc_RNA (1)...(19): siRNA sense strand
ggaaaacacuggacagaga

SEQ ID NO: 677436 - RNA, 19 nt, Homo sapiens
  misc_RNA (1)...(19): siRNA sense strand
gaauaaucauugcagaauc

SEQ ID NO: 677437 - RNA, 19 nt, Homo sapiens
  misc_RNA (1)...(19): siRNA sense strand
gacuggaucccaacgauua

SEQ ID NO: 677438 - RNA, 19 nt, Homo sapiens
  misc_RNA (1)...(19): siRNA sense strand
ggagguaaaucugcagaau

SEQ ID NO: 677439 - RNA, 19 nt, Homo sapiens
  misc_RNA (1)...(19): siRNA sense strand
gaaauucaggaacauaguu

SEQ ID NO: 677440 - RNA, 19 nt, Homo sapiens
  misc_RNA (1)...(19): siRNA sense strand
ggaaguacuagauguaaau

SEQ ID NO: 677441 - RNA, 19 nt, Homo sapiens
  misc_RNA (1)...(19): siRNA sense strand
gagcguaucagccuaugaa

SEQ ID NO: 677442 - RNA, 19 nt, Homo sapiens
  misc_RNA (1)...(19): siRNA sense strand
uaccaucacuucuuuguca

SEQ ID NO: 677443 - RNA, 19 nt, Homo sapiens
  misc_RNA (1)...(19): siRNA sense strand
ucacguugcugcuguauac

SEQ ID NO: 677444 - RNA, 19 nt, Homo sapiens
  misc_RNA (1)...(19): siRNA sense strand
gcugguggaugucaauguu

SEQ ID NO: 677445 - RNA, 19 nt, Homo sapiens
  misc_RNA (1)...(19): siRNA sense strand
gaaucuagaccuccggaaa

SEQ ID NO: 677446 - RNA, 19 nt, Homo sapiens
  misc_RNA (1)...(19): siRNA sense strand
ccaauccguuuauaaagug

SEQ ID NO: 677447 - RNA, 19 nt, Homo sapiens
  misc_RNA (1)...(19): siRNA sense strand
cgaugcagauauuggagua

SEQ ID NO: 677448 - RNA, 19 nt, Homo sapiens
  misc_RNA (1)...(19): siRNA sense strand
agaacgcgcuggucuccua

SEQ ID NO: 677449 - RNA, 19 nt, Homo sapiens
  misc_RNA (1)...(19): siRNA sense strand
gcaguugacaaaggaaaua

SEQ ID NO: 677450 - RNA, 19 nt, Homo sapiens
  misc_RNA (1)...(19): siRNA sense strand
ggaacauaguuuauuacug

SEQ ID NO: 677451 - RNA, 19 nt, Homo sapiens
  misc_RNA (1)...(19): siRNA sense strand
uguauggccugcaguggua

SEQ ID NO: 677452 - RNA, 19 nt, Homo sapiens
  misc_RNA (1)...(19): siRNA sense strand
caagcuaaaugccacagau

SEQ ID NO: 677453 - RNA, 19 nt, Homo sapiens
  misc_RNA (1)...(19): siRNA sense strand
cagccuagcgccauuauug

SEQ ID NO: 677454 - RNA, 19 nt, Homo sapiens
  misc_RNA (1)...(19): siRNA sense strand
ugagggacauuaacgacaa

SEQ ID NO: 677455 - RNA, 19 nt, Homo sapiens
  misc_RNA (1)...(19): siRNA sense strand
augcguggcuuucguauga

SEQ ID NO: 677456 - RNA, 19 nt, Homo sapiens
  misc_RNA (1)...(19): siRNA sense strand
ggacagagaggaaauucag

SEQ ID NO: 677457 - RNA, 19 nt, Homo sapiens
  misc_RNA (1)...(19): siRNA sense strand
ugaaagcaagaaacgaaua

SEQ ID NO: 677458 - RNA, 19 nt, Homo sapiens
  misc_RNA (1)...(19): siRNA sense strand
ugguggaugucaauguuua

SEQ ID NO: 677459 - RNA, 19 nt, Homo sapiens
  misc_RNA (1)...(19): siRNA sense strand
ugguacaaauggagauaua

SEQ ID NO: 677460 - RNA, 19 nt, Homo sapiens
  misc_RNA (1)...(19): siRNA sense strand
gcaagaaacgaauaaucau

SEQ ID NO: 677461 - RNA, 19 nt, Homo sapiens
  misc_RNA (1)...(19): siRNA sense strand
gaacaauggagaaauuagg

SEQ ID NO: 677462 - RNA, 19 nt, Homo sapiens
  misc_RNA (1)...(19): siRNA sense strand
gcuguacacuggcgagauc

SEQ ID NO: 677463 - RNA, 19 nt, Homo sapiens
  misc_RNA (1)...(19): siRNA sense strand
gaggaaauucaggaacaua

SEQ ID NO: 677464 - RNA, 19 nt, Homo sapiens
  misc_RNA (1)...(19): siRNA sense strand
gcauaagacggaccucaug

SEQ ID NO: 677465 - RNA, 19 nt, Homo sapiens
  misc_RNA (1)...(19): siRNA sense strand
gaucgugacucuggcucaa

SEQ ID NO: 677466 - RNA, 19 nt, Homo sapiens
  misc_RNA (1)...(19): siRNA sense strand
ccaacgauuauuucacuuu

SEQ ID NO: 677467 - RNA, 19 nt, Homo sapiens
  misc_RNA (1)...(19): siRNA sense strand
gcagggaguuggucguacu

SEQ ID NO: 677468 - RNA, 19 nt, Homo sapiens
  misc_RNA (1)...(19): siRNA sense strand
ccaccuacaagaacuacua

SEQ ID NO: 677469 - RNA, 19 nt, Homo sapiens
  misc_RNA (1)...(19): siRNA sense strand
gagguuaccaucacuucuu

SEQ ID NO: 677470 - RNA, 19 nt, Homo sapiens
  misc_RNA (1)...(19): siRNA sense strand
cgaauaaucauugcagaau

SEQ ID NO: 677471 - RNA, 19 nt, Homo sapiens
  misc_RNA (1)...(19): siRNA sense strand
gguggaaguacuagaugua

SEQ ID NO: 677472 - RNA, 19 nt, Homo sapiens
  misc_RNA (1)...(19): siRNA sense strand
guacaaauggagauauagu

SEQ ID NO: 677473 - RNA, 19 nt, Homo sapiens
  misc_RNA (1)...(19): siRNA sense strand
cuacaagaacuacuacuca

SEQ ID NO: 677474 - RNA, 19 nt, Homo sapiens
  misc_RNA (1)...(19): siRNA sense strand
uccgaacaauggagaaauu

SEQ ID NO: 677475 - RNA, 19 nt, Homo sapiens
  misc_RNA (1)...(19): siRNA sense strand
ggagauauaguuuacucau

SEQ ID NO: 677476 - RNA, 19 nt, Homo sapiens
  misc_RNA (1)...(19): siRNA sense strand
agagaacgccuucaaugga

SEQ ID NO: 677477 - RNA, 19 nt, Homo sapiens
  misc_RNA (1)...(19): siRNA sense strand
gggaggaggacucagaaug

SEQ ID NO: 677478 - RNA, 19 nt, Homo sapiens
  misc_RNA (1)...(19): siRNA sense strand
uaccauaaauccgaacaau

SEQ ID NO: 677479 - RNA, 19 nt, Homo sapiens
  misc_RNA (1)...(19): siRNA sense strand
gagguaaaucugcagaaug

SEQ ID NO: 677480 - RNA, 19 nt, Homo sapiens
  misc_RNA (1)...(19): siRNA sense strand
uggaaguacuagauguaaa

SEQ ID NO: 677481 - RNA, 19 nt, Homo sapiens
  misc_RNA (1)...(19): siRNA sense strand
ggaggaggacucagaaugc

SEQ ID NO: 677482 - RNA, 19 nt, Homo sapiens
  misc_RNA (1)...(19): siRNA sense strand
aaacagucuugagcaaaug

SEQ ID NO: 677483 - RNA, 19 nt, Homo sapiens
  misc_RNA (1)...(19): siRNA sense strand
agguaaaucugcagaaugg

SEQ ID NO: 677484 - RNA, 19 nt, Homo sapiens
  misc_RNA (1)...(19): siRNA sense strand
gcaaacuagauuucgaaga

SEQ ID NO: 677485 - RNA, 19 nt, Homo sapiens
  misc_RNA (1)...(19): siRNA sense strand
ggaaauucaggaacauagu

SEQ ID NO: 677486 - RNA, 19 nt, Homo sapiens
  misc_RNA (1)...(19): siRNA sense strand
ugaaggugagggacauuaa

SEQ ID NO: 677487 - RNA, 19 nt, Homo sapiens
  misc_RNA (1)...(19): siRNA sense strand
gaaguacuagauguaaaug

SEQ ID NO: 677488 - RNA, 19 nt, Homo sapiens
  misc_RNA (1)...(19): siRNA sense strand
uuagagaacgccuucaaug

SEQ ID NO: 677489 - RNA, 19 nt, Homo sapiens
  misc_RNA (1)...(19): siRNA sense strand
uaaacucggcauugaccua

SEQ ID NO: 677490 - RNA, 19 nt, Homo sapiens
  misc_RNA (1)...(19): siRNA sense strand
gaugguacaaauggagaua

SEQ ID NO: 677491 - RNA, 19 nt, Homo sapiens
  misc_RNA (1)...(19): siRNA sense strand
ccugaaagcaagaaacgaa

SEQ ID NO: 677492 - RNA, 19 nt, Homo sapiens
  misc_RNA (1)...(19): siRNA sense strand
uacaagaacuacuacucau

SEQ ID NO: 677493 - RNA, 19 nt, Homo sapiens
  misc_RNA (1)...(19): siRNA sense strand
gugaaggugagggacauua

SEQ ID NO: 677494 - RNA, 19 nt, Homo sapiens
  misc_RNA (1)...(19): siRNA sense strand
cguaucagccuaugaacug

SEQ ID NO: 677495 - RNA, 19 nt, Homo sapiens
  misc_RNA (1)...(19): siRNA sense strand
ccgaacaauggagaaauua

SEQ ID NO: 677496 - RNA, 19 nt, Homo sapiens
  misc_RNA (1)...(19): siRNA sense strand
ccgcccauauucccugaaa

SEQ ID NO: 677497 - RNA, 19 nt, Homo sapiens
  misc_RNA (1)...(19): siRNA sense strand
uuuauaaagugacgguguu

SEQ ID NO: 677498 - RNA, 19 nt, Homo sapiens
  misc_RNA (1)...(19): siRNA sense strand
aaacucgauuuccacuaga

SEQ ID NO: 677499 - RNA, 19 nt, Homo sapiens
  misc_RNA (1)...(19): siRNA sense strand
ucauuuagaaggccuguau

SEQ ID NO: 677500 - RNA, 19 nt, Homo sapiens
  misc_RNA (1)...(19): siRNA sense strand
acaagaacuacuacucauu

SEQ ID NO: 677501 - RNA, 19 nt, Homo sapiens
  misc_RNA (1)...(19): siRNA sense strand
aaagugacgguguuagaga

SEQ ID NO: 677502 - RNA, 19 nt, Homo sapiens
  misc_RNA (1)...(19): siRNA sense strand
gagggaggaggacucagaa

SEQ ID NO: 677503 - RNA, 19 nt, Homo sapiens
  misc_RNA (1)...(19): siRNA sense strand
guugacaaaggaaauauuc

SEQ ID NO: 677504 - RNA, 19 nt, Homo sapiens
  misc_RNA (1)...(19): siRNA sense strand
gaucccaacgauuauuuca

SEQ ID NO: 677505 - RNA, 19 nt, Homo sapiens
  misc_RNA (1)...(19): siRNA sense strand
gaggaggacucagaaugcu

SEQ ID NO: 677506 - RNA, 19 nt, Homo sapiens
  misc_RNA (1)...(19): siRNA sense strand
ggaccgcgagagcguauca

SEQ ID NO: 677507 - RNA, 19 nt, Homo sapiens
  misc_RNA (1)...(19): siRNA sense strand
guggaaguacuagauguaa

SEQ ID NO: 677508 - RNA, 19 nt, Homo sapiens
  misc_RNA (1)...(19): siRNA sense strand
ggacaaaaggcaaacuaga

SEQ ID NO: 677509 - RNA, 19 nt, Homo sapiens
  misc_RNA (1)...(19): siRNA sense strand
acgauuauuucacuuugga

SEQ ID NO: 677510 - RNA, 19 nt, Homo sapiens
  misc_RNA (1)...(19): siRNA sense strand
accaauccguuuauaaagu

SEQ ID NO: 677511 - RNA, 19 nt, Homo sapiens
  misc_RNA (1)...(19): siRNA sense strand
agcaagaaacgaauaauca

SEQ ID NO: 677512 - RNA, 19 nt, Homo sapiens
  misc_RNA (1)...(19): siRNA sense strand
aagugacgguguuagagaa

SEQ ID NO: 677513 - RNA, 19 nt, Homo sapiens
  misc_RNA (1)...(19): siRNA sense strand
aaaacagucuugagcaaau

SEQ ID NO: 677514 - RNA, 19 nt, Homo sapiens
  misc_RNA (1)...(19): siRNA sense strand
acaaugcguggcuuucgua

SEQ ID NO: 677515 - RNA, 19 nt, Homo sapiens
  misc_RNA (1)...(19): siRNA sense strand
gagagcguaucagccuaug

SEQ ID NO: 677516 - RNA, 19 nt, Homo sapiens
  misc_RNA (1)...(19): siRNA sense strand
gcaccuugacgccgcaugu

SEQ ID NO: 677517 - RNA, 19 nt, Homo sapiens
  misc_RNA (1)...(19): siRNA sense strand
ggccugcagugguauaugc

SEQ ID NO: 677518 - RNA, 19 nt, Homo sapiens
  misc_RNA (1)...(19): siRNA sense strand
ugccacagauccugaugau

SEQ ID NO: 677519 - RNA, 19 nt, Homo sapiens
  misc_RNA (1)...(19): siRNA sense strand
augcagauauuggaguaaa

SEQ ID NO: 677520 - RNA, 19 nt, Homo sapiens
  misc_RNA (1)...(19): siRNA sense strand
uagagaacgccuucaaugg

SEQ ID NO: 677521 - RNA, 19 nt, Homo sapiens
  misc_RNA (1)...(19): siRNA sense strand
gcacagugagcgagcugau

SEQ ID NO: 677522 - RNA, 19 nt, Homo sapiens
  misc_RNA (1)...(19): siRNA sense strand
ccaagagauugucaaauuu

SEQ ID NO: 677523 - RNA, 19 nt, Homo sapiens
  misc_RNA (1)...(19): siRNA sense strand
gccggaagcuuaucacaaa

SEQ ID NO: 677524 - RNA, 19 nt, Homo sapiens
  misc_RNA (1)...(19): siRNA sense strand
ggacaagcuucucaucuuc

SEQ ID NO: 677525 - RNA, 19 nt, Homo sapiens
  misc_RNA (1)...(19): siRNA sense strand
gcaguuggcuaaagagcaa

SEQ ID NO: 677526 - RNA, 19 nt, Homo sapiens
  misc_RNA (1)...(19): siRNA sense strand
accaagagauugucaaauu

SEQ ID NO: 677527 - RNA, 19 nt, Homo sapiens
  misc_RNA (1)...(19): siRNA sense strand
cuaaagagcaagacaaaga

SEQ ID NO: 677528 - RNA, 19 nt, Homo sapiens
  misc_RNA (1)...(19): siRNA sense strand
ggauauccgugauuguuca

SEQ ID NO: 677529 - RNA, 19 nt, Homo sapiens
  misc_RNA (1)...(19): siRNA sense strand
acaguugcgucacagaaua

SEQ ID NO: 677530 - RNA, 19 nt, Homo sapiens
  misc_RNA (1)...(19): siRNA sense strand
gcgcuacgccuguuucuug

SEQ ID NO: 677531 - RNA, 19 nt, Homo sapiens
  misc_RNA (1)...(19): siRNA sense strand
caagagauugucaaauuug

SEQ ID NO: 677532 - RNA, 19 nt, Homo sapiens
  misc_RNA (1)...(19): siRNA sense strand
ggaaguggagaaucacaaa

SEQ ID NO: 677533 - RNA, 19 nt, Homo sapiens
  misc_RNA (1)...(19): siRNA sense strand
ggaagcuuaucacaaaaua

SEQ ID NO: 677534 - RNA, 19 nt, Homo sapiens
  misc_RNA (1)...(19): siRNA sense strand
cggacaagcuucucaucuu

SEQ ID NO: 677535 - RNA, 19 nt, Homo sapiens
  misc_RNA (1)...(19): siRNA sense strand
gcuacgguccucuauauug

SEQ ID NO: 677536 - RNA, 19 nt, Homo sapiens
  misc_RNA (1)...(19): siRNA sense strand
gguccucuauauugugaaa

SEQ ID NO: 677537 - RNA, 19 nt, Homo sapiens
  misc_RNA (1)...(19): siRNA sense strand
uaaagagcaagacaaagaa

SEQ ID NO: 677538 - RNA, 19 nt, Homo sapiens
  misc_RNA (1)...(19): siRNA sense strand
uaaccaagagauugucaaa

SEQ ID NO: 677539 - RNA, 19 nt, Homo sapiens
  misc_RNA (1)...(19): siRNA sense strand
cuacgguccucuauauugu

SEQ ID NO: 677540 - RNA, 19 nt, Homo sapiens
  misc_RNA (1)...(19): siRNA sense strand
uugcuacgguccucuauau

SEQ ID NO: 677541 - RNA, 19 nt, Homo sapiens
  misc_RNA (1)...(19): siRNA sense strand
gcucuuacugaacugaaua

SEQ ID NO: 677542 - RNA, 19 nt, Homo sapiens
  misc_RNA (1)...(19): siRNA sense strand
gcccagacauccaguacca

SEQ ID NO: 677543 - RNA, 19 nt, Homo sapiens
  misc_RNA (1)...(19): siRNA sense strand
gaggugaaggcgcuuauuc

SEQ ID NO: 677544 - RNA, 19 nt, Homo sapiens
  misc_RNA (1)...(19): siRNA sense strand
cuacgccuguuucuugcua

SEQ ID NO: 677545 - RNA, 19 nt, Homo sapiens
  misc_RNA (1)...(19): siRNA sense strand
gccaugcagucucuaguca

SEQ ID NO: 677546 - RNA, 19 nt, Homo sapiens
  misc_RNA (1)...(19): siRNA sense strand
uggagcaguuggcuaaaga

SEQ ID NO: 677547 - RNA, 19 nt, Homo sapiens
  misc_RNA (1)...(19): siRNA sense strand
caggauauccgugauuguu

SEQ ID NO: 677548 - RNA, 19 nt, Homo sapiens
  misc_RNA (1)...(19): siRNA sense strand
ggcuaaagagcaagacaaa

SEQ ID NO: 677549 - RNA, 19 nt, Homo sapiens
  misc_RNA (1)...(19): siRNA sense strand
caagacaaagaaucagaga

SEQ ID NO: 677550 - RNA, 19 nt, Homo sapiens
  misc_RNA (1)...(19): siRNA sense strand
gaaggcgcuuauucaggau

SEQ ID NO: 677551 - RNA, 19 nt, Homo sapiens
  misc_RNA (1)...(19): siRNA sense strand
cuagucacuucuucacgaa

SEQ ID NO: 677552 - RNA, 19 nt, Homo sapiens
  misc_RNA (1)...(19): siRNA sense strand
aagcggcucuuuccauuuu

SEQ ID NO: 677553 - RNA, 19 nt, Homo sapiens
  misc_RNA (1)...(19): siRNA sense strand
agagcaagacaaagaauca

SEQ ID NO: 677554 - RNA, 19 nt, Homo sapiens
  misc_RNA (1)...(19): siRNA sense strand
gaagaauuuaaguccaugu

SEQ ID NO: 677555 - RNA, 19 nt, Homo sapiens
  misc_RNA (1)...(19): siRNA sense strand
ggccggaagcuuaucacaa

SEQ ID NO: 677556 - RNA, 19 nt, Homo sapiens
  misc_RNA (1)...(19): siRNA sense strand
ggaggugaaggcgcuuauu

SEQ ID NO: 677557 - RNA, 19 nt, Homo sapiens
  misc_RNA (1)...(19): siRNA sense strand
ugauuguucaggacccuua

SEQ ID NO: 677558 - RNA, 19 nt, Homo sapiens
  misc_RNA (1)...(19): siRNA sense strand
ugcagucucuagucacuuc

SEQ ID NO: 677559 - RNA, 19 nt, Homo sapiens
  misc_RNA (1)...(19): siRNA sense strand
caugcagucucuagucacu

SEQ ID NO: 677560 - RNA, 19 nt, Homo sapiens
  misc_RNA (1)...(19): siRNA sense strand
guccacguccggaucugua

SEQ ID NO: 677561 - RNA, 19 nt, Homo sapiens
  misc_RNA (1)...(19): siRNA sense strand
ccaagagauugucaaauuu

SEQ ID NO: 677562 - RNA, 19 nt, Homo sapiens
  misc_RNA (1)...(19): siRNA sense strand
gccggaagcuuaucacaaa

SEQ ID NO: 677563 - RNA, 19 nt, Homo sapiens
  misc_RNA (1)...(19): siRNA sense strand
ggacaagcuucucaucuuc

SEQ ID NO: 677564 - RNA, 19 nt, Homo sapiens
  misc_RNA (1)...(19): siRNA sense strand
gcaguuggcuaaagagcaa

SEQ ID NO: 677565 - RNA, 19 nt, Homo sapiens
  misc_RNA (1)...(19): siRNA sense strand
accaagagauugucaaauu

SEQ ID NO: 677566 - RNA, 19 nt, Homo sapiens
  misc_RNA (1)...(19): siRNA sense strand
cuaaagagcaagacaaaga

SEQ ID NO: 677567 - RNA, 19 nt, Homo sapiens
  misc_RNA (1)...(19): siRNA sense strand
ggauauccgugauuguuca

SEQ ID NO: 677568 - RNA, 19 nt, Homo sapiens
  misc_RNA (1)...(19): siRNA sense strand
acaguugcgucacagaaua

SEQ ID NO: 677569 - RNA, 19 nt, Homo sapiens
  misc_RNA (1)...(19): siRNA sense strand
gcgcuacgccuguuucuug

SEQ ID NO: 677570 - RNA, 19 nt, Homo sapiens
  misc_RNA (1)...(19): siRNA sense strand
caagagauugucaaauuug

SEQ ID NO: 677571 - RNA, 19 nt, Homo sapiens
  misc_RNA (1)...(19): siRNA sense strand
ggaaguggagaaucacaaa

SEQ ID NO: 677572 - RNA, 19 nt, Homo sapiens
  misc_RNA (1)...(19): siRNA sense strand
ggaagcuuaucacaaaaua

SEQ ID NO: 677573 - RNA, 19 nt, Homo sapiens
  misc_RNA (1)...(19): siRNA sense strand
cggacaagcuucucaucuu

SEQ ID NO: 677574 - RNA, 19 nt, Homo sapiens
  misc_RNA (1)...(19): siRNA sense strand
gcuacgguccucuauauug

SEQ ID NO: 677575 - RNA, 19 nt, Homo sapiens
  misc_RNA (1)...(19): siRNA sense strand
gguccucuauauugugaaa

SEQ ID NO: 677576 - RNA, 19 nt, Homo sapiens
  misc_RNA (1)...(19): siRNA sense strand
uaaagagcaagacaaagaa

SEQ ID NO: 677577 - RNA, 19 nt, Homo sapiens
  misc_RNA (1)...(19): siRNA sense strand
uaaccaagagauugucaaa

SEQ ID NO: 677578 - RNA, 19 nt, Homo sapiens
  misc_RNA (1)...(19): siRNA sense strand
cuacgguccucuauauugu

SEQ ID NO: 677579 - RNA, 19 nt, Homo sapiens
  misc_RNA (1)...(19): siRNA sense strand
uugcuacgguccucuauau

SEQ ID NO: 677580 - RNA, 19 nt, Homo sapiens
  misc_RNA (1)...(19): siRNA sense strand
gcucuuacugaacugaaua

SEQ ID NO: 677581 - RNA, 19 nt, Homo sapiens
  misc_RNA (1)...(19): siRNA sense strand
gcccagacauccaguacca

SEQ ID NO: 677582 - RNA, 19 nt, Homo sapiens
  misc_RNA (1)...(19): siRNA sense strand
gaggugaaggcgcuuauuc

SEQ ID NO: 677583 - RNA, 19 nt, Homo sapiens
  misc_RNA (1)...(19): siRNA sense strand
cuacgccuguuucuugcua

SEQ ID NO: 677584 - RNA, 19 nt, Homo sapiens
  misc_RNA (1)...(19): siRNA sense strand
gccaugcagucucuaguca

SEQ ID NO: 677585 - RNA, 19 nt, Homo sapiens
  misc_RNA (1)...(19): siRNA sense strand
uggagcaguuggcuaaaga

SEQ ID NO: 677586 - RNA, 19 nt, Homo sapiens
  misc_RNA (1)...(19): siRNA sense strand
caggauauccgugauuguu

SEQ ID NO: 677587 - RNA, 19 nt, Homo sapiens
  misc_RNA (1)...(19): siRNA sense strand
ggcuaaagagcaagacaaa

SEQ ID NO: 677588 - RNA, 19 nt, Homo sapiens
  misc_RNA (1)...(19): siRNA sense strand
caagacaaagaaucagaga

SEQ ID NO: 677589 - RNA, 19 nt, Homo sapiens
  misc_RNA (1)...(19): siRNA sense strand
gaaggcgcuuauucaggau

SEQ ID NO: 677590 - RNA, 19 nt, Homo sapiens
  misc_RNA (1)...(19): siRNA sense strand
cuagucacuucuucacgaa

SEQ ID NO: 677591 - RNA, 19 nt, Homo sapiens
  misc_RNA (1)...(19): siRNA sense strand
aagcggcucuuuccauuuu

SEQ ID NO: 677592 - RNA, 19 nt, Homo sapiens
  misc_RNA (1)...(19): siRNA sense strand
agagcaagacaaagaauca

SEQ ID NO: 677593 - RNA, 19 nt, Homo sapiens
  misc_RNA (1)...(19): siRNA sense strand
gaagaauuuaaguccaugu

SEQ ID NO: 677594 - RNA, 19 nt, Homo sapiens
  misc_RNA (1)...(19): siRNA sense strand
ggccggaagcuuaucacaa

SEQ ID NO: 677595 - RNA, 19 nt, Homo sapiens
  misc_RNA (1)...(19): siRNA sense strand
ggaggugaaggcgcuuauu

SEQ ID NO: 677596 - RNA, 19 nt, Homo sapiens
  misc_RNA (1)...(19): siRNA sense strand
ugauuguucaggacccuua

SEQ ID NO: 677597 - RNA, 19 nt, Homo sapiens
  misc_RNA (1)...(19): siRNA sense strand
ugcagucucuagucacuuc

SEQ ID NO: 677598 - RNA, 19 nt, Homo sapiens
  misc_RNA (1)...(19): siRNA sense strand
caugcagucucuagucacu

SEQ ID NO: 677599 - RNA, 19 nt, Homo sapiens
  misc_RNA (1)...(19): siRNA sense strand
guccacguccggaucugua

SEQ ID NO: 677600 - RNA, 19 nt, Homo sapiens
  misc_RNA (1)...(19): siRNA sense strand
ccaagagauugucaaauuu

SEQ ID NO: 677601 - RNA, 19 nt, Homo sapiens
  misc_RNA (1)...(19): siRNA sense strand
gccggaagcuuaucacaaa

SEQ ID NO: 677602 - RNA, 19 nt, Homo sapiens
  misc_RNA (1)...(19): siRNA sense strand
ggacaagcuucucaucuuc

SEQ ID NO: 677603 - RNA, 19 nt, Homo sapiens
  misc_RNA (1)...(19): siRNA sense strand
gcaguuggcuaaagagcaa

SEQ ID NO: 677604 - RNA, 19 nt, Homo sapiens
  misc_RNA (1)...(19): siRNA sense strand
accaagagauugucaaauu

SEQ ID NO: 677605 - RNA, 19 nt, Homo sapiens
  misc_RNA (1)...(19): siRNA sense strand
cuaaagagcaagacaaaga

SEQ ID NO: 677606 - RNA, 19 nt, Homo sapiens
  misc_RNA (1)...(19): siRNA sense strand
ggauauccgugauuguuca

SEQ ID NO: 677607 - RNA, 19 nt, Homo sapiens
  misc_RNA (1)...(19): siRNA sense strand
acaguugcgucacagaaua

SEQ ID NO: 677608 - RNA, 19 nt, Homo sapiens
  misc_RNA (1)...(19): siRNA sense strand
gcgcuacgccuguuucuug

SEQ ID NO: 677609 - RNA, 19 nt, Homo sapiens
  misc_RNA (1)...(19): siRNA sense strand
caagagauugucaaauuug

SEQ ID NO: 677610 - RNA, 19 nt, Homo sapiens
  misc_RNA (1)...(19): siRNA sense strand
ggaaguggagaaucacaaa

SEQ ID NO: 677611 - RNA, 19 nt, Homo sapiens
  misc_RNA (1)...(19): siRNA sense strand
ggaagcuuaucacaaaaua

SEQ ID NO: 677612 - RNA, 19 nt, Homo sapiens
  misc_RNA (1)...(19): siRNA sense strand
cggacaagcuucucaucuu

SEQ ID NO: 677613 - RNA, 19 nt, Homo sapiens
  misc_RNA (1)...(19): siRNA sense strand
gcuacgguccucuauauug

SEQ ID NO: 677614 - RNA, 19 nt, Homo sapiens
  misc_RNA (1)...(19): siRNA sense strand
gguccucuauauugugaaa

SEQ ID NO: 677615 - RNA, 19 nt, Homo sapiens
  misc_RNA (1)...(19): siRNA sense strand
uaaagagcaagacaaagaa

SEQ ID NO: 677616 - RNA, 19 nt, Homo sapiens
  misc_RNA (1)...(19): siRNA sense strand
uaaccaagagauugucaaa

SEQ ID NO: 677617 - RNA, 19 nt, Homo sapiens
  misc_RNA (1)...(19): siRNA sense strand
cuacgguccucuauauugu

SEQ ID NO: 677618 - RNA, 19 nt, Homo sapiens
  misc_RNA (1)...(19): siRNA sense strand
uugcuacgguccucuauau

SEQ ID NO: 677619 - RNA, 19 nt, Homo sapiens
  misc_RNA (1)...(19): siRNA sense strand
gcucuuacugaacugaaua

SEQ ID NO: 677620 - RNA, 19 nt, Homo sapiens
  misc_RNA (1)...(19): siRNA sense strand
gcccagacauccaguacca

SEQ ID NO: 677621 - RNA, 19 nt, Homo sapiens
  misc_RNA (1)...(19): siRNA sense strand
gaggugaaggcgcuuauuc

SEQ ID NO: 677622 - RNA, 19 nt, Homo sapiens
  misc_RNA (1)...(19): siRNA sense strand
cuacgccuguuucuugcua

SEQ ID NO: 677623 - RNA, 19 nt, Homo sapiens
  misc_RNA (1)...(19): siRNA sense strand
gccaugcagucucuaguca

SEQ ID NO: 677624 - RNA, 19 nt, Homo sapiens
  misc_RNA (1)...(19): siRNA sense strand
uggagcaguuggcuaaaga

SEQ ID NO: 677625 - RNA, 19 nt, Homo sapiens
  misc_RNA (1)...(19): siRNA sense strand
caggauauccgugauuguu

SEQ ID NO: 677626 - RNA, 19 nt, Homo sapiens
  misc_RNA (1)...(19): siRNA sense strand
ggcuaaagagcaagacaaa

SEQ ID NO: 677627 - RNA, 19 nt, Homo sapiens
  misc_RNA (1)...(19): siRNA sense strand
caagacaaagaaucagaga

SEQ ID NO: 677628 - RNA, 19 nt, Homo sapiens
  misc_RNA (1)...(19): siRNA sense strand
gaaggcgcuuauucaggau

SEQ ID NO: 677629 - RNA, 19 nt, Homo sapiens
  misc_RNA (1)...(19): siRNA sense strand
cuagucacuucuucacgaa

SEQ ID NO: 677630 - RNA, 19 nt, Homo sapiens
  misc_RNA (1)...(19): siRNA sense strand
aagcggcucuuuccauuuu

SEQ ID NO: 677631 - RNA, 19 nt, Homo sapiens
  misc_RNA (1)...(19): siRNA sense strand
agagcaagacaaagaauca

SEQ ID NO: 677632 - RNA, 19 nt, Homo sapiens
  misc_RNA (1)...(19): siRNA sense strand
gaagaauuuaaguccaugu

SEQ ID NO: 677633 - RNA, 19 nt, Homo sapiens
  misc_RNA (1)...(19): siRNA sense strand
ggccggaagcuuaucacaa

SEQ ID NO: 677634 - RNA, 19 nt, Homo sapiens
  misc_RNA (1)...(19): siRNA sense strand
ggaggugaaggcgcuuauu

SEQ ID NO: 677635 - RNA, 19 nt, Homo sapiens
  misc_RNA (1)...(19): siRNA sense strand
ugauuguucaggacccuua

SEQ ID NO: 677636 - RNA, 19 nt, Homo sapiens
  misc_RNA (1)...(19): siRNA sense strand
ugcagucucuagucacuuc

SEQ ID NO: 677637 - RNA, 19 nt, Homo sapiens
  misc_RNA (1)...(19): siRNA sense strand
caugcagucucuagucacu

SEQ ID NO: 677638 - RNA, 19 nt, Homo sapiens
  misc_RNA (1)...(19): siRNA sense strand
guccacguccggaucugua

SEQ ID NO: 677639 - RNA, 19 nt, Homo sapiens
  misc_RNA (1)...(19): siRNA sense strand
ccaagagauugucaaauuu

SEQ ID NO: 677640 - RNA, 19 nt, Homo sapiens
  misc_RNA (1)...(19): siRNA sense strand
gccggaagcuuaucacaaa

SEQ ID NO: 677641 - RNA, 19 nt, Homo sapiens
  misc_RNA (1)...(19): siRNA sense strand
ggacaagcuucucaucuuc

SEQ ID NO: 677642 - RNA, 19 nt, Homo sapiens
  misc_RNA (1)...(19): siRNA sense strand
gcaguuggcuaaagagcaa

SEQ ID NO: 677643 - RNA, 19 nt, Homo sapiens
  misc_RNA (1)...(19): siRNA sense strand
accaagagauugucaaauu

SEQ ID NO: 677644 - RNA, 19 nt, Homo sapiens
  misc_RNA (1)...(19): siRNA sense strand
cuaaagagcaagacaaaga

SEQ ID NO: 677645 - RNA, 19 nt, Homo sapiens
  misc_RNA (1)...(19): siRNA sense strand
ggauauccgugauuguuca

SEQ ID NO: 677646 - RNA, 19 nt, Homo sapiens
  misc_RNA (1)...(19): siRNA sense strand
acaguugcgucacagaaua

SEQ ID NO: 677647 - RNA, 19 nt, Homo sapiens
  misc_RNA (1)...(19): siRNA sense strand
gcgcuacgccuguuucuug

SEQ ID NO: 677648 - RNA, 19 nt, Homo sapiens
  misc_RNA (1)...(19): siRNA sense strand
caagagauugucaaauuug

SEQ ID NO: 677649 - RNA, 19 nt, Homo sapiens
  misc_RNA (1)...(19): siRNA sense strand
ggaaguggagaaucacaaa

SEQ ID NO: 677650 - RNA, 19 nt, Homo sapiens
  misc_RNA (1)...(19): siRNA sense strand
ggaagcuuaucacaaaaua

SEQ ID NO: 677651 - RNA, 19 nt, Homo sapiens
  misc_RNA (1)...(19): siRNA sense strand
cggacaagcuucucaucuu

SEQ ID NO: 677652 - RNA, 19 nt, Homo sapiens
  misc_RNA (1)...(19): siRNA sense strand
gcuacgguccucuauauug

SEQ ID NO: 677653 - RNA, 19 nt, Homo sapiens
  misc_RNA (1)...(19): siRNA sense strand
gguccucuauauugugaaa

SEQ ID NO: 677654 - RNA, 19 nt, Homo sapiens
  misc_RNA (1)...(19): siRNA sense strand
uaaagagcaagacaaagaa

SEQ ID NO: 677655 - RNA, 19 nt, Homo sapiens
  misc_RNA (1)...(19): siRNA sense strand
uaaccaagagauugucaaa

SEQ ID NO: 677656 - RNA, 19 nt, Homo sapiens
  misc_RNA (1)...(19): siRNA sense strand
cuacgguccucuauauugu

SEQ ID NO: 677657 - RNA, 19 nt, Homo sapiens
  misc_RNA (1)...(19): siRNA sense strand
uugcuacgguccucuauau

SEQ ID NO: 677658 - RNA, 19 nt, Homo sapiens
  misc_RNA (1)...(19): siRNA sense strand
gcucuuacugaacugaaua

SEQ ID NO: 677659 - RNA, 19 nt, Homo sapiens
  misc_RNA (1)...(19): siRNA sense strand
gcccagacauccaguacca

SEQ ID NO: 677660 - RNA, 19 nt, Homo sapiens
  misc_RNA (1)...(19): siRNA sense strand
gaggugaaggcgcuuauuc

SEQ ID NO: 677661 - RNA, 19 nt, Homo sapiens
  misc_RNA (1)...(19): siRNA sense strand
cuacgccuguuucuugcua

SEQ ID NO: 677662 - RNA, 19 nt, Homo sapiens
  misc_RNA (1)...(19): siRNA sense strand
gccaugcagucucuaguca

SEQ ID NO: 677663 - RNA, 19 nt, Homo sapiens
  misc_RNA (1)...(19): siRNA sense strand
uggagcaguuggcuaaaga

SEQ ID NO: 677664 - RNA, 19 nt, Homo sapiens
  misc_RNA (1)...(19): siRNA sense strand
caggauauccgugauuguu

SEQ ID NO: 677665 - RNA, 19 nt, Homo sapiens
  misc_RNA (1)...(19): siRNA sense strand
ggcuaaagagcaagacaaa

SEQ ID NO: 677666 - RNA, 19 nt, Homo sapiens
  misc_RNA (1)...(19): siRNA sense strand
caagacaaagaaucagaga

SEQ ID NO: 677667 - RNA, 19 nt, Homo sapiens
  misc_RNA (1)...(19): siRNA sense strand
gaaggcgcuuauucaggau

SEQ ID NO: 677668 - RNA, 19 nt, Homo sapiens
  misc_RNA (1)...(19): siRNA sense strand
cuagucacuucuucacgaa

SEQ ID NO: 677669 - RNA, 19 nt, Homo sapiens
  misc_RNA (1)...(19): siRNA sense strand
aagcggcucuuuccauuuu

SEQ ID NO: 677670 - RNA, 19 nt, Homo sapiens
  misc_RNA (1)...(19): siRNA sense strand
agagcaagacaaagaauca

SEQ ID NO: 677671 - RNA, 19 nt, Homo sapiens
  misc_RNA (1)...(19): siRNA sense strand
gaagaauuuaaguccaugu

SEQ ID NO: 677672 - RNA, 19 nt, Homo sapiens
  misc_RNA (1)...(19): siRNA sense strand
ggccggaagcuuaucacaa

SEQ ID NO: 677673 - RNA, 19 nt, Homo sapiens
  misc_RNA (1)...(19): siRNA sense strand
ggaggugaaggcgcuuauu

SEQ ID NO: 677674 - RNA, 19 nt, Homo sapiens
  misc_RNA (1)...(19): siRNA sense strand
ugauuguucaggacccuua

SEQ ID NO: 677675 - RNA, 19 nt, Homo sapiens
  misc_RNA (1)...(19): siRNA sense strand
ugcagucucuagucacuuc

SEQ ID NO: 677676 - RNA, 19 nt, Homo sapiens
  misc_RNA (1)...(19): siRNA sense strand
caugcagucucuagucacu

SEQ ID NO: 677677 - RNA, 19 nt, Homo sapiens
  misc_RNA (1)...(19): siRNA sense strand
guccacguccggaucugua

SEQ ID NO: 677678 - RNA, 19 nt, Homo sapiens
  misc_RNA (1)...(19): siRNA sense strand
ccaagagauugucaaauuu

SEQ ID NO: 677679 - RNA, 19 nt, Homo sapiens
  misc_RNA (1)...(19): siRNA sense strand
gccggaagcuuaucacaaa

SEQ ID NO: 677680 - RNA, 19 nt, Homo sapiens
  misc_RNA (1)...(19): siRNA sense strand
ggacaagcuucucaucuuc

SEQ ID NO: 677681 - RNA, 19 nt, Homo sapiens
  misc_RNA (1)...(19): siRNA sense strand
gcaguuggcuaaagagcaa

SEQ ID NO: 677682 - RNA, 19 nt, Homo sapiens
  misc_RNA (1)...(19): siRNA sense strand
accaagagauugucaaauu

SEQ ID NO: 677683 - RNA, 19 nt, Homo sapiens
  misc_RNA (1)...(19): siRNA sense strand
cuaaagagcaagacaaaga

SEQ ID NO: 677684 - RNA, 19 nt, Homo sapiens
  misc_RNA (1)...(19): siRNA sense strand
ggauauccgugauuguuca

SEQ ID NO: 677685 - RNA, 19 nt, Homo sapiens
  misc_RNA (1)...(19): siRNA sense strand
acaguugcgucacagaaua

SEQ ID NO: 677686 - RNA, 19 nt, Homo sapiens
  misc_RNA (1)...(19): siRNA sense strand
gcgcuacgccuguuucuug

SEQ ID NO: 677687 - RNA, 19 nt, Homo sapiens
  misc_RNA (1)...(19): siRNA sense strand
caagagauugucaaauuug

SEQ ID NO: 677688 - RNA, 19 nt, Homo sapiens
  misc_RNA (1)...(19): siRNA sense strand
ggaaguggagaaucacaaa

SEQ ID NO: 677689 - RNA, 19 nt, Homo sapiens
  misc_RNA (1)...(19): siRNA sense strand
ggaagcuuaucacaaaaua

SEQ ID NO: 677690 - RNA, 19 nt, Homo sapiens
  misc_RNA (1)...(19): siRNA sense strand
cggacaagcuucucaucuu

SEQ ID NO: 677691 - RNA, 19 nt, Homo sapiens
  misc_RNA (1)...(19): siRNA sense strand
gcuacgguccucuauauug

SEQ ID NO: 677692 - RNA, 19 nt, Homo sapiens
  misc_RNA (1)...(19): siRNA sense strand
gguccucuauauugugaaa

SEQ ID NO: 677693 - RNA, 19 nt, Homo sapiens
  misc_RNA (1)...(19): siRNA sense strand
uaaagagcaagacaaagaa

SEQ ID NO: 677694 - RNA, 19 nt, Homo sapiens
  misc_RNA (1)...(19): siRNA sense strand
uaaccaagagauugucaaa

SEQ ID NO: 677695 - RNA, 19 nt, Homo sapiens
  misc_RNA (1)...(19): siRNA sense strand
cuacgguccucuauauugu

SEQ ID NO: 677696 - RNA, 19 nt, Homo sapiens
  misc_RNA (1)...(19): siRNA sense strand
uugcuacgguccucuauau

SEQ ID NO: 677697 - RNA, 19 nt, Homo sapiens
  misc_RNA (1)...(19): siRNA sense strand
gcucuuacugaacugaaua

SEQ ID NO: 677698 - RNA, 19 nt, Homo sapiens
  misc_RNA (1)...(19): siRNA sense strand
gcccagacauccaguacca

SEQ ID NO: 677699 - RNA, 19 nt, Homo sapiens
  misc_RNA (1)...(19): siRNA sense strand
gaggugaaggcgcuuauuc

SEQ ID NO: 677700 - RNA, 19 nt, Homo sapiens
  misc_RNA (1)...(19): siRNA sense strand
cuacgccuguuucuugcua

SEQ ID NO: 677701 - RNA, 19 nt, Homo sapiens
  misc_RNA (1)...(19): siRNA sense strand
gccaugcagucucuaguca

SEQ ID NO: 677702 - RNA, 19 nt, Homo sapiens
  misc_RNA (1)...(19): siRNA sense strand
uggagcaguuggcuaaaga

SEQ ID NO: 677703 - RNA, 19 nt, Homo sapiens
  misc_RNA (1)...(19): siRNA sense strand
caggauauccgugauuguu

SEQ ID NO: 677704 - RNA, 19 nt, Homo sapiens
  misc_RNA (1)...(19): siRNA sense strand
ggcuaaagagcaagacaaa

SEQ ID NO: 677705 - RNA, 19 nt, Homo sapiens
  misc_RNA (1)...(19): siRNA sense strand
caagacaaagaaucagaga

SEQ ID NO: 677706 - RNA, 19 nt, Homo sapiens
  misc_RNA (1)...(19): siRNA sense strand
gaaggcgcuuauucaggau

SEQ ID NO: 677707 - RNA, 19 nt, Homo sapiens
  misc_RNA (1)...(19): siRNA sense strand
cuagucacuucuucacgaa

SEQ ID NO: 677708 - RNA, 19 nt, Homo sapiens
  misc_RNA (1)...(19): siRNA sense strand
aagcggcucuuuccauuuu

SEQ ID NO: 677709 - RNA, 19 nt, Homo sapiens
  misc_RNA (1)...(19): siRNA sense strand
agagcaagacaaagaauca

SEQ ID NO: 677710 - RNA, 19 nt, Homo sapiens
  misc_RNA (1)...(19): siRNA sense strand
gaagaauuuaaguccaugu

SEQ ID NO: 677711 - RNA, 19 nt, Homo sapiens
  misc_RNA (1)...(19): siRNA sense strand
ggccggaagcuuaucacaa

SEQ ID NO: 677712 - RNA, 19 nt, Homo sapiens
  misc_RNA (1)...(19): siRNA sense strand
ggaggugaaggcgcuuauu

SEQ ID NO: 677713 - RNA, 19 nt, Homo sapiens
  misc_RNA (1)...(19): siRNA sense strand
ugauuguucaggacccuua

SEQ ID NO: 677714 - RNA, 19 nt, Homo sapiens
  misc_RNA (1)...(19): siRNA sense strand
ugcagucucuagucacuuc

SEQ ID NO: 677715 - RNA, 19 nt, Homo sapiens
  misc_RNA (1)...(19): siRNA sense strand
caugcagucucuagucacu

SEQ ID NO: 677716 - RNA, 19 nt, Homo sapiens
  misc_RNA (1)...(19): siRNA sense strand
guccacguccggaucugua

SEQ ID NO: 677717 - RNA, 19 nt, Homo sapiens
  misc_RNA (1)...(19): siRNA sense strand
ccaagagauugucaaauuu

SEQ ID NO: 677718 - RNA, 19 nt, Homo sapiens
  misc_RNA (1)...(19): siRNA sense strand
gccggaagcuuaucacaaa

SEQ ID NO: 677719 - RNA, 19 nt, Homo sapiens
  misc_RNA (1)...(19): siRNA sense strand
ggacaagcuucucaucuuc

SEQ ID NO: 677720 - RNA, 19 nt, Homo sapiens
  misc_RNA (1)...(19): siRNA sense strand
gcaguuggcuaaagagcaa

SEQ ID NO: 677721 - RNA, 19 nt, Homo sapiens
  misc_RNA (1)...(19): siRNA sense strand
accaagagauugucaaauu

SEQ ID NO: 677722 - RNA, 19 nt, Homo sapiens
  misc_RNA (1)...(19): siRNA sense strand
cuaaagagcaagacaaaga

SEQ ID NO: 677723 - RNA, 19 nt, Homo sapiens
  misc_RNA (1)...(19): siRNA sense strand
ggauauccgugauuguuca

SEQ ID NO: 677724 - RNA, 19 nt, Homo sapiens
  misc_RNA (1)...(19): siRNA sense strand
acaguugcgucacagaaua

SEQ ID NO: 677725 - RNA, 19 nt, Homo sapiens
  misc_RNA (1)...(19): siRNA sense strand
gcgcuacgccuguuucuug

SEQ ID NO: 677726 - RNA, 19 nt, Homo sapiens
  misc_RNA (1)...(19): siRNA sense strand
caagagauugucaaauuug

SEQ ID NO: 677727 - RNA, 19 nt, Homo sapiens
  misc_RNA (1)...(19): siRNA sense strand
ggaaguggagaaucacaaa

SEQ ID NO: 677728 - RNA, 19 nt, Homo sapiens
  misc_RNA (1)...(19): siRNA sense strand
ggaagcuuaucacaaaaua

SEQ ID NO: 677729 - RNA, 19 nt, Homo sapiens
  misc_RNA (1)...(19): siRNA sense strand
cggacaagcuucucaucuu

SEQ ID NO: 677730 - RNA, 19 nt, Homo sapiens
  misc_RNA (1)...(19): siRNA sense strand
gcuacgguccucuauauug

SEQ ID NO: 677731 - RNA, 19 nt, Homo sapiens
  misc_RNA (1)...(19): siRNA sense strand
gguccucuauauugugaaa

SEQ ID NO: 677732 - RNA, 19 nt, Homo sapiens
  misc_RNA (1)...(19): siRNA sense strand
uaaagagcaagacaaagaa

SEQ ID NO: 677733 - RNA, 19 nt, Homo sapiens
  misc_RNA (1)...(19): siRNA sense strand
uaaccaagagauugucaaa

SEQ ID NO: 677734 - RNA, 19 nt, Homo sapiens
  misc_RNA (1)...(19): siRNA sense strand
cuacgguccucuauauugu

SEQ ID NO: 677735 - RNA, 19 nt, Homo sapiens
  misc_RNA (1)...(19): siRNA sense strand
uugcuacgguccucuauau

SEQ ID NO: 677736 - RNA, 19 nt, Homo sapiens
  misc_RNA (1)...(19): siRNA sense strand
gcucuuacugaacugaaua

SEQ ID NO: 677737 - RNA, 19 nt, Homo sapiens
  misc_RNA (1)...(19): siRNA sense strand
gcccagacauccaguacca

SEQ ID NO: 677738 - RNA, 19 nt, Homo sapiens
  misc_RNA (1)...(19): siRNA sense strand
gaggugaaggcgcuuauuc

SEQ ID NO: 677739 - RNA, 19 nt, Homo sapiens
  misc_RNA (1)...(19): siRNA sense strand
cuacgccuguuucuugcua

SEQ ID NO: 677740 - RNA, 19 nt, Homo sapiens
  misc_RNA (1)...(19): siRNA sense strand
gccaugcagucucuaguca

SEQ ID NO: 677741 - RNA, 19 nt, Homo sapiens
  misc_RNA (1)...(19): siRNA sense strand
uggagcaguuggcuaaaga

SEQ ID NO: 677742 - RNA, 19 nt, Homo sapiens
  misc_RNA (1)...(19): siRNA sense strand
caggauauccgugauuguu

SEQ ID NO: 677743 - RNA, 19 nt, Homo sapiens
  misc_RNA (1)...(19): siRNA sense strand
ggcuaaagagcaagacaaa

SEQ ID NO: 677744 - RNA, 19 nt, Homo sapiens
  misc_RNA (1)...(19): siRNA sense strand
caagacaaagaaucagaga

SEQ ID NO: 677745 - RNA, 19 nt, Homo sapiens
  misc_RNA (1)...(19): siRNA sense strand
gaaggcgcuuauucaggau

SEQ ID NO: 677746 - RNA, 19 nt, Homo sapiens
  misc_RNA (1)...(19): siRNA sense strand
cuagucacuucuucacgaa

SEQ ID NO: 677747 - RNA, 19 nt, Homo sapiens
  misc_RNA (1)...(19): siRNA sense strand
aagcggcucuuuccauuuu

SEQ ID NO: 677748 - RNA, 19 nt, Homo sapiens
  misc_RNA (1)...(19): siRNA sense strand
agagcaagacaaagaauca

SEQ ID NO: 677749 - RNA, 19 nt, Homo sapiens
  misc_RNA (1)...(19): siRNA sense strand
gaagaauuuaaguccaugu

SEQ ID NO: 677750 - RNA, 19 nt, Homo sapiens
  misc_RNA (1)...(19): siRNA sense strand
ggccggaagcuuaucacaa

SEQ ID NO: 677751 - RNA, 19 nt, Homo sapiens
  misc_RNA (1)...(19): siRNA sense strand
ggaggugaaggcgcuuauu

SEQ ID NO: 677752 - RNA, 19 nt, Homo sapiens
  misc_RNA (1)...(19): siRNA sense strand
ugauuguucaggacccuua

SEQ ID NO: 677753 - RNA, 19 nt, Homo sapiens
  misc_RNA (1)...(19): siRNA sense strand
ugcagucucuagucacuuc

SEQ ID NO: 677754 - RNA, 19 nt, Homo sapiens
  misc_RNA (1)...(19): siRNA sense strand
caugcagucucuagucacu

SEQ ID NO: 677755 - RNA, 19 nt, Homo sapiens
  misc_RNA (1)...(19): siRNA sense strand
guccacguccggaucugua

SEQ ID NO: 677756 - RNA, 19 nt, Homo sapiens
  misc_RNA (1)...(19): siRNA sense strand
ccaagagauugucaaauuu

SEQ ID NO: 677757 - RNA, 19 nt, Homo sapiens
  misc_RNA (1)...(19): siRNA sense strand
gccggaagcuuaucacaaa

SEQ ID NO: 677758 - RNA, 19 nt, Homo sapiens
  misc_RNA (1)...(19): siRNA sense strand
ggacaagcuucucaucuuc

SEQ ID NO: 677759 - RNA, 19 nt, Homo sapiens
  misc_RNA (1)...(19): siRNA sense strand
gcaguuggcuaaagagcaa

SEQ ID NO: 677760 - RNA, 19 nt, Homo sapiens
  misc_RNA (1)...(19): siRNA sense strand
accaagagauugucaaauu

SEQ ID NO: 677761 - RNA, 19 nt, Homo sapiens
  misc_RNA (1)...(19): siRNA sense strand
cuaaagagcaagacaaaga

SEQ ID NO: 677762 - RNA, 19 nt, Homo sapiens
  misc_RNA (1)...(19): siRNA sense strand
ggauauccgugauuguuca

SEQ ID NO: 677763 - RNA, 19 nt, Homo sapiens
  misc_RNA (1)...(19): siRNA sense strand
acaguugcgucacagaaua

SEQ ID NO: 677764 - RNA, 19 nt, Homo sapiens
  misc_RNA (1)...(19): siRNA sense strand
gcgcuacgccuguuucuug

SEQ ID NO: 677765 - RNA, 19 nt, Homo sapiens
  misc_RNA (1)...(19): siRNA sense strand
caagagauugucaaauuug

SEQ ID NO: 677766 - RNA, 19 nt, Homo sapiens
  misc_RNA (1)...(19): siRNA sense strand
ggaaguggagaaucacaaa

SEQ ID NO: 677767 - RNA, 19 nt, Homo sapiens
  misc_RNA (1)...(19): siRNA sense strand
ggaagcuuaucacaaaaua

SEQ ID NO: 677768 - RNA, 19 nt, Homo sapiens
  misc_RNA (1)...(19): siRNA sense strand
cggacaagcuucucaucuu

SEQ ID NO: 677769 - RNA, 19 nt, Homo sapiens
  misc_RNA (1)...(19): siRNA sense strand
gcuacgguccucuauauug

SEQ ID NO: 677770 - RNA, 19 nt, Homo sapiens
  misc_RNA (1)...(19): siRNA sense strand
gguccucuauauugugaaa

SEQ ID NO: 677771 - RNA, 19 nt, Homo sapiens
  misc_RNA (1)...(19): siRNA sense strand
uaaagagcaagacaaagaa

SEQ ID NO: 677772 - RNA, 19 nt, Homo sapiens
  misc_RNA (1)...(19): siRNA sense strand
uaaccaagagauugucaaa

SEQ ID NO: 677773 - RNA, 19 nt, Homo sapiens
  misc_RNA (1)...(19): siRNA sense strand
cuacgguccucuauauugu

SEQ ID NO: 677774 - RNA, 19 nt, Homo sapiens
  misc_RNA (1)...(19): siRNA sense strand
uugcuacgguccucuauau

SEQ ID NO: 677775 - RNA, 19 nt, Homo sapiens
  misc_RNA (1)...(19): siRNA sense strand
gcucuuacugaacugaaua

SEQ ID NO: 677776 - RNA, 19 nt, Homo sapiens
  misc_RNA (1)...(19): siRNA sense strand
gcccagacauccaguacca

SEQ ID NO: 677777 - RNA, 19 nt, Homo sapiens
  misc_RNA (1)...(19): siRNA sense strand
gaggugaaggcgcuuauuc

SEQ ID NO: 677778 - RNA, 19 nt, Homo sapiens
  misc_RNA (1)...(19): siRNA sense strand
cuacgccuguuucuugcua

SEQ ID NO: 677779 - RNA, 19 nt, Homo sapiens
  misc_RNA (1)...(19): siRNA sense strand
gccaugcagucucuaguca

SEQ ID NO: 677780 - RNA, 19 nt, Homo sapiens
  misc_RNA (1)...(19): siRNA sense strand
uggagcaguuggcuaaaga

SEQ ID NO: 677781 - RNA, 19 nt, Homo sapiens
  misc_RNA (1)...(19): siRNA sense strand
caggauauccgugauuguu

SEQ ID NO: 677782 - RNA, 19 nt, Homo sapiens
  misc_RNA (1)...(19): siRNA sense strand
ggcuaaagagcaagacaaa

SEQ ID NO: 677783 - RNA, 19 nt, Homo sapiens
  misc_RNA (1)...(19): siRNA sense strand
caagacaaagaaucagaga

SEQ ID NO: 677784 - RNA, 19 nt, Homo sapiens
  misc_RNA (1)...(19): siRNA sense strand
gaaggcgcuuauucaggau

SEQ ID NO: 677785 - RNA, 19 nt, Homo sapiens
  misc_RNA (1)...(19): siRNA sense strand
cuagucacuucuucacgaa

SEQ ID NO: 677786 - RNA, 19 nt, Homo sapiens
  misc_RNA (1)...(19): siRNA sense strand
aagcggcucuuuccauuuu

SEQ ID NO: 677787 - RNA, 19 nt, Homo sapiens
  misc_RNA (1)...(19): siRNA sense strand
agagcaagacaaagaauca

SEQ ID NO: 677788 - RNA, 19 nt, Homo sapiens
  misc_RNA (1)...(19): siRNA sense strand
gaagaauuuaaguccaugu

SEQ ID NO: 677789 - RNA, 19 nt, Homo sapiens
  misc_RNA (1)...(19): siRNA sense strand
ggccggaagcuuaucacaa

SEQ ID NO: 677790 - RNA, 19 nt, Homo sapiens
  misc_RNA (1)...(19): siRNA sense strand
ggaggugaaggcgcuuauu

SEQ ID NO: 677791 - RNA, 19 nt, Homo sapiens
  misc_RNA (1)...(19): siRNA sense strand
ugauuguucaggacccuua

SEQ ID NO: 677792 - RNA, 19 nt, Homo sapiens
  misc_RNA (1)...(19): siRNA sense strand
ugcagucucuagucacuuc

SEQ ID NO: 677793 - RNA, 19 nt, Homo sapiens
  misc_RNA (1)...(19): siRNA sense strand
caugcagucucuagucacu

SEQ ID NO: 677794 - RNA, 19 nt, Homo sapiens
  misc_RNA (1)...(19): siRNA sense strand
guccacguccggaucugua

SEQ ID NO: 677795 - RNA, 19 nt, Homo sapiens
  misc_RNA (1)...(19): siRNA sense strand
ccaagagauugucaaauuu

SEQ ID NO: 677796 - RNA, 19 nt, Homo sapiens
  misc_RNA (1)...(19): siRNA sense strand
gccggaagcuuaucacaaa

SEQ ID NO: 677797 - RNA, 19 nt, Homo sapiens
  misc_RNA (1)...(19): siRNA sense strand
ggacaagcuucucaucuuc

SEQ ID NO: 677798 - RNA, 19 nt, Homo sapiens
  misc_RNA (1)...(19): siRNA sense strand
gcaguuggcuaaagagcaa

SEQ ID NO: 677799 - RNA, 19 nt, Homo sapiens
  misc_RNA (1)...(19): siRNA sense strand
accaagagauugucaaauu

SEQ ID NO: 677800 - RNA, 19 nt, Homo sapiens
  misc_RNA (1)...(19): siRNA sense strand
cuaaagagcaagacaaaga

SEQ ID NO: 677801 - RNA, 19 nt, Homo sapiens
  misc_RNA (1)...(19): siRNA sense strand
ggauauccgugauuguuca

SEQ ID NO: 677802 - RNA, 19 nt, Homo sapiens
  misc_RNA (1)...(19): siRNA sense strand
acaguugcgucacagaaua

SEQ ID NO: 677803 - RNA, 19 nt, Homo sapiens
  misc_RNA (1)...(19): siRNA sense strand
gcgcuacgccuguuucuug

SEQ ID NO: 677804 - RNA, 19 nt, Homo sapiens
  misc_RNA (1)...(19): siRNA sense strand
caagagauugucaaauuug

SEQ ID NO: 677805 - RNA, 19 nt, Homo sapiens
  misc_RNA (1)...(19): siRNA sense strand
ggaaguggagaaucacaaa

SEQ ID NO: 677806 - RNA, 19 nt, Homo sapiens
  misc_RNA (1)...(19): siRNA sense strand
ggaagcuuaucacaaaaua

SEQ ID NO: 677807 - RNA, 19 nt, Homo sapiens
  misc_RNA (1)...(19): siRNA sense strand
cggacaagcuucucaucuu

SEQ ID NO: 677808 - RNA, 19 nt, Homo sapiens
  misc_RNA (1)...(19): siRNA sense strand
gcuacgguccucuauauug

SEQ ID NO: 677809 - RNA, 19 nt, Homo sapiens
  misc_RNA (1)...(19): siRNA sense strand
gguccucuauauugugaaa

SEQ ID NO: 677810 - RNA, 19 nt, Homo sapiens
  misc_RNA (1)...(19): siRNA sense strand
uaaagagcaagacaaagaa

SEQ ID NO: 677811 - RNA, 19 nt, Homo sapiens
  misc_RNA (1)...(19): siRNA sense strand
uaaccaagagauugucaaa

SEQ ID NO: 677812 - RNA, 19 nt, Homo sapiens
  misc_RNA (1)...(19): siRNA sense strand
cuacgguccucuauauugu

SEQ ID NO: 677813 - RNA, 19 nt, Homo sapiens
  misc_RNA (1)...(19): siRNA sense strand
uugcuacgguccucuauau

SEQ ID NO: 677814 - RNA, 19 nt, Homo sapiens
  misc_RNA (1)...(19): siRNA sense strand
gcucuuacugaacugaaua

SEQ ID NO: 677815 - RNA, 19 nt, Homo sapiens
  misc_RNA (1)...(19): siRNA sense strand
gcccagacauccaguacca

SEQ ID NO: 677816 - RNA, 19 nt, Homo sapiens
  misc_RNA (1)...(19): siRNA sense strand
gaggugaaggcgcuuauuc

SEQ ID NO: 677817 - RNA, 19 nt, Homo sapiens
  misc_RNA (1)...(19): siRNA sense strand
cuacgccuguuucuugcua

SEQ ID NO: 677818 - RNA, 19 nt, Homo sapiens
  misc_RNA (1)...(19): siRNA sense strand
gccaugcagucucuaguca

SEQ ID NO: 677819 - RNA, 19 nt, Homo sapiens
  misc_RNA (1)...(19): siRNA sense strand
uggagcaguuggcuaaaga

SEQ ID NO: 677820 - RNA, 19 nt, Homo sapiens
  misc_RNA (1)...(19): siRNA sense strand
caggauauccgugauuguu

SEQ ID NO: 677821 - RNA, 19 nt, Homo sapiens
  misc_RNA (1)...(19): siRNA sense strand
ggcuaaagagcaagacaaa

SEQ ID NO: 677822 - RNA, 19 nt, Homo sapiens
  misc_RNA (1)...(19): siRNA sense strand
caagacaaagaaucagaga

SEQ ID NO: 677823 - RNA, 19 nt, Homo sapiens
  misc_RNA (1)...(19): siRNA sense strand
gaaggcgcuuauucaggau

SEQ ID NO: 677824 - RNA, 19 nt, Homo sapiens
  misc_RNA (1)...(19): siRNA sense strand
cuagucacuucuucacgaa

SEQ ID NO: 677825 - RNA, 19 nt, Homo sapiens
  misc_RNA (1)...(19): siRNA sense strand
aagcggcucuuuccauuuu

SEQ ID NO: 677826 - RNA, 19 nt, Homo sapiens
  misc_RNA (1)...(19): siRNA sense strand
agagcaagacaaagaauca

SEQ ID NO: 677827 - RNA, 19 nt, Homo sapiens
  misc_RNA (1)...(19): siRNA sense strand
gaagaauuuaaguccaugu

SEQ ID NO: 677828 - RNA, 19 nt, Homo sapiens
  misc_RNA (1)...(19): siRNA sense strand
ggccggaagcuuaucacaa

SEQ ID NO: 677829 - RNA, 19 nt, Homo sapiens
  misc_RNA (1)...(19): siRNA sense strand
ggaggugaaggcgcuuauu

SEQ ID NO: 677830 - RNA, 19 nt, Homo sapiens
  misc_RNA (1)...(19): siRNA sense strand
ugauuguucaggacccuua

SEQ ID NO: 677831 - RNA, 19 nt, Homo sapiens
  misc_RNA (1)...(19): siRNA sense strand
ugcagucucuagucacuuc

SEQ ID NO: 677832 - RNA, 19 nt, Homo sapiens
  misc_RNA (1)...(19): siRNA sense strand
caugcagucucuagucacu

SEQ ID NO: 677833 - RNA, 19 nt, Homo sapiens
  misc_RNA (1)...(19): siRNA sense strand
guccacguccggaucugua

SEQ ID NO: 677834 - RNA, 19 nt, Homo sapiens
  misc_RNA (1)...(19): siRNA sense strand
caaagcagaugccauuguc

SEQ ID NO: 677835 - RNA, 19 nt, Homo sapiens
  misc_RNA (1)...(19): siRNA sense strand
cgacuacgccgucuucaug

SEQ ID NO: 677836 - RNA, 19 nt, Homo sapiens
  misc_RNA (1)...(19): siRNA sense strand
acaccuacaugcccaauca

SEQ ID NO: 677837 - RNA, 19 nt, Homo sapiens
  misc_RNA (1)...(19): siRNA sense strand
acauggagcgcuucaagua

SEQ ID NO: 677838 - RNA, 19 nt, Homo sapiens
  misc_RNA (1)...(19): siRNA sense strand
guaagggcaucggcuacaa

SEQ ID NO: 677839 - RNA, 19 nt, Homo sapiens
  misc_RNA (1)...(19): siRNA sense strand
ggagugggguuaccuguug

SEQ ID NO: 677840 - RNA, 19 nt, Homo sapiens
  misc_RNA (1)...(19): siRNA sense strand
agacaggccagaucgcuaa

SEQ ID NO: 677841 - RNA, 19 nt, Homo sapiens
  misc_RNA (1)...(19): siRNA sense strand
gagcaaggcaacccugaca

SEQ ID NO: 677842 - RNA, 19 nt, Homo sapiens
  misc_RNA (1)...(19): siRNA sense strand
ucaccgugccgcuguguaa

SEQ ID NO: 677843 - RNA, 19 nt, Homo sapiens
  misc_RNA (1)...(19): siRNA sense strand
gggcaucggcuacaacuac

SEQ ID NO: 677844 - RNA, 19 nt, Homo sapiens
  misc_RNA (1)...(19): siRNA sense strand
ggucaucuaccucuucauc

SEQ ID NO: 677845 - RNA, 19 nt, Homo sapiens
  misc_RNA (1)...(19): siRNA sense strand
cuacaugcccaaucaguuc

SEQ ID NO: 677846 - RNA, 19 nt, Homo sapiens
  misc_RNA (1)...(19): siRNA sense strand
ucuugucgcucacaugguu

SEQ ID NO: 677847 - RNA, 19 nt, Homo sapiens
  misc_RNA (1)...(19): siRNA sense strand
ccaaagcagaugccauugu

SEQ ID NO: 677848 - RNA, 19 nt, Homo sapiens
  misc_RNA (1)...(19): siRNA sense strand
gccuagaggacuacaagaa

SEQ ID NO: 677849 - RNA, 19 nt, Homo sapiens
  misc_RNA (1)...(19): siRNA sense strand
ccaucugccuagaggacua

SEQ ID NO: 677850 - RNA, 19 nt, Homo sapiens
  misc_RNA (1)...(19): siRNA sense strand
gcucggucaucaagcaaca

SEQ ID NO: 677851 - RNA, 19 nt, Homo sapiens
  misc_RNA (1)...(19): siRNA sense strand
cgacauggagcgcuucaag

SEQ ID NO: 677852 - RNA, 19 nt, Homo sapiens
  misc_RNA (1)...(19): siRNA sense strand
cgcccgaucucaaguucuu

SEQ ID NO: 677853 - RNA, 19 nt, Homo sapiens
  misc_RNA (1)...(19): siRNA sense strand
ccaccuuccuuaucgacau

SEQ ID NO: 677854 - RNA, 19 nt, Homo sapiens
  misc_RNA (1)...(19): siRNA sense strand
cuacaacuacaccuacaug

SEQ ID NO: 677855 - RNA, 19 nt, Homo sapiens
  misc_RNA (1)...(19): siRNA sense strand
gguuaccuguuggaaguga

SEQ ID NO: 677856 - RNA, 19 nt, Homo sapiens
  misc_RNA (1)...(19): siRNA sense strand
gcaccguggucuucuugcu

SEQ ID NO: 677857 - RNA, 19 nt, Homo sapiens
  misc_RNA (1)...(19): siRNA sense strand
ggcaucggcuacaacuaca

SEQ ID NO: 677858 - RNA, 19 nt, Homo sapiens
  misc_RNA (1)...(19): siRNA sense strand
cggcgagcuccgugucuua

SEQ ID NO: 677859 - RNA, 19 nt, Homo sapiens
  misc_RNA (1)...(19): siRNA sense strand
gcauguacacgcccaucug

SEQ ID NO: 677860 - RNA, 19 nt, Homo sapiens
  misc_RNA (1)...(19): siRNA sense strand
guacuucaugugccuagug

SEQ ID NO: 677861 - RNA, 19 nt, Homo sapiens
  misc_RNA (1)...(19): siRNA sense strand
caggccagaucgcuaacug

SEQ ID NO: 677862 - RNA, 19 nt, Homo sapiens
  misc_RNA (1)...(19): siRNA sense strand
cuacaaccgcgucaagaca

SEQ ID NO: 677863 - RNA, 19 nt, Homo sapiens
  misc_RNA (1)...(19): siRNA sense strand
gccauugucccaggucuga

SEQ ID NO: 677864 - RNA, 19 nt, Homo sapiens
  misc_RNA (1)...(19): siRNA sense strand
gggguuaccuguuggaagu

SEQ ID NO: 677865 - RNA, 19 nt, Homo sapiens
  misc_RNA (1)...(19): siRNA sense strand
cuacaaccgcaccgaccua

SEQ ID NO: 677866 - RNA, 19 nt, Homo sapiens
  misc_RNA (1)...(19): siRNA sense strand
ccaccaagacgcacaagcu

SEQ ID NO: 677867 - RNA, 19 nt, Homo sapiens
  misc_RNA (1)...(19): siRNA sense strand
ucgccugccucuucuacga

SEQ ID NO: 677868 - RNA, 19 nt, Homo sapiens
  misc_RNA (1)...(19): siRNA sense strand
gaaguaagaugguuucaaa

SEQ ID NO: 677869 - RNA, 19 nt, Homo sapiens
  misc_RNA (1)...(19): siRNA sense strand
gcaaguagcugcuucacua

SEQ ID NO: 677870 - RNA, 19 nt, Homo sapiens
  misc_RNA (1)...(19): siRNA sense strand
ggacugaauuugccaauau

SEQ ID NO: 677871 - RNA, 19 nt, Homo sapiens
  misc_RNA (1)...(19): siRNA sense strand
ggacuugguucugauaaua

SEQ ID NO: 677872 - RNA, 19 nt, Homo sapiens
  misc_RNA (1)...(19): siRNA sense strand
agaauggccuugucucuua

SEQ ID NO: 677873 - RNA, 19 nt, Homo sapiens
  misc_RNA (1)...(19): siRNA sense strand
gcaaugggauacuaagcua

SEQ ID NO: 677874 - RNA, 19 nt, Homo sapiens
  misc_RNA (1)...(19): siRNA sense strand
gaucugagguauggaagua

SEQ ID NO: 677875 - RNA, 19 nt, Homo sapiens
  misc_RNA (1)...(19): siRNA sense strand
gcccagaacuuguauuuag

SEQ ID NO: 677876 - RNA, 19 nt, Homo sapiens
  misc_RNA (1)...(19): siRNA sense strand
ggacgaaggugucuuuggu

SEQ ID NO: 677877 - RNA, 19 nt, Homo sapiens
  misc_RNA (1)...(19): siRNA sense strand
guaauugccuuggcuugua

SEQ ID NO: 677878 - RNA, 19 nt, Homo sapiens
  misc_RNA (1)...(19): siRNA sense strand
gcaauuugguggucagaga

SEQ ID NO: 677879 - RNA, 19 nt, Homo sapiens
  misc_RNA (1)...(19): siRNA sense strand
ugacaacgcgccuguauuu

SEQ ID NO: 677880 - RNA, 19 nt, Homo sapiens
  misc_RNA (1)...(19): siRNA sense strand
gcacaagucaccaucauug

SEQ ID NO: 677881 - RNA, 19 nt, Homo sapiens
  misc_RNA (1)...(19): siRNA sense strand
ggacaccaaugacaacuca

SEQ ID NO: 677882 - RNA, 19 nt, Homo sapiens
  misc_RNA (1)...(19): siRNA sense strand
gcagaucagugaauaccaa

SEQ ID NO: 677883 - RNA, 19 nt, Homo sapiens
  misc_RNA (1)...(19): siRNA sense strand
gaaggugucuuugguuuag

SEQ ID NO: 677884 - RNA, 19 nt, Homo sapiens
  misc_RNA (1)...(19): siRNA sense strand
auacuaagcuacagccuaa

SEQ ID NO: 677885 - RNA, 19 nt, Homo sapiens
  misc_RNA (1)...(19): siRNA sense strand
gggagcagaucagugaaua

SEQ ID NO: 677886 - RNA, 19 nt, Homo sapiens
  misc_RNA (1)...(19): siRNA sense strand
augaagaccucgauucuaa

SEQ ID NO: 677887 - RNA, 19 nt, Homo sapiens
  misc_RNA (1)...(19): siRNA sense strand
gcacagugauugcucucuu

SEQ ID NO: 677888 - RNA, 19 nt, Homo sapiens
  misc_RNA (1)...(19): siRNA sense strand
gugcaacagugacuauaaa

SEQ ID NO: 677889 - RNA, 19 nt, Homo sapiens
  misc_RNA (1)...(19): siRNA sense strand
ucaguuacuuccagacuuu

SEQ ID NO: 677890 - RNA, 19 nt, Homo sapiens
  misc_RNA (1)...(19): siRNA sense strand
gaaguccaguacucccuaa

SEQ ID NO: 677891 - RNA, 19 nt, Homo sapiens
  misc_RNA (1)...(19): siRNA sense strand
ugacugacgugaacgauca

SEQ ID NO: 677892 - RNA, 19 nt, Homo sapiens
  misc_RNA (1)...(19): siRNA sense strand
caacagugacuauaaacuu

SEQ ID NO: 677893 - RNA, 19 nt, Homo sapiens
  misc_RNA (1)...(19): siRNA sense strand
aaacuuccuuugacuuuga

SEQ ID NO: 677894 - RNA, 19 nt, Homo sapiens
  misc_RNA (1)...(19): siRNA sense strand
gggaagcaaugggauacua

SEQ ID NO: 677895 - RNA, 19 nt, Homo sapiens
  misc_RNA (1)...(19): siRNA sense strand
cuuaugagcuguuggaugu

SEQ ID NO: 677896 - RNA, 19 nt, Homo sapiens
  misc_RNA (1)...(19): siRNA sense strand
ugacaacucaccucucuuu

SEQ ID NO: 677897 - RNA, 19 nt, Homo sapiens
  misc_RNA (1)...(19): siRNA sense strand
uaugagcuguuggauguua

SEQ ID NO: 677898 - RNA, 19 nt, Homo sapiens
  misc_RNA (1)...(19): siRNA sense strand
ccaaugggacuguguuauu

SEQ ID NO: 677899 - RNA, 19 nt, Homo sapiens
  misc_RNA (1)...(19): siRNA sense strand
gcuccguacugcucgcuua

SEQ ID NO: 677900 - RNA, 19 nt, Homo sapiens
  misc_RNA (1)...(19): siRNA sense strand
ccacuuagcacccgaagga

SEQ ID NO: 677901 - RNA, 19 nt, Homo sapiens
  misc_RNA (1)...(19): siRNA sense strand
ggaagcaaugggauacuaa

SEQ ID NO: 677902 - RNA, 19 nt, Homo sapiens
  misc_RNA (1)...(19): siRNA sense strand
ggaucacgcuaaugucaau

SEQ ID NO: 677903 - RNA, 19 nt, Homo sapiens
  misc_RNA (1)...(19): siRNA sense strand
gaaccaggagggcagcuuu

SEQ ID NO: 677904 - RNA, 19 nt, Homo sapiens
  misc_RNA (1)...(19): siRNA sense strand
gaagaccucgauucuaaug

SEQ ID NO: 677905 - RNA, 19 nt, Homo sapiens
  misc_RNA (1)...(19): siRNA sense strand
caaugggacuguguuauuc

SEQ ID NO: 677906 - RNA, 19 nt, Homo sapiens
  misc_RNA (1)...(19): siRNA sense strand
ggaggugacugacgugaac

SEQ ID NO: 677907 - RNA, 19 nt, Homo sapiens
  misc_RNA (1)...(19): siRNA sense strand
caccauagaugucacuaca

SEQ ID NO: 677908 - RNA, 19 nt, Homo sapiens
  misc_RNA (1)...(19): siRNA sense strand
ccacuuuccuccucuguca

SEQ ID NO: 677909 - RNA, 19 nt, Homo sapiens
  misc_RNA (1)...(19): siRNA sense strand
gaauggccuugucucuuau

SEQ ID NO: 677910 - RNA, 19 nt, Homo sapiens
  misc_RNA (1)...(19): siRNA sense strand
ugacaauacaccaaacuuu

SEQ ID NO: 677911 - RNA, 19 nt, Homo sapiens
  misc_RNA (1)...(19): siRNA sense strand
gcuuaguucuucccacuga

SEQ ID NO: 677912 - RNA, 19 nt, Homo sapiens
  misc_RNA (1)...(19): siRNA sense strand
gacaauacaccaaacuuuc

SEQ ID NO: 677913 - RNA, 19 nt, Homo sapiens
  misc_RNA (1)...(19): siRNA sense strand
ccauagaugucacuacagu

SEQ ID NO: 677914 - RNA, 19 nt, Homo sapiens
  misc_RNA (1)...(19): siRNA sense strand
gaagggccaucagccucua

SEQ ID NO: 677915 - RNA, 19 nt, Homo sapiens
  misc_RNA (1)...(19): siRNA sense strand
gaagugcaacagugacuau

SEQ ID NO: 677916 - RNA, 19 nt, Homo sapiens
  misc_RNA (1)...(19): siRNA sense strand
gaaaggggaucacgcuaau

SEQ ID NO: 677917 - RNA, 19 nt, Homo sapiens
  misc_RNA (1)...(19): siRNA sense strand
gaccucgauucuaauggua

SEQ ID NO: 677918 - RNA, 19 nt, Homo sapiens
  misc_RNA (1)...(19): siRNA sense strand
ccagaacuuguauuuagua

SEQ ID NO: 677919 - RNA, 19 nt, Homo sapiens
  misc_RNA (1)...(19): siRNA sense strand
acaauuauccgguuaucuu

SEQ ID NO: 677920 - RNA, 19 nt, Homo sapiens
  misc_RNA (1)...(19): siRNA sense strand
gaucacggccucagauagu

SEQ ID NO: 677921 - RNA, 19 nt, Homo sapiens
  misc_RNA (1)...(19): siRNA sense strand
caacgcgccuguauuugag

SEQ ID NO: 677922 - RNA, 19 nt, Homo sapiens
  misc_RNA (1)...(19): siRNA sense strand
gggcguagccguaggcaau

SEQ ID NO: 677923 - RNA, 19 nt, Homo sapiens
  misc_RNA (1)...(19): siRNA sense strand
gcuguuggauguuaucucu

SEQ ID NO: 677924 - RNA, 19 nt, Homo sapiens
  misc_RNA (1)...(19): siRNA sense strand
gaagaauggccuugucucu

SEQ ID NO: 677925 - RNA, 19 nt, Homo sapiens
  misc_RNA (1)...(19): siRNA sense strand
gaugaagaccucgauucua

SEQ ID NO: 677926 - RNA, 19 nt, Homo sapiens
  misc_RNA (1)...(19): siRNA sense strand
ugauugcucucuuuagugu

SEQ ID NO: 677927 - RNA, 19 nt, Homo sapiens
  misc_RNA (1)...(19): siRNA sense strand
cgaaggugucuuugguuua

SEQ ID NO: 677928 - RNA, 19 nt, Homo sapiens
  misc_RNA (1)...(19): siRNA sense strand
gagggacgaaggugucuuu

SEQ ID NO: 677929 - RNA, 19 nt, Homo sapiens
  misc_RNA (1)...(19): siRNA sense strand
guaagaugguuucaaaucc

SEQ ID NO: 677930 - RNA, 19 nt, Homo sapiens
  misc_RNA (1)...(19): siRNA sense strand
caaagcugccugcgucuug

SEQ ID NO: 677931 - RNA, 19 nt, Homo sapiens
  misc_RNA (1)...(19): siRNA sense strand
acgaaggugucuuugguuu

SEQ ID NO: 677932 - RNA, 19 nt, Homo sapiens
  misc_RNA (1)...(19): siRNA sense strand
cacagugauugcucucuuu

SEQ ID NO: 677933 - RNA, 19 nt, Homo sapiens
  misc_RNA (1)...(19): siRNA sense strand
caacucaccucucuuuccu

SEQ ID NO: 677934 - RNA, 19 nt, Homo sapiens
  misc_RNA (1)...(19): siRNA sense strand
guagauaggaaugacaauu

SEQ ID NO: 677935 - RNA, 19 nt, Homo sapiens
  misc_RNA (1)...(19): siRNA sense strand
acaacgcgccuguauuuga

SEQ ID NO: 677936 - RNA, 19 nt, Homo sapiens
  misc_RNA (1)...(19): siRNA sense strand
aaugacaauuauccgguua

SEQ ID NO: 677937 - RNA, 19 nt, Homo sapiens
  misc_RNA (1)...(19): siRNA sense strand
ugaaugacaauacaccaaa

SEQ ID NO: 677938 - RNA, 19 nt, Homo sapiens
  misc_RNA (1)...(19): siRNA sense strand
gcucuuggaggcauacauu

SEQ ID NO: 677939 - RNA, 19 nt, Homo sapiens
  misc_RNA (1)...(19): siRNA sense strand
gcgaauacccggaguuggu

SEQ ID NO: 677940 - RNA, 19 nt, Homo sapiens
  misc_RNA (1)...(19): siRNA sense strand
caugacaucagccaccaua

SEQ ID NO: 677941 - RNA, 19 nt, Homo sapiens
  misc_RNA (1)...(19): siRNA sense strand
cauggagacccaccacuuu

SEQ ID NO: 677942 - RNA, 19 nt, Homo sapiens
  misc_RNA (1)...(19): siRNA sense strand
aacagugacuauaaacuug

SEQ ID NO: 677943 - RNA, 19 nt, Homo sapiens
  misc_RNA (1)...(19): siRNA sense strand
acaccaaacuuuccucaac

SEQ ID NO: 677944 - RNA, 19 nt, Homo sapiens
  misc_RNA (1)...(19): siRNA sense strand
gaaugacaauacaccaaac

SEQ ID NO: 677945 - RNA, 19 nt, Homo sapiens
  misc_RNA (1)...(19): siRNA sense strand
ggaugaagaccucgauucu

SEQ ID NO: 677946 - RNA, 19 nt, Homo sapiens
  misc_RNA (1)...(19): siRNA sense strand
gcuuucacgugcacccuaa

SEQ ID NO: 677947 - RNA, 19 nt, Homo sapiens
  misc_RNA (1)...(19): siRNA sense strand
cggcuuccuuugacaacua

SEQ ID NO: 677948 - RNA, 19 nt, Homo sapiens
  misc_RNA (1)...(19): siRNA sense strand
uaauugccuuggcuuguau

SEQ ID NO: 677949 - RNA, 19 nt, Homo sapiens
  misc_RNA (1)...(19): siRNA sense strand
ggaaguaagaugguuucaa

SEQ ID NO: 677950 - RNA, 19 nt, Homo sapiens
  misc_RNA (1)...(19): siRNA sense strand
gggacuugguucugauaau

SEQ ID NO: 677951 - RNA, 19 nt, Homo sapiens
  misc_RNA (1)...(19): siRNA sense strand
gacaucagccaccauagau

SEQ ID NO: 677952 - RNA, 19 nt, Homo sapiens
  misc_RNA (1)...(19): siRNA sense strand
ugacaucagccaccauaga

SEQ ID NO: 677953 - RNA, 19 nt, Homo sapiens
  misc_RNA (1)...(19): siRNA sense strand
cgagggaagcaaugggaua

SEQ ID NO: 677954 - RNA, 19 nt, Homo sapiens
  misc_RNA (1)...(19): siRNA sense strand
ucaaauccuugcaugacau

SEQ ID NO: 677955 - RNA, 19 nt, Homo sapiens
  misc_RNA (1)...(19): siRNA sense strand
uguuggauguuaucucuga

SEQ ID NO: 677956 - RNA, 19 nt, Homo sapiens
  misc_RNA (1)...(19): siRNA sense strand
ggucauuuguggcaugucu

SEQ ID NO: 677957 - RNA, 19 nt, Homo sapiens
  misc_RNA (1)...(19): siRNA sense strand
uauuugagcgcuccguaua

SEQ ID NO: 677958 - RNA, 19 nt, Homo sapiens
  misc_RNA (1)...(19): siRNA sense strand
aaugacaacucaccucucu

SEQ ID NO: 677959 - RNA, 19 nt, Homo sapiens
  misc_RNA (1)...(19): siRNA sense strand
ggaaaggggaucacgcuaa

SEQ ID NO: 677960 - RNA, 19 nt, Homo sapiens
  misc_RNA (1)...(19): siRNA sense strand
cgaaggacaaucacugugu

SEQ ID NO: 677961 - RNA, 19 nt, Homo sapiens
  misc_RNA (1)...(19): siRNA sense strand
cgggacagcucgaguacuc

SEQ ID NO: 677962 - RNA, 19 nt, Homo sapiens
  misc_RNA (1)...(19): siRNA sense strand
ucacuagguccgccugaaa

SEQ ID NO: 677963 - RNA, 19 nt, Homo sapiens
  misc_RNA (1)...(19): siRNA sense strand
gacuugguucugauaauaa

SEQ ID NO: 677964 - RNA, 19 nt, Homo sapiens
  misc_RNA (1)...(19): siRNA sense strand
guauggaaguaagaugguu

SEQ ID NO: 677965 - RNA, 19 nt, Homo sapiens
  misc_RNA (1)...(19): siRNA sense strand
gaggaucugagguauggaa

SEQ ID NO: 677966 - RNA, 19 nt, Homo sapiens
  misc_RNA (1)...(19): siRNA sense strand
gaauaccaaguccugauca

SEQ ID NO: 677967 - RNA, 19 nt, Homo sapiens
  misc_RNA (1)...(19): siRNA sense strand
gaucagugaauaccaaguc

SEQ ID NO: 677968 - RNA, 19 nt, Homo sapiens
  misc_RNA (1)...(19): siRNA sense strand
gaaguaagaugguuucaaa

SEQ ID NO: 677969 - RNA, 19 nt, Homo sapiens
  misc_RNA (1)...(19): siRNA sense strand
gcaaguagcugcuucacua

SEQ ID NO: 677970 - RNA, 19 nt, Homo sapiens
  misc_RNA (1)...(19): siRNA sense strand
ggacugaauuugccaauau

SEQ ID NO: 677971 - RNA, 19 nt, Homo sapiens
  misc_RNA (1)...(19): siRNA sense strand
ggacuugguucugauaaua

SEQ ID NO: 677972 - RNA, 19 nt, Homo sapiens
  misc_RNA (1)...(19): siRNA sense strand
agaauggccuugucucuua

SEQ ID NO: 677973 - RNA, 19 nt, Homo sapiens
  misc_RNA (1)...(19): siRNA sense strand
gcaaugggauacuaagcua

SEQ ID NO: 677974 - RNA, 19 nt, Homo sapiens
  misc_RNA (1)...(19): siRNA sense strand
gaucugagguauggaagua

SEQ ID NO: 677975 - RNA, 19 nt, Homo sapiens
  misc_RNA (1)...(19): siRNA sense strand
gcccagaacuuguauuuag

SEQ ID NO: 677976 - RNA, 19 nt, Homo sapiens
  misc_RNA (1)...(19): siRNA sense strand
ggacgaaggugucuuuggu

SEQ ID NO: 677977 - RNA, 19 nt, Homo sapiens
  misc_RNA (1)...(19): siRNA sense strand
guaauugccuuggcuugua

SEQ ID NO: 677978 - RNA, 19 nt, Homo sapiens
  misc_RNA (1)...(19): siRNA sense strand
gcaauuugguggucagaga

SEQ ID NO: 677979 - RNA, 19 nt, Homo sapiens
  misc_RNA (1)...(19): siRNA sense strand
ugacaacgcgccuguauuu

SEQ ID NO: 677980 - RNA, 19 nt, Homo sapiens
  misc_RNA (1)...(19): siRNA sense strand
gcacaagucaccaucauug

SEQ ID NO: 677981 - RNA, 19 nt, Homo sapiens
  misc_RNA (1)...(19): siRNA sense strand
ggacaccaaugacaacuca

SEQ ID NO: 677982 - RNA, 19 nt, Homo sapiens
  misc_RNA (1)...(19): siRNA sense strand
gcagaucagugaauaccaa

SEQ ID NO: 677983 - RNA, 19 nt, Homo sapiens
  misc_RNA (1)...(19): siRNA sense strand
gaaggugucuuugguuuag

SEQ ID NO: 677984 - RNA, 19 nt, Homo sapiens
  misc_RNA (1)...(19): siRNA sense strand
auacuaagcuacagccuaa

SEQ ID NO: 677985 - RNA, 19 nt, Homo sapiens
  misc_RNA (1)...(19): siRNA sense strand
gggagcagaucagugaaua

SEQ ID NO: 677986 - RNA, 19 nt, Homo sapiens
  misc_RNA (1)...(19): siRNA sense strand
augaagaccucgauucuaa

SEQ ID NO: 677987 - RNA, 19 nt, Homo sapiens
  misc_RNA (1)...(19): siRNA sense strand
gcacagugauugcucucuu

SEQ ID NO: 677988 - RNA, 19 nt, Homo sapiens
  misc_RNA (1)...(19): siRNA sense strand
gugcaacagugacuauaaa

SEQ ID NO: 677989 - RNA, 19 nt, Homo sapiens
  misc_RNA (1)...(19): siRNA sense strand
ucaguuacuuccagacuuu

SEQ ID NO: 677990 - RNA, 19 nt, Homo sapiens
  misc_RNA (1)...(19): siRNA sense strand
gaaguccaguacucccuaa

SEQ ID NO: 677991 - RNA, 19 nt, Homo sapiens
  misc_RNA (1)...(19): siRNA sense strand
ugacugacgugaacgauca

SEQ ID NO: 677992 - RNA, 19 nt, Homo sapiens
  misc_RNA (1)...(19): siRNA sense strand
caacagugacuauaaacuu

SEQ ID NO: 677993 - RNA, 19 nt, Homo sapiens
  misc_RNA (1)...(19): siRNA sense strand
aaacuuccuuugacuuuga

SEQ ID NO: 677994 - RNA, 19 nt, Homo sapiens
  misc_RNA (1)...(19): siRNA sense strand
gggaagcaaugggauacua

SEQ ID NO: 677995 - RNA, 19 nt, Homo sapiens
  misc_RNA (1)...(19): siRNA sense strand
cuuaugagcuguuggaugu

SEQ ID NO: 677996 - RNA, 19 nt, Homo sapiens
  misc_RNA (1)...(19): siRNA sense strand
ugacaacucaccucucuuu

SEQ ID NO: 677997 - RNA, 19 nt, Homo sapiens
  misc_RNA (1)...(19): siRNA sense strand
uaugagcuguuggauguua

SEQ ID NO: 677998 - RNA, 19 nt, Homo sapiens
  misc_RNA (1)...(19): siRNA sense strand
ccaaugggacuguguuauu

SEQ ID NO: 677999 - RNA, 19 nt, Homo sapiens
  misc_RNA (1)...(19): siRNA sense strand
gcuccguacugcucgcuua

SEQ ID NO: 678000 - RNA, 19 nt, Homo sapiens
  misc_RNA (1)...(19): siRNA sense strand
ccacuuagcacccgaagga

SEQ ID NO: 678001 - RNA, 19 nt, Homo sapiens
  misc_RNA (1)...(19): siRNA sense strand
ggaagcaaugggauacuaa

SEQ ID NO: 678002 - RNA, 19 nt, Homo sapiens
  misc_RNA (1)...(19): siRNA sense strand
ggaucacgcuaaugucaau

SEQ ID NO: 678003 - RNA, 19 nt, Homo sapiens
  misc_RNA (1)...(19): siRNA sense strand
gaaccaggagggcagcuuu

SEQ ID NO: 678004 - RNA, 19 nt, Homo sapiens
  misc_RNA (1)...(19): siRNA sense strand
gaagaccucgauucuaaug

SEQ ID NO: 678005 - RNA, 19 nt, Homo sapiens
  misc_RNA (1)...(19): siRNA sense strand
caaugggacuguguuauuc

SEQ ID NO: 678006 - RNA, 19 nt, Homo sapiens
  misc_RNA (1)...(19): siRNA sense strand
ggaggugacugacgugaac

SEQ ID NO: 678007 - RNA, 19 nt, Homo sapiens
  misc_RNA (1)...(19): siRNA sense strand
caccauagaugucacuaca

SEQ ID NO: 678008 - RNA, 19 nt, Homo sapiens
  misc_RNA (1)...(19): siRNA sense strand
ccacuuuccuccucuguca

SEQ ID NO: 678009 - RNA, 19 nt, Homo sapiens
  misc_RNA (1)...(19): siRNA sense strand
gaauggccuugucucuuau

SEQ ID NO: 678010 - RNA, 19 nt, Homo sapiens
  misc_RNA (1)...(19): siRNA sense strand
ugacaauacaccaaacuuu

SEQ ID NO: 678011 - RNA, 19 nt, Homo sapiens
  misc_RNA (1)...(19): siRNA sense strand
gcuuaguucuucccacuga

SEQ ID NO: 678012 - RNA, 19 nt, Homo sapiens
  misc_RNA (1)...(19): siRNA sense strand
gacaauacaccaaacuuuc

SEQ ID NO: 678013 - RNA, 19 nt, Homo sapiens
  misc_RNA (1)...(19): siRNA sense strand
ccauagaugucacuacagu

SEQ ID NO: 678014 - RNA, 19 nt, Homo sapiens
  misc_RNA (1)...(19): siRNA sense strand
gaagggccaucagccucua

SEQ ID NO: 678015 - RNA, 19 nt, Homo sapiens
  misc_RNA (1)...(19): siRNA sense strand
gaagugcaacagugacuau

SEQ ID NO: 678016 - RNA, 19 nt, Homo sapiens
  misc_RNA (1)...(19): siRNA sense strand
gaaaggggaucacgcuaau

SEQ ID NO: 678017 - RNA, 19 nt, Homo sapiens
  misc_RNA (1)...(19): siRNA sense strand
gaccucgauucuaauggua

SEQ ID NO: 678018 - RNA, 19 nt, Homo sapiens
  misc_RNA (1)...(19): siRNA sense strand
ccagaacuuguauuuagua

SEQ ID NO: 678019 - RNA, 19 nt, Homo sapiens
  misc_RNA (1)...(19): siRNA sense strand
acaauuauccgguuaucuu

SEQ ID NO: 678020 - RNA, 19 nt, Homo sapiens
  misc_RNA (1)...(19): siRNA sense strand
gaucacggccucagauagu

SEQ ID NO: 678021 - RNA, 19 nt, Homo sapiens
  misc_RNA (1)...(19): siRNA sense strand
caacgcgccuguauuugag

SEQ ID NO: 678022 - RNA, 19 nt, Homo sapiens
  misc_RNA (1)...(19): siRNA sense strand
gggcguagccguaggcaau

SEQ ID NO: 678023 - RNA, 19 nt, Homo sapiens
  misc_RNA (1)...(19): siRNA sense strand
gcuguuggauguuaucucu

SEQ ID NO: 678024 - RNA, 19 nt, Homo sapiens
  misc_RNA (1)...(19): siRNA sense strand
gaagaauggccuugucucu

SEQ ID NO: 678025 - RNA, 19 nt, Homo sapiens
  misc_RNA (1)...(19): siRNA sense strand
gaugaagaccucgauucua

SEQ ID NO: 678026 - RNA, 19 nt, Homo sapiens
  misc_RNA (1)...(19): siRNA sense strand
ugauugcucucuuuagugu

SEQ ID NO: 678027 - RNA, 19 nt, Homo sapiens
  misc_RNA (1)...(19): siRNA sense strand
cgaaggugucuuugguuua

SEQ ID NO: 678028 - RNA, 19 nt, Homo sapiens
  misc_RNA (1)...(19): siRNA sense strand
gagggacgaaggugucuuu

SEQ ID NO: 678029 - RNA, 19 nt, Homo sapiens
  misc_RNA (1)...(19): siRNA sense strand
guaagaugguuucaaaucc

SEQ ID NO: 678030 - RNA, 19 nt, Homo sapiens
  misc_RNA (1)...(19): siRNA sense strand
caaagcugccugcgucuug

SEQ ID NO: 678031 - RNA, 19 nt, Homo sapiens
  misc_RNA (1)...(19): siRNA sense strand
acgaaggugucuuugguuu

SEQ ID NO: 678032 - RNA, 19 nt, Homo sapiens
  misc_RNA (1)...(19): siRNA sense strand
cacagugauugcucucuuu

SEQ ID NO: 678033 - RNA, 19 nt, Homo sapiens
  misc_RNA (1)...(19): siRNA sense strand
caacucaccucucuuuccu

SEQ ID NO: 678034 - RNA, 19 nt, Homo sapiens
  misc_RNA (1)...(19): siRNA sense strand
guagauaggaaugacaauu

SEQ ID NO: 678035 - RNA, 19 nt, Homo sapiens
  misc_RNA (1)...(19): siRNA sense strand
acaacgcgccuguauuuga

SEQ ID NO: 678036 - RNA, 19 nt, Homo sapiens
  misc_RNA (1)...(19): siRNA sense strand
aaugacaauuauccgguua

SEQ ID NO: 678037 - RNA, 19 nt, Homo sapiens
  misc_RNA (1)...(19): siRNA sense strand
ugaaugacaauacaccaaa

SEQ ID NO: 678038 - RNA, 19 nt, Homo sapiens
  misc_RNA (1)...(19): siRNA sense strand
gcucuuggaggcauacauu

SEQ ID NO: 678039 - RNA, 19 nt, Homo sapiens
  misc_RNA (1)...(19): siRNA sense strand
gcgaauacccggaguuggu

SEQ ID NO: 678040 - RNA, 19 nt, Homo sapiens
  misc_RNA (1)...(19): siRNA sense strand
caugacaucagccaccaua

SEQ ID NO: 678041 - RNA, 19 nt, Homo sapiens
  misc_RNA (1)...(19): siRNA sense strand
cauggagacccaccacuuu

SEQ ID NO: 678042 - RNA, 19 nt, Homo sapiens
  misc_RNA (1)...(19): siRNA sense strand
aacagugacuauaaacuug

SEQ ID NO: 678043 - RNA, 19 nt, Homo sapiens
  misc_RNA (1)...(19): siRNA sense strand
acaccaaacuuuccucaac

SEQ ID NO: 678044 - RNA, 19 nt, Homo sapiens
  misc_RNA (1)...(19): siRNA sense strand
gaaugacaauacaccaaac

SEQ ID NO: 678045 - RNA, 19 nt, Homo sapiens
  misc_RNA (1)...(19): siRNA sense strand
ggaugaagaccucgauucu

SEQ ID NO: 678046 - RNA, 19 nt, Homo sapiens
  misc_RNA (1)...(19): siRNA sense strand
gcuuucacgugcacccuaa

SEQ ID NO: 678047 - RNA, 19 nt, Homo sapiens
  misc_RNA (1)...(19): siRNA sense strand
cggcuuccuuugacaacua

SEQ ID NO: 678048 - RNA, 19 nt, Homo sapiens
  misc_RNA (1)...(19): siRNA sense strand
uaauugccuuggcuuguau

SEQ ID NO: 678049 - RNA, 19 nt, Homo sapiens
  misc_RNA (1)...(19): siRNA sense strand
ggaaguaagaugguuucaa

SEQ ID NO: 678050 - RNA, 19 nt, Homo sapiens
  misc_RNA (1)...(19): siRNA sense strand
gggacuugguucugauaau

SEQ ID NO: 678051 - RNA, 19 nt, Homo sapiens
  misc_RNA (1)...(19): siRNA sense strand
gacaucagccaccauagau

SEQ ID NO: 678052 - RNA, 19 nt, Homo sapiens
  misc_RNA (1)...(19): siRNA sense strand
ugacaucagccaccauaga

SEQ ID NO: 678053 - RNA, 19 nt, Homo sapiens
  misc_RNA (1)...(19): siRNA sense strand
cgagggaagcaaugggaua

SEQ ID NO: 678054 - RNA, 19 nt, Homo sapiens
  misc_RNA (1)...(19): siRNA sense strand
ucaaauccuugcaugacau

SEQ ID NO: 678055 - RNA, 19 nt, Homo sapiens
  misc_RNA (1)...(19): siRNA sense strand
uguuggauguuaucucuga

SEQ ID NO: 678056 - RNA, 19 nt, Homo sapiens
  misc_RNA (1)...(19): siRNA sense strand
ggucauuuguggcaugucu

SEQ ID NO: 678057 - RNA, 19 nt, Homo sapiens
  misc_RNA (1)...(19): siRNA sense strand
uauuugagcgcuccguaua

SEQ ID NO: 678058 - RNA, 19 nt, Homo sapiens
  misc_RNA (1)...(19): siRNA sense strand
aaugacaacucaccucucu

SEQ ID NO: 678059 - RNA, 19 nt, Homo sapiens
  misc_RNA (1)...(19): siRNA sense strand
ggaaaggggaucacgcuaa

SEQ ID NO: 678060 - RNA, 19 nt, Homo sapiens
  misc_RNA (1)...(19): siRNA sense strand
cgaaggacaaucacugugu

SEQ ID NO: 678061 - RNA, 19 nt, Homo sapiens
  misc_RNA (1)...(19): siRNA sense strand
cgggacagcucgaguacuc

SEQ ID NO: 678062 - RNA, 19 nt, Homo sapiens
  misc_RNA (1)...(19): siRNA sense strand
ucacuagguccgccugaaa

SEQ ID NO: 678063 - RNA, 19 nt, Homo sapiens
  misc_RNA (1)...(19): siRNA sense strand
gacuugguucugauaauaa

SEQ ID NO: 678064 - RNA, 19 nt, Homo sapiens
  misc_RNA (1)...(19): siRNA sense strand
guauggaaguaagaugguu

SEQ ID NO: 678065 - RNA, 19 nt, Homo sapiens
  misc_RNA (1)...(19): siRNA sense strand
gaggaucugagguauggaa

SEQ ID NO: 678066 - RNA, 19 nt, Homo sapiens
  misc_RNA (1)...(19): siRNA sense strand
gaauaccaaguccugauca

SEQ ID NO: 678067 - RNA, 19 nt, Homo sapiens
  misc_RNA (1)...(19): siRNA sense strand
gaucagugaauaccaaguc

SEQ ID NO: 678068 - RNA, 19 nt, Homo sapiens
  misc_RNA (1)...(19): siRNA sense strand
cgacaacucuccugccuuu

SEQ ID NO: 678069 - RNA, 19 nt, Homo sapiens
  misc_RNA (1)...(19): siRNA sense strand
caauauugaugccaggaua

SEQ ID NO: 678070 - RNA, 19 nt, Homo sapiens
  misc_RNA (1)...(19): siRNA sense strand
gaaccugauuauucucaaa

SEQ ID NO: 678071 - RNA, 19 nt, Homo sapiens
  misc_RNA (1)...(19): siRNA sense strand
ggagcgcgcuuucacauag

SEQ ID NO: 678072 - RNA, 19 nt, Homo sapiens
  misc_RNA (1)...(19): siRNA sense strand
ugagaucucugacaucaau

SEQ ID NO: 678073 - RNA, 19 nt, Homo sapiens
  misc_RNA (1)...(19): siRNA sense strand
acucugaaauuacccuuua

SEQ ID NO: 678074 - RNA, 19 nt, Homo sapiens
  misc_RNA (1)...(19): siRNA sense strand
ccacugagcagcacuguga

SEQ ID NO: 678075 - RNA, 19 nt, Homo sapiens
  misc_RNA (1)...(19): siRNA sense strand
ggacaucaacgacaacuca

SEQ ID NO: 678076 - RNA, 19 nt, Homo sapiens
  misc_RNA (1)...(19): siRNA sense strand
gagcucagguacuccuuga

SEQ ID NO: 678077 - RNA, 19 nt, Homo sapiens
  misc_RNA (1)...(19): siRNA sense strand
aaacaagccaacaacaaua

SEQ ID NO: 678078 - RNA, 19 nt, Homo sapiens
  misc_RNA (1)...(19): siRNA sense strand
ccaggaagaugggagauga

SEQ ID NO: 678079 - RNA, 19 nt, Homo sapiens
  misc_RNA (1)...(19): siRNA sense strand
ggagaacaguaaagugcuu

SEQ ID NO: 678080 - RNA, 19 nt, Homo sapiens
  misc_RNA (1)...(19): siRNA sense strand
caaacaagccaacaacaau

SEQ ID NO: 678081 - RNA, 19 nt, Homo sapiens
  misc_RNA (1)...(19): siRNA sense strand
cugcagaacuguacaaaca

SEQ ID NO: 678082 - RNA, 19 nt, Homo sapiens
  misc_RNA (1)...(19): siRNA sense strand
gcaaggugcugguggacau

SEQ ID NO: 678083 - RNA, 19 nt, Homo sapiens
  misc_RNA (1)...(19): siRNA sense strand
ggacauacucugaaauuac

SEQ ID NO: 678084 - RNA, 19 nt, Homo sapiens
  misc_RNA (1)...(19): siRNA sense strand
gcacauugguggugaagcu

SEQ ID NO: 678085 - RNA, 19 nt, Homo sapiens
  misc_RNA (1)...(19): siRNA sense strand
gcagaacuguacaaacaag

SEQ ID NO: 678086 - RNA, 19 nt, Homo sapiens
  misc_RNA (1)...(19): siRNA sense strand
ccuccuaugucuccauuaa

SEQ ID NO: 678087 - RNA, 19 nt, Homo sapiens
  misc_RNA (1)...(19): siRNA sense strand
gcugggaaccugauuauuc

SEQ ID NO: 678088 - RNA, 19 nt, Homo sapiens
  misc_RNA (1)...(19): siRNA sense strand
ucaccaaagucauagcuau

SEQ ID NO: 678089 - RNA, 19 nt, Homo sapiens
  misc_RNA (1)...(19): siRNA sense strand
guugagaucucugacauca

SEQ ID NO: 678090 - RNA, 19 nt, Homo sapiens
  misc_RNA (1)...(19): siRNA sense strand
ggacuccuauuccaucuac

SEQ ID NO: 678091 - RNA, 19 nt, Homo sapiens
  misc_RNA (1)...(19): siRNA sense strand
gaagaugggagaugagagu

SEQ ID NO: 678092 - RNA, 19 nt, Homo sapiens
  misc_RNA (1)...(19): siRNA sense strand
ccagguguguugcucugua

SEQ ID NO: 678093 - RNA, 19 nt, Homo sapiens
  misc_RNA (1)...(19): siRNA sense strand
ggaggcuucuguggaguaa

SEQ ID NO: 678094 - RNA, 19 nt, Homo sapiens
  misc_RNA (1)...(19): siRNA sense strand
cggacauacucugaaauua

SEQ ID NO: 678095 - RNA, 19 nt, Homo sapiens
  misc_RNA (1)...(19): siRNA sense strand
gagagcggguggcugucua

SEQ ID NO: 678096 - RNA, 19 nt, Homo sapiens
  misc_RNA (1)...(19): siRNA sense strand
ccguugagguggaaauauu

SEQ ID NO: 678097 - RNA, 19 nt, Homo sapiens
  misc_RNA (1)...(19): siRNA sense strand
ggacaucguggacgugaau

SEQ ID NO: 678098 - RNA, 19 nt, Homo sapiens
  misc_RNA (1)...(19): siRNA sense strand
gauaccgcauggccucaaa

SEQ ID NO: 678099 - RNA, 19 nt, Homo sapiens
  misc_RNA (1)...(19): siRNA sense strand
ccucggacauacucugaaa

SEQ ID NO: 678100 - RNA, 19 nt, Homo sapiens
  misc_RNA (1)...(19): siRNA sense strand
ccagucaccuccuaugucu

SEQ ID NO: 678101 - RNA, 19 nt, Homo sapiens
  misc_RNA (1)...(19): siRNA sense strand
ggagagccaucacuaucag

SEQ ID NO: 678102 - RNA, 19 nt, Homo sapiens
  misc_RNA (1)...(19): siRNA sense strand
guggaaauauuggacauca

SEQ ID NO: 678103 - RNA, 19 nt, Homo sapiens
  misc_RNA (1)...(19): siRNA sense strand
ucaccaagaccuacugcua

SEQ ID NO: 678104 - RNA, 19 nt, Homo sapiens
  misc_RNA (1)...(19): siRNA sense strand
gcacacaggagaaauuagg

SEQ ID NO: 678105 - RNA, 19 nt, Homo sapiens
  misc_RNA (1)...(19): siRNA sense strand
guggagcgcucuucgucaa

SEQ ID NO: 678106 - RNA, 19 nt, Homo sapiens
  misc_RNA (1)...(19): siRNA sense strand
ggaaauauuggacaucaac

SEQ ID NO: 678107 - RNA, 19 nt, Homo sapiens
  misc_RNA (1)...(19): siRNA sense strand
acauacaggagaacaauuu

SEQ ID NO: 678108 - RNA, 19 nt, Homo sapiens
  misc_RNA (1)...(19): siRNA sense strand
gaauaccgcagcucacauc

SEQ ID NO: 678109 - RNA, 19 nt, Homo sapiens
  misc_RNA (1)...(19): siRNA sense strand
ggaaccugauuauucucaa

SEQ ID NO: 678110 - RNA, 19 nt, Homo sapiens
  misc_RNA (1)...(19): siRNA sense strand
uaagagcccucggacauac

SEQ ID NO: 678111 - RNA, 19 nt, Homo sapiens
  misc_RNA (1)...(19): siRNA sense strand
guuaagagcccucggacau

SEQ ID NO: 678112 - RNA, 19 nt, Homo sapiens
  misc_RNA (1)...(19): siRNA sense strand
ugacaucaaugacaaucca

SEQ ID NO: 678113 - RNA, 19 nt, Homo sapiens
  misc_RNA (1)...(19): siRNA sense strand
ucucugacaucaaugacaa

SEQ ID NO: 678114 - RNA, 19 nt, Homo sapiens
  misc_RNA (1)...(19): siRNA sense strand
ccaacucaguacagaccua

SEQ ID NO: 678115 - RNA, 19 nt, Homo sapiens
  misc_RNA (1)...(19): siRNA sense strand
gagcgcgcuuucacauaga

SEQ ID NO: 678116 - RNA, 19 nt, Homo sapiens
  misc_RNA (1)...(19): siRNA sense strand
gcggguggcugucuacaac

SEQ ID NO: 678117 - RNA, 19 nt, Homo sapiens
  misc_RNA (1)...(19): siRNA sense strand
acacugccuuuccgacuga

SEQ ID NO: 678118 - RNA, 19 nt, Homo sapiens
  misc_RNA (1)...(19): siRNA sense strand
aggcagcucuucagcauag

SEQ ID NO: 678119 - RNA, 19 nt, Homo sapiens
  misc_RNA (1)...(19): siRNA sense strand
caagccaacaacaauauug

SEQ ID NO: 678120 - RNA, 19 nt, Homo sapiens
  misc_RNA (1)...(19): siRNA sense strand
acaaacaagccaacaacaa

SEQ ID NO: 678121 - RNA, 19 nt, Homo sapiens
  misc_RNA (1)...(19): siRNA sense strand
ccuuugaccaguccacuua

SEQ ID NO: 678122 - RNA, 19 nt, Homo sapiens
  misc_RNA (1)...(19): siRNA sense strand
gacacucagaggcauguua

SEQ ID NO: 678123 - RNA, 19 nt, Homo sapiens
  misc_RNA (1)...(19): siRNA sense strand
cacugugacugccaacgua

SEQ ID NO: 678124 - RNA, 19 nt, Homo sapiens
  misc_RNA (1)...(19): siRNA sense strand
ccaauggugagcucaggua

SEQ ID NO: 678125 - RNA, 19 nt, Homo sapiens
  misc_RNA (1)...(19): siRNA sense strand
guacaaacaagccaacaac

SEQ ID NO: 678126 - RNA, 19 nt, Homo sapiens
  misc_RNA (1)...(19): siRNA sense strand
ggaaagguccccugcagaa

SEQ ID NO: 678127 - RNA, 19 nt, Homo sapiens
  misc_RNA (1)...(19): siRNA sense strand
caauuugccagguguguug

SEQ ID NO: 678128 - RNA, 19 nt, Homo sapiens
  misc_RNA (1)...(19): siRNA sense strand
ccuauuccaucuacauaca

SEQ ID NO: 678129 - RNA, 19 nt, Homo sapiens
  misc_RNA (1)...(19): siRNA sense strand
gacauacucugaaauuacc

SEQ ID NO: 678130 - RNA, 19 nt, Homo sapiens
  misc_RNA (1)...(19): siRNA sense strand
acacucagaggcauguuaa

SEQ ID NO: 678131 - RNA, 19 nt, Homo sapiens
  misc_RNA (1)...(19): siRNA sense strand
caggagaaauuaggacuac

SEQ ID NO: 678132 - RNA, 19 nt, Homo sapiens
  misc_RNA (1)...(19): siRNA sense strand
acuucgagcuggaccuuaa

SEQ ID NO: 678133 - RNA, 19 nt, Homo sapiens
  misc_RNA (1)...(19): siRNA sense strand
gagcugcacacaggagaaa

SEQ ID NO: 678134 - RNA, 19 nt, Homo sapiens
  misc_RNA (1)...(19): siRNA sense strand
gaaguuucgggaguucuuu

SEQ ID NO: 678135 - RNA, 19 nt, Homo sapiens
  misc_RNA (1)...(19): siRNA sense strand
gcaggagaacaguaaagug

SEQ ID NO: 678136 - RNA, 19 nt, Homo sapiens
  misc_RNA (1)...(19): siRNA sense strand
ccacagacccagaugaaaa

SEQ ID NO: 678137 - RNA, 19 nt, Homo sapiens
  misc_RNA (1)...(19): siRNA sense strand
uuaagagcccucggacaua

SEQ ID NO: 678138 - RNA, 19 nt, Homo sapiens
  misc_RNA (1)...(19): siRNA sense strand
ggauaggguuuccaaaauc

SEQ ID NO: 678139 - RNA, 19 nt, Homo sapiens
  misc_RNA (1)...(19): siRNA sense strand
acaacucuccugccuuuga

SEQ ID NO: 678140 - RNA, 19 nt, Homo sapiens
  misc_RNA (1)...(19): siRNA sense strand
gcacagugucuuuuauauu

SEQ ID NO: 678141 - RNA, 19 nt, Homo sapiens
  misc_RNA (1)...(19): siRNA sense strand
ggagaaauuaggacuacca

SEQ ID NO: 678142 - RNA, 19 nt, Homo sapiens
  misc_RNA (1)...(19): siRNA sense strand
ccaucuacauacaggagaa

SEQ ID NO: 678143 - RNA, 19 nt, Homo sapiens
  misc_RNA (1)...(19): siRNA sense strand
ucacaucccugcguacacu

SEQ ID NO: 678144 - RNA, 19 nt, Homo sapiens
  misc_RNA (1)...(19): siRNA sense strand
cgacugaauggcuuuggaa

SEQ ID NO: 678145 - RNA, 19 nt, Homo sapiens
  misc_RNA (1)...(19): siRNA sense strand
ggccaaaguggucagaaug

SEQ ID NO: 678146 - RNA, 19 nt, Homo sapiens
  misc_RNA (1)...(19): siRNA sense strand
ggaauggcucccucaccaa

SEQ ID NO: 678147 - RNA, 19 nt, Homo sapiens
  misc_RNA (1)...(19): siRNA sense strand
cauugaaguucgagggaau

SEQ ID NO: 678148 - RNA, 19 nt, Homo sapiens
  misc_RNA (1)...(19): siRNA sense strand
cuucugaccuggaccucuu

SEQ ID NO: 678149 - RNA, 19 nt, Homo sapiens
  misc_RNA (1)...(19): siRNA sense strand
uuucgggaguucuuuguga

SEQ ID NO: 678150 - RNA, 19 nt, Homo sapiens
  misc_RNA (1)...(19): siRNA sense strand
caacuccuuugacuaugag

SEQ ID NO: 678151 - RNA, 19 nt, Homo sapiens
  misc_RNA (1)...(19): siRNA sense strand
uauuggacaucaacgacaa

SEQ ID NO: 678152 - RNA, 19 nt, Homo sapiens
  misc_RNA (1)...(19): siRNA sense strand
cugaauggcuuuggaaacu

SEQ ID NO: 678153 - RNA, 19 nt, Homo sapiens
  misc_RNA (1)...(19): siRNA sense strand
gaccuggaccucuuuaagg

SEQ ID NO: 678154 - RNA, 19 nt, Homo sapiens
  misc_RNA (1)...(19): siRNA sense strand
cugggaaccugauuauucu

SEQ ID NO: 678155 - RNA, 19 nt, Homo sapiens
  misc_RNA (1)...(19): siRNA sense strand
gaaucucacaggccaaagu

SEQ ID NO: 678156 - RNA, 19 nt, Homo sapiens
  misc_RNA (1)...(19): siRNA sense strand
gccaacaacaauauugaug

SEQ ID NO: 678157 - RNA, 19 nt, Homo sapiens
  misc_RNA (1)...(19): siRNA sense strand
gcauuaagcacagugucuu

SEQ ID NO: 678158 - RNA, 19 nt, Homo sapiens
  misc_RNA (1)...(19): siRNA sense strand
ucggacauacucugaaauu

SEQ ID NO: 678159 - RNA, 19 nt, Homo sapiens
  misc_RNA (1)...(19): siRNA sense strand
caguagcugugguggauag

SEQ ID NO: 678160 - RNA, 19 nt, Homo sapiens
  misc_RNA (1)...(19): siRNA sense strand
aaauuaggacuaccaggaa

SEQ ID NO: 678161 - RNA, 19 nt, Homo sapiens
  misc_RNA (1)...(19): siRNA sense strand
gcugcacacaggagaaauu

SEQ ID NO: 678162 - RNA, 19 nt, Homo sapiens
  misc_RNA (1)...(19): siRNA sense strand
gagcgccguugagguggaa

SEQ ID NO: 678163 - RNA, 19 nt, Homo sapiens
  misc_RNA (1)...(19): siRNA sense strand
gagauggugccucgaacug

SEQ ID NO: 678164 - RNA, 19 nt, Homo sapiens
  misc_RNA (1)...(19): siRNA sense strand
gggaguucuuugugacugu

SEQ ID NO: 678165 - RNA, 19 nt, Homo sapiens
  misc_RNA (1)...(19): siRNA sense strand
gcaagccacagacccagau

SEQ ID NO: 678166 - RNA, 19 nt, Homo sapiens
  misc_RNA (1)...(19): siRNA sense strand
ccggguugcuugcgcauca

SEQ ID NO: 678167 - RNA, 19 nt, Homo sapiens
  misc_RNA (1)...(19): siRNA sense strand
cugcacacaggagaaauua

SEQ ID NO: 678168 - RNA, 19 nt, Homo sapiens
  misc_RNA (1)...(19): siRNA sense strand
cgacaacucuccugccuuu

SEQ ID NO: 678169 - RNA, 19 nt, Homo sapiens
  misc_RNA (1)...(19): siRNA sense strand
caauauugaugccaggaua

SEQ ID NO: 678170 - RNA, 19 nt, Homo sapiens
  misc_RNA (1)...(19): siRNA sense strand
gaaccugauuauucucaaa

SEQ ID NO: 678171 - RNA, 19 nt, Homo sapiens
  misc_RNA (1)...(19): siRNA sense strand
ggagcgcgcuuucacauag

SEQ ID NO: 678172 - RNA, 19 nt, Homo sapiens
  misc_RNA (1)...(19): siRNA sense strand
ugagaucucugacaucaau

SEQ ID NO: 678173 - RNA, 19 nt, Homo sapiens
  misc_RNA (1)...(19): siRNA sense strand
acucugaaauuacccuuua

SEQ ID NO: 678174 - RNA, 19 nt, Homo sapiens
  misc_RNA (1)...(19): siRNA sense strand
ccacugagcagcacuguga

SEQ ID NO: 678175 - RNA, 19 nt, Homo sapiens
  misc_RNA (1)...(19): siRNA sense strand
ggacaucaacgacaacuca

SEQ ID NO: 678176 - RNA, 19 nt, Homo sapiens
  misc_RNA (1)...(19): siRNA sense strand
gagcucagguacuccuuga

SEQ ID NO: 678177 - RNA, 19 nt, Homo sapiens
  misc_RNA (1)...(19): siRNA sense strand
aaacaagccaacaacaaua

SEQ ID NO: 678178 - RNA, 19 nt, Homo sapiens
  misc_RNA (1)...(19): siRNA sense strand
ccaggaagaugggagauga

SEQ ID NO: 678179 - RNA, 19 nt, Homo sapiens
  misc_RNA (1)...(19): siRNA sense strand
ggagaacaguaaagugcuu

SEQ ID NO: 678180 - RNA, 19 nt, Homo sapiens
  misc_RNA (1)...(19): siRNA sense strand
caaacaagccaacaacaau

SEQ ID NO: 678181 - RNA, 19 nt, Homo sapiens
  misc_RNA (1)...(19): siRNA sense strand
cugcagaacuguacaaaca

SEQ ID NO: 678182 - RNA, 19 nt, Homo sapiens
  misc_RNA (1)...(19): siRNA sense strand
gcaaggugcugguggacau

SEQ ID NO: 678183 - RNA, 19 nt, Homo sapiens
  misc_RNA (1)...(19): siRNA sense strand
ggacauacucugaaauuac

SEQ ID NO: 678184 - RNA, 19 nt, Homo sapiens
  misc_RNA (1)...(19): siRNA sense strand
gcacauugguggugaagcu

SEQ ID NO: 678185 - RNA, 19 nt, Homo sapiens
  misc_RNA (1)...(19): siRNA sense strand
gcagaacuguacaaacaag

SEQ ID NO: 678186 - RNA, 19 nt, Homo sapiens
  misc_RNA (1)...(19): siRNA sense strand
ccuccuaugucuccauuaa

SEQ ID NO: 678187 - RNA, 19 nt, Homo sapiens
  misc_RNA (1)...(19): siRNA sense strand
gcugggaaccugauuauuc

SEQ ID NO: 678188 - RNA, 19 nt, Homo sapiens
  misc_RNA (1)...(19): siRNA sense strand
ucaccaaagucauagcuau

SEQ ID NO: 678189 - RNA, 19 nt, Homo sapiens
  misc_RNA (1)...(19): siRNA sense strand
guugagaucucugacauca

SEQ ID NO: 678190 - RNA, 19 nt, Homo sapiens
  misc_RNA (1)...(19): siRNA sense strand
ggacuccuauuccaucuac

SEQ ID NO: 678191 - RNA, 19 nt, Homo sapiens
  misc_RNA (1)...(19): siRNA sense strand
gaagaugggagaugagagu

SEQ ID NO: 678192 - RNA, 19 nt, Homo sapiens
  misc_RNA (1)...(19): siRNA sense strand
ccagguguguugcucugua

SEQ ID NO: 678193 - RNA, 19 nt, Homo sapiens
  misc_RNA (1)...(19): siRNA sense strand
ggaggcuucuguggaguaa

SEQ ID NO: 678194 - RNA, 19 nt, Homo sapiens
  misc_RNA (1)...(19): siRNA sense strand
cggacauacucugaaauua

SEQ ID NO: 678195 - RNA, 19 nt, Homo sapiens
  misc_RNA (1)...(19): siRNA sense strand
gagagcggguggcugucua

SEQ ID NO: 678196 - RNA, 19 nt, Homo sapiens
  misc_RNA (1)...(19): siRNA sense strand
ccguugagguggaaauauu

SEQ ID NO: 678197 - RNA, 19 nt, Homo sapiens
  misc_RNA (1)...(19): siRNA sense strand
ggacaucguggacgugaau

SEQ ID NO: 678198 - RNA, 19 nt, Homo sapiens
  misc_RNA (1)...(19): siRNA sense strand
gauaccgcauggccucaaa

SEQ ID NO: 678199 - RNA, 19 nt, Homo sapiens
  misc_RNA (1)...(19): siRNA sense strand
ccucggacauacucugaaa

SEQ ID NO: 678200 - RNA, 19 nt, Homo sapiens
  misc_RNA (1)...(19): siRNA sense strand
ccagucaccuccuaugucu

SEQ ID NO: 678201 - RNA, 19 nt, Homo sapiens
  misc_RNA (1)...(19): siRNA sense strand
ggagagccaucacuaucag

SEQ ID NO: 678202 - RNA, 19 nt, Homo sapiens
  misc_RNA (1)...(19): siRNA sense strand
guggaaauauuggacauca

SEQ ID NO: 678203 - RNA, 19 nt, Homo sapiens
  misc_RNA (1)...(19): siRNA sense strand
ucaccaagaccuacugcua

SEQ ID NO: 678204 - RNA, 19 nt, Homo sapiens
  misc_RNA (1)...(19): siRNA sense strand
gcacacaggagaaauuagg

SEQ ID NO: 678205 - RNA, 19 nt, Homo sapiens
  misc_RNA (1)...(19): siRNA sense strand
guggagcgcucuucgucaa

SEQ ID NO: 678206 - RNA, 19 nt, Homo sapiens
  misc_RNA (1)...(19): siRNA sense strand
ggaaauauuggacaucaac

SEQ ID NO: 678207 - RNA, 19 nt, Homo sapiens
  misc_RNA (1)...(19): siRNA sense strand
acauacaggagaacaauuu

SEQ ID NO: 678208 - RNA, 19 nt, Homo sapiens
  misc_RNA (1)...(19): siRNA sense strand
gaauaccgcagcucacauc

SEQ ID NO: 678209 - RNA, 19 nt, Homo sapiens
  misc_RNA (1)...(19): siRNA sense strand
ggaaccugauuauucucaa

SEQ ID NO: 678210 - RNA, 19 nt, Homo sapiens
  misc_RNA (1)...(19): siRNA sense strand
uaagagcccucggacauac

SEQ ID NO: 678211 - RNA, 19 nt, Homo sapiens
  misc_RNA (1)...(19): siRNA sense strand
guuaagagcccucggacau

SEQ ID NO: 678212 - RNA, 19 nt, Homo sapiens
  misc_RNA (1)...(19): siRNA sense strand
ugacaucaaugacaaucca

SEQ ID NO: 678213 - RNA, 19 nt, Homo sapiens
  misc_RNA (1)...(19): siRNA sense strand
ucucugacaucaaugacaa

SEQ ID NO: 678214 - RNA, 19 nt, Homo sapiens
  misc_RNA (1)...(19): siRNA sense strand
ccaacucaguacagaccua

SEQ ID NO: 678215 - RNA, 19 nt, Homo sapiens
  misc_RNA (1)...(19): siRNA sense strand
gagcgcgcuuucacauaga

SEQ ID NO: 678216 - RNA, 19 nt, Homo sapiens
  misc_RNA (1)...(19): siRNA sense strand
gcggguggcugucuacaac

SEQ ID NO: 678217 - RNA, 19 nt, Homo sapiens
  misc_RNA (1)...(19): siRNA sense strand
acacugccuuuccgacuga

SEQ ID NO: 678218 - RNA, 19 nt, Homo sapiens
  misc_RNA (1)...(19): siRNA sense strand
aggcagcucuucagcauag

SEQ ID NO: 678219 - RNA, 19 nt, Homo sapiens
  misc_RNA (1)...(19): siRNA sense strand
caagccaacaacaauauug

SEQ ID NO: 678220 - RNA, 19 nt, Homo sapiens
  misc_RNA (1)...(19): siRNA sense strand
acaaacaagccaacaacaa

SEQ ID NO: 678221 - RNA, 19 nt, Homo sapiens
  misc_RNA (1)...(19): siRNA sense strand
ccuuugaccaguccacuua

SEQ ID NO: 678222 - RNA, 19 nt, Homo sapiens
  misc_RNA (1)...(19): siRNA sense strand
gacacucagaggcauguua

SEQ ID NO: 678223 - RNA, 19 nt, Homo sapiens
  misc_RNA (1)...(19): siRNA sense strand
cacugugacugccaacgua

SEQ ID NO: 678224 - RNA, 19 nt, Homo sapiens
  misc_RNA (1)...(19): siRNA sense strand
ccaauggugagcucaggua

SEQ ID NO: 678225 - RNA, 19 nt, Homo sapiens
  misc_RNA (1)...(19): siRNA sense strand
guacaaacaagccaacaac

SEQ ID NO: 678226 - RNA, 19 nt, Homo sapiens
  misc_RNA (1)...(19): siRNA sense strand
ggaaagguccccugcagaa

SEQ ID NO: 678227 - RNA, 19 nt, Homo sapiens
  misc_RNA (1)...(19): siRNA sense strand
caauuugccagguguguug

SEQ ID NO: 678228 - RNA, 19 nt, Homo sapiens
  misc_RNA (1)...(19): siRNA sense strand
ccuauuccaucuacauaca

SEQ ID NO: 678229 - RNA, 19 nt, Homo sapiens
  misc_RNA (1)...(19): siRNA sense strand
gacauacucugaaauuacc

SEQ ID NO: 678230 - RNA, 19 nt, Homo sapiens
  misc_RNA (1)...(19): siRNA sense strand
acacucagaggcauguuaa

SEQ ID NO: 678231 - RNA, 19 nt, Homo sapiens
  misc_RNA (1)...(19): siRNA sense strand
caggagaaauuaggacuac

SEQ ID NO: 678232 - RNA, 19 nt, Homo sapiens
  misc_RNA (1)...(19): siRNA sense strand
acuucgagcuggaccuuaa

SEQ ID NO: 678233 - RNA, 19 nt, Homo sapiens
  misc_RNA (1)...(19): siRNA sense strand
gagcugcacacaggagaaa

SEQ ID NO: 678234 - RNA, 19 nt, Homo sapiens
  misc_RNA (1)...(19): siRNA sense strand
gaaguuucgggaguucuuu

SEQ ID NO: 678235 - RNA, 19 nt, Homo sapiens
  misc_RNA (1)...(19): siRNA sense strand
gcaggagaacaguaaagug

SEQ ID NO: 678236 - RNA, 19 nt, Homo sapiens
  misc_RNA (1)...(19): siRNA sense strand
ccacagacccagaugaaaa

SEQ ID NO: 678237 - RNA, 19 nt, Homo sapiens
  misc_RNA (1)...(19): siRNA sense strand
uuaagagcccucggacaua

SEQ ID NO: 678238 - RNA, 19 nt, Homo sapiens
  misc_RNA (1)...(19): siRNA sense strand
ggauaggguuuccaaaauc

SEQ ID NO: 678239 - RNA, 19 nt, Homo sapiens
  misc_RNA (1)...(19): siRNA sense strand
acaacucuccugccuuuga

SEQ ID NO: 678240 - RNA, 19 nt, Homo sapiens
  misc_RNA (1)...(19): siRNA sense strand
gcacagugucuuuuauauu

SEQ ID NO: 678241 - RNA, 19 nt, Homo sapiens
  misc_RNA (1)...(19): siRNA sense strand
ggagaaauuaggacuacca

SEQ ID NO: 678242 - RNA, 19 nt, Homo sapiens
  misc_RNA (1)...(19): siRNA sense strand
ccaucuacauacaggagaa

SEQ ID NO: 678243 - RNA, 19 nt, Homo sapiens
  misc_RNA (1)...(19): siRNA sense strand
ucacaucccugcguacacu

SEQ ID NO: 678244 - RNA, 19 nt, Homo sapiens
  misc_RNA (1)...(19): siRNA sense strand
cgacugaauggcuuuggaa

SEQ ID NO: 678245 - RNA, 19 nt, Homo sapiens
  misc_RNA (1)...(19): siRNA sense strand
ggccaaaguggucagaaug

SEQ ID NO: 678246 - RNA, 19 nt, Homo sapiens
  misc_RNA (1)...(19): siRNA sense strand
ggaauggcucccucaccaa

SEQ ID NO: 678247 - RNA, 19 nt, Homo sapiens
  misc_RNA (1)...(19): siRNA sense strand
cauugaaguucgagggaau

SEQ ID NO: 678248 - RNA, 19 nt, Homo sapiens
  misc_RNA (1)...(19): siRNA sense strand
cuucugaccuggaccucuu

SEQ ID NO: 678249 - RNA, 19 nt, Homo sapiens
  misc_RNA (1)...(19): siRNA sense strand
uuucgggaguucuuuguga

SEQ ID NO: 678250 - RNA, 19 nt, Homo sapiens
  misc_RNA (1)...(19): siRNA sense strand
caacuccuuugacuaugag

SEQ ID NO: 678251 - RNA, 19 nt, Homo sapiens
  misc_RNA (1)...(19): siRNA sense strand
uauuggacaucaacgacaa

SEQ ID NO: 678252 - RNA, 19 nt, Homo sapiens
  misc_RNA (1)...(19): siRNA sense strand
cugaauggcuuuggaaacu

SEQ ID NO: 678253 - RNA, 19 nt, Homo sapiens
  misc_RNA (1)...(19): siRNA sense strand
gaccuggaccucuuuaagg

SEQ ID NO: 678254 - RNA, 19 nt, Homo sapiens
  misc_RNA (1)...(19): siRNA sense strand
cugggaaccugauuauucu

SEQ ID NO: 678255 - RNA, 19 nt, Homo sapiens
  misc_RNA (1)...(19): siRNA sense strand
gaaucucacaggccaaagu

SEQ ID NO: 678256 - RNA, 19 nt, Homo sapiens
  misc_RNA (1)...(19): siRNA sense strand
gccaacaacaauauugaug

SEQ ID NO: 678257 - RNA, 19 nt, Homo sapiens
  misc_RNA (1)...(19): siRNA sense strand
gcauuaagcacagugucuu

SEQ ID NO: 678258 - RNA, 19 nt, Homo sapiens
  misc_RNA (1)...(19): siRNA sense strand
ucggacauacucugaaauu

SEQ ID NO: 678259 - RNA, 19 nt, Homo sapiens
  misc_RNA (1)...(19): siRNA sense strand
caguagcugugguggauag

SEQ ID NO: 678260 - RNA, 19 nt, Homo sapiens
  misc_RNA (1)...(19): siRNA sense strand
aaauuaggacuaccaggaa

SEQ ID NO: 678261 - RNA, 19 nt, Homo sapiens
  misc_RNA (1)...(19): siRNA sense strand
gcugcacacaggagaaauu

SEQ ID NO: 678262 - RNA, 19 nt, Homo sapiens
  misc_RNA (1)...(19): siRNA sense strand
gagcgccguugagguggaa

SEQ ID NO: 678263 - RNA, 19 nt, Homo sapiens
  misc_RNA (1)...(19): siRNA sense strand
gagauggugccucgaacug

SEQ ID NO: 678264 - RNA, 19 nt, Homo sapiens
  misc_RNA (1)...(19): siRNA sense strand
gggaguucuuugugacugu

SEQ ID NO: 678265 - RNA, 19 nt, Homo sapiens
  misc_RNA (1)...(19): siRNA sense strand
gcaagccacagacccagau

SEQ ID NO: 678266 - RNA, 19 nt, Homo sapiens
  misc_RNA (1)...(19): siRNA sense strand
ccggguugcuugcgcauca

SEQ ID NO: 678267 - RNA, 19 nt, Homo sapiens
  misc_RNA (1)...(19): siRNA sense strand
cugcacacaggagaaauua

SEQ ID NO: 678268 - RNA, 19 nt, Homo sapiens
  misc_RNA (1)...(19): siRNA sense strand
caaauaaguuggucaagua

SEQ ID NO: 678269 - RNA, 19 nt, Homo sapiens
  misc_RNA (1)...(19): siRNA sense strand
caacuucgcugccaacuuu

SEQ ID NO: 678270 - RNA, 19 nt, Homo sapiens
  misc_RNA (1)...(19): siRNA sense strand
gaagacagcgccuugcuua

SEQ ID NO: 678271 - RNA, 19 nt, Homo sapiens
  misc_RNA (1)...(19): siRNA sense strand
ggaaacuucucaccuauga

SEQ ID NO: 678272 - RNA, 19 nt, Homo sapiens
  misc_RNA (1)...(19): siRNA sense strand
ggaaagagcaaauaaguug

SEQ ID NO: 678273 - RNA, 19 nt, Homo sapiens
  misc_RNA (1)...(19): siRNA sense strand
gaagaacaccuguauauuc

SEQ ID NO: 678274 - RNA, 19 nt, Homo sapiens
  misc_RNA (1)...(19): siRNA sense strand
uaaggaaacuucucaccua

SEQ ID NO: 678275 - RNA, 19 nt, Homo sapiens
  misc_RNA (1)...(19): siRNA sense strand
gggaugacauugaguuuga

SEQ ID NO: 678276 - RNA, 19 nt, Homo sapiens
  misc_RNA (1)...(19): siRNA sense strand
gaacaccuguauauucuca

SEQ ID NO: 678277 - RNA, 19 nt, Homo sapiens
  misc_RNA (1)...(19): siRNA sense strand
gcaaauaaguuggucaagu

SEQ ID NO: 678278 - RNA, 19 nt, Homo sapiens
  misc_RNA (1)...(19): siRNA sense strand
gagaagaaauuugggauuc

SEQ ID NO: 678279 - RNA, 19 nt, Homo sapiens
  misc_RNA (1)...(19): siRNA sense strand
gaagaaauuugggauucaa

SEQ ID NO: 678280 - RNA, 19 nt, Homo sapiens
  misc_RNA (1)...(19): siRNA sense strand
gugaauacacugauguuua

SEQ ID NO: 678281 - RNA, 19 nt, Homo sapiens
  misc_RNA (1)...(19): siRNA sense strand
gaauguaaaucaggccaaa

SEQ ID NO: 678282 - RNA, 19 nt, Homo sapiens
  misc_RNA (1)...(19): siRNA sense strand
caaagaagaacaccuguau

SEQ ID NO: 678283 - RNA, 19 nt, Homo sapiens
  misc_RNA (1)...(19): siRNA sense strand
acacaaaggugcccaucaa

SEQ ID NO: 678284 - RNA, 19 nt, Homo sapiens
  misc_RNA (1)...(19): siRNA sense strand
caagaggacccgcaagauu

SEQ ID NO: 678285 - RNA, 19 nt, Homo sapiens
  misc_RNA (1)...(19): siRNA sense strand
aagaggacccgcaagauua

SEQ ID NO: 678286 - RNA, 19 nt, Homo sapiens
  misc_RNA (1)...(19): siRNA sense strand
ccaaugagauggcugacau

SEQ ID NO: 678287 - RNA, 19 nt, Homo sapiens
  misc_RNA (1)...(19): siRNA sense strand
agaaauaccuggacuacag

SEQ ID NO: 678288 - RNA, 19 nt, Homo sapiens
  misc_RNA (1)...(19): siRNA sense strand
gagauaucauccgugaaua

SEQ ID NO: 678289 - RNA, 19 nt, Homo sapiens
  misc_RNA (1)...(19): siRNA sense strand
cagaaaugcugagagauau

SEQ ID NO: 678290 - RNA, 19 nt, Homo sapiens
  misc_RNA (1)...(19): siRNA sense strand
ccaaaugccaccuacaauu

SEQ ID NO: 678291 - RNA, 19 nt, Homo sapiens
  misc_RNA (1)...(19): siRNA sense strand
uaacuugaauguugaagag

SEQ ID NO: 678292 - RNA, 19 nt, Homo sapiens
  misc_RNA (1)...(19): siRNA sense strand
gagauucauugcagagguu

SEQ ID NO: 678293 - RNA, 19 nt, Homo sapiens
  misc_RNA (1)...(19): siRNA sense strand
ccaaugaccuggccaacag

SEQ ID NO: 678294 - RNA, 19 nt, Homo sapiens
  misc_RNA (1)...(19): siRNA sense strand
ggaaggagauuuuggagau

SEQ ID NO: 678295 - RNA, 19 nt, Homo sapiens
  misc_RNA (1)...(19): siRNA sense strand
cgucagagcccuccagcua

SEQ ID NO: 678296 - RNA, 19 nt, Homo sapiens
  misc_RNA (1)...(19): siRNA sense strand
aagaagaacaccuguauau

SEQ ID NO: 678297 - RNA, 19 nt, Homo sapiens
  misc_RNA (1)...(19): siRNA sense strand
ccacuggccuggcagaauc

SEQ ID NO: 678298 - RNA, 19 nt, Homo sapiens
  misc_RNA (1)...(19): siRNA sense strand
gagcugggaugacauugag

SEQ ID NO: 678299 - RNA, 19 nt, Homo sapiens
  misc_RNA (1)...(19): siRNA sense strand
cagauucccucagaccuuu

SEQ ID NO: 678300 - RNA, 19 nt, Homo sapiens
  misc_RNA (1)...(19): siRNA sense strand
uaagucagccuuuaaaguc

SEQ ID NO: 678301 - RNA, 19 nt, Homo sapiens
  misc_RNA (1)...(19): siRNA sense strand
ccaaauggugucuaugauu

SEQ ID NO: 678302 - RNA, 19 nt, Homo sapiens
  misc_RNA (1)...(19): siRNA sense strand
gcccaaauggugucuauga

SEQ ID NO: 678303 - RNA, 19 nt, Homo sapiens
  misc_RNA (1)...(19): siRNA sense strand
cauugaacgugcaugcuuu

SEQ ID NO: 678304 - RNA, 19 nt, Homo sapiens
  misc_RNA (1)...(19): siRNA sense strand
gaaaugcugagagauauca

SEQ ID NO: 678305 - RNA, 19 nt, Homo sapiens
  misc_RNA (1)...(19): siRNA sense strand
gaucuaaggaaacuucuca

SEQ ID NO: 678306 - RNA, 19 nt, Homo sapiens
  misc_RNA (1)...(19): siRNA sense strand
gcaugggaauuggagauga

SEQ ID NO: 678307 - RNA, 19 nt, Homo sapiens
  misc_RNA (1)...(19): siRNA sense strand
agaugaaagugcugagauu

SEQ ID NO: 678308 - RNA, 19 nt, Homo sapiens
  misc_RNA (1)...(19): siRNA sense strand
gaaauaccuggacuacaga

SEQ ID NO: 678309 - RNA, 19 nt, Homo sapiens
  misc_RNA (1)...(19): siRNA sense strand
ggacccgcaagauuaauaa

SEQ ID NO: 678310 - RNA, 19 nt, Homo sapiens
  misc_RNA (1)...(19): siRNA sense strand
ccuaugaguuuguaaagca

SEQ ID NO: 678311 - RNA, 19 nt, Homo sapiens
  misc_RNA (1)...(19): siRNA sense strand
ggagaucuaaggaaacuuc

SEQ ID NO: 678312 - RNA, 19 nt, Homo sapiens
  misc_RNA (1)...(19): siRNA sense strand
guccaaaugcugccuauga

SEQ ID NO: 678313 - RNA, 19 nt, Homo sapiens
  misc_RNA (1)...(19): siRNA sense strand
gaaagugcugagauucauu

SEQ ID NO: 678314 - RNA, 19 nt, Homo sapiens
  misc_RNA (1)...(19): siRNA sense strand
gccaacagcaggccuaaga

SEQ ID NO: 678315 - RNA, 19 nt, Homo sapiens
  misc_RNA (1)...(19): siRNA sense strand
caacuuuggugccauuggu

SEQ ID NO: 678316 - RNA, 19 nt, Homo sapiens
  misc_RNA (1)...(19): siRNA sense strand
gagcaaauaaguuggucaa

SEQ ID NO: 678317 - RNA, 19 nt, Homo sapiens
  misc_RNA (1)...(19): siRNA sense strand
cuacuaaagugggcccaaa

SEQ ID NO: 678318 - RNA, 19 nt, Homo sapiens
  misc_RNA (1)...(19): siRNA sense strand
gauucugggugucaucuuc

SEQ ID NO: 678319 - RNA, 19 nt, Homo sapiens
  misc_RNA (1)...(19): siRNA sense strand
caucaagcgcucagaaaug

SEQ ID NO: 678320 - RNA, 19 nt, Homo sapiens
  misc_RNA (1)...(19): siRNA sense strand
gaccugggaugaggaagga

SEQ ID NO: 678321 - RNA, 19 nt, Homo sapiens
  misc_RNA (1)...(19): siRNA sense strand
aaagaagaacaccuguaua

SEQ ID NO: 678322 - RNA, 19 nt, Homo sapiens
  misc_RNA (1)...(19): siRNA sense strand
uggcagaacccagugauuu

SEQ ID NO: 678323 - RNA, 19 nt, Homo sapiens
  misc_RNA (1)...(19): siRNA sense strand
caggaaagagcaaauaagu

SEQ ID NO: 678324 - RNA, 19 nt, Homo sapiens
  misc_RNA (1)...(19): siRNA sense strand
gcccaaaugccaccuacaa

SEQ ID NO: 678325 - RNA, 19 nt, Homo sapiens
  misc_RNA (1)...(19): siRNA sense strand
ccaugagacuagcaagaug

SEQ ID NO: 678326 - RNA, 19 nt, Homo sapiens
  misc_RNA (1)...(19): siRNA sense strand
cagaggcuccaccuacuaa

SEQ ID NO: 678327 - RNA, 19 nt, Homo sapiens
  misc_RNA (1)...(19): siRNA sense strand
ccagaaugccacuacuaaa

SEQ ID NO: 678328 - RNA, 19 nt, Homo sapiens
  misc_RNA (1)...(19): siRNA sense strand
ggagcugggaugacauuga

SEQ ID NO: 678329 - RNA, 19 nt, Homo sapiens
  misc_RNA (1)...(19): siRNA sense strand
gcagaaauaccuggacuac

SEQ ID NO: 678330 - RNA, 19 nt, Homo sapiens
  misc_RNA (1)...(19): siRNA sense strand
caacugaaagaaauugaca

SEQ ID NO: 678331 - RNA, 19 nt, Homo sapiens
  misc_RNA (1)...(19): siRNA sense strand
gaaauuugggauucaacug

SEQ ID NO: 678332 - RNA, 19 nt, Homo sapiens
  misc_RNA (1)...(19): siRNA sense strand
agagauaucauccgugaau

SEQ ID NO: 678333 - RNA, 19 nt, Homo sapiens
  misc_RNA (1)...(19): siRNA sense strand
ggcagaacccagugauuug

SEQ ID NO: 678334 - RNA, 19 nt, Homo sapiens
  misc_RNA (1)...(19): siRNA sense strand
ccaaaugcugccuaugauu

SEQ ID NO: 678335 - RNA, 19 nt, Homo sapiens
  misc_RNA (1)...(19): siRNA sense strand
guacagccagugccaacuu

SEQ ID NO: 678336 - RNA, 19 nt, Homo sapiens
  misc_RNA (1)...(19): siRNA sense strand
aaggaaacuucucaccuau

SEQ ID NO: 678337 - RNA, 19 nt, Homo sapiens
  misc_RNA (1)...(19): siRNA sense strand
ggccuaagucagccuuuaa

SEQ ID NO: 678338 - RNA, 19 nt, Homo sapiens
  misc_RNA (1)...(19): siRNA sense strand
ggucuccucuuggugauuc

SEQ ID NO: 678339 - RNA, 19 nt, Homo sapiens
  misc_RNA (1)...(19): siRNA sense strand
agaagaaauuugggauuca

SEQ ID NO: 678340 - RNA, 19 nt, Homo sapiens
  misc_RNA (1)...(19): siRNA sense strand
gcaagaggacccgcaagau

SEQ ID NO: 678341 - RNA, 19 nt, Homo sapiens
  misc_RNA (1)...(19): siRNA sense strand
agucugagauggccuucaa

SEQ ID NO: 678342 - RNA, 19 nt, Homo sapiens
  misc_RNA (1)...(19): siRNA sense strand
ccaaggaugugcccaacac

SEQ ID NO: 678343 - RNA, 19 nt, Homo sapiens
  misc_RNA (1)...(19): siRNA sense strand
ccagauaccaccagaaugc

SEQ ID NO: 678344 - RNA, 19 nt, Homo sapiens
  misc_RNA (1)...(19): siRNA sense strand
ggccuuggaugcucuggau

SEQ ID NO: 678345 - RNA, 19 nt, Homo sapiens
  misc_RNA (1)...(19): siRNA sense strand
gagacuagcaagaugaaag

SEQ ID NO: 678346 - RNA, 19 nt, Homo sapiens
  misc_RNA (1)...(19): siRNA sense strand
gacagcgccuugcuuaugc

SEQ ID NO: 678347 - RNA, 19 nt, Homo sapiens
  misc_RNA (1)...(19): siRNA sense strand
gauaucauccgugaauaca

SEQ ID NO: 678348 - RNA, 19 nt, Homo sapiens
  misc_RNA (1)...(19): siRNA sense strand
cgacccagguaucucugaa

SEQ ID NO: 678349 - RNA, 19 nt, Homo sapiens
  misc_RNA (1)...(19): siRNA sense strand
cagaaugccacuacuaaag

SEQ ID NO: 678350 - RNA, 19 nt, Homo sapiens
  misc_RNA (1)...(19): siRNA sense strand
ccaaaaugcuaccuccaaa

SEQ ID NO: 678351 - RNA, 19 nt, Homo sapiens
  misc_RNA (1)...(19): siRNA sense strand
gugcaugcuuuguccuaga

SEQ ID NO: 678352 - RNA, 19 nt, Homo sapiens
  misc_RNA (1)...(19): siRNA sense strand
ggccagauaccaccagaau

SEQ ID NO: 678353 - RNA, 19 nt, Homo sapiens
  misc_RNA (1)...(19): siRNA sense strand
gguccagaauuccauuuac

SEQ ID NO: 678354 - RNA, 19 nt, Homo sapiens
  misc_RNA (1)...(19): siRNA sense strand
caagaacccgcaugggaau

SEQ ID NO: 678355 - RNA, 19 nt, Homo sapiens
  misc_RNA (1)...(19): siRNA sense strand
cauggaggcugcagaugag

SEQ ID NO: 678356 - RNA, 19 nt, Homo sapiens
  misc_RNA (1)...(19): siRNA sense strand
ggcaagaggacccgcaaga

SEQ ID NO: 678357 - RNA, 19 nt, Homo sapiens
  misc_RNA (1)...(19): siRNA sense strand
gaauuccauuuaccuucug

SEQ ID NO: 678358 - RNA, 19 nt, Homo sapiens
  misc_RNA (1)...(19): siRNA sense strand
agaagaacaccuguauauu

SEQ ID NO: 678359 - RNA, 19 nt, Homo sapiens
  misc_RNA (1)...(19): siRNA sense strand
gcuuuguccuagagaagaa

SEQ ID NO: 678360 - RNA, 19 nt, Homo sapiens
  misc_RNA (1)...(19): siRNA sense strand
uaucauccgugaauacacu

SEQ ID NO: 678361 - RNA, 19 nt, Homo sapiens
  misc_RNA (1)...(19): siRNA sense strand
agacagcgccuugcuuaug

SEQ ID NO: 678362 - RNA, 19 nt, Homo sapiens
  misc_RNA (1)...(19): siRNA sense strand
cccgcaagauuaauaacuu

SEQ ID NO: 678363 - RNA, 19 nt, Homo sapiens
  misc_RNA (1)...(19): siRNA sense strand
cccagaaugccacuacuaa

SEQ ID NO: 678364 - RNA, 19 nt, Homo sapiens
  misc_RNA (1)...(19): siRNA sense strand
gggaugaggaaggagauuu

SEQ ID NO: 678365 - RNA, 19 nt, Homo sapiens
  misc_RNA (1)...(19): siRNA sense strand
gaugaaagugcugagauuc

SEQ ID NO: 678366 - RNA, 19 nt, Homo sapiens
  misc_RNA (1)...(19): siRNA sense strand
acaaagaagaacaccugua

SEQ ID NO: 678367 - RNA, 19 nt, Homo sapiens
  misc_RNA (1)...(19): siRNA sense strand
agaggacccgcaagauuaa

SEQ ID NO: 678368 - RNA, 19 nt, Homo sapiens
  misc_RNA (1)...(19): siRNA sense strand
ggagagaucacuauaaaua

SEQ ID NO: 678369 - RNA, 19 nt, Homo sapiens
  misc_RNA (1)...(19): siRNA sense strand
caagacagcucccucgauu

SEQ ID NO: 678370 - RNA, 19 nt, Homo sapiens
  misc_RNA (1)...(19): siRNA sense strand
ugaaggaagugaucucuuu

SEQ ID NO: 678371 - RNA, 19 nt, Homo sapiens
  misc_RNA (1)...(19): siRNA sense strand
gagccaaucaguuauguua

SEQ ID NO: 678372 - RNA, 19 nt, Homo sapiens
  misc_RNA (1)...(19): siRNA sense strand
gaagagucguuauauggaa

SEQ ID NO: 678373 - RNA, 19 nt, Homo sapiens
  misc_RNA (1)...(19): siRNA sense strand
ccagugagccaaucaguua

SEQ ID NO: 678374 - RNA, 19 nt, Homo sapiens
  misc_RNA (1)...(19): siRNA sense strand
guggagagaucacuauaaa

SEQ ID NO: 678375 - RNA, 19 nt, Homo sapiens
  misc_RNA (1)...(19): siRNA sense strand
gaaaggugcuaguuaaggu

SEQ ID NO: 678376 - RNA, 19 nt, Homo sapiens
  misc_RNA (1)...(19): siRNA sense strand
gcaauaacaucaacacacu

SEQ ID NO: 678377 - RNA, 19 nt, Homo sapiens
  misc_RNA (1)...(19): siRNA sense strand
ccaaacugcucauacagaa

SEQ ID NO: 678378 - RNA, 19 nt, Homo sapiens
  misc_RNA (1)...(19): siRNA sense strand
gagacuugcuaaauggaua

SEQ ID NO: 678379 - RNA, 19 nt, Homo sapiens
  misc_RNA (1)...(19): siRNA sense strand
uaguuaagguggaugaaua

SEQ ID NO: 678380 - RNA, 19 nt, Homo sapiens
  misc_RNA (1)...(19): siRNA sense strand
gagacaauguuaauuccuu

SEQ ID NO: 678381 - RNA, 19 nt, Homo sapiens
  misc_RNA (1)...(19): siRNA sense strand
gcacccaguuucauguauu

SEQ ID NO: 678382 - RNA, 19 nt, Homo sapiens
  misc_RNA (1)...(19): siRNA sense strand
ggaacucuaugaccuuaau

SEQ ID NO: 678383 - RNA, 19 nt, Homo sapiens
  misc_RNA (1)...(19): siRNA sense strand
agacuaaucuuuuggcuua

SEQ ID NO: 678384 - RNA, 19 nt, Homo sapiens
  misc_RNA (1)...(19): siRNA sense strand
uacgaaaggugcuaguuaa

SEQ ID NO: 678385 - RNA, 19 nt, Homo sapiens
  misc_RNA (1)...(19): siRNA sense strand
gcacagaggguuguuguau

SEQ ID NO: 678386 - RNA, 19 nt, Homo sapiens
  misc_RNA (1)...(19): siRNA sense strand
gcugaucauucuaauuuga

SEQ ID NO: 678387 - RNA, 19 nt, Homo sapiens
  misc_RNA (1)...(19): siRNA sense strand
gaaaugacagaaacagaga

SEQ ID NO: 678388 - RNA, 19 nt, Homo sapiens
  misc_RNA (1)...(19): siRNA sense strand
aauagagacuugcuaaaug

SEQ ID NO: 678389 - RNA, 19 nt, Homo sapiens
  misc_RNA (1)...(19): siRNA sense strand
gaagguugaugcucgaagu

SEQ ID NO: 678390 - RNA, 19 nt, Homo sapiens
  misc_RNA (1)...(19): siRNA sense strand
ugaaggcauucguggguua

SEQ ID NO: 678391 - RNA, 19 nt, Homo sapiens
  misc_RNA (1)...(19): siRNA sense strand
cauacagaauuacgcauuu

SEQ ID NO: 678392 - RNA, 19 nt, Homo sapiens
  misc_RNA (1)...(19): siRNA sense strand
ccggauggauggccacaua

SEQ ID NO: 678393 - RNA, 19 nt, Homo sapiens
  misc_RNA (1)...(19): siRNA sense strand
gcaauucgaagcaauaaca

SEQ ID NO: 678394 - RNA, 19 nt, Homo sapiens
  misc_RNA (1)...(19): siRNA sense strand
uggagugaaugaacugaua

SEQ ID NO: 678395 - RNA, 19 nt, Homo sapiens
  misc_RNA (1)...(19): siRNA sense strand
uaaggaagaugagauugug

SEQ ID NO: 678396 - RNA, 19 nt, Homo sapiens
  misc_RNA (1)...(19): siRNA sense strand
gacccaaacugcucauaca

SEQ ID NO: 678397 - RNA, 19 nt, Homo sapiens
  misc_RNA (1)...(19): siRNA sense strand
ucccgauacuggagaauua

SEQ ID NO: 678398 - RNA, 19 nt, Homo sapiens
  misc_RNA (1)...(19): siRNA sense strand
gauagucaccucucuuugu

SEQ ID NO: 678399 - RNA, 19 nt, Homo sapiens
  misc_RNA (1)...(19): siRNA sense strand
uggcugaucauucuaauuu

SEQ ID NO: 678400 - RNA, 19 nt, Homo sapiens
  misc_RNA (1)...(19): siRNA sense strand
gaauuacgcauuuccacuu

SEQ ID NO: 678401 - RNA, 19 nt, Homo sapiens
  misc_RNA (1)...(19): siRNA sense strand
ggacacagacuaaucuuuu

SEQ ID NO: 678402 - RNA, 19 nt, Homo sapiens
  misc_RNA (1)...(19): siRNA sense strand
uuacgaaaggugcuaguua

SEQ ID NO: 678403 - RNA, 19 nt, Homo sapiens
  misc_RNA (1)...(19): siRNA sense strand
guuaugcccuuuccaaugg

SEQ ID NO: 678404 - RNA, 19 nt, Homo sapiens
  misc_RNA (1)...(19): siRNA sense strand
acaaugaagagucguuaua

SEQ ID NO: 678405 - RNA, 19 nt, Homo sapiens
  misc_RNA (1)...(19): siRNA sense strand
cuaauuugauccgaaguuu

SEQ ID NO: 678406 - RNA, 19 nt, Homo sapiens
  misc_RNA (1)...(19): siRNA sense strand
ggaaucugauguuucucuu

SEQ ID NO: 678407 - RNA, 19 nt, Homo sapiens
  misc_RNA (1)...(19): siRNA sense strand
aaacugcucauacagaauu

SEQ ID NO: 678408 - RNA, 19 nt, Homo sapiens
  misc_RNA (1)...(19): siRNA sense strand
gcggccaccugcauauaaa

SEQ ID NO: 678409 - RNA, 19 nt, Homo sapiens
  misc_RNA (1)...(19): siRNA sense strand
ggauggccacauacaguua

SEQ ID NO: 678410 - RNA, 19 nt, Homo sapiens
  misc_RNA (1)...(19): siRNA sense strand
gaugcaauucgaagcaaua

SEQ ID NO: 678411 - RNA, 19 nt, Homo sapiens
  misc_RNA (1)...(19): siRNA sense strand
ggcauaaucccagccaaua

SEQ ID NO: 678412 - RNA, 19 nt, Homo sapiens
  misc_RNA (1)...(19): siRNA sense strand
gcacaguuggaguuuauga

SEQ ID NO: 678413 - RNA, 19 nt, Homo sapiens
  misc_RNA (1)...(19): siRNA sense strand
ccucaaagcaguaaaucaa

SEQ ID NO: 678414 - RNA, 19 nt, Homo sapiens
  misc_RNA (1)...(19): siRNA sense strand
cauccgagcaguauugauu

SEQ ID NO: 678415 - RNA, 19 nt, Homo sapiens
  misc_RNA (1)...(19): siRNA sense strand
ggagugaaugaacugauaa

SEQ ID NO: 678416 - RNA, 19 nt, Homo sapiens
  misc_RNA (1)...(19): siRNA sense strand
cagaagacacucacauuca

SEQ ID NO: 678417 - RNA, 19 nt, Homo sapiens
  misc_RNA (1)...(19): siRNA sense strand
ugaggaugcucgucugaug

SEQ ID NO: 678418 - RNA, 19 nt, Homo sapiens
  misc_RNA (1)...(19): siRNA sense strand
ugauuuggcuggugauauc

SEQ ID NO: 678419 - RNA, 19 nt, Homo sapiens
  misc_RNA (1)...(19): siRNA sense strand
gaagacacucacauucaga

SEQ ID NO: 678420 - RNA, 19 nt, Homo sapiens
  misc_RNA (1)...(19): siRNA sense strand
ggaaaccucaaagcaguaa

SEQ ID NO: 678421 - RNA, 19 nt, Homo sapiens
  misc_RNA (1)...(19): siRNA sense strand
uggcacaguuggaguuuau

SEQ ID NO: 678422 - RNA, 19 nt, Homo sapiens
  misc_RNA (1)...(19): siRNA sense strand
ugacuuugauggugaugga

SEQ ID NO: 678423 - RNA, 19 nt, Homo sapiens
  misc_RNA (1)...(19): siRNA sense strand
aaaauucgcuguaacaauc

SEQ ID NO: 678424 - RNA, 19 nt, Homo sapiens
  misc_RNA (1)...(19): siRNA sense strand
gaacucuaugaccuuaaua

SEQ ID NO: 678425 - RNA, 19 nt, Homo sapiens
  misc_RNA (1)...(19): siRNA sense strand
ggauuuuccugucuauuuu

SEQ ID NO: 678426 - RNA, 19 nt, Homo sapiens
  misc_RNA (1)...(19): siRNA sense strand
gauaucauccagucaaugg

SEQ ID NO: 678427 - RNA, 19 nt, Homo sapiens
  misc_RNA (1)...(19): siRNA sense strand
guacaucccagcauucaca

SEQ ID NO: 678428 - RNA, 19 nt, Homo sapiens
  misc_RNA (1)...(19): siRNA sense strand
cuacaauaauucggauuug

SEQ ID NO: 678429 - RNA, 19 nt, Homo sapiens
  misc_RNA (1)...(19): siRNA sense strand
caaugaagagucguuauau

SEQ ID NO: 678430 - RNA, 19 nt, Homo sapiens
  misc_RNA (1)...(19): siRNA sense strand
acccugagcuuggcuauga

SEQ ID NO: 678431 - RNA, 19 nt, Homo sapiens
  misc_RNA (1)...(19): siRNA sense strand
cacccaguuucauguauuu

SEQ ID NO: 678432 - RNA, 19 nt, Homo sapiens
  misc_RNA (1)...(19): siRNA sense strand
gggaggucaucuuuaagga

SEQ ID NO: 678433 - RNA, 19 nt, Homo sapiens
  misc_RNA (1)...(19): siRNA sense strand
ugauggugauggaaagaaa

SEQ ID NO: 678434 - RNA, 19 nt, Homo sapiens
  misc_RNA (1)...(19): siRNA sense strand
ccaaagaaccaggugauca

SEQ ID NO: 678435 - RNA, 19 nt, Homo sapiens
  misc_RNA (1)...(19): siRNA sense strand
aaugaagagucguuauaug

SEQ ID NO: 678436 - RNA, 19 nt, Homo sapiens
  misc_RNA (1)...(19): siRNA sense strand
aaacaaugaagagucguua

SEQ ID NO: 678437 - RNA, 19 nt, Homo sapiens
  misc_RNA (1)...(19): siRNA sense strand
ccuggaaucugauguuucu

SEQ ID NO: 678438 - RNA, 19 nt, Homo sapiens
  misc_RNA (1)...(19): siRNA sense strand
acagaggguuguuguaugg

SEQ ID NO: 678439 - RNA, 19 nt, Homo sapiens
  misc_RNA (1)...(19): siRNA sense strand
agcaguaaaucaagcaauu

SEQ ID NO: 678440 - RNA, 19 nt, Homo sapiens
  misc_RNA (1)...(19): siRNA sense strand
caucauccgagcaguauug

SEQ ID NO: 678441 - RNA, 19 nt, Homo sapiens
  misc_RNA (1)...(19): siRNA sense strand
ccagaagacacucacauuc

SEQ ID NO: 678442 - RNA, 19 nt, Homo sapiens
  misc_RNA (1)...(19): siRNA sense strand
ggacauugggagacauuuc

SEQ ID NO: 678443 - RNA, 19 nt, Homo sapiens
  misc_RNA (1)...(19): siRNA sense strand
gaggaugcucgucugauga

SEQ ID NO: 678444 - RNA, 19 nt, Homo sapiens
  misc_RNA (1)...(19): siRNA sense strand
uuucacaucuuuacggaau

SEQ ID NO: 678445 - RNA, 19 nt, Homo sapiens
  misc_RNA (1)...(19): siRNA sense strand
cacagaggguuguuguaug

SEQ ID NO: 678446 - RNA, 19 nt, Homo sapiens
  misc_RNA (1)...(19): siRNA sense strand
uuacgcauuuccacuucua

SEQ ID NO: 678447 - RNA, 19 nt, Homo sapiens
  misc_RNA (1)...(19): siRNA sense strand
gacgguuacuggagacaau

SEQ ID NO: 678448 - RNA, 19 nt, Homo sapiens
  misc_RNA (1)...(19): siRNA sense strand
cugcaagguuucaaucaug

SEQ ID NO: 678449 - RNA, 19 nt, Homo sapiens
  misc_RNA (1)...(19): siRNA sense strand
gagauuguggcagaaauga

SEQ ID NO: 678450 - RNA, 19 nt, Homo sapiens
  misc_RNA (1)...(19): siRNA sense strand
ggaugcaauucgaagcaau

SEQ ID NO: 678451 - RNA, 19 nt, Homo sapiens
  misc_RNA (1)...(19): siRNA sense strand
gucguuauauggaacucua

SEQ ID NO: 678452 - RNA, 19 nt, Homo sapiens
  misc_RNA (1)...(19): siRNA sense strand
uaacuuuaccauugcagaa

SEQ ID NO: 678453 - RNA, 19 nt, Homo sapiens
  misc_RNA (1)...(19): siRNA sense strand
gaagcagcacccaguuuca

SEQ ID NO: 678454 - RNA, 19 nt, Homo sapiens
  misc_RNA (1)...(19): siRNA sense strand
cgugguacaucccagcauu

SEQ ID NO: 678455 - RNA, 19 nt, Homo sapiens
  misc_RNA (1)...(19): siRNA sense strand
ggcagucgauuugguuaug

SEQ ID NO: 678456 - RNA, 19 nt, Homo sapiens
  misc_RNA (1)...(19): siRNA sense strand
gauggccacauacaguuaa

SEQ ID NO: 678457 - RNA, 19 nt, Homo sapiens
  misc_RNA (1)...(19): siRNA sense strand
auagagacuugcuaaaugg

SEQ ID NO: 678458 - RNA, 19 nt, Homo sapiens
  misc_RNA (1)...(19): siRNA sense strand
ggaauuacgaaaggugcua

SEQ ID NO: 678459 - RNA, 19 nt, Homo sapiens
  misc_RNA (1)...(19): siRNA sense strand
ggugauaucauccagucaa

SEQ ID NO: 678460 - RNA, 19 nt, Homo sapiens
  misc_RNA (1)...(19): siRNA sense strand
caauaauucggauuuguuc

SEQ ID NO: 678461 - RNA, 19 nt, Homo sapiens
  misc_RNA (1)...(19): siRNA sense strand
gagagaucacuauaaauac

SEQ ID NO: 678462 - RNA, 19 nt, Homo sapiens
  misc_RNA (1)...(19): siRNA sense strand
gguuaugcccuuuccaaug

SEQ ID NO: 678463 - RNA, 19 nt, Homo sapiens
  misc_RNA (1)...(19): siRNA sense strand
uggcagaaaugacagaaac

SEQ ID NO: 678464 - RNA, 19 nt, Homo sapiens
  misc_RNA (1)...(19): siRNA sense strand
ggaacuccguaacuaugag

SEQ ID NO: 678465 - RNA, 19 nt, Homo sapiens
  misc_RNA (1)...(19): siRNA sense strand
gggaaaccucaaagcagua

SEQ ID NO: 678466 - RNA, 19 nt, Homo sapiens
  misc_RNA (1)...(19): siRNA sense strand
cuuaauagagacuugcuaa

SEQ ID NO: 678467 - RNA, 19 nt, Homo sapiens
  misc_RNA (1)...(19): siRNA sense strand
ggucggagcugaggaugcu

SEQ ID NO: 678468 - RNA, 19 nt, Homo sapiens
  misc_RNA (1)...(19): siRNA sense strand
gcaaggcuaucuucuucaa

SEQ ID NO: 678469 - RNA, 19 nt, Homo sapiens
  misc_RNA (1)...(19): siRNA sense strand
caaagggccugcaaaucuu

SEQ ID NO: 678470 - RNA, 19 nt, Homo sapiens
  misc_RNA (1)...(19): siRNA sense strand
cgaagaggcugggauguuc

SEQ ID NO: 678471 - RNA, 19 nt, Homo sapiens
  misc_RNA (1)...(19): siRNA sense strand
aagcaaggcuaucuucuuc

SEQ ID NO: 678472 - RNA, 19 nt, Homo sapiens
  misc_RNA (1)...(19): siRNA sense strand
gagacgcuguguauuuguu

SEQ ID NO: 678473 - RNA, 19 nt, Homo sapiens
  misc_RNA (1)...(19): siRNA sense strand
guggagacgcuguguauuu

SEQ ID NO: 678474 - RNA, 19 nt, Homo sapiens
  misc_RNA (1)...(19): siRNA sense strand
ucaaagggccugcaaaucu

SEQ ID NO: 678475 - RNA, 19 nt, Homo sapiens
  misc_RNA (1)...(19): siRNA sense strand
gauagugggcucucugugu

SEQ ID NO: 678476 - RNA, 19 nt, Homo sapiens
  misc_RNA (1)...(19): siRNA sense strand
uggagacgcuguguauuug

SEQ ID NO: 678477 - RNA, 19 nt, Homo sapiens
  misc_RNA (1)...(19): siRNA sense strand
caagcaaggcuaucuucuu

SEQ ID NO: 678478 - RNA, 19 nt, Homo sapiens
  misc_RNA (1)...(19): siRNA sense strand
cacuguggguggcaagaua

SEQ ID NO: 678479 - RNA, 19 nt, Homo sapiens
  misc_RNA (1)...(19): siRNA sense strand
gagcugggccuccucaucu

SEQ ID NO: 678480 - RNA, 19 nt, Homo sapiens
  misc_RNA (1)...(19): siRNA sense strand
gcgaagaggcugggauguu

SEQ ID NO: 678481 - RNA, 19 nt, Homo sapiens
  misc_RNA (1)...(19): siRNA sense strand
ucgagacgcugccugacuu

SEQ ID NO: 678482 - RNA, 19 nt, Homo sapiens
  misc_RNA (1)...(19): siRNA sense strand
ggcuauccuucccuacuuu

SEQ ID NO: 678483 - RNA, 19 nt, Homo sapiens
  misc_RNA (1)...(19): siRNA sense strand
ucaagaacgugaugaaccu

SEQ ID NO: 678484 - RNA, 19 nt, Homo sapiens
  misc_RNA (1)...(19): siRNA sense strand
gacuacaguuggcuaugga

SEQ ID NO: 678485 - RNA, 19 nt, Homo sapiens
  misc_RNA (1)...(19): siRNA sense strand
ggagacagagggcgaagag

SEQ ID NO: 678486 - RNA, 19 nt, Homo sapiens
  misc_RNA (1)...(19): siRNA sense strand
cggguggacucccauuuca

SEQ ID NO: 678487 - RNA, 19 nt, Homo sapiens
  misc_RNA (1)...(19): siRNA sense strand
gcacucaaagggccugcaa

SEQ ID NO: 678488 - RNA, 19 nt, Homo sapiens
  misc_RNA (1)...(19): siRNA sense strand
gaagaggcugggauguuca

SEQ ID NO: 678489 - RNA, 19 nt, Homo sapiens
  misc_RNA (1)...(19): siRNA sense strand
ugacuacaguuggcuaugg

SEQ ID NO: 678490 - RNA, 19 nt, Homo sapiens
  misc_RNA (1)...(19): siRNA sense strand
acgccgugcucuacuacua

SEQ ID NO: 678491 - RNA, 19 nt, Homo sapiens
  misc_RNA (1)...(19): siRNA sense strand
gcaagauagugggcucucu

SEQ ID NO: 678492 - RNA, 19 nt, Homo sapiens
  misc_RNA (1)...(19): siRNA sense strand
uggcuauccuucccuacuu

SEQ ID NO: 678493 - RNA, 19 nt, Homo sapiens
  misc_RNA (1)...(19): siRNA sense strand
uuccagcgccgucuacuuu

SEQ ID NO: 678494 - RNA, 19 nt, Homo sapiens
  misc_RNA (1)...(19): siRNA sense strand
ucaaugacccguucuucgu

SEQ ID NO: 678495 - RNA, 19 nt, Homo sapiens
  misc_RNA (1)...(19): siRNA sense strand
ucgacgccgugcucuacua

SEQ ID NO: 678496 - RNA, 19 nt, Homo sapiens
  misc_RNA (1)...(19): siRNA sense strand
uuuguugguucuccuuuga

SEQ ID NO: 678497 - RNA, 19 nt, Homo sapiens
  misc_RNA (1)...(19): siRNA sense strand
gcugggccuccucaucuuu

SEQ ID NO: 678498 - RNA, 19 nt, Homo sapiens
  misc_RNA (1)...(19): siRNA sense strand
gagcuaccaccuccacucu

SEQ ID NO: 678499 - RNA, 19 nt, Homo sapiens
  misc_RNA (1)...(19): siRNA sense strand
ccugagagucauccgauug

SEQ ID NO: 678500 - RNA, 19 nt, Homo sapiens
  misc_RNA (1)...(19): siRNA sense strand
acaguuggcuauggagaca

SEQ ID NO: 678501 - RNA, 19 nt, Homo sapiens
  misc_RNA (1)...(19): siRNA sense strand
ggagacgcuguguauuugu

SEQ ID NO: 678502 - RNA, 19 nt, Homo sapiens
  misc_RNA (1)...(19): siRNA sense strand
cgggcgugcugacuauuuc

SEQ ID NO: 678503 - RNA, 19 nt, Homo sapiens
  misc_RNA (1)...(19): siRNA sense strand
acucaaagggccugcaaau

SEQ ID NO: 678504 - RNA, 19 nt, Homo sapiens
  misc_RNA (1)...(19): siRNA sense strand
gcagaugccuuugacauua

SEQ ID NO: 678505 - RNA, 19 nt, Homo sapiens
  misc_RNA (1)...(19): siRNA sense strand
ggacagcgcucaugaacau

SEQ ID NO: 678506 - RNA, 19 nt, Homo sapiens
  misc_RNA (1)...(19): siRNA sense strand
ggacagagaagccaaagaa

SEQ ID NO: 678507 - RNA, 19 nt, Homo sapiens
  misc_RNA (1)...(19): siRNA sense strand
ucucagaugucaaugauaa

SEQ ID NO: 678508 - RNA, 19 nt, Homo sapiens
  misc_RNA (1)...(19): siRNA sense strand
ccagaaacauuaccagaug

SEQ ID NO: 678509 - RNA, 19 nt, Homo sapiens
  misc_RNA (1)...(19): siRNA sense strand
ggaaucagcuccaauuagc

SEQ ID NO: 678510 - RNA, 19 nt, Homo sapiens
  misc_RNA (1)...(19): siRNA sense strand
ggagacggauccaucaaau

SEQ ID NO: 678511 - RNA, 19 nt, Homo sapiens
  misc_RNA (1)...(19): siRNA sense strand
gaacaaccauacagaucau

SEQ ID NO: 678512 - RNA, 19 nt, Homo sapiens
  misc_RNA (1)...(19): siRNA sense strand
ugacaaugcuccagaguuc

SEQ ID NO: 678513 - RNA, 19 nt, Homo sapiens
  misc_RNA (1)...(19): siRNA sense strand
gaacaaucccucccagguu

SEQ ID NO: 678514 - RNA, 19 nt, Homo sapiens
  misc_RNA (1)...(19): siRNA sense strand
ggaccgacccuuuguaugu

SEQ ID NO: 678515 - RNA, 19 nt, Homo sapiens
  misc_RNA (1)...(19): siRNA sense strand
gaggaaagagcccaguaua

SEQ ID NO: 678516 - RNA, 19 nt, Homo sapiens
  misc_RNA (1)...(19): siRNA sense strand
gcagagaugaaauauacua

SEQ ID NO: 678517 - RNA, 19 nt, Homo sapiens
  misc_RNA (1)...(19): siRNA sense strand
gaaccuggcuuuuacuuug

SEQ ID NO: 678518 - RNA, 19 nt, Homo sapiens
  misc_RNA (1)...(19): siRNA sense strand
caaagaauacuacgaagug

SEQ ID NO: 678519 - RNA, 19 nt, Homo sapiens
  misc_RNA (1)...(19): siRNA sense strand
gaaacaaccauacaucauc

SEQ ID NO: 678520 - RNA, 19 nt, Homo sapiens
  misc_RNA (1)...(19): siRNA sense strand
uagaagcacuccugucaga

SEQ ID NO: 678521 - RNA, 19 nt, Homo sapiens
  misc_RNA (1)...(19): siRNA sense strand
gcacagaucccaauuucca

SEQ ID NO: 678522 - RNA, 19 nt, Homo sapiens
  misc_RNA (1)...(19): siRNA sense strand
ggauggagauggugcagau

SEQ ID NO: 678523 - RNA, 19 nt, Homo sapiens
  misc_RNA (1)...(19): siRNA sense strand
uagcacagaucccaauuuc

SEQ ID NO: 678524 - RNA, 19 nt, Homo sapiens
  misc_RNA (1)...(19): siRNA sense strand
acagagaagccaaagaaua

SEQ ID NO: 678525 - RNA, 19 nt, Homo sapiens
  misc_RNA (1)...(19): siRNA sense strand
ggagaguguuugccaagga

SEQ ID NO: 678526 - RNA, 19 nt, Homo sapiens
  misc_RNA (1)...(19): siRNA sense strand
ggaaagagcccaguauacu

SEQ ID NO: 678527 - RNA, 19 nt, Homo sapiens
  misc_RNA (1)...(19): siRNA sense strand
ggaacaaccauacagauca

SEQ ID NO: 678528 - RNA, 19 nt, Homo sapiens
  misc_RNA (1)...(19): siRNA sense strand
gaccuuauguggccacugu

SEQ ID NO: 678529 - RNA, 19 nt, Homo sapiens
  misc_RNA (1)...(19): siRNA sense strand
gugcugguguugcucauuu

SEQ ID NO: 678530 - RNA, 19 nt, Homo sapiens
  misc_RNA (1)...(19): siRNA sense strand
gcagugacccuggaagauu

SEQ ID NO: 678531 - RNA, 19 nt, Homo sapiens
  misc_RNA (1)...(19): siRNA sense strand
gagggcagcuuggaggauu

SEQ ID NO: 678532 - RNA, 19 nt, Homo sapiens
  misc_RNA (1)...(19): siRNA sense strand
cugcaucuuuguccucuua

SEQ ID NO: 678533 - RNA, 19 nt, Homo sapiens
  misc_RNA (1)...(19): siRNA sense strand
caagaugacccacgcaaug

SEQ ID NO: 678534 - RNA, 19 nt, Homo sapiens
  misc_RNA (1)...(19): siRNA sense strand
uaucauaacugugaagaag

SEQ ID NO: 678535 - RNA, 19 nt, Homo sapiens
  misc_RNA (1)...(19): siRNA sense strand
ucaaugcagagaugaaaua

SEQ ID NO: 678536 - RNA, 19 nt, Homo sapiens
  misc_RNA (1)...(19): siRNA sense strand
cgacaccacuggagacauc

SEQ ID NO: 678537 - RNA, 19 nt, Homo sapiens
  misc_RNA (1)...(19): siRNA sense strand
caaucaaagucuuagaugu

SEQ ID NO: 678538 - RNA, 19 nt, Homo sapiens
  misc_RNA (1)...(19): siRNA sense strand
uacaacaggugcccuaaug

SEQ ID NO: 678539 - RNA, 19 nt, Homo sapiens
  misc_RNA (1)...(19): siRNA sense strand
cagugacccuggaagauuu

SEQ ID NO: 678540 - RNA, 19 nt, Homo sapiens
  misc_RNA (1)...(19): siRNA sense strand
gaucccaauuuccaaguug

SEQ ID NO: 678541 - RNA, 19 nt, Homo sapiens
  misc_RNA (1)...(19): siRNA sense strand
caauggagcccgagucaga

SEQ ID NO: 678542 - RNA, 19 nt, Homo sapiens
  misc_RNA (1)...(19): siRNA sense strand
uaagggacaaccaagauaa

SEQ ID NO: 678543 - RNA, 19 nt, Homo sapiens
  misc_RNA (1)...(19): siRNA sense strand
gaaguguuccugucacaau

SEQ ID NO: 678544 - RNA, 19 nt, Homo sapiens
  misc_RNA (1)...(19): siRNA sense strand
gagacggauccaucaaaua

SEQ ID NO: 678545 - RNA, 19 nt, Homo sapiens
  misc_RNA (1)...(19): siRNA sense strand
ggaaacaaccauacaucau

SEQ ID NO: 678546 - RNA, 19 nt, Homo sapiens
  misc_RNA (1)...(19): siRNA sense strand
uaacacagcacggauucua

SEQ ID NO: 678547 - RNA, 19 nt, Homo sapiens
  misc_RNA (1)...(19): siRNA sense strand
caacagugcacaucagugu

SEQ ID NO: 678548 - RNA, 19 nt, Homo sapiens
  misc_RNA (1)...(19): siRNA sense strand
caagaaaagcuacaccuua

SEQ ID NO: 678549 - RNA, 19 nt, Homo sapiens
  misc_RNA (1)...(19): siRNA sense strand
cagaaacauuaccagauga

SEQ ID NO: 678550 - RNA, 19 nt, Homo sapiens
  misc_RNA (1)...(19): siRNA sense strand
caacaacagugcacaucag

SEQ ID NO: 678551 - RNA, 19 nt, Homo sapiens
  misc_RNA (1)...(19): siRNA sense strand
gaaagagcccaguauacuc

SEQ ID NO: 678552 - RNA, 19 nt, Homo sapiens
  misc_RNA (1)...(19): siRNA sense strand
cauccucgccugcaucuuu

SEQ ID NO: 678553 - RNA, 19 nt, Homo sapiens
  misc_RNA (1)...(19): siRNA sense strand
gauacuccauugauagaag

SEQ ID NO: 678554 - RNA, 19 nt, Homo sapiens
  misc_RNA (1)...(19): siRNA sense strand
aagaaaagcuacaccuuaa

SEQ ID NO: 678555 - RNA, 19 nt, Homo sapiens
  misc_RNA (1)...(19): siRNA sense strand
gagaagccaaagaauacua

SEQ ID NO: 678556 - RNA, 19 nt, Homo sapiens
  misc_RNA (1)...(19): siRNA sense strand
cagagaagccaaagaauac

SEQ ID NO: 678557 - RNA, 19 nt, Homo sapiens
  misc_RNA (1)...(19): siRNA sense strand
ggacaaccaagauaacaca

SEQ ID NO: 678558 - RNA, 19 nt, Homo sapiens
  misc_RNA (1)...(19): siRNA sense strand
gaaugagcaaugcaaagaa

SEQ ID NO: 678559 - RNA, 19 nt, Homo sapiens
  misc_RNA (1)...(19): siRNA sense strand
augcagagaugaaauauac

SEQ ID NO: 678560 - RNA, 19 nt, Homo sapiens
  misc_RNA (1)...(19): siRNA sense strand
ugagugcgguggaccaaga

SEQ ID NO: 678561 - RNA, 19 nt, Homo sapiens
  misc_RNA (1)...(19): siRNA sense strand
ucggcaagcuucauucaga

SEQ ID NO: 678562 - RNA, 19 nt, Homo sapiens
  misc_RNA (1)...(19): siRNA sense strand
gaccaacaacucaaucaga

SEQ ID NO: 678563 - RNA, 19 nt, Homo sapiens
  misc_RNA (1)...(19): siRNA sense strand
ggaggugccugaggaugug

SEQ ID NO: 678564 - RNA, 19 nt, Homo sapiens
  misc_RNA (1)...(19): siRNA sense strand
gagccaauccucaccuaga

SEQ ID NO: 678565 - RNA, 19 nt, Homo sapiens
  misc_RNA (1)...(19): siRNA sense strand
aaagaauacuacgaaguga

SEQ ID NO: 678566 - RNA, 19 nt, Homo sapiens
  misc_RNA (1)...(19): siRNA sense strand
gcuaacaaccccaacuuua

SEQ ID NO: 678567 - RNA, 19 nt, Homo sapiens
  misc_RNA (1)...(19): siRNA sense strand
cagcugauccagacaguga

SEQ ID NO: 678568 - RNA, 19 nt, Homo sapiens
  misc_RNA (1)...(19): siRNA sense strand
ugaagaagccccugaguuu

SEQ ID NO: 678569 - RNA, 19 nt, Homo sapiens
  misc_RNA (1)...(19): siRNA sense strand
gacuuggcauguccuugua

SEQ ID NO: 678570 - RNA, 19 nt, Homo sapiens
  misc_RNA (1)...(19): siRNA sense strand
ccagaugaguguguuggaa

SEQ ID NO: 678571 - RNA, 19 nt, Homo sapiens
  misc_RNA (1)...(19): siRNA sense strand
gagaggaaagagcccagua

SEQ ID NO: 678572 - RNA, 19 nt, Homo sapiens
  misc_RNA (1)...(19): siRNA sense strand
caucaucgacgacgaggaa

SEQ ID NO: 678573 - RNA, 19 nt, Homo sapiens
  misc_RNA (1)...(19): siRNA sense strand
gauaacacagcacggauuc

SEQ ID NO: 678574 - RNA, 19 nt, Homo sapiens
  misc_RNA (1)...(19): siRNA sense strand
ucacuguccuugcuaugga

SEQ ID NO: 678575 - RNA, 19 nt, Homo sapiens
  misc_RNA (1)...(19): siRNA sense strand
gaacuugggcccauuucag

SEQ ID NO: 678576 - RNA, 19 nt, Homo sapiens
  misc_RNA (1)...(19): siRNA sense strand
agucagaguucaucaucaa

SEQ ID NO: 678577 - RNA, 19 nt, Homo sapiens
  misc_RNA (1)...(19): siRNA sense strand
guugguaucauaacuguga

SEQ ID NO: 678578 - RNA, 19 nt, Homo sapiens
  misc_RNA (1)...(19): siRNA sense strand
ccucagacgugcgcaguga

SEQ ID NO: 678579 - RNA, 19 nt, Homo sapiens
  misc_RNA (1)...(19): siRNA sense strand
caacaacucaaucagauac

SEQ ID NO: 678580 - RNA, 19 nt, Homo sapiens
  misc_RNA (1)...(19): siRNA sense strand
ccaacaacucaaucagaua

SEQ ID NO: 678581 - RNA, 19 nt, Homo sapiens
  misc_RNA (1)...(19): siRNA sense strand
gggagccaauccucaccua

SEQ ID NO: 678582 - RNA, 19 nt, Homo sapiens
  misc_RNA (1)...(19): siRNA sense strand
gcaagcuucauucagauau

SEQ ID NO: 678583 - RNA, 19 nt, Homo sapiens
  misc_RNA (1)...(19): siRNA sense strand
agacaucaaugacaaugag

SEQ ID NO: 678584 - RNA, 19 nt, Homo sapiens
  misc_RNA (1)...(19): siRNA sense strand
ggucagcauuucuacuaca

SEQ ID NO: 678585 - RNA, 19 nt, Homo sapiens
  misc_RNA (1)...(19): siRNA sense strand
gaauacuacgaagugauua

SEQ ID NO: 678586 - RNA, 19 nt, Homo sapiens
  misc_RNA (1)...(19): siRNA sense strand
aagaggagcuggguuugga

SEQ ID NO: 678587 - RNA, 19 nt, Homo sapiens
  misc_RNA (1)...(19): siRNA sense strand
agaauacuacgaagugauu

SEQ ID NO: 678588 - RNA, 19 nt, Homo sapiens
  misc_RNA (1)...(19): siRNA sense strand
ggaacagagcuucgacuuc

SEQ ID NO: 678589 - RNA, 19 nt, Homo sapiens
  misc_RNA (1)...(19): siRNA sense strand
caagcuucauucagauaug

SEQ ID NO: 678590 - RNA, 19 nt, Homo sapiens
  misc_RNA (1)...(19): siRNA sense strand
ccucucagaugucaaugau

SEQ ID NO: 678591 - RNA, 19 nt, Homo sapiens
  misc_RNA (1)...(19): siRNA sense strand
gggagacggauccaucaaa

SEQ ID NO: 678592 - RNA, 19 nt, Homo sapiens
  misc_RNA (1)...(19): siRNA sense strand
uaauaucacuguccuugcu

SEQ ID NO: 678593 - RNA, 19 nt, Homo sapiens
  misc_RNA (1)...(19): siRNA sense strand
guaccuccgucauccaagu

SEQ ID NO: 678594 - RNA, 19 nt, Homo sapiens
  misc_RNA (1)...(19): siRNA sense strand
ucgacucccuccagacgua

SEQ ID NO: 678595 - RNA, 19 nt, Homo sapiens
  misc_RNA (1)...(19): siRNA sense strand
accacaaggugaauuagaa

SEQ ID NO: 678596 - RNA, 19 nt, Homo sapiens
  misc_RNA (1)...(19): siRNA sense strand
guagaaugagcaaugcaaa

SEQ ID NO: 678597 - RNA, 19 nt, Homo sapiens
  misc_RNA (1)...(19): siRNA sense strand
caagugacagccacagaug

SEQ ID NO: 678598 - RNA, 19 nt, Homo sapiens
  misc_RNA (1)...(19): siRNA sense strand
gcaggagcagagugucuuu

SEQ ID NO: 678599 - RNA, 19 nt, Homo sapiens
  misc_RNA (1)...(19): siRNA sense strand
cagaugccuuugacauuag

SEQ ID NO: 678600 - RNA, 19 nt, Homo sapiens
  misc_RNA (1)...(19): siRNA sense strand
ucacaucagcggaccaaga

SEQ ID NO: 678601 - RNA, 19 nt, Homo sapiens
  misc_RNA (1)...(19): siRNA sense strand
uaaaacagguguaauuagg

SEQ ID NO: 678602 - RNA, 19 nt, Homo sapiens
  misc_RNA (1)...(19): siRNA sense strand
gagucagaguucaucauca

SEQ ID NO: 678603 - RNA, 19 nt, Homo sapiens
  misc_RNA (1)...(19): siRNA sense strand
gcacacugaccauccaagu

SEQ ID NO: 678604 - RNA, 19 nt, Homo sapiens
  misc_RNA (1)...(19): siRNA sense strand
gaacuucuuccgcuacuuc

SEQ ID NO: 678605 - RNA, 19 nt, Homo sapiens
  misc_RNA (1)...(19): siRNA sense strand
gcaagucaagaccaucaaa

SEQ ID NO: 678606 - RNA, 19 nt, Homo sapiens
  misc_RNA (1)...(19): siRNA sense strand
cugaguaccuguucgacaa

SEQ ID NO: 678607 - RNA, 19 nt, Homo sapiens
  misc_RNA (1)...(19): siRNA sense strand
gagcaagucaagaccauca

SEQ ID NO: 678608 - RNA, 19 nt, Homo sapiens
  misc_RNA (1)...(19): siRNA sense strand
ucuauggccuucuacuuca

SEQ ID NO: 678609 - RNA, 19 nt, Homo sapiens
  misc_RNA (1)...(19): siRNA sense strand
aaauggagcaugcccagaa

SEQ ID NO: 678610 - RNA, 19 nt, Homo sapiens
  misc_RNA (1)...(19): siRNA sense strand
gagcaaccugcgcaagauu

SEQ ID NO: 678611 - RNA, 19 nt, Homo sapiens
  misc_RNA (1)...(19): siRNA sense strand
gcaaccugcgcaagauuug

SEQ ID NO: 678612 - RNA, 19 nt, Homo sapiens
  misc_RNA (1)...(19): siRNA sense strand
ccacaucugccuucacgau

SEQ ID NO: 678613 - RNA, 19 nt, Homo sapiens
  misc_RNA (1)...(19): siRNA sense strand
acaucugccuucacgauau

SEQ ID NO: 678614 - RNA, 19 nt, Homo sapiens
  misc_RNA (1)...(19): siRNA sense strand
ugagcaaccugcgcaagau

SEQ ID NO: 678615 - RNA, 19 nt, Homo sapiens
  misc_RNA (1)...(19): siRNA sense strand
acaucacgcuggagcucua

SEQ ID NO: 678616 - RNA, 19 nt, Homo sapiens
  misc_RNA (1)...(19): siRNA sense strand
gugagcaaccugcgcaaga

SEQ ID NO: 678617 - RNA, 19 nt, Homo sapiens
  misc_RNA (1)...(19): siRNA sense strand
caucugccuucacgauauc

SEQ ID NO: 678618 - RNA, 19 nt, Homo sapiens
  misc_RNA (1)...(19): siRNA sense strand
cacaucugccuucacgaua

SEQ ID NO: 678619 - RNA, 19 nt, Homo sapiens
  misc_RNA (1)...(19): siRNA sense strand
agagccugcuggaucugua

SEQ ID NO: 678620 - RNA, 19 nt, Homo sapiens
  misc_RNA (1)...(19): siRNA sense strand
gucuauggccuucuacuuc

SEQ ID NO: 678621 - RNA, 19 nt, Homo sapiens
  misc_RNA (1)...(19): siRNA sense strand
ugaugaggcugcagaaccu

SEQ ID NO: 678622 - RNA, 19 nt, Homo sapiens
  misc_RNA (1)...(19): siRNA sense strand
gccaucaacagccacauca

SEQ ID NO: 678623 - RNA, 19 nt, Homo sapiens
  misc_RNA (1)...(19): siRNA sense strand
gauaucaggaagccagagu

SEQ ID NO: 678624 - RNA, 19 nt, Homo sapiens
  misc_RNA (1)...(19): siRNA sense strand
caagucaagaccaucaaag

SEQ ID NO: 678625 - RNA, 19 nt, Homo sapiens
  misc_RNA (1)...(19): siRNA sense strand
gcgugaagaucaaucauuu

SEQ ID NO: 678626 - RNA, 19 nt, Homo sapiens
  misc_RNA (1)...(19): siRNA sense strand
ccaacacgcucaacaggaa

SEQ ID NO: 678627 - RNA, 19 nt, Homo sapiens
  misc_RNA (1)...(19): siRNA sense strand
cgacagcgcggaguaucua

SEQ ID NO: 678628 - RNA, 19 nt, Homo sapiens
  misc_RNA (1)...(19): siRNA sense strand
gaggaucugcugccuggaa

SEQ ID NO: 678629 - RNA, 19 nt, Homo sapiens
  misc_RNA (1)...(19): siRNA sense strand
gcagcaggccugagcaaca

SEQ ID NO: 678630 - RNA, 19 nt, Homo sapiens
  misc_RNA (1)...(19): siRNA sense strand
cagcaggccugagcaacau

SEQ ID NO: 678631 - RNA, 19 nt, Homo sapiens
  misc_RNA (1)...(19): siRNA sense strand
cauccuggccgaggugaua

SEQ ID NO: 678632 - RNA, 19 nt, Homo sapiens
  misc_RNA (1)...(19): siRNA sense strand
ggaaaaccacgccugugua

SEQ ID NO: 678633 - RNA, 19 nt, Homo sapiens
  misc_RNA (1)...(19): siRNA sense strand
aaagaggcgucugcgugaa

SEQ ID NO: 678634 - RNA, 19 nt, Homo sapiens
  misc_RNA (1)...(19): siRNA sense strand
ccaagaggaacaucauucu

SEQ ID NO: 678635 - RNA, 19 nt, Homo sapiens
  misc_RNA (1)...(19): siRNA sense strand
caacacgcucaacaggaaa

SEQ ID NO: 678636 - RNA, 19 nt, Homo sapiens
  misc_RNA (1)...(19): siRNA sense strand
gaaaaccacgccuguguag

SEQ ID NO: 678637 - RNA, 19 nt, Homo sapiens
  misc_RNA (1)...(19): siRNA sense strand
caagaggaacaucauucug

SEQ ID NO: 678638 - RNA, 19 nt, Homo sapiens
  misc_RNA (1)...(19): siRNA sense strand
cggcugguccuucuacuuc

SEQ ID NO: 678639 - RNA, 19 nt, Homo sapiens
  misc_RNA (1)...(19): siRNA sense strand
gcacugacuacuggcucua

SEQ ID NO: 678640 - RNA, 19 nt, Homo sapiens
  misc_RNA (1)...(19): siRNA sense strand
ucaucggcgugaucgugua

SEQ ID NO: 678641 - RNA, 19 nt, Homo sapiens
  misc_RNA (1)...(19): siRNA sense strand
gaacuugucuuucaccaau

SEQ ID NO: 678642 - RNA, 19 nt, Homo sapiens
  misc_RNA (1)...(19): siRNA sense strand
ggauacaucucgccugauu

SEQ ID NO: 678643 - RNA, 19 nt, Homo sapiens
  misc_RNA (1)...(19): siRNA sense strand
caaaugcacuuacugaugu

SEQ ID NO: 678644 - RNA, 19 nt, Homo sapiens
  misc_RNA (1)...(19): siRNA sense strand
ccaaugagauguggaauca

SEQ ID NO: 678645 - RNA, 19 nt, Homo sapiens
  misc_RNA (1)...(19): siRNA sense strand
ugacggaaguugauacuau

SEQ ID NO: 678646 - RNA, 19 nt, Homo sapiens
  misc_RNA (1)...(19): siRNA sense strand
ugaguuggaugaaaugauu

SEQ ID NO: 678647 - RNA, 19 nt, Homo sapiens
  misc_RNA (1)...(19): siRNA sense strand
gcuaagagacgacauugaa

SEQ ID NO: 678648 - RNA, 19 nt, Homo sapiens
  misc_RNA (1)...(19): siRNA sense strand
gcucagcuacgccuuguua

SEQ ID NO: 678649 - RNA, 19 nt, Homo sapiens
  misc_RNA (1)...(19): siRNA sense strand
guacuuuaacgacaacuua

SEQ ID NO: 678650 - RNA, 19 nt, Homo sapiens
  misc_RNA (1)...(19): siRNA sense strand
caaagacccugcaggagau

SEQ ID NO: 678651 - RNA, 19 nt, Homo sapiens
  misc_RNA (1)...(19): siRNA sense strand
agacugaaaugaccauaga

SEQ ID NO: 678652 - RNA, 19 nt, Homo sapiens
  misc_RNA (1)...(19): siRNA sense strand
caagacggccgaacauuga

SEQ ID NO: 678653 - RNA, 19 nt, Homo sapiens
  misc_RNA (1)...(19): siRNA sense strand
gacggaaguugauacuauu

SEQ ID NO: 678654 - RNA, 19 nt, Homo sapiens
  misc_RNA (1)...(19): siRNA sense strand
ggagagacaaaugcacuua

SEQ ID NO: 678655 - RNA, 19 nt, Homo sapiens
  misc_RNA (1)...(19): siRNA sense strand
gggcuuugauggagacuga

SEQ ID NO: 678656 - RNA, 19 nt, Homo sapiens
  misc_RNA (1)...(19): siRNA sense strand
gggccaaauuuacagauga

SEQ ID NO: 678657 - RNA, 19 nt, Homo sapiens
  misc_RNA (1)...(19): siRNA sense strand
gaacguguagguuguacuu

SEQ ID NO: 678658 - RNA, 19 nt, Homo sapiens
  misc_RNA (1)...(19): siRNA sense strand
ccaauucccuguacaucga

SEQ ID NO: 678659 - RNA, 19 nt, Homo sapiens
  misc_RNA (1)...(19): siRNA sense strand
gaaccacuuucuucacaag

SEQ ID NO: 678660 - RNA, 19 nt, Homo sapiens
  misc_RNA (1)...(19): siRNA sense strand
caagauacacaccggauga

SEQ ID NO: 678661 - RNA, 19 nt, Homo sapiens
  misc_RNA (1)...(19): siRNA sense strand
ucagguagcccgagaaugu

SEQ ID NO: 678662 - RNA, 19 nt, Homo sapiens
  misc_RNA (1)...(19): siRNA sense strand
cugcagaugcuaagaauaa

SEQ ID NO: 678663 - RNA, 19 nt, Homo sapiens
  misc_RNA (1)...(19): siRNA sense strand
caacagagcgucccagcau

SEQ ID NO: 678664 - RNA, 19 nt, Homo sapiens
  misc_RNA (1)...(19): siRNA sense strand
gaagcuacauuuggauaag

SEQ ID NO: 678665 - RNA, 19 nt, Homo sapiens
  misc_RNA (1)...(19): siRNA sense strand
gguccaauuuaaccaacua

SEQ ID NO: 678666 - RNA, 19 nt, Homo sapiens
  misc_RNA (1)...(19): siRNA sense strand
ucaagaaggccaucaagga

SEQ ID NO: 678667 - RNA, 19 nt, Homo sapiens
  misc_RNA (1)...(19): siRNA sense strand
ggaaguugauacuauucug

SEQ ID NO: 678668 - RNA, 19 nt, Homo sapiens
  misc_RNA (1)...(19): siRNA sense strand
ugguacagguccaauuuaa

SEQ ID NO: 678669 - RNA, 19 nt, Homo sapiens
  misc_RNA (1)...(19): siRNA sense strand
acguguagguuguacuuua

SEQ ID NO: 678670 - RNA, 19 nt, Homo sapiens
  misc_RNA (1)...(19): siRNA sense strand
cguguagguuguacuuuaa

SEQ ID NO: 678671 - RNA, 19 nt, Homo sapiens
  misc_RNA (1)...(19): siRNA sense strand
caucucgccugauucaaga

SEQ ID NO: 678672 - RNA, 19 nt, Homo sapiens
  misc_RNA (1)...(19): siRNA sense strand
cagaggguguccgagaaua

SEQ ID NO: 678673 - RNA, 19 nt, Homo sapiens
  misc_RNA (1)...(19): siRNA sense strand
gcacaagacggccgaacau

SEQ ID NO: 678674 - RNA, 19 nt, Homo sapiens
  misc_RNA (1)...(19): siRNA sense strand
agacaaaugcacuuacuga

SEQ ID NO: 678675 - RNA, 19 nt, Homo sapiens
  misc_RNA (1)...(19): siRNA sense strand
ugaaaugauuggagagaca

SEQ ID NO: 678676 - RNA, 19 nt, Homo sapiens
  misc_RNA (1)...(19): siRNA sense strand
uaucaagaguccaacacuu

SEQ ID NO: 678677 - RNA, 19 nt, Homo sapiens
  misc_RNA (1)...(19): siRNA sense strand
cgaugaaguugaagcacaa

SEQ ID NO: 678678 - RNA, 19 nt, Homo sapiens
  misc_RNA (1)...(19): siRNA sense strand
gagaaacuaagaguggaua

SEQ ID NO: 678679 - RNA, 19 nt, Homo sapiens
  misc_RNA (1)...(19): siRNA sense strand
caaagccaauucccuguac

SEQ ID NO: 678680 - RNA, 19 nt, Homo sapiens
  misc_RNA (1)...(19): siRNA sense strand
gaaugggaaucgaccuagu

SEQ ID NO: 678681 - RNA, 19 nt, Homo sapiens
  misc_RNA (1)...(19): siRNA sense strand
gagaaugggaaucgaccua

SEQ ID NO: 678682 - RNA, 19 nt, Homo sapiens
  misc_RNA (1)...(19): siRNA sense strand
gugacaaacagacggcuua

SEQ ID NO: 678683 - RNA, 19 nt, Homo sapiens
  misc_RNA (1)...(19): siRNA sense strand
ggccgaacauugaguugug

SEQ ID NO: 678684 - RNA, 19 nt, Homo sapiens
  misc_RNA (1)...(19): siRNA sense strand
gaccauagaauccaucaag

SEQ ID NO: 678685 - RNA, 19 nt, Homo sapiens
  misc_RNA (1)...(19): siRNA sense strand
gcccgagaaugucuauuuc

SEQ ID NO: 678686 - RNA, 19 nt, Homo sapiens
  misc_RNA (1)...(19): siRNA sense strand
gaaaugaccauagaaucca

SEQ ID NO: 678687 - RNA, 19 nt, Homo sapiens
  misc_RNA (1)...(19): siRNA sense strand
ggagacccagcacauacua

SEQ ID NO: 678688 - RNA, 19 nt, Homo sapiens
  misc_RNA (1)...(19): siRNA sense strand
ccauagaauccaucaagaa

SEQ ID NO: 678689 - RNA, 19 nt, Homo sapiens
  misc_RNA (1)...(19): siRNA sense strand
gacugcagaugcuaagaau

SEQ ID NO: 678690 - RNA, 19 nt, Homo sapiens
  misc_RNA (1)...(19): siRNA sense strand
ggaccugagugacaaacag

SEQ ID NO: 678691 - RNA, 19 nt, Homo sapiens
  misc_RNA (1)...(19): siRNA sense strand
gaaaaggaccugagugaca

SEQ ID NO: 678692 - RNA, 19 nt, Homo sapiens
  misc_RNA (1)...(19): siRNA sense strand
cacagaggguguccgagaa

SEQ ID NO: 678693 - RNA, 19 nt, Homo sapiens
  misc_RNA (1)...(19): siRNA sense strand
cagacgcacuuagcaaaga

SEQ ID NO: 678694 - RNA, 19 nt, Homo sapiens
  misc_RNA (1)...(19): siRNA sense strand
gaccaacaccaaccaacuu

SEQ ID NO: 678695 - RNA, 19 nt, Homo sapiens
  misc_RNA (1)...(19): siRNA sense strand
gaaguugauacuauucugu

SEQ ID NO: 678696 - RNA, 19 nt, Homo sapiens
  misc_RNA (1)...(19): siRNA sense strand
caacacuucccgacauaau

SEQ ID NO: 678697 - RNA, 19 nt, Homo sapiens
  misc_RNA (1)...(19): siRNA sense strand
ccaauuuaaccaacuauca

SEQ ID NO: 678698 - RNA, 19 nt, Homo sapiens
  misc_RNA (1)...(19): siRNA sense strand
gaaaugauuggagagacaa

SEQ ID NO: 678699 - RNA, 19 nt, Homo sapiens
  misc_RNA (1)...(19): siRNA sense strand
ugggagaacgugucaauga

SEQ ID NO: 678700 - RNA, 19 nt, Homo sapiens
  misc_RNA (1)...(19): siRNA sense strand
acaaaugcacuuacugaug

SEQ ID NO: 678701 - RNA, 19 nt, Homo sapiens
  misc_RNA (1)...(19): siRNA sense strand
uccaacacuucccgacaua

SEQ ID NO: 678702 - RNA, 19 nt, Homo sapiens
  misc_RNA (1)...(19): siRNA sense strand
acaagacggccgaacauug

SEQ ID NO: 678703 - RNA, 19 nt, Homo sapiens
  misc_RNA (1)...(19): siRNA sense strand
agaaggccaucaaggacaa

SEQ ID NO: 678704 - RNA, 19 nt, Homo sapiens
  misc_RNA (1)...(19): siRNA sense strand
gcagaugcuaagaauaaga

SEQ ID NO: 678705 - RNA, 19 nt, Homo sapiens
  misc_RNA (1)...(19): siRNA sense strand
cgacauaauucggagaaac

SEQ ID NO: 678706 - RNA, 19 nt, Homo sapiens
  misc_RNA (1)...(19): siRNA sense strand
caaagucgccuccaauucc

SEQ ID NO: 678707 - RNA, 19 nt, Homo sapiens
  misc_RNA (1)...(19): siRNA sense strand
ucaaagccaauucccugua

SEQ ID NO: 678708 - RNA, 19 nt, Homo sapiens
  misc_RNA (1)...(19): siRNA sense strand
uugauacuauucuguguug

SEQ ID NO: 678709 - RNA, 19 nt, Homo sapiens
  misc_RNA (1)...(19): siRNA sense strand
ccgagaaugucuauuucau

SEQ ID NO: 678710 - RNA, 19 nt, Homo sapiens
  misc_RNA (1)...(19): siRNA sense strand
gaugaaaugauuggagaga

SEQ ID NO: 678711 - RNA, 19 nt, Homo sapiens
  misc_RNA (1)...(19): siRNA sense strand
aagaaagaaugaagcuaca

SEQ ID NO: 678712 - RNA, 19 nt, Homo sapiens
  misc_RNA (1)...(19): siRNA sense strand
cuacaaagucgccuccaau

SEQ ID NO: 678713 - RNA, 19 nt, Homo sapiens
  misc_RNA (1)...(19): siRNA sense strand
cauagaauccaucaagaag

SEQ ID NO: 678714 - RNA, 19 nt, Homo sapiens
  misc_RNA (1)...(19): siRNA sense strand
gaaacuaagaguggauaca

SEQ ID NO: 678715 - RNA, 19 nt, Homo sapiens
  misc_RNA (1)...(19): siRNA sense strand
gaauaccaugcuucccuuu

SEQ ID NO: 678716 - RNA, 19 nt, Homo sapiens
  misc_RNA (1)...(19): siRNA sense strand
caacaccaaccaacuuucu

SEQ ID NO: 678717 - RNA, 19 nt, Homo sapiens
  misc_RNA (1)...(19): siRNA sense strand
uaagcuaagagacgacauu

SEQ ID NO: 678718 - RNA, 19 nt, Homo sapiens
  misc_RNA (1)...(19): siRNA sense strand
ugaagcuacauuuggauaa

SEQ ID NO: 678719 - RNA, 19 nt, Homo sapiens
  misc_RNA (1)...(19): siRNA sense strand
gacauaggguuuuggaaau

SEQ ID NO: 678720 - RNA, 19 nt, Homo sapiens
  misc_RNA (1)...(19): siRNA sense strand
cuaagagacgacauugaaa

SEQ ID NO: 678721 - RNA, 19 nt, Homo sapiens
  misc_RNA (1)...(19): siRNA sense strand
guccaacacuucccgacau

SEQ ID NO: 678722 - RNA, 19 nt, Homo sapiens
  misc_RNA (1)...(19): siRNA sense strand
cagcacauacuacaaaguc

SEQ ID NO: 678723 - RNA, 19 nt, Homo sapiens
  misc_RNA (1)...(19): siRNA sense strand
uaccaugcuucccuuuguu

SEQ ID NO: 678724 - RNA, 19 nt, Homo sapiens
  misc_RNA (1)...(19): siRNA sense strand
uacaaagucgccuccaauu

SEQ ID NO: 678725 - RNA, 19 nt, Homo sapiens
  misc_RNA (1)...(19): siRNA sense strand
acacaccggaugacuggua

SEQ ID NO: 678726 - RNA, 19 nt, Homo sapiens
  misc_RNA (1)...(19): siRNA sense strand
auaccaugcuucccuuugu

SEQ ID NO: 678727 - RNA, 19 nt, Homo sapiens
  misc_RNA (1)...(19): siRNA sense strand
uaacgagguacacgagguu

SEQ ID NO: 678728 - RNA, 19 nt, Homo sapiens
  misc_RNA (1)...(19): siRNA sense strand
cacaacugcugacggaagu

SEQ ID NO: 678729 - RNA, 19 nt, Homo sapiens
  misc_RNA (1)...(19): siRNA sense strand
guaccauggccucaagcua

SEQ ID NO: 678730 - RNA, 19 nt, Homo sapiens
  misc_RNA (1)...(19): siRNA sense strand
agagacaaaugcacuuacu

SEQ ID NO: 678731 - RNA, 19 nt, Homo sapiens
  misc_RNA (1)...(19): siRNA sense strand
uuaaccaacuaucaagagu

SEQ ID NO: 678732 - RNA, 19 nt, Homo sapiens
  misc_RNA (1)...(19): siRNA sense strand
ucaguaccauggccucaag

SEQ ID NO: 678733 - RNA, 19 nt, Homo sapiens
  misc_RNA (1)...(19): siRNA sense strand
gacaaaugcacuuacugau

SEQ ID NO: 678734 - RNA, 19 nt, Homo sapiens
  misc_RNA (1)...(19): siRNA sense strand
cauaauucggagaaacuaa

SEQ ID NO: 678735 - RNA, 19 nt, Homo sapiens
  misc_RNA (1)...(19): siRNA sense strand
guacagguccaauuuaacc

SEQ ID NO: 678736 - RNA, 19 nt, Homo sapiens
  misc_RNA (1)...(19): siRNA sense strand
ggagagggucgaugcaacu

SEQ ID NO: 678737 - RNA, 19 nt, Homo sapiens
  misc_RNA (1)...(19): siRNA sense strand
aaacuaagaguggauacau

SEQ ID NO: 678738 - RNA, 19 nt, Homo sapiens
  misc_RNA (1)...(19): siRNA sense strand
ggagaaacuaagaguggau

SEQ ID NO: 678739 - RNA, 19 nt, Homo sapiens
  misc_RNA (1)...(19): siRNA sense strand
ugaaaugaccauagaaucc

SEQ ID NO: 678740 - RNA, 19 nt, Homo sapiens
  misc_RNA (1)...(19): siRNA sense strand
acaaagucgccuccaauuc

SEQ ID NO: 678741 - RNA, 19 nt, Homo sapiens
  misc_RNA (1)...(19): siRNA sense strand
gaauuucucucuuggacaa

SEQ ID NO: 678742 - RNA, 19 nt, Homo sapiens
  misc_RNA (1)...(19): siRNA sense strand
ugaagcugaugguguauaa

SEQ ID NO: 678743 - RNA, 19 nt, Homo sapiens
  misc_RNA (1)...(19): siRNA sense strand
ccagaucucuaccacagaa

SEQ ID NO: 678744 - RNA, 19 nt, Homo sapiens
  misc_RNA (1)...(19): siRNA sense strand
gcacagagggccuagauac

SEQ ID NO: 678745 - RNA, 19 nt, Homo sapiens
  misc_RNA (1)...(19): siRNA sense strand
ccuugaagcugauggugua

SEQ ID NO: 678746 - RNA, 19 nt, Homo sapiens
  misc_RNA (1)...(19): siRNA sense strand
gaucucuaccacagaauaa

SEQ ID NO: 678747 - RNA, 19 nt, Homo sapiens
  misc_RNA (1)...(19): siRNA sense strand
gaaagccaauguggagaag

SEQ ID NO: 678748 - RNA, 19 nt, Homo sapiens
  misc_RNA (1)...(19): siRNA sense strand
cuggagguguucaauauga

SEQ ID NO: 678749 - RNA, 19 nt, Homo sapiens
  misc_RNA (1)...(19): siRNA sense strand
acucgaggcugaacaagga

SEQ ID NO: 678750 - RNA, 19 nt, Homo sapiens
  misc_RNA (1)...(19): siRNA sense strand
ggacgugucgggaauuucu

SEQ ID NO: 678751 - RNA, 19 nt, Homo sapiens
  misc_RNA (1)...(19): siRNA sense strand
ccugaaggcacuacugaaa

SEQ ID NO: 678752 - RNA, 19 nt, Homo sapiens
  misc_RNA (1)...(19): siRNA sense strand
gccuggagcccuacuuuga

SEQ ID NO: 678753 - RNA, 19 nt, Homo sapiens
  misc_RNA (1)...(19): siRNA sense strand
ccgugaagcuggagguguu

SEQ ID NO: 678754 - RNA, 19 nt, Homo sapiens
  misc_RNA (1)...(19): siRNA sense strand
cagcagcaguucucaugag

SEQ ID NO: 678755 - RNA, 19 nt, Homo sapiens
  misc_RNA (1)...(19): siRNA sense strand
ugaaggcacuacugaaagc

SEQ ID NO: 678756 - RNA, 19 nt, Homo sapiens
  misc_RNA (1)...(19): siRNA sense strand
gauguggcauuggcuaugg

SEQ ID NO: 678757 - RNA, 19 nt, Homo sapiens
  misc_RNA (1)...(19): siRNA sense strand
ugaaagccaauguggagaa

SEQ ID NO: 678758 - RNA, 19 nt, Homo sapiens
  misc_RNA (1)...(19): siRNA sense strand
ggaagcccuugaagcugau

SEQ ID NO: 678759 - RNA, 19 nt, Homo sapiens
  misc_RNA (1)...(19): siRNA sense strand
gucgggaauuucucucuug

SEQ ID NO: 678760 - RNA, 19 nt, Homo sapiens
  misc_RNA (1)...(19): siRNA sense strand
ggacuucuuuacgcucauc

SEQ ID NO: 678761 - RNA, 19 nt, Homo sapiens
  misc_RNA (1)...(19): siRNA sense strand
uacuuugacuucaucauca

SEQ ID NO: 678762 - RNA, 19 nt, Homo sapiens
  misc_RNA (1)...(19): siRNA sense strand
agcuggagguguucaauau

SEQ ID NO: 678763 - RNA, 19 nt, Homo sapiens
  misc_RNA (1)...(19): siRNA sense strand
gugagcagguguggcaugu

SEQ ID NO: 678764 - RNA, 19 nt, Homo sapiens
  misc_RNA (1)...(19): siRNA sense strand
gcccuacuuugacuucauc

SEQ ID NO: 678765 - RNA, 19 nt, Homo sapiens
  misc_RNA (1)...(19): siRNA sense strand
ggagaaugacacccugaag

SEQ ID NO: 678766 - RNA, 19 nt, Homo sapiens
  misc_RNA (1)...(19): siRNA sense strand
gacuucaucaucaccauug

SEQ ID NO: 678767 - RNA, 19 nt, Homo sapiens
  misc_RNA (1)...(19): siRNA sense strand
aagcuggagguguucaaua

SEQ ID NO: 678768 - RNA, 19 nt, Homo sapiens
  misc_RNA (1)...(19): siRNA sense strand
gaagcuggagguguucaau

SEQ ID NO: 678769 - RNA, 19 nt, Homo sapiens
  misc_RNA (1)...(19): siRNA sense strand
gaccaccacagcugucuca

SEQ ID NO: 678770 - RNA, 19 nt, Homo sapiens
  misc_RNA (1)...(19): siRNA sense strand
caggcagagugacuacaug

SEQ ID NO: 678771 - RNA, 19 nt, Homo sapiens
  misc_RNA (1)...(19): siRNA sense strand
agucugggauguggcauug

SEQ ID NO: 678772 - RNA, 19 nt, Homo sapiens
  misc_RNA (1)...(19): siRNA sense strand
cuacuuugacuucaucauc

SEQ ID NO: 678773 - RNA, 19 nt, Homo sapiens
  misc_RNA (1)...(19): siRNA sense strand
ggcauuggcuauggguauc

SEQ ID NO: 678774 - RNA, 19 nt, Homo sapiens
  misc_RNA (1)...(19): siRNA sense strand
gccgggaggugacuguaac

SEQ ID NO: 678775 - RNA, 19 nt, Homo sapiens
  misc_RNA (1)...(19): siRNA sense strand
ggauguggcauuggcuaug

SEQ ID NO: 678776 - RNA, 19 nt, Homo sapiens
  misc_RNA (1)...(19): siRNA sense strand
ggcugaacaaggagaauga

SEQ ID NO: 678777 - RNA, 19 nt, Homo sapiens
  misc_RNA (1)...(19): siRNA sense strand
ggagcccuacuuugacuuc

SEQ ID NO: 678778 - RNA, 19 nt, Homo sapiens
  misc_RNA (1)...(19): siRNA sense strand
uguauaacuccaagucaga

SEQ ID NO: 678779 - RNA, 19 nt, Homo sapiens
  misc_RNA (1)...(19): siRNA sense strand
acagagggccuagauacug

SEQ ID NO: 678780 - RNA, 19 nt, Homo sapiens
  misc_RNA (1)...(19): siRNA sense strand
ugucgggaauuucucucuu

SEQ ID NO: 678781 - RNA, 19 nt, Homo sapiens
  misc_RNA (1)...(19): siRNA sense strand
cccaccaccugaugcucua

SEQ ID NO: 678782 - RNA, 19 nt, Homo sapiens
  misc_RNA (1)...(19): siRNA sense strand
cccaccaccuucugcucua

SEQ ID NO: 678783 - RNA, 19 nt, Homo sapiens
  misc_RNA (1)...(19): siRNA sense strand
cauuggcuauggguaucua

SEQ ID NO: 678784 - RNA, 19 nt, Homo sapiens
  misc_RNA (1)...(19): siRNA sense strand
gcagauaccuggauuucuu

SEQ ID NO: 678785 - RNA, 19 nt, Homo sapiens
  misc_RNA (1)...(19): siRNA sense strand
ggaaagaagagcuaaguaa

SEQ ID NO: 678786 - RNA, 19 nt, Homo sapiens
  misc_RNA (1)...(19): siRNA sense strand
ggaccuacauguuacuaaa

SEQ ID NO: 678787 - RNA, 19 nt, Homo sapiens
  misc_RNA (1)...(19): siRNA sense strand
ggaagccacugucgagauu

SEQ ID NO: 678788 - RNA, 19 nt, Homo sapiens
  misc_RNA (1)...(19): siRNA sense strand
ggaagcagauaccuggauu

SEQ ID NO: 678789 - RNA, 19 nt, Homo sapiens
  misc_RNA (1)...(19): siRNA sense strand
caagucaauugcuggauuu

SEQ ID NO: 678790 - RNA, 19 nt, Homo sapiens
  misc_RNA (1)...(19): siRNA sense strand
cgaaaugccugcagcacuu

SEQ ID NO: 678791 - RNA, 19 nt, Homo sapiens
  misc_RNA (1)...(19): siRNA sense strand
cauaaccacuccagagauu

SEQ ID NO: 678792 - RNA, 19 nt, Homo sapiens
  misc_RNA (1)...(19): siRNA sense strand
uagaaauggugcaggauaa

SEQ ID NO: 678793 - RNA, 19 nt, Homo sapiens
  misc_RNA (1)...(19): siRNA sense strand
ggaaaacagucaagaaguu

SEQ ID NO: 678794 - RNA, 19 nt, Homo sapiens
  misc_RNA (1)...(19): siRNA sense strand
ccaagucaauugcuggauu

SEQ ID NO: 678795 - RNA, 19 nt, Homo sapiens
  misc_RNA (1)...(19): siRNA sense strand
ucucagacauuucgcauug

SEQ ID NO: 678796 - RNA, 19 nt, Homo sapiens
  misc_RNA (1)...(19): siRNA sense strand
uaaccaagcucagucuuca

SEQ ID NO: 678797 - RNA, 19 nt, Homo sapiens
  misc_RNA (1)...(19): siRNA sense strand
acucuaaucuggagacauu

SEQ ID NO: 678798 - RNA, 19 nt, Homo sapiens
  misc_RNA (1)...(19): siRNA sense strand
caacauagacaucauuucu

SEQ ID NO: 678799 - RNA, 19 nt, Homo sapiens
  misc_RNA (1)...(19): siRNA sense strand
gcacauggaguggcucuuu

SEQ ID NO: 678800 - RNA, 19 nt, Homo sapiens
  misc_RNA (1)...(19): siRNA sense strand
ccaacaauguguccagaug

SEQ ID NO: 678801 - RNA, 19 nt, Homo sapiens
  misc_RNA (1)...(19): siRNA sense strand
gugcaucacuaaaccagaa

SEQ ID NO: 678802 - RNA, 19 nt, Homo sapiens
  misc_RNA (1)...(19): siRNA sense strand
ccaaugagcuggccaugcu

SEQ ID NO: 678803 - RNA, 19 nt, Homo sapiens
  misc_RNA (1)...(19): siRNA sense strand
caccauggcuaaagggauu

SEQ ID NO: 678804 - RNA, 19 nt, Homo sapiens
  misc_RNA (1)...(19): siRNA sense strand
agacaucauuucuuucaga

SEQ ID NO: 678805 - RNA, 19 nt, Homo sapiens
  misc_RNA (1)...(19): siRNA sense strand
ccagacugcugccaagcua

SEQ ID NO: 678806 - RNA, 19 nt, Homo sapiens
  misc_RNA (1)...(19): siRNA sense strand
cuacaaccguguccuggaa

SEQ ID NO: 678807 - RNA, 19 nt, Homo sapiens
  misc_RNA (1)...(19): siRNA sense strand
ggugaacaguggcucagaa

SEQ ID NO: 678808 - RNA, 19 nt, Homo sapiens
  misc_RNA (1)...(19): siRNA sense strand
gcucuuugaugcugaagga

SEQ ID NO: 678809 - RNA, 19 nt, Homo sapiens
  misc_RNA (1)...(19): siRNA sense strand
ggacaucaguaaccaagcu

SEQ ID NO: 678810 - RNA, 19 nt, Homo sapiens
  misc_RNA (1)...(19): siRNA sense strand
ccagaaugccuccauguga

SEQ ID NO: 678811 - RNA, 19 nt, Homo sapiens
  misc_RNA (1)...(19): siRNA sense strand
gaaguugggaccuacaugu

SEQ ID NO: 678812 - RNA, 19 nt, Homo sapiens
  misc_RNA (1)...(19): siRNA sense strand
gugaagaaguaaaucagau

SEQ ID NO: 678813 - RNA, 19 nt, Homo sapiens
  misc_RNA (1)...(19): siRNA sense strand
caugauaggcauagaaaug

SEQ ID NO: 678814 - RNA, 19 nt, Homo sapiens
  misc_RNA (1)...(19): siRNA sense strand
ucacuaaaccagaaguuga

SEQ ID NO: 678815 - RNA, 19 nt, Homo sapiens
  misc_RNA (1)...(19): siRNA sense strand
gaaauggugcaggauaaga

SEQ ID NO: 678816 - RNA, 19 nt, Homo sapiens
  misc_RNA (1)...(19): siRNA sense strand
caaacaacauagacaucau

SEQ ID NO: 678817 - RNA, 19 nt, Homo sapiens
  misc_RNA (1)...(19): siRNA sense strand
cuaaagggauugggaaugg

SEQ ID NO: 678818 - RNA, 19 nt, Homo sapiens
  misc_RNA (1)...(19): siRNA sense strand
gcuaaagaucaguauauug

SEQ ID NO: 678819 - RNA, 19 nt, Homo sapiens
  misc_RNA (1)...(19): siRNA sense strand
cagaggagccuaccaugga

SEQ ID NO: 678820 - RNA, 19 nt, Homo sapiens
  misc_RNA (1)...(19): siRNA sense strand
acacuuggcuugacaaacg

SEQ ID NO: 678821 - RNA, 19 nt, Homo sapiens
  misc_RNA (1)...(19): siRNA sense strand
gcugcgggaugaauuugaa

SEQ ID NO: 678822 - RNA, 19 nt, Homo sapiens
  misc_RNA (1)...(19): siRNA sense strand
cauuggaucugcugugcuu

SEQ ID NO: 678823 - RNA, 19 nt, Homo sapiens
  misc_RNA (1)...(19): siRNA sense strand
gcaguagaaguauuucguu

SEQ ID NO: 678824 - RNA, 19 nt, Homo sapiens
  misc_RNA (1)...(19): siRNA sense strand
gaagaaaaucuacaggaaa

SEQ ID NO: 678825 - RNA, 19 nt, Homo sapiens
  misc_RNA (1)...(19): siRNA sense strand
guauuucguucugccuuaa

SEQ ID NO: 678826 - RNA, 19 nt, Homo sapiens
  misc_RNA (1)...(19): siRNA sense strand
uugcuaagcugcgggauga

SEQ ID NO: 678827 - RNA, 19 nt, Homo sapiens
  misc_RNA (1)...(19): siRNA sense strand
gaagcagauaccuggauuu

SEQ ID NO: 678828 - RNA, 19 nt, Homo sapiens
  misc_RNA (1)...(19): siRNA sense strand
gucaagaaguugggaccua

SEQ ID NO: 678829 - RNA, 19 nt, Homo sapiens
  misc_RNA (1)...(19): siRNA sense strand
uaccauggaugcaguccuu

SEQ ID NO: 678830 - RNA, 19 nt, Homo sapiens
  misc_RNA (1)...(19): siRNA sense strand
caagcuaaagaucaguaua

SEQ ID NO: 678831 - RNA, 19 nt, Homo sapiens
  misc_RNA (1)...(19): siRNA sense strand
gauaagcugucggccucuu

SEQ ID NO: 678832 - RNA, 19 nt, Homo sapiens
  misc_RNA (1)...(19): siRNA sense strand
ugaggugauuaaagaagaa

SEQ ID NO: 678833 - RNA, 19 nt, Homo sapiens
  misc_RNA (1)...(19): siRNA sense strand
caaagggguuucuaaagga

SEQ ID NO: 678834 - RNA, 19 nt, Homo sapiens
  misc_RNA (1)...(19): siRNA sense strand
aguauuucguucugccuua

SEQ ID NO: 678835 - RNA, 19 nt, Homo sapiens
  misc_RNA (1)...(19): siRNA sense strand
gcacuucaacaccuuugga

SEQ ID NO: 678836 - RNA, 19 nt, Homo sapiens
  misc_RNA (1)...(19): siRNA sense strand
ccacaaggaacaucuuucu

SEQ ID NO: 678837 - RNA, 19 nt, Homo sapiens
  misc_RNA (1)...(19): siRNA sense strand
ugcuugaggugauuaaaga

SEQ ID NO: 678838 - RNA, 19 nt, Homo sapiens
  misc_RNA (1)...(19): siRNA sense strand
ucccauggcagcagucaua

SEQ ID NO: 678839 - RNA, 19 nt, Homo sapiens
  misc_RNA (1)...(19): siRNA sense strand
gaagugcagacaggauuug

SEQ ID NO: 678840 - RNA, 19 nt, Homo sapiens
  misc_RNA (1)...(19): siRNA sense strand
ccagggcgcacucaaacaa

SEQ ID NO: 678841 - RNA, 19 nt, Homo sapiens
  misc_RNA (1)...(19): siRNA sense strand
uaagcugcgggaugaauuu

SEQ ID NO: 678842 - RNA, 19 nt, Homo sapiens
  misc_RNA (1)...(19): siRNA sense strand
gugcagacaggauuuggaa

SEQ ID NO: 678843 - RNA, 19 nt, Homo sapiens
  misc_RNA (1)...(19): siRNA sense strand
ucaaacaacauagacauca

SEQ ID NO: 678844 - RNA, 19 nt, Homo sapiens
  misc_RNA (1)...(19): siRNA sense strand
cacauggaguggcucuuug

SEQ ID NO: 678845 - RNA, 19 nt, Homo sapiens
  misc_RNA (1)...(19): siRNA sense strand
aaguaaaucagauccauga

SEQ ID NO: 678846 - RNA, 19 nt, Homo sapiens
  misc_RNA (1)...(19): siRNA sense strand
agaagaaaaucuacaggaa

SEQ ID NO: 678847 - RNA, 19 nt, Homo sapiens
  misc_RNA (1)...(19): siRNA sense strand
ccaaagggguuucuaaagg

SEQ ID NO: 678848 - RNA, 19 nt, Homo sapiens
  misc_RNA (1)...(19): siRNA sense strand
caacaauguguccagaugu

SEQ ID NO: 678849 - RNA, 19 nt, Homo sapiens
  misc_RNA (1)...(19): siRNA sense strand
uccuugagaugcauccuuu

SEQ ID NO: 678850 - RNA, 19 nt, Homo sapiens
  misc_RNA (1)...(19): siRNA sense strand
auagaaauggugcaggaua

SEQ ID NO: 678851 - RNA, 19 nt, Homo sapiens
  misc_RNA (1)...(19): siRNA sense strand
aagauacgcugagcacauc

SEQ ID NO: 678852 - RNA, 19 nt, Homo sapiens
  misc_RNA (1)...(19): siRNA sense strand
uuacacacuuggcuugaca

SEQ ID NO: 678853 - RNA, 19 nt, Homo sapiens
  misc_RNA (1)...(19): siRNA sense strand
guacuucccggacaucagu

SEQ ID NO: 678854 - RNA, 19 nt, Homo sapiens
  misc_RNA (1)...(19): siRNA sense strand
agaaguaaaucagauccau

SEQ ID NO: 678855 - RNA, 19 nt, Homo sapiens
  misc_RNA (1)...(19): siRNA sense strand
guaaccaagcucagucuuc

SEQ ID NO: 678856 - RNA, 19 nt, Homo sapiens
  misc_RNA (1)...(19): siRNA sense strand
gaagguugggcucucacuu

SEQ ID NO: 678857 - RNA, 19 nt, Homo sapiens
  misc_RNA (1)...(19): siRNA sense strand
agacaggauuuggaagguu

SEQ ID NO: 678858 - RNA, 19 nt, Homo sapiens
  misc_RNA (1)...(19): siRNA sense strand
agaaguugauuuugcagua

SEQ ID NO: 678859 - RNA, 19 nt, Homo sapiens
  misc_RNA (1)...(19): siRNA sense strand
cagauaccuggauuucuuu

SEQ ID NO: 678860 - RNA, 19 nt, Homo sapiens
  misc_RNA (1)...(19): siRNA sense strand
ccaggauccuugagaugca

SEQ ID NO: 678861 - RNA, 19 nt, Homo sapiens
  misc_RNA (1)...(19): siRNA sense strand
uacaagcaccgucuucuuc

SEQ ID NO: 678862 - RNA, 19 nt, Homo sapiens
  misc_RNA (1)...(19): siRNA sense strand
gcauacaagcaccgucuuc

SEQ ID NO: 678863 - RNA, 19 nt, Homo sapiens
  misc_RNA (1)...(19): siRNA sense strand
ugaaugcaguggcacaaaa

SEQ ID NO: 678864 - RNA, 19 nt, Homo sapiens
  misc_RNA (1)...(19): siRNA sense strand
gcacucaaacaacauagac

SEQ ID NO: 678865 - RNA, 19 nt, Homo sapiens
  misc_RNA (1)...(19): siRNA sense strand
caacacauggaaagaagag

SEQ ID NO: 678866 - RNA, 19 nt, Homo sapiens
  misc_RNA (1)...(19): siRNA sense strand
ggaaauccacaaggaacau

SEQ ID NO: 678867 - RNA, 19 nt, Homo sapiens
  misc_RNA (1)...(19): siRNA sense strand
guugggaccuacauguuac

SEQ ID NO: 678868 - RNA, 19 nt, Homo sapiens
  misc_RNA (1)...(19): siRNA sense strand
gcuaaagggauugggaaug

SEQ ID NO: 678869 - RNA, 19 nt, Homo sapiens
  misc_RNA (1)...(19): siRNA sense strand
ugaagugcagacaggauuu

SEQ ID NO: 678870 - RNA, 19 nt, Homo sapiens
  misc_RNA (1)...(19): siRNA sense strand
aaagauacgcugagcacau

SEQ ID NO: 678871 - RNA, 19 nt, Homo sapiens
  misc_RNA (1)...(19): siRNA sense strand
gccaagcuaaagaucagua

SEQ ID NO: 678872 - RNA, 19 nt, Homo sapiens
  misc_RNA (1)...(19): siRNA sense strand
cuaaaccagaaguugauuu

SEQ ID NO: 678873 - RNA, 19 nt, Homo sapiens
  misc_RNA (1)...(19): siRNA sense strand
gaaaacagucaagaaguug

SEQ ID NO: 678874 - RNA, 19 nt, Homo sapiens
  misc_RNA (1)...(19): siRNA sense strand
uugaggugauuaaagaaga

SEQ ID NO: 678875 - RNA, 19 nt, Homo sapiens
  misc_RNA (1)...(19): siRNA sense strand
gucauaaccacuccagaga

SEQ ID NO: 678876 - RNA, 19 nt, Homo sapiens
  misc_RNA (1)...(19): siRNA sense strand
cccaacacauggaaagaag

SEQ ID NO: 678877 - RNA, 19 nt, Homo sapiens
  misc_RNA (1)...(19): siRNA sense strand
accaagcucagucuucaua

SEQ ID NO: 678878 - RNA, 19 nt, Homo sapiens
  misc_RNA (1)...(19): siRNA sense strand
guuggcagaggcagcauuu

SEQ ID NO: 678879 - RNA, 19 nt, Homo sapiens
  misc_RNA (1)...(19): siRNA sense strand
uuacuaaaguuugcuaagc

SEQ ID NO: 678880 - RNA, 19 nt, Homo sapiens
  misc_RNA (1)...(19): siRNA sense strand
aguugggaccuacauguua

SEQ ID NO: 678881 - RNA, 19 nt, Homo sapiens
  misc_RNA (1)...(19): siRNA sense strand
gaaaugccugcagcacuuc

SEQ ID NO: 678882 - RNA, 19 nt, Homo sapiens
  misc_RNA (1)...(19): siRNA sense strand
ccuugugccuggucacuuc

SEQ ID NO: 678883 - RNA, 19 nt, Homo sapiens
  misc_RNA (1)...(19): siRNA sense strand
uggaaagaagagcuaagua

SEQ ID NO: 678884 - RNA, 19 nt, Homo sapiens
  misc_RNA (1)...(19): siRNA sense strand
caacauagcuucaauuaca

SEQ ID NO: 678885 - RNA, 19 nt, Homo sapiens
  misc_RNA (1)...(19): siRNA sense strand
cagcaggacucacgcauua

SEQ ID NO: 678886 - RNA, 19 nt, Homo sapiens
  misc_RNA (1)...(19): siRNA sense strand
caaagcaaaugcauucaaa

SEQ ID NO: 678887 - RNA, 19 nt, Homo sapiens
  misc_RNA (1)...(19): siRNA sense strand
agacauaccuaacuuaaga

SEQ ID NO: 678888 - RNA, 19 nt, Homo sapiens
  misc_RNA (1)...(19): siRNA sense strand
gauaauacccaaugagaaa

SEQ ID NO: 678889 - RNA, 19 nt, Homo sapiens
  misc_RNA (1)...(19): siRNA sense strand
gugaagaaguugacauuga

SEQ ID NO: 678890 - RNA, 19 nt, Homo sapiens
  misc_RNA (1)...(19): siRNA sense strand
auaaauaccuggauggaaa

SEQ ID NO: 678891 - RNA, 19 nt, Homo sapiens
  misc_RNA (1)...(19): siRNA sense strand
ggaccgcauugaagagaua

SEQ ID NO: 678892 - RNA, 19 nt, Homo sapiens
  misc_RNA (1)...(19): siRNA sense strand
gcagacauaccuaacuuaa

SEQ ID NO: 678893 - RNA, 19 nt, Homo sapiens
  misc_RNA (1)...(19): siRNA sense strand
ggaaucagccuaucuuuac

SEQ ID NO: 678894 - RNA, 19 nt, Homo sapiens
  misc_RNA (1)...(19): siRNA sense strand
ccagaaagucuacguguaa

SEQ ID NO: 678895 - RNA, 19 nt, Homo sapiens
  misc_RNA (1)...(19): siRNA sense strand
ccacgugucugcugugugu

SEQ ID NO: 678896 - RNA, 19 nt, Homo sapiens
  misc_RNA (1)...(19): siRNA sense strand
gaaagucuacguguaauuc

SEQ ID NO: 678897 - RNA, 19 nt, Homo sapiens
  misc_RNA (1)...(19): siRNA sense strand
gaagauauagaagauggua

SEQ ID NO: 678898 - RNA, 19 nt, Homo sapiens
  misc_RNA (1)...(19): siRNA sense strand
ugaagaaguugacauugau

SEQ ID NO: 678899 - RNA, 19 nt, Homo sapiens
  misc_RNA (1)...(19): siRNA sense strand
uagcuucaauuacagauga

SEQ ID NO: 678900 - RNA, 19 nt, Homo sapiens
  misc_RNA (1)...(19): siRNA sense strand
ccucuuaauuuaccagaaa

SEQ ID NO: 678901 - RNA, 19 nt, Homo sapiens
  misc_RNA (1)...(19): siRNA sense strand
ggaaagcauccaaacaguu

SEQ ID NO: 678902 - RNA, 19 nt, Homo sapiens
  misc_RNA (1)...(19): siRNA sense strand
gggaaagcauccaaacagu

SEQ ID NO: 678903 - RNA, 19 nt, Homo sapiens
  misc_RNA (1)...(19): siRNA sense strand
caacaacauagcuucaauu

SEQ ID NO: 678904 - RNA, 19 nt, Homo sapiens
  misc_RNA (1)...(19): siRNA sense strand
ggacucacgcauuaucuau

SEQ ID NO: 678905 - RNA, 19 nt, Homo sapiens
  misc_RNA (1)...(19): siRNA sense strand
cccaagcucacuuuauuua

SEQ ID NO: 678906 - RNA, 19 nt, Homo sapiens
  misc_RNA (1)...(19): siRNA sense strand
ggaccauaaugcccuggaa

SEQ ID NO: 678907 - RNA, 19 nt, Homo sapiens
  misc_RNA (1)...(19): siRNA sense strand
accauuaccucccaagaaa

SEQ ID NO: 678908 - RNA, 19 nt, Homo sapiens
  misc_RNA (1)...(19): siRNA sense strand
gauuaccgauagggucaua

SEQ ID NO: 678909 - RNA, 19 nt, Homo sapiens
  misc_RNA (1)...(19): siRNA sense strand
uggaauccgugccucuuaa

SEQ ID NO: 678910 - RNA, 19 nt, Homo sapiens
  misc_RNA (1)...(19): siRNA sense strand
uguauacugugaagaaguu

SEQ ID NO: 678911 - RNA, 19 nt, Homo sapiens
  misc_RNA (1)...(19): siRNA sense strand
cucccaagcucacuuuauu

SEQ ID NO: 678912 - RNA, 19 nt, Homo sapiens
  misc_RNA (1)...(19): siRNA sense strand
uagccaagauuaugaggau

SEQ ID NO: 678913 - RNA, 19 nt, Homo sapiens
  misc_RNA (1)...(19): siRNA sense strand
ucaacaacauagcuucaau

SEQ ID NO: 678914 - RNA, 19 nt, Homo sapiens
  misc_RNA (1)...(19): siRNA sense strand
caucuucaguucaacaaca

SEQ ID NO: 678915 - RNA, 19 nt, Homo sapiens
  misc_RNA (1)...(19): siRNA sense strand
auccgugccucuuaauuua

SEQ ID NO: 678916 - RNA, 19 nt, Homo sapiens
  misc_RNA (1)...(19): siRNA sense strand
aaagcugacugccaaagau

SEQ ID NO: 678917 - RNA, 19 nt, Homo sapiens
  misc_RNA (1)...(19): siRNA sense strand
acucacgcauuaucuauga

SEQ ID NO: 678918 - RNA, 19 nt, Homo sapiens
  misc_RNA (1)...(19): siRNA sense strand
gauaaauaccuggauggaa

SEQ ID NO: 678919 - RNA, 19 nt, Homo sapiens
  misc_RNA (1)...(19): siRNA sense strand
aaucaaagcaaaugcauuc

SEQ ID NO: 678920 - RNA, 19 nt, Homo sapiens
  misc_RNA (1)...(19): siRNA sense strand
ugacauugaugcuguacca

SEQ ID NO: 678921 - RNA, 19 nt, Homo sapiens
  misc_RNA (1)...(19): siRNA sense strand
gcacgauucaacaaaauua

SEQ ID NO: 678922 - RNA, 19 nt, Homo sapiens
  misc_RNA (1)...(19): siRNA sense strand
aauuacagaugacacauuc

SEQ ID NO: 678923 - RNA, 19 nt, Homo sapiens
  misc_RNA (1)...(19): siRNA sense strand
gaaucaaagcaaaugcauu

SEQ ID NO: 678924 - RNA, 19 nt, Homo sapiens
  misc_RNA (1)...(19): siRNA sense strand
ccauauuuagccaagauua

SEQ ID NO: 678925 - RNA, 19 nt, Homo sapiens
  misc_RNA (1)...(19): siRNA sense strand
ugaauaaccucaccuuccu

SEQ ID NO: 678926 - RNA, 19 nt, Homo sapiens
  misc_RNA (1)...(19): siRNA sense strand
gucuacacuucuccuguua

SEQ ID NO: 678927 - RNA, 19 nt, Homo sapiens
  misc_RNA (1)...(19): siRNA sense strand
gugauaauacccaaugaga

SEQ ID NO: 678928 - RNA, 19 nt, Homo sapiens
  misc_RNA (1)...(19): siRNA sense strand
cacgcauuaucuaugauua

SEQ ID NO: 678929 - RNA, 19 nt, Homo sapiens
  misc_RNA (1)...(19): siRNA sense strand
gaagaaguugacauugaug

SEQ ID NO: 678930 - RNA, 19 nt, Homo sapiens
  misc_RNA (1)...(19): siRNA sense strand
gcuaaugacaccaguuaca

SEQ ID NO: 678931 - RNA, 19 nt, Homo sapiens
  misc_RNA (1)...(19): siRNA sense strand
aggaaucagccuaucuuua

SEQ ID NO: 678932 - RNA, 19 nt, Homo sapiens
  misc_RNA (1)...(19): siRNA sense strand
aauccgugccucuuaauuu

SEQ ID NO: 678933 - RNA, 19 nt, Homo sapiens
  misc_RNA (1)...(19): siRNA sense strand
gaauccgugccucuuaauu

SEQ ID NO: 678934 - RNA, 19 nt, Homo sapiens
  misc_RNA (1)...(19): siRNA sense strand
ccaagcucacuuuauuuaa

SEQ ID NO: 678935 - RNA, 19 nt, Homo sapiens
  misc_RNA (1)...(19): siRNA sense strand
ucugcuguguguuuguuua

SEQ ID NO: 678936 - RNA, 19 nt, Homo sapiens
  misc_RNA (1)...(19): siRNA sense strand
gauagggucauacuuuuaa

SEQ ID NO: 678937 - RNA, 19 nt, Homo sapiens
  misc_RNA (1)...(19): siRNA sense strand
uguaauucaucuucaguuc

SEQ ID NO: 678938 - RNA, 19 nt, Homo sapiens
  misc_RNA (1)...(19): siRNA sense strand
cagaaagucuacguguaau

SEQ ID NO: 678939 - RNA, 19 nt, Homo sapiens
  misc_RNA (1)...(19): siRNA sense strand
uaagaagacucgauuuuac

SEQ ID NO: 678940 - RNA, 19 nt, Homo sapiens
  misc_RNA (1)...(19): siRNA sense strand
ccaaaggaaucagccuauc

SEQ ID NO: 678941 - RNA, 19 nt, Homo sapiens
  misc_RNA (1)...(19): siRNA sense strand
gcuguguguuuguuuaagu

SEQ ID NO: 678942 - RNA, 19 nt, Homo sapiens
  misc_RNA (1)...(19): siRNA sense strand
gcaggacucacgcauuauc

SEQ ID NO: 678943 - RNA, 19 nt, Homo sapiens
  misc_RNA (1)...(19): siRNA sense strand
ggauaaauaccuggaugga

SEQ ID NO: 678944 - RNA, 19 nt, Homo sapiens
  misc_RNA (1)...(19): siRNA sense strand
uuagaagaacuuucacuug

SEQ ID NO: 678945 - RNA, 19 nt, Homo sapiens
  misc_RNA (1)...(19): siRNA sense strand
guuagaagaacuuucacuu

SEQ ID NO: 678946 - RNA, 19 nt, Homo sapiens
  misc_RNA (1)...(19): siRNA sense strand
auaccuaacuuaagaagac

SEQ ID NO: 678947 - RNA, 19 nt, Homo sapiens
  misc_RNA (1)...(19): siRNA sense strand
aaaggaaucagccuaucuu

SEQ ID NO: 678948 - RNA, 19 nt, Homo sapiens
  misc_RNA (1)...(19): siRNA sense strand
aggcuaaugacaccaguua

SEQ ID NO: 678949 - RNA, 19 nt, Homo sapiens
  misc_RNA (1)...(19): siRNA sense strand
caaaggaaucagccuaucu

SEQ ID NO: 678950 - RNA, 19 nt, Homo sapiens
  misc_RNA (1)...(19): siRNA sense strand
caauuacagaugacacauu

SEQ ID NO: 678951 - RNA, 19 nt, Homo sapiens
  misc_RNA (1)...(19): siRNA sense strand
cgcauuaucuaugauuaug

SEQ ID NO: 678952 - RNA, 19 nt, Homo sapiens
  misc_RNA (1)...(19): siRNA sense strand
guaauucaucuucaguuca

SEQ ID NO: 678953 - RNA, 19 nt, Homo sapiens
  misc_RNA (1)...(19): siRNA sense strand
ggaaucaaagcaaaugcau

SEQ ID NO: 678954 - RNA, 19 nt, Homo sapiens
  misc_RNA (1)...(19): siRNA sense strand
uugcagacauaccuaacuu

SEQ ID NO: 678955 - RNA, 19 nt, Homo sapiens
  misc_RNA (1)...(19): siRNA sense strand
agucuacacuucuccuguu

SEQ ID NO: 678956 - RNA, 19 nt, Homo sapiens
  misc_RNA (1)...(19): siRNA sense strand
accagaaagucuacgugua

SEQ ID NO: 678957 - RNA, 19 nt, Homo sapiens
  misc_RNA (1)...(19): siRNA sense strand
ucaccuuccucuacuugga

SEQ ID NO: 678958 - RNA, 19 nt, Homo sapiens
  misc_RNA (1)...(19): siRNA sense strand
caccauuaccucccaagaa

SEQ ID NO: 678959 - RNA, 19 nt, Homo sapiens
  misc_RNA (1)...(19): siRNA sense strand
ucaaagcaaaugcauucaa

SEQ ID NO: 678960 - RNA, 19 nt, Homo sapiens
  misc_RNA (1)...(19): siRNA sense strand
uuaaguggcucuguauacu

SEQ ID NO: 678961 - RNA, 19 nt, Homo sapiens
  misc_RNA (1)...(19): siRNA sense strand
gaaucagccuaucuuuacg

SEQ ID NO: 678962 - RNA, 19 nt, Homo sapiens
  misc_RNA (1)...(19): siRNA sense strand
ugauaauacccaaugagaa

SEQ ID NO: 678963 - RNA, 19 nt, Homo sapiens
  misc_RNA (1)...(19): siRNA sense strand
ggaauccgugccucuuaau

SEQ ID NO: 678964 - RNA, 19 nt, Homo sapiens
  misc_RNA (1)...(19): siRNA sense strand
uaaccucaccuuccucuac

SEQ ID NO: 678965 - RNA, 19 nt, Homo sapiens
  misc_RNA (1)...(19): siRNA sense strand
cauuaccucccaagaaaga

SEQ ID NO: 678966 - RNA, 19 nt, Homo sapiens
  misc_RNA (1)...(19): siRNA sense strand
gagaaaagucuucaauuac

SEQ ID NO: 678967 - RNA, 19 nt, Homo sapiens
  misc_RNA (1)...(19): siRNA sense strand
gcuugugccucugauaaag

SEQ ID NO: 678968 - RNA, 19 nt, Homo sapiens
  misc_RNA (1)...(19): siRNA sense strand
uaacuuaagaagacucgau

SEQ ID NO: 678969 - RNA, 19 nt, Homo sapiens
  misc_RNA (1)...(19): siRNA sense strand
ucacgcauuaucuaugauu

SEQ ID NO: 678970 - RNA, 19 nt, Homo sapiens
  misc_RNA (1)...(19): siRNA sense strand
aaguggcucuguauacugu

SEQ ID NO: 678971 - RNA, 19 nt, Homo sapiens
  misc_RNA (1)...(19): siRNA sense strand
ccgauagggucauacuuuu

SEQ ID NO: 678972 - RNA, 19 nt, Homo sapiens
  misc_RNA (1)...(19): siRNA sense strand
ugaagaauccauauuuagc

SEQ ID NO: 678973 - RNA, 19 nt, Homo sapiens
  misc_RNA (1)...(19): siRNA sense strand
guaggggaaucaaagcaaa

SEQ ID NO: 678974 - RNA, 19 nt, Homo sapiens
  misc_RNA (1)...(19): siRNA sense strand
cuacacuucuccuguuacu

SEQ ID NO: 678975 - RNA, 19 nt, Homo sapiens
  misc_RNA (1)...(19): siRNA sense strand
acucugcagucuacacuuc

SEQ ID NO: 678976 - RNA, 19 nt, Homo sapiens
  misc_RNA (1)...(19): siRNA sense strand
agaagaacuuucacuugcu

SEQ ID NO: 678977 - RNA, 19 nt, Homo sapiens
  misc_RNA (1)...(19): siRNA sense strand
ugaggcaauaacaccauua

SEQ ID NO: 678978 - RNA, 19 nt, Homo sapiens
  misc_RNA (1)...(19): siRNA sense strand
uuacgcacgauucaacaaa

SEQ ID NO: 678979 - RNA, 19 nt, Homo sapiens
  misc_RNA (1)...(19): siRNA sense strand
accgauagggucauacuuu

SEQ ID NO: 678980 - RNA, 19 nt, Homo sapiens
  misc_RNA (1)...(19): siRNA sense strand
cuacguguaauucaucuuc

SEQ ID NO: 678981 - RNA, 19 nt, Homo sapiens
  misc_RNA (1)...(19): siRNA sense strand
agaaagucuacguguaauu

SEQ ID NO: 678982 - RNA, 19 nt, Homo sapiens
  misc_RNA (1)...(19): siRNA sense strand
gaccauaaugcccuggaau

SEQ ID NO: 678983 - RNA, 19 nt, Homo sapiens
  misc_RNA (1)...(19): siRNA sense strand
ccagcaggacucacgcauu

SEQ ID NO: 678984 - RNA, 19 nt, Homo sapiens
  misc_RNA (1)...(19): siRNA sense strand
caacauagcuucaauuaca

SEQ ID NO: 678985 - RNA, 19 nt, Homo sapiens
  misc_RNA (1)...(19): siRNA sense strand
cagcaggacucacgcauua

SEQ ID NO: 678986 - RNA, 19 nt, Homo sapiens
  misc_RNA (1)...(19): siRNA sense strand
caaagcaaaugcauucaaa

SEQ ID NO: 678987 - RNA, 19 nt, Homo sapiens
  misc_RNA (1)...(19): siRNA sense strand
agacauaccuaacuuaaga

SEQ ID NO: 678988 - RNA, 19 nt, Homo sapiens
  misc_RNA (1)...(19): siRNA sense strand
gauaauacccaaugagaaa

SEQ ID NO: 678989 - RNA, 19 nt, Homo sapiens
  misc_RNA (1)...(19): siRNA sense strand
gugaagaaguugacauuga

SEQ ID NO: 678990 - RNA, 19 nt, Homo sapiens
  misc_RNA (1)...(19): siRNA sense strand
auaaauaccuggauggaaa

SEQ ID NO: 678991 - RNA, 19 nt, Homo sapiens
  misc_RNA (1)...(19): siRNA sense strand
ggaccgcauugaagagaua

SEQ ID NO: 678992 - RNA, 19 nt, Homo sapiens
  misc_RNA (1)...(19): siRNA sense strand
gcagacauaccuaacuuaa

SEQ ID NO: 678993 - RNA, 19 nt, Homo sapiens
  misc_RNA (1)...(19): siRNA sense strand
ggaaucagccuaucuuuac

SEQ ID NO: 678994 - RNA, 19 nt, Homo sapiens
  misc_RNA (1)...(19): siRNA sense strand
ccagaaagucuacguguaa

SEQ ID NO: 678995 - RNA, 19 nt, Homo sapiens
  misc_RNA (1)...(19): siRNA sense strand
ccacgugucugcugugugu

SEQ ID NO: 678996 - RNA, 19 nt, Homo sapiens
  misc_RNA (1)...(19): siRNA sense strand
gaaagucuacguguaauuc

SEQ ID NO: 678997 - RNA, 19 nt, Homo sapiens
  misc_RNA (1)...(19): siRNA sense strand
gaagauauagaagauggua

SEQ ID NO: 678998 - RNA, 19 nt, Homo sapiens
  misc_RNA (1)...(19): siRNA sense strand
ugaagaaguugacauugau

SEQ ID NO: 678999 - RNA, 19 nt, Homo sapiens
  misc_RNA (1)...(19): siRNA sense strand
uagcuucaauuacagauga

SEQ ID NO: 679000 - RNA, 19 nt, Homo sapiens
  misc_RNA (1)...(19): siRNA sense strand
ccucuuaauuuaccagaaa

SEQ ID NO: 679001 - RNA, 19 nt, Homo sapiens
  misc_RNA (1)...(19): siRNA sense strand
ggaaagcauccaaacaguu

SEQ ID NO: 679002 - RNA, 19 nt, Homo sapiens
  misc_RNA (1)...(19): siRNA sense strand
gggaaagcauccaaacagu

SEQ ID NO: 679003 - RNA, 19 nt, Homo sapiens
  misc_RNA (1)...(19): siRNA sense strand
caacaacauagcuucaauu

SEQ ID NO: 679004 - RNA, 19 nt, Homo sapiens
  misc_RNA (1)...(19): siRNA sense strand
ggacucacgcauuaucuau

SEQ ID NO: 679005 - RNA, 19 nt, Homo sapiens
  misc_RNA (1)...(19): siRNA sense strand
cccaagcucacuuuauuua

SEQ ID NO: 679006 - RNA, 19 nt, Homo sapiens
  misc_RNA (1)...(19): siRNA sense strand
ggaccauaaugcccuggaa

SEQ ID NO: 679007 - RNA, 19 nt, Homo sapiens
  misc_RNA (1)...(19): siRNA sense strand
accauuaccucccaagaaa

SEQ ID NO: 679008 - RNA, 19 nt, Homo sapiens
  misc_RNA (1)...(19): siRNA sense strand
gauuaccgauagggucaua

SEQ ID NO: 679009 - RNA, 19 nt, Homo sapiens
  misc_RNA (1)...(19): siRNA sense strand
uggaauccgugccucuuaa

SEQ ID NO: 679010 - RNA, 19 nt, Homo sapiens
  misc_RNA (1)...(19): siRNA sense strand
uguauacugugaagaaguu

SEQ ID NO: 679011 - RNA, 19 nt, Homo sapiens
  misc_RNA (1)...(19): siRNA sense strand
cucccaagcucacuuuauu

SEQ ID NO: 679012 - RNA, 19 nt, Homo sapiens
  misc_RNA (1)...(19): siRNA sense strand
uagccaagauuaugaggau

SEQ ID NO: 679013 - RNA, 19 nt, Homo sapiens
  misc_RNA (1)...(19): siRNA sense strand
ucaacaacauagcuucaau

SEQ ID NO: 679014 - RNA, 19 nt, Homo sapiens
  misc_RNA (1)...(19): siRNA sense strand
caucuucaguucaacaaca

SEQ ID NO: 679015 - RNA, 19 nt, Homo sapiens
  misc_RNA (1)...(19): siRNA sense strand
auccgugccucuuaauuua

SEQ ID NO: 679016 - RNA, 19 nt, Homo sapiens
  misc_RNA (1)...(19): siRNA sense strand
aaagcugacugccaaagau

SEQ ID NO: 679017 - RNA, 19 nt, Homo sapiens
  misc_RNA (1)...(19): siRNA sense strand
acucacgcauuaucuauga

SEQ ID NO: 679018 - RNA, 19 nt, Homo sapiens
  misc_RNA (1)...(19): siRNA sense strand
gauaaauaccuggauggaa

SEQ ID NO: 679019 - RNA, 19 nt, Homo sapiens
  misc_RNA (1)...(19): siRNA sense strand
aaucaaagcaaaugcauuc

SEQ ID NO: 679020 - RNA, 19 nt, Homo sapiens
  misc_RNA (1)...(19): siRNA sense strand
ugacauugaugcuguacca

SEQ ID NO: 679021 - RNA, 19 nt, Homo sapiens
  misc_RNA (1)...(19): siRNA sense strand
gcacgauucaacaaaauua

SEQ ID NO: 679022 - RNA, 19 nt, Homo sapiens
  misc_RNA (1)...(19): siRNA sense strand
aauuacagaugacacauuc

SEQ ID NO: 679023 - RNA, 19 nt, Homo sapiens
  misc_RNA (1)...(19): siRNA sense strand
gaaucaaagcaaaugcauu

SEQ ID NO: 679024 - RNA, 19 nt, Homo sapiens
  misc_RNA (1)...(19): siRNA sense strand
ccauauuuagccaagauua

SEQ ID NO: 679025 - RNA, 19 nt, Homo sapiens
  misc_RNA (1)...(19): siRNA sense strand
ugaauaaccucaccuuccu

SEQ ID NO: 679026 - RNA, 19 nt, Homo sapiens
  misc_RNA (1)...(19): siRNA sense strand
gucuacacuucuccuguua

SEQ ID NO: 679027 - RNA, 19 nt, Homo sapiens
  misc_RNA (1)...(19): siRNA sense strand
gugauaauacccaaugaga

SEQ ID NO: 679028 - RNA, 19 nt, Homo sapiens
  misc_RNA (1)...(19): siRNA sense strand
cacgcauuaucuaugauua

SEQ ID NO: 679029 - RNA, 19 nt, Homo sapiens
  misc_RNA (1)...(19): siRNA sense strand
gaagaaguugacauugaug

SEQ ID NO: 679030 - RNA, 19 nt, Homo sapiens
  misc_RNA (1)...(19): siRNA sense strand
gcuaaugacaccaguuaca

SEQ ID NO: 679031 - RNA, 19 nt, Homo sapiens
  misc_RNA (1)...(19): siRNA sense strand
aggaaucagccuaucuuua

SEQ ID NO: 679032 - RNA, 19 nt, Homo sapiens
  misc_RNA (1)...(19): siRNA sense strand
aauccgugccucuuaauuu

SEQ ID NO: 679033 - RNA, 19 nt, Homo sapiens
  misc_RNA (1)...(19): siRNA sense strand
gaauccgugccucuuaauu

SEQ ID NO: 679034 - RNA, 19 nt, Homo sapiens
  misc_RNA (1)...(19): siRNA sense strand
ccaagcucacuuuauuuaa

SEQ ID NO: 679035 - RNA, 19 nt, Homo sapiens
  misc_RNA (1)...(19): siRNA sense strand
ucugcuguguguuuguuua

SEQ ID NO: 679036 - RNA, 19 nt, Homo sapiens
  misc_RNA (1)...(19): siRNA sense strand
gauagggucauacuuuuaa

SEQ ID NO: 679037 - RNA, 19 nt, Homo sapiens
  misc_RNA (1)...(19): siRNA sense strand
uguaauucaucuucaguuc

SEQ ID NO: 679038 - RNA, 19 nt, Homo sapiens
  misc_RNA (1)...(19): siRNA sense strand
cagaaagucuacguguaau

SEQ ID NO: 679039 - RNA, 19 nt, Homo sapiens
  misc_RNA (1)...(19): siRNA sense strand
uaagaagacucgauuuuac

SEQ ID NO: 679040 - RNA, 19 nt, Homo sapiens
  misc_RNA (1)...(19): siRNA sense strand
ccaaaggaaucagccuauc

SEQ ID NO: 679041 - RNA, 19 nt, Homo sapiens
  misc_RNA (1)...(19): siRNA sense strand
gcuguguguuuguuuaagu

SEQ ID NO: 679042 - RNA, 19 nt, Homo sapiens
  misc_RNA (1)...(19): siRNA sense strand
gcaggacucacgcauuauc

SEQ ID NO: 679043 - RNA, 19 nt, Homo sapiens
  misc_RNA (1)...(19): siRNA sense strand
ggauaaauaccuggaugga

SEQ ID NO: 679044 - RNA, 19 nt, Homo sapiens
  misc_RNA (1)...(19): siRNA sense strand
uuagaagaacuuucacuug

SEQ ID NO: 679045 - RNA, 19 nt, Homo sapiens
  misc_RNA (1)...(19): siRNA sense strand
guuagaagaacuuucacuu

SEQ ID NO: 679046 - RNA, 19 nt, Homo sapiens
  misc_RNA (1)...(19): siRNA sense strand
auaccuaacuuaagaagac

SEQ ID NO: 679047 - RNA, 19 nt, Homo sapiens
  misc_RNA (1)...(19): siRNA sense strand
aaaggaaucagccuaucuu

SEQ ID NO: 679048 - RNA, 19 nt, Homo sapiens
  misc_RNA (1)...(19): siRNA sense strand
aggcuaaugacaccaguua

SEQ ID NO: 679049 - RNA, 19 nt, Homo sapiens
  misc_RNA (1)...(19): siRNA sense strand
caaaggaaucagccuaucu

SEQ ID NO: 679050 - RNA, 19 nt, Homo sapiens
  misc_RNA (1)...(19): siRNA sense strand
caauuacagaugacacauu

SEQ ID NO: 679051 - RNA, 19 nt, Homo sapiens
  misc_RNA (1)...(19): siRNA sense strand
cgcauuaucuaugauuaug

SEQ ID NO: 679052 - RNA, 19 nt, Homo sapiens
  misc_RNA (1)...(19): siRNA sense strand
guaauucaucuucaguuca

SEQ ID NO: 679053 - RNA, 19 nt, Homo sapiens
  misc_RNA (1)...(19): siRNA sense strand
ggaaucaaagcaaaugcau

SEQ ID NO: 679054 - RNA, 19 nt, Homo sapiens
  misc_RNA (1)...(19): siRNA sense strand
uugcagacauaccuaacuu

SEQ ID NO: 679055 - RNA, 19 nt, Homo sapiens
  misc_RNA (1)...(19): siRNA sense strand
agucuacacuucuccuguu

SEQ ID NO: 679056 - RNA, 19 nt, Homo sapiens
  misc_RNA (1)...(19): siRNA sense strand
accagaaagucuacgugua

SEQ ID NO: 679057 - RNA, 19 nt, Homo sapiens
  misc_RNA (1)...(19): siRNA sense strand
ucaccuuccucuacuugga

SEQ ID NO: 679058 - RNA, 19 nt, Homo sapiens
  misc_RNA (1)...(19): siRNA sense strand
caccauuaccucccaagaa

SEQ ID NO: 679059 - RNA, 19 nt, Homo sapiens
  misc_RNA (1)...(19): siRNA sense strand
ucaaagcaaaugcauucaa

SEQ ID NO: 679060 - RNA, 19 nt, Homo sapiens
  misc_RNA (1)...(19): siRNA sense strand
uuaaguggcucuguauacu

SEQ ID NO: 679061 - RNA, 19 nt, Homo sapiens
  misc_RNA (1)...(19): siRNA sense strand
gaaucagccuaucuuuacg

SEQ ID NO: 679062 - RNA, 19 nt, Homo sapiens
  misc_RNA (1)...(19): siRNA sense strand
ugauaauacccaaugagaa

SEQ ID NO: 679063 - RNA, 19 nt, Homo sapiens
  misc_RNA (1)...(19): siRNA sense strand
ggaauccgugccucuuaau

SEQ ID NO: 679064 - RNA, 19 nt, Homo sapiens
  misc_RNA (1)...(19): siRNA sense strand
uaaccucaccuuccucuac

SEQ ID NO: 679065 - RNA, 19 nt, Homo sapiens
  misc_RNA (1)...(19): siRNA sense strand
cauuaccucccaagaaaga

SEQ ID NO: 679066 - RNA, 19 nt, Homo sapiens
  misc_RNA (1)...(19): siRNA sense strand
gagaaaagucuucaauuac

SEQ ID NO: 679067 - RNA, 19 nt, Homo sapiens
  misc_RNA (1)...(19): siRNA sense strand
gcuugugccucugauaaag

SEQ ID NO: 679068 - RNA, 19 nt, Homo sapiens
  misc_RNA (1)...(19): siRNA sense strand
uaacuuaagaagacucgau

SEQ ID NO: 679069 - RNA, 19 nt, Homo sapiens
  misc_RNA (1)...(19): siRNA sense strand
ucacgcauuaucuaugauu

SEQ ID NO: 679070 - RNA, 19 nt, Homo sapiens
  misc_RNA (1)...(19): siRNA sense strand
aaguggcucuguauacugu

SEQ ID NO: 679071 - RNA, 19 nt, Homo sapiens
  misc_RNA (1)...(19): siRNA sense strand
ccgauagggucauacuuuu

SEQ ID NO: 679072 - RNA, 19 nt, Homo sapiens
  misc_RNA (1)...(19): siRNA sense strand
ugaagaauccauauuuagc

SEQ ID NO: 679073 - RNA, 19 nt, Homo sapiens
  misc_RNA (1)...(19): siRNA sense strand
guaggggaaucaaagcaaa

SEQ ID NO: 679074 - RNA, 19 nt, Homo sapiens
  misc_RNA (1)...(19): siRNA sense strand
cuacacuucuccuguuacu

SEQ ID NO: 679075 - RNA, 19 nt, Homo sapiens
  misc_RNA (1)...(19): siRNA sense strand
acucugcagucuacacuuc

SEQ ID NO: 679076 - RNA, 19 nt, Homo sapiens
  misc_RNA (1)...(19): siRNA sense strand
agaagaacuuucacuugcu

SEQ ID NO: 679077 - RNA, 19 nt, Homo sapiens
  misc_RNA (1)...(19): siRNA sense strand
ugaggcaauaacaccauua

SEQ ID NO: 679078 - RNA, 19 nt, Homo sapiens
  misc_RNA (1)...(19): siRNA sense strand
uuacgcacgauucaacaaa

SEQ ID NO: 679079 - RNA, 19 nt, Homo sapiens
  misc_RNA (1)...(19): siRNA sense strand
accgauagggucauacuuu

SEQ ID NO: 679080 - RNA, 19 nt, Homo sapiens
  misc_RNA (1)...(19): siRNA sense strand
cuacguguaauucaucuuc

SEQ ID NO: 679081 - RNA, 19 nt, Homo sapiens
  misc_RNA (1)...(19): siRNA sense strand
agaaagucuacguguaauu

SEQ ID NO: 679082 - RNA, 19 nt, Homo sapiens
  misc_RNA (1)...(19): siRNA sense strand
gaccauaaugcccuggaau

SEQ ID NO: 679083 - RNA, 19 nt, Homo sapiens
  misc_RNA (1)...(19): siRNA sense strand
ccagcaggacucacgcauu

SEQ ID NO: 679084 - RNA, 19 nt, Homo sapiens
  misc_RNA (1)...(19): siRNA sense strand
caacauagcuucaauuaca

SEQ ID NO: 679085 - RNA, 19 nt, Homo sapiens
  misc_RNA (1)...(19): siRNA sense strand
cagcaggacucacgcauua

SEQ ID NO: 679086 - RNA, 19 nt, Homo sapiens
  misc_RNA (1)...(19): siRNA sense strand
caaagcaaaugcauucaaa

SEQ ID NO: 679087 - RNA, 19 nt, Homo sapiens
  misc_RNA (1)...(19): siRNA sense strand
agacauaccuaacuuaaga

SEQ ID NO: 679088 - RNA, 19 nt, Homo sapiens
  misc_RNA (1)...(19): siRNA sense strand
gauaauacccaaugagaaa

SEQ ID NO: 679089 - RNA, 19 nt, Homo sapiens
  misc_RNA (1)...(19): siRNA sense strand
gugaagaaguugacauuga

SEQ ID NO: 679090 - RNA, 19 nt, Homo sapiens
  misc_RNA (1)...(19): siRNA sense strand
auaaauaccuggauggaaa

SEQ ID NO: 679091 - RNA, 19 nt, Homo sapiens
  misc_RNA (1)...(19): siRNA sense strand
ggaccgcauugaagagaua

SEQ ID NO: 679092 - RNA, 19 nt, Homo sapiens
  misc_RNA (1)...(19): siRNA sense strand
gcagacauaccuaacuuaa

SEQ ID NO: 679093 - RNA, 19 nt, Homo sapiens
  misc_RNA (1)...(19): siRNA sense strand
ggaaucagccuaucuuuac

SEQ ID NO: 679094 - RNA, 19 nt, Homo sapiens
  misc_RNA (1)...(19): siRNA sense strand
ccagaaagucuacguguaa

SEQ ID NO: 679095 - RNA, 19 nt, Homo sapiens
  misc_RNA (1)...(19): siRNA sense strand
ccacgugucugcugugugu

SEQ ID NO: 679096 - RNA, 19 nt, Homo sapiens
  misc_RNA (1)...(19): siRNA sense strand
gaaagucuacguguaauuc

SEQ ID NO: 679097 - RNA, 19 nt, Homo sapiens
  misc_RNA (1)...(19): siRNA sense strand
gaagauauagaagauggua

SEQ ID NO: 679098 - RNA, 19 nt, Homo sapiens
  misc_RNA (1)...(19): siRNA sense strand
ugaagaaguugacauugau

SEQ ID NO: 679099 - RNA, 19 nt, Homo sapiens
  misc_RNA (1)...(19): siRNA sense strand
uagcuucaauuacagauga

SEQ ID NO: 679100 - RNA, 19 nt, Homo sapiens
  misc_RNA (1)...(19): siRNA sense strand
ccucuuaauuuaccagaaa

SEQ ID NO: 679101 - RNA, 19 nt, Homo sapiens
  misc_RNA (1)...(19): siRNA sense strand
ggaaagcauccaaacaguu

SEQ ID NO: 679102 - RNA, 19 nt, Homo sapiens
  misc_RNA (1)...(19): siRNA sense strand
gggaaagcauccaaacagu

SEQ ID NO: 679103 - RNA, 19 nt, Homo sapiens
  misc_RNA (1)...(19): siRNA sense strand
caacaacauagcuucaauu

SEQ ID NO: 679104 - RNA, 19 nt, Homo sapiens
  misc_RNA (1)...(19): siRNA sense strand
ggacucacgcauuaucuau

SEQ ID NO: 679105 - RNA, 19 nt, Homo sapiens
  misc_RNA (1)...(19): siRNA sense strand
cccaagcucacuuuauuua

SEQ ID NO: 679106 - RNA, 19 nt, Homo sapiens
  misc_RNA (1)...(19): siRNA sense strand
ggaccauaaugcccuggaa

SEQ ID NO: 679107 - RNA, 19 nt, Homo sapiens
  misc_RNA (1)...(19): siRNA sense strand
accauuaccucccaagaaa

SEQ ID NO: 679108 - RNA, 19 nt, Homo sapiens
  misc_RNA (1)...(19): siRNA sense strand
gauuaccgauagggucaua

SEQ ID NO: 679109 - RNA, 19 nt, Homo sapiens
  misc_RNA (1)...(19): siRNA sense strand
uggaauccgugccucuuaa

SEQ ID NO: 679110 - RNA, 19 nt, Homo sapiens
  misc_RNA (1)...(19): siRNA sense strand
uguauacugugaagaaguu

SEQ ID NO: 679111 - RNA, 19 nt, Homo sapiens
  misc_RNA (1)...(19): siRNA sense strand
cucccaagcucacuuuauu

SEQ ID NO: 679112 - RNA, 19 nt, Homo sapiens
  misc_RNA (1)...(19): siRNA sense strand
uagccaagauuaugaggau

SEQ ID NO: 679113 - RNA, 19 nt, Homo sapiens
  misc_RNA (1)...(19): siRNA sense strand
ucaacaacauagcuucaau

SEQ ID NO: 679114 - RNA, 19 nt, Homo sapiens
  misc_RNA (1)...(19): siRNA sense strand
caucuucaguucaacaaca

SEQ ID NO: 679115 - RNA, 19 nt, Homo sapiens
  misc_RNA (1)...(19): siRNA sense strand
auccgugccucuuaauuua

SEQ ID NO: 679116 - RNA, 19 nt, Homo sapiens
  misc_RNA (1)...(19): siRNA sense strand
aaagcugacugccaaagau

SEQ ID NO: 679117 - RNA, 19 nt, Homo sapiens
  misc_RNA (1)...(19): siRNA sense strand
acucacgcauuaucuauga

SEQ ID NO: 679118 - RNA, 19 nt, Homo sapiens
  misc_RNA (1)...(19): siRNA sense strand
gauaaauaccuggauggaa

SEQ ID NO: 679119 - RNA, 19 nt, Homo sapiens
  misc_RNA (1)...(19): siRNA sense strand
aaucaaagcaaaugcauuc

SEQ ID NO: 679120 - RNA, 19 nt, Homo sapiens
  misc_RNA (1)...(19): siRNA sense strand
ugacauugaugcuguacca

SEQ ID NO: 679121 - RNA, 19 nt, Homo sapiens
  misc_RNA (1)...(19): siRNA sense strand
gcacgauucaacaaaauua

SEQ ID NO: 679122 - RNA, 19 nt, Homo sapiens
  misc_RNA (1)...(19): siRNA sense strand
aauuacagaugacacauuc

SEQ ID NO: 679123 - RNA, 19 nt, Homo sapiens
  misc_RNA (1)...(19): siRNA sense strand
gaaucaaagcaaaugcauu

SEQ ID NO: 679124 - RNA, 19 nt, Homo sapiens
  misc_RNA (1)...(19): siRNA sense strand
ccauauuuagccaagauua

SEQ ID NO: 679125 - RNA, 19 nt, Homo sapiens
  misc_RNA (1)...(19): siRNA sense strand
ugaauaaccucaccuuccu

SEQ ID NO: 679126 - RNA, 19 nt, Homo sapiens
  misc_RNA (1)...(19): siRNA sense strand
gucuacacuucuccuguua

SEQ ID NO: 679127 - RNA, 19 nt, Homo sapiens
  misc_RNA (1)...(19): siRNA sense strand
gugauaauacccaaugaga

SEQ ID NO: 679128 - RNA, 19 nt, Homo sapiens
  misc_RNA (1)...(19): siRNA sense strand
cacgcauuaucuaugauua

SEQ ID NO: 679129 - RNA, 19 nt, Homo sapiens
  misc_RNA (1)...(19): siRNA sense strand
gaagaaguugacauugaug

SEQ ID NO: 679130 - RNA, 19 nt, Homo sapiens
  misc_RNA (1)...(19): siRNA sense strand
gcuaaugacaccaguuaca

SEQ ID NO: 679131 - RNA, 19 nt, Homo sapiens
  misc_RNA (1)...(19): siRNA sense strand
aggaaucagccuaucuuua

SEQ ID NO: 679132 - RNA, 19 nt, Homo sapiens
  misc_RNA (1)...(19): siRNA sense strand
aauccgugccucuuaauuu

SEQ ID NO: 679133 - RNA, 19 nt, Homo sapiens
  misc_RNA (1)...(19): siRNA sense strand
gaauccgugccucuuaauu

SEQ ID NO: 679134 - RNA, 19 nt, Homo sapiens
  misc_RNA (1)...(19): siRNA sense strand
ccaagcucacuuuauuuaa

SEQ ID NO: 679135 - RNA, 19 nt, Homo sapiens
  misc_RNA (1)...(19): siRNA sense strand
ucugcuguguguuuguuua

SEQ ID NO: 679136 - RNA, 19 nt, Homo sapiens
  misc_RNA (1)...(19): siRNA sense strand
gauagggucauacuuuuaa

SEQ ID NO: 679137 - RNA, 19 nt, Homo sapiens
  misc_RNA (1)...(19): siRNA sense strand
uguaauucaucuucaguuc

SEQ ID NO: 679138 - RNA, 19 nt, Homo sapiens
  misc_RNA (1)...(19): siRNA sense strand
cagaaagucuacguguaau

SEQ ID NO: 679139 - RNA, 19 nt, Homo sapiens
  misc_RNA (1)...(19): siRNA sense strand
uaagaagacucgauuuuac

SEQ ID NO: 679140 - RNA, 19 nt, Homo sapiens
  misc_RNA (1)...(19): siRNA sense strand
ccaaaggaaucagccuauc

SEQ ID NO: 679141 - RNA, 19 nt, Homo sapiens
  misc_RNA (1)...(19): siRNA sense strand
gcuguguguuuguuuaagu

SEQ ID NO: 679142 - RNA, 19 nt, Homo sapiens
  misc_RNA (1)...(19): siRNA sense strand
gcaggacucacgcauuauc

SEQ ID NO: 679143 - RNA, 19 nt, Homo sapiens
  misc_RNA (1)...(19): siRNA sense strand
ggauaaauaccuggaugga

SEQ ID NO: 679144 - RNA, 19 nt, Homo sapiens
  misc_RNA (1)...(19): siRNA sense strand
uuagaagaacuuucacuug

SEQ ID NO: 679145 - RNA, 19 nt, Homo sapiens
  misc_RNA (1)...(19): siRNA sense strand
guuagaagaacuuucacuu

SEQ ID NO: 679146 - RNA, 19 nt, Homo sapiens
  misc_RNA (1)...(19): siRNA sense strand
auaccuaacuuaagaagac

SEQ ID NO: 679147 - RNA, 19 nt, Homo sapiens
  misc_RNA (1)...(19): siRNA sense strand
aaaggaaucagccuaucuu

SEQ ID NO: 679148 - RNA, 19 nt, Homo sapiens
  misc_RNA (1)...(19): siRNA sense strand
aggcuaaugacaccaguua

SEQ ID NO: 679149 - RNA, 19 nt, Homo sapiens
  misc_RNA (1)...(19): siRNA sense strand
caaaggaaucagccuaucu

SEQ ID NO: 679150 - RNA, 19 nt, Homo sapiens
  misc_RNA (1)...(19): siRNA sense strand
caauuacagaugacacauu

SEQ ID NO: 679151 - RNA, 19 nt, Homo sapiens
  misc_RNA (1)...(19): siRNA sense strand
cgcauuaucuaugauuaug

SEQ ID NO: 679152 - RNA, 19 nt, Homo sapiens
  misc_RNA (1)...(19): siRNA sense strand
guaauucaucuucaguuca

SEQ ID NO: 679153 - RNA, 19 nt, Homo sapiens
  misc_RNA (1)...(19): siRNA sense strand
ggaaucaaagcaaaugcau

SEQ ID NO: 679154 - RNA, 19 nt, Homo sapiens
  misc_RNA (1)...(19): siRNA sense strand
uugcagacauaccuaacuu

SEQ ID NO: 679155 - RNA, 19 nt, Homo sapiens
  misc_RNA (1)...(19): siRNA sense strand
agucuacacuucuccuguu

SEQ ID NO: 679156 - RNA, 19 nt, Homo sapiens
  misc_RNA (1)...(19): siRNA sense strand
accagaaagucuacgugua

SEQ ID NO: 679157 - RNA, 19 nt, Homo sapiens
  misc_RNA (1)...(19): siRNA sense strand
ucaccuuccucuacuugga

SEQ ID NO: 679158 - RNA, 19 nt, Homo sapiens
  misc_RNA (1)...(19): siRNA sense strand
caccauuaccucccaagaa

SEQ ID NO: 679159 - RNA, 19 nt, Homo sapiens
  misc_RNA (1)...(19): siRNA sense strand
ucaaagcaaaugcauucaa

SEQ ID NO: 679160 - RNA, 19 nt, Homo sapiens
  misc_RNA (1)...(19): siRNA sense strand
uuaaguggcucuguauacu

SEQ ID NO: 679161 - RNA, 19 nt, Homo sapiens
  misc_RNA (1)...(19): siRNA sense strand
gaaucagccuaucuuuacg

SEQ ID NO: 679162 - RNA, 19 nt, Homo sapiens
  misc_RNA (1)...(19): siRNA sense strand
ugauaauacccaaugagaa

SEQ ID NO: 679163 - RNA, 19 nt, Homo sapiens
  misc_RNA (1)...(19): siRNA sense strand
ggaauccgugccucuuaau

SEQ ID NO: 679164 - RNA, 19 nt, Homo sapiens
  misc_RNA (1)...(19): siRNA sense strand
uaaccucaccuuccucuac

SEQ ID NO: 679165 - RNA, 19 nt, Homo sapiens
  misc_RNA (1)...(19): siRNA sense strand
cauuaccucccaagaaaga

SEQ ID NO: 679166 - RNA, 19 nt, Homo sapiens
  misc_RNA (1)...(19): siRNA sense strand
gagaaaagucuucaauuac

SEQ ID NO: 679167 - RNA, 19 nt, Homo sapiens
  misc_RNA (1)...(19): siRNA sense strand
gcuugugccucugauaaag

SEQ ID NO: 679168 - RNA, 19 nt, Homo sapiens
  misc_RNA (1)...(19): siRNA sense strand
uaacuuaagaagacucgau

SEQ ID NO: 679169 - RNA, 19 nt, Homo sapiens
  misc_RNA (1)...(19): siRNA sense strand
ucacgcauuaucuaugauu

SEQ ID NO: 679170 - RNA, 19 nt, Homo sapiens
  misc_RNA (1)...(19): siRNA sense strand
aaguggcucuguauacugu

SEQ ID NO: 679171 - RNA, 19 nt, Homo sapiens
  misc_RNA (1)...(19): siRNA sense strand
ccgauagggucauacuuuu

SEQ ID NO: 679172 - RNA, 19 nt, Homo sapiens
  misc_RNA (1)...(19): siRNA sense strand
ugaagaauccauauuuagc

SEQ ID NO: 679173 - RNA, 19 nt, Homo sapiens
  misc_RNA (1)...(19): siRNA sense strand
guaggggaaucaaagcaaa

SEQ ID NO: 679174 - RNA, 19 nt, Homo sapiens
  misc_RNA (1)...(19): siRNA sense strand
cuacacuucuccuguuacu

SEQ ID NO: 679175 - RNA, 19 nt, Homo sapiens
  misc_RNA (1)...(19): siRNA sense strand
acucugcagucuacacuuc

SEQ ID NO: 679176 - RNA, 19 nt, Homo sapiens
  misc_RNA (1)...(19): siRNA sense strand
agaagaacuuucacuugcu

SEQ ID NO: 679177 - RNA, 19 nt, Homo sapiens
  misc_RNA (1)...(19): siRNA sense strand
ugaggcaauaacaccauua

SEQ ID NO: 679178 - RNA, 19 nt, Homo sapiens
  misc_RNA (1)...(19): siRNA sense strand
uuacgcacgauucaacaaa

SEQ ID NO: 679179 - RNA, 19 nt, Homo sapiens
  misc_RNA (1)...(19): siRNA sense strand
accgauagggucauacuuu

SEQ ID NO: 679180 - RNA, 19 nt, Homo sapiens
  misc_RNA (1)...(19): siRNA sense strand
cuacguguaauucaucuuc

SEQ ID NO: 679181 - RNA, 19 nt, Homo sapiens
  misc_RNA (1)...(19): siRNA sense strand
agaaagucuacguguaauu

SEQ ID NO: 679182 - RNA, 19 nt, Homo sapiens
  misc_RNA (1)...(19): siRNA sense strand
gaccauaaugcccuggaau

SEQ ID NO: 679183 - RNA, 19 nt, Homo sapiens
  misc_RNA (1)...(19): siRNA sense strand
ccagcaggacucacgcauu

SEQ ID NO: 679184 - RNA, 19 nt, Homo sapiens
  misc_RNA (1)...(19): siRNA sense strand
ggacaaagcucagaaacaa

SEQ ID NO: 679185 - RNA, 19 nt, Homo sapiens
  misc_RNA (1)...(19): siRNA sense strand
agaagaagauguuggacua

SEQ ID NO: 679186 - RNA, 19 nt, Homo sapiens
  misc_RNA (1)...(19): siRNA sense strand
ggaggaagguggaggaucu

SEQ ID NO: 679187 - RNA, 19 nt, Homo sapiens
  misc_RNA (1)...(19): siRNA sense strand
uaagugcgcuggagagcaa

SEQ ID NO: 679188 - RNA, 19 nt, Homo sapiens
  misc_RNA (1)...(19): siRNA sense strand
ugaccgggcuggacaaaga

SEQ ID NO: 679189 - RNA, 19 nt, Homo sapiens
  misc_RNA (1)...(19): siRNA sense strand
aacaggaggucgagaguuu

SEQ ID NO: 679190 - RNA, 19 nt, Homo sapiens
  misc_RNA (1)...(19): siRNA sense strand
ccaagaagaccaagcguau

SEQ ID NO: 679191 - RNA, 19 nt, Homo sapiens
  misc_RNA (1)...(19): siRNA sense strand
gcucagggcccaaguaagu

SEQ ID NO: 679192 - RNA, 19 nt, Homo sapiens
  misc_RNA (1)...(19): siRNA sense strand
gaacaagagggacaaagag

SEQ ID NO: 679193 - RNA, 19 nt, Homo sapiens
  misc_RNA (1)...(19): siRNA sense strand
cguaucggcuucccaucua

SEQ ID NO: 679194 - RNA, 19 nt, Homo sapiens
  misc_RNA (1)...(19): siRNA sense strand
cagaaccugucauugcauu

SEQ ID NO: 679195 - RNA, 19 nt, Homo sapiens
  misc_RNA (1)...(19): siRNA sense strand
agcagaaacucaaggauga

SEQ ID NO: 679196 - RNA, 19 nt, Homo sapiens
  misc_RNA (1)...(19): siRNA sense strand
gcuaauggacaacuggaaa

SEQ ID NO: 679197 - RNA, 19 nt, Homo sapiens
  misc_RNA (1)...(19): siRNA sense strand
gcaauuccgguucugcaaa

SEQ ID NO: 679198 - RNA, 19 nt, Homo sapiens
  misc_RNA (1)...(19): siRNA sense strand
ggaaggagcggagccugaa

SEQ ID NO: 679199 - RNA, 19 nt, Homo sapiens
  misc_RNA (1)...(19): siRNA sense strand
gagaagcagcagcacauug

SEQ ID NO: 679200 - RNA, 19 nt, Homo sapiens
  misc_RNA (1)...(19): siRNA sense strand
ggagagcaaguguaaguca

SEQ ID NO: 679201 - RNA, 19 nt, Homo sapiens
  misc_RNA (1)...(19): siRNA sense strand
agaagcagcagcacauuga

SEQ ID NO: 679202 - RNA, 19 nt, Homo sapiens
  misc_RNA (1)...(19): siRNA sense strand
gcaggacaaagcucagaaa

SEQ ID NO: 679203 - RNA, 19 nt, Homo sapiens
  misc_RNA (1)...(19): siRNA sense strand
ugaacaagagggacaaaga

SEQ ID NO: 679204 - RNA, 19 nt, Homo sapiens
  misc_RNA (1)...(19): siRNA sense strand
acaaagcucagaaacaaga

SEQ ID NO: 679205 - RNA, 19 nt, Homo sapiens
  misc_RNA (1)...(19): siRNA sense strand
ucaaggagcagaaacucaa

SEQ ID NO: 679206 - RNA, 19 nt, Homo sapiens
  misc_RNA (1)...(19): siRNA sense strand
cagcacacccacaugauug

SEQ ID NO: 679207 - RNA, 19 nt, Homo sapiens
  misc_RNA (1)...(19): siRNA sense strand
gaacgaacugcggguguug

SEQ ID NO: 679208 - RNA, 19 nt, Homo sapiens
  misc_RNA (1)...(19): siRNA sense strand
guaagucaggcgagaagaa

SEQ ID NO: 679209 - RNA, 19 nt, Homo sapiens
  misc_RNA (1)...(19): siRNA sense strand
ccagugcccacccaaguuu

SEQ ID NO: 679210 - RNA, 19 nt, Homo sapiens
  misc_RNA (1)...(19): siRNA sense strand
ccaugcacgugaaggagaa

SEQ ID NO: 679211 - RNA, 19 nt, Homo sapiens
  misc_RNA (1)...(19): siRNA sense strand
ugaacgaacugcggguguu

SEQ ID NO: 679212 - RNA, 19 nt, Homo sapiens
  misc_RNA (1)...(19): siRNA sense strand
ugagcaguauguugcagaa

SEQ ID NO: 679213 - RNA, 19 nt, Homo sapiens
  misc_RNA (1)...(19): siRNA sense strand
aggacaagcugaacaagag

SEQ ID NO: 679214 - RNA, 19 nt, Homo sapiens
  misc_RNA (1)...(19): siRNA sense strand
aggaggcacugaaggagaa

SEQ ID NO: 679215 - RNA, 19 nt, Homo sapiens
  misc_RNA (1)...(19): siRNA sense strand
ccacaugauugagucgaau

SEQ ID NO: 679216 - RNA, 19 nt, Homo sapiens
  misc_RNA (1)...(19): siRNA sense strand
gguggaggaucugcaguuc

SEQ ID NO: 679217 - RNA, 19 nt, Homo sapiens
  misc_RNA (1)...(19): siRNA sense strand
ggagaagcagcagcacauu

SEQ ID NO: 679218 - RNA, 19 nt, Homo sapiens
  misc_RNA (1)...(19): siRNA sense strand
gagaccgugucccggaaga

SEQ ID NO: 679219 - RNA, 19 nt, Homo sapiens
  misc_RNA (1)...(19): siRNA sense strand
ccagcacacccacaugauu

SEQ ID NO: 679220 - RNA, 19 nt, Homo sapiens
  misc_RNA (1)...(19): siRNA sense strand
aggcacagcaugagcagua

SEQ ID NO: 679221 - RNA, 19 nt, Homo sapiens
  misc_RNA (1)...(19): siRNA sense strand
cagcaugagcaguauguug

SEQ ID NO: 679222 - RNA, 19 nt, Homo sapiens
  misc_RNA (1)...(19): siRNA sense strand
cccagaaccugucauugca

SEQ ID NO: 679223 - RNA, 19 nt, Homo sapiens
  misc_RNA (1)...(19): siRNA sense strand
ccugguggcugagaacaga

SEQ ID NO: 679224 - RNA, 19 nt, Homo sapiens
  misc_RNA (1)...(19): siRNA sense strand
gcccagaaccugucauugc

SEQ ID NO: 679225 - RNA, 19 nt, Homo sapiens
  misc_RNA (1)...(19): siRNA sense strand
gcccagaccaucggcaauu

SEQ ID NO: 679226 - RNA, 19 nt, Homo sapiens
  misc_RNA (1)...(19): siRNA sense strand
augaggagcugcccugaca

SEQ ID NO: 679227 - RNA, 19 nt, Homo sapiens
  misc_RNA (1)...(19): siRNA sense strand
ggagauugcccugcucaag

SEQ ID NO: 679228 - RNA, 19 nt, Homo sapiens
  misc_RNA (1)...(19): siRNA sense strand
cucaacagcuccgugaaga

SEQ ID NO: 679229 - RNA, 19 nt, Homo sapiens
  misc_RNA (1)...(19): siRNA sense strand
ggagaucggcgagcugaag

SEQ ID NO: 679230 - RNA, 19 nt, Homo sapiens
  misc_RNA (1)...(19): siRNA sense strand
caauuccgguucugcaaac

SEQ ID NO: 679231 - RNA, 19 nt, Homo sapiens
  misc_RNA (1)...(19): siRNA sense strand
caggacaagcugaacaaga

SEQ ID NO: 679232 - RNA, 19 nt, Homo sapiens
  misc_RNA (1)...(19): siRNA sense strand
agaagauguuggacuacga

SEQ ID NO: 679233 - RNA, 19 nt, Homo sapiens
  misc_RNA (1)...(19): siRNA sense strand
gcgcccauccacaaaguga

SEQ ID NO: 679234 - RNA, 19 nt, Homo sapiens
  misc_RNA (1)...(19): siRNA sense strand
gaugcucagggcccaagua

SEQ ID NO: 679235 - RNA, 19 nt, Homo sapiens
  misc_RNA (1)...(19): siRNA sense strand
uggagggccugcaggacaa

SEQ ID NO: 679236 - RNA, 19 nt, Homo sapiens
  misc_RNA (1)...(19): siRNA sense strand
gggagagcguccucaacag

SEQ ID NO: 679237 - RNA, 19 nt, Homo sapiens
  misc_RNA (1)...(19): siRNA sense strand
gagagcgugcggaaagaga

SEQ ID NO: 679238 - RNA, 19 nt, Homo sapiens
  misc_RNA (1)...(19): siRNA sense strand
ucugcgagguggagaagga

SEQ ID NO: 679239 - RNA, 19 nt, Homo sapiens
  misc_RNA (1)...(19): siRNA sense strand
guggagagcgugcggaaag

SEQ ID NO: 679240 - RNA, 19 nt, Homo sapiens
  misc_RNA (1)...(19): siRNA sense strand
gcaacgagucgggauccaa

SEQ ID NO: 679241 - RNA, 19 nt, Homo sapiens
  misc_RNA (1)...(19): siRNA sense strand
ggcgcaggcuaucgaguuc

SEQ ID NO: 679242 - RNA, 19 nt, Homo sapiens
  misc_RNA (1)...(19): siRNA sense strand
gggugcugcgggauaaaua

SEQ ID NO: 679243 - RNA, 19 nt, Homo sapiens
  misc_RNA (1)...(19): siRNA sense strand
gcucucggccagcaaggaa

SEQ ID NO: 679244 - RNA, 19 nt, Homo sapiens
  misc_RNA (1)...(19): siRNA sense strand
caagaagaccaagcguaug

SEQ ID NO: 679245 - RNA, 19 nt, Homo sapiens
  misc_RNA (1)...(19): siRNA sense strand
agccaggcguggugcagua

SEQ ID NO: 679246 - RNA, 19 nt, Homo sapiens
  misc_RNA (1)...(19): siRNA sense strand
ggauccaaccucucagaca

SEQ ID NO: 679247 - RNA, 19 nt, Homo sapiens
  misc_RNA (1)...(19): siRNA sense strand
caucggcaauuccgguucu

SEQ ID NO: 679248 - RNA, 19 nt, Homo sapiens
  misc_RNA (1)...(19): siRNA sense strand
ccucaaagccacccugaac

SEQ ID NO: 679249 - RNA, 19 nt, Homo sapiens
  misc_RNA (1)...(19): siRNA sense strand
cgggagagcguccucaaca

SEQ ID NO: 679250 - RNA, 19 nt, Homo sapiens
  misc_RNA (1)...(19): siRNA sense strand
ccacaaagugauccguauc

SEQ ID NO: 679251 - RNA, 19 nt, Homo sapiens
  misc_RNA (1)...(19): siRNA sense strand
gaggagcugcccugacaag

SEQ ID NO: 679252 - RNA, 19 nt, Homo sapiens
  misc_RNA (1)...(19): siRNA sense strand
gaucaaggagcagaaacuc

SEQ ID NO: 679253 - RNA, 19 nt, Homo sapiens
  misc_RNA (1)...(19): siRNA sense strand
gcgcuggagagcaagugua

SEQ ID NO: 679254 - RNA, 19 nt, Homo sapiens
  misc_RNA (1)...(19): siRNA sense strand
caaacaggaggucgagagu

SEQ ID NO: 679255 - RNA, 19 nt, Homo sapiens
  misc_RNA (1)...(19): siRNA sense strand
ccgagaagaagauguugga

SEQ ID NO: 679256 - RNA, 19 nt, Homo sapiens
  misc_RNA (1)...(19): siRNA sense strand
gcacagcaugagcaguaug

SEQ ID NO: 679257 - RNA, 19 nt, Homo sapiens
  misc_RNA (1)...(19): siRNA sense strand
gaagaagauguuggacuac

SEQ ID NO: 679258 - RNA, 19 nt, Homo sapiens
  misc_RNA (1)...(19): siRNA sense strand
gcccagccaaggccaagaa

SEQ ID NO: 679259 - RNA, 19 nt, Homo sapiens
  misc_RNA (1)...(19): siRNA sense strand
ggaucaaggagcagaaacu

SEQ ID NO: 679260 - RNA, 19 nt, Homo sapiens
  misc_RNA (1)...(19): siRNA sense strand
uccacaaagugauccguau

SEQ ID NO: 679261 - RNA, 19 nt, Homo sapiens
  misc_RNA (1)...(19): siRNA sense strand
agaccgccaugcacgugaa

SEQ ID NO: 679262 - RNA, 19 nt, Homo sapiens
  misc_RNA (1)...(19): siRNA sense strand
ucaaagccacccugaacuc

SEQ ID NO: 679263 - RNA, 19 nt, Homo sapiens
  misc_RNA (1)...(19): siRNA sense strand
cccagcaguuccuccauca

SEQ ID NO: 679264 - RNA, 19 nt, Homo sapiens
  misc_RNA (1)...(19): siRNA sense strand
aagaagaccaagcguaugg

SEQ ID NO: 679265 - RNA, 19 nt, Homo sapiens
  misc_RNA (1)...(19): siRNA sense strand
cuaauggacaacuggaaau

SEQ ID NO: 679266 - RNA, 19 nt, Homo sapiens
  misc_RNA (1)...(19): siRNA sense strand
ggacaaagcucagaaacaa

SEQ ID NO: 679267 - RNA, 19 nt, Homo sapiens
  misc_RNA (1)...(19): siRNA sense strand
agaagaagauguuggacua

SEQ ID NO: 679268 - RNA, 19 nt, Homo sapiens
  misc_RNA (1)...(19): siRNA sense strand
ggaggaagguggaggaucu

SEQ ID NO: 679269 - RNA, 19 nt, Homo sapiens
  misc_RNA (1)...(19): siRNA sense strand
uaagugcgcuggagagcaa

SEQ ID NO: 679270 - RNA, 19 nt, Homo sapiens
  misc_RNA (1)...(19): siRNA sense strand
ugaccgggcuggacaaaga

SEQ ID NO: 679271 - RNA, 19 nt, Homo sapiens
  misc_RNA (1)...(19): siRNA sense strand
aacaggaggucgagaguuu

SEQ ID NO: 679272 - RNA, 19 nt, Homo sapiens
  misc_RNA (1)...(19): siRNA sense strand
ccaagaagaccaagcguau

SEQ ID NO: 679273 - RNA, 19 nt, Homo sapiens
  misc_RNA (1)...(19): siRNA sense strand
gcucagggcccaaguaagu

SEQ ID NO: 679274 - RNA, 19 nt, Homo sapiens
  misc_RNA (1)...(19): siRNA sense strand
gaacaagagggacaaagag

SEQ ID NO: 679275 - RNA, 19 nt, Homo sapiens
  misc_RNA (1)...(19): siRNA sense strand
cguaucggcuucccaucua

SEQ ID NO: 679276 - RNA, 19 nt, Homo sapiens
  misc_RNA (1)...(19): siRNA sense strand
cagaaccugucauugcauu

SEQ ID NO: 679277 - RNA, 19 nt, Homo sapiens
  misc_RNA (1)...(19): siRNA sense strand
agcagaaacucaaggauga

SEQ ID NO: 679278 - RNA, 19 nt, Homo sapiens
  misc_RNA (1)...(19): siRNA sense strand
gcuaauggacaacuggaaa

SEQ ID NO: 679279 - RNA, 19 nt, Homo sapiens
  misc_RNA (1)...(19): siRNA sense strand
gcaauuccgguucugcaaa

SEQ ID NO: 679280 - RNA, 19 nt, Homo sapiens
  misc_RNA (1)...(19): siRNA sense strand
ggaaggagcggagccugaa

SEQ ID NO: 679281 - RNA, 19 nt, Homo sapiens
  misc_RNA (1)...(19): siRNA sense strand
gagaagcagcagcacauug

SEQ ID NO: 679282 - RNA, 19 nt, Homo sapiens
  misc_RNA (1)...(19): siRNA sense strand
ggagagcaaguguaaguca

SEQ ID NO: 679283 - RNA, 19 nt, Homo sapiens
  misc_RNA (1)...(19): siRNA sense strand
agaagcagcagcacauuga

SEQ ID NO: 679284 - RNA, 19 nt, Homo sapiens
  misc_RNA (1)...(19): siRNA sense strand
gcaggacaaagcucagaaa

SEQ ID NO: 679285 - RNA, 19 nt, Homo sapiens
  misc_RNA (1)...(19): siRNA sense strand
ugaacaagagggacaaaga

SEQ ID NO: 679286 - RNA, 19 nt, Homo sapiens
  misc_RNA (1)...(19): siRNA sense strand
acaaagcucagaaacaaga

SEQ ID NO: 679287 - RNA, 19 nt, Homo sapiens
  misc_RNA (1)...(19): siRNA sense strand
ucaaggagcagaaacucaa

SEQ ID NO: 679288 - RNA, 19 nt, Homo sapiens
  misc_RNA (1)...(19): siRNA sense strand
cagcacacccacaugauug

SEQ ID NO: 679289 - RNA, 19 nt, Homo sapiens
  misc_RNA (1)...(19): siRNA sense strand
gaacgaacugcggguguug

SEQ ID NO: 679290 - RNA, 19 nt, Homo sapiens
  misc_RNA (1)...(19): siRNA sense strand
guaagucaggcgagaagaa

SEQ ID NO: 679291 - RNA, 19 nt, Homo sapiens
  misc_RNA (1)...(19): siRNA sense strand
ccagugcccacccaaguuu

SEQ ID NO: 679292 - RNA, 19 nt, Homo sapiens
  misc_RNA (1)...(19): siRNA sense strand
ccaugcacgugaaggagaa

SEQ ID NO: 679293 - RNA, 19 nt, Homo sapiens
  misc_RNA (1)...(19): siRNA sense strand
ugaacgaacugcggguguu

SEQ ID NO: 679294 - RNA, 19 nt, Homo sapiens
  misc_RNA (1)...(19): siRNA sense strand
ugagcaguauguugcagaa

SEQ ID NO: 679295 - RNA, 19 nt, Homo sapiens
  misc_RNA (1)...(19): siRNA sense strand
aggacaagcugaacaagag

SEQ ID NO: 679296 - RNA, 19 nt, Homo sapiens
  misc_RNA (1)...(19): siRNA sense strand
aggaggcacugaaggagaa

SEQ ID NO: 679297 - RNA, 19 nt, Homo sapiens
  misc_RNA (1)...(19): siRNA sense strand
ccacaugauugagucgaau

SEQ ID NO: 679298 - RNA, 19 nt, Homo sapiens
  misc_RNA (1)...(19): siRNA sense strand
gguggaggaucugcaguuc

SEQ ID NO: 679299 - RNA, 19 nt, Homo sapiens
  misc_RNA (1)...(19): siRNA sense strand
ggagaagcagcagcacauu

SEQ ID NO: 679300 - RNA, 19 nt, Homo sapiens
  misc_RNA (1)...(19): siRNA sense strand
gagaccgugucccggaaga

SEQ ID NO: 679301 - RNA, 19 nt, Homo sapiens
  misc_RNA (1)...(19): siRNA sense strand
ccagcacacccacaugauu

SEQ ID NO: 679302 - RNA, 19 nt, Homo sapiens
  misc_RNA (1)...(19): siRNA sense strand
aggcacagcaugagcagua

SEQ ID NO: 679303 - RNA, 19 nt, Homo sapiens
  misc_RNA (1)...(19): siRNA sense strand
cagcaugagcaguauguug

SEQ ID NO: 679304 - RNA, 19 nt, Homo sapiens
  misc_RNA (1)...(19): siRNA sense strand
cccagaaccugucauugca

SEQ ID NO: 679305 - RNA, 19 nt, Homo sapiens
  misc_RNA (1)...(19): siRNA sense strand
ccugguggcugagaacaga

SEQ ID NO: 679306 - RNA, 19 nt, Homo sapiens
  misc_RNA (1)...(19): siRNA sense strand
gcccagaaccugucauugc

SEQ ID NO: 679307 - RNA, 19 nt, Homo sapiens
  misc_RNA (1)...(19): siRNA sense strand
gcccagaccaucggcaauu

SEQ ID NO: 679308 - RNA, 19 nt, Homo sapiens
  misc_RNA (1)...(19): siRNA sense strand
augaggagcugcccugaca

SEQ ID NO: 679309 - RNA, 19 nt, Homo sapiens
  misc_RNA (1)...(19): siRNA sense strand
ggagauugcccugcucaag

SEQ ID NO: 679310 - RNA, 19 nt, Homo sapiens
  misc_RNA (1)...(19): siRNA sense strand
cucaacagcuccgugaaga

SEQ ID NO: 679311 - RNA, 19 nt, Homo sapiens
  misc_RNA (1)...(19): siRNA sense strand
ggagaucggcgagcugaag

SEQ ID NO: 679312 - RNA, 19 nt, Homo sapiens
  misc_RNA (1)...(19): siRNA sense strand
caauuccgguucugcaaac

SEQ ID NO: 679313 - RNA, 19 nt, Homo sapiens
  misc_RNA (1)...(19): siRNA sense strand
caggacaagcugaacaaga

SEQ ID NO: 679314 - RNA, 19 nt, Homo sapiens
  misc_RNA (1)...(19): siRNA sense strand
agaagauguuggacuacga

SEQ ID NO: 679315 - RNA, 19 nt, Homo sapiens
  misc_RNA (1)...(19): siRNA sense strand
gcgcccauccacaaaguga

SEQ ID NO: 679316 - RNA, 19 nt, Homo sapiens
  misc_RNA (1)...(19): siRNA sense strand
gaugcucagggcccaagua

SEQ ID NO: 679317 - RNA, 19 nt, Homo sapiens
  misc_RNA (1)...(19): siRNA sense strand
uggagggccugcaggacaa

SEQ ID NO: 679318 - RNA, 19 nt, Homo sapiens
  misc_RNA (1)...(19): siRNA sense strand
gggagagcguccucaacag

SEQ ID NO: 679319 - RNA, 19 nt, Homo sapiens
  misc_RNA (1)...(19): siRNA sense strand
gagagcgugcggaaagaga

SEQ ID NO: 679320 - RNA, 19 nt, Homo sapiens
  misc_RNA (1)...(19): siRNA sense strand
ucugcgagguggagaagga

SEQ ID NO: 679321 - RNA, 19 nt, Homo sapiens
  misc_RNA (1)...(19): siRNA sense strand
guggagagcgugcggaaag

SEQ ID NO: 679322 - RNA, 19 nt, Homo sapiens
  misc_RNA (1)...(19): siRNA sense strand
gcaacgagucgggauccaa

SEQ ID NO: 679323 - RNA, 19 nt, Homo sapiens
  misc_RNA (1)...(19): siRNA sense strand
ggcgcaggcuaucgaguuc

SEQ ID NO: 679324 - RNA, 19 nt, Homo sapiens
  misc_RNA (1)...(19): siRNA sense strand
gggugcugcgggauaaaua

SEQ ID NO: 679325 - RNA, 19 nt, Homo sapiens
  misc_RNA (1)...(19): siRNA sense strand
gcucucggccagcaaggaa

SEQ ID NO: 679326 - RNA, 19 nt, Homo sapiens
  misc_RNA (1)...(19): siRNA sense strand
caagaagaccaagcguaug

SEQ ID NO: 679327 - RNA, 19 nt, Homo sapiens
  misc_RNA (1)...(19): siRNA sense strand
agccaggcguggugcagua

SEQ ID NO: 679328 - RNA, 19 nt, Homo sapiens
  misc_RNA (1)...(19): siRNA sense strand
ggauccaaccucucagaca

SEQ ID NO: 679329 - RNA, 19 nt, Homo sapiens
  misc_RNA (1)...(19): siRNA sense strand
caucggcaauuccgguucu

SEQ ID NO: 679330 - RNA, 19 nt, Homo sapiens
  misc_RNA (1)...(19): siRNA sense strand
ccucaaagccacccugaac

SEQ ID NO: 679331 - RNA, 19 nt, Homo sapiens
  misc_RNA (1)...(19): siRNA sense strand
cgggagagcguccucaaca

SEQ ID NO: 679332 - RNA, 19 nt, Homo sapiens
  misc_RNA (1)...(19): siRNA sense strand
ccacaaagugauccguauc

SEQ ID NO: 679333 - RNA, 19 nt, Homo sapiens
  misc_RNA (1)...(19): siRNA sense strand
gaggagcugcccugacaag

SEQ ID NO: 679334 - RNA, 19 nt, Homo sapiens
  misc_RNA (1)...(19): siRNA sense strand
gaucaaggagcagaaacuc

SEQ ID NO: 679335 - RNA, 19 nt, Homo sapiens
  misc_RNA (1)...(19): siRNA sense strand
gcgcuggagagcaagugua

SEQ ID NO: 679336 - RNA, 19 nt, Homo sapiens
  misc_RNA (1)...(19): siRNA sense strand
caaacaggaggucgagagu

SEQ ID NO: 679337 - RNA, 19 nt, Homo sapiens
  misc_RNA (1)...(19): siRNA sense strand
ccgagaagaagauguugga

SEQ ID NO: 679338 - RNA, 19 nt, Homo sapiens
  misc_RNA (1)...(19): siRNA sense strand
gcacagcaugagcaguaug

SEQ ID NO: 679339 - RNA, 19 nt, Homo sapiens
  misc_RNA (1)...(19): siRNA sense strand
gaagaagauguuggacuac

SEQ ID NO: 679340 - RNA, 19 nt, Homo sapiens
  misc_RNA (1)...(19): siRNA sense strand
gcccagccaaggccaagaa

SEQ ID NO: 679341 - RNA, 19 nt, Homo sapiens
  misc_RNA (1)...(19): siRNA sense strand
ggaucaaggagcagaaacu

SEQ ID NO: 679342 - RNA, 19 nt, Homo sapiens
  misc_RNA (1)...(19): siRNA sense strand
uccacaaagugauccguau

SEQ ID NO: 679343 - RNA, 19 nt, Homo sapiens
  misc_RNA (1)...(19): siRNA sense strand
agaccgccaugcacgugaa

SEQ ID NO: 679344 - RNA, 19 nt, Homo sapiens
  misc_RNA (1)...(19): siRNA sense strand
ucaaagccacccugaacuc

SEQ ID NO: 679345 - RNA, 19 nt, Homo sapiens
  misc_RNA (1)...(19): siRNA sense strand
cccagcaguuccuccauca

SEQ ID NO: 679346 - RNA, 19 nt, Homo sapiens
  misc_RNA (1)...(19): siRNA sense strand
aagaagaccaagcguaugg

SEQ ID NO: 679347 - RNA, 19 nt, Homo sapiens
  misc_RNA (1)...(19): siRNA sense strand
cuaauggacaacuggaaau

SEQ ID NO: 679348 - RNA, 19 nt, Homo sapiens
  misc_RNA (1)...(19): siRNA sense strand
ccaagagauugucaaauuu

SEQ ID NO: 679349 - RNA, 19 nt, Homo sapiens
  misc_RNA (1)...(19): siRNA sense strand
gccggaagcuuaucacaaa

SEQ ID NO: 679350 - RNA, 19 nt, Homo sapiens
  misc_RNA (1)...(19): siRNA sense strand
ggacaagcuucucaucuuc

SEQ ID NO: 679351 - RNA, 19 nt, Homo sapiens
  misc_RNA (1)...(19): siRNA sense strand
gcaguuggcuaaagagcaa

SEQ ID NO: 679352 - RNA, 19 nt, Homo sapiens
  misc_RNA (1)...(19): siRNA sense strand
accaagagauugucaaauu

SEQ ID NO: 679353 - RNA, 19 nt, Homo sapiens
  misc_RNA (1)...(19): siRNA sense strand
cuaaagagcaagacaaaga

SEQ ID NO: 679354 - RNA, 19 nt, Homo sapiens
  misc_RNA (1)...(19): siRNA sense strand
ggauauccgugauuguuca

SEQ ID NO: 679355 - RNA, 19 nt, Homo sapiens
  misc_RNA (1)...(19): siRNA sense strand
acaguugcgucacagaaua

SEQ ID NO: 679356 - RNA, 19 nt, Homo sapiens
  misc_RNA (1)...(19): siRNA sense strand
gcgcuacgccuguuucuug

SEQ ID NO: 679357 - RNA, 19 nt, Homo sapiens
  misc_RNA (1)...(19): siRNA sense strand
caagagauugucaaauuug

SEQ ID NO: 679358 - RNA, 19 nt, Homo sapiens
  misc_RNA (1)...(19): siRNA sense strand
ggaaguggagaaucacaaa

SEQ ID NO: 679359 - RNA, 19 nt, Homo sapiens
  misc_RNA (1)...(19): siRNA sense strand
ggaagcuuaucacaaaaua

SEQ ID NO: 679360 - RNA, 19 nt, Homo sapiens
  misc_RNA (1)...(19): siRNA sense strand
cggacaagcuucucaucuu

SEQ ID NO: 679361 - RNA, 19 nt, Homo sapiens
  misc_RNA (1)...(19): siRNA sense strand
gcuacgguccucuauauug

SEQ ID NO: 679362 - RNA, 19 nt, Homo sapiens
  misc_RNA (1)...(19): siRNA sense strand
gguccucuauauugugaaa

SEQ ID NO: 679363 - RNA, 19 nt, Homo sapiens
  misc_RNA (1)...(19): siRNA sense strand
uaaagagcaagacaaagaa

SEQ ID NO: 679364 - RNA, 19 nt, Homo sapiens
  misc_RNA (1)...(19): siRNA sense strand
uaaccaagagauugucaaa

SEQ ID NO: 679365 - RNA, 19 nt, Homo sapiens
  misc_RNA (1)...(19): siRNA sense strand
cuacgguccucuauauugu

SEQ ID NO: 679366 - RNA, 19 nt, Homo sapiens
  misc_RNA (1)...(19): siRNA sense strand
uugcuacgguccucuauau

SEQ ID NO: 679367 - RNA, 19 nt, Homo sapiens
  misc_RNA (1)...(19): siRNA sense strand
gcucuuacugaacugaaua

SEQ ID NO: 679368 - RNA, 19 nt, Homo sapiens
  misc_RNA (1)...(19): siRNA sense strand
gcccagacauccaguacca

SEQ ID NO: 679369 - RNA, 19 nt, Homo sapiens
  misc_RNA (1)...(19): siRNA sense strand
gaggugaaggcgcuuauuc

SEQ ID NO: 679370 - RNA, 19 nt, Homo sapiens
  misc_RNA (1)...(19): siRNA sense strand
cuacgccuguuucuugcua

SEQ ID NO: 679371 - RNA, 19 nt, Homo sapiens
  misc_RNA (1)...(19): siRNA sense strand
gccaugcagucucuaguca

SEQ ID NO: 679372 - RNA, 19 nt, Homo sapiens
  misc_RNA (1)...(19): siRNA sense strand
uggagcaguuggcuaaaga

SEQ ID NO: 679373 - RNA, 19 nt, Homo sapiens
  misc_RNA (1)...(19): siRNA sense strand
caggauauccgugauuguu

SEQ ID NO: 679374 - RNA, 19 nt, Homo sapiens
  misc_RNA (1)...(19): siRNA sense strand
ggcuaaagagcaagacaaa

SEQ ID NO: 679375 - RNA, 19 nt, Homo sapiens
  misc_RNA (1)...(19): siRNA sense strand
caagacaaagaaucagaga

SEQ ID NO: 679376 - RNA, 19 nt, Homo sapiens
  misc_RNA (1)...(19): siRNA sense strand
gaaggcgcuuauucaggau

SEQ ID NO: 679377 - RNA, 19 nt, Homo sapiens
  misc_RNA (1)...(19): siRNA sense strand
cuagucacuucuucacgaa

SEQ ID NO: 679378 - RNA, 19 nt, Homo sapiens
  misc_RNA (1)...(19): siRNA sense strand
aagcggcucuuuccauuuu

SEQ ID NO: 679379 - RNA, 19 nt, Homo sapiens
  misc_RNA (1)...(19): siRNA sense strand
agagcaagacaaagaauca

SEQ ID NO: 679380 - RNA, 19 nt, Homo sapiens
  misc_RNA (1)...(19): siRNA sense strand
gaagaauuuaaguccaugu

SEQ ID NO: 679381 - RNA, 19 nt, Homo sapiens
  misc_RNA (1)...(19): siRNA sense strand
ggccggaagcuuaucacaa

SEQ ID NO: 679382 - RNA, 19 nt, Homo sapiens
  misc_RNA (1)...(19): siRNA sense strand
ggaggugaaggcgcuuauu

SEQ ID NO: 679383 - RNA, 19 nt, Homo sapiens
  misc_RNA (1)...(19): siRNA sense strand
ugauuguucaggacccuua

SEQ ID NO: 679384 - RNA, 19 nt, Homo sapiens
  misc_RNA (1)...(19): siRNA sense strand
ugcagucucuagucacuuc

SEQ ID NO: 679385 - RNA, 19 nt, Homo sapiens
  misc_RNA (1)...(19): siRNA sense strand
caugcagucucuagucacu

SEQ ID NO: 679386 - RNA, 19 nt, Homo sapiens
  misc_RNA (1)...(19): siRNA sense strand
guccacguccggaucugua

SEQ ID NO: 679387 - RNA, 19 nt, Homo sapiens
  misc_RNA (1)...(19): siRNA sense strand
ccaagagauugucaaauuu

SEQ ID NO: 679388 - RNA, 19 nt, Homo sapiens
  misc_RNA (1)...(19): siRNA sense strand
gccggaagcuuaucacaaa

SEQ ID NO: 679389 - RNA, 19 nt, Homo sapiens
  misc_RNA (1)...(19): siRNA sense strand
ggacaagcuucucaucuuc

SEQ ID NO: 679390 - RNA, 19 nt, Homo sapiens
  misc_RNA (1)...(19): siRNA sense strand
gcaguuggcuaaagagcaa

SEQ ID NO: 679391 - RNA, 19 nt, Homo sapiens
  misc_RNA (1)...(19): siRNA sense strand
accaagagauugucaaauu

SEQ ID NO: 679392 - RNA, 19 nt, Homo sapiens
  misc_RNA (1)...(19): siRNA sense strand
cuaaagagcaagacaaaga

SEQ ID NO: 679393 - RNA, 19 nt, Homo sapiens
  misc_RNA (1)...(19): siRNA sense strand
ggauauccgugauuguuca

SEQ ID NO: 679394 - RNA, 19 nt, Homo sapiens
  misc_RNA (1)...(19): siRNA sense strand
acaguugcgucacagaaua

SEQ ID NO: 679395 - RNA, 19 nt, Homo sapiens
  misc_RNA (1)...(19): siRNA sense strand
gcgcuacgccuguuucuug

SEQ ID NO: 679396 - RNA, 19 nt, Homo sapiens
  misc_RNA (1)...(19): siRNA sense strand
caagagauugucaaauuug

SEQ ID NO: 679397 - RNA, 19 nt, Homo sapiens
  misc_RNA (1)...(19): siRNA sense strand
ggaaguggagaaucacaaa

SEQ ID NO: 679398 - RNA, 19 nt, Homo sapiens
  misc_RNA (1)...(19): siRNA sense strand
ggaagcuuaucacaaaaua

SEQ ID NO: 679399 - RNA, 19 nt, Homo sapiens
  misc_RNA (1)...(19): siRNA sense strand
cggacaagcuucucaucuu

SEQ ID NO: 679400 - RNA, 19 nt, Homo sapiens
  misc_RNA (1)...(19): siRNA sense strand
gcuacgguccucuauauug

SEQ ID NO: 679401 - RNA, 19 nt, Homo sapiens
  misc_RNA (1)...(19): siRNA sense strand
gguccucuauauugugaaa

SEQ ID NO: 679402 - RNA, 19 nt, Homo sapiens
  misc_RNA (1)...(19): siRNA sense strand
uaaagagcaagacaaagaa

SEQ ID NO: 679403 - RNA, 19 nt, Homo sapiens
  misc_RNA (1)...(19): siRNA sense strand
uaaccaagagauugucaaa

SEQ ID NO: 679404 - RNA, 19 nt, Homo sapiens
  misc_RNA (1)...(19): siRNA sense strand
cuacgguccucuauauugu

SEQ ID NO: 679405 - RNA, 19 nt, Homo sapiens
  misc_RNA (1)...(19): siRNA sense strand
uugcuacgguccucuauau

SEQ ID NO: 679406 - RNA, 19 nt, Homo sapiens
  misc_RNA (1)...(19): siRNA sense strand
gcucuuacugaacugaaua

SEQ ID NO: 679407 - RNA, 19 nt, Homo sapiens
  misc_RNA (1)...(19): siRNA sense strand
gcccagacauccaguacca

SEQ ID NO: 679408 - RNA, 19 nt, Homo sapiens
  misc_RNA (1)...(19): siRNA sense strand
gaggugaaggcgcuuauuc

SEQ ID NO: 679409 - RNA, 19 nt, Homo sapiens
  misc_RNA (1)...(19): siRNA sense strand
cuacgccuguuucuugcua

SEQ ID NO: 679410 - RNA, 19 nt, Homo sapiens
  misc_RNA (1)...(19): siRNA sense strand
gccaugcagucucuaguca

SEQ ID NO: 679411 - RNA, 19 nt, Homo sapiens
  misc_RNA (1)...(19): siRNA sense strand
uggagcaguuggcuaaaga

SEQ ID NO: 679412 - RNA, 19 nt, Homo sapiens
  misc_RNA (1)...(19): siRNA sense strand
caggauauccgugauuguu

SEQ ID NO: 679413 - RNA, 19 nt, Homo sapiens
  misc_RNA (1)...(19): siRNA sense strand
ggcuaaagagcaagacaaa

SEQ ID NO: 679414 - RNA, 19 nt, Homo sapiens
  misc_RNA (1)...(19): siRNA sense strand
caagacaaagaaucagaga

SEQ ID NO: 679415 - RNA, 19 nt, Homo sapiens
  misc_RNA (1)...(19): siRNA sense strand
gaaggcgcuuauucaggau

SEQ ID NO: 679416 - RNA, 19 nt, Homo sapiens
  misc_RNA (1)...(19): siRNA sense strand
cuagucacuucuucacgaa

SEQ ID NO: 679417 - RNA, 19 nt, Homo sapiens
  misc_RNA (1)...(19): siRNA sense strand
aagcggcucuuuccauuuu

SEQ ID NO: 679418 - RNA, 19 nt, Homo sapiens
  misc_RNA (1)...(19): siRNA sense strand
agagcaagacaaagaauca

SEQ ID NO: 679419 - RNA, 19 nt, Homo sapiens
  misc_RNA (1)...(19): siRNA sense strand
gaagaauuuaaguccaugu

SEQ ID NO: 679420 - RNA, 19 nt, Homo sapiens
  misc_RNA (1)...(19): siRNA sense strand
ggccggaagcuuaucacaa

SEQ ID NO: 679421 - RNA, 19 nt, Homo sapiens
  misc_RNA (1)...(19): siRNA sense strand
ggaggugaaggcgcuuauu

SEQ ID NO: 679422 - RNA, 19 nt, Homo sapiens
  misc_RNA (1)...(19): siRNA sense strand
ugauuguucaggacccuua

SEQ ID NO: 679423 - RNA, 19 nt, Homo sapiens
  misc_RNA (1)...(19): siRNA sense strand
ugcagucucuagucacuuc

SEQ ID NO: 679424 - RNA, 19 nt, Homo sapiens
  misc_RNA (1)...(19): siRNA sense strand
caugcagucucuagucacu

SEQ ID NO: 679425 - RNA, 19 nt, Homo sapiens
  misc_RNA (1)...(19): siRNA sense strand
guccacguccggaucugua

SEQ ID NO: 679426 - RNA, 19 nt, Homo sapiens
  misc_RNA (1)...(19): siRNA sense strand
ccaagagauugucaaauuu

SEQ ID NO: 679427 - RNA, 19 nt, Homo sapiens
  misc_RNA (1)...(19): siRNA sense strand
gccggaagcuuaucacaaa

SEQ ID NO: 679428 - RNA, 19 nt, Homo sapiens
  misc_RNA (1)...(19): siRNA sense strand
ggacaagcuucucaucuuc

SEQ ID NO: 679429 - RNA, 19 nt, Homo sapiens
  misc_RNA (1)...(19): siRNA sense strand
gcaguuggcuaaagagcaa

SEQ ID NO: 679430 - RNA, 19 nt, Homo sapiens
  misc_RNA (1)...(19): siRNA sense strand
accaagagauugucaaauu

SEQ ID NO: 679431 - RNA, 19 nt, Homo sapiens
  misc_RNA (1)...(19): siRNA sense strand
cuaaagagcaagacaaaga

SEQ ID NO: 679432 - RNA, 19 nt, Homo sapiens
  misc_RNA (1)...(19): siRNA sense strand
ggauauccgugauuguuca

SEQ ID NO: 679433 - RNA, 19 nt, Homo sapiens
  misc_RNA (1)...(19): siRNA sense strand
acaguugcgucacagaaua

SEQ ID NO: 679434 - RNA, 19 nt, Homo sapiens
  misc_RNA (1)...(19): siRNA sense strand
gcgcuacgccuguuucuug

SEQ ID NO: 679435 - RNA, 19 nt, Homo sapiens
  misc_RNA (1)...(19): siRNA sense strand
caagagauugucaaauuug

SEQ ID NO: 679436 - RNA, 19 nt, Homo sapiens
  misc_RNA (1)...(19): siRNA sense strand
ggaaguggagaaucacaaa

SEQ ID NO: 679437 - RNA, 19 nt, Homo sapiens
  misc_RNA (1)...(19): siRNA sense strand
ggaagcuuaucacaaaaua

SEQ ID NO: 679438 - RNA, 19 nt, Homo sapiens
  misc_RNA (1)...(19): siRNA sense strand
cggacaagcuucucaucuu

SEQ ID NO: 679439 - RNA, 19 nt, Homo sapiens
  misc_RNA (1)...(19): siRNA sense strand
gcuacgguccucuauauug

SEQ ID NO: 679440 - RNA, 19 nt, Homo sapiens
  misc_RNA (1)...(19): siRNA sense strand
gguccucuauauugugaaa

SEQ ID NO: 679441 - RNA, 19 nt, Homo sapiens
  misc_RNA (1)...(19): siRNA sense strand
uaaagagcaagacaaagaa

SEQ ID NO: 679442 - RNA, 19 nt, Homo sapiens
  misc_RNA (1)...(19): siRNA sense strand
uaaccaagagauugucaaa

SEQ ID NO: 679443 - RNA, 19 nt, Homo sapiens
  misc_RNA (1)...(19): siRNA sense strand
cuacgguccucuauauugu

SEQ ID NO: 679444 - RNA, 19 nt, Homo sapiens
  misc_RNA (1)...(19): siRNA sense strand
uugcuacgguccucuauau

SEQ ID NO: 679445 - RNA, 19 nt, Homo sapiens
  misc_RNA (1)...(19): siRNA sense strand
gcucuuacugaacugaaua

SEQ ID NO: 679446 - RNA, 19 nt, Homo sapiens
  misc_RNA (1)...(19): siRNA sense strand
gcccagacauccaguacca

SEQ ID NO: 679447 - RNA, 19 nt, Homo sapiens
  misc_RNA (1)...(19): siRNA sense strand
gaggugaaggcgcuuauuc

SEQ ID NO: 679448 - RNA, 19 nt, Homo sapiens
  misc_RNA (1)...(19): siRNA sense strand
cuacgccuguuucuugcua

SEQ ID NO: 679449 - RNA, 19 nt, Homo sapiens
  misc_RNA (1)...(19): siRNA sense strand
gccaugcagucucuaguca

SEQ ID NO: 679450 - RNA, 19 nt, Homo sapiens
  misc_RNA (1)...(19): siRNA sense strand
uggagcaguuggcuaaaga

SEQ ID NO: 679451 - RNA, 19 nt, Homo sapiens
  misc_RNA (1)...(19): siRNA sense strand
caggauauccgugauuguu

SEQ ID NO: 679452 - RNA, 19 nt, Homo sapiens
  misc_RNA (1)...(19): siRNA sense strand
ggcuaaagagcaagacaaa

SEQ ID NO: 679453 - RNA, 19 nt, Homo sapiens
  misc_RNA (1)...(19): siRNA sense strand
caagacaaagaaucagaga

SEQ ID NO: 679454 - RNA, 19 nt, Homo sapiens
  misc_RNA (1)...(19): siRNA sense strand
gaaggcgcuuauucaggau

SEQ ID NO: 679455 - RNA, 19 nt, Homo sapiens
  misc_RNA (1)...(19): siRNA sense strand
cuagucacuucuucacgaa

SEQ ID NO: 679456 - RNA, 19 nt, Homo sapiens
  misc_RNA (1)...(19): siRNA sense strand
aagcggcucuuuccauuuu

SEQ ID NO: 679457 - RNA, 19 nt, Homo sapiens
  misc_RNA (1)...(19): siRNA sense strand
agagcaagacaaagaauca

SEQ ID NO: 679458 - RNA, 19 nt, Homo sapiens
  misc_RNA (1)...(19): siRNA sense strand
gaagaauuuaaguccaugu

SEQ ID NO: 679459 - RNA, 19 nt, Homo sapiens
  misc_RNA (1)...(19): siRNA sense strand
ggccggaagcuuaucacaa

SEQ ID NO: 679460 - RNA, 19 nt, Homo sapiens
  misc_RNA (1)...(19): siRNA sense strand
ggaggugaaggcgcuuauu

SEQ ID NO: 679461 - RNA, 19 nt, Homo sapiens
  misc_RNA (1)...(19): siRNA sense strand
ugauuguucaggacccuua

SEQ ID NO: 679462 - RNA, 19 nt, Homo sapiens
  misc_RNA (1)...(19): siRNA sense strand
ugcagucucuagucacuuc

SEQ ID NO: 679463 - RNA, 19 nt, Homo sapiens
  misc_RNA (1)...(19): siRNA sense strand
caugcagucucuagucacu

SEQ ID NO: 679464 - RNA, 19 nt, Homo sapiens
  misc_RNA (1)...(19): siRNA sense strand
guccacguccggaucugua

SEQ ID NO: 679465 - RNA, 19 nt, Homo sapiens
  misc_RNA (1)...(19): siRNA sense strand
ccaagagauugucaaauuu

SEQ ID NO: 679466 - RNA, 19 nt, Homo sapiens
  misc_RNA (1)...(19): siRNA sense strand
gccggaagcuuaucacaaa

SEQ ID NO: 679467 - RNA, 19 nt, Homo sapiens
  misc_RNA (1)...(19): siRNA sense strand
ggacaagcuucucaucuuc

SEQ ID NO: 679468 - RNA, 19 nt, Homo sapiens
  misc_RNA (1)...(19): siRNA sense strand
gcaguuggcuaaagagcaa

SEQ ID NO: 679469 - RNA, 19 nt, Homo sapiens
  misc_RNA (1)...(19): siRNA sense strand
accaagagauugucaaauu

SEQ ID NO: 679470 - RNA, 19 nt, Homo sapiens
  misc_RNA (1)...(19): siRNA sense strand
cuaaagagcaagacaaaga

SEQ ID NO: 679471 - RNA, 19 nt, Homo sapiens
  misc_RNA (1)...(19): siRNA sense strand
ggauauccgugauuguuca

SEQ ID NO: 679472 - RNA, 19 nt, Homo sapiens
  misc_RNA (1)...(19): siRNA sense strand
acaguugcgucacagaaua

SEQ ID NO: 679473 - RNA, 19 nt, Homo sapiens
  misc_RNA (1)...(19): siRNA sense strand
gcgcuacgccuguuucuug

SEQ ID NO: 679474 - RNA, 19 nt, Homo sapiens
  misc_RNA (1)...(19): siRNA sense strand
caagagauugucaaauuug

SEQ ID NO: 679475 - RNA, 19 nt, Homo sapiens
  misc_RNA (1)...(19): siRNA sense strand
ggaaguggagaaucacaaa

SEQ ID NO: 679476 - RNA, 19 nt, Homo sapiens
  misc_RNA (1)...(19): siRNA sense strand
ggaagcuuaucacaaaaua

SEQ ID NO: 679477 - RNA, 19 nt, Homo sapiens
  misc_RNA (1)...(19): siRNA sense strand
cggacaagcuucucaucuu

SEQ ID NO: 679478 - RNA, 19 nt, Homo sapiens
  misc_RNA (1)...(19): siRNA sense strand
gcuacgguccucuauauug

SEQ ID NO: 679479 - RNA, 19 nt, Homo sapiens
  misc_RNA (1)...(19): siRNA sense strand
gguccucuauauugugaaa

SEQ ID NO: 679480 - RNA, 19 nt, Homo sapiens
  misc_RNA (1)...(19): siRNA sense strand
uaaagagcaagacaaagaa

SEQ ID NO: 679481 - RNA, 19 nt, Homo sapiens
  misc_RNA (1)...(19): siRNA sense strand
uaaccaagagauugucaaa

SEQ ID NO: 679482 - RNA, 19 nt, Homo sapiens
  misc_RNA (1)...(19): siRNA sense strand
cuacgguccucuauauugu

SEQ ID NO: 679483 - RNA, 19 nt, Homo sapiens
  misc_RNA (1)...(19): siRNA sense strand
uugcuacgguccucuauau

SEQ ID NO: 679484 - RNA, 19 nt, Homo sapiens
  misc_RNA (1)...(19): siRNA sense strand
gcucuuacugaacugaaua

SEQ ID NO: 679485 - RNA, 19 nt, Homo sapiens
  misc_RNA (1)...(19): siRNA sense strand
gcccagacauccaguacca

SEQ ID NO: 679486 - RNA, 19 nt, Homo sapiens
  misc_RNA (1)...(19): siRNA sense strand
gaggugaaggcgcuuauuc

SEQ ID NO: 679487 - RNA, 19 nt, Homo sapiens
  misc_RNA (1)...(19): siRNA sense strand
cuacgccuguuucuugcua

SEQ ID NO: 679488 - RNA, 19 nt, Homo sapiens
  misc_RNA (1)...(19): siRNA sense strand
gccaugcagucucuaguca

SEQ ID NO: 679489 - RNA, 19 nt, Homo sapiens
  misc_RNA (1)...(19): siRNA sense strand
uggagcaguuggcuaaaga

SEQ ID NO: 679490 - RNA, 19 nt, Homo sapiens
  misc_RNA (1)...(19): siRNA sense strand
caggauauccgugauuguu

SEQ ID NO: 679491 - RNA, 19 nt, Homo sapiens
  misc_RNA (1)...(19): siRNA sense strand
ggcuaaagagcaagacaaa

SEQ ID NO: 679492 - RNA, 19 nt, Homo sapiens
  misc_RNA (1)...(19): siRNA sense strand
caagacaaagaaucagaga

SEQ ID NO: 679493 - RNA, 19 nt, Homo sapiens
  misc_RNA (1)...(19): siRNA sense strand
gaaggcgcuuauucaggau

SEQ ID NO: 679494 - RNA, 19 nt, Homo sapiens
  misc_RNA (1)...(19): siRNA sense strand
cuagucacuucuucacgaa

SEQ ID NO: 679495 - RNA, 19 nt, Homo sapiens
  misc_RNA (1)...(19): siRNA sense strand
aagcggcucuuuccauuuu

SEQ ID NO: 679496 - RNA, 19 nt, Homo sapiens
  misc_RNA (1)...(19): siRNA sense strand
agagcaagacaaagaauca

SEQ ID NO: 679497 - RNA, 19 nt, Homo sapiens
  misc_RNA (1)...(19): siRNA sense strand
gaagaauuuaaguccaugu

SEQ ID NO: 679498 - RNA, 19 nt, Homo sapiens
  misc_RNA (1)...(19): siRNA sense strand
ggccggaagcuuaucacaa

SEQ ID NO: 679499 - RNA, 19 nt, Homo sapiens
  misc_RNA (1)...(19): siRNA sense strand
ggaggugaaggcgcuuauu

SEQ ID NO: 679500 - RNA, 19 nt, Homo sapiens
  misc_RNA (1)...(19): siRNA sense strand
ugauuguucaggacccuua

SEQ ID NO: 679501 - RNA, 19 nt, Homo sapiens
  misc_RNA (1)...(19): siRNA sense strand
ugcagucucuagucacuuc

SEQ ID NO: 679502 - RNA, 19 nt, Homo sapiens
  misc_RNA (1)...(19): siRNA sense strand
caugcagucucuagucacu

SEQ ID NO: 679503 - RNA, 19 nt, Homo sapiens
  misc_RNA (1)...(19): siRNA sense strand
guccacguccggaucugua

SEQ ID NO: 679504 - RNA, 19 nt, Homo sapiens
  misc_RNA (1)...(19): siRNA sense strand
gaaguuaaccgguguagga

SEQ ID NO: 679505 - RNA, 19 nt, Homo sapiens
  misc_RNA (1)...(19): siRNA sense strand
gaaaucagacgacagauag

SEQ ID NO: 679506 - RNA, 19 nt, Homo sapiens
  misc_RNA (1)...(19): siRNA sense strand
gcagaagcuuauuaaaguu

SEQ ID NO: 679507 - RNA, 19 nt, Homo sapiens
  misc_RNA (1)...(19): siRNA sense strand
gcaaggagacugcagaaau

SEQ ID NO: 679508 - RNA, 19 nt, Homo sapiens
  misc_RNA (1)...(19): siRNA sense strand
caaggagacugcagaaauc

SEQ ID NO: 679509 - RNA, 19 nt, Homo sapiens
  misc_RNA (1)...(19): siRNA sense strand
gcagaaaucagacgacaga

SEQ ID NO: 679510 - RNA, 19 nt, Homo sapiens
  misc_RNA (1)...(19): siRNA sense strand
uuacagagccagcaaauga

SEQ ID NO: 679511 - RNA, 19 nt, Homo sapiens
  misc_RNA (1)...(19): siRNA sense strand
gaagaaauccgcagaagcu

SEQ ID NO: 679512 - RNA, 19 nt, Homo sapiens
  misc_RNA (1)...(19): siRNA sense strand
gaaauccgcagaagcuuau

SEQ ID NO: 679513 - RNA, 19 nt, Homo sapiens
  misc_RNA (1)...(19): siRNA sense strand
cgcagaagcuuauuaaagu

SEQ ID NO: 679514 - RNA, 19 nt, Homo sapiens
  misc_RNA (1)...(19): siRNA sense strand
ugaauguggucaccugaaa

SEQ ID NO: 679515 - RNA, 19 nt, Homo sapiens
  misc_RNA (1)...(19): siRNA sense strand
gagaagaaauccgcagaag

SEQ ID NO: 679516 - RNA, 19 nt, Homo sapiens
  misc_RNA (1)...(19): siRNA sense strand
acagaaacauguccuuugu

SEQ ID NO: 679517 - RNA, 19 nt, Homo sapiens
  misc_RNA (1)...(19): siRNA sense strand
guuaaccgguguaggagaa

SEQ ID NO: 679518 - RNA, 19 nt, Homo sapiens
  misc_RNA (1)...(19): siRNA sense strand
gcccagccauguuuacaga

SEQ ID NO: 679519 - RNA, 19 nt, Homo sapiens
  misc_RNA (1)...(19): siRNA sense strand
guggucaccugaaacagaa

SEQ ID NO: 679520 - RNA, 19 nt, Homo sapiens
  misc_RNA (1)...(19): siRNA sense strand
agaaaucagacgacagaua

SEQ ID NO: 679521 - RNA, 19 nt, Homo sapiens
  misc_RNA (1)...(19): siRNA sense strand
ggagaagaaauccgcagaa

SEQ ID NO: 679522 - RNA, 19 nt, Homo sapiens
  misc_RNA (1)...(19): siRNA sense strand
guacagggcccagccaugu

SEQ ID NO: 679523 - RNA, 19 nt, Homo sapiens
  misc_RNA (1)...(19): siRNA sense strand
uagagacuguggugcugua

SEQ ID NO: 679524 - RNA, 19 nt, Homo sapiens
  misc_RNA (1)...(19): siRNA sense strand
cauagacguuuguccugaa

SEQ ID NO: 679525 - RNA, 19 nt, Homo sapiens
  misc_RNA (1)...(19): siRNA sense strand
agaaauccgcagaagcuua

SEQ ID NO: 679526 - RNA, 19 nt, Homo sapiens
  misc_RNA (1)...(19): siRNA sense strand
gacgcaccauugaaguuaa

SEQ ID NO: 679527 - RNA, 19 nt, Homo sapiens
  misc_RNA (1)...(19): siRNA sense strand
gggaccagcauuagcagua

SEQ ID NO: 679528 - RNA, 19 nt, Homo sapiens
  misc_RNA (1)...(19): siRNA sense strand
aaacagaaacauguccuuu

SEQ ID NO: 679529 - RNA, 19 nt, Homo sapiens
  misc_RNA (1)...(19): siRNA sense strand
gaucauugaacgagacaga

SEQ ID NO: 679530 - RNA, 19 nt, Homo sapiens
  misc_RNA (1)...(19): siRNA sense strand
ggagacugcagaaaucaga

SEQ ID NO: 679531 - RNA, 19 nt, Homo sapiens
  misc_RNA (1)...(19): siRNA sense strand
gaaacagaaacauguccuu

SEQ ID NO: 679532 - RNA, 19 nt, Homo sapiens
  misc_RNA (1)...(19): siRNA sense strand
agacgcaccauugaaguua

SEQ ID NO: 679533 - RNA, 19 nt, Homo sapiens
  misc_RNA (1)...(19): siRNA sense strand
agaacaacauagacguuug

SEQ ID NO: 679534 - RNA, 19 nt, Homo sapiens
  misc_RNA (1)...(19): siRNA sense strand
gacaccgucugaacaagau

SEQ ID NO: 679535 - RNA, 19 nt, Homo sapiens
  misc_RNA (1)...(19): siRNA sense strand
uaagaacaacauagacguu

SEQ ID NO: 679536 - RNA, 19 nt, Homo sapiens
  misc_RNA (1)...(19): siRNA sense strand
agacguuuguccugaaugu

SEQ ID NO: 679537 - RNA, 19 nt, Homo sapiens
  misc_RNA (1)...(19): siRNA sense strand
acagagccagcaaaugaua

SEQ ID NO: 679538 - RNA, 19 nt, Homo sapiens
  misc_RNA (1)...(19): siRNA sense strand
gaacaagaucagggcaaga

SEQ ID NO: 679539 - RNA, 19 nt, Homo sapiens
  misc_RNA (1)...(19): siRNA sense strand
ccgcagaagcuuauuaaag

SEQ ID NO: 679540 - RNA, 19 nt, Homo sapiens
  misc_RNA (1)...(19): siRNA sense strand
ggaccagcauuagcaguac

SEQ ID NO: 679541 - RNA, 19 nt, Homo sapiens
  misc_RNA (1)...(19): siRNA sense strand
gggagugcuucgaaacuac

SEQ ID NO: 679542 - RNA, 19 nt, Homo sapiens
  misc_RNA (1)...(19): siRNA sense strand
uuaaggcucccaccauaga

SEQ ID NO: 679543 - RNA, 19 nt, Homo sapiens
  misc_RNA (1)...(19): siRNA sense strand
aaauagacgcaccauugaa

SEQ ID NO: 679544 - RNA, 19 nt, Homo sapiens
  misc_RNA (1)...(19): siRNA sense strand
ucauugaacgagacagaaa

SEQ ID NO: 679545 - RNA, 19 nt, Homo sapiens
  misc_RNA (1)...(19): siRNA sense strand
aagaacaacauagacguuu

SEQ ID NO: 679546 - RNA, 19 nt, Homo sapiens
  misc_RNA (1)...(19): siRNA sense strand
cuacugggagcgacugcua

SEQ ID NO: 679547 - RNA, 19 nt, Homo sapiens
  misc_RNA (1)...(19): siRNA sense strand
ggcaagaggaucauugaac

SEQ ID NO: 679548 - RNA, 19 nt, Homo sapiens
  misc_RNA (1)...(19): siRNA sense strand
gacgacagauagggaagca

SEQ ID NO: 679549 - RNA, 19 nt, Homo sapiens
  misc_RNA (1)...(19): siRNA sense strand
gaccagcauuagcaguaca

SEQ ID NO: 679550 - RNA, 19 nt, Homo sapiens
  misc_RNA (1)...(19): siRNA sense strand
acagggcccagccauguuu

SEQ ID NO: 679551 - RNA, 19 nt, Homo sapiens
  misc_RNA (1)...(19): siRNA sense strand
uaaccgguguaggagaaga

SEQ ID NO: 679552 - RNA, 19 nt, Homo sapiens
  misc_RNA (1)...(19): siRNA sense strand
gggcaagaggaucauugaa

SEQ ID NO: 679553 - RNA, 19 nt, Homo sapiens
  misc_RNA (1)...(19): siRNA sense strand
ggggagugcuucgaaacua

SEQ ID NO: 679554 - RNA, 19 nt, Homo sapiens
  misc_RNA (1)...(19): siRNA sense strand
caagaggaucauugaacga

SEQ ID NO: 679555 - RNA, 19 nt, Homo sapiens
  misc_RNA (1)...(19): siRNA sense strand
aacagaaacauguccuuug

SEQ ID NO: 679556 - RNA, 19 nt, Homo sapiens
  misc_RNA (1)...(19): siRNA sense strand
aauccgcagaagcuuauua

SEQ ID NO: 679557 - RNA, 19 nt, Homo sapiens
  misc_RNA (1)...(19): siRNA sense strand
acagauagggaagcaagaa

SEQ ID NO: 679558 - RNA, 19 nt, Homo sapiens
  misc_RNA (1)...(19): siRNA sense strand
uagacgcaccauugaaguu

SEQ ID NO: 679559 - RNA, 19 nt, Homo sapiens
  misc_RNA (1)...(19): siRNA sense strand
caccugaaacagaaacaug

SEQ ID NO: 679560 - RNA, 19 nt, Homo sapiens
  misc_RNA (1)...(19): siRNA sense strand
cagaagagcuugaguauaa

SEQ ID NO: 679561 - RNA, 19 nt, Homo sapiens
  misc_RNA (1)...(19): siRNA sense strand
gaacgaugcucaugaguuu

SEQ ID NO: 679562 - RNA, 19 nt, Homo sapiens
  misc_RNA (1)...(19): siRNA sense strand
ccacaaagcuggagguaaa

SEQ ID NO: 679563 - RNA, 19 nt, Homo sapiens
  misc_RNA (1)...(19): siRNA sense strand
gaagauaccucacuuuguc

SEQ ID NO: 679564 - RNA, 19 nt, Homo sapiens
  misc_RNA (1)...(19): siRNA sense strand
ccacaaaguugaugagaaa

SEQ ID NO: 679565 - RNA, 19 nt, Homo sapiens
  misc_RNA (1)...(19): siRNA sense strand
caaaugagcuagaaucugu

SEQ ID NO: 679566 - RNA, 19 nt, Homo sapiens
  misc_RNA (1)...(19): siRNA sense strand
gcacaagacuuccguugga

SEQ ID NO: 679567 - RNA, 19 nt, Homo sapiens
  misc_RNA (1)...(19): siRNA sense strand
gcacauccuucaucuauuc

SEQ ID NO: 679568 - RNA, 19 nt, Homo sapiens
  misc_RNA (1)...(19): siRNA sense strand
aaacagaucugguucacuu

SEQ ID NO: 679569 - RNA, 19 nt, Homo sapiens
  misc_RNA (1)...(19): siRNA sense strand
gcuagaaucuguauacuca

SEQ ID NO: 679570 - RNA, 19 nt, Homo sapiens
  misc_RNA (1)...(19): siRNA sense strand
gcacuggguuccaauaaga

SEQ ID NO: 679571 - RNA, 19 nt, Homo sapiens
  misc_RNA (1)...(19): siRNA sense strand
acaaaggaauccaaagaua

SEQ ID NO: 679572 - RNA, 19 nt, Homo sapiens
  misc_RNA (1)...(19): siRNA sense strand
gagaaugcccagcuuaaua

SEQ ID NO: 679573 - RNA, 19 nt, Homo sapiens
  misc_RNA (1)...(19): siRNA sense strand
gaaaucaaguagcaaaucu

SEQ ID NO: 679574 - RNA, 19 nt, Homo sapiens
  misc_RNA (1)...(19): siRNA sense strand
ccaguaaguuuguagcuuu

SEQ ID NO: 679575 - RNA, 19 nt, Homo sapiens
  misc_RNA (1)...(19): siRNA sense strand
gaagagaaugcccagcuua

SEQ ID NO: 679576 - RNA, 19 nt, Homo sapiens
  misc_RNA (1)...(19): siRNA sense strand
uaacaggaauucccuacuu

SEQ ID NO: 679577 - RNA, 19 nt, Homo sapiens
  misc_RNA (1)...(19): siRNA sense strand
gaugagaaaucaaguagca

SEQ ID NO: 679578 - RNA, 19 nt, Homo sapiens
  misc_RNA (1)...(19): siRNA sense strand
gauaaggagucugaacaaa

SEQ ID NO: 679579 - RNA, 19 nt, Homo sapiens
  misc_RNA (1)...(19): siRNA sense strand
gagugaggauggagaaauu

SEQ ID NO: 679580 - RNA, 19 nt, Homo sapiens
  misc_RNA (1)...(19): siRNA sense strand
caacaaaggaauccaaaga

SEQ ID NO: 679581 - RNA, 19 nt, Homo sapiens
  misc_RNA (1)...(19): siRNA sense strand
ccuaagaccuacaaaauua

SEQ ID NO: 679582 - RNA, 19 nt, Homo sapiens
  misc_RNA (1)...(19): siRNA sense strand
ucaccugcauuuaacuuua

SEQ ID NO: 679583 - RNA, 19 nt, Homo sapiens
  misc_RNA (1)...(19): siRNA sense strand
gcugaacaauugaagauau

SEQ ID NO: 679584 - RNA, 19 nt, Homo sapiens
  misc_RNA (1)...(19): siRNA sense strand
ccacagaugcugaacaauu

SEQ ID NO: 679585 - RNA, 19 nt, Homo sapiens
  misc_RNA (1)...(19): siRNA sense strand
uaucagaauuccagaaaga

SEQ ID NO: 679586 - RNA, 19 nt, Homo sapiens
  misc_RNA (1)...(19): siRNA sense strand
gaaagaugacuucuggaaa

SEQ ID NO: 679587 - RNA, 19 nt, Homo sapiens
  misc_RNA (1)...(19): siRNA sense strand
gaaauuggaaugugaaucu

SEQ ID NO: 679588 - RNA, 19 nt, Homo sapiens
  misc_RNA (1)...(19): siRNA sense strand
ccaauaagaauccaagaaa

SEQ ID NO: 679589 - RNA, 19 nt, Homo sapiens
  misc_RNA (1)...(19): siRNA sense strand
ggaaauccuuaccuagaug

SEQ ID NO: 679590 - RNA, 19 nt, Homo sapiens
  misc_RNA (1)...(19): siRNA sense strand
aaagaaugcucucaucuag

SEQ ID NO: 679591 - RNA, 19 nt, Homo sapiens
  misc_RNA (1)...(19): siRNA sense strand
gagcagaagagcuugagua

SEQ ID NO: 679592 - RNA, 19 nt, Homo sapiens
  misc_RNA (1)...(19): siRNA sense strand
uuaaaggugucuucucauu

SEQ ID NO: 679593 - RNA, 19 nt, Homo sapiens
  misc_RNA (1)...(19): siRNA sense strand
gaagacagcagcaaaagua

SEQ ID NO: 679594 - RNA, 19 nt, Homo sapiens
  misc_RNA (1)...(19): siRNA sense strand
gcaagacugggauaucuaa

SEQ ID NO: 679595 - RNA, 19 nt, Homo sapiens
  misc_RNA (1)...(19): siRNA sense strand
cacagaugcugaacaauug

SEQ ID NO: 679596 - RNA, 19 nt, Homo sapiens
  misc_RNA (1)...(19): siRNA sense strand
ggagaucgagcauucauug

SEQ ID NO: 679597 - RNA, 19 nt, Homo sapiens
  misc_RNA (1)...(19): siRNA sense strand
ucaaggagauguuacucuu

SEQ ID NO: 679598 - RNA, 19 nt, Homo sapiens
  misc_RNA (1)...(19): siRNA sense strand
gagagaaacaauugaaguu

SEQ ID NO: 679599 - RNA, 19 nt, Homo sapiens
  misc_RNA (1)...(19): siRNA sense strand
aaagaagaaugaccaggaa

SEQ ID NO: 679600 - RNA, 19 nt, Homo sapiens
  misc_RNA (1)...(19): siRNA sense strand
caaaggaauccaaagauau

SEQ ID NO: 679601 - RNA, 19 nt, Homo sapiens
  misc_RNA (1)...(19): siRNA sense strand
uaucauggccugcaacaaa

SEQ ID NO: 679602 - RNA, 19 nt, Homo sapiens
  misc_RNA (1)...(19): siRNA sense strand
cacaaagugggauaaauua

SEQ ID NO: 679603 - RNA, 19 nt, Homo sapiens
  misc_RNA (1)...(19): siRNA sense strand
cagaggaugccuuugcuua

SEQ ID NO: 679604 - RNA, 19 nt, Homo sapiens
  misc_RNA (1)...(19): siRNA sense strand
gaagagauguugaaaagag

SEQ ID NO: 679605 - RNA, 19 nt, Homo sapiens
  misc_RNA (1)...(19): siRNA sense strand
uauccuggcuccacacauu

SEQ ID NO: 679606 - RNA, 19 nt, Homo sapiens
  misc_RNA (1)...(19): siRNA sense strand
auaauuaccucuccaucaa

SEQ ID NO: 679607 - RNA, 19 nt, Homo sapiens
  misc_RNA (1)...(19): siRNA sense strand
gcacuccauugcuuguaaa

SEQ ID NO: 679608 - RNA, 19 nt, Homo sapiens
  misc_RNA (1)...(19): siRNA sense strand
acacaaagugggauaaauu

SEQ ID NO: 679609 - RNA, 19 nt, Homo sapiens
  misc_RNA (1)...(19): siRNA sense strand
gauaugcggguguuaggua

SEQ ID NO: 679610 - RNA, 19 nt, Homo sapiens
  misc_RNA (1)...(19): siRNA sense strand
gaacugcaagacugggaua

SEQ ID NO: 679611 - RNA, 19 nt, Homo sapiens
  misc_RNA (1)...(19): siRNA sense strand
ggacagaguucaucaaaac

SEQ ID NO: 679612 - RNA, 19 nt, Homo sapiens
  misc_RNA (1)...(19): siRNA sense strand
aaagaugacuucuggaaac

SEQ ID NO: 679613 - RNA, 19 nt, Homo sapiens
  misc_RNA (1)...(19): siRNA sense strand
aagauagacuggugcugua

SEQ ID NO: 679614 - RNA, 19 nt, Homo sapiens
  misc_RNA (1)...(19): siRNA sense strand
gcagaagagcuugaguaua

SEQ ID NO: 679615 - RNA, 19 nt, Homo sapiens
  misc_RNA (1)...(19): siRNA sense strand
gaaagaagaaagauagacu

SEQ ID NO: 679616 - RNA, 19 nt, Homo sapiens
  misc_RNA (1)...(19): siRNA sense strand
ggaagauaccucacuuugu

SEQ ID NO: 679617 - RNA, 19 nt, Homo sapiens
  misc_RNA (1)...(19): siRNA sense strand
cgaaagaugacuucuggaa

SEQ ID NO: 679618 - RNA, 19 nt, Homo sapiens
  misc_RNA (1)...(19): siRNA sense strand
gcuauagcuugaaugaguu

SEQ ID NO: 679619 - RNA, 19 nt, Homo sapiens
  misc_RNA (1)...(19): siRNA sense strand
gagcuugaguauaaaugug

SEQ ID NO: 679620 - RNA, 19 nt, Homo sapiens
  misc_RNA (1)...(19): siRNA sense strand
aaggagauguuacucuuga

SEQ ID NO: 679621 - RNA, 19 nt, Homo sapiens
  misc_RNA (1)...(19): siRNA sense strand
gaggaugccuuugcuuaca

SEQ ID NO: 679622 - RNA, 19 nt, Homo sapiens
  misc_RNA (1)...(19): siRNA sense strand
uaaaccaaaugagcuagaa

SEQ ID NO: 679623 - RNA, 19 nt, Homo sapiens
  misc_RNA (1)...(19): siRNA sense strand
gauauuccauggcaaugca

SEQ ID NO: 679624 - RNA, 19 nt, Homo sapiens
  misc_RNA (1)...(19): siRNA sense strand
uuaaugcucuuaccaugug

SEQ ID NO: 679625 - RNA, 19 nt, Homo sapiens
  misc_RNA (1)...(19): siRNA sense strand
uaaagucaggccauuauau

SEQ ID NO: 679626 - RNA, 19 nt, Homo sapiens
  misc_RNA (1)...(19): siRNA sense strand
ccacacauuggaucagaua

SEQ ID NO: 679627 - RNA, 19 nt, Homo sapiens
  misc_RNA (1)...(19): siRNA sense strand
gaccaggaagucaucauuu

SEQ ID NO: 679628 - RNA, 19 nt, Homo sapiens
  misc_RNA (1)...(19): siRNA sense strand
cgagguguguaagcuauaa

SEQ ID NO: 679629 - RNA, 19 nt, Homo sapiens
  misc_RNA (1)...(19): siRNA sense strand
ccaagaaacaaagacauuu

SEQ ID NO: 679630 - RNA, 19 nt, Homo sapiens
  misc_RNA (1)...(19): siRNA sense strand
guuacagucucuacuuuca

SEQ ID NO: 679631 - RNA, 19 nt, Homo sapiens
  misc_RNA (1)...(19): siRNA sense strand
gaaauccuuaccuagauga

SEQ ID NO: 679632 - RNA, 19 nt, Homo sapiens
  misc_RNA (1)...(19): siRNA sense strand
caauaagaauccaagaaac

SEQ ID NO: 679633 - RNA, 19 nt, Homo sapiens
  misc_RNA (1)...(19): siRNA sense strand
gcacacaaagaaccuccua

SEQ ID NO: 679634 - RNA, 19 nt, Homo sapiens
  misc_RNA (1)...(19): siRNA sense strand
gcacaccucucucaaaagu

SEQ ID NO: 679635 - RNA, 19 nt, Homo sapiens
  misc_RNA (1)...(19): siRNA sense strand
accguuagcucacuuaaug

SEQ ID NO: 679636 - RNA, 19 nt, Homo sapiens
  misc_RNA (1)...(19): siRNA sense strand
caaacgcuauagcuugaau

SEQ ID NO: 679637 - RNA, 19 nt, Homo sapiens
  misc_RNA (1)...(19): siRNA sense strand
ccuagaauccuuauuguuc

SEQ ID NO: 679638 - RNA, 19 nt, Homo sapiens
  misc_RNA (1)...(19): siRNA sense strand
gcacagaacgaugcucaug

SEQ ID NO: 679639 - RNA, 19 nt, Homo sapiens
  misc_RNA (1)...(19): siRNA sense strand
ggaaaagaaugcucucauc

SEQ ID NO: 679640 - RNA, 19 nt, Homo sapiens
  misc_RNA (1)...(19): siRNA sense strand
cuagaauccuuauuguuca

SEQ ID NO: 679641 - RNA, 19 nt, Homo sapiens
  misc_RNA (1)...(19): siRNA sense strand
cuaccuagaauccuuauug

SEQ ID NO: 679642 - RNA, 19 nt, Homo sapiens
  misc_RNA (1)...(19): siRNA sense strand
auagacuggugcuguauuu

SEQ ID NO: 679643 - RNA, 19 nt, Homo sapiens
  misc_RNA (1)...(19): siRNA sense strand
gaagagcuugaguauaaau

SEQ ID NO: 679644 - RNA, 19 nt, Homo sapiens
  misc_RNA (1)...(19): siRNA sense strand
acugaaagauaacauggaa

SEQ ID NO: 679645 - RNA, 19 nt, Homo sapiens
  misc_RNA (1)...(19): siRNA sense strand
cuguuuagaucaacugaaa

SEQ ID NO: 679646 - RNA, 19 nt, Homo sapiens
  misc_RNA (1)...(19): siRNA sense strand
gaacgccacuggaaauccu

SEQ ID NO: 679647 - RNA, 19 nt, Homo sapiens
  misc_RNA (1)...(19): siRNA sense strand
ggaaagaaagaagaaagau

SEQ ID NO: 679648 - RNA, 19 nt, Homo sapiens
  misc_RNA (1)...(19): siRNA sense strand
ccuaugacuuugagaaaca

SEQ ID NO: 679649 - RNA, 19 nt, Homo sapiens
  misc_RNA (1)...(19): siRNA sense strand
gcaaaaguaccuuggaaaa

SEQ ID NO: 679650 - RNA, 19 nt, Homo sapiens
  misc_RNA (1)...(19): siRNA sense strand
agaaaucaaggagauguua

SEQ ID NO: 679651 - RNA, 19 nt, Homo sapiens
  misc_RNA (1)...(19): siRNA sense strand
guguuacagucucuacuuu

SEQ ID NO: 679652 - RNA, 19 nt, Homo sapiens
  misc_RNA (1)...(19): siRNA sense strand
ugagaaaucaaguagcaaa

SEQ ID NO: 679653 - RNA, 19 nt, Homo sapiens
  misc_RNA (1)...(19): siRNA sense strand
aagcacauccuucaucuau

SEQ ID NO: 679654 - RNA, 19 nt, Homo sapiens
  misc_RNA (1)...(19): siRNA sense strand
gcuauaaucgagagaaaca

SEQ ID NO: 679655 - RNA, 19 nt, Homo sapiens
  misc_RNA (1)...(19): siRNA sense strand
cgcuauagcuugaaugagu

SEQ ID NO: 679656 - RNA, 19 nt, Homo sapiens
  misc_RNA (1)...(19): siRNA sense strand
gaagagaauaagaaauugg

SEQ ID NO: 679657 - RNA, 19 nt, Homo sapiens
  misc_RNA (1)...(19): siRNA sense strand
uugaagcaguggaaagaaa

SEQ ID NO: 679658 - RNA, 19 nt, Homo sapiens
  misc_RNA (1)...(19): siRNA sense strand
acagaagucuaacaggaau

SEQ ID NO: 679659 - RNA, 19 nt, Homo sapiens
  misc_RNA (1)...(19): siRNA sense strand
uagaggagacccuucagaa

SEQ ID NO: 679660 - RNA, 19 nt, Homo sapiens
  misc_RNA (1)...(19): siRNA sense strand
acccagagcuguacaaguu

SEQ ID NO: 679661 - RNA, 19 nt, Homo sapiens
  misc_RNA (1)...(19): siRNA sense strand
gacgagcacuucaucuuuc

SEQ ID NO: 679662 - RNA, 19 nt, Homo sapiens
  misc_RNA (1)...(19): siRNA sense strand
gugccacccucaccuauga

SEQ ID NO: 679663 - RNA, 19 nt, Homo sapiens
  misc_RNA (1)...(19): siRNA sense strand
gaugaaccacaacaaguuu

SEQ ID NO: 679664 - RNA, 19 nt, Homo sapiens
  misc_RNA (1)...(19): siRNA sense strand
gucaaagugucucugauga

SEQ ID NO: 679665 - RNA, 19 nt, Homo sapiens
  misc_RNA (1)...(19): siRNA sense strand
caucaacccuguguacaau

SEQ ID NO: 679666 - RNA, 19 nt, Homo sapiens
  misc_RNA (1)...(19): siRNA sense strand
aaugagaccuucagcuuca

SEQ ID NO: 679667 - RNA, 19 nt, Homo sapiens
  misc_RNA (1)...(19): siRNA sense strand
gguucucgguggaauauga

SEQ ID NO: 679668 - RNA, 19 nt, Homo sapiens
  misc_RNA (1)...(19): siRNA sense strand
caaagugucucugaugaac

SEQ ID NO: 679669 - RNA, 19 nt, Homo sapiens
  misc_RNA (1)...(19): siRNA sense strand
ugacgagcacuucaucuuu

SEQ ID NO: 679670 - RNA, 19 nt, Homo sapiens
  misc_RNA (1)...(19): siRNA sense strand
ucaacccuguguacaauga

SEQ ID NO: 679671 - RNA, 19 nt, Homo sapiens
  misc_RNA (1)...(19): siRNA sense strand
acagaggcauugucagugu

SEQ ID NO: 679672 - RNA, 19 nt, Homo sapiens
  misc_RNA (1)...(19): siRNA sense strand
gaagaaugagacccuagug

SEQ ID NO: 679673 - RNA, 19 nt, Homo sapiens
  misc_RNA (1)...(19): siRNA sense strand
acaaugagaccuucagcuu

SEQ ID NO: 679674 - RNA, 19 nt, Homo sapiens
  misc_RNA (1)...(19): siRNA sense strand
gcagcuggcccuggugauu

SEQ ID NO: 679675 - RNA, 19 nt, Homo sapiens
  misc_RNA (1)...(19): siRNA sense strand
cccagagggugcugaaguu

SEQ ID NO: 679676 - RNA, 19 nt, Homo sapiens
  misc_RNA (1)...(19): siRNA sense strand
ugaugaaccacaacaaguu

SEQ ID NO: 679677 - RNA, 19 nt, Homo sapiens
  misc_RNA (1)...(19): siRNA sense strand
ugacuguggugcagaacau

SEQ ID NO: 679678 - RNA, 19 nt, Homo sapiens
  misc_RNA (1)...(19): siRNA sense strand
ccuuggagaugcauguaug

SEQ ID NO: 679679 - RNA, 19 nt, Homo sapiens
  misc_RNA (1)...(19): siRNA sense strand
ucaaagugucucugaugaa

SEQ ID NO: 679680 - RNA, 19 nt, Homo sapiens
  misc_RNA (1)...(19): siRNA sense strand
ccuccaacccgcaguuuga

SEQ ID NO: 679681 - RNA, 19 nt, Homo sapiens
  misc_RNA (1)...(19): siRNA sense strand
gccaccagcugugccauuc

SEQ ID NO: 679682 - RNA, 19 nt, Homo sapiens
  misc_RNA (1)...(19): siRNA sense strand
ccaucaacccuguguacaa

SEQ ID NO: 679683 - RNA, 19 nt, Homo sapiens
  misc_RNA (1)...(19): siRNA sense strand
caaguucccggaggacaaa

SEQ ID NO: 679684 - RNA, 19 nt, Homo sapiens
  misc_RNA (1)...(19): siRNA sense strand
uuucagguguccagcaaga

SEQ ID NO: 679685 - RNA, 19 nt, Homo sapiens
  misc_RNA (1)...(19): siRNA sense strand
ugucaaagugucucugaug

SEQ ID NO: 679686 - RNA, 19 nt, Homo sapiens
  misc_RNA (1)...(19): siRNA sense strand
gcaguuugacgagcacuuc

SEQ ID NO: 679687 - RNA, 19 nt, Homo sapiens
  misc_RNA (1)...(19): siRNA sense strand
caugcuaggacccaacuga

SEQ ID NO: 679688 - RNA, 19 nt, Homo sapiens
  misc_RNA (1)...(19): siRNA sense strand
ggggcaagcugcugucugu

SEQ ID NO: 679689 - RNA, 19 nt, Homo sapiens
  misc_RNA (1)...(19): siRNA sense strand
ccaggaggacagaggcauu

SEQ ID NO: 679690 - RNA, 19 nt, Homo sapiens
  misc_RNA (1)...(19): siRNA sense strand
gaugccaccgagcuggaua

SEQ ID NO: 679691 - RNA, 19 nt, Homo sapiens
  misc_RNA (1)...(19): siRNA sense strand
cagcuggcccuggugauug

SEQ ID NO: 679692 - RNA, 19 nt, Homo sapiens
  misc_RNA (1)...(19): siRNA sense strand
ccaucaacccagagcugua

SEQ ID NO: 679693 - RNA, 19 nt, Homo sapiens
  misc_RNA (1)...(19): siRNA sense strand
ucuaccugcugcccgauga

SEQ ID NO: 679694 - RNA, 19 nt, Homo sapiens
  misc_RNA (1)...(19): siRNA sense strand
gccugacuguggugcagaa

SEQ ID NO: 679695 - RNA, 19 nt, Homo sapiens
  misc_RNA (1)...(19): siRNA sense strand
acccagagcuguacaaguu

SEQ ID NO: 679696 - RNA, 19 nt, Homo sapiens
  misc_RNA (1)...(19): siRNA sense strand
gacgagcacuucaucuuuc

SEQ ID NO: 679697 - RNA, 19 nt, Homo sapiens
  misc_RNA (1)...(19): siRNA sense strand
gugccacccucaccuauga

SEQ ID NO: 679698 - RNA, 19 nt, Homo sapiens
  misc_RNA (1)...(19): siRNA sense strand
gaugaaccacaacaaguuu

SEQ ID NO: 679699 - RNA, 19 nt, Homo sapiens
  misc_RNA (1)...(19): siRNA sense strand
gucaaagugucucugauga

SEQ ID NO: 679700 - RNA, 19 nt, Homo sapiens
  misc_RNA (1)...(19): siRNA sense strand
caucaacccuguguacaau

SEQ ID NO: 679701 - RNA, 19 nt, Homo sapiens
  misc_RNA (1)...(19): siRNA sense strand
aaugagaccuucagcuuca

SEQ ID NO: 679702 - RNA, 19 nt, Homo sapiens
  misc_RNA (1)...(19): siRNA sense strand
gguucucgguggaauauga

SEQ ID NO: 679703 - RNA, 19 nt, Homo sapiens
  misc_RNA (1)...(19): siRNA sense strand
caaagugucucugaugaac

SEQ ID NO: 679704 - RNA, 19 nt, Homo sapiens
  misc_RNA (1)...(19): siRNA sense strand
ugacgagcacuucaucuuu

SEQ ID NO: 679705 - RNA, 19 nt, Homo sapiens
  misc_RNA (1)...(19): siRNA sense strand
ucaacccuguguacaauga

SEQ ID NO: 679706 - RNA, 19 nt, Homo sapiens
  misc_RNA (1)...(19): siRNA sense strand
acagaggcauugucagugu

SEQ ID NO: 679707 - RNA, 19 nt, Homo sapiens
  misc_RNA (1)...(19): siRNA sense strand
gaagaaugagacccuagug

SEQ ID NO: 679708 - RNA, 19 nt, Homo sapiens
  misc_RNA (1)...(19): siRNA sense strand
acaaugagaccuucagcuu

SEQ ID NO: 679709 - RNA, 19 nt, Homo sapiens
  misc_RNA (1)...(19): siRNA sense strand
gcagcuggcccuggugauu

SEQ ID NO: 679710 - RNA, 19 nt, Homo sapiens
  misc_RNA (1)...(19): siRNA sense strand
cccagagggugcugaaguu

SEQ ID NO: 679711 - RNA, 19 nt, Homo sapiens
  misc_RNA (1)...(19): siRNA sense strand
ugaugaaccacaacaaguu

SEQ ID NO: 679712 - RNA, 19 nt, Homo sapiens
  misc_RNA (1)...(19): siRNA sense strand
ugacuguggugcagaacau

SEQ ID NO: 679713 - RNA, 19 nt, Homo sapiens
  misc_RNA (1)...(19): siRNA sense strand
ccuuggagaugcauguaug

SEQ ID NO: 679714 - RNA, 19 nt, Homo sapiens
  misc_RNA (1)...(19): siRNA sense strand
ucaaagugucucugaugaa

SEQ ID NO: 679715 - RNA, 19 nt, Homo sapiens
  misc_RNA (1)...(19): siRNA sense strand
ccuccaacccgcaguuuga

SEQ ID NO: 679716 - RNA, 19 nt, Homo sapiens
  misc_RNA (1)...(19): siRNA sense strand
gccaccagcugugccauuc

SEQ ID NO: 679717 - RNA, 19 nt, Homo sapiens
  misc_RNA (1)...(19): siRNA sense strand
ccaucaacccuguguacaa

SEQ ID NO: 679718 - RNA, 19 nt, Homo sapiens
  misc_RNA (1)...(19): siRNA sense strand
caaguucccggaggacaaa

SEQ ID NO: 679719 - RNA, 19 nt, Homo sapiens
  misc_RNA (1)...(19): siRNA sense strand
uuucagguguccagcaaga

SEQ ID NO: 679720 - RNA, 19 nt, Homo sapiens
  misc_RNA (1)...(19): siRNA sense strand
ugucaaagugucucugaug

SEQ ID NO: 679721 - RNA, 19 nt, Homo sapiens
  misc_RNA (1)...(19): siRNA sense strand
gcaguuugacgagcacuuc

SEQ ID NO: 679722 - RNA, 19 nt, Homo sapiens
  misc_RNA (1)...(19): siRNA sense strand
caugcuaggacccaacuga

SEQ ID NO: 679723 - RNA, 19 nt, Homo sapiens
  misc_RNA (1)...(19): siRNA sense strand
ggggcaagcugcugucugu

SEQ ID NO: 679724 - RNA, 19 nt, Homo sapiens
  misc_RNA (1)...(19): siRNA sense strand
ccaggaggacagaggcauu

SEQ ID NO: 679725 - RNA, 19 nt, Homo sapiens
  misc_RNA (1)...(19): siRNA sense strand
gaugccaccgagcuggaua

SEQ ID NO: 679726 - RNA, 19 nt, Homo sapiens
  misc_RNA (1)...(19): siRNA sense strand
cagcuggcccuggugauug

SEQ ID NO: 679727 - RNA, 19 nt, Homo sapiens
  misc_RNA (1)...(19): siRNA sense strand
ccaucaacccagagcugua

SEQ ID NO: 679728 - RNA, 19 nt, Homo sapiens
  misc_RNA (1)...(19): siRNA sense strand
ucuaccugcugcccgauga

SEQ ID NO: 679729 - RNA, 19 nt, Homo sapiens
  misc_RNA (1)...(19): siRNA sense strand
gccugacuguggugcagaa

SEQ ID NO: 679730 - RNA, 19 nt, Homo sapiens
  misc_RNA (1)...(19): siRNA sense strand
gaaaggaucuccaaacucu

SEQ ID NO: 679731 - RNA, 19 nt, Homo sapiens
  misc_RNA (1)...(19): siRNA sense strand
cagagagacuuccuucaua

SEQ ID NO: 679732 - RNA, 19 nt, Homo sapiens
  misc_RNA (1)...(19): siRNA sense strand
gugaacaauuuccugauaa

SEQ ID NO: 679733 - RNA, 19 nt, Homo sapiens
  misc_RNA (1)...(19): siRNA sense strand
gcugaggccuuccuuccua

SEQ ID NO: 679734 - RNA, 19 nt, Homo sapiens
  misc_RNA (1)...(19): siRNA sense strand
gcuguacggucaaguguga

SEQ ID NO: 679735 - RNA, 19 nt, Homo sapiens
  misc_RNA (1)...(19): siRNA sense strand
ccagagcccugaugaaucu

SEQ ID NO: 679736 - RNA, 19 nt, Homo sapiens
  misc_RNA (1)...(19): siRNA sense strand
gaggaaaacugaggucaua

SEQ ID NO: 679737 - RNA, 19 nt, Homo sapiens
  misc_RNA (1)...(19): siRNA sense strand
uaucugaccuacacgacua

SEQ ID NO: 679738 - RNA, 19 nt, Homo sapiens
  misc_RNA (1)...(19): siRNA sense strand
gcagugagagccaccauga

SEQ ID NO: 679739 - RNA, 19 nt, Homo sapiens
  misc_RNA (1)...(19): siRNA sense strand
gggaaaggaucuccaaacu

SEQ ID NO: 679740 - RNA, 19 nt, Homo sapiens
  misc_RNA (1)...(19): siRNA sense strand
uagcaugggugacuucgaa

SEQ ID NO: 679741 - RNA, 19 nt, Homo sapiens
  misc_RNA (1)...(19): siRNA sense strand
ggagucauguacaucauca

SEQ ID NO: 679742 - RNA, 19 nt, Homo sapiens
  misc_RNA (1)...(19): siRNA sense strand
cagcgacaauguggaauuu

SEQ ID NO: 679743 - RNA, 19 nt, Homo sapiens
  misc_RNA (1)...(19): siRNA sense strand
gagacuuccuucauacaug

SEQ ID NO: 679744 - RNA, 19 nt, Homo sapiens
  misc_RNA (1)...(19): siRNA sense strand
ggagaugggagacuaccua

SEQ ID NO: 679745 - RNA, 19 nt, Homo sapiens
  misc_RNA (1)...(19): siRNA sense strand
ccuggucagugaacaauuu

SEQ ID NO: 679746 - RNA, 19 nt, Homo sapiens
  misc_RNA (1)...(19): siRNA sense strand
agugaacaauuuccugaua

SEQ ID NO: 679747 - RNA, 19 nt, Homo sapiens
  misc_RNA (1)...(19): siRNA sense strand
ggagugcaaguuccaguuu

SEQ ID NO: 679748 - RNA, 19 nt, Homo sapiens
  misc_RNA (1)...(19): siRNA sense strand
gaugggagacuaccuaaag

SEQ ID NO: 679749 - RNA, 19 nt, Homo sapiens
  misc_RNA (1)...(19): siRNA sense strand
gggcagcucugggcauaug

SEQ ID NO: 679750 - RNA, 19 nt, Homo sapiens
  misc_RNA (1)...(19): siRNA sense strand
ggucgugagugccuacaga

SEQ ID NO: 679751 - RNA, 19 nt, Homo sapiens
  misc_RNA (1)...(19): siRNA sense strand
gagugcaaguuccaguuug

SEQ ID NO: 679752 - RNA, 19 nt, Homo sapiens
  misc_RNA (1)...(19): siRNA sense strand
guaggcauguggugagcaa

SEQ ID NO: 679753 - RNA, 19 nt, Homo sapiens
  misc_RNA (1)...(19): siRNA sense strand
caaaugucauggcaucucu

SEQ ID NO: 679754 - RNA, 19 nt, Homo sapiens
  misc_RNA (1)...(19): siRNA sense strand
gcgacaauguggaauuugg

SEQ ID NO: 679755 - RNA, 19 nt, Homo sapiens
  misc_RNA (1)...(19): siRNA sense strand
ugugaugggucaaacaaug

SEQ ID NO: 679756 - RNA, 19 nt, Homo sapiens
  misc_RNA (1)...(19): siRNA sense strand
ucauguacaucaucaccaa

SEQ ID NO: 679757 - RNA, 19 nt, Homo sapiens
  misc_RNA (1)...(19): siRNA sense strand
gagaugggagacuaccuaa

SEQ ID NO: 679758 - RNA, 19 nt, Homo sapiens
  misc_RNA (1)...(19): siRNA sense strand
gcagcgacaauguggaauu

SEQ ID NO: 679759 - RNA, 19 nt, Homo sapiens
  misc_RNA (1)...(19): siRNA sense strand
gaacaauuuccugauaaca

SEQ ID NO: 679760 - RNA, 19 nt, Homo sapiens
  misc_RNA (1)...(19): siRNA sense strand
ggcauguggugagcaagua

SEQ ID NO: 679761 - RNA, 19 nt, Homo sapiens
  misc_RNA (1)...(19): siRNA sense strand
ccagagagacuuccuucau

SEQ ID NO: 679762 - RNA, 19 nt, Homo sapiens
  misc_RNA (1)...(19): siRNA sense strand
cuacagaacagccacaaca

SEQ ID NO: 679763 - RNA, 19 nt, Homo sapiens
  misc_RNA (1)...(19): siRNA sense strand
agagagacuuccuucauac

SEQ ID NO: 679764 - RNA, 19 nt, Homo sapiens
  misc_RNA (1)...(19): siRNA sense strand
ucugggagcugcagcauac

SEQ ID NO: 679765 - RNA, 19 nt, Homo sapiens
  misc_RNA (1)...(19): siRNA sense strand
ggaaaggaucuccaaacuc

SEQ ID NO: 679766 - RNA, 19 nt, Homo sapiens
  misc_RNA (1)...(19): siRNA sense strand
gaacugcccugaaaaugcu

SEQ ID NO: 679767 - RNA, 19 nt, Homo sapiens
  misc_RNA (1)...(19): siRNA sense strand
aaggaucuccaaacucuuu

SEQ ID NO: 679768 - RNA, 19 nt, Homo sapiens
  misc_RNA (1)...(19): siRNA sense strand
agugagagccaccaugaaa

SEQ ID NO: 679769 - RNA, 19 nt, Homo sapiens
  misc_RNA (1)...(19): siRNA sense strand
cgcuggaacugcccugaaa

SEQ ID NO: 679770 - RNA, 19 nt, Homo sapiens
  misc_RNA (1)...(19): siRNA sense strand
cacaacaggcugagaagug

SEQ ID NO: 679771 - RNA, 19 nt, Homo sapiens
  misc_RNA (1)...(19): siRNA sense strand
ugaacaauuuccugauaac

SEQ ID NO: 679772 - RNA, 19 nt, Homo sapiens
  misc_RNA (1)...(19): siRNA sense strand
ugagaagugcuaccagaga

SEQ ID NO: 679773 - RNA, 19 nt, Homo sapiens
  misc_RNA (1)...(19): siRNA sense strand
aaauuccaguggugcugua

SEQ ID NO: 679774 - RNA, 19 nt, Homo sapiens
  misc_RNA (1)...(19): siRNA sense strand
gaggucauaagcagcugua

SEQ ID NO: 679775 - RNA, 19 nt, Homo sapiens
  misc_RNA (1)...(19): siRNA sense strand
gcugugaugggucaaacaa

SEQ ID NO: 679776 - RNA, 19 nt, Homo sapiens
  misc_RNA (1)...(19): siRNA sense strand
gcagguggaagagaggaaa

SEQ ID NO: 679777 - RNA, 19 nt, Homo sapiens
  misc_RNA (1)...(19): siRNA sense strand
cagaacagccacaacacau

SEQ ID NO: 679778 - RNA, 19 nt, Homo sapiens
  misc_RNA (1)...(19): siRNA sense strand
gagagacuuccuucauaca

SEQ ID NO: 679779 - RNA, 19 nt, Homo sapiens
  misc_RNA (1)...(19): siRNA sense strand
gcaaaugucauggcaucuc

SEQ ID NO: 679780 - RNA, 19 nt, Homo sapiens
  misc_RNA (1)...(19): siRNA sense strand
gaugccagagcccugauga

SEQ ID NO: 679781 - RNA, 19 nt, Homo sapiens
  misc_RNA (1)...(19): siRNA sense strand
cugggcagcucugggcaua

SEQ ID NO: 679782 - RNA, 19 nt, Homo sapiens
  misc_RNA (1)...(19): siRNA sense strand
gcuggagucauguacauca

SEQ ID NO: 679783 - RNA, 19 nt, Homo sapiens
  misc_RNA (1)...(19): siRNA sense strand
gccucugccuggucaguga

SEQ ID NO: 679784 - RNA, 19 nt, Homo sapiens
  misc_RNA (1)...(19): siRNA sense strand
caucgaggagugcaaguuc

SEQ ID NO: 679785 - RNA, 19 nt, Homo sapiens
  misc_RNA (1)...(19): siRNA sense strand
cuaccuaaaggccaaguau

SEQ ID NO: 679786 - RNA, 19 nt, Homo sapiens
  misc_RNA (1)...(19): siRNA sense strand
cagcuguaacugcaaauuc

SEQ ID NO: 679787 - RNA, 19 nt, Homo sapiens
  misc_RNA (1)...(19): siRNA sense strand
gucauaagcagcuguaacu

SEQ ID NO: 679788 - RNA, 19 nt, Homo sapiens
  misc_RNA (1)...(19): siRNA sense strand
gcaucgaggagugcaaguu

SEQ ID NO: 679789 - RNA, 19 nt, Homo sapiens
  misc_RNA (1)...(19): siRNA sense strand
gugagugccuacagaacag

SEQ ID NO: 679790 - RNA, 19 nt, Homo sapiens
  misc_RNA (1)...(19): siRNA sense strand
gcugaaaauugaaauggau

SEQ ID NO: 679791 - RNA, 19 nt, Homo sapiens
  misc_RNA (1)...(19): siRNA sense strand
gcucugcuggagucaugua

SEQ ID NO: 679792 - RNA, 19 nt, Homo sapiens
  misc_RNA (1)...(19): siRNA sense strand
uguacaucaucaccaagaa

SEQ ID NO: 679793 - RNA, 19 nt, Homo sapiens
  misc_RNA (1)...(19): siRNA sense strand
accuaaaggccaaguauga

SEQ ID NO: 679794 - RNA, 19 nt, Homo sapiens
  misc_RNA (1)...(19): siRNA sense strand
gcugcagcauacagacaug

SEQ ID NO: 679795 - RNA, 19 nt, Homo sapiens
  misc_RNA (1)...(19): siRNA sense strand
gccagagcccugaugaauc

SEQ ID NO: 679796 - RNA, 19 nt, Homo sapiens
  misc_RNA (1)...(19): siRNA sense strand
caucaucaccaagaacugu

SEQ ID NO: 679797 - RNA, 19 nt, Homo sapiens
  misc_RNA (1)...(19): siRNA sense strand
gagcugcagcauacagaca

SEQ ID NO: 679798 - RNA, 19 nt, Homo sapiens
  misc_RNA (1)...(19): siRNA sense strand
ccaaggccuaucugaccua

SEQ ID NO: 679799 - RNA, 19 nt, Homo sapiens
  misc_RNA (1)...(19): siRNA sense strand
gguuuggggucuauaucua

SEQ ID NO: 679800 - RNA, 19 nt, Homo sapiens
  misc_RNA (1)...(19): siRNA sense strand
gaccaggcgcugaaaauug

SEQ ID NO: 679801 - RNA, 19 nt, Homo sapiens
  misc_RNA (1)...(19): siRNA sense strand
gaaaggaucuccaaacucu

SEQ ID NO: 679802 - RNA, 19 nt, Homo sapiens
  misc_RNA (1)...(19): siRNA sense strand
cagagagacuuccuucaua

SEQ ID NO: 679803 - RNA, 19 nt, Homo sapiens
  misc_RNA (1)...(19): siRNA sense strand
gugaacaauuuccugauaa

SEQ ID NO: 679804 - RNA, 19 nt, Homo sapiens
  misc_RNA (1)...(19): siRNA sense strand
gcugaggccuuccuuccua

SEQ ID NO: 679805 - RNA, 19 nt, Homo sapiens
  misc_RNA (1)...(19): siRNA sense strand
ccagagcccugaugaaucu

SEQ ID NO: 679806 - RNA, 19 nt, Homo sapiens
  misc_RNA (1)...(19): siRNA sense strand
gaggaaaacugaggucaua

SEQ ID NO: 679807 - RNA, 19 nt, Homo sapiens
  misc_RNA (1)...(19): siRNA sense strand
uaucugaccuacacgacua

SEQ ID NO: 679808 - RNA, 19 nt, Homo sapiens
  misc_RNA (1)...(19): siRNA sense strand
gcagugagagccaccauga

SEQ ID NO: 679809 - RNA, 19 nt, Homo sapiens
  misc_RNA (1)...(19): siRNA sense strand
gggaaaggaucuccaaacu

SEQ ID NO: 679810 - RNA, 19 nt, Homo sapiens
  misc_RNA (1)...(19): siRNA sense strand
uagcaugggugacuucgaa

SEQ ID NO: 679811 - RNA, 19 nt, Homo sapiens
  misc_RNA (1)...(19): siRNA sense strand
ggagucauguacaucauca

SEQ ID NO: 679812 - RNA, 19 nt, Homo sapiens
  misc_RNA (1)...(19): siRNA sense strand
cagcgacaauguggaauuu

SEQ ID NO: 679813 - RNA, 19 nt, Homo sapiens
  misc_RNA (1)...(19): siRNA sense strand
gagacuuccuucauacaug

SEQ ID NO: 679814 - RNA, 19 nt, Homo sapiens
  misc_RNA (1)...(19): siRNA sense strand
ggagaugggagacuaccua

SEQ ID NO: 679815 - RNA, 19 nt, Homo sapiens
  misc_RNA (1)...(19): siRNA sense strand
ccuggucagugaacaauuu

SEQ ID NO: 679816 - RNA, 19 nt, Homo sapiens
  misc_RNA (1)...(19): siRNA sense strand
agugaacaauuuccugaua

SEQ ID NO: 679817 - RNA, 19 nt, Homo sapiens
  misc_RNA (1)...(19): siRNA sense strand
ggagugcaaguuccaguuu

SEQ ID NO: 679818 - RNA, 19 nt, Homo sapiens
  misc_RNA (1)...(19): siRNA sense strand
gaugggagacuaccuaaag

SEQ ID NO: 679819 - RNA, 19 nt, Homo sapiens
  misc_RNA (1)...(19): siRNA sense strand
gggcagcucugggcauaug

SEQ ID NO: 679820 - RNA, 19 nt, Homo sapiens
  misc_RNA (1)...(19): siRNA sense strand
ggucgugagugccuacaga

SEQ ID NO: 679821 - RNA, 19 nt, Homo sapiens
  misc_RNA (1)...(19): siRNA sense strand
gagugcaaguuccaguuug

SEQ ID NO: 679822 - RNA, 19 nt, Homo sapiens
  misc_RNA (1)...(19): siRNA sense strand
guaggcauguggugagcaa

SEQ ID NO: 679823 - RNA, 19 nt, Homo sapiens
  misc_RNA (1)...(19): siRNA sense strand
caaaugucauggcaucucu

SEQ ID NO: 679824 - RNA, 19 nt, Homo sapiens
  misc_RNA (1)...(19): siRNA sense strand
gcgacaauguggaauuugg

SEQ ID NO: 679825 - RNA, 19 nt, Homo sapiens
  misc_RNA (1)...(19): siRNA sense strand
ugugaugggucaaacaaug

SEQ ID NO: 679826 - RNA, 19 nt, Homo sapiens
  misc_RNA (1)...(19): siRNA sense strand
ucauguacaucaucaccaa

SEQ ID NO: 679827 - RNA, 19 nt, Homo sapiens
  misc_RNA (1)...(19): siRNA sense strand
gagaugggagacuaccuaa

SEQ ID NO: 679828 - RNA, 19 nt, Homo sapiens
  misc_RNA (1)...(19): siRNA sense strand
gcagcgacaauguggaauu

SEQ ID NO: 679829 - RNA, 19 nt, Homo sapiens
  misc_RNA (1)...(19): siRNA sense strand
gaacaauuuccugauaaca

SEQ ID NO: 679830 - RNA, 19 nt, Homo sapiens
  misc_RNA (1)...(19): siRNA sense strand
ggcauguggugagcaagua

SEQ ID NO: 679831 - RNA, 19 nt, Homo sapiens
  misc_RNA (1)...(19): siRNA sense strand
ccagagagacuuccuucau

SEQ ID NO: 679832 - RNA, 19 nt, Homo sapiens
  misc_RNA (1)...(19): siRNA sense strand
cuacagaacagccacaaca

SEQ ID NO: 679833 - RNA, 19 nt, Homo sapiens
  misc_RNA (1)...(19): siRNA sense strand
agagagacuuccuucauac

SEQ ID NO: 679834 - RNA, 19 nt, Homo sapiens
  misc_RNA (1)...(19): siRNA sense strand
ucugggagcugcagcauac

SEQ ID NO: 679835 - RNA, 19 nt, Homo sapiens
  misc_RNA (1)...(19): siRNA sense strand
ggaaaggaucuccaaacuc

SEQ ID NO: 679836 - RNA, 19 nt, Homo sapiens
  misc_RNA (1)...(19): siRNA sense strand
gaacugcccugaaaaugcu

SEQ ID NO: 679837 - RNA, 19 nt, Homo sapiens
  misc_RNA (1)...(19): siRNA sense strand
aaggaucuccaaacucuuu

SEQ ID NO: 679838 - RNA, 19 nt, Homo sapiens
  misc_RNA (1)...(19): siRNA sense strand
agugagagccaccaugaaa

SEQ ID NO: 679839 - RNA, 19 nt, Homo sapiens
  misc_RNA (1)...(19): siRNA sense strand
cgcuggaacugcccugaaa

SEQ ID NO: 679840 - RNA, 19 nt, Homo sapiens
  misc_RNA (1)...(19): siRNA sense strand
cacaacaggcugagaagug

SEQ ID NO: 679841 - RNA, 19 nt, Homo sapiens
  misc_RNA (1)...(19): siRNA sense strand
ugaacaauuuccugauaac

SEQ ID NO: 679842 - RNA, 19 nt, Homo sapiens
  misc_RNA (1)...(19): siRNA sense strand
ugagaagugcuaccagaga

SEQ ID NO: 679843 - RNA, 19 nt, Homo sapiens
  misc_RNA (1)...(19): siRNA sense strand
aaauuccaguggugcugua

SEQ ID NO: 679844 - RNA, 19 nt, Homo sapiens
  misc_RNA (1)...(19): siRNA sense strand
gaggucauaagcagcugua

SEQ ID NO: 679845 - RNA, 19 nt, Homo sapiens
  misc_RNA (1)...(19): siRNA sense strand
gcugugaugggucaaacaa

SEQ ID NO: 679846 - RNA, 19 nt, Homo sapiens
  misc_RNA (1)...(19): siRNA sense strand
gcagguggaagagaggaaa

SEQ ID NO: 679847 - RNA, 19 nt, Homo sapiens
  misc_RNA (1)...(19): siRNA sense strand
cagaacagccacaacacau

SEQ ID NO: 679848 - RNA, 19 nt, Homo sapiens
  misc_RNA (1)...(19): siRNA sense strand
gagagacuuccuucauaca

SEQ ID NO: 679849 - RNA, 19 nt, Homo sapiens
  misc_RNA (1)...(19): siRNA sense strand
gcaaaugucauggcaucuc

SEQ ID NO: 679850 - RNA, 19 nt, Homo sapiens
  misc_RNA (1)...(19): siRNA sense strand
gaugccagagcccugauga

SEQ ID NO: 679851 - RNA, 19 nt, Homo sapiens
  misc_RNA (1)...(19): siRNA sense strand
cugggcagcucugggcaua

SEQ ID NO: 679852 - RNA, 19 nt, Homo sapiens
  misc_RNA (1)...(19): siRNA sense strand
gcuggagucauguacauca

SEQ ID NO: 679853 - RNA, 19 nt, Homo sapiens
  misc_RNA (1)...(19): siRNA sense strand
gccucugccuggucaguga

SEQ ID NO: 679854 - RNA, 19 nt, Homo sapiens
  misc_RNA (1)...(19): siRNA sense strand
caucgaggagugcaaguuc

SEQ ID NO: 679855 - RNA, 19 nt, Homo sapiens
  misc_RNA (1)...(19): siRNA sense strand
cuaccuaaaggccaaguau

SEQ ID NO: 679856 - RNA, 19 nt, Homo sapiens
  misc_RNA (1)...(19): siRNA sense strand
cagcuguaacugcaaauuc

SEQ ID NO: 679857 - RNA, 19 nt, Homo sapiens
  misc_RNA (1)...(19): siRNA sense strand
gucauaagcagcuguaacu

SEQ ID NO: 679858 - RNA, 19 nt, Homo sapiens
  misc_RNA (1)...(19): siRNA sense strand
gcucugcuggagucaugua

SEQ ID NO: 679859 - RNA, 19 nt, Homo sapiens
  misc_RNA (1)...(19): siRNA sense strand
gugagugccuacagaacag

SEQ ID NO: 679860 - RNA, 19 nt, Homo sapiens
  misc_RNA (1)...(19): siRNA sense strand
gcugaaaauugaaauggau

SEQ ID NO: 679861 - RNA, 19 nt, Homo sapiens
  misc_RNA (1)...(19): siRNA sense strand
gcaucgaggagugcaaguu

SEQ ID NO: 679862 - RNA, 19 nt, Homo sapiens
  misc_RNA (1)...(19): siRNA sense strand
uguacaucaucaccaagaa

SEQ ID NO: 679863 - RNA, 19 nt, Homo sapiens
  misc_RNA (1)...(19): siRNA sense strand
accuaaaggccaaguauga

SEQ ID NO: 679864 - RNA, 19 nt, Homo sapiens
  misc_RNA (1)...(19): siRNA sense strand
gcugcagcauacagacaug

SEQ ID NO: 679865 - RNA, 19 nt, Homo sapiens
  misc_RNA (1)...(19): siRNA sense strand
gccagagcccugaugaauc

SEQ ID NO: 679866 - RNA, 19 nt, Homo sapiens
  misc_RNA (1)...(19): siRNA sense strand
caucaucaccaagaacugu

SEQ ID NO: 679867 - RNA, 19 nt, Homo sapiens
  misc_RNA (1)...(19): siRNA sense strand
gagcugcagcauacagaca

SEQ ID NO: 679868 - RNA, 19 nt, Homo sapiens
  misc_RNA (1)...(19): siRNA sense strand
gaccaggcgcugaaaauug

SEQ ID NO: 679869 - RNA, 19 nt, Homo sapiens
  misc_RNA (1)...(19): siRNA sense strand
ccaaggccuaucugaccua

SEQ ID NO: 679870 - RNA, 19 nt, Homo sapiens
  misc_RNA (1)...(19): siRNA sense strand
gaaauuggcucaaauguga

SEQ ID NO: 679871 - RNA, 19 nt, Homo sapiens
  misc_RNA (1)...(19): siRNA sense strand
ggacaagucuuacauuuaa

SEQ ID NO: 679872 - RNA, 19 nt, Homo sapiens
  misc_RNA (1)...(19): siRNA sense strand
caacaugacuguaauagua

SEQ ID NO: 679873 - RNA, 19 nt, Homo sapiens
  misc_RNA (1)...(19): siRNA sense strand
ggaaagacaugccaagaua

SEQ ID NO: 679874 - RNA, 19 nt, Homo sapiens
  misc_RNA (1)...(19): siRNA sense strand
gaacaagagugcacugaua

SEQ ID NO: 679875 - RNA, 19 nt, Homo sapiens
  misc_RNA (1)...(19): siRNA sense strand
gaaauugccucuacaaguu

SEQ ID NO: 679876 - RNA, 19 nt, Homo sapiens
  misc_RNA (1)...(19): siRNA sense strand
gaagauaccucugaauuug

SEQ ID NO: 679877 - RNA, 19 nt, Homo sapiens
  misc_RNA (1)...(19): siRNA sense strand
ggaaguggcuuucgaagaa

SEQ ID NO: 679878 - RNA, 19 nt, Homo sapiens
  misc_RNA (1)...(19): siRNA sense strand
gaagagauaucaguaauug

SEQ ID NO: 679879 - RNA, 19 nt, Homo sapiens
  misc_RNA (1)...(19): siRNA sense strand
gaacuuaccugcauugcuu

SEQ ID NO: 679880 - RNA, 19 nt, Homo sapiens
  misc_RNA (1)...(19): siRNA sense strand
gaacgucgguggauuaaga

SEQ ID NO: 679881 - RNA, 19 nt, Homo sapiens
  misc_RNA (1)...(19): siRNA sense strand
gagcaagacuuuguaauaa

SEQ ID NO: 679882 - RNA, 19 nt, Homo sapiens
  misc_RNA (1)...(19): siRNA sense strand
gaaguucucuuaagacuau

SEQ ID NO: 679883 - RNA, 19 nt, Homo sapiens
  misc_RNA (1)...(19): siRNA sense strand
caaaggagaucuugaguug

SEQ ID NO: 679884 - RNA, 19 nt, Homo sapiens
  misc_RNA (1)...(19): siRNA sense strand
gaacacaaauacucucauu

SEQ ID NO: 679885 - RNA, 19 nt, Homo sapiens
  misc_RNA (1)...(19): siRNA sense strand
gaaaauggauuccuucaua

SEQ ID NO: 679886 - RNA, 19 nt, Homo sapiens
  misc_RNA (1)...(19): siRNA sense strand
gagcuuaccuccacccaua

SEQ ID NO: 679887 - RNA, 19 nt, Homo sapiens
  misc_RNA (1)...(19): siRNA sense strand
ggagacgugucauuaaaua

SEQ ID NO: 679888 - RNA, 19 nt, Homo sapiens
  misc_RNA (1)...(19): siRNA sense strand
ggagauggcuauagaauuc

SEQ ID NO: 679889 - RNA, 19 nt, Homo sapiens
  misc_RNA (1)...(19): siRNA sense strand
gaaagggaguggauauuga

SEQ ID NO: 679890 - RNA, 19 nt, Homo sapiens
  misc_RNA (1)...(19): siRNA sense strand
gaugguaccuuauuuauca

SEQ ID NO: 679891 - RNA, 19 nt, Homo sapiens
  misc_RNA (1)...(19): siRNA sense strand
gaaagaagauaccucugaa

SEQ ID NO: 679892 - RNA, 19 nt, Homo sapiens
  misc_RNA (1)...(19): siRNA sense strand
gaaugcagcuggugaagaa

SEQ ID NO: 679893 - RNA, 19 nt, Homo sapiens
  misc_RNA (1)...(19): siRNA sense strand
ggaagaugcuggccaauau

SEQ ID NO: 679894 - RNA, 19 nt, Homo sapiens
  misc_RNA (1)...(19): siRNA sense strand
gaacuuagauauugcaaag

SEQ ID NO: 679895 - RNA, 19 nt, Homo sapiens
  misc_RNA (1)...(19): siRNA sense strand
gaaugaggcuggagaaaug

SEQ ID NO: 679896 - RNA, 19 nt, Homo sapiens
  misc_RNA (1)...(19): siRNA sense strand
caacauuccucauuauuga

SEQ ID NO: 679897 - RNA, 19 nt, Homo sapiens
  misc_RNA (1)...(19): siRNA sense strand
ggacacacacuucaaauaa

SEQ ID NO: 679898 - RNA, 19 nt, Homo sapiens
  misc_RNA (1)...(19): siRNA sense strand
gaaauuacauggcacaaag

SEQ ID NO: 679899 - RNA, 19 nt, Homo sapiens
  misc_RNA (1)...(19): siRNA sense strand
gaaccuguauugauauuga

SEQ ID NO: 679900 - RNA, 19 nt, Homo sapiens
  misc_RNA (1)...(19): siRNA sense strand
gcauguaccuccuaauauu

SEQ ID NO: 679901 - RNA, 19 nt, Homo sapiens
  misc_RNA (1)...(19): siRNA sense strand
ugaagaacaugaagagaua

SEQ ID NO: 679902 - RNA, 19 nt, Homo sapiens
  misc_RNA (1)...(19): siRNA sense strand
guaaauacuuggagaauuc

SEQ ID NO: 679903 - RNA, 19 nt, Homo sapiens
  misc_RNA (1)...(19): siRNA sense strand
gcagagaccuaccgcauga

SEQ ID NO: 679904 - RNA, 19 nt, Homo sapiens
  misc_RNA (1)...(19): siRNA sense strand
uaacauggaccuucaauaa

SEQ ID NO: 679905 - RNA, 19 nt, Homo sapiens
  misc_RNA (1)...(19): siRNA sense strand
gcugaaggauggccaguua

SEQ ID NO: 679906 - RNA, 19 nt, Homo sapiens
  misc_RNA (1)...(19): siRNA sense strand
guacaaagauaaucgucua

SEQ ID NO: 679907 - RNA, 19 nt, Homo sapiens
  misc_RNA (1)...(19): siRNA sense strand
caaauucccugcucuguug

SEQ ID NO: 679908 - RNA, 19 nt, Homo sapiens
  misc_RNA (1)...(19): siRNA sense strand
ccacagaucccaagaaauu

SEQ ID NO: 679909 - RNA, 19 nt, Homo sapiens
  misc_RNA (1)...(19): siRNA sense strand
uggagaggcugccaaauua

SEQ ID NO: 679910 - RNA, 19 nt, Homo sapiens
  misc_RNA (1)...(19): siRNA sense strand
caaguuaaauguccaaguu

SEQ ID NO: 679911 - RNA, 19 nt, Homo sapiens
  misc_RNA (1)...(19): siRNA sense strand
gaauagaucuucuugaacu

SEQ ID NO: 679912 - RNA, 19 nt, Homo sapiens
  misc_RNA (1)...(19): siRNA sense strand
gggcugaguugucaagaua

SEQ ID NO: 679913 - RNA, 19 nt, Homo sapiens
  misc_RNA (1)...(19): siRNA sense strand
ggaagaaacucgaaaucau

SEQ ID NO: 679914 - RNA, 19 nt, Homo sapiens
  misc_RNA (1)...(19): siRNA sense strand
gaggacaagucuuacauuu

SEQ ID NO: 679915 - RNA, 19 nt, Homo sapiens
  misc_RNA (1)...(19): siRNA sense strand
caacgcagcuggagaaaca

SEQ ID NO: 679916 - RNA, 19 nt, Homo sapiens
  misc_RNA (1)...(19): siRNA sense strand
cagagaaacuaaugacuuu

SEQ ID NO: 679917 - RNA, 19 nt, Homo sapiens
  misc_RNA (1)...(19): siRNA sense strand
gaaaagcccagaaauauua

SEQ ID NO: 679918 - RNA, 19 nt, Homo sapiens
  misc_RNA (1)...(19): siRNA sense strand
gaccucagaugguaccuua

SEQ ID NO: 679919 - RNA, 19 nt, Homo sapiens
  misc_RNA (1)...(19): siRNA sense strand
ggagugauguccagaguga

SEQ ID NO: 679920 - RNA, 19 nt, Homo sapiens
  misc_RNA (1)...(19): siRNA sense strand
gaacagcccaucaaacuga

SEQ ID NO: 679921 - RNA, 19 nt, Homo sapiens
  misc_RNA (1)...(19): siRNA sense strand
uagccaagcuguggaauua

SEQ ID NO: 679922 - RNA, 19 nt, Homo sapiens
  misc_RNA (1)...(19): siRNA sense strand
ccauaacucugccaaagua

SEQ ID NO: 679923 - RNA, 19 nt, Homo sapiens
  misc_RNA (1)...(19): siRNA sense strand
cagcaugaguguaagaaua

SEQ ID NO: 679924 - RNA, 19 nt, Homo sapiens
  misc_RNA (1)...(19): siRNA sense strand
gaacagcguuggcuuugug

SEQ ID NO: 679925 - RNA, 19 nt, Homo sapiens
  misc_RNA (1)...(19): siRNA sense strand
guaauuaccugcacugcuu

SEQ ID NO: 679926 - RNA, 19 nt, Homo sapiens
  misc_RNA (1)...(19): siRNA sense strand
gaaugaggcuggagaagau

SEQ ID NO: 679927 - RNA, 19 nt, Homo sapiens
  misc_RNA (1)...(19): siRNA sense strand
ggacaaugcuggaagauac

SEQ ID NO: 679928 - RNA, 19 nt, Homo sapiens
  misc_RNA (1)...(19): siRNA sense strand
gagcuucagucuuaaugua

SEQ ID NO: 679929 - RNA, 19 nt, Homo sapiens
  misc_RNA (1)...(19): siRNA sense strand
uaaaucagcugaccaaucu

SEQ ID NO: 679930 - RNA, 19 nt, Homo sapiens
  misc_RNA (1)...(19): siRNA sense strand
guacaggccuccaaaguuc

SEQ ID NO: 679931 - RNA, 19 nt, Homo sapiens
  misc_RNA (1)...(19): siRNA sense strand
ggacaagcccaucacguua

SEQ ID NO: 679932 - RNA, 19 nt, Homo sapiens
  misc_RNA (1)...(19): siRNA sense strand
aaagaaggcaucaauguua

SEQ ID NO: 679933 - RNA, 19 nt, Homo sapiens
  misc_RNA (1)...(19): siRNA sense strand
gaacuucugugucuuugga

SEQ ID NO: 679934 - RNA, 19 nt, Homo sapiens
  misc_RNA (1)...(19): siRNA sense strand
ccucugaccucaagugaua

SEQ ID NO: 679935 - RNA, 19 nt, Homo sapiens
  misc_RNA (1)...(19): siRNA sense strand
gaagugaagaucaaaguaa

SEQ ID NO: 679936 - RNA, 19 nt, Homo sapiens
  misc_RNA (1)...(19): siRNA sense strand
gacucaggcugucaaauua

SEQ ID NO: 679937 - RNA, 19 nt, Homo sapiens
  misc_RNA (1)...(19): siRNA sense strand
caagauaacucuggauguu

SEQ ID NO: 679938 - RNA, 19 nt, Homo sapiens
  misc_RNA (1)...(19): siRNA sense strand
caacgaugcuggagaguau

SEQ ID NO: 679939 - RNA, 19 nt, Homo sapiens
  misc_RNA (1)...(19): siRNA sense strand
gaucagcacuguaagaaca

SEQ ID NO: 679940 - RNA, 19 nt, Homo sapiens
  misc_RNA (1)...(19): siRNA sense strand
caaaggagaucgcaguaau

SEQ ID NO: 679941 - RNA, 19 nt, Homo sapiens
  misc_RNA (1)...(19): siRNA sense strand
ggaaaucacaguucucaaa

SEQ ID NO: 679942 - RNA, 19 nt, Homo sapiens
  misc_RNA (1)...(19): siRNA sense strand
uaacagauaucggcaggua

SEQ ID NO: 679943 - RNA, 19 nt, Homo sapiens
  misc_RNA (1)...(19): siRNA sense strand
gagcacaggucucugauuc

SEQ ID NO: 679944 - RNA, 19 nt, Homo sapiens
  misc_RNA (1)...(19): siRNA sense strand
gaaagcagcacuauucaga

SEQ ID NO: 679945 - RNA, 19 nt, Homo sapiens
  misc_RNA (1)...(19): siRNA sense strand
ugacgaagguuucuaugaa

SEQ ID NO: 679946 - RNA, 19 nt, Homo sapiens
  misc_RNA (1)...(19): siRNA sense strand
gcaaugagaaagauaguuu

SEQ ID NO: 679947 - RNA, 19 nt, Homo sapiens
  misc_RNA (1)...(19): siRNA sense strand
gcaauuggauuuguuuaug

SEQ ID NO: 679948 - RNA, 19 nt, Homo sapiens
  misc_RNA (1)...(19): siRNA sense strand
gaacuacacgucauucuga

SEQ ID NO: 679949 - RNA, 19 nt, Homo sapiens
  misc_RNA (1)...(19): siRNA sense strand
ugaaggaccugaaagagaa

SEQ ID NO: 679950 - RNA, 19 nt, Homo sapiens
  misc_RNA (1)...(19): siRNA sense strand
ggacagcccuugcuagaag

SEQ ID NO: 679951 - RNA, 19 nt, Homo sapiens
  misc_RNA (1)...(19): siRNA sense strand
gaccucaagugauaaagua

SEQ ID NO: 679952 - RNA, 19 nt, Homo sapiens
  misc_RNA (1)...(19): siRNA sense strand
aaaggaggcucaaauauca

SEQ ID NO: 679953 - RNA, 19 nt, Homo sapiens
  misc_RNA (1)...(19): siRNA sense strand
gaacagauaaacagaauuc

SEQ ID NO: 679954 - RNA, 19 nt, Homo sapiens
  misc_RNA (1)...(19): siRNA sense strand
gaacaggagcucucuuuau

SEQ ID NO: 679955 - RNA, 19 nt, Homo sapiens
  misc_RNA (1)...(19): siRNA sense strand
caaauuauggcacucaaua

SEQ ID NO: 679956 - RNA, 19 nt, Homo sapiens
  misc_RNA (1)...(19): siRNA sense strand
gugcagauauaaccagaua

SEQ ID NO: 679957 - RNA, 19 nt, Homo sapiens
  misc_RNA (1)...(19): siRNA sense strand
gcaaaguccuccuauuauc

SEQ ID NO: 679958 - RNA, 19 nt, Homo sapiens
  misc_RNA (1)...(19): siRNA sense strand
gaucagaaguacagaagga

SEQ ID NO: 679959 - RNA, 19 nt, Homo sapiens
  misc_RNA (1)...(19): siRNA sense strand
aaacuacucuggcuuguga

SEQ ID NO: 679960 - RNA, 19 nt, Homo sapiens
  misc_RNA (1)...(19): siRNA sense strand
ggagggagauacuugcaaa

SEQ ID NO: 679961 - RNA, 19 nt, Homo sapiens
  misc_RNA (1)...(19): siRNA sense strand
uaagaaagcugagguaucu

SEQ ID NO: 679962 - RNA, 19 nt, Homo sapiens
  misc_RNA (1)...(19): siRNA sense strand
gaacagaggacagaucauu

SEQ ID NO: 679963 - RNA, 19 nt, Homo sapiens
  misc_RNA (1)...(19): siRNA sense strand
gcucaauacuucuggaauu

SEQ ID NO: 679964 - RNA, 19 nt, Homo sapiens
  misc_RNA (1)...(19): siRNA sense strand
aauggaaccuguauugaua

SEQ ID NO: 679965 - RNA, 19 nt, Homo sapiens
  misc_RNA (1)...(19): siRNA sense strand
ggaaugcuguggaaauaau

SEQ ID NO: 679966 - RNA, 19 nt, Homo sapiens
  misc_RNA (1)...(19): siRNA sense strand
acagugaacuuguuauuga

SEQ ID NO: 679967 - RNA, 19 nt, Homo sapiens
  misc_RNA (1)...(19): siRNA sense strand
gaggaaaugucaccacaga

SEQ ID NO: 679968 - RNA, 19 nt, Homo sapiens
  misc_RNA (1)...(19): siRNA sense strand
ggaaagauccagucagaga

SEQ ID NO: 679969 - RNA, 19 nt, Homo sapiens
  misc_RNA (1)...(19): siRNA sense strand
gagaaaggauggagcuguu

SEQ ID NO: 679970 - RNA, 19 nt, Homo sapiens
  misc_RNA (1)...(19): siRNA sense strand
cuaggugguugcccgguua

SEQ ID NO: 679971 - RNA, 19 nt, Homo sapiens
  misc_RNA (1)...(19): siRNA sense strand
gugguugcccgguuaguua

SEQ ID NO: 679972 - RNA, 19 nt, Homo sapiens
  misc_RNA (1)...(19): siRNA sense strand
guuaguuacuuacuucugu

SEQ ID NO: 679973 - RNA, 19 nt, Homo sapiens
  misc_RNA (1)...(19): siRNA sense strand
gcugcgagcugggaauaug

SEQ ID NO: 679974 - RNA, 19 nt, Homo sapiens
  misc_RNA (1)...(19): siRNA sense strand
gaauuuacuucugcugcau

SEQ ID NO: 679975 - RNA, 19 nt, Homo sapiens
  misc_RNA (1)...(19): siRNA sense strand
ccgguuaguuacuuacuuc

SEQ ID NO: 679976 - RNA, 19 nt, Homo sapiens
  misc_RNA (1)...(19): siRNA sense strand
ucucggagccacucgcaaa

SEQ ID NO: 679977 - RNA, 19 nt, Homo sapiens
  misc_RNA (1)...(19): siRNA sense strand
gugcugcgagcugggaaua

SEQ ID NO: 679978 - RNA, 19 nt, Homo sapiens
  misc_RNA (1)...(19): siRNA sense strand
cauccucugcucuuaccua

SEQ ID NO: 679979 - RNA, 19 nt, Homo sapiens
  misc_RNA (1)...(19): siRNA sense strand
ggugguugcccgguuaguu

SEQ ID NO: 679980 - RNA, 19 nt, Homo sapiens
  misc_RNA (1)...(19): siRNA sense strand
gggauuuggugguuuguug

SEQ ID NO: 679981 - RNA, 19 nt, Homo sapiens
  misc_RNA (1)...(19): siRNA sense strand
ggacacuacuucauaacca

SEQ ID NO: 679982 - RNA, 19 nt, Homo sapiens
  misc_RNA (1)...(19): siRNA sense strand
ggaacuugguuaugguugu

SEQ ID NO: 679983 - RNA, 19 nt, Homo sapiens
  misc_RNA (1)...(19): siRNA sense strand
gcaacuggugcacuguuua

SEQ ID NO: 679984 - RNA, 19 nt, Homo sapiens
  misc_RNA (1)...(19): siRNA sense strand
ccacuuuacucuacuccuu

SEQ ID NO: 679985 - RNA, 19 nt, Homo sapiens
  misc_RNA (1)...(19): siRNA sense strand
cauaaccacuuuacucuac

SEQ ID NO: 679986 - RNA, 19 nt, Homo sapiens
  misc_RNA (1)...(19): siRNA sense strand
cuaggugguugcccgguua

SEQ ID NO: 679987 - RNA, 19 nt, Homo sapiens
  misc_RNA (1)...(19): siRNA sense strand
guuaguuacuuacuucugu

SEQ ID NO: 679988 - RNA, 19 nt, Homo sapiens
  misc_RNA (1)...(19): siRNA sense strand
cuggugcacuguuuacuaa

SEQ ID NO: 679989 - RNA, 19 nt, Homo sapiens
  misc_RNA (1)...(19): siRNA sense strand
gugguugcccgguuaguua

SEQ ID NO: 679990 - RNA, 19 nt, Homo sapiens
  misc_RNA (1)...(19): siRNA sense strand
gcugcgagcugggaauaug

SEQ ID NO: 679991 - RNA, 19 nt, Homo sapiens
  misc_RNA (1)...(19): siRNA sense strand
uaaaguauaccggacacua

SEQ ID NO: 679992 - RNA, 19 nt, Homo sapiens
  misc_RNA (1)...(19): siRNA sense strand
gaacuugguuaugguuguc

SEQ ID NO: 679993 - RNA, 19 nt, Homo sapiens
  misc_RNA (1)...(19): siRNA sense strand
gagggcugaugccaaguga

SEQ ID NO: 679994 - RNA, 19 nt, Homo sapiens
  misc_RNA (1)...(19): siRNA sense strand
ccagugccaugccuuagau

SEQ ID NO: 679995 - RNA, 19 nt, Homo sapiens
  misc_RNA (1)...(19): siRNA sense strand
guggaucgauucuguuugg

SEQ ID NO: 679996 - RNA, 19 nt, Homo sapiens
  misc_RNA (1)...(19): siRNA sense strand
uaccggacacuacuucaua

SEQ ID NO: 679997 - RNA, 19 nt, Homo sapiens
  misc_RNA (1)...(19): siRNA sense strand
gugaagacccaguggauca

SEQ ID NO: 679998 - RNA, 19 nt, Homo sapiens
  misc_RNA (1)...(19): siRNA sense strand
gggcugaugccaagugaug

SEQ ID NO: 679999 - RNA, 19 nt, Homo sapiens
  misc_RNA (1)...(19): siRNA sense strand
gaauuuacuucugcugcau

SEQ ID NO: 680000 - RNA, 19 nt, Homo sapiens
  misc_RNA (1)...(19): siRNA sense strand
gguuaugguugucucaagu

SEQ ID NO: 680001 - RNA, 19 nt, Homo sapiens
  misc_RNA (1)...(19): siRNA sense strand
ccgguuaguuacuuacuuc

SEQ ID NO: 680002 - RNA, 19 nt, Homo sapiens
  misc_RNA (1)...(19): siRNA sense strand
gugguuuguugaccuuauu

SEQ ID NO: 680003 - RNA, 19 nt, Homo sapiens
  misc_RNA (1)...(19): siRNA sense strand
gaucauguuggaaaugcaa

SEQ ID NO: 680004 - RNA, 19 nt, Homo sapiens
  misc_RNA (1)...(19): siRNA sense strand
ccaggaacuugguuauggu

SEQ ID NO: 680005 - RNA, 19 nt, Homo sapiens
  misc_RNA (1)...(19): siRNA sense strand
ggugguuuguugaccuuau

SEQ ID NO: 680006 - RNA, 19 nt, Homo sapiens
  misc_RNA (1)...(19): siRNA sense strand
gcaguagggaagcuguuga

SEQ ID NO: 680007 - RNA, 19 nt, Homo sapiens
  misc_RNA (1)...(19): siRNA sense strand
ggauuuggugguuuguuga

SEQ ID NO: 680008 - RNA, 19 nt, Homo sapiens
  misc_RNA (1)...(19): siRNA sense strand
cccaggaacuugguuaugg

SEQ ID NO: 680009 - RNA, 19 nt, Homo sapiens
  misc_RNA (1)...(19): siRNA sense strand
cccaguggaucauguugga

SEQ ID NO: 680010 - RNA, 19 nt, Homo sapiens
  misc_RNA (1)...(19): siRNA sense strand
gacuugggauuuggugguu

SEQ ID NO: 680011 - RNA, 19 nt, Homo sapiens
  misc_RNA (1)...(19): siRNA sense strand
ucucggagccacucgcaaa

SEQ ID NO: 680012 - RNA, 19 nt, Homo sapiens
  misc_RNA (1)...(19): siRNA sense strand
cgacguggaacacacuuca

SEQ ID NO: 680013 - RNA, 19 nt, Homo sapiens
  misc_RNA (1)...(19): siRNA sense strand
ggagggcugaugccaagug

SEQ ID NO: 680014 - RNA, 19 nt, Homo sapiens
  misc_RNA (1)...(19): siRNA sense strand
ucauaaccacuuuacucua

SEQ ID NO: 680015 - RNA, 19 nt, Homo sapiens
  misc_RNA (1)...(19): siRNA sense strand
ugccuuagauggaauugag

SEQ ID NO: 680016 - RNA, 19 nt, Homo sapiens
  misc_RNA (1)...(19): siRNA sense strand
gaagacccaguggaucaug

SEQ ID NO: 680017 - RNA, 19 nt, Homo sapiens
  misc_RNA (1)...(19): siRNA sense strand
accggacacuacuucauaa

SEQ ID NO: 680018 - RNA, 19 nt, Homo sapiens
  misc_RNA (1)...(19): siRNA sense strand
caucccaggaacuugguua

SEQ ID NO: 680019 - RNA, 19 nt, Homo sapiens
  misc_RNA (1)...(19): siRNA sense strand
caguggaucauguuggaaa

SEQ ID NO: 680020 - RNA, 19 nt, Homo sapiens
  misc_RNA (1)...(19): siRNA sense strand
cuacuucauaaccacuuua

SEQ ID NO: 680021 - RNA, 19 nt, Homo sapiens
  misc_RNA (1)...(19): siRNA sense strand
caacuggugcacuguuuac

SEQ ID NO: 680022 - RNA, 19 nt, Homo sapiens
  misc_RNA (1)...(19): siRNA sense strand
guguggaucgauucuguuu

SEQ ID NO: 680023 - RNA, 19 nt, Homo sapiens
  misc_RNA (1)...(19): siRNA sense strand
gcuuggaggacuugggauu

SEQ ID NO: 680024 - RNA, 19 nt, Homo sapiens
  misc_RNA (1)...(19): siRNA sense strand
agcaacuggugcacuguuu

SEQ ID NO: 680025 - RNA, 19 nt, Homo sapiens
  misc_RNA (1)...(19): siRNA sense strand
uuggaggacuugggauuug

SEQ ID NO: 680026 - RNA, 19 nt, Homo sapiens
  misc_RNA (1)...(19): siRNA sense strand
gcacugcaguagggaagcu

SEQ ID NO: 680027 - RNA, 19 nt, Homo sapiens
  misc_RNA (1)...(19): siRNA sense strand
cauccucugcucuuaccua

SEQ ID NO: 680028 - RNA, 19 nt, Homo sapiens
  misc_RNA (1)...(19): siRNA sense strand
gugcugcgagcugggaaua

SEQ ID NO: 680029 - RNA, 19 nt, Homo sapiens
  misc_RNA (1)...(19): siRNA sense strand
guauaccggacacuacuuc

SEQ ID NO: 680030 - RNA, 19 nt, Homo sapiens
  misc_RNA (1)...(19): siRNA sense strand
gagugugccaguccuagga

SEQ ID NO: 680031 - RNA, 19 nt, Homo sapiens
  misc_RNA (1)...(19): siRNA sense strand
uaaccacuuuacucuacuc

SEQ ID NO: 680032 - RNA, 19 nt, Homo sapiens
  misc_RNA (1)...(19): siRNA sense strand
cuugggauuuggugguuug

SEQ ID NO: 680033 - RNA, 19 nt, Homo sapiens
  misc_RNA (1)...(19): siRNA sense strand
ggugguugcccgguuaguu

SEQ ID NO: 680034 - RNA, 19 nt, Homo sapiens
  misc_RNA (1)...(19): siRNA sense strand
ccacgcagcugccagacua

SEQ ID NO: 680035 - RNA, 19 nt, Homo sapiens
  misc_RNA (1)...(19): siRNA sense strand
ggaacuggcuguggcauug

SEQ ID NO: 680036 - RNA, 19 nt, Homo sapiens
  misc_RNA (1)...(19): siRNA sense strand
uaucccagcuucuccauca

SEQ ID NO: 680037 - RNA, 19 nt, Homo sapiens
  misc_RNA (1)...(19): siRNA sense strand
ccaagcugcugccagauca

SEQ ID NO: 680038 - RNA, 19 nt, Homo sapiens
  misc_RNA (1)...(19): siRNA sense strand
gcugugagcacccguauca

SEQ ID NO: 680039 - RNA, 19 nt, Homo sapiens
  misc_RNA (1)...(19): siRNA sense strand
gaucagcuccugcggaacu

SEQ ID NO: 680040 - RNA, 19 nt, Homo sapiens
  misc_RNA (1)...(19): siRNA sense strand
gaccagcuucuguggauau

SEQ ID NO: 680041 - RNA, 19 nt, Homo sapiens
  misc_RNA (1)...(19): siRNA sense strand
ggaccugcagcuccaguug

SEQ ID NO: 680042 - RNA, 19 nt, Homo sapiens
  misc_RNA (1)...(19): siRNA sense strand
gacuagcuucugcggauuu

SEQ ID NO: 680043 - RNA, 19 nt, Homo sapiens
  misc_RNA (1)...(19): siRNA sense strand
ggugguggcaucagcuaug

SEQ ID NO: 680044 - RNA, 19 nt, Homo sapiens
  misc_RNA (1)...(19): siRNA sense strand
ggauuucccagcuucucaa

SEQ ID NO: 680045 - RNA, 19 nt, Homo sapiens
  misc_RNA (1)...(19): siRNA sense strand
gagcugugagcacccguau

SEQ ID NO: 680046 - RNA, 19 nt, Homo sapiens
  misc_RNA (1)...(19): siRNA sense strand
agaccagcuucuguggaua

SEQ ID NO: 680047 - RNA, 19 nt, Homo sapiens
  misc_RNA (1)...(19): siRNA sense strand
agacuagcuucugcggauu

SEQ ID NO: 680048 - RNA, 19 nt, Homo sapiens
  misc_RNA (1)...(19): siRNA sense strand
ggaucaaccugaccaccua

SEQ ID NO: 680049 - RNA, 19 nt, Homo sapiens
  misc_RNA (1)...(19): siRNA sense strand
gcugcaagccugauaccua

SEQ ID NO: 680050 - RNA, 19 nt, Homo sapiens
  misc_RNA (1)...(19): siRNA sense strand
cugcaagccugauaccuau

SEQ ID NO: 680051 - RNA, 19 nt, Homo sapiens
  misc_RNA (1)...(19): siRNA sense strand
auaccuaugugccaacuug

SEQ ID NO: 680052 - RNA, 19 nt, Homo sapiens
  misc_RNA (1)...(19): siRNA sense strand
gcugugagagucccuguga

SEQ ID NO: 680053 - RNA, 19 nt, Homo sapiens
  misc_RNA (1)...(19): siRNA sense strand
gcaagccugauaccuaugu

SEQ ID NO: 680054 - RNA, 19 nt, Homo sapiens
  misc_RNA (1)...(19): siRNA sense strand
caaccugaccaccuauguu

SEQ ID NO: 680055 - RNA, 19 nt, Homo sapiens
  misc_RNA (1)...(19): siRNA sense strand
gcuggcugcucaacaacug

SEQ ID NO: 680056 - RNA, 19 nt, Homo sapiens
  misc_RNA (1)...(19): siRNA sense strand
gcaccugcccacaugagau

SEQ ID NO: 680057 - RNA, 19 nt, Homo sapiens
  misc_RNA (1)...(19): siRNA sense strand
ccaccaccuucugcucauu

SEQ ID NO: 680058 - RNA, 19 nt, Homo sapiens
  misc_RNA (1)...(19): siRNA sense strand
cuugcuggcugcucaacaa

SEQ ID NO: 680059 - RNA, 19 nt, Homo sapiens
  misc_RNA (1)...(19): siRNA sense strand
cuucugcucauuugauaaa

SEQ ID NO: 680060 - RNA, 19 nt, Homo sapiens
  misc_RNA (1)...(19): siRNA sense strand
gaucaaccugaccaccuau

SEQ ID NO: 680061 - RNA, 19 nt, Homo sapiens
  misc_RNA (1)...(19): siRNA sense strand
gagcccaucugcugugaca

SEQ ID NO: 680062 - RNA, 19 nt, Homo sapiens
  misc_RNA (1)...(19): siRNA sense strand
caucugcugugacaacugu

SEQ ID NO: 680063 - RNA, 19 nt, Homo sapiens
  misc_RNA (1)...(19): siRNA sense strand
caucugcuccuccgacaaa

SEQ ID NO: 680064 - RNA, 19 nt, Homo sapiens
  misc_RNA (1)...(19): siRNA sense strand
gcaccugcccacacacagu

SEQ ID NO: 680065 - RNA, 19 nt, Homo sapiens
  misc_RNA (1)...(19): siRNA sense strand
ccacacacaguuugguuac

SEQ ID NO: 680066 - RNA, 19 nt, Homo sapiens
  misc_RNA (1)...(19): siRNA sense strand
ggagaucauuucggagaug

SEQ ID NO: 680067 - RNA, 19 nt, Homo sapiens
  misc_RNA (1)...(19): siRNA sense strand
gaccagagcccacuacaac

SEQ ID NO: 680068 - RNA, 19 nt, Homo sapiens
  misc_RNA (1)...(19): siRNA sense strand
gcuuggagcuucggaguuc

SEQ ID NO: 680069 - RNA, 19 nt, Homo sapiens
  misc_RNA (1)...(19): siRNA sense strand
gccuauggccgaucuguuu

SEQ ID NO: 680070 - RNA, 19 nt, Homo sapiens
  misc_RNA (1)...(19): siRNA sense strand
gugugaagauggcugcauu

SEQ ID NO: 680071 - RNA, 19 nt, Homo sapiens
  misc_RNA (1)...(19): siRNA sense strand
aggagcagcugaccacaga

SEQ ID NO: 680072 - RNA, 19 nt, Homo sapiens
  misc_RNA (1)...(19): siRNA sense strand
aggaacagcggcagaagua

SEQ ID NO: 680073 - RNA, 19 nt, Homo sapiens
  misc_RNA (1)...(19): siRNA sense strand
ccaggaaccagcugauuca

SEQ ID NO: 680074 - RNA, 19 nt, Homo sapiens
  misc_RNA (1)...(19): siRNA sense strand
ugggauuucugacgaguau

SEQ ID NO: 680075 - RNA, 19 nt, Homo sapiens
  misc_RNA (1)...(19): siRNA sense strand
gagcagcugaccacagaug

SEQ ID NO: 680076 - RNA, 19 nt, Homo sapiens
  misc_RNA (1)...(19): siRNA sense strand
gaggaauaacugugggaaa

SEQ ID NO: 680077 - RNA, 19 nt, Homo sapiens
  misc_RNA (1)...(19): siRNA sense strand
aggaauaacugugggaaag

SEQ ID NO: 680078 - RNA, 19 nt, Homo sapiens
  misc_RNA (1)...(19): siRNA sense strand
ggauuucugacgaguauca

SEQ ID NO: 680079 - RNA, 19 nt, Homo sapiens
  misc_RNA (1)...(19): siRNA sense strand
gccaaucgcaacgaaguuu

SEQ ID NO: 680080 - RNA, 19 nt, Homo sapiens
  misc_RNA (1)...(19): siRNA sense strand
gagcuucggaguucugcuu

SEQ ID NO: 680081 - RNA, 19 nt, Homo sapiens
  misc_RNA (1)...(19): siRNA sense strand
gagaaaggcgggagaacac

SEQ ID NO: 680082 - RNA, 19 nt, Homo sapiens
  misc_RNA (1)...(19): siRNA sense strand
cacuacaacucauccaaca

SEQ ID NO: 680083 - RNA, 19 nt, Homo sapiens
  misc_RNA (1)...(19): siRNA sense strand
gggagaucauuucggagau

SEQ ID NO: 680084 - RNA, 19 nt, Homo sapiens
  misc_RNA (1)...(19): siRNA sense strand
caagagcuacacccucaau

SEQ ID NO: 680085 - RNA, 19 nt, Homo sapiens
  misc_RNA (1)...(19): siRNA sense strand
cgucaugcacccuaucuau

SEQ ID NO: 680086 - RNA, 19 nt, Homo sapiens
  misc_RNA (1)...(19): siRNA sense strand
cuacaacucauccaacaag

SEQ ID NO: 680087 - RNA, 19 nt, Homo sapiens
  misc_RNA (1)...(19): siRNA sense strand
uggaggccgugaacaccua

SEQ ID NO: 680088 - RNA, 19 nt, Homo sapiens
  misc_RNA (1)...(19): siRNA sense strand
gccaggaaccagcugauuc

SEQ ID NO: 680089 - RNA, 19 nt, Homo sapiens
  misc_RNA (1)...(19): siRNA sense strand
uauggccgaucuguuugua

SEQ ID NO: 680090 - RNA, 19 nt, Homo sapiens
  misc_RNA (1)...(19): siRNA sense strand
cgagaaaggcgggagaaca

SEQ ID NO: 680091 - RNA, 19 nt, Homo sapiens
  misc_RNA (1)...(19): siRNA sense strand
gaugguuucucugcugaag

SEQ ID NO: 680092 - RNA, 19 nt, Homo sapiens
  misc_RNA (1)...(19): siRNA sense strand
ggcuacaggucggcgauga

SEQ ID NO: 680093 - RNA, 19 nt, Homo sapiens
  misc_RNA (1)...(19): siRNA sense strand
gaggaacagcggcagaagu

SEQ ID NO: 680094 - RNA, 19 nt, Homo sapiens
  misc_RNA (1)...(19): siRNA sense strand
gccgaucuguuuguagugu

SEQ ID NO: 680095 - RNA, 19 nt, Homo sapiens
  misc_RNA (1)...(19): siRNA sense strand
agaccuggaucacgaacuc

SEQ ID NO: 680096 - RNA, 19 nt, Homo sapiens
  misc_RNA (1)...(19): siRNA sense strand
gaaccuggaggccgugaac

SEQ ID NO: 680097 - RNA, 19 nt, Homo sapiens
  misc_RNA (1)...(19): siRNA sense strand
uggccgaucuguuuguagu

SEQ ID NO: 680098 - RNA, 19 nt, Homo sapiens
  misc_RNA (1)...(19): siRNA sense strand
gcgaggaacagcggcagaa

SEQ ID NO: 680099 - RNA, 19 nt, Homo sapiens
  misc_RNA (1)...(19): siRNA sense strand
cagcugaccacagaugaga

SEQ ID NO: 680100 - RNA, 19 nt, Homo sapiens
  misc_RNA (1)...(19): siRNA sense strand
uacaacucauccaacaaga

SEQ ID NO: 680101 - RNA, 19 nt, Homo sapiens
  misc_RNA (1)...(19): siRNA sense strand
gagaacacagagccaacug

SEQ ID NO: 680102 - RNA, 19 nt, Homo sapiens
  misc_RNA (1)...(19): siRNA sense strand
ggaggugccagaggagaau

SEQ ID NO: 680103 - RNA, 19 nt, Homo sapiens
  misc_RNA (1)...(19): siRNA sense strand
ccaguccucccucgucaug

SEQ ID NO: 680104 - RNA, 19 nt, Homo sapiens
  misc_RNA (1)...(19): siRNA sense strand
gaagauggaauucucugua

SEQ ID NO: 680105 - RNA, 19 nt, Homo sapiens
  misc_RNA (1)...(19): siRNA sense strand
ggagaucauuucggagaug

SEQ ID NO: 680106 - RNA, 19 nt, Homo sapiens
  misc_RNA (1)...(19): siRNA sense strand
gaccagagcccacuacaac

SEQ ID NO: 680107 - RNA, 19 nt, Homo sapiens
  misc_RNA (1)...(19): siRNA sense strand
gcuuggagcuucggaguuc

SEQ ID NO: 680108 - RNA, 19 nt, Homo sapiens
  misc_RNA (1)...(19): siRNA sense strand
gccuauggccgaucuguuu

SEQ ID NO: 680109 - RNA, 19 nt, Homo sapiens
  misc_RNA (1)...(19): siRNA sense strand
gugugaagauggcugcauu

SEQ ID NO: 680110 - RNA, 19 nt, Homo sapiens
  misc_RNA (1)...(19): siRNA sense strand
aggagcagcugaccacaga

SEQ ID NO: 680111 - RNA, 19 nt, Homo sapiens
  misc_RNA (1)...(19): siRNA sense strand
aggaacagcggcagaagua

SEQ ID NO: 680112 - RNA, 19 nt, Homo sapiens
  misc_RNA (1)...(19): siRNA sense strand
ccaggaaccagcugauuca

SEQ ID NO: 680113 - RNA, 19 nt, Homo sapiens
  misc_RNA (1)...(19): siRNA sense strand
aagauggaauucucuguag

SEQ ID NO: 680114 - RNA, 19 nt, Homo sapiens
  misc_RNA (1)...(19): siRNA sense strand
ugggauuucugacgaguau

SEQ ID NO: 680115 - RNA, 19 nt, Homo sapiens
  misc_RNA (1)...(19): siRNA sense strand
gagcagcugaccacagaug

SEQ ID NO: 680116 - RNA, 19 nt, Homo sapiens
  misc_RNA (1)...(19): siRNA sense strand
gaggaauaacugugggaaa

SEQ ID NO: 680117 - RNA, 19 nt, Homo sapiens
  misc_RNA (1)...(19): siRNA sense strand
aggaauaacugugggaaag

SEQ ID NO: 680118 - RNA, 19 nt, Homo sapiens
  misc_RNA (1)...(19): siRNA sense strand
ggauuucugacgaguauca

SEQ ID NO: 680119 - RNA, 19 nt, Homo sapiens
  misc_RNA (1)...(19): siRNA sense strand
gccaaucgcaacgaaguuu

SEQ ID NO: 680120 - RNA, 19 nt, Homo sapiens
  misc_RNA (1)...(19): siRNA sense strand
gagcuucggaguucugcuu

SEQ ID NO: 680121 - RNA, 19 nt, Homo sapiens
  misc_RNA (1)...(19): siRNA sense strand
gagaaaggcgggagaacac

SEQ ID NO: 680122 - RNA, 19 nt, Homo sapiens
  misc_RNA (1)...(19): siRNA sense strand
cacuacaacucauccaaca

SEQ ID NO: 680123 - RNA, 19 nt, Homo sapiens
  misc_RNA (1)...(19): siRNA sense strand
gggagaucauuucggagau

SEQ ID NO: 680124 - RNA, 19 nt, Homo sapiens
  misc_RNA (1)...(19): siRNA sense strand
caagagcuacacccucaau

SEQ ID NO: 680125 - RNA, 19 nt, Homo sapiens
  misc_RNA (1)...(19): siRNA sense strand
cgucaugcacccuaucuau

SEQ ID NO: 680126 - RNA, 19 nt, Homo sapiens
  misc_RNA (1)...(19): siRNA sense strand
cuacaacucauccaacaag

SEQ ID NO: 680127 - RNA, 19 nt, Homo sapiens
  misc_RNA (1)...(19): siRNA sense strand
uggaggccgugaacaccua

SEQ ID NO: 680128 - RNA, 19 nt, Homo sapiens
  misc_RNA (1)...(19): siRNA sense strand
gccaggaaccagcugauuc

SEQ ID NO: 680129 - RNA, 19 nt, Homo sapiens
  misc_RNA (1)...(19): siRNA sense strand
uauggccgaucuguuugua

SEQ ID NO: 680130 - RNA, 19 nt, Homo sapiens
  misc_RNA (1)...(19): siRNA sense strand
cgagaaaggcgggagaaca

SEQ ID NO: 680131 - RNA, 19 nt, Homo sapiens
  misc_RNA (1)...(19): siRNA sense strand
gaugguuucucugcugaag

SEQ ID NO: 680132 - RNA, 19 nt, Homo sapiens
  misc_RNA (1)...(19): siRNA sense strand
ggcuacaggucggcgauga

SEQ ID NO: 680133 - RNA, 19 nt, Homo sapiens
  misc_RNA (1)...(19): siRNA sense strand
gaggaacagcggcagaagu

SEQ ID NO: 680134 - RNA, 19 nt, Homo sapiens
  misc_RNA (1)...(19): siRNA sense strand
gccgaucuguuuguagugu

SEQ ID NO: 680135 - RNA, 19 nt, Homo sapiens
  misc_RNA (1)...(19): siRNA sense strand
agaccuggaucacgaacuc

SEQ ID NO: 680136 - RNA, 19 nt, Homo sapiens
  misc_RNA (1)...(19): siRNA sense strand
gaaccuggaggccgugaac

SEQ ID NO: 680137 - RNA, 19 nt, Homo sapiens
  misc_RNA (1)...(19): siRNA sense strand
uggccgaucuguuuguagu

SEQ ID NO: 680138 - RNA, 19 nt, Homo sapiens
  misc_RNA (1)...(19): siRNA sense strand
gcgaggaacagcggcagaa

SEQ ID NO: 680139 - RNA, 19 nt, Homo sapiens
  misc_RNA (1)...(19): siRNA sense strand
cagcugaccacagaugaga

SEQ ID NO: 680140 - RNA, 19 nt, Homo sapiens
  misc_RNA (1)...(19): siRNA sense strand
uacaacucauccaacaaga

SEQ ID NO: 680141 - RNA, 19 nt, Homo sapiens
  misc_RNA (1)...(19): siRNA sense strand
gagaacacagagccaacug

SEQ ID NO: 680142 - RNA, 19 nt, Homo sapiens
  misc_RNA (1)...(19): siRNA sense strand
ggaggugccagaggagaau

SEQ ID NO: 680143 - RNA, 19 nt, Homo sapiens
  misc_RNA (1)...(19): siRNA sense strand
ccaguccucccucgucaug

SEQ ID NO: 680144 - RNA, 19 nt, Homo sapiens
  misc_RNA (1)...(19): siRNA sense strand
gaacugcacuucagcaaua

SEQ ID NO: 680145 - RNA, 19 nt, Homo sapiens
  misc_RNA (1)...(19): siRNA sense strand
caacagggcuucugaaaca

SEQ ID NO: 680146 - RNA, 19 nt, Homo sapiens
  misc_RNA (1)...(19): siRNA sense strand
ggaaagaaguugaaagcau

SEQ ID NO: 680147 - RNA, 19 nt, Homo sapiens
  misc_RNA (1)...(19): siRNA sense strand
ggaagaugauauugaaaga

SEQ ID NO: 680148 - RNA, 19 nt, Homo sapiens
  misc_RNA (1)...(19): siRNA sense strand
cagccucgguuucuauuua

SEQ ID NO: 680149 - RNA, 19 nt, Homo sapiens
  misc_RNA (1)...(19): siRNA sense strand
ugaggaagaugauauugaa

SEQ ID NO: 680150 - RNA, 19 nt, Homo sapiens
  misc_RNA (1)...(19): siRNA sense strand
gaaagaaggaaagaaguug

SEQ ID NO: 680151 - RNA, 19 nt, Homo sapiens
  misc_RNA (1)...(19): siRNA sense strand
gaaguugaaagcaucuuga

SEQ ID NO: 680152 - RNA, 19 nt, Homo sapiens
  misc_RNA (1)...(19): siRNA sense strand
acacgagcgucaugaagaa

SEQ ID NO: 680153 - RNA, 19 nt, Homo sapiens
  misc_RNA (1)...(19): siRNA sense strand
aaacucagauuggauaugg

SEQ ID NO: 680154 - RNA, 19 nt, Homo sapiens
  misc_RNA (1)...(19): siRNA sense strand
gauaugggauuggucaagu

SEQ ID NO: 680155 - RNA, 19 nt, Homo sapiens
  misc_RNA (1)...(19): siRNA sense strand
ucgcagacaccacaagaua

SEQ ID NO: 680156 - RNA, 19 nt, Homo sapiens
  misc_RNA (1)...(19): siRNA sense strand
ccauagcauuggagagaaa

SEQ ID NO: 680157 - RNA, 19 nt, Homo sapiens
  misc_RNA (1)...(19): siRNA sense strand
acagauacccauagcauug

SEQ ID NO: 680158 - RNA, 19 nt, Homo sapiens
  misc_RNA (1)...(19): siRNA sense strand
gaacacgagcgucaugaag

SEQ ID NO: 680159 - RNA, 19 nt, Homo sapiens
  misc_RNA (1)...(19): siRNA sense strand
ugaaagaaggaaagaaguu

SEQ ID NO: 680160 - RNA, 19 nt, Homo sapiens
  misc_RNA (1)...(19): siRNA sense strand
cagauuggauaugggauug

SEQ ID NO: 680161 - RNA, 19 nt, Homo sapiens
  misc_RNA (1)...(19): siRNA sense strand
ggaacacgagcgucaugaa

SEQ ID NO: 680162 - RNA, 19 nt, Homo sapiens
  misc_RNA (1)...(19): siRNA sense strand
caucucugcugcucucuca

SEQ ID NO: 680163 - RNA, 19 nt, Homo sapiens
  misc_RNA (1)...(19): siRNA sense strand
aaacagauacccauagcau

SEQ ID NO: 680164 - RNA, 19 nt, Homo sapiens
  misc_RNA (1)...(19): siRNA sense strand
gaaggaaagaaguugaaag

SEQ ID NO: 680165 - RNA, 19 nt, Homo sapiens
  misc_RNA (1)...(19): siRNA sense strand
ggguagaacugcacuucag

SEQ ID NO: 680166 - RNA, 19 nt, Homo sapiens
  misc_RNA (1)...(19): siRNA sense strand
ugaaacagauacccauagc

SEQ ID NO: 680167 - RNA, 19 nt, Homo sapiens
  misc_RNA (1)...(19): siRNA sense strand
gaugauauugaaagaagga

SEQ ID NO: 680168 - RNA, 19 nt, Homo sapiens
  misc_RNA (1)...(19): siRNA sense strand
gauauugaaagaaggaaag

SEQ ID NO: 680169 - RNA, 19 nt, Homo sapiens
  misc_RNA (1)...(19): siRNA sense strand
aaagaaggaaagaaguuga

SEQ ID NO: 680170 - RNA, 19 nt, Homo sapiens
  misc_RNA (1)...(19): siRNA sense strand
gaggaagaugauauugaaa

SEQ ID NO: 680171 - RNA, 19 nt, Homo sapiens
  misc_RNA (1)...(19): siRNA sense strand
uauauuggaaggcgucuga

SEQ ID NO: 680172 - RNA, 19 nt, Homo sapiens
  misc_RNA (1)...(19): siRNA sense strand
uauaauggagacauggaaa

SEQ ID NO: 680173 - RNA, 19 nt, Homo sapiens
  misc_RNA (1)...(19): siRNA sense strand
gaggaacacgagcgucaug

SEQ ID NO: 680174 - RNA, 19 nt, Homo sapiens
  misc_RNA (1)...(19): siRNA sense strand
guuccagccucgguuucua

SEQ ID NO: 680175 - RNA, 19 nt, Homo sapiens
  misc_RNA (1)...(19): siRNA sense strand
gcucgcagacaccacaaga

SEQ ID NO: 680176 - RNA, 19 nt, Homo sapiens
  misc_RNA (1)...(19): siRNA sense strand
gccucgguuucuauuuaua

SEQ ID NO: 680177 - RNA, 19 nt, Homo sapiens
  misc_RNA (1)...(19): siRNA sense strand
ccucgguuucuauuuauaa

SEQ ID NO: 680178 - RNA, 19 nt, Homo sapiens
  misc_RNA (1)...(19): siRNA sense strand
gaaacagauacccauagca

SEQ ID NO: 680179 - RNA, 19 nt, Homo sapiens
  misc_RNA (1)...(19): siRNA sense strand
ggacgcacagcaugagucu

SEQ ID NO: 680180 - RNA, 19 nt, Homo sapiens
  misc_RNA (1)...(19): siRNA sense strand
cgguuucuauuuauaaugg

SEQ ID NO: 680181 - RNA, 19 nt, Homo sapiens
  misc_RNA (1)...(19): siRNA sense strand
gauuggauaugggauuggu

SEQ ID NO: 680182 - RNA, 19 nt, Homo sapiens
  misc_RNA (1)...(19): siRNA sense strand
ucagauuggauaugggauu

SEQ ID NO: 680183 - RNA, 19 nt, Homo sapiens
  misc_RNA (1)...(19): siRNA sense strand
cugaggaagaugauauuga

SEQ ID NO: 680184 - RNA, 19 nt, Homo sapiens
  misc_RNA (1)...(19): siRNA sense strand
aagaaggaaagaaguugaa

SEQ ID NO: 680185 - RNA, 19 nt, Homo sapiens
  misc_RNA (1)...(19): siRNA sense strand
ggauuggggaucuauauug

SEQ ID NO: 680186 - RNA, 19 nt, Homo sapiens
  misc_RNA (1)...(19): siRNA sense strand
ggaaggcgucugacaaccu

SEQ ID NO: 680187 - RNA, 19 nt, Homo sapiens
  misc_RNA (1)...(19): siRNA sense strand
caaaacaccugcuguagga

SEQ ID NO: 680188 - RNA, 19 nt, Homo sapiens
  misc_RNA (1)...(19): siRNA sense strand
gcaccuguguacugcagaa

SEQ ID NO: 680189 - RNA, 19 nt, Homo sapiens
  misc_RNA (1)...(19): siRNA sense strand
cagaagaaccugcuacuac

SEQ ID NO: 680190 - RNA, 19 nt, Homo sapiens
  misc_RNA (1)...(19): siRNA sense strand
gcuggaagcccaccacugu

SEQ ID NO: 680191 - RNA, 19 nt, Homo sapiens
  misc_RNA (1)...(19): siRNA sense strand
ccuguguacugcagaagaa

SEQ ID NO: 680192 - RNA, 19 nt, Homo sapiens
  misc_RNA (1)...(19): siRNA sense strand
ccaacuugcugucaaaaca

SEQ ID NO: 680193 - RNA, 19 nt, Homo sapiens
  misc_RNA (1)...(19): siRNA sense strand
uggaagcccaccacuguga

SEQ ID NO: 680194 - RNA, 19 nt, Homo sapiens
  misc_RNA (1)...(19): siRNA sense strand
cgcccaacuugcugucaaa

SEQ ID NO: 680195 - RNA, 19 nt, Homo sapiens
  misc_RNA (1)...(19): siRNA sense strand
ccgcccaacuugcugucaa

SEQ ID NO: 680196 - RNA, 19 nt, Homo sapiens
  misc_RNA (1)...(19): siRNA sense strand
caaaacaccugcuguagga

SEQ ID NO: 680197 - RNA, 19 nt, Homo sapiens
  misc_RNA (1)...(19): siRNA sense strand
gcaccuguguacugcagaa

SEQ ID NO: 680198 - RNA, 19 nt, Homo sapiens
  misc_RNA (1)...(19): siRNA sense strand
ccacccaacuugcugucaa

SEQ ID NO: 680199 - RNA, 19 nt, Homo sapiens
  misc_RNA (1)...(19): siRNA sense strand
ccuguguacugcagaagaa

SEQ ID NO: 680200 - RNA, 19 nt, Homo sapiens
  misc_RNA (1)...(19): siRNA sense strand
gcugcaggaccacuuguuu

SEQ ID NO: 680201 - RNA, 19 nt, Homo sapiens
  misc_RNA (1)...(19): siRNA sense strand
cacccaacuugcugucaaa

SEQ ID NO: 680202 - RNA, 19 nt, Homo sapiens
  misc_RNA (1)...(19): siRNA sense strand
ccaacuugcugucaaaaca

SEQ ID NO: 680203 - RNA, 19 nt, Homo sapiens
  misc_RNA (1)...(19): siRNA sense strand
ggguccagcuguggucaga

SEQ ID NO: 680204 - RNA, 19 nt, Homo sapiens
  misc_RNA (1)...(19): siRNA sense strand
uggcagcccaccacuguga

SEQ ID NO: 680205 - RNA, 19 nt, Homo sapiens
  misc_RNA (1)...(19): siRNA sense strand
ggaaauggaucucuuuaua

SEQ ID NO: 680206 - RNA, 19 nt, Homo sapiens
  misc_RNA (1)...(19): siRNA sense strand
gaagaaaucuauacagcua

SEQ ID NO: 680207 - RNA, 19 nt, Homo sapiens
  misc_RNA (1)...(19): siRNA sense strand
gaaguagaauaccgaauua

SEQ ID NO: 680208 - RNA, 19 nt, Homo sapiens
  misc_RNA (1)...(19): siRNA sense strand
gaaauaauguucagaagga

SEQ ID NO: 680209 - RNA, 19 nt, Homo sapiens
  misc_RNA (1)...(19): siRNA sense strand
gaacagcgccagagucauu

SEQ ID NO: 680210 - RNA, 19 nt, Homo sapiens
  misc_RNA (1)...(19): siRNA sense strand
ccagaaacguuauuuauuc

SEQ ID NO: 680211 - RNA, 19 nt, Homo sapiens
  misc_RNA (1)...(19): siRNA sense strand
ggagauggaucacucaaau

SEQ ID NO: 680212 - RNA, 19 nt, Homo sapiens
  misc_RNA (1)...(19): siRNA sense strand
cgaaaugucuguuguaggu

SEQ ID NO: 680213 - RNA, 19 nt, Homo sapiens
  misc_RNA (1)...(19): siRNA sense strand
gccagaaucuuaaccagaa

SEQ ID NO: 680214 - RNA, 19 nt, Homo sapiens
  misc_RNA (1)...(19): siRNA sense strand
gaauauacaggaucugauu

SEQ ID NO: 680215 - RNA, 19 nt, Homo sapiens
  misc_RNA (1)...(19): siRNA sense strand
ugacgguacugauauguuu

SEQ ID NO: 680216 - RNA, 19 nt, Homo sapiens
  misc_RNA (1)...(19): siRNA sense strand
uaugagagccgaagacuuu

SEQ ID NO: 680217 - RNA, 19 nt, Homo sapiens
  misc_RNA (1)...(19): siRNA sense strand
ggguaugccugccacauuu

SEQ ID NO: 680218 - RNA, 19 nt, Homo sapiens
  misc_RNA (1)...(19): siRNA sense strand
cuaggaccauuuaaagaua

SEQ ID NO: 680219 - RNA, 19 nt, Homo sapiens
  misc_RNA (1)...(19): siRNA sense strand
agacaaugauuacccaauu

SEQ ID NO: 680220 - RNA, 19 nt, Homo sapiens
  misc_RNA (1)...(19): siRNA sense strand
caauagacaugaaaucagu

SEQ ID NO: 680221 - RNA, 19 nt, Homo sapiens
  misc_RNA (1)...(19): siRNA sense strand
gcacagccauuggaagugu

SEQ ID NO: 680222 - RNA, 19 nt, Homo sapiens
  misc_RNA (1)...(19): siRNA sense strand
gaccuugacagaaucuuua

SEQ ID NO: 680223 - RNA, 19 nt, Homo sapiens
  misc_RNA (1)...(19): siRNA sense strand
gacaugaaaucaguaccua

SEQ ID NO: 680224 - RNA, 19 nt, Homo sapiens
  misc_RNA (1)...(19): siRNA sense strand
caguuuagcugcugucaau

SEQ ID NO: 680225 - RNA, 19 nt, Homo sapiens
  misc_RNA (1)...(19): siRNA sense strand
gaaauggaucucuuuauac

SEQ ID NO: 680226 - RNA, 19 nt, Homo sapiens
  misc_RNA (1)...(19): siRNA sense strand
gaagauaucagagacaaca

SEQ ID NO: 680227 - RNA, 19 nt, Homo sapiens
  misc_RNA (1)...(19): siRNA sense strand
cagcuaauacagacuauaa

SEQ ID NO: 680228 - RNA, 19 nt, Homo sapiens
  misc_RNA (1)...(19): siRNA sense strand
ccagaacacuauucaucuu

SEQ ID NO: 680229 - RNA, 19 nt, Homo sapiens
  misc_RNA (1)...(19): siRNA sense strand
auacugaccuugacagaau

SEQ ID NO: 680230 - RNA, 19 nt, Homo sapiens
  misc_RNA (1)...(19): siRNA sense strand
ugaaguagaauaccgaauu

SEQ ID NO: 680231 - RNA, 19 nt, Homo sapiens
  misc_RNA (1)...(19): siRNA sense strand
cagagucauuuacagcaua

SEQ ID NO: 680232 - RNA, 19 nt, Homo sapiens
  misc_RNA (1)...(19): siRNA sense strand
uggcauaaucuuacuguua

SEQ ID NO: 680233 - RNA, 19 nt, Homo sapiens
  misc_RNA (1)...(19): siRNA sense strand
gauggugacgguacugaua

SEQ ID NO: 680234 - RNA, 19 nt, Homo sapiens
  misc_RNA (1)...(19): siRNA sense strand
caagcuacauucagaccaa

SEQ ID NO: 680235 - RNA, 19 nt, Homo sapiens
  misc_RNA (1)...(19): siRNA sense strand
uaagcuagcagaaauguau

SEQ ID NO: 680236 - RNA, 19 nt, Homo sapiens
  misc_RNA (1)...(19): siRNA sense strand
uauagaagauguggaugaa

SEQ ID NO: 680237 - RNA, 19 nt, Homo sapiens
  misc_RNA (1)...(19): siRNA sense strand
gagauggaucacucaaaua

SEQ ID NO: 680238 - RNA, 19 nt, Homo sapiens
  misc_RNA (1)...(19): siRNA sense strand
gacaaugauuacccaauuc

SEQ ID NO: 680239 - RNA, 19 nt, Homo sapiens
  misc_RNA (1)...(19): siRNA sense strand
uaagugcaguagacaaaga

SEQ ID NO: 680240 - RNA, 19 nt, Homo sapiens
  misc_RNA (1)...(19): siRNA sense strand
aaacagagagcaauaccaa

SEQ ID NO: 680241 - RNA, 19 nt, Homo sapiens
  misc_RNA (1)...(19): siRNA sense strand
caucaucauucuacugguu

SEQ ID NO: 680242 - RNA, 19 nt, Homo sapiens
  misc_RNA (1)...(19): siRNA sense strand
caagggacccagauucuau

SEQ ID NO: 680243 - RNA, 19 nt, Homo sapiens
  misc_RNA (1)...(19): siRNA sense strand
cgaagacuuuauacucuga

SEQ ID NO: 680244 - RNA, 19 nt, Homo sapiens
  misc_RNA (1)...(19): siRNA sense strand
gagagccgaagacuuuaua

SEQ ID NO: 680245 - RNA, 19 nt, Homo sapiens
  misc_RNA (1)...(19): siRNA sense strand
gccacaaggcgaauugaua

SEQ ID NO: 680246 - RNA, 19 nt, Homo sapiens
  misc_RNA (1)...(19): siRNA sense strand
gcacaagcuauuaacagaa

SEQ ID NO: 680247 - RNA, 19 nt, Homo sapiens
  misc_RNA (1)...(19): siRNA sense strand
uaauacugccagaaucuua

SEQ ID NO: 680248 - RNA, 19 nt, Homo sapiens
  misc_RNA (1)...(19): siRNA sense strand
gcaagggacccagauucua

SEQ ID NO: 680249 - RNA, 19 nt, Homo sapiens
  misc_RNA (1)...(19): siRNA sense strand
ucaugaagauauugaagug

SEQ ID NO: 680250 - RNA, 19 nt, Homo sapiens
  misc_RNA (1)...(19): siRNA sense strand
gaacacuauucaucuucga

SEQ ID NO: 680251 - RNA, 19 nt, Homo sapiens
  misc_RNA (1)...(19): siRNA sense strand
ggacaaccacugugaacau

SEQ ID NO: 680252 - RNA, 19 nt, Homo sapiens
  misc_RNA (1)...(19): siRNA sense strand
ccagaaauaauguucagaa

SEQ ID NO: 680253 - RNA, 19 nt, Homo sapiens
  misc_RNA (1)...(19): siRNA sense strand
ucacaguacaggauaauga

SEQ ID NO: 680254 - RNA, 19 nt, Homo sapiens
  misc_RNA (1)...(19): siRNA sense strand
gaaaucaacaaucccaaag

SEQ ID NO: 680255 - RNA, 19 nt, Homo sapiens
  misc_RNA (1)...(19): siRNA sense strand
gauggaucacucaaauaua

SEQ ID NO: 680256 - RNA, 19 nt, Homo sapiens
  misc_RNA (1)...(19): siRNA sense strand
ggacguccgggauuucauu

SEQ ID NO: 680257 - RNA, 19 nt, Homo sapiens
  misc_RNA (1)...(19): siRNA sense strand
gaacaucacgcugacagau

SEQ ID NO: 680258 - RNA, 19 nt, Homo sapiens
  misc_RNA (1)...(19): siRNA sense strand
ugaagaauauacaggaucu

SEQ ID NO: 680259 - RNA, 19 nt, Homo sapiens
  misc_RNA (1)...(19): siRNA sense strand
ucucugaguucauuagaau

SEQ ID NO: 680260 - RNA, 19 nt, Homo sapiens
  misc_RNA (1)...(19): siRNA sense strand
gauaucagagacaacauug

SEQ ID NO: 680261 - RNA, 19 nt, Homo sapiens
  misc_RNA (1)...(19): siRNA sense strand
uaggcaagcuacauucaga

SEQ ID NO: 680262 - RNA, 19 nt, Homo sapiens
  misc_RNA (1)...(19): siRNA sense strand
cgagauauuauuccagaaa

SEQ ID NO: 680263 - RNA, 19 nt, Homo sapiens
  misc_RNA (1)...(19): siRNA sense strand
ucucuugccuguggugaua

SEQ ID NO: 680264 - RNA, 19 nt, Homo sapiens
  misc_RNA (1)...(19): siRNA sense strand
gaaaucaguaccuaucucu

SEQ ID NO: 680265 - RNA, 19 nt, Homo sapiens
  misc_RNA (1)...(19): siRNA sense strand
gaagauaauacugccagaa

SEQ ID NO: 680266 - RNA, 19 nt, Homo sapiens
  misc_RNA (1)...(19): siRNA sense strand
gccgaagacuuuauacucu

SEQ ID NO: 680267 - RNA, 19 nt, Homo sapiens
  misc_RNA (1)...(19): siRNA sense strand
gagccaacguucccagaag

SEQ ID NO: 680268 - RNA, 19 nt, Homo sapiens
  misc_RNA (1)...(19): siRNA sense strand
ccacaaggcgaauugauag

SEQ ID NO: 680269 - RNA, 19 nt, Homo sapiens
  misc_RNA (1)...(19): siRNA sense strand
cgacucacuugcaaccuau

SEQ ID NO: 680270 - RNA, 19 nt, Homo sapiens
  misc_RNA (1)...(19): siRNA sense strand
gguuggauguggaaucaau

SEQ ID NO: 680271 - RNA, 19 nt, Homo sapiens
  misc_RNA (1)...(19): siRNA sense strand
ggacccagauucuauuucc

SEQ ID NO: 680272 - RNA, 19 nt, Homo sapiens
  misc_RNA (1)...(19): siRNA sense strand
gggaacagcgccagaguca

SEQ ID NO: 680273 - RNA, 19 nt, Homo sapiens
  misc_RNA (1)...(19): siRNA sense strand
gcaagucacagcuacagau

SEQ ID NO: 680274 - RNA, 19 nt, Homo sapiens
  misc_RNA (1)...(19): siRNA sense strand
uaccgaacaugaacagaga

SEQ ID NO: 680275 - RNA, 19 nt, Homo sapiens
  misc_RNA (1)...(19): siRNA sense strand
gauaauacugccagaaucu

SEQ ID NO: 680276 - RNA, 19 nt, Homo sapiens
  misc_RNA (1)...(19): siRNA sense strand
uagcugcugucaauccaaa

SEQ ID NO: 680277 - RNA, 19 nt, Homo sapiens
  misc_RNA (1)...(19): siRNA sense strand
uauaagugcaguagacaaa

SEQ ID NO: 680278 - RNA, 19 nt, Homo sapiens
  misc_RNA (1)...(19): siRNA sense strand
gaacuaucucaguggcaua

SEQ ID NO: 680279 - RNA, 19 nt, Homo sapiens
  misc_RNA (1)...(19): siRNA sense strand
cgcacaagcuauuaacaga

SEQ ID NO: 680280 - RNA, 19 nt, Homo sapiens
  misc_RNA (1)...(19): siRNA sense strand
caggaaauggaucucuuua

SEQ ID NO: 680281 - RNA, 19 nt, Homo sapiens
  misc_RNA (1)...(19): siRNA sense strand
ccuccuaucuguuugaagu

SEQ ID NO: 680282 - RNA, 19 nt, Homo sapiens
  misc_RNA (1)...(19): siRNA sense strand
cagcuaguguucccgaaau

SEQ ID NO: 680283 - RNA, 19 nt, Homo sapiens
  misc_RNA (1)...(19): siRNA sense strand
agucagaguuugugaucaa

SEQ ID NO: 680284 - RNA, 19 nt, Homo sapiens
  misc_RNA (1)...(19): siRNA sense strand
agauggagcugguacucuu

SEQ ID NO: 680285 - RNA, 19 nt, Homo sapiens
  misc_RNA (1)...(19): siRNA sense strand
gagauauuauuccagaaac

SEQ ID NO: 680286 - RNA, 19 nt, Homo sapiens
  misc_RNA (1)...(19): siRNA sense strand
cagaaauaauguucagaag

SEQ ID NO: 680287 - RNA, 19 nt, Homo sapiens
  misc_RNA (1)...(19): siRNA sense strand
ggacugcuuuaccgaacau

SEQ ID NO: 680288 - RNA, 19 nt, Homo sapiens
  misc_RNA (1)...(19): siRNA sense strand
cacaagcuauuaacagaag

SEQ ID NO: 680289 - RNA, 19 nt, Homo sapiens
  misc_RNA (1)...(19): siRNA sense strand
aagaagauaucagagacaa

SEQ ID NO: 680290 - RNA, 19 nt, Homo sapiens
  misc_RNA (1)...(19): siRNA sense strand
aauccaaacuucacaguac

SEQ ID NO: 680291 - RNA, 19 nt, Homo sapiens
  misc_RNA (1)...(19): siRNA sense strand
gugaaaaucucuauagaag

SEQ ID NO: 680292 - RNA, 19 nt, Homo sapiens
  misc_RNA (1)...(19): siRNA sense strand
gacaaccacugugaacauc

SEQ ID NO: 680293 - RNA, 19 nt, Homo sapiens
  misc_RNA (1)...(19): siRNA sense strand
ggaggacacccaggccuuu

SEQ ID NO: 680294 - RNA, 19 nt, Homo sapiens
  misc_RNA (1)...(19): siRNA sense strand
gcuaauacagacuauaagu

SEQ ID NO: 680295 - RNA, 19 nt, Homo sapiens
  misc_RNA (1)...(19): siRNA sense strand
gaccagggcagcuaauaca

SEQ ID NO: 680296 - RNA, 19 nt, Homo sapiens
  misc_RNA (1)...(19): siRNA sense strand
aaaagccacucgacuauga

SEQ ID NO: 680297 - RNA, 19 nt, Homo sapiens
  misc_RNA (1)...(19): siRNA sense strand
gcuauuaacagaagaacuc

SEQ ID NO: 680298 - RNA, 19 nt, Homo sapiens
  misc_RNA (1)...(19): siRNA sense strand
ggaaagugacaaagacucu

SEQ ID NO: 680299 - RNA, 19 nt, Homo sapiens
  misc_RNA (1)...(19): siRNA sense strand
ccagaaucuuaaccagaaa

SEQ ID NO: 680300 - RNA, 19 nt, Homo sapiens
  misc_RNA (1)...(19): siRNA sense strand
ugaaaucaacaaucccaaa

SEQ ID NO: 680301 - RNA, 19 nt, Homo sapiens
  misc_RNA (1)...(19): siRNA sense strand
ugaagugggcacaaucauu

SEQ ID NO: 680302 - RNA, 19 nt, Homo sapiens
  misc_RNA (1)...(19): siRNA sense strand
agaccaagauaaaggagau

SEQ ID NO: 680303 - RNA, 19 nt, Homo sapiens
  misc_RNA (1)...(19): siRNA sense strand
gggcagcuaauacagacua

SEQ ID NO: 680304 - RNA, 19 nt, Homo sapiens
  misc_RNA (1)...(19): siRNA sense strand
gacuauaagugcaguagac

SEQ ID NO: 680305 - RNA, 19 nt, Homo sapiens
  misc_RNA (1)...(19): siRNA sense strand
gaagagagguucagcuaaa

SEQ ID NO: 680306 - RNA, 19 nt, Homo sapiens
  misc_RNA (1)...(19): siRNA sense strand
gaagaaauauacacgguuu

SEQ ID NO: 680307 - RNA, 19 nt, Homo sapiens
  misc_RNA (1)...(19): siRNA sense strand
uacaugagcuuuacagaua

SEQ ID NO: 680308 - RNA, 19 nt, Homo sapiens
  misc_RNA (1)...(19): siRNA sense strand
ugaauuacuuggacaguua

SEQ ID NO: 680309 - RNA, 19 nt, Homo sapiens
  misc_RNA (1)...(19): siRNA sense strand
gacaggagguggccauuaa

SEQ ID NO: 680310 - RNA, 19 nt, Homo sapiens
  misc_RNA (1)...(19): siRNA sense strand
caacaaagaacaaucacua

SEQ ID NO: 680311 - RNA, 19 nt, Homo sapiens
  misc_RNA (1)...(19): siRNA sense strand
acccaaacauugugaauua

SEQ ID NO: 680312 - RNA, 19 nt, Homo sapiens
  misc_RNA (1)...(19): siRNA sense strand
gaugagcuguggguuguua

SEQ ID NO: 680313 - RNA, 19 nt, Homo sapiens
  misc_RNA (1)...(19): siRNA sense strand
ugacagauguggugacaga

SEQ ID NO: 680314 - RNA, 19 nt, Homo sapiens
  misc_RNA (1)...(19): siRNA sense strand
caucaagagugacaauauu

SEQ ID NO: 680315 - RNA, 19 nt, Homo sapiens
  misc_RNA (1)...(19): siRNA sense strand
gaggagaucuuggagaaau

SEQ ID NO: 680316 - RNA, 19 nt, Homo sapiens
  misc_RNA (1)...(19): siRNA sense strand
caucaaauaucacuaaguc

SEQ ID NO: 680317 - RNA, 19 nt, Homo sapiens
  misc_RNA (1)...(19): siRNA sense strand
gacagaaacuugcauggau

SEQ ID NO: 680318 - RNA, 19 nt, Homo sapiens
  misc_RNA (1)...(19): siRNA sense strand
gagaagagagguucagcua

SEQ ID NO: 680319 - RNA, 19 nt, Homo sapiens
  misc_RNA (1)...(19): siRNA sense strand
gaaccgcugucucgauaug

SEQ ID NO: 680320 - RNA, 19 nt, Homo sapiens
  misc_RNA (1)...(19): siRNA sense strand
ggauggcucugucaagcua

SEQ ID NO: 680321 - RNA, 19 nt, Homo sapiens
  misc_RNA (1)...(19): siRNA sense strand
agaaauaccagcacuauga

SEQ ID NO: 680322 - RNA, 19 nt, Homo sapiens
  misc_RNA (1)...(19): siRNA sense strand
caagcuaacugacuuugga

SEQ ID NO: 680323 - RNA, 19 nt, Homo sapiens
  misc_RNA (1)...(19): siRNA sense strand
acagagacaucaagaguga

SEQ ID NO: 680324 - RNA, 19 nt, Homo sapiens
  misc_RNA (1)...(19): siRNA sense strand
gagaugagcuguggguugu

SEQ ID NO: 680325 - RNA, 19 nt, Homo sapiens
  misc_RNA (1)...(19): siRNA sense strand
ucuaaugccuugaauguga

SEQ ID NO: 680326 - RNA, 19 nt, Homo sapiens
  misc_RNA (1)...(19): siRNA sense strand
ggagaaauuacgaagcaua

SEQ ID NO: 680327 - RNA, 19 nt, Homo sapiens
  misc_RNA (1)...(19): siRNA sense strand
cuucagacaucaaauauca

SEQ ID NO: 680328 - RNA, 19 nt, Homo sapiens
  misc_RNA (1)...(19): siRNA sense strand
cagcaucaauuccugaaga

SEQ ID NO: 680329 - RNA, 19 nt, Homo sapiens
  misc_RNA (1)...(19): siRNA sense strand
ggagaucuuggagaaauua

SEQ ID NO: 680330 - RNA, 19 nt, Homo sapiens
  misc_RNA (1)...(19): siRNA sense strand
gaaauuacgaagcauagug

SEQ ID NO: 680331 - RNA, 19 nt, Homo sapiens
  misc_RNA (1)...(19): siRNA sense strand
uaacaccacuccaccagau

SEQ ID NO: 680332 - RNA, 19 nt, Homo sapiens
  misc_RNA (1)...(19): siRNA sense strand
caagaaagagcugauuauu

SEQ ID NO: 680333 - RNA, 19 nt, Homo sapiens
  misc_RNA (1)...(19): siRNA sense strand
ggacaggagguggccauua

SEQ ID NO: 680334 - RNA, 19 nt, Homo sapiens
  misc_RNA (1)...(19): siRNA sense strand
cuaaaccucugccuccaaa

SEQ ID NO: 680335 - RNA, 19 nt, Homo sapiens
  misc_RNA (1)...(19): siRNA sense strand
aaacaagaacccaaacauu

SEQ ID NO: 680336 - RNA, 19 nt, Homo sapiens
  misc_RNA (1)...(19): siRNA sense strand
gaaagagcggccagagauu

SEQ ID NO: 680337 - RNA, 19 nt, Homo sapiens
  misc_RNA (1)...(19): siRNA sense strand
gcucuggaguucuugcauu

SEQ ID NO: 680338 - RNA, 19 nt, Homo sapiens
  misc_RNA (1)...(19): siRNA sense strand
cugaaccgcugucucgaua

SEQ ID NO: 680339 - RNA, 19 nt, Homo sapiens
  misc_RNA (1)...(19): siRNA sense strand
cagaaauacaugagcuuua

SEQ ID NO: 680340 - RNA, 19 nt, Homo sapiens
  misc_RNA (1)...(19): siRNA sense strand
caucauggccaucgaaaug

SEQ ID NO: 680341 - RNA, 19 nt, Homo sapiens
  misc_RNA (1)...(19): siRNA sense strand
cagccucacuccacugauu

SEQ ID NO: 680342 - RNA, 19 nt, Homo sapiens
  misc_RNA (1)...(19): siRNA sense strand
uaagucagcugaggauuac

SEQ ID NO: 680343 - RNA, 19 nt, Homo sapiens
  misc_RNA (1)...(19): siRNA sense strand
gaaauaccagcacuaugau

SEQ ID NO: 680344 - RNA, 19 nt, Homo sapiens
  misc_RNA (1)...(19): siRNA sense strand
guggcuacaucucccauuu

SEQ ID NO: 680345 - RNA, 19 nt, Homo sapiens
  misc_RNA (1)...(19): siRNA sense strand
cagaagaugaggaugauga

SEQ ID NO: 680346 - RNA, 19 nt, Homo sapiens
  misc_RNA (1)...(19): siRNA sense strand
cagcugaggauuacaauuc

SEQ ID NO: 680347 - RNA, 19 nt, Homo sapiens
  misc_RNA (1)...(19): siRNA sense strand
gagugacaauauucuguug

SEQ ID NO: 680348 - RNA, 19 nt, Homo sapiens
  misc_RNA (1)...(19): siRNA sense strand
gcuguggguuguuauggaa

SEQ ID NO: 680349 - RNA, 19 nt, Homo sapiens
  misc_RNA (1)...(19): siRNA sense strand
aacaagaacccaaacauug

SEQ ID NO: 680350 - RNA, 19 nt, Homo sapiens
  misc_RNA (1)...(19): siRNA sense strand
ccaagaaagagcugauuau

SEQ ID NO: 680351 - RNA, 19 nt, Homo sapiens
  misc_RNA (1)...(19): siRNA sense strand
ucaaauaacggccuagaca

SEQ ID NO: 680352 - RNA, 19 nt, Homo sapiens
  misc_RNA (1)...(19): siRNA sense strand
gagaaagagcggccagaga

SEQ ID NO: 680353 - RNA, 19 nt, Homo sapiens
  misc_RNA (1)...(19): siRNA sense strand
cuaaggaggcaacaaagaa

SEQ ID NO: 680354 - RNA, 19 nt, Homo sapiens
  misc_RNA (1)...(19): siRNA sense strand
ggaugaugaugaugaugau

SEQ ID NO: 680355 - RNA, 19 nt, Homo sapiens
  misc_RNA (1)...(19): siRNA sense strand
agaaauacaugagcuuuac

SEQ ID NO: 680356 - RNA, 19 nt, Homo sapiens
  misc_RNA (1)...(19): siRNA sense strand
cauccaacagccagaaaua

SEQ ID NO: 680357 - RNA, 19 nt, Homo sapiens
  misc_RNA (1)...(19): siRNA sense strand
gaagaagccuaaaaugucu

SEQ ID NO: 680358 - RNA, 19 nt, Homo sapiens
  misc_RNA (1)...(19): siRNA sense strand
cagcuaaggaggcaacaaa

SEQ ID NO: 680359 - RNA, 19 nt, Homo sapiens
  misc_RNA (1)...(19): siRNA sense strand
gcgauccuaagaagaaaua

SEQ ID NO: 680360 - RNA, 19 nt, Homo sapiens
  misc_RNA (1)...(19): siRNA sense strand
auaagucagcugaggauua

SEQ ID NO: 680361 - RNA, 19 nt, Homo sapiens
  misc_RNA (1)...(19): siRNA sense strand
aaauaacggccuagacauu

SEQ ID NO: 680362 - RNA, 19 nt, Homo sapiens
  misc_RNA (1)...(19): siRNA sense strand
ggcuacaucucccauuuca

SEQ ID NO: 680363 - RNA, 19 nt, Homo sapiens
  misc_RNA (1)...(19): siRNA sense strand
ccuagacauucaagacaaa

SEQ ID NO: 680364 - RNA, 19 nt, Homo sapiens
  misc_RNA (1)...(19): siRNA sense strand
gaacuucagaacccagaga

SEQ ID NO: 680365 - RNA, 19 nt, Homo sapiens
  misc_RNA (1)...(19): siRNA sense strand
gaacccaaacauugugaau

SEQ ID NO: 680366 - RNA, 19 nt, Homo sapiens
  misc_RNA (1)...(19): siRNA sense strand
aaauauacacgguuugaga

SEQ ID NO: 680367 - RNA, 19 nt, Homo sapiens
  misc_RNA (1)...(19): siRNA sense strand
ucacuaagucggagcagaa

SEQ ID NO: 680368 - RNA, 19 nt, Homo sapiens
  misc_RNA (1)...(19): siRNA sense strand
gcuaaggaggcaacaaaga

SEQ ID NO: 680369 - RNA, 19 nt, Homo sapiens
  misc_RNA (1)...(19): siRNA sense strand
gaaccaggucauucacaga

SEQ ID NO: 680370 - RNA, 19 nt, Homo sapiens
  misc_RNA (1)...(19): siRNA sense strand
agaaagagcggccagagau

SEQ ID NO: 680371 - RNA, 19 nt, Homo sapiens
  misc_RNA (1)...(19): siRNA sense strand
gugaauuacuuggacaguu

SEQ ID NO: 680372 - RNA, 19 nt, Homo sapiens
  misc_RNA (1)...(19): siRNA sense strand
gagaaauuacgaagcauag

SEQ ID NO: 680373 - RNA, 19 nt, Homo sapiens
  misc_RNA (1)...(19): siRNA sense strand
gccuagacauucaagacaa

SEQ ID NO: 680374 - RNA, 19 nt, Homo sapiens
  misc_RNA (1)...(19): siRNA sense strand
ucacagagacaucaagagu

SEQ ID NO: 680375 - RNA, 19 nt, Homo sapiens
  misc_RNA (1)...(19): siRNA sense strand
agauuucucucccuucaga

SEQ ID NO: 680376 - RNA, 19 nt, Homo sapiens
  misc_RNA (1)...(19): siRNA sense strand
aaagagcggccagagauuu

SEQ ID NO: 680377 - RNA, 19 nt, Homo sapiens
  misc_RNA (1)...(19): siRNA sense strand
acaugagcuuuacagauaa

SEQ ID NO: 680378 - RNA, 19 nt, Homo sapiens
  misc_RNA (1)...(19): siRNA sense strand
cugagaagcagaagaagaa

SEQ ID NO: 680379 - RNA, 19 nt, Homo sapiens
  misc_RNA (1)...(19): siRNA sense strand
caacagccagaaauacaug

SEQ ID NO: 680380 - RNA, 19 nt, Homo sapiens
  misc_RNA (1)...(19): siRNA sense strand
gagccuccauaccucaaug

SEQ ID NO: 680381 - RNA, 19 nt, Homo sapiens
  misc_RNA (1)...(19): siRNA sense strand
ggaugaaggccaaauugca

SEQ ID NO: 680382 - RNA, 19 nt, Homo sapiens
  misc_RNA (1)...(19): siRNA sense strand
aagaugaggaugaugauga

SEQ ID NO: 680383 - RNA, 19 nt, Homo sapiens
  misc_RNA (1)...(19): siRNA sense strand
gagcuuuacagauaaguca

SEQ ID NO: 680384 - RNA, 19 nt, Homo sapiens
  misc_RNA (1)...(19): siRNA sense strand
augaggagaucuuggagaa

SEQ ID NO: 680385 - RNA, 19 nt, Homo sapiens
  misc_RNA (1)...(19): siRNA sense strand
ccagaaauacaugagcuuu

SEQ ID NO: 680386 - RNA, 19 nt, Homo sapiens
  misc_RNA (1)...(19): siRNA sense strand
uaacugacuuuggauucug

SEQ ID NO: 680387 - RNA, 19 nt, Homo sapiens
  misc_RNA (1)...(19): siRNA sense strand
cccaagaaagagcugauua

SEQ ID NO: 680388 - RNA, 19 nt, Homo sapiens
  misc_RNA (1)...(19): siRNA sense strand
auacugagaagcagaagaa

SEQ ID NO: 680389 - RNA, 19 nt, Homo sapiens
  misc_RNA (1)...(19): siRNA sense strand
cacaaaaucuguauacaca

SEQ ID NO: 680390 - RNA, 19 nt, Homo sapiens
  misc_RNA (1)...(19): siRNA sense strand
cuaaugccuugaaugugaa

SEQ ID NO: 680391 - RNA, 19 nt, Homo sapiens
  misc_RNA (1)...(19): siRNA sense strand
acacaauucaugucgguuu

SEQ ID NO: 680392 - RNA, 19 nt, Homo sapiens
  misc_RNA (1)...(19): siRNA sense strand
ugagaaauaccagcacuau

SEQ ID NO: 680393 - RNA, 19 nt, Homo sapiens
  misc_RNA (1)...(19): siRNA sense strand
cagagguugugacacgaaa

SEQ ID NO: 680394 - RNA, 19 nt, Homo sapiens
  misc_RNA (1)...(19): siRNA sense strand
gggcgauccuaagaagaaa

SEQ ID NO: 680395 - RNA, 19 nt, Homo sapiens
  misc_RNA (1)...(19): siRNA sense strand
gagaaauaccagcacuaug

SEQ ID NO: 680396 - RNA, 19 nt, Homo sapiens
  misc_RNA (1)...(19): siRNA sense strand
gaggauuacaauucuucua

SEQ ID NO: 680397 - RNA, 19 nt, Homo sapiens
  misc_RNA (1)...(19): siRNA sense strand
ccuaugggcccaagguuga

SEQ ID NO: 680398 - RNA, 19 nt, Homo sapiens
  misc_RNA (1)...(19): siRNA sense strand
gcagcugugugccgugagu

SEQ ID NO: 680399 - RNA, 19 nt, Homo sapiens
  misc_RNA (1)...(19): siRNA sense strand
uguggguuguuauggaaua

SEQ ID NO: 680400 - RNA, 19 nt, Homo sapiens
  misc_RNA (1)...(19): siRNA sense strand
agaaauauacacgguuuga

SEQ ID NO: 680401 - RNA, 19 nt, Homo sapiens
  misc_RNA (1)...(19): siRNA sense strand
gaagaagaagccuaaaaug

SEQ ID NO: 680402 - RNA, 19 nt, Homo sapiens
  misc_RNA (1)...(19): siRNA sense strand
ugagaagauuggacaaggu

SEQ ID NO: 680403 - RNA, 19 nt, Homo sapiens
  misc_RNA (1)...(19): siRNA sense strand
caaacggagcaccauggua

SEQ ID NO: 680404 - RNA, 19 nt, Homo sapiens
  misc_RNA (1)...(19): siRNA sense strand
caagaacccaaacauugug

SEQ ID NO: 680405 - RNA, 19 nt, Homo sapiens
  misc_RNA (1)...(19): siRNA sense strand
ggacuuggcugacaugaua

SEQ ID NO: 680406 - RNA, 19 nt, Homo sapiens
  misc_RNA (1)...(19): siRNA sense strand
gggaagagcuggaagauaa

SEQ ID NO: 680407 - RNA, 19 nt, Homo sapiens
  misc_RNA (1)...(19): siRNA sense strand
gggagaagcuggccacaaa

SEQ ID NO: 680408 - RNA, 19 nt, Homo sapiens
  misc_RNA (1)...(19): siRNA sense strand
gaucuuggauucugaagug

SEQ ID NO: 680409 - RNA, 19 nt, Homo sapiens
  misc_RNA (1)...(19): siRNA sense strand
cagcaaagauggcaacaug

SEQ ID NO: 680410 - RNA, 19 nt, Homo sapiens
  misc_RNA (1)...(19): siRNA sense strand
gcuaaugucugccuguuug

SEQ ID NO: 680411 - RNA, 19 nt, Homo sapiens
  misc_RNA (1)...(19): siRNA sense strand
uugcagaucugucuucuaa

SEQ ID NO: 680412 - RNA, 19 nt, Homo sapiens
  misc_RNA (1)...(19): siRNA sense strand
gauaaggacuggaaaucug

SEQ ID NO: 680413 - RNA, 19 nt, Homo sapiens
  misc_RNA (1)...(19): siRNA sense strand
gaaagcagccuuccaggau

SEQ ID NO: 680414 - RNA, 19 nt, Homo sapiens
  misc_RNA (1)...(19): siRNA sense strand
gcaaagccuuccgcuauga

SEQ ID NO: 680415 - RNA, 19 nt, Homo sapiens
  misc_RNA (1)...(19): siRNA sense strand
ccaaugaccuuaaaugcau

SEQ ID NO: 680416 - RNA, 19 nt, Homo sapiens
  misc_RNA (1)...(19): siRNA sense strand
gaccuuaaaugcaucauca

SEQ ID NO: 680417 - RNA, 19 nt, Homo sapiens
  misc_RNA (1)...(19): siRNA sense strand
ccaauggcauguucucuga

SEQ ID NO: 680418 - RNA, 19 nt, Homo sapiens
  misc_RNA (1)...(19): siRNA sense strand
gaucuacuauccugacuuc

SEQ ID NO: 680419 - RNA, 19 nt, Homo sapiens
  misc_RNA (1)...(19): siRNA sense strand
gaaaggcgccucauuuguc

SEQ ID NO: 680420 - RNA, 19 nt, Homo sapiens
  misc_RNA (1)...(19): siRNA sense strand
gagcaaaggcggcaugaug

SEQ ID NO: 680421 - RNA, 19 nt, Homo sapiens
  misc_RNA (1)...(19): siRNA sense strand
gacauugccuccaggugua

SEQ ID NO: 680422 - RNA, 19 nt, Homo sapiens
  misc_RNA (1)...(19): siRNA sense strand
guuuacaacuugaacgaua

SEQ ID NO: 680423 - RNA, 19 nt, Homo sapiens
  misc_RNA (1)...(19): siRNA sense strand
gcagaucugucuucuaagg

SEQ ID NO: 680424 - RNA, 19 nt, Homo sapiens
  misc_RNA (1)...(19): siRNA sense strand
gcggaaagcugcugaugag

SEQ ID NO: 680425 - RNA, 19 nt, Homo sapiens
  misc_RNA (1)...(19): siRNA sense strand
gcaaguccguugaguaugc

SEQ ID NO: 680426 - RNA, 19 nt, Homo sapiens
  misc_RNA (1)...(19): siRNA sense strand
gcagguacaccaaagaaga

SEQ ID NO: 680427 - RNA, 19 nt, Homo sapiens
  misc_RNA (1)...(19): siRNA sense strand
uuaaaugcaucaucagguu

SEQ ID NO: 680428 - RNA, 19 nt, Homo sapiens
  misc_RNA (1)...(19): siRNA sense strand
gcauaaggacugucugcua

SEQ ID NO: 680429 - RNA, 19 nt, Homo sapiens
  misc_RNA (1)...(19): siRNA sense strand
gaaaugaagcgagucacaa

SEQ ID NO: 680430 - RNA, 19 nt, Homo sapiens
  misc_RNA (1)...(19): siRNA sense strand
gggcugaauucuccaaauc

SEQ ID NO: 680431 - RNA, 19 nt, Homo sapiens
  misc_RNA (1)...(19): siRNA sense strand
ggaagauaaugagaaggaa

SEQ ID NO: 680432 - RNA, 19 nt, Homo sapiens
  misc_RNA (1)...(19): siRNA sense strand
gaacuagacauggugaaga

SEQ ID NO: 680433 - RNA, 19 nt, Homo sapiens
  misc_RNA (1)...(19): siRNA sense strand
ucagguugaucaaacauga

SEQ ID NO: 680434 - RNA, 19 nt, Homo sapiens
  misc_RNA (1)...(19): siRNA sense strand
uaagacuguuuacaacuug

SEQ ID NO: 680435 - RNA, 19 nt, Homo sapiens
  misc_RNA (1)...(19): siRNA sense strand
gcaaaguggugcccaaucc

SEQ ID NO: 680436 - RNA, 19 nt, Homo sapiens
  misc_RNA (1)...(19): siRNA sense strand
gacaaucagagucuucuuu

SEQ ID NO: 680437 - RNA, 19 nt, Homo sapiens
  misc_RNA (1)...(19): siRNA sense strand
gaugagacgcugugccaaa

SEQ ID NO: 680438 - RNA, 19 nt, Homo sapiens
  misc_RNA (1)...(19): siRNA sense strand
gcagaagggaagcugagua

SEQ ID NO: 680439 - RNA, 19 nt, Homo sapiens
  misc_RNA (1)...(19): siRNA sense strand
guccaggccucgcugauga

SEQ ID NO: 680440 - RNA, 19 nt, Homo sapiens
  misc_RNA (1)...(19): siRNA sense strand
gaacucaggugcaaaacau

SEQ ID NO: 680441 - RNA, 19 nt, Homo sapiens
  misc_RNA (1)...(19): siRNA sense strand
guacagccaaugaccuuaa

SEQ ID NO: 680442 - RNA, 19 nt, Homo sapiens
  misc_RNA (1)...(19): siRNA sense strand
ggugacuucuccagugaaa

SEQ ID NO: 680443 - RNA, 19 nt, Homo sapiens
  misc_RNA (1)...(19): siRNA sense strand
gaagggaagcugaguaacu

SEQ ID NO: 680444 - RNA, 19 nt, Homo sapiens
  misc_RNA (1)...(19): siRNA sense strand
cagaagggaagcugaguaa

SEQ ID NO: 680445 - RNA, 19 nt, Homo sapiens
  misc_RNA (1)...(19): siRNA sense strand
gaguccaggugcauaagaa

SEQ ID NO: 680446 - RNA, 19 nt, Homo sapiens
  misc_RNA (1)...(19): siRNA sense strand
uguccaagcucaccaagga

SEQ ID NO: 680447 - RNA, 19 nt, Homo sapiens
  misc_RNA (1)...(19): siRNA sense strand
caaucagagucuucuuuga

SEQ ID NO: 680448 - RNA, 19 nt, Homo sapiens
  misc_RNA (1)...(19): siRNA sense strand
gaaaggcucagcaggagau

SEQ ID NO: 680449 - RNA, 19 nt, Homo sapiens
  misc_RNA (1)...(19): siRNA sense strand
gagacgcugugccaaacaa

SEQ ID NO: 680450 - RNA, 19 nt, Homo sapiens
  misc_RNA (1)...(19): siRNA sense strand
gcacauugcagaucugucu

SEQ ID NO: 680451 - RNA, 19 nt, Homo sapiens
  misc_RNA (1)...(19): siRNA sense strand
gcaaagauggcaacaugca

SEQ ID NO: 680452 - RNA, 19 nt, Homo sapiens
  misc_RNA (1)...(19): siRNA sense strand
gagaugauaaggacuggaa

SEQ ID NO: 680453 - RNA, 19 nt, Homo sapiens
  misc_RNA (1)...(19): siRNA sense strand
cagaaguggugcacaguca

SEQ ID NO: 680454 - RNA, 19 nt, Homo sapiens
  misc_RNA (1)...(19): siRNA sense strand
ccaagagccuccuuaccau

SEQ ID NO: 680455 - RNA, 19 nt, Homo sapiens
  misc_RNA (1)...(19): siRNA sense strand
gcuggaagauaaugagaag

SEQ ID NO: 680456 - RNA, 19 nt, Homo sapiens
  misc_RNA (1)...(19): siRNA sense strand
gugaaaggcgccucauuug

SEQ ID NO: 680457 - RNA, 19 nt, Homo sapiens
  misc_RNA (1)...(19): siRNA sense strand
gaagggcguaugccgaauu

SEQ ID NO: 680458 - RNA, 19 nt, Homo sapiens
  misc_RNA (1)...(19): siRNA sense strand
cagauaacccagcacauug

SEQ ID NO: 680459 - RNA, 19 nt, Homo sapiens
  misc_RNA (1)...(19): siRNA sense strand
aaagucuucuccagugaaa

SEQ ID NO: 680460 - RNA, 19 nt, Homo sapiens
  misc_RNA (1)...(19): siRNA sense strand
ucaacaagaucuacuaucc

SEQ ID NO: 680461 - RNA, 19 nt, Homo sapiens
  misc_RNA (1)...(19): siRNA sense strand
caggugacuucuccaguga

SEQ ID NO: 680462 - RNA, 19 nt, Homo sapiens
  misc_RNA (1)...(19): siRNA sense strand
gaaaucugccacuaaccuu

SEQ ID NO: 680463 - RNA, 19 nt, Homo sapiens
  misc_RNA (1)...(19): siRNA sense strand
gauguguaccuaacaguga

SEQ ID NO: 680464 - RNA, 19 nt, Homo sapiens
  misc_RNA (1)...(19): siRNA sense strand
aaaggcgccucauuuguca

SEQ ID NO: 680465 - RNA, 19 nt, Homo sapiens
  misc_RNA (1)...(19): siRNA sense strand
agaaugaacuagacauggu

SEQ ID NO: 680466 - RNA, 19 nt, Homo sapiens
  misc_RNA (1)...(19): siRNA sense strand
gcagaaugaacuagacaug

SEQ ID NO: 680467 - RNA, 19 nt, Homo sapiens
  misc_RNA (1)...(19): siRNA sense strand
gaaauuccaaaccggauca

SEQ ID NO: 680468 - RNA, 19 nt, Homo sapiens
  misc_RNA (1)...(19): siRNA sense strand
gcaugaucuuggauucuga

SEQ ID NO: 680469 - RNA, 19 nt, Homo sapiens
  misc_RNA (1)...(19): siRNA sense strand
ggagaccacuucagcuacu

SEQ ID NO: 680470 - RNA, 19 nt, Homo sapiens
  misc_RNA (1)...(19): siRNA sense strand
caaggaggaugagcagcaa

SEQ ID NO: 680471 - RNA, 19 nt, Homo sapiens
  misc_RNA (1)...(19): siRNA sense strand
caaagaagaaagcuguugu

SEQ ID NO: 680472 - RNA, 19 nt, Homo sapiens
  misc_RNA (1)...(19): siRNA sense strand
acaaagucuucuccaguga

SEQ ID NO: 680473 - RNA, 19 nt, Homo sapiens
  misc_RNA (1)...(19): siRNA sense strand
gccaagagccuccuuacca

SEQ ID NO: 680474 - RNA, 19 nt, Homo sapiens
  misc_RNA (1)...(19): siRNA sense strand
cuacgggaguuucgaaagu

SEQ ID NO: 680475 - RNA, 19 nt, Homo sapiens
  misc_RNA (1)...(19): siRNA sense strand
ccacggugauguguaccua

SEQ ID NO: 680476 - RNA, 19 nt, Homo sapiens
  misc_RNA (1)...(19): siRNA sense strand
cugcaaagccuuccgcuau

SEQ ID NO: 680477 - RNA, 19 nt, Homo sapiens
  misc_RNA (1)...(19): siRNA sense strand
cuacuauccugacuucauc

SEQ ID NO: 680478 - RNA, 19 nt, Homo sapiens
  misc_RNA (1)...(19): siRNA sense strand
acagauaacccagcacauu

SEQ ID NO: 680479 - RNA, 19 nt, Homo sapiens
  misc_RNA (1)...(19): siRNA sense strand
caacaagacaggcaaacca

SEQ ID NO: 680480 - RNA, 19 nt, Homo sapiens
  misc_RNA (1)...(19): siRNA sense strand
aguaugcaaugaagaaaug

SEQ ID NO: 680481 - RNA, 19 nt, Homo sapiens
  misc_RNA (1)...(19): siRNA sense strand
cauuaagacuguuuacaac

SEQ ID NO: 680482 - RNA, 19 nt, Homo sapiens
  misc_RNA (1)...(19): siRNA sense strand
ggguagcagugaagagaau

SEQ ID NO: 680483 - RNA, 19 nt, Homo sapiens
  misc_RNA (1)...(19): siRNA sense strand
gcacccgaauccgagauga

SEQ ID NO: 680484 - RNA, 19 nt, Homo sapiens
  misc_RNA (1)...(19): siRNA sense strand
aaaugaagcgagucacaaa

SEQ ID NO: 680485 - RNA, 19 nt, Homo sapiens
  misc_RNA (1)...(19): siRNA sense strand
cgcaggagguggagaagga

SEQ ID NO: 680486 - RNA, 19 nt, Homo sapiens
  misc_RNA (1)...(19): siRNA sense strand
agugaaaggcgccucauuu

SEQ ID NO: 680487 - RNA, 19 nt, Homo sapiens
  misc_RNA (1)...(19): siRNA sense strand
augaagaaaugucccaaug

SEQ ID NO: 680488 - RNA, 19 nt, Homo sapiens
  misc_RNA (1)...(19): siRNA sense strand
uaaugagaaggaacagaua

SEQ ID NO: 680489 - RNA, 19 nt, Homo sapiens
  misc_RNA (1)...(19): siRNA sense strand
aagaugaacucaggugcaa

SEQ ID NO: 680490 - RNA, 19 nt, Homo sapiens
  misc_RNA (1)...(19): siRNA sense strand
gaagcuggccacaaagucu

SEQ ID NO: 680491 - RNA, 19 nt, Homo sapiens
  misc_RNA (1)...(19): siRNA sense strand
gaagagcuggaagauaaug

SEQ ID NO: 680492 - RNA, 19 nt, Homo sapiens
  misc_RNA (1)...(19): siRNA sense strand
ccaaggagaaggcagacuu

SEQ ID NO: 680493 - RNA, 19 nt, Homo sapiens
  misc_RNA (1)...(19): siRNA sense strand
gaugauaaggacuggaaau

SEQ ID NO: 680494 - RNA, 19 nt, Homo sapiens
  misc_RNA (1)...(19): siRNA sense strand
acgggaguuucgaaaguua

SEQ ID NO: 680495 - RNA, 19 nt, Homo sapiens
  misc_RNA (1)...(19): siRNA sense strand
gagaagcuggccacaaagu

SEQ ID NO: 680496 - RNA, 19 nt, Homo sapiens
  misc_RNA (1)...(19): siRNA sense strand
ugaaaggcgccucauuugu

SEQ ID NO: 680497 - RNA, 19 nt, Homo sapiens
  misc_RNA (1)...(19): siRNA sense strand
ggaaaucugccacuaaccu

SEQ ID NO: 680498 - RNA, 19 nt, Homo sapiens
  misc_RNA (1)...(19): siRNA sense strand
cccaaucccuucucagagu

SEQ ID NO: 680499 - RNA, 19 nt, Homo sapiens
  misc_RNA (1)...(19): siRNA sense strand
gcaggaggccaugaugaug

SEQ ID NO: 680500 - RNA, 19 nt, Homo sapiens
  misc_RNA (1)...(19): siRNA sense strand
gagcgaguccaggugcaua

SEQ ID NO: 680501 - RNA, 19 nt, Homo sapiens
  misc_RNA (1)...(19): siRNA sense strand
ggaagagcuggaagauaau

SEQ ID NO: 680502 - RNA, 19 nt, Homo sapiens
  misc_RNA (1)...(19): siRNA sense strand
caaagucuucuccagugaa

SEQ ID NO: 680503 - RNA, 19 nt, Homo sapiens
  misc_RNA (1)...(19): siRNA sense strand
gacuggaaaucugccacua

SEQ ID NO: 680504 - RNA, 19 nt, Homo sapiens
  misc_RNA (1)...(19): siRNA sense strand
ggucaacaagaucuacuau

SEQ ID NO: 680505 - RNA, 19 nt, Homo sapiens
  misc_RNA (1)...(19): siRNA sense strand
ggacuuggcugacaugaua

SEQ ID NO: 680506 - RNA, 19 nt, Homo sapiens
  misc_RNA (1)...(19): siRNA sense strand
gggaagagcuggaagauaa

SEQ ID NO: 680507 - RNA, 19 nt, Homo sapiens
  misc_RNA (1)...(19): siRNA sense strand
gggagaagcuggccacaaa

SEQ ID NO: 680508 - RNA, 19 nt, Homo sapiens
  misc_RNA (1)...(19): siRNA sense strand
gaucuuggauucugaagug

SEQ ID NO: 680509 - RNA, 19 nt, Homo sapiens
  misc_RNA (1)...(19): siRNA sense strand
cagcaaagauggcaacaug

SEQ ID NO: 680510 - RNA, 19 nt, Homo sapiens
  misc_RNA (1)...(19): siRNA sense strand
gcuaaugucugccuguuug

SEQ ID NO: 680511 - RNA, 19 nt, Homo sapiens
  misc_RNA (1)...(19): siRNA sense strand
uugcagaucugucuucuaa

SEQ ID NO: 680512 - RNA, 19 nt, Homo sapiens
  misc_RNA (1)...(19): siRNA sense strand
gauaaggacuggaaaucug

SEQ ID NO: 680513 - RNA, 19 nt, Homo sapiens
  misc_RNA (1)...(19): siRNA sense strand
gaaagcagccuuccaggau

SEQ ID NO: 680514 - RNA, 19 nt, Homo sapiens
  misc_RNA (1)...(19): siRNA sense strand
gcaaagccuuccgcuauga

SEQ ID NO: 680515 - RNA, 19 nt, Homo sapiens
  misc_RNA (1)...(19): siRNA sense strand
ccaaugaccuuaaaugcau

SEQ ID NO: 680516 - RNA, 19 nt, Homo sapiens
  misc_RNA (1)...(19): siRNA sense strand
gaccuuaaaugcaucauca

SEQ ID NO: 680517 - RNA, 19 nt, Homo sapiens
  misc_RNA (1)...(19): siRNA sense strand
ccaauggcauguucucuga

SEQ ID NO: 680518 - RNA, 19 nt, Homo sapiens
  misc_RNA (1)...(19): siRNA sense strand
gaucuacuauccugacuuc

SEQ ID NO: 680519 - RNA, 19 nt, Homo sapiens
  misc_RNA (1)...(19): siRNA sense strand
gaaaggcgccucauuuguc

SEQ ID NO: 680520 - RNA, 19 nt, Homo sapiens
  misc_RNA (1)...(19): siRNA sense strand
gagcaaaggcggcaugaug

SEQ ID NO: 680521 - RNA, 19 nt, Homo sapiens
  misc_RNA (1)...(19): siRNA sense strand
gacauugccuccaggugua

SEQ ID NO: 680522 - RNA, 19 nt, Homo sapiens
  misc_RNA (1)...(19): siRNA sense strand
guuuacaacuugaacgaua

SEQ ID NO: 680523 - RNA, 19 nt, Homo sapiens
  misc_RNA (1)...(19): siRNA sense strand
gcagaucugucuucuaagg

SEQ ID NO: 680524 - RNA, 19 nt, Homo sapiens
  misc_RNA (1)...(19): siRNA sense strand
gcggaaagcugcugaugag

SEQ ID NO: 680525 - RNA, 19 nt, Homo sapiens
  misc_RNA (1)...(19): siRNA sense strand
gcaaguccguugaguaugc

SEQ ID NO: 680526 - RNA, 19 nt, Homo sapiens
  misc_RNA (1)...(19): siRNA sense strand
gcagguacaccaaagaaga

SEQ ID NO: 680527 - RNA, 19 nt, Homo sapiens
  misc_RNA (1)...(19): siRNA sense strand
uuaaaugcaucaucagguu

SEQ ID NO: 680528 - RNA, 19 nt, Homo sapiens
  misc_RNA (1)...(19): siRNA sense strand
gcauaaggacugucugcua

SEQ ID NO: 680529 - RNA, 19 nt, Homo sapiens
  misc_RNA (1)...(19): siRNA sense strand
gaaaugaagcgagucacaa

SEQ ID NO: 680530 - RNA, 19 nt, Homo sapiens
  misc_RNA (1)...(19): siRNA sense strand
gggcugaauucuccaaauc

SEQ ID NO: 680531 - RNA, 19 nt, Homo sapiens
  misc_RNA (1)...(19): siRNA sense strand
ggaagauaaugagaaggaa

SEQ ID NO: 680532 - RNA, 19 nt, Homo sapiens
  misc_RNA (1)...(19): siRNA sense strand
gaacuagacauggugaaga

SEQ ID NO: 680533 - RNA, 19 nt, Homo sapiens
  misc_RNA (1)...(19): siRNA sense strand
ucagguugaucaaacauga

SEQ ID NO: 680534 - RNA, 19 nt, Homo sapiens
  misc_RNA (1)...(19): siRNA sense strand
uaagacuguuuacaacuug

SEQ ID NO: 680535 - RNA, 19 nt, Homo sapiens
  misc_RNA (1)...(19): siRNA sense strand
gcaaaguggugcccaaucc

SEQ ID NO: 680536 - RNA, 19 nt, Homo sapiens
  misc_RNA (1)...(19): siRNA sense strand
gacaaucagagucuucuuu

SEQ ID NO: 680537 - RNA, 19 nt, Homo sapiens
  misc_RNA (1)...(19): siRNA sense strand
gaugagacgcugugccaaa

SEQ ID NO: 680538 - RNA, 19 nt, Homo sapiens
  misc_RNA (1)...(19): siRNA sense strand
gcagaagggaagcugagua

SEQ ID NO: 680539 - RNA, 19 nt, Homo sapiens
  misc_RNA (1)...(19): siRNA sense strand
guccaggccucgcugauga

SEQ ID NO: 680540 - RNA, 19 nt, Homo sapiens
  misc_RNA (1)...(19): siRNA sense strand
gaacucaggugcaaaacau

SEQ ID NO: 680541 - RNA, 19 nt, Homo sapiens
  misc_RNA (1)...(19): siRNA sense strand
guacagccaaugaccuuaa

SEQ ID NO: 680542 - RNA, 19 nt, Homo sapiens
  misc_RNA (1)...(19): siRNA sense strand
ggugacuucuccagugaaa

SEQ ID NO: 680543 - RNA, 19 nt, Homo sapiens
  misc_RNA (1)...(19): siRNA sense strand
gaagggaagcugaguaacu

SEQ ID NO: 680544 - RNA, 19 nt, Homo sapiens
  misc_RNA (1)...(19): siRNA sense strand
cagaagggaagcugaguaa

SEQ ID NO: 680545 - RNA, 19 nt, Homo sapiens
  misc_RNA (1)...(19): siRNA sense strand
gaguccaggugcauaagaa

SEQ ID NO: 680546 - RNA, 19 nt, Homo sapiens
  misc_RNA (1)...(19): siRNA sense strand
uguccaagcucaccaagga

SEQ ID NO: 680547 - RNA, 19 nt, Homo sapiens
  misc_RNA (1)...(19): siRNA sense strand
caaucagagucuucuuuga

SEQ ID NO: 680548 - RNA, 19 nt, Homo sapiens
  misc_RNA (1)...(19): siRNA sense strand
gaaaggcucagcaggagau

SEQ ID NO: 680549 - RNA, 19 nt, Homo sapiens
  misc_RNA (1)...(19): siRNA sense strand
gagacgcugugccaaacaa

SEQ ID NO: 680550 - RNA, 19 nt, Homo sapiens
  misc_RNA (1)...(19): siRNA sense strand
gcacauugcagaucugucu

SEQ ID NO: 680551 - RNA, 19 nt, Homo sapiens
  misc_RNA (1)...(19): siRNA sense strand
gcaaagauggcaacaugca

SEQ ID NO: 680552 - RNA, 19 nt, Homo sapiens
  misc_RNA (1)...(19): siRNA sense strand
gagaugauaaggacuggaa

SEQ ID NO: 680553 - RNA, 19 nt, Homo sapiens
  misc_RNA (1)...(19): siRNA sense strand
cagaaguggugcacaguca

SEQ ID NO: 680554 - RNA, 19 nt, Homo sapiens
  misc_RNA (1)...(19): siRNA sense strand
ccaagagccuccuuaccau

SEQ ID NO: 680555 - RNA, 19 nt, Homo sapiens
  misc_RNA (1)...(19): siRNA sense strand
gcuggaagauaaugagaag

SEQ ID NO: 680556 - RNA, 19 nt, Homo sapiens
  misc_RNA (1)...(19): siRNA sense strand
gugaaaggcgccucauuug

SEQ ID NO: 680557 - RNA, 19 nt, Homo sapiens
  misc_RNA (1)...(19): siRNA sense strand
gaagggcguaugccgaauu

SEQ ID NO: 680558 - RNA, 19 nt, Homo sapiens
  misc_RNA (1)...(19): siRNA sense strand
cagauaacccagcacauug

SEQ ID NO: 680559 - RNA, 19 nt, Homo sapiens
  misc_RNA (1)...(19): siRNA sense strand
aaagucuucuccagugaaa

SEQ ID NO: 680560 - RNA, 19 nt, Homo sapiens
  misc_RNA (1)...(19): siRNA sense strand
ucaacaagaucuacuaucc

SEQ ID NO: 680561 - RNA, 19 nt, Homo sapiens
  misc_RNA (1)...(19): siRNA sense strand
caggugacuucuccaguga

SEQ ID NO: 680562 - RNA, 19 nt, Homo sapiens
  misc_RNA (1)...(19): siRNA sense strand
gaaaucugccacuaaccuu

SEQ ID NO: 680563 - RNA, 19 nt, Homo sapiens
  misc_RNA (1)...(19): siRNA sense strand
gauguguaccuaacaguga

SEQ ID NO: 680564 - RNA, 19 nt, Homo sapiens
  misc_RNA (1)...(19): siRNA sense strand
aaaggcgccucauuuguca

SEQ ID NO: 680565 - RNA, 19 nt, Homo sapiens
  misc_RNA (1)...(19): siRNA sense strand
agaaugaacuagacauggu

SEQ ID NO: 680566 - RNA, 19 nt, Homo sapiens
  misc_RNA (1)...(19): siRNA sense strand
gcagaaugaacuagacaug

SEQ ID NO: 680567 - RNA, 19 nt, Homo sapiens
  misc_RNA (1)...(19): siRNA sense strand
gaaauuccaaaccggauca

SEQ ID NO: 680568 - RNA, 19 nt, Homo sapiens
  misc_RNA (1)...(19): siRNA sense strand
gcaugaucuuggauucuga

SEQ ID NO: 680569 - RNA, 19 nt, Homo sapiens
  misc_RNA (1)...(19): siRNA sense strand
ggagaccacuucagcuacu

SEQ ID NO: 680570 - RNA, 19 nt, Homo sapiens
  misc_RNA (1)...(19): siRNA sense strand
caaggaggaugagcagcaa

SEQ ID NO: 680571 - RNA, 19 nt, Homo sapiens
  misc_RNA (1)...(19): siRNA sense strand
caaagaagaaagcuguugu

SEQ ID NO: 680572 - RNA, 19 nt, Homo sapiens
  misc_RNA (1)...(19): siRNA sense strand
acaaagucuucuccaguga

SEQ ID NO: 680573 - RNA, 19 nt, Homo sapiens
  misc_RNA (1)...(19): siRNA sense strand
gccaagagccuccuuacca

SEQ ID NO: 680574 - RNA, 19 nt, Homo sapiens
  misc_RNA (1)...(19): siRNA sense strand
cuacgggaguuucgaaagu

SEQ ID NO: 680575 - RNA, 19 nt, Homo sapiens
  misc_RNA (1)...(19): siRNA sense strand
ccacggugauguguaccua

SEQ ID NO: 680576 - RNA, 19 nt, Homo sapiens
  misc_RNA (1)...(19): siRNA sense strand
cugcaaagccuuccgcuau

SEQ ID NO: 680577 - RNA, 19 nt, Homo sapiens
  misc_RNA (1)...(19): siRNA sense strand
cuacuauccugacuucauc

SEQ ID NO: 680578 - RNA, 19 nt, Homo sapiens
  misc_RNA (1)...(19): siRNA sense strand
acagauaacccagcacauu

SEQ ID NO: 680579 - RNA, 19 nt, Homo sapiens
  misc_RNA (1)...(19): siRNA sense strand
caacaagacaggcaaacca

SEQ ID NO: 680580 - RNA, 19 nt, Homo sapiens
  misc_RNA (1)...(19): siRNA sense strand
aguaugcaaugaagaaaug

SEQ ID NO: 680581 - RNA, 19 nt, Homo sapiens
  misc_RNA (1)...(19): siRNA sense strand
cauuaagacuguuuacaac

SEQ ID NO: 680582 - RNA, 19 nt, Homo sapiens
  misc_RNA (1)...(19): siRNA sense strand
ggguagcagugaagagaau

SEQ ID NO: 680583 - RNA, 19 nt, Homo sapiens
  misc_RNA (1)...(19): siRNA sense strand
gcacccgaauccgagauga

SEQ ID NO: 680584 - RNA, 19 nt, Homo sapiens
  misc_RNA (1)...(19): siRNA sense strand
aaaugaagcgagucacaaa

SEQ ID NO: 680585 - RNA, 19 nt, Homo sapiens
  misc_RNA (1)...(19): siRNA sense strand
cgcaggagguggagaagga

SEQ ID NO: 680586 - RNA, 19 nt, Homo sapiens
  misc_RNA (1)...(19): siRNA sense strand
agugaaaggcgccucauuu

SEQ ID NO: 680587 - RNA, 19 nt, Homo sapiens
  misc_RNA (1)...(19): siRNA sense strand
augaagaaaugucccaaug

SEQ ID NO: 680588 - RNA, 19 nt, Homo sapiens
  misc_RNA (1)...(19): siRNA sense strand
uaaugagaaggaacagaua

SEQ ID NO: 680589 - RNA, 19 nt, Homo sapiens
  misc_RNA (1)...(19): siRNA sense strand
aagaugaacucaggugcaa

SEQ ID NO: 680590 - RNA, 19 nt, Homo sapiens
  misc_RNA (1)...(19): siRNA sense strand
gaagcuggccacaaagucu

SEQ ID NO: 680591 - RNA, 19 nt, Homo sapiens
  misc_RNA (1)...(19): siRNA sense strand
gaagagcuggaagauaaug

SEQ ID NO: 680592 - RNA, 19 nt, Homo sapiens
  misc_RNA (1)...(19): siRNA sense strand
ccaaggagaaggcagacuu

SEQ ID NO: 680593 - RNA, 19 nt, Homo sapiens
  misc_RNA (1)...(19): siRNA sense strand
gaugauaaggacuggaaau

SEQ ID NO: 680594 - RNA, 19 nt, Homo sapiens
  misc_RNA (1)...(19): siRNA sense strand
acgggaguuucgaaaguua

SEQ ID NO: 680595 - RNA, 19 nt, Homo sapiens
  misc_RNA (1)...(19): siRNA sense strand
gagaagcuggccacaaagu

SEQ ID NO: 680596 - RNA, 19 nt, Homo sapiens
  misc_RNA (1)...(19): siRNA sense strand
ugaaaggcgccucauuugu

SEQ ID NO: 680597 - RNA, 19 nt, Homo sapiens
  misc_RNA (1)...(19): siRNA sense strand
ggaaaucugccacuaaccu

SEQ ID NO: 680598 - RNA, 19 nt, Homo sapiens
  misc_RNA (1)...(19): siRNA sense strand
cccaaucccuucucagagu

SEQ ID NO: 680599 - RNA, 19 nt, Homo sapiens
  misc_RNA (1)...(19): siRNA sense strand
gcaggaggccaugaugaug

SEQ ID NO: 680600 - RNA, 19 nt, Homo sapiens
  misc_RNA (1)...(19): siRNA sense strand
gagcgaguccaggugcaua

SEQ ID NO: 680601 - RNA, 19 nt, Homo sapiens
  misc_RNA (1)...(19): siRNA sense strand
ggaagagcuggaagauaau

SEQ ID NO: 680602 - RNA, 19 nt, Homo sapiens
  misc_RNA (1)...(19): siRNA sense strand
caaagucuucuccagugaa

SEQ ID NO: 680603 - RNA, 19 nt, Homo sapiens
  misc_RNA (1)...(19): siRNA sense strand
gacuggaaaucugccacua

SEQ ID NO: 680604 - RNA, 19 nt, Homo sapiens
  misc_RNA (1)...(19): siRNA sense strand
ggucaacaagaucuacuau

SEQ ID NO: 680605 - RNA, 19 nt, Homo sapiens
  misc_RNA (1)...(19): siRNA sense strand
acaccuauaugcgacacaa

SEQ ID NO: 680606 - RNA, 19 nt, Homo sapiens
  misc_RNA (1)...(19): siRNA sense strand
gcaaaacugcugugaagag

SEQ ID NO: 680607 - RNA, 19 nt, Homo sapiens
  misc_RNA (1)...(19): siRNA sense strand
ggaaauaguucaguucuuu

SEQ ID NO: 680608 - RNA, 19 nt, Homo sapiens
  misc_RNA (1)...(19): siRNA sense strand
gaacucuucuugaauucua

SEQ ID NO: 680609 - RNA, 19 nt, Homo sapiens
  misc_RNA (1)...(19): siRNA sense strand
gaagagauggaauggauaa

SEQ ID NO: 680610 - RNA, 19 nt, Homo sapiens
  misc_RNA (1)...(19): siRNA sense strand
gagauggaauggauaauca

SEQ ID NO: 680611 - RNA, 19 nt, Homo sapiens
  misc_RNA (1)...(19): siRNA sense strand
agaagcagauguagaguuu

SEQ ID NO: 680612 - RNA, 19 nt, Homo sapiens
  misc_RNA (1)...(19): siRNA sense strand
gaaacacaaggaaagaaua

SEQ ID NO: 680613 - RNA, 19 nt, Homo sapiens
  misc_RNA (1)...(19): siRNA sense strand
gcacagguauauugagauc

SEQ ID NO: 680614 - RNA, 19 nt, Homo sapiens
  misc_RNA (1)...(19): siRNA sense strand
ugacauugcuaauuucuuc

SEQ ID NO: 680615 - RNA, 19 nt, Homo sapiens
  misc_RNA (1)...(19): siRNA sense strand
caacaucgauauauugaac

SEQ ID NO: 680616 - RNA, 19 nt, Homo sapiens
  misc_RNA (1)...(19): siRNA sense strand
gaaacauaaugguccaaau

SEQ ID NO: 680617 - RNA, 19 nt, Homo sapiens
  misc_RNA (1)...(19): siRNA sense strand
gggcacagguauauugaga

SEQ ID NO: 680618 - RNA, 19 nt, Homo sapiens
  misc_RNA (1)...(19): siRNA sense strand
uagcaggagugaaaucaaa

SEQ ID NO: 680619 - RNA, 19 nt, Homo sapiens
  misc_RNA (1)...(19): siRNA sense strand
gaauagggcacagguauau

SEQ ID NO: 680620 - RNA, 19 nt, Homo sapiens
  misc_RNA (1)...(19): siRNA sense strand
cagcaaagaggaaauaguu

SEQ ID NO: 680621 - RNA, 19 nt, Homo sapiens
  misc_RNA (1)...(19): siRNA sense strand
gcaaagaggaaauaguuca

SEQ ID NO: 680622 - RNA, 19 nt, Homo sapiens
  misc_RNA (1)...(19): siRNA sense strand
caaaggagauagcagaaaa

SEQ ID NO: 680623 - RNA, 19 nt, Homo sapiens
  misc_RNA (1)...(19): siRNA sense strand
agaaguagcaggagugaaa

SEQ ID NO: 680624 - RNA, 19 nt, Homo sapiens
  misc_RNA (1)...(19): siRNA sense strand
caauuacaguggaggauau

SEQ ID NO: 680625 - RNA, 19 nt, Homo sapiens
  misc_RNA (1)...(19): siRNA sense strand
cggaagagauggaauggau

SEQ ID NO: 680626 - RNA, 19 nt, Homo sapiens
  misc_RNA (1)...(19): siRNA sense strand
gcugccaugucuaaagaua

SEQ ID NO: 680627 - RNA, 19 nt, Homo sapiens
  misc_RNA (1)...(19): siRNA sense strand
caugggagguucuggaaug

SEQ ID NO: 680628 - RNA, 19 nt, Homo sapiens
  misc_RNA (1)...(19): siRNA sense strand
uaacauugacgauggacua

SEQ ID NO: 680629 - RNA, 19 nt, Homo sapiens
  misc_RNA (1)...(19): siRNA sense strand
ggaaacacaaggaaagaau

SEQ ID NO: 680630 - RNA, 19 nt, Homo sapiens
  misc_RNA (1)...(19): siRNA sense strand
caugcaacaucgauauauu

SEQ ID NO: 680631 - RNA, 19 nt, Homo sapiens
  misc_RNA (1)...(19): siRNA sense strand
cgaccgggaccauaugaua

SEQ ID NO: 680632 - RNA, 19 nt, Homo sapiens
  misc_RNA (1)...(19): siRNA sense strand
gggaggcuauggaucaguu

SEQ ID NO: 680633 - RNA, 19 nt, Homo sapiens
  misc_RNA (1)...(19): siRNA sense strand
ggauaacauugacgaugga

SEQ ID NO: 680634 - RNA, 19 nt, Homo sapiens
  misc_RNA (1)...(19): siRNA sense strand
ggaagagauggaauggaua

SEQ ID NO: 680635 - RNA, 19 nt, Homo sapiens
  misc_RNA (1)...(19): siRNA sense strand
uaacaugcaacaucgauau

SEQ ID NO: 680636 - RNA, 19 nt, Homo sapiens
  misc_RNA (1)...(19): siRNA sense strand
uagcugccaugucuaaaga

SEQ ID NO: 680637 - RNA, 19 nt, Homo sapiens
  misc_RNA (1)...(19): siRNA sense strand
ccaaaugacgcuagugaug

SEQ ID NO: 680638 - RNA, 19 nt, Homo sapiens
  misc_RNA (1)...(19): siRNA sense strand
aaacauaaugguccaaaug

SEQ ID NO: 680639 - RNA, 19 nt, Homo sapiens
  misc_RNA (1)...(19): siRNA sense strand
ugacuaugguggcuauaau

SEQ ID NO: 680640 - RNA, 19 nt, Homo sapiens
  misc_RNA (1)...(19): siRNA sense strand
acagguauauugagaucuu

SEQ ID NO: 680641 - RNA, 19 nt, Homo sapiens
  misc_RNA (1)...(19): siRNA sense strand
gaugacagaaugagagaug

SEQ ID NO: 680642 - RNA, 19 nt, Homo sapiens
  misc_RNA (1)...(19): siRNA sense strand
ugccaugucuaaagauaaa

SEQ ID NO: 680643 - RNA, 19 nt, Homo sapiens
  misc_RNA (1)...(19): siRNA sense strand
gcagauguagaguuuguga

SEQ ID NO: 680644 - RNA, 19 nt, Homo sapiens
  misc_RNA (1)...(19): siRNA sense strand
gagaagcagauguagaguu

SEQ ID NO: 680645 - RNA, 19 nt, Homo sapiens
  misc_RNA (1)...(19): siRNA sense strand
gacuaugguggcuauaaua

SEQ ID NO: 680646 - RNA, 19 nt, Homo sapiens
  misc_RNA (1)...(19): siRNA sense strand
aagcagauguagaguuugu

SEQ ID NO: 680647 - RNA, 19 nt, Homo sapiens
  misc_RNA (1)...(19): siRNA sense strand
ucaugguggucauuucgua

SEQ ID NO: 680648 - RNA, 19 nt, Homo sapiens
  misc_RNA (1)...(19): siRNA sense strand
aagaggaaauaguucaguu

SEQ ID NO: 680649 - RNA, 19 nt, Homo sapiens
  misc_RNA (1)...(19): siRNA sense strand
gguggucauuucguacaua

SEQ ID NO: 680650 - RNA, 19 nt, Homo sapiens
  misc_RNA (1)...(19): siRNA sense strand
gggaggacauggcuauggu

SEQ ID NO: 680651 - RNA, 19 nt, Homo sapiens
  misc_RNA (1)...(19): siRNA sense strand
cacaggagaagcagaugua

SEQ ID NO: 680652 - RNA, 19 nt, Homo sapiens
  misc_RNA (1)...(19): siRNA sense strand
ucagggaggcuauggauca

SEQ ID NO: 680653 - RNA, 19 nt, Homo sapiens
  misc_RNA (1)...(19): siRNA sense strand
agaauagggcacagguaua

SEQ ID NO: 680654 - RNA, 19 nt, Homo sapiens
  misc_RNA (1)...(19): siRNA sense strand
gggaggccuucgugcaguu

SEQ ID NO: 680655 - RNA, 19 nt, Homo sapiens
  misc_RNA (1)...(19): siRNA sense strand
aaacacaaggaaagaauag

SEQ ID NO: 680656 - RNA, 19 nt, Homo sapiens
  misc_RNA (1)...(19): siRNA sense strand
uggaucaguuggaagaaug

SEQ ID NO: 680657 - RNA, 19 nt, Homo sapiens
  misc_RNA (1)...(19): siRNA sense strand
guggucauuucguacauau

SEQ ID NO: 680658 - RNA, 19 nt, Homo sapiens
  misc_RNA (1)...(19): siRNA sense strand
aagaauagggcacagguau

SEQ ID NO: 680659 - RNA, 19 nt, Homo sapiens
  misc_RNA (1)...(19): siRNA sense strand
ggauaugguacuccugaug

SEQ ID NO: 680660 - RNA, 19 nt, Homo sapiens
  misc_RNA (1)...(19): siRNA sense strand
gaugggacaguacgacuuc

SEQ ID NO: 680661 - RNA, 19 nt, Homo sapiens
  misc_RNA (1)...(19): siRNA sense strand
ugaugacuaugguggcuau

SEQ ID NO: 680662 - RNA, 19 nt, Homo sapiens
  misc_RNA (1)...(19): siRNA sense strand
caguagcugccaugucuaa

SEQ ID NO: 680663 - RNA, 19 nt, Homo sapiens
  misc_RNA (1)...(19): siRNA sense strand
cuaaauccaauacgaguuc

SEQ ID NO: 680664 - RNA, 19 nt, Homo sapiens
  misc_RNA (1)...(19): siRNA sense strand
uggcuuugaugacagaaug

SEQ ID NO: 680665 - RNA, 19 nt, Homo sapiens
  misc_RNA (1)...(19): siRNA sense strand
gaggaaauaguucaguucu

SEQ ID NO: 680666 - RNA, 19 nt, Homo sapiens
  misc_RNA (1)...(19): siRNA sense strand
gggaaacacaaggaaagaa

SEQ ID NO: 680667 - RNA, 19 nt, Homo sapiens
  misc_RNA (1)...(19): siRNA sense strand
gcaguggagguuacuaugg

SEQ ID NO: 680668 - RNA, 19 nt, Homo sapiens
  misc_RNA (1)...(19): siRNA sense strand
guccaaaugacgcuaguga

SEQ ID NO: 680669 - RNA, 19 nt, Homo sapiens
  misc_RNA (1)...(19): siRNA sense strand
gcaacaucgauauauugaa

SEQ ID NO: 680670 - RNA, 19 nt, Homo sapiens
  misc_RNA (1)...(19): siRNA sense strand
gagcuggugaugcaaguuc

SEQ ID NO: 680671 - RNA, 19 nt, Homo sapiens
  misc_RNA (1)...(19): siRNA sense strand
cagaaugagagauggaaga

SEQ ID NO: 680672 - RNA, 19 nt, Homo sapiens
  misc_RNA (1)...(19): siRNA sense strand
aacauaaugguccaaauga

SEQ ID NO: 680673 - RNA, 19 nt, Homo sapiens
  misc_RNA (1)...(19): siRNA sense strand
acaauuacaguggaggaua

SEQ ID NO: 680674 - RNA, 19 nt, Homo sapiens
  misc_RNA (1)...(19): siRNA sense strand
ggcuauggaucaguuggaa

SEQ ID NO: 680675 - RNA, 19 nt, Homo sapiens
  misc_RNA (1)...(19): siRNA sense strand
gaaguagcaggagugaaau

SEQ ID NO: 680676 - RNA, 19 nt, Homo sapiens
  misc_RNA (1)...(19): siRNA sense strand
accauaugauagaccaaua

SEQ ID NO: 680677 - RNA, 19 nt, Homo sapiens
  misc_RNA (1)...(19): siRNA sense strand
acaugaagaugcaguagcu

SEQ ID NO: 680678 - RNA, 19 nt, Homo sapiens
  misc_RNA (1)...(19): siRNA sense strand
ucaaaggagauagcagaaa

SEQ ID NO: 680679 - RNA, 19 nt, Homo sapiens
  misc_RNA (1)...(19): siRNA sense strand
gaccgggaccauaugauag

SEQ ID NO: 680680 - RNA, 19 nt, Homo sapiens
  misc_RNA (1)...(19): siRNA sense strand
gcagcaaagaggaaauagu

SEQ ID NO: 680681 - RNA, 19 nt, Homo sapiens
  misc_RNA (1)...(19): siRNA sense strand
cuacggaagagauggaaug

SEQ ID NO: 680682 - RNA, 19 nt, Homo sapiens
  misc_RNA (1)...(19): siRNA sense strand
aauuucuucucaccacuaa

SEQ ID NO: 680683 - RNA, 19 nt, Homo sapiens
  misc_RNA (1)...(19): siRNA sense strand
acuaugguggcuauaauaa

SEQ ID NO: 680684 - RNA, 19 nt, Homo sapiens
  misc_RNA (1)...(19): siRNA sense strand
aaagaauagggcacaggua

SEQ ID NO: 680685 - RNA, 19 nt, Homo sapiens
  misc_RNA (1)...(19): siRNA sense strand
aauccaauacgaguucaua

SEQ ID NO: 680686 - RNA, 19 nt, Homo sapiens
  misc_RNA (1)...(19): siRNA sense strand
ucucaccacuaaauccaau

SEQ ID NO: 680687 - RNA, 19 nt, Homo sapiens
  misc_RNA (1)...(19): siRNA sense strand
ugauggcuuugaugacaga

SEQ ID NO: 680688 - RNA, 19 nt, Homo sapiens
  misc_RNA (1)...(19): siRNA sense strand
ggugaugcaaguucagguu

SEQ ID NO: 680689 - RNA, 19 nt, Homo sapiens
  misc_RNA (1)...(19): siRNA sense strand
guggauggcgugggaugua

SEQ ID NO: 680690 - RNA, 19 nt, Homo sapiens
  misc_RNA (1)...(19): siRNA sense strand
uacaguggaggauauggua

SEQ ID NO: 680691 - RNA, 19 nt, Homo sapiens
  misc_RNA (1)...(19): siRNA sense strand
ugaaacauaaugguccaaa

SEQ ID NO: 680692 - RNA, 19 nt, Homo sapiens
  misc_RNA (1)...(19): siRNA sense strand
gugaugcaaguucagguuu

SEQ ID NO: 680693 - RNA, 19 nt, Homo sapiens
  misc_RNA (1)...(19): siRNA sense strand
uggaaaucgugccaaaugg

SEQ ID NO: 680694 - RNA, 19 nt, Homo sapiens
  misc_RNA (1)...(19): siRNA sense strand
cuauggaucaguuggaaga

SEQ ID NO: 680695 - RNA, 19 nt, Homo sapiens
  misc_RNA (1)...(19): siRNA sense strand
ggauuggguuaugaaacau

SEQ ID NO: 680696 - RNA, 19 nt, Homo sapiens
  misc_RNA (1)...(19): siRNA sense strand
gacacaugaagaugcagua

SEQ ID NO: 680697 - RNA, 19 nt, Homo sapiens
  misc_RNA (1)...(19): siRNA sense strand
uaaauccaauacgaguuca

SEQ ID NO: 680698 - RNA, 19 nt, Homo sapiens
  misc_RNA (1)...(19): siRNA sense strand
uaauuucuucucaccacua

SEQ ID NO: 680699 - RNA, 19 nt, Homo sapiens
  misc_RNA (1)...(19): siRNA sense strand
gaccauaugauagaccaau

SEQ ID NO: 680700 - RNA, 19 nt, Homo sapiens
  misc_RNA (1)...(19): siRNA sense strand
cuucguggacuaccauuug

SEQ ID NO: 680701 - RNA, 19 nt, Homo sapiens
  misc_RNA (1)...(19): siRNA sense strand
aaugggaggcuacggaaga

SEQ ID NO: 680702 - RNA, 19 nt, Homo sapiens
  misc_RNA (1)...(19): siRNA sense strand
auaguucaguucuuucaag

SEQ ID NO: 680703 - RNA, 19 nt, Homo sapiens
  misc_RNA (1)...(19): siRNA sense strand
auagggcacagguauauug

SEQ ID NO: 680704 - RNA, 19 nt, Homo sapiens
  misc_RNA (1)...(19): siRNA sense strand
gacagaaugagagauggaa

SEQ ID NO: 680705 - RNA, 19 nt, Homo sapiens
  misc_RNA (1)...(19): siRNA sense strand
gauagaccaauaggaggaa

SEQ ID NO: 680706 - RNA, 19 nt, Homo sapiens
  misc_RNA (1)...(19): siRNA sense strand
cugaugguuugggugguua

SEQ ID NO: 680707 - RNA, 19 nt, Homo sapiens
  misc_RNA (1)...(19): siRNA sense strand
ggaaauaguucaguucuuu

SEQ ID NO: 680708 - RNA, 19 nt, Homo sapiens
  misc_RNA (1)...(19): siRNA sense strand
gaacucuucuugaauucua

SEQ ID NO: 680709 - RNA, 19 nt, Homo sapiens
  misc_RNA (1)...(19): siRNA sense strand
gaagagauggaauggauaa

SEQ ID NO: 680710 - RNA, 19 nt, Homo sapiens
  misc_RNA (1)...(19): siRNA sense strand
gagauggaauggauaauca

SEQ ID NO: 680711 - RNA, 19 nt, Homo sapiens
  misc_RNA (1)...(19): siRNA sense strand
agaagcagauguagaguuu

SEQ ID NO: 680712 - RNA, 19 nt, Homo sapiens
  misc_RNA (1)...(19): siRNA sense strand
gaaacacaaggaaagaaua

SEQ ID NO: 680713 - RNA, 19 nt, Homo sapiens
  misc_RNA (1)...(19): siRNA sense strand
gcacagguauauugagauc

SEQ ID NO: 680714 - RNA, 19 nt, Homo sapiens
  misc_RNA (1)...(19): siRNA sense strand
ggaaugauggcuuugauga

SEQ ID NO: 680715 - RNA, 19 nt, Homo sapiens
  misc_RNA (1)...(19): siRNA sense strand
ugacauugcuaauuucuuc

SEQ ID NO: 680716 - RNA, 19 nt, Homo sapiens
  misc_RNA (1)...(19): siRNA sense strand
caacaucgauauauugaac

SEQ ID NO: 680717 - RNA, 19 nt, Homo sapiens
  misc_RNA (1)...(19): siRNA sense strand
gaaacauaaugguccaaau

SEQ ID NO: 680718 - RNA, 19 nt, Homo sapiens
  misc_RNA (1)...(19): siRNA sense strand
gggcacagguauauugaga

SEQ ID NO: 680719 - RNA, 19 nt, Homo sapiens
  misc_RNA (1)...(19): siRNA sense strand
uagcaggagugaaaucaaa

SEQ ID NO: 680720 - RNA, 19 nt, Homo sapiens
  misc_RNA (1)...(19): siRNA sense strand
gaauagggcacagguauau

SEQ ID NO: 680721 - RNA, 19 nt, Homo sapiens
  misc_RNA (1)...(19): siRNA sense strand
cagcaaagaggaaauaguu

SEQ ID NO: 680722 - RNA, 19 nt, Homo sapiens
  misc_RNA (1)...(19): siRNA sense strand
gcaaagaggaaauaguuca

SEQ ID NO: 680723 - RNA, 19 nt, Homo sapiens
  misc_RNA (1)...(19): siRNA sense strand
caaaggagauagcagaaaa

SEQ ID NO: 680724 - RNA, 19 nt, Homo sapiens
  misc_RNA (1)...(19): siRNA sense strand
agaaguagcaggagugaaa

SEQ ID NO: 680725 - RNA, 19 nt, Homo sapiens
  misc_RNA (1)...(19): siRNA sense strand
caauuacaguggaggauau

SEQ ID NO: 680726 - RNA, 19 nt, Homo sapiens
  misc_RNA (1)...(19): siRNA sense strand
cggaagagauggaauggau

SEQ ID NO: 680727 - RNA, 19 nt, Homo sapiens
  misc_RNA (1)...(19): siRNA sense strand
gcugccaugucuaaagaua

SEQ ID NO: 680728 - RNA, 19 nt, Homo sapiens
  misc_RNA (1)...(19): siRNA sense strand
caugggagguucuggaaug

SEQ ID NO: 680729 - RNA, 19 nt, Homo sapiens
  misc_RNA (1)...(19): siRNA sense strand
uaacauugacgauggacua

SEQ ID NO: 680730 - RNA, 19 nt, Homo sapiens
  misc_RNA (1)...(19): siRNA sense strand
ggaaacacaaggaaagaau

SEQ ID NO: 680731 - RNA, 19 nt, Homo sapiens
  misc_RNA (1)...(19): siRNA sense strand
caugcaacaucgauauauu

SEQ ID NO: 680732 - RNA, 19 nt, Homo sapiens
  misc_RNA (1)...(19): siRNA sense strand
cgaccgggaccauaugaua

SEQ ID NO: 680733 - RNA, 19 nt, Homo sapiens
  misc_RNA (1)...(19): siRNA sense strand
gggaggcuauggaucaguu

SEQ ID NO: 680734 - RNA, 19 nt, Homo sapiens
  misc_RNA (1)...(19): siRNA sense strand
ggauaacauugacgaugga

SEQ ID NO: 680735 - RNA, 19 nt, Homo sapiens
  misc_RNA (1)...(19): siRNA sense strand
ggaagagauggaauggaua

SEQ ID NO: 680736 - RNA, 19 nt, Homo sapiens
  misc_RNA (1)...(19): siRNA sense strand
uaacaugcaacaucgauau

SEQ ID NO: 680737 - RNA, 19 nt, Homo sapiens
  misc_RNA (1)...(19): siRNA sense strand
uagcugccaugucuaaaga

SEQ ID NO: 680738 - RNA, 19 nt, Homo sapiens
  misc_RNA (1)...(19): siRNA sense strand
ccaaaugacgcuagugaug

SEQ ID NO: 680739 - RNA, 19 nt, Homo sapiens
  misc_RNA (1)...(19): siRNA sense strand
aaacauaaugguccaaaug

SEQ ID NO: 680740 - RNA, 19 nt, Homo sapiens
  misc_RNA (1)...(19): siRNA sense strand
ugacuaugguggcuauaau

SEQ ID NO: 680741 - RNA, 19 nt, Homo sapiens
  misc_RNA (1)...(19): siRNA sense strand
acagguauauugagaucuu

SEQ ID NO: 680742 - RNA, 19 nt, Homo sapiens
  misc_RNA (1)...(19): siRNA sense strand
gaugacagaaugagagaug

SEQ ID NO: 680743 - RNA, 19 nt, Homo sapiens
  misc_RNA (1)...(19): siRNA sense strand
ugccaugucuaaagauaaa

SEQ ID NO: 680744 - RNA, 19 nt, Homo sapiens
  misc_RNA (1)...(19): siRNA sense strand
gcagauguagaguuuguga

SEQ ID NO: 680745 - RNA, 19 nt, Homo sapiens
  misc_RNA (1)...(19): siRNA sense strand
gagaagcagauguagaguu

SEQ ID NO: 680746 - RNA, 19 nt, Homo sapiens
  misc_RNA (1)...(19): siRNA sense strand
gacuaugguggcuauaaua

SEQ ID NO: 680747 - RNA, 19 nt, Homo sapiens
  misc_RNA (1)...(19): siRNA sense strand
aagcagauguagaguuugu

SEQ ID NO: 680748 - RNA, 19 nt, Homo sapiens
  misc_RNA (1)...(19): siRNA sense strand
aagaggaaauaguucaguu

SEQ ID NO: 680749 - RNA, 19 nt, Homo sapiens
  misc_RNA (1)...(19): siRNA sense strand
gguggucauuucguacaua

SEQ ID NO: 680750 - RNA, 19 nt, Homo sapiens
  misc_RNA (1)...(19): siRNA sense strand
ucaugguggucauuucgua

SEQ ID NO: 680751 - RNA, 19 nt, Homo sapiens
  misc_RNA (1)...(19): siRNA sense strand
gggaggacauggcuauggu

SEQ ID NO: 680752 - RNA, 19 nt, Homo sapiens
  misc_RNA (1)...(19): siRNA sense strand
cuaugggaaugauggcuuu

SEQ ID NO: 680753 - RNA, 19 nt, Homo sapiens
  misc_RNA (1)...(19): siRNA sense strand
ucagggaggcuauggauca

SEQ ID NO: 680754 - RNA, 19 nt, Homo sapiens
  misc_RNA (1)...(19): siRNA sense strand
cacaggagaagcagaugua

SEQ ID NO: 680755 - RNA, 19 nt, Homo sapiens
  misc_RNA (1)...(19): siRNA sense strand
aaugauggcuuugaugaca

SEQ ID NO: 680756 - RNA, 19 nt, Homo sapiens
  misc_RNA (1)...(19): siRNA sense strand
agaauagggcacagguaua

SEQ ID NO: 680757 - RNA, 19 nt, Homo sapiens
  misc_RNA (1)...(19): siRNA sense strand
gggaggccuucgugcaguu

SEQ ID NO: 680758 - RNA, 19 nt, Homo sapiens
  misc_RNA (1)...(19): siRNA sense strand
aaacacaaggaaagaauag

SEQ ID NO: 680759 - RNA, 19 nt, Homo sapiens
  misc_RNA (1)...(19): siRNA sense strand
uggaucaguuggaagaaug

SEQ ID NO: 680760 - RNA, 19 nt, Homo sapiens
  misc_RNA (1)...(19): siRNA sense strand
guggucauuucguacauau

SEQ ID NO: 680761 - RNA, 19 nt, Homo sapiens
  misc_RNA (1)...(19): siRNA sense strand
aagaauagggcacagguau

SEQ ID NO: 680762 - RNA, 19 nt, Homo sapiens
  misc_RNA (1)...(19): siRNA sense strand
ggauaugguacuccugaug

SEQ ID NO: 680763 - RNA, 19 nt, Homo sapiens
  misc_RNA (1)...(19): siRNA sense strand
gaugggacaguacgacuuc

SEQ ID NO: 680764 - RNA, 19 nt, Homo sapiens
  misc_RNA (1)...(19): siRNA sense strand
gaggaaauaguucaguucu

SEQ ID NO: 680765 - RNA, 19 nt, Homo sapiens
  misc_RNA (1)...(19): siRNA sense strand
caguagcugccaugucuaa

SEQ ID NO: 680766 - RNA, 19 nt, Homo sapiens
  misc_RNA (1)...(19): siRNA sense strand
cuaaauccaauacgaguuc

SEQ ID NO: 680767 - RNA, 19 nt, Homo sapiens
  misc_RNA (1)...(19): siRNA sense strand
uggcuuugaugacagaaug

SEQ ID NO: 680768 - RNA, 19 nt, Homo sapiens
  misc_RNA (1)...(19): siRNA sense strand
ugaugacuaugguggcuau

SEQ ID NO: 680769 - RNA, 19 nt, Homo sapiens
  misc_RNA (1)...(19): siRNA sense strand
gggaaacacaaggaaagaa

SEQ ID NO: 680770 - RNA, 19 nt, Homo sapiens
  misc_RNA (1)...(19): siRNA sense strand
gcaguggagguuacuaugg

SEQ ID NO: 680771 - RNA, 19 nt, Homo sapiens
  misc_RNA (1)...(19): siRNA sense strand
guccaaaugacgcuaguga

SEQ ID NO: 680772 - RNA, 19 nt, Homo sapiens
  misc_RNA (1)...(19): siRNA sense strand
gcaacaucgauauauugaa

SEQ ID NO: 680773 - RNA, 19 nt, Homo sapiens
  misc_RNA (1)...(19): siRNA sense strand
gagcuggugaugcaaguuc

SEQ ID NO: 680774 - RNA, 19 nt, Homo sapiens
  misc_RNA (1)...(19): siRNA sense strand
cagaaugagagauggaaga

SEQ ID NO: 680775 - RNA, 19 nt, Homo sapiens
  misc_RNA (1)...(19): siRNA sense strand
aacauaaugguccaaauga

SEQ ID NO: 680776 - RNA, 19 nt, Homo sapiens
  misc_RNA (1)...(19): siRNA sense strand
acaauuacaguggaggaua

SEQ ID NO: 680777 - RNA, 19 nt, Homo sapiens
  misc_RNA (1)...(19): siRNA sense strand
ggcuauggaucaguuggaa

SEQ ID NO: 680778 - RNA, 19 nt, Homo sapiens
  misc_RNA (1)...(19): siRNA sense strand
gaaguagcaggagugaaau

SEQ ID NO: 680779 - RNA, 19 nt, Homo sapiens
  misc_RNA (1)...(19): siRNA sense strand
accauaugauagaccaaua

SEQ ID NO: 680780 - RNA, 19 nt, Homo sapiens
  misc_RNA (1)...(19): siRNA sense strand
ucaaaggagauagcagaaa

SEQ ID NO: 680781 - RNA, 19 nt, Homo sapiens
  misc_RNA (1)...(19): siRNA sense strand
acaugaagaugcaguagcu

SEQ ID NO: 680782 - RNA, 19 nt, Homo sapiens
  misc_RNA (1)...(19): siRNA sense strand
gaccgggaccauaugauag

SEQ ID NO: 680783 - RNA, 19 nt, Homo sapiens
  misc_RNA (1)...(19): siRNA sense strand
cuacggaagagauggaaug

SEQ ID NO: 680784 - RNA, 19 nt, Homo sapiens
  misc_RNA (1)...(19): siRNA sense strand
gcagcaaagaggaaauagu

SEQ ID NO: 680785 - RNA, 19 nt, Homo sapiens
  misc_RNA (1)...(19): siRNA sense strand
aauuucuucucaccacuaa

SEQ ID NO: 680786 - RNA, 19 nt, Homo sapiens
  misc_RNA (1)...(19): siRNA sense strand
acuaugguggcuauaauaa

SEQ ID NO: 680787 - RNA, 19 nt, Homo sapiens
  misc_RNA (1)...(19): siRNA sense strand
aaagaauagggcacaggua

SEQ ID NO: 680788 - RNA, 19 nt, Homo sapiens
  misc_RNA (1)...(19): siRNA sense strand
aauccaauacgaguucaua

SEQ ID NO: 680789 - RNA, 19 nt, Homo sapiens
  misc_RNA (1)...(19): siRNA sense strand
ucucaccacuaaauccaau

SEQ ID NO: 680790 - RNA, 19 nt, Homo sapiens
  misc_RNA (1)...(19): siRNA sense strand
ugauggcuuugaugacaga

SEQ ID NO: 680791 - RNA, 19 nt, Homo sapiens
  misc_RNA (1)...(19): siRNA sense strand
uaauuacggcuaugggaau

SEQ ID NO: 680792 - RNA, 19 nt, Homo sapiens
  misc_RNA (1)...(19): siRNA sense strand
guggauggcgugggaugua

SEQ ID NO: 680793 - RNA, 19 nt, Homo sapiens
  misc_RNA (1)...(19): siRNA sense strand
uacaguggaggauauggua

SEQ ID NO: 680794 - RNA, 19 nt, Homo sapiens
  misc_RNA (1)...(19): siRNA sense strand
ugaaacauaaugguccaaa

SEQ ID NO: 680795 - RNA, 19 nt, Homo sapiens
  misc_RNA (1)...(19): siRNA sense strand
gugaugcaaguucagguuu

SEQ ID NO: 680796 - RNA, 19 nt, Homo sapiens
  misc_RNA (1)...(19): siRNA sense strand
ggugaugcaaguucagguu

SEQ ID NO: 680797 - RNA, 19 nt, Homo sapiens
  misc_RNA (1)...(19): siRNA sense strand
gggaaugauggcuuugaug

SEQ ID NO: 680798 - RNA, 19 nt, Homo sapiens
  misc_RNA (1)...(19): siRNA sense strand
ggauuggguuaugaaacau

SEQ ID NO: 680799 - RNA, 19 nt, Homo sapiens
  misc_RNA (1)...(19): siRNA sense strand
cuauggaucaguuggaaga

SEQ ID NO: 680800 - RNA, 19 nt, Homo sapiens
  misc_RNA (1)...(19): siRNA sense strand
gacacaugaagaugcagua

SEQ ID NO: 680801 - RNA, 19 nt, Homo sapiens
  misc_RNA (1)...(19): siRNA sense strand
uggaaaucgugccaaaugg

SEQ ID NO: 680802 - RNA, 19 nt, Homo sapiens
  misc_RNA (1)...(19): siRNA sense strand
uaaauccaauacgaguuca

SEQ ID NO: 680803 - RNA, 19 nt, Homo sapiens
  misc_RNA (1)...(19): siRNA sense strand
uaauuucuucucaccacua

SEQ ID NO: 680804 - RNA, 19 nt, Homo sapiens
  misc_RNA (1)...(19): siRNA sense strand
auaguucaguucuuucaag

SEQ ID NO: 680805 - RNA, 19 nt, Homo sapiens
  misc_RNA (1)...(19): siRNA sense strand
aaugggaggcuacggaaga

SEQ ID NO: 680806 - RNA, 19 nt, Homo sapiens
  misc_RNA (1)...(19): siRNA sense strand
cuucguggacuaccauuug

SEQ ID NO: 680807 - RNA, 19 nt, Homo sapiens
  misc_RNA (1)...(19): siRNA sense strand
gcaaggagacggaauucua

SEQ ID NO: 680808 - RNA, 19 nt, Homo sapiens
  misc_RNA (1)...(19): siRNA sense strand
ggacgugcauuucaugaag

SEQ ID NO: 680809 - RNA, 19 nt, Homo sapiens
  misc_RNA (1)...(19): siRNA sense strand
gcacuugccuguguuuaca

SEQ ID NO: 680810 - RNA, 19 nt, Homo sapiens
  misc_RNA (1)...(19): siRNA sense strand
gaauucuaccugugcauga

SEQ ID NO: 680811 - RNA, 19 nt, Homo sapiens
  misc_RNA (1)...(19): siRNA sense strand
caacuacacggcccugaug

SEQ ID NO: 680812 - RNA, 19 nt, Homo sapiens
  misc_RNA (1)...(19): siRNA sense strand
gggacgaugugagccguaa

SEQ ID NO: 680813 - RNA, 19 nt, Homo sapiens
  misc_RNA (1)...(19): siRNA sense strand
uacgugggcuucaccaaga

SEQ ID NO: 680814 - RNA, 19 nt, Homo sapiens
  misc_RNA (1)...(19): siRNA sense strand
gcaaggaguguguguucau

SEQ ID NO: 680815 - RNA, 19 nt, Homo sapiens
  misc_RNA (1)...(19): siRNA sense strand
acacgacggugaccaagag

SEQ ID NO: 680816 - RNA, 19 nt, Homo sapiens
  misc_RNA (1)...(19): siRNA sense strand
caaggaguguguguucauc

SEQ ID NO: 680817 - RNA, 19 nt, Homo sapiens
  misc_RNA (1)...(19): siRNA sense strand
cagcaaggaguguguguuc

SEQ ID NO: 680818 - RNA, 19 nt, Homo sapiens
  misc_RNA (1)...(19): siRNA sense strand
gcaggacgugcauuucaug

SEQ ID NO: 680819 - RNA, 19 nt, Homo sapiens
  misc_RNA (1)...(19): siRNA sense strand
cagcaggacgugcauuuca

SEQ ID NO: 680820 - RNA, 19 nt, Homo sapiens
  misc_RNA (1)...(19): siRNA sense strand
caaguaugcccagcuccua

SEQ ID NO: 680821 - RNA, 19 nt, Homo sapiens
  misc_RNA (1)...(19): siRNA sense strand
guagucaaguccggaucaa

SEQ ID NO: 680822 - RNA, 19 nt, Homo sapiens
  misc_RNA (1)...(19): siRNA sense strand
acagacaccuucgguaguc

SEQ ID NO: 680823 - RNA, 19 nt, Homo sapiens
  misc_RNA (1)...(19): siRNA sense strand
caaggagacggaauucuac

SEQ ID NO: 680824 - RNA, 19 nt, Homo sapiens
  misc_RNA (1)...(19): siRNA sense strand
gcccugaugucggcuaagu

SEQ ID NO: 680825 - RNA, 19 nt, Homo sapiens
  misc_RNA (1)...(19): siRNA sense strand
cgccugcacuugccugugu

SEQ ID NO: 680826 - RNA, 19 nt, Homo sapiens
  misc_RNA (1)...(19): siRNA sense strand
caccuucgguagucaaguc

SEQ ID NO: 680827 - RNA, 19 nt, Homo sapiens
  misc_RNA (1)...(19): siRNA sense strand
gcaccagcaaggagugugu

SEQ ID NO: 680828 - RNA, 19 nt, Homo sapiens
  misc_RNA (1)...(19): siRNA sense strand
gacagacaccuucgguagu

SEQ ID NO: 680829 - RNA, 19 nt, Homo sapiens
  misc_RNA (1)...(19): siRNA sense strand
gguagucaaguccggauca

SEQ ID NO: 680830 - RNA, 19 nt, Homo sapiens
  misc_RNA (1)...(19): siRNA sense strand
gcugcugugcuuccaggua

SEQ ID NO: 680831 - RNA, 19 nt, Homo sapiens
  misc_RNA (1)...(19): siRNA sense strand
cuaaguacuccggcuggua

SEQ ID NO: 680832 - RNA, 19 nt, Homo sapiens
  misc_RNA (1)...(19): siRNA sense strand
gcaaggagacggaauucua

SEQ ID NO: 680833 - RNA, 19 nt, Homo sapiens
  misc_RNA (1)...(19): siRNA sense strand
ggacgugcauuucaugaag

SEQ ID NO: 680834 - RNA, 19 nt, Homo sapiens
  misc_RNA (1)...(19): siRNA sense strand
gcacuugccuguguuuaca

SEQ ID NO: 680835 - RNA, 19 nt, Homo sapiens
  misc_RNA (1)...(19): siRNA sense strand
gaauucuaccugugcauga

SEQ ID NO: 680836 - RNA, 19 nt, Homo sapiens
  misc_RNA (1)...(19): siRNA sense strand
caacuacacggcccugaug

SEQ ID NO: 680837 - RNA, 19 nt, Homo sapiens
  misc_RNA (1)...(19): siRNA sense strand
gggacgaugugagccguaa

SEQ ID NO: 680838 - RNA, 19 nt, Homo sapiens
  misc_RNA (1)...(19): siRNA sense strand
uacgugggcuucaccaaga

SEQ ID NO: 680839 - RNA, 19 nt, Homo sapiens
  misc_RNA (1)...(19): siRNA sense strand
gcaaggaguguguguucau

SEQ ID NO: 680840 - RNA, 19 nt, Homo sapiens
  misc_RNA (1)...(19): siRNA sense strand
acacgacggugaccaagag

SEQ ID NO: 680841 - RNA, 19 nt, Homo sapiens
  misc_RNA (1)...(19): siRNA sense strand
caaggaguguguguucauc

SEQ ID NO: 680842 - RNA, 19 nt, Homo sapiens
  misc_RNA (1)...(19): siRNA sense strand
cagcaaggaguguguguuc

SEQ ID NO: 680843 - RNA, 19 nt, Homo sapiens
  misc_RNA (1)...(19): siRNA sense strand
gcaggacgugcauuucaug

SEQ ID NO: 680844 - RNA, 19 nt, Homo sapiens
  misc_RNA (1)...(19): siRNA sense strand
cagcaggacgugcauuuca

SEQ ID NO: 680845 - RNA, 19 nt, Homo sapiens
  misc_RNA (1)...(19): siRNA sense strand
caaguaugcccagcuccua

SEQ ID NO: 680846 - RNA, 19 nt, Homo sapiens
  misc_RNA (1)...(19): siRNA sense strand
guagucaaguccggaucaa

SEQ ID NO: 680847 - RNA, 19 nt, Homo sapiens
  misc_RNA (1)...(19): siRNA sense strand
acagacaccuucgguaguc

SEQ ID NO: 680848 - RNA, 19 nt, Homo sapiens
  misc_RNA (1)...(19): siRNA sense strand
caaggagacggaauucuac

SEQ ID NO: 680849 - RNA, 19 nt, Homo sapiens
  misc_RNA (1)...(19): siRNA sense strand
gcccugaugucggcuaagu

SEQ ID NO: 680850 - RNA, 19 nt, Homo sapiens
  misc_RNA (1)...(19): siRNA sense strand
cgccugcacuugccugugu

SEQ ID NO: 680851 - RNA, 19 nt, Homo sapiens
  misc_RNA (1)...(19): siRNA sense strand
caccuucgguagucaaguc

SEQ ID NO: 680852 - RNA, 19 nt, Homo sapiens
  misc_RNA (1)...(19): siRNA sense strand
gcaccagcaaggagugugu

SEQ ID NO: 680853 - RNA, 19 nt, Homo sapiens
  misc_RNA (1)...(19): siRNA sense strand
gacagacaccuucgguagu

SEQ ID NO: 680854 - RNA, 19 nt, Homo sapiens
  misc_RNA (1)...(19): siRNA sense strand
gguagucaaguccggauca

SEQ ID NO: 680855 - RNA, 19 nt, Homo sapiens
  misc_RNA (1)...(19): siRNA sense strand
gcugcugugcuuccaggua

SEQ ID NO: 680856 - RNA, 19 nt, Homo sapiens
  misc_RNA (1)...(19): siRNA sense strand
cuaaguacuccggcuggua

SEQ ID NO: 680857 - RNA, 19 nt, Homo sapiens
  misc_RNA (1)...(19): siRNA sense strand
caaagaagauugugcuaag

SEQ ID NO: 680858 - RNA, 19 nt, Homo sapiens
  misc_RNA (1)...(19): siRNA sense strand
gaagagaaagggccaagug

SEQ ID NO: 680859 - RNA, 19 nt, Homo sapiens
  misc_RNA (1)...(19): siRNA sense strand
ggaaggaggcgcuaugauc

SEQ ID NO: 680860 - RNA, 19 nt, Homo sapiens
  misc_RNA (1)...(19): siRNA sense strand
gcuaagaccacaaagaaga

SEQ ID NO: 680861 - RNA, 19 nt, Homo sapiens
  misc_RNA (1)...(19): siRNA sense strand
gaggagauaagaagagaaa

SEQ ID NO: 680862 - RNA, 19 nt, Homo sapiens
  misc_RNA (1)...(19): siRNA sense strand
gaacugggaggagauaaga

SEQ ID NO: 680863 - RNA, 19 nt, Homo sapiens
  misc_RNA (1)...(19): siRNA sense strand
gggcagacaaagccaauuu

SEQ ID NO: 680864 - RNA, 19 nt, Homo sapiens
  misc_RNA (1)...(19): siRNA sense strand
gccaagugauccaguucua

SEQ ID NO: 680865 - RNA, 19 nt, Homo sapiens
  misc_RNA (1)...(19): siRNA sense strand
uggaauguguugagccuaa

SEQ ID NO: 680866 - RNA, 19 nt, Homo sapiens
  misc_RNA (1)...(19): siRNA sense strand
gggaggagauaagaagaga

SEQ ID NO: 680867 - RNA, 19 nt, Homo sapiens
  misc_RNA (1)...(19): siRNA sense strand
gagaaagggccaagugauc

SEQ ID NO: 680868 - RNA, 19 nt, Homo sapiens
  misc_RNA (1)...(19): siRNA sense strand
acaaagugacacaguauaa

SEQ ID NO: 680869 - RNA, 19 nt, Homo sapiens
  misc_RNA (1)...(19): siRNA sense strand
gaagcagaguggcuauggu

SEQ ID NO: 680870 - RNA, 19 nt, Homo sapiens
  misc_RNA (1)...(19): siRNA sense strand
aaagugacacaguauaaga

SEQ ID NO: 680871 - RNA, 19 nt, Homo sapiens
  misc_RNA (1)...(19): siRNA sense strand
uauaagaagggcaaggauu

SEQ ID NO: 680872 - RNA, 19 nt, Homo sapiens
  misc_RNA (1)...(19): siRNA sense strand
ggagauaagaagagaaagg

SEQ ID NO: 680873 - RNA, 19 nt, Homo sapiens
  misc_RNA (1)...(19): siRNA sense strand
aggcuaagaccacaaagaa

SEQ ID NO: 680874 - RNA, 19 nt, Homo sapiens
  misc_RNA (1)...(19): siRNA sense strand
cacaaagugacacaguaua

SEQ ID NO: 680875 - RNA, 19 nt, Homo sapiens
  misc_RNA (1)...(19): siRNA sense strand
ccaagugauccaguucuaa

SEQ ID NO: 680876 - RNA, 19 nt, Homo sapiens
  misc_RNA (1)...(19): siRNA sense strand
ggaagcagaguggcuaugg

SEQ ID NO: 680877 - RNA, 19 nt, Homo sapiens
  misc_RNA (1)...(19): siRNA sense strand
gcuauggugggcagacaaa

SEQ ID NO: 680878 - RNA, 19 nt, Homo sapiens
  misc_RNA (1)...(19): siRNA sense strand
ugcuaaggcuggaaugugu

SEQ ID NO: 680879 - RNA, 19 nt, Homo sapiens
  misc_RNA (1)...(19): siRNA sense strand
caaagugacacaguauaag

SEQ ID NO: 680880 - RNA, 19 nt, Homo sapiens
  misc_RNA (1)...(19): siRNA sense strand
auaagaagggcaaggauuc

SEQ ID NO: 680881 - RNA, 19 nt, Homo sapiens
  misc_RNA (1)...(19): siRNA sense strand
gaaagggccaagugaucca

SEQ ID NO: 680882 - RNA, 19 nt, Homo sapiens
  misc_RNA (1)...(19): siRNA sense strand
agaaggcuaagaccacaaa

SEQ ID NO: 680883 - RNA, 19 nt, Homo sapiens
  misc_RNA (1)...(19): siRNA sense strand
aaagaagauugugcuaagg

SEQ ID NO: 680884 - RNA, 19 nt, Homo sapiens
  misc_RNA (1)...(19): siRNA sense strand
aagagaaagggccaaguga

SEQ ID NO: 680885 - RNA, 19 nt, Homo sapiens
  misc_RNA (1)...(19): siRNA sense strand
uaagaccacaaagaagauu

SEQ ID NO: 680886 - RNA, 19 nt, Homo sapiens
  misc_RNA (1)...(19): siRNA sense strand
ggaauguguugagccuaac

SEQ ID NO: 680887 - RNA, 19 nt, Homo sapiens
  misc_RNA (1)...(19): siRNA sense strand
ggaggagauaagaagagaa

SEQ ID NO: 680888 - RNA, 19 nt, Homo sapiens
  misc_RNA (1)...(19): siRNA sense strand
ggacaaagaugaucccaaa

SEQ ID NO: 680889 - RNA, 19 nt, Homo sapiens
  misc_RNA (1)...(19): siRNA sense strand
gaagauaauucccucagua

SEQ ID NO: 680890 - RNA, 19 nt, Homo sapiens
  misc_RNA (1)...(19): siRNA sense strand
gagaggcaguucaacauua

SEQ ID NO: 680891 - RNA, 19 nt, Homo sapiens
  misc_RNA (1)...(19): siRNA sense strand
gauaauucccucaguauuu

SEQ ID NO: 680892 - RNA, 19 nt, Homo sapiens
  misc_RNA (1)...(19): siRNA sense strand
ggagauauccaugcuauaa

SEQ ID NO: 680893 - RNA, 19 nt, Homo sapiens
  misc_RNA (1)...(19): siRNA sense strand
caacaccacuugacagaga

SEQ ID NO: 680894 - RNA, 19 nt, Homo sapiens
  misc_RNA (1)...(19): siRNA sense strand
gcaccagaguuucuuaaug

SEQ ID NO: 680895 - RNA, 19 nt, Homo sapiens
  misc_RNA (1)...(19): siRNA sense strand
gugcaaaguugguuuauag

SEQ ID NO: 680896 - RNA, 19 nt, Homo sapiens
  misc_RNA (1)...(19): siRNA sense strand
gaaaaccucuggacuuuga

SEQ ID NO: 680897 - RNA, 19 nt, Homo sapiens
  misc_RNA (1)...(19): siRNA sense strand
ucagauauauggcuaugaa

SEQ ID NO: 680898 - RNA, 19 nt, Homo sapiens
  misc_RNA (1)...(19): siRNA sense strand
gaaaugcucuuggaucucu

SEQ ID NO: 680899 - RNA, 19 nt, Homo sapiens
  misc_RNA (1)...(19): siRNA sense strand
caaagaugaugaagacguu

SEQ ID NO: 680900 - RNA, 19 nt, Homo sapiens
  misc_RNA (1)...(19): siRNA sense strand
gcucuaaacuccgugauug

SEQ ID NO: 680901 - RNA, 19 nt, Homo sapiens
  misc_RNA (1)...(19): siRNA sense strand
gcaaaguugguuuauagua

SEQ ID NO: 680902 - RNA, 19 nt, Homo sapiens
  misc_RNA (1)...(19): siRNA sense strand
gaaucagucucaaguuuua

SEQ ID NO: 680903 - RNA, 19 nt, Homo sapiens
  misc_RNA (1)...(19): siRNA sense strand
gacagagaauuaaguguau

SEQ ID NO: 680904 - RNA, 19 nt, Homo sapiens
  misc_RNA (1)...(19): siRNA sense strand
cauauuagcaugcaucauu

SEQ ID NO: 680905 - RNA, 19 nt, Homo sapiens
  misc_RNA (1)...(19): siRNA sense strand
gaaccacagucagauauca

SEQ ID NO: 680906 - RNA, 19 nt, Homo sapiens
  misc_RNA (1)...(19): siRNA sense strand
ugacagagaauuaagugua

SEQ ID NO: 680907 - RNA, 19 nt, Homo sapiens
  misc_RNA (1)...(19): siRNA sense strand
ccauaugacuccauucaga

SEQ ID NO: 680908 - RNA, 19 nt, Homo sapiens
  misc_RNA (1)...(19): siRNA sense strand
gaguaccuguugcuauuaa

SEQ ID NO: 680909 - RNA, 19 nt, Homo sapiens
  misc_RNA (1)...(19): siRNA sense strand
gauaucacuuccaguccua

SEQ ID NO: 680910 - RNA, 19 nt, Homo sapiens
  misc_RNA (1)...(19): siRNA sense strand
ugucgaagcuuauguccuu

SEQ ID NO: 680911 - RNA, 19 nt, Homo sapiens
  misc_RNA (1)...(19): siRNA sense strand
caacauuaaugcagacgau

SEQ ID NO: 680912 - RNA, 19 nt, Homo sapiens
  misc_RNA (1)...(19): siRNA sense strand
ggcccaggauggcauuaua

SEQ ID NO: 680913 - RNA, 19 nt, Homo sapiens
  misc_RNA (1)...(19): siRNA sense strand
cagauggaauuaauggauu

SEQ ID NO: 680914 - RNA, 19 nt, Homo sapiens
  misc_RNA (1)...(19): siRNA sense strand
gaugaagacguucgagaaa

SEQ ID NO: 680915 - RNA, 19 nt, Homo sapiens
  misc_RNA (1)...(19): siRNA sense strand
gagccuccuucugaauuua

SEQ ID NO: 680916 - RNA, 19 nt, Homo sapiens
  misc_RNA (1)...(19): siRNA sense strand
agaggcaguucaacauuaa

SEQ ID NO: 680917 - RNA, 19 nt, Homo sapiens
  misc_RNA (1)...(19): siRNA sense strand
ugacaauccuccaaaauuu

SEQ ID NO: 680918 - RNA, 19 nt, Homo sapiens
  misc_RNA (1)...(19): siRNA sense strand
guacaucugucacuaacgu

SEQ ID NO: 680919 - RNA, 19 nt, Homo sapiens
  misc_RNA (1)...(19): siRNA sense strand
caccagaguuucuuaaugg

SEQ ID NO: 680920 - RNA, 19 nt, Homo sapiens
  misc_RNA (1)...(19): siRNA sense strand
ugacaaugcaccagaguuu

SEQ ID NO: 680921 - RNA, 19 nt, Homo sapiens
  misc_RNA (1)...(19): siRNA sense strand
aaacugcccuucccaacau

SEQ ID NO: 680922 - RNA, 19 nt, Homo sapiens
  misc_RNA (1)...(19): siRNA sense strand
gcuuauguccuuccaauug

SEQ ID NO: 680923 - RNA, 19 nt, Homo sapiens
  misc_RNA (1)...(19): siRNA sense strand
caagucauucaaacuguua

SEQ ID NO: 680924 - RNA, 19 nt, Homo sapiens
  misc_RNA (1)...(19): siRNA sense strand
gaagauaacgcuggcaaca

SEQ ID NO: 680925 - RNA, 19 nt, Homo sapiens
  misc_RNA (1)...(19): siRNA sense strand
uuacauggcuccgaugaau

SEQ ID NO: 680926 - RNA, 19 nt, Homo sapiens
  misc_RNA (1)...(19): siRNA sense strand
ggagauggaacagcacuuu

SEQ ID NO: 680927 - RNA, 19 nt, Homo sapiens
  misc_RNA (1)...(19): siRNA sense strand
gaaggccaaugaucaggau

SEQ ID NO: 680928 - RNA, 19 nt, Homo sapiens
  misc_RNA (1)...(19): siRNA sense strand
gaagggugaaggccaauga

SEQ ID NO: 680929 - RNA, 19 nt, Homo sapiens
  misc_RNA (1)...(19): siRNA sense strand
gaggaguaccugguuguua

SEQ ID NO: 680930 - RNA, 19 nt, Homo sapiens
  misc_RNA (1)...(19): siRNA sense strand
ugauguaacuggagauauc

SEQ ID NO: 680931 - RNA, 19 nt, Homo sapiens
  misc_RNA (1)...(19): siRNA sense strand
ggagaggcaguucaacauu

SEQ ID NO: 680932 - RNA, 19 nt, Homo sapiens
  misc_RNA (1)...(19): siRNA sense strand
gagccuguaucacuucuca

SEQ ID NO: 680933 - RNA, 19 nt, Homo sapiens
  misc_RNA (1)...(19): siRNA sense strand
ccugaaacagcuauuauaa

SEQ ID NO: 680934 - RNA, 19 nt, Homo sapiens
  misc_RNA (1)...(19): siRNA sense strand
gagcugggaccauauuuca

SEQ ID NO: 680935 - RNA, 19 nt, Homo sapiens
  misc_RNA (1)...(19): siRNA sense strand
ggucaacaauccgaauuuc

SEQ ID NO: 680936 - RNA, 19 nt, Homo sapiens
  misc_RNA (1)...(19): siRNA sense strand
gagaagccaaggaggagua

SEQ ID NO: 680937 - RNA, 19 nt, Homo sapiens
  misc_RNA (1)...(19): siRNA sense strand
uggaaacagugcaaaguug

SEQ ID NO: 680938 - RNA, 19 nt, Homo sapiens
  misc_RNA (1)...(19): siRNA sense strand
gcugggaccauauuucaaa

SEQ ID NO: 680939 - RNA, 19 nt, Homo sapiens
  misc_RNA (1)...(19): siRNA sense strand
ggcgaacucuacucuguug

SEQ ID NO: 680940 - RNA, 19 nt, Homo sapiens
  misc_RNA (1)...(19): siRNA sense strand
gcacuagcaccuugacaau

SEQ ID NO: 680941 - RNA, 19 nt, Homo sapiens
  misc_RNA (1)...(19): siRNA sense strand
acgaguaccuguugcuauu

SEQ ID NO: 680942 - RNA, 19 nt, Homo sapiens
  misc_RNA (1)...(19): siRNA sense strand
uaaacagucugggugaaga

SEQ ID NO: 680943 - RNA, 19 nt, Homo sapiens
  misc_RNA (1)...(19): siRNA sense strand
gagauauccaugcuauaaa

SEQ ID NO: 680944 - RNA, 19 nt, Homo sapiens
  misc_RNA (1)...(19): siRNA sense strand
uggcaaagcauaauggauu

SEQ ID NO: 680945 - RNA, 19 nt, Homo sapiens
  misc_RNA (1)...(19): siRNA sense strand
cagaacggcuagcggaaau

SEQ ID NO: 680946 - RNA, 19 nt, Homo sapiens
  misc_RNA (1)...(19): siRNA sense strand
uuaaagugcuggaugucaa

SEQ ID NO: 680947 - RNA, 19 nt, Homo sapiens
  misc_RNA (1)...(19): siRNA sense strand
gcacaacauaacaaucauu

SEQ ID NO: 680948 - RNA, 19 nt, Homo sapiens
  misc_RNA (1)...(19): siRNA sense strand
guaccugguuguuauccaa

SEQ ID NO: 680949 - RNA, 19 nt, Homo sapiens
  misc_RNA (1)...(19): siRNA sense strand
ggaccugaaccgauucuug

SEQ ID NO: 680950 - RNA, 19 nt, Homo sapiens
  misc_RNA (1)...(19): siRNA sense strand
guguugaugucgaugaauu

SEQ ID NO: 680951 - RNA, 19 nt, Homo sapiens
  misc_RNA (1)...(19): siRNA sense strand
aaacaucauucgcuacgau

SEQ ID NO: 680952 - RNA, 19 nt, Homo sapiens
  misc_RNA (1)...(19): siRNA sense strand
ccaagucauucaaacuguu

SEQ ID NO: 680953 - RNA, 19 nt, Homo sapiens
  misc_RNA (1)...(19): siRNA sense strand
ggugaagaacagcgaauuu

SEQ ID NO: 680954 - RNA, 19 nt, Homo sapiens
  misc_RNA (1)...(19): siRNA sense strand
aggaguaccugguuguuau

SEQ ID NO: 680955 - RNA, 19 nt, Homo sapiens
  misc_RNA (1)...(19): siRNA sense strand
ccuauacgcuaaagguaga

SEQ ID NO: 680956 - RNA, 19 nt, Homo sapiens
  misc_RNA (1)...(19): siRNA sense strand
ccacuugacagagaauuaa

SEQ ID NO: 680957 - RNA, 19 nt, Homo sapiens
  misc_RNA (1)...(19): siRNA sense strand
augaaucagucucaaguuu

SEQ ID NO: 680958 - RNA, 19 nt, Homo sapiens
  misc_RNA (1)...(19): siRNA sense strand
acuagcaccuugacaauca

SEQ ID NO: 680959 - RNA, 19 nt, Homo sapiens
  misc_RNA (1)...(19): siRNA sense strand
ccacugagcagcacuagca

SEQ ID NO: 680960 - RNA, 19 nt, Homo sapiens
  misc_RNA (1)...(19): siRNA sense strand
ggcaaagcauaauggauuc

SEQ ID NO: 680961 - RNA, 19 nt, Homo sapiens
  misc_RNA (1)...(19): siRNA sense strand
gaccugaaccgauucuugu

SEQ ID NO: 680962 - RNA, 19 nt, Homo sapiens
  misc_RNA (1)...(19): siRNA sense strand
aaccagauuugcaguuuau

SEQ ID NO: 680963 - RNA, 19 nt, Homo sapiens
  misc_RNA (1)...(19): siRNA sense strand
ccaauuggacucaguaugg

SEQ ID NO: 680964 - RNA, 19 nt, Homo sapiens
  misc_RNA (1)...(19): siRNA sense strand
gaagaacagcgaauuuuga

SEQ ID NO: 680965 - RNA, 19 nt, Homo sapiens
  misc_RNA (1)...(19): siRNA sense strand
uagcggaaaugcucuugga

SEQ ID NO: 680966 - RNA, 19 nt, Homo sapiens
  misc_RNA (1)...(19): siRNA sense strand
agacaucaaugacaaugca

SEQ ID NO: 680967 - RNA, 19 nt, Homo sapiens
  misc_RNA (1)...(19): siRNA sense strand
cggaaaugcucuuggaucu

SEQ ID NO: 680968 - RNA, 19 nt, Homo sapiens
  misc_RNA (1)...(19): siRNA sense strand
ggccaaugaucaggauauu

SEQ ID NO: 680969 - RNA, 19 nt, Homo sapiens
  misc_RNA (1)...(19): siRNA sense strand
gagccugaaacagcuauua

SEQ ID NO: 680970 - RNA, 19 nt, Homo sapiens
  misc_RNA (1)...(19): siRNA sense strand
ggacugggagacaagcaaa

SEQ ID NO: 680971 - RNA, 19 nt, Homo sapiens
  misc_RNA (1)...(19): siRNA sense strand
ucgcuacgaugaugaagga

SEQ ID NO: 680972 - RNA, 19 nt, Homo sapiens
  misc_RNA (1)...(19): siRNA sense strand
gccugaaacagcuauuaua

SEQ ID NO: 680973 - RNA, 19 nt, Homo sapiens
  misc_RNA (1)...(19): siRNA sense strand
cuugcaaugucgaagcuua

SEQ ID NO: 680974 - RNA, 19 nt, Homo sapiens
  misc_RNA (1)...(19): siRNA sense strand
cuauuaaagugcuggaugu

SEQ ID NO: 680975 - RNA, 19 nt, Homo sapiens
  misc_RNA (1)...(19): siRNA sense strand
gaggcuggguuuggaauca

SEQ ID NO: 680976 - RNA, 19 nt, Homo sapiens
  misc_RNA (1)...(19): siRNA sense strand
gcagacgaugggaagauaa

SEQ ID NO: 680977 - RNA, 19 nt, Homo sapiens
  misc_RNA (1)...(19): siRNA sense strand
ggugaaagugacaaagaaa

SEQ ID NO: 680978 - RNA, 19 nt, Homo sapiens
  misc_RNA (1)...(19): siRNA sense strand
gacauugcaacuuuacaaa

SEQ ID NO: 680979 - RNA, 19 nt, Homo sapiens
  misc_RNA (1)...(19): siRNA sense strand
gcgccuuaauugccauauu

SEQ ID NO: 680980 - RNA, 19 nt, Homo sapiens
  misc_RNA (1)...(19): siRNA sense strand
aagcuuauguccuuccaau

SEQ ID NO: 680981 - RNA, 19 nt, Homo sapiens
  misc_RNA (1)...(19): siRNA sense strand
gccaagucauucaaacugu

SEQ ID NO: 680982 - RNA, 19 nt, Homo sapiens
  misc_RNA (1)...(19): siRNA sense strand
ggcauuauaaggcuaagaa

SEQ ID NO: 680983 - RNA, 19 nt, Homo sapiens
  misc_RNA (1)...(19): siRNA sense strand
cgaauuucaccaucaagaa

SEQ ID NO: 680984 - RNA, 19 nt, Homo sapiens
  misc_RNA (1)...(19): siRNA sense strand
ggcagccaauguccauauu

SEQ ID NO: 680985 - RNA, 19 nt, Homo sapiens
  misc_RNA (1)...(19): siRNA sense strand
gguugaagaugcugaugag

SEQ ID NO: 680986 - RNA, 19 nt, Homo sapiens
  misc_RNA (1)...(19): siRNA sense strand
gcaugaggcagauaaugau

SEQ ID NO: 680987 - RNA, 19 nt, Homo sapiens
  misc_RNA (1)...(19): siRNA sense strand
ucaccgacuuaccuacuug

SEQ ID NO: 680988 - RNA, 19 nt, Homo sapiens
  misc_RNA (1)...(19): siRNA sense strand
uaaaaugugcggagaagga

SEQ ID NO: 680989 - RNA, 19 nt, Homo sapiens
  misc_RNA (1)...(19): siRNA sense strand
uuucaaaccccucgagaua

SEQ ID NO: 680990 - RNA, 19 nt, Homo sapiens
  misc_RNA (1)...(19): siRNA sense strand
uaaaaugugcggagaagga

SEQ ID NO: 680991 - RNA, 19 nt, Homo sapiens
  misc_RNA (1)...(19): siRNA sense strand
uuucaaaccccucgagaua

SEQ ID NO: 680992 - RNA, 19 nt, Homo sapiens
  misc_RNA (1)...(19): siRNA sense strand
uaaaaugugcggagaagga

SEQ ID NO: 680993 - RNA, 19 nt, Homo sapiens
  misc_RNA (1)...(19): siRNA sense strand
uuucaaaccccucgagaua

SEQ ID NO: 680994 - RNA, 19 nt, Homo sapiens
  misc_RNA (1)...(19): siRNA sense strand
uaaaaugugcggagaagga

SEQ ID NO: 680995 - RNA, 19 nt, Homo sapiens
  misc_RNA (1)...(19): siRNA sense strand
uuucaaaccccucgagaua

SEQ ID NO: 680996 - RNA, 19 nt, Homo sapiens
  misc_RNA (1)...(19): siRNA sense strand
uaaaaugugcggagaagga

SEQ ID NO: 680997 - RNA, 19 nt, Homo sapiens
  misc_RNA (1)...(19): siRNA sense strand
uuucaaaccccucgagaua

SEQ ID NO: 680998 - RNA, 19 nt, Homo sapiens
  misc_RNA (1)...(19): siRNA sense strand
uaaaaugugcggagaagga

SEQ ID NO: 680999 - RNA, 19 nt, Homo sapiens
  misc_RNA (1)...(19): siRNA sense strand
uuucaaaccccucgagaua

SEQ ID NO: 681000 - RNA, 19 nt, Homo sapiens
  misc_RNA (1)...(19): siRNA sense strand
uaaaaugugcggagaagga

SEQ ID NO: 681001 - RNA, 19 nt, Homo sapiens
  misc_RNA (1)...(19): siRNA sense strand
uuucaaaccccucgagaua

SEQ ID NO: 681002 - RNA, 19 nt, Homo sapiens
  misc_RNA (1)...(19): siRNA sense strand
uaaaaugugcggagaagga

SEQ ID NO: 681003 - RNA, 19 nt, Homo sapiens
  misc_RNA (1)...(19): siRNA sense strand
uuucaaaccccucgagaua

SEQ ID NO: 681004 - RNA, 19 nt, Homo sapiens
  misc_RNA (1)...(19): siRNA sense strand
uaaaaugugcggagaagga

SEQ ID NO: 681005 - RNA, 19 nt, Homo sapiens
  misc_RNA (1)...(19): siRNA sense strand
uuucaaaccccucgagaua

SEQ ID NO: 681006 - RNA, 19 nt, Homo sapiens
  misc_RNA (1)...(19): siRNA sense strand
cagcaaaggugccaaagau

SEQ ID NO: 681007 - RNA, 19 nt, Homo sapiens
  misc_RNA (1)...(19): siRNA sense strand
gcuccuaccuggacaacuu

SEQ ID NO: 681008 - RNA, 19 nt, Homo sapiens
  misc_RNA (1)...(19): siRNA sense strand
ggaagaagcggguggagau

SEQ ID NO: 681009 - RNA, 19 nt, Homo sapiens
  misc_RNA (1)...(19): siRNA sense strand
gggugaagcugucagacuu

SEQ ID NO: 681010 - RNA, 19 nt, Homo sapiens
  misc_RNA (1)...(19): siRNA sense strand
ggauaauggugauugagau

SEQ ID NO: 681011 - RNA, 19 nt, Homo sapiens
  misc_RNA (1)...(19): siRNA sense strand
ggacaacuucaucaagauu

SEQ ID NO: 681012 - RNA, 19 nt, Homo sapiens
  misc_RNA (1)...(19): siRNA sense strand
agaaugugguggagaugua

SEQ ID NO: 681013 - RNA, 19 nt, Homo sapiens
  misc_RNA (1)...(19): siRNA sense strand
ucaaagccaugaagaugau

SEQ ID NO: 681014 - RNA, 19 nt, Homo sapiens
  misc_RNA (1)...(19): siRNA sense strand
ggacgaguuugagaacaug

SEQ ID NO: 681015 - RNA, 19 nt, Homo sapiens
  misc_RNA (1)...(19): siRNA sense strand
ucaacgaggugguaaucau

SEQ ID NO: 681016 - RNA, 19 nt, Homo sapiens
  misc_RNA (1)...(19): siRNA sense strand
cuggacaacuucaucaaga

SEQ ID NO: 681017 - RNA, 19 nt, Homo sapiens
  misc_RNA (1)...(19): siRNA sense strand
gcagcaaaggugccaaaga

SEQ ID NO: 681018 - RNA, 19 nt, Homo sapiens
  misc_RNA (1)...(19): siRNA sense strand
gggauaauggugauugaga

SEQ ID NO: 681019 - RNA, 19 nt, Homo sapiens
  misc_RNA (1)...(19): siRNA sense strand
gaagaugauucgggacaac

SEQ ID NO: 681020 - RNA, 19 nt, Homo sapiens
  misc_RNA (1)...(19): siRNA sense strand
gauaauggugauugagaug

SEQ ID NO: 681021 - RNA, 19 nt, Homo sapiens
  misc_RNA (1)...(19): siRNA sense strand
caacgaggugguaaucaug

SEQ ID NO: 681022 - RNA, 19 nt, Homo sapiens
  misc_RNA (1)...(19): siRNA sense strand
ggacuaccagcacgagaau

SEQ ID NO: 681023 - RNA, 19 nt, Homo sapiens
  misc_RNA (1)...(19): siRNA sense strand
gcaagcugguggccgucaa

SEQ ID NO: 681024 - RNA, 19 nt, Homo sapiens
  misc_RNA (1)...(19): siRNA sense strand
gugaagcugucagacuuug

SEQ ID NO: 681025 - RNA, 19 nt, Homo sapiens
  misc_RNA (1)...(19): siRNA sense strand
gaguaucccaugagcaguu

SEQ ID NO: 681026 - RNA, 19 nt, Homo sapiens
  misc_RNA (1)...(19): siRNA sense strand
gacaacuucaucaagauug

SEQ ID NO: 681027 - RNA, 19 nt, Homo sapiens
  misc_RNA (1)...(19): siRNA sense strand
ccucaaagccaugaagaug

SEQ ID NO: 681028 - RNA, 19 nt, Homo sapiens
  misc_RNA (1)...(19): siRNA sense strand
gggacuaccagcacgagaa

SEQ ID NO: 681029 - RNA, 19 nt, Homo sapiens
  misc_RNA (1)...(19): siRNA sense strand
ggugaagcugucagacuuu

SEQ ID NO: 681030 - RNA, 19 nt, Homo sapiens
  misc_RNA (1)...(19): siRNA sense strand
ugaagaugauucgggacaa

SEQ ID NO: 681031 - RNA, 19 nt, Homo sapiens
  misc_RNA (1)...(19): siRNA sense strand
ccagaaccgcaccagauga

SEQ ID NO: 681032 - RNA, 19 nt, Homo sapiens
  misc_RNA (1)...(19): siRNA sense strand
gcucuucaacgagguggua

SEQ ID NO: 681033 - RNA, 19 nt, Homo sapiens
  misc_RNA (1)...(19): siRNA sense strand
gccagaaccgcaccagaug

SEQ ID NO: 681034 - RNA, 19 nt, Homo sapiens
  misc_RNA (1)...(19): siRNA sense strand
cgauccugcugacccauga

SEQ ID NO: 681035 - RNA, 19 nt, Homo sapiens
  misc_RNA (1)...(19): siRNA sense strand
gcugguggccgucaagaag

SEQ ID NO: 681036 - RNA, 19 nt, Homo sapiens
  misc_RNA (1)...(19): siRNA sense strand
gcagggugaagcugucaga

SEQ ID NO: 681037 - RNA, 19 nt, Homo sapiens
  misc_RNA (1)...(19): siRNA sense strand
cagagaagaggcccaaguc

SEQ ID NO: 681038 - RNA, 19 nt, Homo sapiens
  misc_RNA (1)...(19): siRNA sense strand
uaauggugauugagauggu

SEQ ID NO: 681039 - RNA, 19 nt, Homo sapiens
  misc_RNA (1)...(19): siRNA sense strand
gagaaugugguggagaugu

SEQ ID NO: 681040 - RNA, 19 nt, Homo sapiens
  misc_RNA (1)...(19): siRNA sense strand
acgagaaugugguggagau

SEQ ID NO: 681041 - RNA, 19 nt, Homo sapiens
  misc_RNA (1)...(19): siRNA sense strand
gaagaagcggguggagauc

SEQ ID NO: 681042 - RNA, 19 nt, Homo sapiens
  misc_RNA (1)...(19): siRNA sense strand
uggacaacuucaucaagau

SEQ ID NO: 681043 - RNA, 19 nt, Homo sapiens
  misc_RNA (1)...(19): siRNA sense strand
uggacgaguuugagaacau

SEQ ID NO: 681044 - RNA, 19 nt, Homo sapiens
  misc_RNA (1)...(19): siRNA sense strand
ccagagaagaggcccaagu

SEQ ID NO: 681045 - RNA, 19 nt, Homo sapiens
  misc_RNA (1)...(19): siRNA sense strand
ggaugaacgaggagcagau

SEQ ID NO: 681046 - RNA, 19 nt, Homo sapiens
  misc_RNA (1)...(19): siRNA sense strand
cacagcgaguaucccauga

SEQ ID NO: 681047 - RNA, 19 nt, Homo sapiens
  misc_RNA (1)...(19): siRNA sense strand
gcacacaucuucagacaug

SEQ ID NO: 681048 - RNA, 19 nt, Homo sapiens
  misc_RNA (1)...(19): siRNA sense strand
gaacggagaggugguguua

SEQ ID NO: 681049 - RNA, 19 nt, Homo sapiens
  misc_RNA (1)...(19): siRNA sense strand
gcucuuuggugaaggauua

SEQ ID NO: 681050 - RNA, 19 nt, Homo sapiens
  misc_RNA (1)...(19): siRNA sense strand
ccaaggagcuguucaacga

SEQ ID NO: 681051 - RNA, 19 nt, Homo sapiens
  misc_RNA (1)...(19): siRNA sense strand
caaggaauguaguaagaaa

SEQ ID NO: 681052 - RNA, 19 nt, Homo sapiens
  misc_RNA (1)...(19): siRNA sense strand
gaaaugugauaccucaaag

SEQ ID NO: 681053 - RNA, 19 nt, Homo sapiens
  misc_RNA (1)...(19): siRNA sense strand
gcuggaggcucuucaggaa

SEQ ID NO: 681054 - RNA, 19 nt, Homo sapiens
  misc_RNA (1)...(19): siRNA sense strand
gcuggaggaugcuuaaaug

SEQ ID NO: 681055 - RNA, 19 nt, Homo sapiens
  misc_RNA (1)...(19): siRNA sense strand
gaaacaaagacuuccaaga

SEQ ID NO: 681056 - RNA, 19 nt, Homo sapiens
  misc_RNA (1)...(19): siRNA sense strand
cgaaacauccagaacauga

SEQ ID NO: 681057 - RNA, 19 nt, Homo sapiens
  misc_RNA (1)...(19): siRNA sense strand
gaggaaggaguccaacuuu

SEQ ID NO: 681058 - RNA, 19 nt, Homo sapiens
  misc_RNA (1)...(19): siRNA sense strand
ggugaaauugcucaaauaa

SEQ ID NO: 681059 - RNA, 19 nt, Homo sapiens
  misc_RNA (1)...(19): siRNA sense strand
aaacaaagacuuccaagag

SEQ ID NO: 681060 - RNA, 19 nt, Homo sapiens
  misc_RNA (1)...(19): siRNA sense strand
gaagggagaauuccacaag

SEQ ID NO: 681061 - RNA, 19 nt, Homo sapiens
  misc_RNA (1)...(19): siRNA sense strand
uaaauucaaccucagugua

SEQ ID NO: 681062 - RNA, 19 nt, Homo sapiens
  misc_RNA (1)...(19): siRNA sense strand
gccuauggcuuucgaaaca

SEQ ID NO: 681063 - RNA, 19 nt, Homo sapiens
  misc_RNA (1)...(19): siRNA sense strand
gcaugugacagcuguauga

SEQ ID NO: 681064 - RNA, 19 nt, Homo sapiens
  misc_RNA (1)...(19): siRNA sense strand
gaggugguguuacgcuuug

SEQ ID NO: 681065 - RNA, 19 nt, Homo sapiens
  misc_RNA (1)...(19): siRNA sense strand
gacgauagcugcggauuuu

SEQ ID NO: 681066 - RNA, 19 nt, Homo sapiens
  misc_RNA (1)...(19): siRNA sense strand
aacaugauccugaagcuua

SEQ ID NO: 681067 - RNA, 19 nt, Homo sapiens
  misc_RNA (1)...(19): siRNA sense strand
aaauucaaccucaguguaa

SEQ ID NO: 681068 - RNA, 19 nt, Homo sapiens
  misc_RNA (1)...(19): siRNA sense strand
gaaauugcucaaauaaugg

SEQ ID NO: 681069 - RNA, 19 nt, Homo sapiens
  misc_RNA (1)...(19): siRNA sense strand
gcacugcacgcgcaaggaa

SEQ ID NO: 681070 - RNA, 19 nt, Homo sapiens
  misc_RNA (1)...(19): siRNA sense strand
gcaccuggcacacaucuuc

SEQ ID NO: 681071 - RNA, 19 nt, Homo sapiens
  misc_RNA (1)...(19): siRNA sense strand
cgcaaggaauguaguaaga

SEQ ID NO: 681072 - RNA, 19 nt, Homo sapiens
  misc_RNA (1)...(19): siRNA sense strand
cucaaucuuugccuuauuu

SEQ ID NO: 681073 - RNA, 19 nt, Homo sapiens
  misc_RNA (1)...(19): siRNA sense strand
gcaaggaauguaguaagaa

SEQ ID NO: 681074 - RNA, 19 nt, Homo sapiens
  misc_RNA (1)...(19): siRNA sense strand
gggagaauuccacaaguug

SEQ ID NO: 681075 - RNA, 19 nt, Homo sapiens
  misc_RNA (1)...(19): siRNA sense strand
gagaaacaaagacuuccaa

SEQ ID NO: 681076 - RNA, 19 nt, Homo sapiens
  misc_RNA (1)...(19): siRNA sense strand
gcagauggaaggcauuuac

SEQ ID NO: 681077 - RNA, 19 nt, Homo sapiens
  misc_RNA (1)...(19): siRNA sense strand
gaagggcaaguucccauuc

SEQ ID NO: 681078 - RNA, 19 nt, Homo sapiens
  misc_RNA (1)...(19): siRNA sense strand
gaacaugauccugaagcuu

SEQ ID NO: 681079 - RNA, 19 nt, Homo sapiens
  misc_RNA (1)...(19): siRNA sense strand
aaacugaugaccaagagaa

SEQ ID NO: 681080 - RNA, 19 nt, Homo sapiens
  misc_RNA (1)...(19): siRNA sense strand
aggugaaauugcucaaaua

SEQ ID NO: 681081 - RNA, 19 nt, Homo sapiens
  misc_RNA (1)...(19): siRNA sense strand
agaaaugugauaccucaaa

SEQ ID NO: 681082 - RNA, 19 nt, Homo sapiens
  misc_RNA (1)...(19): siRNA sense strand
acaugauccugaagcuuaa

SEQ ID NO: 681083 - RNA, 19 nt, Homo sapiens
  misc_RNA (1)...(19): siRNA sense strand
ccucaaucuuugccuuauu

SEQ ID NO: 681084 - RNA, 19 nt, Homo sapiens
  misc_RNA (1)...(19): siRNA sense strand
gggcgcugacugcguguua

SEQ ID NO: 681085 - RNA, 19 nt, Homo sapiens
  misc_RNA (1)...(19): siRNA sense strand
agggagaauuccacaaguu

SEQ ID NO: 681086 - RNA, 19 nt, Homo sapiens
  misc_RNA (1)...(19): siRNA sense strand
gaaacauccagaacaugau

SEQ ID NO: 681087 - RNA, 19 nt, Homo sapiens
  misc_RNA (1)...(19): siRNA sense strand
cgacgauagcugcggauuu

SEQ ID NO: 681088 - RNA, 19 nt, Homo sapiens
  misc_RNA (1)...(19): siRNA sense strand
acacacagccuggacauca

SEQ ID NO: 681089 - RNA, 19 nt, Homo sapiens
  misc_RNA (1)...(19): siRNA sense strand
guccaacuuucccagcaaa

SEQ ID NO: 681090 - RNA, 19 nt, Homo sapiens
  misc_RNA (1)...(19): siRNA sense strand
acucugugguuuccucaaa

SEQ ID NO: 681091 - RNA, 19 nt, Homo sapiens
  misc_RNA (1)...(19): siRNA sense strand
uaacugaugcauccagaag

SEQ ID NO: 681092 - RNA, 19 nt, Homo sapiens
  misc_RNA (1)...(19): siRNA sense strand
uggcacacaucuucagaca

SEQ ID NO: 681093 - RNA, 19 nt, Homo sapiens
  misc_RNA (1)...(19): siRNA sense strand
uuaguauccuggagaguca

SEQ ID NO: 681094 - RNA, 19 nt, Homo sapiens
  misc_RNA (1)...(19): siRNA sense strand
ggugcacuauguauuugau

SEQ ID NO: 681095 - RNA, 19 nt, Homo sapiens
  misc_RNA (1)...(19): siRNA sense strand
gaaggcauuuacgcugaca

SEQ ID NO: 681096 - RNA, 19 nt, Homo sapiens
  misc_RNA (1)...(19): siRNA sense strand
cagacggacaugcggauaa

SEQ ID NO: 681097 - RNA, 19 nt, Homo sapiens
  misc_RNA (1)...(19): siRNA sense strand
cuguaugacugcagaggaa

SEQ ID NO: 681098 - RNA, 19 nt, Homo sapiens
  misc_RNA (1)...(19): siRNA sense strand
gcacacacagccuggacau

SEQ ID NO: 681099 - RNA, 19 nt, Homo sapiens
  misc_RNA (1)...(19): siRNA sense strand
gaggucacccuugagaaga

SEQ ID NO: 681100 - RNA, 19 nt, Homo sapiens
  misc_RNA (1)...(19): siRNA sense strand
uggaggcucuucaggaaag

SEQ ID NO: 681101 - RNA, 19 nt, Homo sapiens
  misc_RNA (1)...(19): siRNA sense strand
ucugaaccuuaacaagaaa

SEQ ID NO: 681102 - RNA, 19 nt, Homo sapiens
  misc_RNA (1)...(19): siRNA sense strand
cccgagaggugcugcauac

SEQ ID NO: 681103 - RNA, 19 nt, Homo sapiens
  misc_RNA (1)...(19): siRNA sense strand
uccagaacaugauccugaa

SEQ ID NO: 681104 - RNA, 19 nt, Homo sapiens
  misc_RNA (1)...(19): siRNA sense strand
gcuaucgccagcacaguga

SEQ ID NO: 681105 - RNA, 19 nt, Homo sapiens
  misc_RNA (1)...(19): siRNA sense strand
acgcuuugcugcagccuau

SEQ ID NO: 681106 - RNA, 19 nt, Homo sapiens
  misc_RNA (1)...(19): siRNA sense strand
cacacagccuggacaucaa

SEQ ID NO: 681107 - RNA, 19 nt, Homo sapiens
  misc_RNA (1)...(19): siRNA sense strand
gaaccuuaacaagaaaugu

SEQ ID NO: 681108 - RNA, 19 nt, Homo sapiens
  misc_RNA (1)...(19): siRNA sense strand
cgucgacacucuguuugga

SEQ ID NO: 681109 - RNA, 19 nt, Homo sapiens
  misc_RNA (1)...(19): siRNA sense strand
aggaaggaguccaacuuuc

SEQ ID NO: 681110 - RNA, 19 nt, Homo sapiens
  misc_RNA (1)...(19): siRNA sense strand
gaaugugucagccgaugca

SEQ ID NO: 681111 - RNA, 19 nt, Homo sapiens
  misc_RNA (1)...(19): siRNA sense strand
uguguguccucaaucuuug

SEQ ID NO: 681112 - RNA, 19 nt, Homo sapiens
  misc_RNA (1)...(19): siRNA sense strand
agaggaaggaguccaacuu

SEQ ID NO: 681113 - RNA, 19 nt, Homo sapiens
  misc_RNA (1)...(19): siRNA sense strand
agacggacaugcggauaag

SEQ ID NO: 681114 - RNA, 19 nt, Homo sapiens
  misc_RNA (1)...(19): siRNA sense strand
ucagacaugcggccaagga

SEQ ID NO: 681115 - RNA, 19 nt, Homo sapiens
  misc_RNA (1)...(19): siRNA sense strand
gcgcaaggaauguaguaag

SEQ ID NO: 681116 - RNA, 19 nt, Homo sapiens
  misc_RNA (1)...(19): siRNA sense strand
guccucaaucuuugccuua

SEQ ID NO: 681117 - RNA, 19 nt, Homo sapiens
  misc_RNA (1)...(19): siRNA sense strand
ugacugcguguuaacauca

SEQ ID NO: 681118 - RNA, 19 nt, Homo sapiens
  misc_RNA (1)...(19): siRNA sense strand
gcacgcgcaaggaauguag

SEQ ID NO: 681119 - RNA, 19 nt, Homo sapiens
  misc_RNA (1)...(19): siRNA sense strand
ggacuucuuccgcguucug

SEQ ID NO: 681120 - RNA, 19 nt, Homo sapiens
  misc_RNA (1)...(19): siRNA sense strand
ggcgcugacugcguguuaa

SEQ ID NO: 681121 - RNA, 19 nt, Homo sapiens
  misc_RNA (1)...(19): siRNA sense strand
gcugguagugucugugugu

SEQ ID NO: 681122 - RNA, 19 nt, Homo sapiens
  misc_RNA (1)...(19): siRNA sense strand
ccugagaaacaaagacuuc

SEQ ID NO: 681123 - RNA, 19 nt, Homo sapiens
  misc_RNA (1)...(19): siRNA sense strand
caugggcucuuuggugaag

SEQ ID NO: 681124 - RNA, 19 nt, Homo sapiens
  misc_RNA (1)...(19): siRNA sense strand
gcaggucaugggcucuuug

SEQ ID NO: 681125 - RNA, 19 nt, Homo sapiens
  misc_RNA (1)...(19): siRNA sense strand
aaacauccagaacaugauc

SEQ ID NO: 681126 - RNA, 19 nt, Homo sapiens
  misc_RNA (1)...(19): siRNA sense strand
gagagaagggagaauucca

SEQ ID NO: 681127 - RNA, 19 nt, Homo sapiens
  misc_RNA (1)...(19): siRNA sense strand
gaagauuuuccacgucauu

SEQ ID NO: 681128 - RNA, 19 nt, Homo sapiens
  misc_RNA (1)...(19): siRNA sense strand
aggauuauuucgccagaca

SEQ ID NO: 681129 - RNA, 19 nt, Homo sapiens
  misc_RNA (1)...(19): siRNA sense strand
gcacacaucuucagacaug

SEQ ID NO: 681130 - RNA, 19 nt, Homo sapiens
  misc_RNA (1)...(19): siRNA sense strand
gaacggagaggugguguua

SEQ ID NO: 681131 - RNA, 19 nt, Homo sapiens
  misc_RNA (1)...(19): siRNA sense strand
gcucuuuggugaaggauua

SEQ ID NO: 681132 - RNA, 19 nt, Homo sapiens
  misc_RNA (1)...(19): siRNA sense strand
ccaaggagcuguucaacga

SEQ ID NO: 681133 - RNA, 19 nt, Homo sapiens
  misc_RNA (1)...(19): siRNA sense strand
caaggaauguaguaagaaa

SEQ ID NO: 681134 - RNA, 19 nt, Homo sapiens
  misc_RNA (1)...(19): siRNA sense strand
gaaaugugauaccucaaag

SEQ ID NO: 681135 - RNA, 19 nt, Homo sapiens
  misc_RNA (1)...(19): siRNA sense strand
gcuggaggcucuucaggaa

SEQ ID NO: 681136 - RNA, 19 nt, Homo sapiens
  misc_RNA (1)...(19): siRNA sense strand
gcuggaggaugcuuaaaug

SEQ ID NO: 681137 - RNA, 19 nt, Homo sapiens
  misc_RNA (1)...(19): siRNA sense strand
gaaacaaagacuuccaaga

SEQ ID NO: 681138 - RNA, 19 nt, Homo sapiens
  misc_RNA (1)...(19): siRNA sense strand
cgaaacauccagaacauga

SEQ ID NO: 681139 - RNA, 19 nt, Homo sapiens
  misc_RNA (1)...(19): siRNA sense strand
gaggaaggaguccaacuuu

SEQ ID NO: 681140 - RNA, 19 nt, Homo sapiens
  misc_RNA (1)...(19): siRNA sense strand
ggugaaauugcucaaauaa

SEQ ID NO: 681141 - RNA, 19 nt, Homo sapiens
  misc_RNA (1)...(19): siRNA sense strand
aaacaaagacuuccaagag

SEQ ID NO: 681142 - RNA, 19 nt, Homo sapiens
  misc_RNA (1)...(19): siRNA sense strand
gaagggagaauuccacaag

SEQ ID NO: 681143 - RNA, 19 nt, Homo sapiens
  misc_RNA (1)...(19): siRNA sense strand
uaaauucaaccucagugua

SEQ ID NO: 681144 - RNA, 19 nt, Homo sapiens
  misc_RNA (1)...(19): siRNA sense strand
gccuauggcuuucgaaaca

SEQ ID NO: 681145 - RNA, 19 nt, Homo sapiens
  misc_RNA (1)...(19): siRNA sense strand
gcaugugacagcuguauga

SEQ ID NO: 681146 - RNA, 19 nt, Homo sapiens
  misc_RNA (1)...(19): siRNA sense strand
gaggugguguuacgcuuug

SEQ ID NO: 681147 - RNA, 19 nt, Homo sapiens
  misc_RNA (1)...(19): siRNA sense strand
gacgauagcugcggauuuu

SEQ ID NO: 681148 - RNA, 19 nt, Homo sapiens
  misc_RNA (1)...(19): siRNA sense strand
aacaugauccugaagcuua

SEQ ID NO: 681149 - RNA, 19 nt, Homo sapiens
  misc_RNA (1)...(19): siRNA sense strand
aaauucaaccucaguguaa

SEQ ID NO: 681150 - RNA, 19 nt, Homo sapiens
  misc_RNA (1)...(19): siRNA sense strand
gaaauugcucaaauaaugg

SEQ ID NO: 681151 - RNA, 19 nt, Homo sapiens
  misc_RNA (1)...(19): siRNA sense strand
gcacugcacgcgcaaggaa

SEQ ID NO: 681152 - RNA, 19 nt, Homo sapiens
  misc_RNA (1)...(19): siRNA sense strand
gcaccuggcacacaucuuc

SEQ ID NO: 681153 - RNA, 19 nt, Homo sapiens
  misc_RNA (1)...(19): siRNA sense strand
cgcaaggaauguaguaaga

SEQ ID NO: 681154 - RNA, 19 nt, Homo sapiens
  misc_RNA (1)...(19): siRNA sense strand
cucaaucuuugccuuauuu

SEQ ID NO: 681155 - RNA, 19 nt, Homo sapiens
  misc_RNA (1)...(19): siRNA sense strand
gcaaggaauguaguaagaa

SEQ ID NO: 681156 - RNA, 19 nt, Homo sapiens
  misc_RNA (1)...(19): siRNA sense strand
gggagaauuccacaaguug

SEQ ID NO: 681157 - RNA, 19 nt, Homo sapiens
  misc_RNA (1)...(19): siRNA sense strand
gagaaacaaagacuuccaa

SEQ ID NO: 681158 - RNA, 19 nt, Homo sapiens
  misc_RNA (1)...(19): siRNA sense strand
gcagauggaaggcauuuac

SEQ ID NO: 681159 - RNA, 19 nt, Homo sapiens
  misc_RNA (1)...(19): siRNA sense strand
gaagggcaaguucccauuc

SEQ ID NO: 681160 - RNA, 19 nt, Homo sapiens
  misc_RNA (1)...(19): siRNA sense strand
gaacaugauccugaagcuu

SEQ ID NO: 681161 - RNA, 19 nt, Homo sapiens
  misc_RNA (1)...(19): siRNA sense strand
aaacugaugaccaagagaa

SEQ ID NO: 681162 - RNA, 19 nt, Homo sapiens
  misc_RNA (1)...(19): siRNA sense strand
aggugaaauugcucaaaua

SEQ ID NO: 681163 - RNA, 19 nt, Homo sapiens
  misc_RNA (1)...(19): siRNA sense strand
agaaaugugauaccucaaa

SEQ ID NO: 681164 - RNA, 19 nt, Homo sapiens
  misc_RNA (1)...(19): siRNA sense strand
acaugauccugaagcuuaa

SEQ ID NO: 681165 - RNA, 19 nt, Homo sapiens
  misc_RNA (1)...(19): siRNA sense strand
ccucaaucuuugccuuauu

SEQ ID NO: 681166 - RNA, 19 nt, Homo sapiens
  misc_RNA (1)...(19): siRNA sense strand
gggcgcugacugcguguua

SEQ ID NO: 681167 - RNA, 19 nt, Homo sapiens
  misc_RNA (1)...(19): siRNA sense strand
agggagaauuccacaaguu

SEQ ID NO: 681168 - RNA, 19 nt, Homo sapiens
  misc_RNA (1)...(19): siRNA sense strand
gaaacauccagaacaugau

SEQ ID NO: 681169 - RNA, 19 nt, Homo sapiens
  misc_RNA (1)...(19): siRNA sense strand
cgacgauagcugcggauuu

SEQ ID NO: 681170 - RNA, 19 nt, Homo sapiens
  misc_RNA (1)...(19): siRNA sense strand
acacacagccuggacauca

SEQ ID NO: 681171 - RNA, 19 nt, Homo sapiens
  misc_RNA (1)...(19): siRNA sense strand
guccaacuuucccagcaaa

SEQ ID NO: 681172 - RNA, 19 nt, Homo sapiens
  misc_RNA (1)...(19): siRNA sense strand
acucugugguuuccucaaa

SEQ ID NO: 681173 - RNA, 19 nt, Homo sapiens
  misc_RNA (1)...(19): siRNA sense strand
uaacugaugcauccagaag

SEQ ID NO: 681174 - RNA, 19 nt, Homo sapiens
  misc_RNA (1)...(19): siRNA sense strand
uggcacacaucuucagaca

SEQ ID NO: 681175 - RNA, 19 nt, Homo sapiens
  misc_RNA (1)...(19): siRNA sense strand
uuaguauccuggagaguca

SEQ ID NO: 681176 - RNA, 19 nt, Homo sapiens
  misc_RNA (1)...(19): siRNA sense strand
ggugcacuauguauuugau

SEQ ID NO: 681177 - RNA, 19 nt, Homo sapiens
  misc_RNA (1)...(19): siRNA sense strand
gaaggcauuuacgcugaca

SEQ ID NO: 681178 - RNA, 19 nt, Homo sapiens
  misc_RNA (1)...(19): siRNA sense strand
cagacggacaugcggauaa

SEQ ID NO: 681179 - RNA, 19 nt, Homo sapiens
  misc_RNA (1)...(19): siRNA sense strand
cuguaugacugcagaggaa

SEQ ID NO: 681180 - RNA, 19 nt, Homo sapiens
  misc_RNA (1)...(19): siRNA sense strand
gcacacacagccuggacau

SEQ ID NO: 681181 - RNA, 19 nt, Homo sapiens
  misc_RNA (1)...(19): siRNA sense strand
gaggucacccuugagaaga

SEQ ID NO: 681182 - RNA, 19 nt, Homo sapiens
  misc_RNA (1)...(19): siRNA sense strand
uggaggcucuucaggaaag

SEQ ID NO: 681183 - RNA, 19 nt, Homo sapiens
  misc_RNA (1)...(19): siRNA sense strand
ucugaaccuuaacaagaaa

SEQ ID NO: 681184 - RNA, 19 nt, Homo sapiens
  misc_RNA (1)...(19): siRNA sense strand
cccgagaggugcugcauac

SEQ ID NO: 681185 - RNA, 19 nt, Homo sapiens
  misc_RNA (1)...(19): siRNA sense strand
uccagaacaugauccugaa

SEQ ID NO: 681186 - RNA, 19 nt, Homo sapiens
  misc_RNA (1)...(19): siRNA sense strand
gcuaucgccagcacaguga

SEQ ID NO: 681187 - RNA, 19 nt, Homo sapiens
  misc_RNA (1)...(19): siRNA sense strand
acgcuuugcugcagccuau

SEQ ID NO: 681188 - RNA, 19 nt, Homo sapiens
  misc_RNA (1)...(19): siRNA sense strand
cacacagccuggacaucaa

SEQ ID NO: 681189 - RNA, 19 nt, Homo sapiens
  misc_RNA (1)...(19): siRNA sense strand
gaaccuuaacaagaaaugu

SEQ ID NO: 681190 - RNA, 19 nt, Homo sapiens
  misc_RNA (1)...(19): siRNA sense strand
cgucgacacucuguuugga

SEQ ID NO: 681191 - RNA, 19 nt, Homo sapiens
  misc_RNA (1)...(19): siRNA sense strand
aggaaggaguccaacuuuc

SEQ ID NO: 681192 - RNA, 19 nt, Homo sapiens
  misc_RNA (1)...(19): siRNA sense strand
gaaugugucagccgaugca

SEQ ID NO: 681193 - RNA, 19 nt, Homo sapiens
  misc_RNA (1)...(19): siRNA sense strand
uguguguccucaaucuuug

SEQ ID NO: 681194 - RNA, 19 nt, Homo sapiens
  misc_RNA (1)...(19): siRNA sense strand
agaggaaggaguccaacuu

SEQ ID NO: 681195 - RNA, 19 nt, Homo sapiens
  misc_RNA (1)...(19): siRNA sense strand
agacggacaugcggauaag

SEQ ID NO: 681196 - RNA, 19 nt, Homo sapiens
  misc_RNA (1)...(19): siRNA sense strand
ucagacaugcggccaagga

SEQ ID NO: 681197 - RNA, 19 nt, Homo sapiens
  misc_RNA (1)...(19): siRNA sense strand
gcgcaaggaauguaguaag

SEQ ID NO: 681198 - RNA, 19 nt, Homo sapiens
  misc_RNA (1)...(19): siRNA sense strand
guccucaaucuuugccuua

SEQ ID NO: 681199 - RNA, 19 nt, Homo sapiens
  misc_RNA (1)...(19): siRNA sense strand
ugacugcguguuaacauca

SEQ ID NO: 681200 - RNA, 19 nt, Homo sapiens
  misc_RNA (1)...(19): siRNA sense strand
gcacgcgcaaggaauguag

SEQ ID NO: 681201 - RNA, 19 nt, Homo sapiens
  misc_RNA (1)...(19): siRNA sense strand
ggacuucuuccgcguucug

SEQ ID NO: 681202 - RNA, 19 nt, Homo sapiens
  misc_RNA (1)...(19): siRNA sense strand
ggcgcugacugcguguuaa

SEQ ID NO: 681203 - RNA, 19 nt, Homo sapiens
  misc_RNA (1)...(19): siRNA sense strand
gcugguagugucugugugu

SEQ ID NO: 681204 - RNA, 19 nt, Homo sapiens
  misc_RNA (1)...(19): siRNA sense strand
ccugagaaacaaagacuuc

SEQ ID NO: 681205 - RNA, 19 nt, Homo sapiens
  misc_RNA (1)...(19): siRNA sense strand
caugggcucuuuggugaag

SEQ ID NO: 681206 - RNA, 19 nt, Homo sapiens
  misc_RNA (1)...(19): siRNA sense strand
gcaggucaugggcucuuug

SEQ ID NO: 681207 - RNA, 19 nt, Homo sapiens
  misc_RNA (1)...(19): siRNA sense strand
aaacauccagaacaugauc

SEQ ID NO: 681208 - RNA, 19 nt, Homo sapiens
  misc_RNA (1)...(19): siRNA sense strand
gagagaagggagaauucca

SEQ ID NO: 681209 - RNA, 19 nt, Homo sapiens
  misc_RNA (1)...(19): siRNA sense strand
gaagauuuuccacgucauu

SEQ ID NO: 681210 - RNA, 19 nt, Homo sapiens
  misc_RNA (1)...(19): siRNA sense strand
aggauuauuucgccagaca

SEQ ID NO: 681211 - RNA, 19 nt, Homo sapiens
  misc_RNA (1)...(19): siRNA sense strand
cggaauagcuuuggauuaa

SEQ ID NO: 681212 - RNA, 19 nt, Homo sapiens
  misc_RNA (1)...(19): siRNA sense strand
ggacaacggccaccuguuu

SEQ ID NO: 681213 - RNA, 19 nt, Homo sapiens
  misc_RNA (1)...(19): siRNA sense strand
ugaaguuacucaaccauuu

SEQ ID NO: 681214 - RNA, 19 nt, Homo sapiens
  misc_RNA (1)...(19): siRNA sense strand
ggacaacgguaggaugauu

SEQ ID NO: 681215 - RNA, 19 nt, Homo sapiens
  misc_RNA (1)...(19): siRNA sense strand
ggacuguguuucccuuaaa

SEQ ID NO: 681216 - RNA, 19 nt, Homo sapiens
  misc_RNA (1)...(19): siRNA sense strand
gcgaaugcauuacaaagga

SEQ ID NO: 681217 - RNA, 19 nt, Homo sapiens
  misc_RNA (1)...(19): siRNA sense strand
cgaggcaacuccauauuau

SEQ ID NO: 681218 - RNA, 19 nt, Homo sapiens
  misc_RNA (1)...(19): siRNA sense strand
ggaauagcuuuggauuaaa

SEQ ID NO: 681219 - RNA, 19 nt, Homo sapiens
  misc_RNA (1)...(19): siRNA sense strand
ugaagccgauuauuccuaa

SEQ ID NO: 681220 - RNA, 19 nt, Homo sapiens
  misc_RNA (1)...(19): siRNA sense strand
gggcgcuggugaagaaaua

SEQ ID NO: 681221 - RNA, 19 nt, Homo sapiens
  misc_RNA (1)...(19): siRNA sense strand
gcauugucgucuuggauaa

SEQ ID NO: 681222 - RNA, 19 nt, Homo sapiens
  misc_RNA (1)...(19): siRNA sense strand
gaaguuacucaaccauuug

SEQ ID NO: 681223 - RNA, 19 nt, Homo sapiens
  misc_RNA (1)...(19): siRNA sense strand
agagaacacuggacagaga

SEQ ID NO: 681224 - RNA, 19 nt, Homo sapiens
  misc_RNA (1)...(19): siRNA sense strand
gaaauuguagccacagaug

SEQ ID NO: 681225 - RNA, 19 nt, Homo sapiens
  misc_RNA (1)...(19): siRNA sense strand
caaauucacacuuucaugu

SEQ ID NO: 681226 - RNA, 19 nt, Homo sapiens
  misc_RNA (1)...(19): siRNA sense strand
cagcccaaauucacacuuu

SEQ ID NO: 681227 - RNA, 19 nt, Homo sapiens
  misc_RNA (1)...(19): siRNA sense strand
gcucugaggcaguuaggua

SEQ ID NO: 681228 - RNA, 19 nt, Homo sapiens
  misc_RNA (1)...(19): siRNA sense strand
gaaaaggcaaguuauguuu

SEQ ID NO: 681229 - RNA, 19 nt, Homo sapiens
  misc_RNA (1)...(19): siRNA sense strand
gaguguagccuaugcucua

SEQ ID NO: 681230 - RNA, 19 nt, Homo sapiens
  misc_RNA (1)...(19): siRNA sense strand
uauaaagaccggcaauuug

SEQ ID NO: 681231 - RNA, 19 nt, Homo sapiens
  misc_RNA (1)...(19): siRNA sense strand
ugacauagguagcaacacu

SEQ ID NO: 681232 - RNA, 19 nt, Homo sapiens
  misc_RNA (1)...(19): siRNA sense strand
gaaaaccgagcacaacaua

SEQ ID NO: 681233 - RNA, 19 nt, Homo sapiens
  misc_RNA (1)...(19): siRNA sense strand
ucaggucgcuggacuacga

SEQ ID NO: 681234 - RNA, 19 nt, Homo sapiens
  misc_RNA (1)...(19): siRNA sense strand
ucuugcagcuugauauaaa

SEQ ID NO: 681235 - RNA, 19 nt, Homo sapiens
  misc_RNA (1)...(19): siRNA sense strand
gaggcaacuccauauuaua

SEQ ID NO: 681236 - RNA, 19 nt, Homo sapiens
  misc_RNA (1)...(19): siRNA sense strand
gcucuugcagcuugauaua

SEQ ID NO: 681237 - RNA, 19 nt, Homo sapiens
  misc_RNA (1)...(19): siRNA sense strand
cuauagaagugguggaugu

SEQ ID NO: 681238 - RNA, 19 nt, Homo sapiens
  misc_RNA (1)...(19): siRNA sense strand
ucgaggcaacuccauauua

SEQ ID NO: 681239 - RNA, 19 nt, Homo sapiens
  misc_RNA (1)...(19): siRNA sense strand
ccaaggcgaugaaguuacu

SEQ ID NO: 681240 - RNA, 19 nt, Homo sapiens
  misc_RNA (1)...(19): siRNA sense strand
cgaaugcauuacaaaggaa

SEQ ID NO: 681241 - RNA, 19 nt, Homo sapiens
  misc_RNA (1)...(19): siRNA sense strand
aggcaacuccauauuauaa

SEQ ID NO: 681242 - RNA, 19 nt, Homo sapiens
  misc_RNA (1)...(19): siRNA sense strand
cagcagaaauucgccugaa

SEQ ID NO: 681243 - RNA, 19 nt, Homo sapiens
  misc_RNA (1)...(19): siRNA sense strand
gcagcucacagauauaaau

SEQ ID NO: 681244 - RNA, 19 nt, Homo sapiens
  misc_RNA (1)...(19): siRNA sense strand
ccacagaaaaggcaaguua

SEQ ID NO: 681245 - RNA, 19 nt, Homo sapiens
  misc_RNA (1)...(19): siRNA sense strand
uuccagcucuuacuagaaa

SEQ ID NO: 681246 - RNA, 19 nt, Homo sapiens
  misc_RNA (1)...(19): siRNA sense strand
gaucuccccuuucuuuuga

SEQ ID NO: 681247 - RNA, 19 nt, Homo sapiens
  misc_RNA (1)...(19): siRNA sense strand
gcccaggacuuugacauag

SEQ ID NO: 681248 - RNA, 19 nt, Homo sapiens
  misc_RNA (1)...(19): siRNA sense strand
gcucacagauauaaaugac

SEQ ID NO: 681249 - RNA, 19 nt, Homo sapiens
  misc_RNA (1)...(19): siRNA sense strand
gcauuacaaaggaaacaaa

SEQ ID NO: 681250 - RNA, 19 nt, Homo sapiens
  misc_RNA (1)...(19): siRNA sense strand
uagaagugguggaugugaa

SEQ ID NO: 681251 - RNA, 19 nt, Homo sapiens
  misc_RNA (1)...(19): siRNA sense strand
gauauaaagaccggcaauu

SEQ ID NO: 681252 - RNA, 19 nt, Homo sapiens
  misc_RNA (1)...(19): siRNA sense strand
aaacagaaaguggcuauuc

SEQ ID NO: 681253 - RNA, 19 nt, Homo sapiens
  misc_RNA (1)...(19): siRNA sense strand
gcauuuccagcucuuacua

SEQ ID NO: 681254 - RNA, 19 nt, Homo sapiens
  misc_RNA (1)...(19): siRNA sense strand
ccgacucgcucacugucua

SEQ ID NO: 681255 - RNA, 19 nt, Homo sapiens
  misc_RNA (1)...(19): siRNA sense strand
gagagagccaagccgagua

SEQ ID NO: 681256 - RNA, 19 nt, Homo sapiens
  misc_RNA (1)...(19): siRNA sense strand
gcacuguggcuauagaagu

SEQ ID NO: 681257 - RNA, 19 nt, Homo sapiens
  misc_RNA (1)...(19): siRNA sense strand
aaaggcaaguuauguuucu

SEQ ID NO: 681258 - RNA, 19 nt, Homo sapiens
  misc_RNA (1)...(19): siRNA sense strand
gcaacuccauauuauaacg

SEQ ID NO: 681259 - RNA, 19 nt, Homo sapiens
  misc_RNA (1)...(19): siRNA sense strand
gaaaaugcacuguggcuau

SEQ ID NO: 681260 - RNA, 19 nt, Homo sapiens
  misc_RNA (1)...(19): siRNA sense strand
cgagaaaacagcagaaauu

SEQ ID NO: 681261 - RNA, 19 nt, Homo sapiens
  misc_RNA (1)...(19): siRNA sense strand
gacaacgguaggaugauuu

SEQ ID NO: 681262 - RNA, 19 nt, Homo sapiens
  misc_RNA (1)...(19): siRNA sense strand
auauaaagaccggcaauuu

SEQ ID NO: 681263 - RNA, 19 nt, Homo sapiens
  misc_RNA (1)...(19): siRNA sense strand
gaguacaacaucaccauca

SEQ ID NO: 681264 - RNA, 19 nt, Homo sapiens
  misc_RNA (1)...(19): siRNA sense strand
cuugcuauauuguugcuuu

SEQ ID NO: 681265 - RNA, 19 nt, Homo sapiens
  misc_RNA (1)...(19): siRNA sense strand
gaaugcauuacaaaggaaa

SEQ ID NO: 681266 - RNA, 19 nt, Homo sapiens
  misc_RNA (1)...(19): siRNA sense strand
ccggaauagcuuuggauua

SEQ ID NO: 681267 - RNA, 19 nt, Homo sapiens
  misc_RNA (1)...(19): siRNA sense strand
ugucgucgcucuuccucuu

SEQ ID NO: 681268 - RNA, 19 nt, Homo sapiens
  misc_RNA (1)...(19): siRNA sense strand
gacaacggccaccuguuug

SEQ ID NO: 681269 - RNA, 19 nt, Homo sapiens
  misc_RNA (1)...(19): siRNA sense strand
aaaaugcacuguggcuaua

SEQ ID NO: 681270 - RNA, 19 nt, Homo sapiens
  misc_RNA (1)...(19): siRNA sense strand
aaauagcccaggacuuuga

SEQ ID NO: 681271 - RNA, 19 nt, Homo sapiens
  misc_RNA (1)...(19): siRNA sense strand
gcagaaauucgccugaaaa

SEQ ID NO: 681272 - RNA, 19 nt, Homo sapiens
  misc_RNA (1)...(19): siRNA sense strand
ccgauuauuccuaaccuuu

SEQ ID NO: 681273 - RNA, 19 nt, Homo sapiens
  misc_RNA (1)...(19): siRNA sense strand
aauucacacuuucauguug

SEQ ID NO: 681274 - RNA, 19 nt, Homo sapiens
  misc_RNA (1)...(19): siRNA sense strand
acugcugccuuccggaaua

SEQ ID NO: 681275 - RNA, 19 nt, Homo sapiens
  misc_RNA (1)...(19): siRNA sense strand
gaaacagaaaguggcuauu

SEQ ID NO: 681276 - RNA, 19 nt, Homo sapiens
  misc_RNA (1)...(19): siRNA sense strand
ggaaauuguagccacagau

SEQ ID NO: 681277 - RNA, 19 nt, Homo sapiens
  misc_RNA (1)...(19): siRNA sense strand
acucaaccauuuguaauag

SEQ ID NO: 681278 - RNA, 19 nt, Homo sapiens
  misc_RNA (1)...(19): siRNA sense strand
gaagaaauagggaaaacug

SEQ ID NO: 681279 - RNA, 19 nt, Homo sapiens
  misc_RNA (1)...(19): siRNA sense strand
uacacaaucagcccaaauu

SEQ ID NO: 681280 - RNA, 19 nt, Homo sapiens
  misc_RNA (1)...(19): siRNA sense strand
ccagaaugaucuccccuuu

SEQ ID NO: 681281 - RNA, 19 nt, Homo sapiens
  misc_RNA (1)...(19): siRNA sense strand
uguagccuaugcucuauuc

SEQ ID NO: 681282 - RNA, 19 nt, Homo sapiens
  misc_RNA (1)...(19): siRNA sense strand
ccaggacuuugacauaggu

SEQ ID NO: 681283 - RNA, 19 nt, Homo sapiens
  misc_RNA (1)...(19): siRNA sense strand
ccaaauucacacuuucaug

SEQ ID NO: 681284 - RNA, 19 nt, Homo sapiens
  misc_RNA (1)...(19): siRNA sense strand
guuucuugcuauauuguug

SEQ ID NO: 681285 - RNA, 19 nt, Homo sapiens
  misc_RNA (1)...(19): siRNA sense strand
aaaccgagcacaacauaac

SEQ ID NO: 681286 - RNA, 19 nt, Homo sapiens
  misc_RNA (1)...(19): siRNA sense strand
cugcagcucacagauauaa

SEQ ID NO: 681287 - RNA, 19 nt, Homo sapiens
  misc_RNA (1)...(19): siRNA sense strand
uuacaaaggaaacaaagag

SEQ ID NO: 681288 - RNA, 19 nt, Homo sapiens
  misc_RNA (1)...(19): siRNA sense strand
ugaaaagggcauuggauuu

SEQ ID NO: 681289 - RNA, 19 nt, Homo sapiens
  misc_RNA (1)...(19): siRNA sense strand
agcagaaauucgccugaaa

SEQ ID NO: 681290 - RNA, 19 nt, Homo sapiens
  misc_RNA (1)...(19): siRNA sense strand
cgaugaaguuacucaacca

SEQ ID NO: 681291 - RNA, 19 nt, Homo sapiens
  misc_RNA (1)...(19): siRNA sense strand
cacaaucagcccaaauuca

SEQ ID NO: 681292 - RNA, 19 nt, Homo sapiens
  misc_RNA (1)...(19): siRNA sense strand
gaacccuguauauugcauu

SEQ ID NO: 681293 - RNA, 19 nt, Homo sapiens
  misc_RNA (1)...(19): siRNA sense strand
gauuauuccuaaccuuuug

SEQ ID NO: 681294 - RNA, 19 nt, Homo sapiens
  misc_RNA (1)...(19): siRNA sense strand
caagccgaguacaacauca

SEQ ID NO: 681295 - RNA, 19 nt, Homo sapiens
  misc_RNA (1)...(19): siRNA sense strand
gagccaagccgaguacaac

SEQ ID NO: 681296 - RNA, 19 nt, Homo sapiens
  misc_RNA (1)...(19): siRNA sense strand
agaaacagaaaguggcuau

SEQ ID NO: 681297 - RNA, 19 nt, Homo sapiens
  misc_RNA (1)...(19): siRNA sense strand
aacccuguauauugcauuu

SEQ ID NO: 681298 - RNA, 19 nt, Homo sapiens
  misc_RNA (1)...(19): siRNA sense strand
auugucgucuuggauaaua

SEQ ID NO: 681299 - RNA, 19 nt, Homo sapiens
  misc_RNA (1)...(19): siRNA sense strand
gcccaaauucacacuuuca

SEQ ID NO: 681300 - RNA, 19 nt, Homo sapiens
  misc_RNA (1)...(19): siRNA sense strand
gcuauucuguggccaaccu

SEQ ID NO: 681301 - RNA, 19 nt, Homo sapiens
  misc_RNA (1)...(19): siRNA sense strand
gauuugcuccauccagaau

SEQ ID NO: 681302 - RNA, 19 nt, Homo sapiens
  misc_RNA (1)...(19): siRNA sense strand
cauaccagaagaaacagaa

SEQ ID NO: 681303 - RNA, 19 nt, Homo sapiens
  misc_RNA (1)...(19): siRNA sense strand
gcgcgaaugcauuacaaag

SEQ ID NO: 681304 - RNA, 19 nt, Homo sapiens
  misc_RNA (1)...(19): siRNA sense strand
aaagggcauuggauuucga

SEQ ID NO: 681305 - RNA, 19 nt, Homo sapiens
  misc_RNA (1)...(19): siRNA sense strand
ucgcggagauggcagaaaa

SEQ ID NO: 681306 - RNA, 19 nt, Homo sapiens
  misc_RNA (1)...(19): siRNA sense strand
cgcauugucgucuuggaua

SEQ ID NO: 681307 - RNA, 19 nt, Homo sapiens
  misc_RNA (1)...(19): siRNA sense strand
acagagaacacuggacaga

SEQ ID NO: 681308 - RNA, 19 nt, Homo sapiens
  misc_RNA (1)...(19): siRNA sense strand
gaccaccacaauucgcauu

SEQ ID NO: 681309 - RNA, 19 nt, Homo sapiens
  misc_RNA (1)...(19): siRNA sense strand
ucaaccauuuguaauagac

SEQ ID NO: 681310 - RNA, 19 nt, Homo sapiens
  misc_RNA (1)...(19): siRNA sense strand
ccacuacgagguguguuug

SEQ ID NO: 681311 - RNA, 19 nt, Homo sapiens
  misc_RNA (1)...(19): siRNA sense strand
gaaagcaacugguuugugu

SEQ ID NO: 681312 - RNA, 19 nt, Homo sapiens
  misc_RNA (1)...(19): siRNA sense strand
auaaagagcugacagauga

SEQ ID NO: 681313 - RNA, 19 nt, Homo sapiens
  misc_RNA (1)...(19): siRNA sense strand
gcacaaauacuucuuccua

SEQ ID NO: 681314 - RNA, 19 nt, Homo sapiens
  misc_RNA (1)...(19): siRNA sense strand
ugacacagaugaaccauau

SEQ ID NO: 681315 - RNA, 19 nt, Homo sapiens
  misc_RNA (1)...(19): siRNA sense strand
caacaugcaucccuucuuc

SEQ ID NO: 681316 - RNA, 19 nt, Homo sapiens
  misc_RNA (1)...(19): siRNA sense strand
ggaaccaucugcuacauca

SEQ ID NO: 681317 - RNA, 19 nt, Homo sapiens
  misc_RNA (1)...(19): siRNA sense strand
ccacaagucugccuucaau

SEQ ID NO: 681318 - RNA, 19 nt, Homo sapiens
  misc_RNA (1)...(19): siRNA sense strand
gaggagcgguggcuaguga

SEQ ID NO: 681319 - RNA, 19 nt, Homo sapiens
  misc_RNA (1)...(19): siRNA sense strand
gacuuggccuggaugauua

SEQ ID NO: 681320 - RNA, 19 nt, Homo sapiens
  misc_RNA (1)...(19): siRNA sense strand
gcaaagacccagacaucaa

SEQ ID NO: 681321 - RNA, 19 nt, Homo sapiens
  misc_RNA (1)...(19): siRNA sense strand
ucacuuaugugccacuauu

SEQ ID NO: 681322 - RNA, 19 nt, Homo sapiens
  misc_RNA (1)...(19): siRNA sense strand
gggcagcucuggcuagaug

SEQ ID NO: 681323 - RNA, 19 nt, Homo sapiens
  misc_RNA (1)...(19): siRNA sense strand
uaugaacucucuccugauu

SEQ ID NO: 681324 - RNA, 19 nt, Homo sapiens
  misc_RNA (1)...(19): siRNA sense strand
ggacuuggccuggaugauu

SEQ ID NO: 681325 - RNA, 19 nt, Homo sapiens
  misc_RNA (1)...(19): siRNA sense strand
cacaaauacuucuuccuaa

SEQ ID NO: 681326 - RNA, 19 nt, Homo sapiens
  misc_RNA (1)...(19): siRNA sense strand
caccucaacuuccagauug

SEQ ID NO: 681327 - RNA, 19 nt, Homo sapiens
  misc_RNA (1)...(19): siRNA sense strand
gaagaaguauaugaacucu

SEQ ID NO: 681328 - RNA, 19 nt, Homo sapiens
  misc_RNA (1)...(19): siRNA sense strand
agaaguauaugaacucucu

SEQ ID NO: 681329 - RNA, 19 nt, Homo sapiens
  misc_RNA (1)...(19): siRNA sense strand
gacaucauccacucacuaa

SEQ ID NO: 681330 - RNA, 19 nt, Homo sapiens
  misc_RNA (1)...(19): siRNA sense strand
gcuuugagcccaccaagaa

SEQ ID NO: 681331 - RNA, 19 nt, Homo sapiens
  misc_RNA (1)...(19): siRNA sense strand
ggccaaccaugucuucuuc

SEQ ID NO: 681332 - RNA, 19 nt, Homo sapiens
  misc_RNA (1)...(19): siRNA sense strand
augccuaucuucaccaaua

SEQ ID NO: 681333 - RNA, 19 nt, Homo sapiens
  misc_RNA (1)...(19): siRNA sense strand
gaauaaagagcugacagau

SEQ ID NO: 681334 - RNA, 19 nt, Homo sapiens
  misc_RNA (1)...(19): siRNA sense strand
guacaaccaccagcacaaa

SEQ ID NO: 681335 - RNA, 19 nt, Homo sapiens
  misc_RNA (1)...(19): siRNA sense strand
acaaccaccagcacaaaua

SEQ ID NO: 681336 - RNA, 19 nt, Homo sapiens
  misc_RNA (1)...(19): siRNA sense strand
acaagucugccuucaauga

SEQ ID NO: 681337 - RNA, 19 nt, Homo sapiens
  misc_RNA (1)...(19): siRNA sense strand
gugaagaaguauaugaacu

SEQ ID NO: 681338 - RNA, 19 nt, Homo sapiens
  misc_RNA (1)...(19): siRNA sense strand
cgacaucauccacucacua

SEQ ID NO: 681339 - RNA, 19 nt, Homo sapiens
  misc_RNA (1)...(19): siRNA sense strand
ccaagcauggcauagagua

SEQ ID NO: 681340 - RNA, 19 nt, Homo sapiens
  misc_RNA (1)...(19): siRNA sense strand
cacgaugccucgacacaau

SEQ ID NO: 681341 - RNA, 19 nt, Homo sapiens
  misc_RNA (1)...(19): siRNA sense strand
ugaacucucuccugauugg

SEQ ID NO: 681342 - RNA, 19 nt, Homo sapiens
  misc_RNA (1)...(19): siRNA sense strand
ggaaagcaacugguuugug

SEQ ID NO: 681343 - RNA, 19 nt, Homo sapiens
  misc_RNA (1)...(19): siRNA sense strand
cauauucccaugcacauug

SEQ ID NO: 681344 - RNA, 19 nt, Homo sapiens
  misc_RNA (1)...(19): siRNA sense strand
cguaagguguacaacauca

SEQ ID NO: 681345 - RNA, 19 nt, Homo sapiens
  misc_RNA (1)...(19): siRNA sense strand
cgacacaauuaccacaaag

SEQ ID NO: 681346 - RNA, 19 nt, Homo sapiens
  misc_RNA (1)...(19): siRNA sense strand
gauccucucuguggagcuu

SEQ ID NO: 681347 - RNA, 19 nt, Homo sapiens
  misc_RNA (1)...(19): siRNA sense strand
gcauagaguaccaguccaa

SEQ ID NO: 681348 - RNA, 19 nt, Homo sapiens
  misc_RNA (1)...(19): siRNA sense strand
augcaucccuucuucuuug

SEQ ID NO: 681349 - RNA, 19 nt, Homo sapiens
  misc_RNA (1)...(19): siRNA sense strand
ggcuagugaucgaccguaa

SEQ ID NO: 681350 - RNA, 19 nt, Homo sapiens
  misc_RNA (1)...(19): siRNA sense strand
acacagaugaaccauauuc

SEQ ID NO: 681351 - RNA, 19 nt, Homo sapiens
  misc_RNA (1)...(19): siRNA sense strand
cagagcagcccagcuuuga

SEQ ID NO: 681352 - RNA, 19 nt, Homo sapiens
  misc_RNA (1)...(19): siRNA sense strand
caucauccacucacuaaag

SEQ ID NO: 681353 - RNA, 19 nt, Homo sapiens
  misc_RNA (1)...(19): siRNA sense strand
ucgacacaauuaccacaaa

SEQ ID NO: 681354 - RNA, 19 nt, Homo sapiens
  misc_RNA (1)...(19): siRNA sense strand
gaacauggacuggguuucc

SEQ ID NO: 681355 - RNA, 19 nt, Homo sapiens
  misc_RNA (1)...(19): siRNA sense strand
ccgcaaagacccagacauc

SEQ ID NO: 681356 - RNA, 19 nt, Homo sapiens
  misc_RNA (1)...(19): siRNA sense strand
ccuggaugauuaccuucua

SEQ ID NO: 681357 - RNA, 19 nt, Homo sapiens
  misc_RNA (1)...(19): siRNA sense strand
gagcuugggaaacagaaga

SEQ ID NO: 681358 - RNA, 19 nt, Homo sapiens
  misc_RNA (1)...(19): siRNA sense strand
agaauaaagagcugacaga

SEQ ID NO: 681359 - RNA, 19 nt, Homo sapiens
  misc_RNA (1)...(19): siRNA sense strand
cgaugccucgacacaauua

SEQ ID NO: 681360 - RNA, 19 nt, Homo sapiens
  misc_RNA (1)...(19): siRNA sense strand
aaaguggaaccaucugcua

SEQ ID NO: 681361 - RNA, 19 nt, Homo sapiens
  misc_RNA (1)...(19): siRNA sense strand
caugcaauguccacaaguc

SEQ ID NO: 681362 - RNA, 19 nt, Homo sapiens
  misc_RNA (1)...(19): siRNA sense strand
caaagacccagacaucaac

SEQ ID NO: 681363 - RNA, 19 nt, Homo sapiens
  misc_RNA (1)...(19): siRNA sense strand
guacaacaucagcgaguuc

SEQ ID NO: 681364 - RNA, 19 nt, Homo sapiens
  misc_RNA (1)...(19): siRNA sense strand
gcuucuuccucacuuaugu

SEQ ID NO: 681365 - RNA, 19 nt, Homo sapiens
  misc_RNA (1)...(19): siRNA sense strand
uacuuccagugguauauuu

SEQ ID NO: 681366 - RNA, 19 nt, Homo sapiens
  misc_RNA (1)...(19): siRNA sense strand
cagggcagcucuggcuaga

SEQ ID NO: 681367 - RNA, 19 nt, Homo sapiens
  misc_RNA (1)...(19): siRNA sense strand
aauaaagagcugacagaug

SEQ ID NO: 681368 - RNA, 19 nt, Homo sapiens
  misc_RNA (1)...(19): siRNA sense strand
ccagagcagcccagcuuug

SEQ ID NO: 681369 - RNA, 19 nt, Homo sapiens
  misc_RNA (1)...(19): siRNA sense strand
gcccaacugcuuccgcaaa

SEQ ID NO: 681370 - RNA, 19 nt, Homo sapiens
  misc_RNA (1)...(19): siRNA sense strand
ugaaccauauucccaugca

SEQ ID NO: 681371 - RNA, 19 nt, Homo sapiens
  misc_RNA (1)...(19): siRNA sense strand
ccaacugcuuccgcaaaga

SEQ ID NO: 681372 - RNA, 19 nt, Homo sapiens
  misc_RNA (1)...(19): siRNA sense strand
gaccguaagguguacaaca

SEQ ID NO: 681373 - RNA, 19 nt, Homo sapiens
  misc_RNA (1)...(19): siRNA sense strand
ugccuaucuucaccaauaa

SEQ ID NO: 681374 - RNA, 19 nt, Homo sapiens
  misc_RNA (1)...(19): siRNA sense strand
acacaauuaccacaaagug

SEQ ID NO: 681375 - RNA, 19 nt, Homo sapiens
  misc_RNA (1)...(19): siRNA sense strand
ugaagaaguauaugaacuc

SEQ ID NO: 681376 - RNA, 19 nt, Homo sapiens
  misc_RNA (1)...(19): siRNA sense strand
aaccaucugcuacaucauu

SEQ ID NO: 681377 - RNA, 19 nt, Homo sapiens
  misc_RNA (1)...(19): siRNA sense strand
gaucgaccguaagguguac

SEQ ID NO: 681378 - RNA, 19 nt, Homo sapiens
  misc_RNA (1)...(19): siRNA sense strand
caugcaucccuucuucuuu

SEQ ID NO: 681379 - RNA, 19 nt, Homo sapiens
  misc_RNA (1)...(19): siRNA sense strand
caaccaccagcacaaauac

SEQ ID NO: 681380 - RNA, 19 nt, Homo sapiens
  misc_RNA (1)...(19): siRNA sense strand
acaccucaacuuccagauu

SEQ ID NO: 681381 - RNA, 19 nt, Homo sapiens
  misc_RNA (1)...(19): siRNA sense strand
ucaguggacaccucaacuu

SEQ ID NO: 681382 - RNA, 19 nt, Homo sapiens
  misc_RNA (1)...(19): siRNA sense strand
uuugagcccaccaagaaua

SEQ ID NO: 681383 - RNA, 19 nt, Homo sapiens
  misc_RNA (1)...(19): siRNA sense strand
uggccuggaugauuaccuu

SEQ ID NO: 681384 - RNA, 19 nt, Homo sapiens
  misc_RNA (1)...(19): siRNA sense strand
accaucugcuacaucauuu

SEQ ID NO: 681385 - RNA, 19 nt, Homo sapiens
  misc_RNA (1)...(19): siRNA sense strand
gggcaccugucggucuuca

SEQ ID NO: 681386 - RNA, 19 nt, Homo sapiens
  misc_RNA (1)...(19): siRNA sense strand
uguacaacaucagcgaguu

SEQ ID NO: 681387 - RNA, 19 nt, Homo sapiens
  misc_RNA (1)...(19): siRNA sense strand
ccagugguauauuuucuau

SEQ ID NO: 681388 - RNA, 19 nt, Homo sapiens
  misc_RNA (1)...(19): siRNA sense strand
cuguggagcuugggaaaca

SEQ ID NO: 681389 - RNA, 19 nt, Homo sapiens
  misc_RNA (1)...(19): siRNA sense strand
gagcccaccaagaauaaag

SEQ ID NO: 681390 - RNA, 19 nt, Homo sapiens
  misc_RNA (1)...(19): siRNA sense strand
gcaaguggcuuucuucauu

SEQ ID NO: 681391 - RNA, 19 nt, Homo sapiens
  misc_RNA (1)...(19): siRNA sense strand
caaccaacccuucgaaaua

SEQ ID NO: 681392 - RNA, 19 nt, Homo sapiens
  misc_RNA (1)...(19): siRNA sense strand
ggaauucccugccagagaa

SEQ ID NO: 681393 - RNA, 19 nt, Homo sapiens
  misc_RNA (1)...(19): siRNA sense strand
gcaacggccuucagaggua

SEQ ID NO: 681394 - RNA, 19 nt, Homo sapiens
  misc_RNA (1)...(19): siRNA sense strand
ggacaacggccaccuguuu

SEQ ID NO: 681395 - RNA, 19 nt, Homo sapiens
  misc_RNA (1)...(19): siRNA sense strand
gaccuuccguggagaauuu

SEQ ID NO: 681396 - RNA, 19 nt, Homo sapiens
  misc_RNA (1)...(19): siRNA sense strand
gacagaaaguggcacguuu

SEQ ID NO: 681397 - RNA, 19 nt, Homo sapiens
  misc_RNA (1)...(19): siRNA sense strand
caaguggcuuucuucauuu

SEQ ID NO: 681398 - RNA, 19 nt, Homo sapiens
  misc_RNA (1)...(19): siRNA sense strand
gacaacauuugcaguuuga

SEQ ID NO: 681399 - RNA, 19 nt, Homo sapiens
  misc_RNA (1)...(19): siRNA sense strand
uugaggaaauucagucuua

SEQ ID NO: 681400 - RNA, 19 nt, Homo sapiens
  misc_RNA (1)...(19): siRNA sense strand
ccagagaaaugcuccugaa

SEQ ID NO: 681401 - RNA, 19 nt, Homo sapiens
  misc_RNA (1)...(19): siRNA sense strand
gaaaugcuccugaaaauau

SEQ ID NO: 681402 - RNA, 19 nt, Homo sapiens
  misc_RNA (1)...(19): siRNA sense strand
gaaauucggcugagaaagg

SEQ ID NO: 681403 - RNA, 19 nt, Homo sapiens
  misc_RNA (1)...(19): siRNA sense strand
gaaauuacuaugccaggaa

SEQ ID NO: 681404 - RNA, 19 nt, Homo sapiens
  misc_RNA (1)...(19): siRNA sense strand
ccacggagcucggucuguu

SEQ ID NO: 681405 - RNA, 19 nt, Homo sapiens
  misc_RNA (1)...(19): siRNA sense strand
gcacguuuguggccaacuu

SEQ ID NO: 681406 - RNA, 19 nt, Homo sapiens
  misc_RNA (1)...(19): siRNA sense strand
gagaaaugcuccugaaaau

SEQ ID NO: 681407 - RNA, 19 nt, Homo sapiens
  misc_RNA (1)...(19): siRNA sense strand
aaccaacccuucgaaauaa

SEQ ID NO: 681408 - RNA, 19 nt, Homo sapiens
  misc_RNA (1)...(19): siRNA sense strand
ggagaaauucggcugagaa

SEQ ID NO: 681409 - RNA, 19 nt, Homo sapiens
  misc_RNA (1)...(19): siRNA sense strand
cgaaauaaacgcaaucaca

SEQ ID NO: 681410 - RNA, 19 nt, Homo sapiens
  misc_RNA (1)...(19): siRNA sense strand
gauucaguauuccguauug

SEQ ID NO: 681411 - RNA, 19 nt, Homo sapiens
  misc_RNA (1)...(19): siRNA sense strand
cuucagagguacacaauca

SEQ ID NO: 681412 - RNA, 19 nt, Homo sapiens
  misc_RNA (1)...(19): siRNA sense strand
cagacaacauuugcaguuu

SEQ ID NO: 681413 - RNA, 19 nt, Homo sapiens
  misc_RNA (1)...(19): siRNA sense strand
ccagaaaacuuaccagaga

SEQ ID NO: 681414 - RNA, 19 nt, Homo sapiens
  misc_RNA (1)...(19): siRNA sense strand
gagaaauucggcugagaaa

SEQ ID NO: 681415 - RNA, 19 nt, Homo sapiens
  misc_RNA (1)...(19): siRNA sense strand
ucaggucgcuggacuacga

SEQ ID NO: 681416 - RNA, 19 nt, Homo sapiens
  misc_RNA (1)...(19): siRNA sense strand
aaagggaacagacaacauu

SEQ ID NO: 681417 - RNA, 19 nt, Homo sapiens
  misc_RNA (1)...(19): siRNA sense strand
agacaacauuugcaguuug

SEQ ID NO: 681418 - RNA, 19 nt, Homo sapiens
  misc_RNA (1)...(19): siRNA sense strand
ggagcucuaugaagcacaa

SEQ ID NO: 681419 - RNA, 19 nt, Homo sapiens
  misc_RNA (1)...(19): siRNA sense strand
gcacugagagagaaaugga

SEQ ID NO: 681420 - RNA, 19 nt, Homo sapiens
  misc_RNA (1)...(19): siRNA sense strand
caaaugaguucaaguuccu

SEQ ID NO: 681421 - RNA, 19 nt, Homo sapiens
  misc_RNA (1)...(19): siRNA sense strand
gcacaagucccugagaaca

SEQ ID NO: 681422 - RNA, 19 nt, Homo sapiens
  misc_RNA (1)...(19): siRNA sense strand
gaauuucuacacccuggua

SEQ ID NO: 681423 - RNA, 19 nt, Homo sapiens
  misc_RNA (1)...(19): siRNA sense strand
gacccaugauuuacugcua

SEQ ID NO: 681424 - RNA, 19 nt, Homo sapiens
  misc_RNA (1)...(19): siRNA sense strand
gcaggucuccgacgucaau

SEQ ID NO: 681425 - RNA, 19 nt, Homo sapiens
  misc_RNA (1)...(19): siRNA sense strand
gaguacaacaucacuauca

SEQ ID NO: 681426 - RNA, 19 nt, Homo sapiens
  misc_RNA (1)...(19): siRNA sense strand
gguggguucugaaucgauu

SEQ ID NO: 681427 - RNA, 19 nt, Homo sapiens
  misc_RNA (1)...(19): siRNA sense strand
gacagagacucaggcauca

SEQ ID NO: 681428 - RNA, 19 nt, Homo sapiens
  misc_RNA (1)...(19): siRNA sense strand
gaugcaaacuaaaguacag

SEQ ID NO: 681429 - RNA, 19 nt, Homo sapiens
  misc_RNA (1)...(19): siRNA sense strand
acgaggcccugcagucuuu

SEQ ID NO: 681430 - RNA, 19 nt, Homo sapiens
  misc_RNA (1)...(19): siRNA sense strand
gagcagagccgaguacaac

SEQ ID NO: 681431 - RNA, 19 nt, Homo sapiens
  misc_RNA (1)...(19): siRNA sense strand
gagauucagauccagguuu

SEQ ID NO: 681432 - RNA, 19 nt, Homo sapiens
  misc_RNA (1)...(19): siRNA sense strand
aaauuacuaugccaggaaa

SEQ ID NO: 681433 - RNA, 19 nt, Homo sapiens
  misc_RNA (1)...(19): siRNA sense strand
ucagggaccuccgagauuc

SEQ ID NO: 681434 - RNA, 19 nt, Homo sapiens
  misc_RNA (1)...(19): siRNA sense strand
agagagaaauggaagaaac

SEQ ID NO: 681435 - RNA, 19 nt, Homo sapiens
  misc_RNA (1)...(19): siRNA sense strand
aagcacaagucccugagaa

SEQ ID NO: 681436 - RNA, 19 nt, Homo sapiens
  misc_RNA (1)...(19): siRNA sense strand
ucaagucgaugacgucaac

SEQ ID NO: 681437 - RNA, 19 nt, Homo sapiens
  misc_RNA (1)...(19): siRNA sense strand
guggaggccuaucaggaaa

SEQ ID NO: 681438 - RNA, 19 nt, Homo sapiens
  misc_RNA (1)...(19): siRNA sense strand
gguggaggccuaucaggaa

SEQ ID NO: 681439 - RNA, 19 nt, Homo sapiens
  misc_RNA (1)...(19): siRNA sense strand
cuuaugacguggauguuga

SEQ ID NO: 681440 - RNA, 19 nt, Homo sapiens
  misc_RNA (1)...(19): siRNA sense strand
cuaaaguacagaacaagaa

SEQ ID NO: 681441 - RNA, 19 nt, Homo sapiens
  misc_RNA (1)...(19): siRNA sense strand
gcaaucacaggagaaauuc

SEQ ID NO: 681442 - RNA, 19 nt, Homo sapiens
  misc_RNA (1)...(19): siRNA sense strand
gaggaaauucagucuuaug

SEQ ID NO: 681443 - RNA, 19 nt, Homo sapiens
  misc_RNA (1)...(19): siRNA sense strand
caaacuaaaguacagaaca

SEQ ID NO: 681444 - RNA, 19 nt, Homo sapiens
  misc_RNA (1)...(19): siRNA sense strand
ggagagguggguucugaau

SEQ ID NO: 681445 - RNA, 19 nt, Homo sapiens
  misc_RNA (1)...(19): siRNA sense strand
ccucggcucucugguuauu

SEQ ID NO: 681446 - RNA, 19 nt, Homo sapiens
  misc_RNA (1)...(19): siRNA sense strand
ucccggagcuggugcuaga

SEQ ID NO: 681447 - RNA, 19 nt, Homo sapiens
  misc_RNA (1)...(19): siRNA sense strand
agaaacaaaugaguucaag

SEQ ID NO: 681448 - RNA, 19 nt, Homo sapiens
  misc_RNA (1)...(19): siRNA sense strand
gacgggaggcucagaaaca

SEQ ID NO: 681449 - RNA, 19 nt, Homo sapiens
  misc_RNA (1)...(19): siRNA sense strand
ugugcuaccuuuccaagug

SEQ ID NO: 681450 - RNA, 19 nt, Homo sapiens
  misc_RNA (1)...(19): siRNA sense strand
acaaaggaccugggacuga

SEQ ID NO: 681451 - RNA, 19 nt, Homo sapiens
  misc_RNA (1)...(19): siRNA sense strand
ugucgucgcucuuccucuu

SEQ ID NO: 681452 - RNA, 19 nt, Homo sapiens
  misc_RNA (1)...(19): siRNA sense strand
gacaacggccaccuguuug

SEQ ID NO: 681453 - RNA, 19 nt, Homo sapiens
  misc_RNA (1)...(19): siRNA sense strand
cgcaaucacaggagaaauu

SEQ ID NO: 681454 - RNA, 19 nt, Homo sapiens
  misc_RNA (1)...(19): siRNA sense strand
gcgagucagagauauaaau

SEQ ID NO: 681455 - RNA, 19 nt, Homo sapiens
  misc_RNA (1)...(19): siRNA sense strand
uagcuucccguucaguuaa

SEQ ID NO: 681456 - RNA, 19 nt, Homo sapiens
  misc_RNA (1)...(19): siRNA sense strand
ucuacacccugguaacaga

SEQ ID NO: 681457 - RNA, 19 nt, Homo sapiens
  misc_RNA (1)...(19): siRNA sense strand
gagaucacaguggcaguuu

SEQ ID NO: 681458 - RNA, 19 nt, Homo sapiens
  misc_RNA (1)...(19): siRNA sense strand
ugaggaaauucagucuuau

SEQ ID NO: 681459 - RNA, 19 nt, Homo sapiens
  misc_RNA (1)...(19): siRNA sense strand
acagacaacauuugcaguu

SEQ ID NO: 681460 - RNA, 19 nt, Homo sapiens
  misc_RNA (1)...(19): siRNA sense strand
gagagagaaauggaagaaa

SEQ ID NO: 681461 - RNA, 19 nt, Homo sapiens
  misc_RNA (1)...(19): siRNA sense strand
gaaacaaaugaguucaagu

SEQ ID NO: 681462 - RNA, 19 nt, Homo sapiens
  misc_RNA (1)...(19): siRNA sense strand
gggaggcucagaaacaaau

SEQ ID NO: 681463 - RNA, 19 nt, Homo sapiens
  misc_RNA (1)...(19): siRNA sense strand
gaagcacaagucccugaga

SEQ ID NO: 681464 - RNA, 19 nt, Homo sapiens
  misc_RNA (1)...(19): siRNA sense strand
cgagucagagauauaaaug

SEQ ID NO: 681465 - RNA, 19 nt, Homo sapiens
  misc_RNA (1)...(19): siRNA sense strand
ccacagacccaugauuuac

SEQ ID NO: 681466 - RNA, 19 nt, Homo sapiens
  misc_RNA (1)...(19): siRNA sense strand
ucccagagcuaccaguaca

SEQ ID NO: 681467 - RNA, 19 nt, Homo sapiens
  misc_RNA (1)...(19): siRNA sense strand
uaucuuacgcccuguuuca

SEQ ID NO: 681468 - RNA, 19 nt, Homo sapiens
  misc_RNA (1)...(19): siRNA sense strand
gugcuaccuuuccaagugu

SEQ ID NO: 681469 - RNA, 19 nt, Homo sapiens
  misc_RNA (1)...(19): siRNA sense strand
ccgacucucucaccgucua

SEQ ID NO: 681470 - RNA, 19 nt, Homo sapiens
  misc_RNA (1)...(19): siRNA sense strand
ucaaccaacccuucgaaau

SEQ ID NO: 681471 - RNA, 19 nt, Homo sapiens
  misc_RNA (1)...(19): siRNA sense strand
agccagagauuuagaugca

SEQ ID NO: 681472 - RNA, 19 nt, Homo sapiens
  misc_RNA (1)...(19): siRNA sense strand
caacauuugcaguuugauc

SEQ ID NO: 681473 - RNA, 19 nt, Homo sapiens
  misc_RNA (1)...(19): siRNA sense strand
ggagcuggugcuagacaaa

SEQ ID NO: 681474 - RNA, 19 nt, Homo sapiens
  misc_RNA (1)...(19): siRNA sense strand
cagagaaaugcuccugaaa

SEQ ID NO: 681475 - RNA, 19 nt, Homo sapiens
  misc_RNA (1)...(19): siRNA sense strand
gagagagcagagccgagua

SEQ ID NO: 681476 - RNA, 19 nt, Homo sapiens
  misc_RNA (1)...(19): siRNA sense strand
ugagagagaaauggaagaa

SEQ ID NO: 681477 - RNA, 19 nt, Homo sapiens
  misc_RNA (1)...(19): siRNA sense strand
gauccacagacccaugauu

SEQ ID NO: 681478 - RNA, 19 nt, Homo sapiens
  misc_RNA (1)...(19): siRNA sense strand
agagguggguucugaaucg

SEQ ID NO: 681479 - RNA, 19 nt, Homo sapiens
  misc_RNA (1)...(19): siRNA sense strand
uccacagacccaugauuua

SEQ ID NO: 681480 - RNA, 19 nt, Homo sapiens
  misc_RNA (1)...(19): siRNA sense strand
cgucagcgccacagacaga

SEQ ID NO: 681481 - RNA, 19 nt, Homo sapiens
  misc_RNA (1)...(19): siRNA sense strand
gcagagccgaguacaacau

SEQ ID NO: 681482 - RNA, 19 nt, Homo sapiens
  misc_RNA (1)...(19): siRNA sense strand
acagacccaugauuuacug

SEQ ID NO: 681483 - RNA, 19 nt, Homo sapiens
  misc_RNA (1)...(19): siRNA sense strand
gagucagagauauaaauga

SEQ ID NO: 681484 - RNA, 19 nt, Homo sapiens
  misc_RNA (1)...(19): siRNA sense strand
cagaaacaaaugaguucaa

SEQ ID NO: 681485 - RNA, 19 nt, Homo sapiens
  misc_RNA (1)...(19): siRNA sense strand
ccugcagucuuucgaguuc

SEQ ID NO: 681486 - RNA, 19 nt, Homo sapiens
  misc_RNA (1)...(19): siRNA sense strand
acccaugauuuacugcuaa

SEQ ID NO: 681487 - RNA, 19 nt, Homo sapiens
  misc_RNA (1)...(19): siRNA sense strand
aaacuuaccagagaucaca

SEQ ID NO: 681488 - RNA, 19 nt, Homo sapiens
  misc_RNA (1)...(19): siRNA sense strand
cguuugggaagguaucuua

SEQ ID NO: 681489 - RNA, 19 nt, Homo sapiens
  misc_RNA (1)...(19): siRNA sense strand
caaagggaacagacaacau

SEQ ID NO: 681490 - RNA, 19 nt, Homo sapiens
  misc_RNA (1)...(19): siRNA sense strand
gaacuagaauuguuucaga

SEQ ID NO: 681491 - RNA, 19 nt, Homo sapiens
  misc_RNA (1)...(19): siRNA sense strand
gaauaucuaucccgaauug

SEQ ID NO: 681492 - RNA, 19 nt, Homo sapiens
  misc_RNA (1)...(19): siRNA sense strand
gagagaggcaccuuucuua

SEQ ID NO: 681493 - RNA, 19 nt, Homo sapiens
  misc_RNA (1)...(19): siRNA sense strand
gaccagaacaugcaaauuu

SEQ ID NO: 681494 - RNA, 19 nt, Homo sapiens
  misc_RNA (1)...(19): siRNA sense strand
ggacaacggccaccuguuu

SEQ ID NO: 681495 - RNA, 19 nt, Homo sapiens
  misc_RNA (1)...(19): siRNA sense strand
ggacaaaugaguucaaguu

SEQ ID NO: 681496 - RNA, 19 nt, Homo sapiens
  misc_RNA (1)...(19): siRNA sense strand
gaaauuggaccgagaggaa

SEQ ID NO: 681497 - RNA, 19 nt, Homo sapiens
  misc_RNA (1)...(19): siRNA sense strand
caaaugaguucaaguuucu

SEQ ID NO: 681498 - RNA, 19 nt, Homo sapiens
  misc_RNA (1)...(19): siRNA sense strand
gggaagagauaccagaguu

SEQ ID NO: 681499 - RNA, 19 nt, Homo sapiens
  misc_RNA (1)...(19): siRNA sense strand
acagagagauuuccuugaa

SEQ ID NO: 681500 - RNA, 19 nt, Homo sapiens
  misc_RNA (1)...(19): siRNA sense strand
aggcaagucuuauuucuuu

SEQ ID NO: 681501 - RNA, 19 nt, Homo sapiens
  misc_RNA (1)...(19): siRNA sense strand
gaaccaacagccugaguaa

SEQ ID NO: 681502 - RNA, 19 nt, Homo sapiens
  misc_RNA (1)...(19): siRNA sense strand
ugaucacgcuccaguauuu

SEQ ID NO: 681503 - RNA, 19 nt, Homo sapiens
  misc_RNA (1)...(19): siRNA sense strand
gcacaggauucagauguug

SEQ ID NO: 681504 - RNA, 19 nt, Homo sapiens
  misc_RNA (1)...(19): siRNA sense strand
gcaccuuucuuaccaacuu

SEQ ID NO: 681505 - RNA, 19 nt, Homo sapiens
  misc_RNA (1)...(19): siRNA sense strand
aaacuucuauacucuggua

SEQ ID NO: 681506 - RNA, 19 nt, Homo sapiens
  misc_RNA (1)...(19): siRNA sense strand
gaaaaggcaagucuuauuu

SEQ ID NO: 681507 - RNA, 19 nt, Homo sapiens
  misc_RNA (1)...(19): siRNA sense strand
ccaacucgcucaccgucua

SEQ ID NO: 681508 - RNA, 19 nt, Homo sapiens
  misc_RNA (1)...(19): siRNA sense strand
gauaccagaguucaguuua

SEQ ID NO: 681509 - RNA, 19 nt, Homo sapiens
  misc_RNA (1)...(19): siRNA sense strand
gugaucuacuucuaaauga

SEQ ID NO: 681510 - RNA, 19 nt, Homo sapiens
  misc_RNA (1)...(19): siRNA sense strand
ucaaaucaauccaacaucu

SEQ ID NO: 681511 - RNA, 19 nt, Homo sapiens
  misc_RNA (1)...(19): siRNA sense strand
gaaaauagccccguugguu

SEQ ID NO: 681512 - RNA, 19 nt, Homo sapiens
  misc_RNA (1)...(19): siRNA sense strand
ccaacagccugaguaacua

SEQ ID NO: 681513 - RNA, 19 nt, Homo sapiens
  misc_RNA (1)...(19): siRNA sense strand
acaaaugaguucaaguuuc

SEQ ID NO: 681514 - RNA, 19 nt, Homo sapiens
  misc_RNA (1)...(19): siRNA sense strand
gagagaggaacacugagua

SEQ ID NO: 681515 - RNA, 19 nt, Homo sapiens
  misc_RNA (1)...(19): siRNA sense strand
ggaaccaacagccugagua

SEQ ID NO: 681516 - RNA, 19 nt, Homo sapiens
  misc_RNA (1)...(19): siRNA sense strand
gcagaaaaggcaagucuua

SEQ ID NO: 681517 - RNA, 19 nt, Homo sapiens
  misc_RNA (1)...(19): siRNA sense strand
gacaaaugaguucaaguuu

SEQ ID NO: 681518 - RNA, 19 nt, Homo sapiens
  misc_RNA (1)...(19): siRNA sense strand
uuacgccacugaaagaauu

SEQ ID NO: 681519 - RNA, 19 nt, Homo sapiens
  misc_RNA (1)...(19): siRNA sense strand
gaagagauaccagaguuca

SEQ ID NO: 681520 - RNA, 19 nt, Homo sapiens
  misc_RNA (1)...(19): siRNA sense strand
cccaaugccuauuuccaua

SEQ ID NO: 681521 - RNA, 19 nt, Homo sapiens
  misc_RNA (1)...(19): siRNA sense strand
caaugccuauuuccauauu

SEQ ID NO: 681522 - RNA, 19 nt, Homo sapiens
  misc_RNA (1)...(19): siRNA sense strand
gcccauuucagaauaauuu

SEQ ID NO: 681523 - RNA, 19 nt, Homo sapiens
  misc_RNA (1)...(19): siRNA sense strand
gcagggaaguggaagaaaa

SEQ ID NO: 681524 - RNA, 19 nt, Homo sapiens
  misc_RNA (1)...(19): siRNA sense strand
guuuaacccucaccgcuuu

SEQ ID NO: 681525 - RNA, 19 nt, Homo sapiens
  misc_RNA (1)...(19): siRNA sense strand
gaaaaccgagcacaacaua

SEQ ID NO: 681526 - RNA, 19 nt, Homo sapiens
  misc_RNA (1)...(19): siRNA sense strand
ggagcgugcugugcagaaa

SEQ ID NO: 681527 - RNA, 19 nt, Homo sapiens
  misc_RNA (1)...(19): siRNA sense strand
gaaagacagugugcuccau

SEQ ID NO: 681528 - RNA, 19 nt, Homo sapiens
  misc_RNA (1)...(19): siRNA sense strand
ccgaauuggugcugaauca

SEQ ID NO: 681529 - RNA, 19 nt, Homo sapiens
  misc_RNA (1)...(19): siRNA sense strand
augaggcaauucaaacuua

SEQ ID NO: 681530 - RNA, 19 nt, Homo sapiens
  misc_RNA (1)...(19): siRNA sense strand
ggugaucuacuucuaaaug

SEQ ID NO: 681531 - RNA, 19 nt, Homo sapiens
  misc_RNA (1)...(19): siRNA sense strand
aaucgcccauuucagaaua

SEQ ID NO: 681532 - RNA, 19 nt, Homo sapiens
  misc_RNA (1)...(19): siRNA sense strand
uaacagagaaaccuuugga

SEQ ID NO: 681533 - RNA, 19 nt, Homo sapiens
  misc_RNA (1)...(19): siRNA sense strand
ggaccgagaggaacugugu

SEQ ID NO: 681534 - RNA, 19 nt, Homo sapiens
  misc_RNA (1)...(19): siRNA sense strand
uuagauaccggaaguaaug

SEQ ID NO: 681535 - RNA, 19 nt, Homo sapiens
  misc_RNA (1)...(19): siRNA sense strand
cgugucagccagagauuua

SEQ ID NO: 681536 - RNA, 19 nt, Homo sapiens
  misc_RNA (1)...(19): siRNA sense strand
auaccagaguucaguuuaa

SEQ ID NO: 681537 - RNA, 19 nt, Homo sapiens
  misc_RNA (1)...(19): siRNA sense strand
gaucuacuucuaaaugaga

SEQ ID NO: 681538 - RNA, 19 nt, Homo sapiens
  misc_RNA (1)...(19): siRNA sense strand
gaacacugaguacaacauc

SEQ ID NO: 681539 - RNA, 19 nt, Homo sapiens
  misc_RNA (1)...(19): siRNA sense strand
gaacuaugggucagagaca

SEQ ID NO: 681540 - RNA, 19 nt, Homo sapiens
  misc_RNA (1)...(19): siRNA sense strand
gaggaacacugaguacaac

SEQ ID NO: 681541 - RNA, 19 nt, Homo sapiens
  misc_RNA (1)...(19): siRNA sense strand
cugcuccugucuucacuua

SEQ ID NO: 681542 - RNA, 19 nt, Homo sapiens
  misc_RNA (1)...(19): siRNA sense strand
uaacuauucaggccaaaga

SEQ ID NO: 681543 - RNA, 19 nt, Homo sapiens
  misc_RNA (1)...(19): siRNA sense strand
aagcgcaauuggacuauga

SEQ ID NO: 681544 - RNA, 19 nt, Homo sapiens
  misc_RNA (1)...(19): siRNA sense strand
cugaguaacuacaccauca

SEQ ID NO: 681545 - RNA, 19 nt, Homo sapiens
  misc_RNA (1)...(19): siRNA sense strand
agagaaaccuuuggaucga

SEQ ID NO: 681546 - RNA, 19 nt, Homo sapiens
  misc_RNA (1)...(19): siRNA sense strand
ugacaacgccccugauuuu

SEQ ID NO: 681547 - RNA, 19 nt, Homo sapiens
  misc_RNA (1)...(19): siRNA sense strand
ggcaaaagaccuaggguua

SEQ ID NO: 681548 - RNA, 19 nt, Homo sapiens
  misc_RNA (1)...(19): siRNA sense strand
ucccagagcuaccaguaug

SEQ ID NO: 681549 - RNA, 19 nt, Homo sapiens
  misc_RNA (1)...(19): siRNA sense strand
aaaggcaagucuuauuucu

SEQ ID NO: 681550 - RNA, 19 nt, Homo sapiens
  misc_RNA (1)...(19): siRNA sense strand
gcaagucuuauuucuuugu

SEQ ID NO: 681551 - RNA, 19 nt, Homo sapiens
  misc_RNA (1)...(19): siRNA sense strand
gcuccaguauuucuagaca

SEQ ID NO: 681552 - RNA, 19 nt, Homo sapiens
  misc_RNA (1)...(19): siRNA sense strand
gaauaauuuggguuucuga

SEQ ID NO: 681553 - RNA, 19 nt, Homo sapiens
  misc_RNA (1)...(19): siRNA sense strand
ucacuuacuagcccaauug

SEQ ID NO: 681554 - RNA, 19 nt, Homo sapiens
  misc_RNA (1)...(19): siRNA sense strand
uuaaagcgcaauuggacua

SEQ ID NO: 681555 - RNA, 19 nt, Homo sapiens
  misc_RNA (1)...(19): siRNA sense strand
ggacuaugaggcaauucaa

SEQ ID NO: 681556 - RNA, 19 nt, Homo sapiens
  misc_RNA (1)...(19): siRNA sense strand
cacgacaucugguggacuu

SEQ ID NO: 681557 - RNA, 19 nt, Homo sapiens
  misc_RNA (1)...(19): siRNA sense strand
cuggugaucuacuucuaaa

SEQ ID NO: 681558 - RNA, 19 nt, Homo sapiens
  misc_RNA (1)...(19): siRNA sense strand
gcucccgccuucacccaaa

SEQ ID NO: 681559 - RNA, 19 nt, Homo sapiens
  misc_RNA (1)...(19): siRNA sense strand
gaguacaacaucaccauca

SEQ ID NO: 681560 - RNA, 19 nt, Homo sapiens
  misc_RNA (1)...(19): siRNA sense strand
gguaacagagaaaccuuug

SEQ ID NO: 681561 - RNA, 19 nt, Homo sapiens
  misc_RNA (1)...(19): siRNA sense strand
caagucuuauuucuuugug

SEQ ID NO: 681562 - RNA, 19 nt, Homo sapiens
  misc_RNA (1)...(19): siRNA sense strand
gaauuggugcugaaucaag

SEQ ID NO: 681563 - RNA, 19 nt, Homo sapiens
  misc_RNA (1)...(19): siRNA sense strand
cgagagaggcaccuuucuu

SEQ ID NO: 681564 - RNA, 19 nt, Homo sapiens
  misc_RNA (1)...(19): siRNA sense strand
uguagugguugauguaaca

SEQ ID NO: 681565 - RNA, 19 nt, Homo sapiens
  misc_RNA (1)...(19): siRNA sense strand
gcaauucaaacuuacacau

SEQ ID NO: 681566 - RNA, 19 nt, Homo sapiens
  misc_RNA (1)...(19): siRNA sense strand
ggaauaucuaucccgaauu

SEQ ID NO: 681567 - RNA, 19 nt, Homo sapiens
  misc_RNA (1)...(19): siRNA sense strand
gacaacggccaccuguuug

SEQ ID NO: 681568 - RNA, 19 nt, Homo sapiens
  misc_RNA (1)...(19): siRNA sense strand
gcuccugucuucacuuacu

SEQ ID NO: 681569 - RNA, 19 nt, Homo sapiens
  misc_RNA (1)...(19): siRNA sense strand
ggaagagauaccagaguuc

SEQ ID NO: 681570 - RNA, 19 nt, Homo sapiens
  misc_RNA (1)...(19): siRNA sense strand
caguauuucuagacagaga

SEQ ID NO: 681571 - RNA, 19 nt, Homo sapiens
  misc_RNA (1)...(19): siRNA sense strand
cauucugguucuagacgua

SEQ ID NO: 681572 - RNA, 19 nt, Homo sapiens
  misc_RNA (1)...(19): siRNA sense strand
gcuuacuggugaucuacuu

SEQ ID NO: 681573 - RNA, 19 nt, Homo sapiens
  misc_RNA (1)...(19): siRNA sense strand
ccauauuaauguccaugau

SEQ ID NO: 681574 - RNA, 19 nt, Homo sapiens
  misc_RNA (1)...(19): siRNA sense strand
ucuggcagucuucaucuua

SEQ ID NO: 681575 - RNA, 19 nt, Homo sapiens
  misc_RNA (1)...(19): siRNA sense strand
agaggcaccuuucuuacca

SEQ ID NO: 681576 - RNA, 19 nt, Homo sapiens
  misc_RNA (1)...(19): siRNA sense strand
gaagccaucugucgaaaac

SEQ ID NO: 681577 - RNA, 19 nt, Homo sapiens
  misc_RNA (1)...(19): siRNA sense strand
agauuuagauaccggaagu

SEQ ID NO: 681578 - RNA, 19 nt, Homo sapiens
  misc_RNA (1)...(19): siRNA sense strand
cgggaacaauggaaagaca

SEQ ID NO: 681579 - RNA, 19 nt, Homo sapiens
  misc_RNA (1)...(19): siRNA sense strand
uggcagucuucaucuuaaa

SEQ ID NO: 681580 - RNA, 19 nt, Homo sapiens
  misc_RNA (1)...(19): siRNA sense strand
cuggcagucuucaucuuaa

SEQ ID NO: 681581 - RNA, 19 nt, Homo sapiens
  misc_RNA (1)...(19): siRNA sense strand
uccaguauuucuagacaga

SEQ ID NO: 681582 - RNA, 19 nt, Homo sapiens
  misc_RNA (1)...(19): siRNA sense strand
agaggaacacugaguacaa

SEQ ID NO: 681583 - RNA, 19 nt, Homo sapiens
  misc_RNA (1)...(19): siRNA sense strand
cuagagagugcacaggauu

SEQ ID NO: 681584 - RNA, 19 nt, Homo sapiens
  misc_RNA (1)...(19): siRNA sense strand
aaaccgagcacaacauaac

SEQ ID NO: 681585 - RNA, 19 nt, Homo sapiens
  misc_RNA (1)...(19): siRNA sense strand
gaggcaccuuucuuaccaa

SEQ ID NO: 681586 - RNA, 19 nt, Homo sapiens
  misc_RNA (1)...(19): siRNA sense strand
caaaucaauccaacaucug

SEQ ID NO: 681587 - RNA, 19 nt, Homo sapiens
  misc_RNA (1)...(19): siRNA sense strand
ccaaugccuauuuccauau

SEQ ID NO: 681588 - RNA, 19 nt, Homo sapiens
  misc_RNA (1)...(19): siRNA sense strand
gugcacaggauucagaugu

SEQ ID NO: 681589 - RNA, 19 nt, Homo sapiens
  misc_RNA (1)...(19): siRNA sense strand
ugugcugccuuuccaguug

SEQ ID NO: 681590 - RNA, 19 nt, Homo sapiens
  misc_RNA (1)...(19): siRNA sense strand
gaacagaaacggcuacuga

SEQ ID NO: 681591 - RNA, 19 nt, Homo sapiens
  misc_RNA (1)...(19): siRNA sense strand
gcgaaacccuggccuuaaa

SEQ ID NO: 681592 - RNA, 19 nt, Homo sapiens
  misc_RNA (1)...(19): siRNA sense strand
ccaaagaacggccuacaua

SEQ ID NO: 681593 - RNA, 19 nt, Homo sapiens
  misc_RNA (1)...(19): siRNA sense strand
ucacagugcuuaaagaaga

SEQ ID NO: 681594 - RNA, 19 nt, Homo sapiens
  misc_RNA (1)...(19): siRNA sense strand
cgucaagccuucuaaugua

SEQ ID NO: 681595 - RNA, 19 nt, Homo sapiens
  misc_RNA (1)...(19): siRNA sense strand
gauaaaggccagacaauuc

SEQ ID NO: 681596 - RNA, 19 nt, Homo sapiens
  misc_RNA (1)...(19): siRNA sense strand
gcucauggauacaucacua

SEQ ID NO: 681597 - RNA, 19 nt, Homo sapiens
  misc_RNA (1)...(19): siRNA sense strand
gauacagugugaagucuga

SEQ ID NO: 681598 - RNA, 19 nt, Homo sapiens
  misc_RNA (1)...(19): siRNA sense strand
cagaugaccuggagccuau

SEQ ID NO: 681599 - RNA, 19 nt, Homo sapiens
  misc_RNA (1)...(19): siRNA sense strand
cagaagggauacaguguga

SEQ ID NO: 681600 - RNA, 19 nt, Homo sapiens
  misc_RNA (1)...(19): siRNA sense strand
cuacaugaauccaaaggaa

SEQ ID NO: 681601 - RNA, 19 nt, Homo sapiens
  misc_RNA (1)...(19): siRNA sense strand
guaaauagccaggaacaga

SEQ ID NO: 681602 - RNA, 19 nt, Homo sapiens
  misc_RNA (1)...(19): siRNA sense strand
ggauacaucacuagauaaa

SEQ ID NO: 681603 - RNA, 19 nt, Homo sapiens
  misc_RNA (1)...(19): siRNA sense strand
gguggacucuguugcuaaa

SEQ ID NO: 681604 - RNA, 19 nt, Homo sapiens
  misc_RNA (1)...(19): siRNA sense strand
gauccgagccacaguaaau

SEQ ID NO: 681605 - RNA, 19 nt, Homo sapiens
  misc_RNA (1)...(19): siRNA sense strand
gaauaaacccagagcucaa

SEQ ID NO: 681606 - RNA, 19 nt, Homo sapiens
  misc_RNA (1)...(19): siRNA sense strand
acccagagcucaaccagaa

SEQ ID NO: 681607 - RNA, 19 nt, Homo sapiens
  misc_RNA (1)...(19): siRNA sense strand
auggauacaucacuagaua

SEQ ID NO: 681608 - RNA, 19 nt, Homo sapiens
  misc_RNA (1)...(19): siRNA sense strand
gaacaaccucagaccaguu

SEQ ID NO: 681609 - RNA, 19 nt, Homo sapiens
  misc_RNA (1)...(19): siRNA sense strand
caucaaugcucucggucaa

SEQ ID NO: 681610 - RNA, 19 nt, Homo sapiens
  misc_RNA (1)...(19): siRNA sense strand
uaaauagccaggaacagaa

SEQ ID NO: 681611 - RNA, 19 nt, Homo sapiens
  misc_RNA (1)...(19): siRNA sense strand
uggaaucaguggcuacuug

SEQ ID NO: 681612 - RNA, 19 nt, Homo sapiens
  misc_RNA (1)...(19): siRNA sense strand
agaaacggcuacugaugga

SEQ ID NO: 681613 - RNA, 19 nt, Homo sapiens
  misc_RNA (1)...(19): siRNA sense strand
gggcagaucauggcaguga

SEQ ID NO: 681614 - RNA, 19 nt, Homo sapiens
  misc_RNA (1)...(19): siRNA sense strand
gaagggauacagugugaag

SEQ ID NO: 681615 - RNA, 19 nt, Homo sapiens
  misc_RNA (1)...(19): siRNA sense strand
uccauucacugucaccuuu

SEQ ID NO: 681616 - RNA, 19 nt, Homo sapiens
  misc_RNA (1)...(19): siRNA sense strand
caagugaagaugugcgauu

SEQ ID NO: 681617 - RNA, 19 nt, Homo sapiens
  misc_RNA (1)...(19): siRNA sense strand
cugcagaguuuguugacuu

SEQ ID NO: 681618 - RNA, 19 nt, Homo sapiens
  misc_RNA (1)...(19): siRNA sense strand
cacaguaaauagccaggaa

SEQ ID NO: 681619 - RNA, 19 nt, Homo sapiens
  misc_RNA (1)...(19): siRNA sense strand
cacccuacaugaauccaaa

SEQ ID NO: 681620 - RNA, 19 nt, Homo sapiens
  misc_RNA (1)...(19): siRNA sense strand
cuaauguacucaucaaugc

SEQ ID NO: 681621 - RNA, 19 nt, Homo sapiens
  misc_RNA (1)...(19): siRNA sense strand
ugauggauuuggauauuuc

SEQ ID NO: 681622 - RNA, 19 nt, Homo sapiens
  misc_RNA (1)...(19): siRNA sense strand
cauaguaagcugucuguca

SEQ ID NO: 681623 - RNA, 19 nt, Homo sapiens
  misc_RNA (1)...(19): siRNA sense strand
aagugaagaugugcgauuu

SEQ ID NO: 681624 - RNA, 19 nt, Homo sapiens
  misc_RNA (1)...(19): siRNA sense strand
gaggacaucuuagggaaaa

SEQ ID NO: 681625 - RNA, 19 nt, Homo sapiens
  misc_RNA (1)...(19): siRNA sense strand
ugauaaaggccagacaauu

SEQ ID NO: 681626 - RNA, 19 nt, Homo sapiens
  misc_RNA (1)...(19): siRNA sense strand
cuacauacccagagcuaau

SEQ ID NO: 681627 - RNA, 19 nt, Homo sapiens
  misc_RNA (1)...(19): siRNA sense strand
caaagaacggccuacauac

SEQ ID NO: 681628 - RNA, 19 nt, Homo sapiens
  misc_RNA (1)...(19): siRNA sense strand
gcuuaaagaagaauuccaa

SEQ ID NO: 681629 - RNA, 19 nt, Homo sapiens
  misc_RNA (1)...(19): siRNA sense strand
aagcgaaacccuggccuua

SEQ ID NO: 681630 - RNA, 19 nt, Homo sapiens
  misc_RNA (1)...(19): siRNA sense strand
ucaaugcucucggucaagu

SEQ ID NO: 681631 - RNA, 19 nt, Homo sapiens
  misc_RNA (1)...(19): siRNA sense strand
auaguaagcugucugucau

SEQ ID NO: 681632 - RNA, 19 nt, Homo sapiens
  misc_RNA (1)...(19): siRNA sense strand
aaacggcuacugauggauu

SEQ ID NO: 681633 - RNA, 19 nt, Homo sapiens
  misc_RNA (1)...(19): siRNA sense strand
acccagagcuaaugcaaca

SEQ ID NO: 681634 - RNA, 19 nt, Homo sapiens
  misc_RNA (1)...(19): siRNA sense strand
gaggagccaucgccacaac

SEQ ID NO: 681635 - RNA, 19 nt, Homo sapiens
  misc_RNA (1)...(19): siRNA sense strand
ugugaagucugacauuugg

SEQ ID NO: 681636 - RNA, 19 nt, Homo sapiens
  misc_RNA (1)...(19): siRNA sense strand
cuacugauggauuuggaua

SEQ ID NO: 681637 - RNA, 19 nt, Homo sapiens
  misc_RNA (1)...(19): siRNA sense strand
acugauggauuuggauauu

SEQ ID NO: 681638 - RNA, 19 nt, Homo sapiens
  misc_RNA (1)...(19): siRNA sense strand
aagaagaauuccaaagaac

SEQ ID NO: 681639 - RNA, 19 nt, Homo sapiens
  misc_RNA (1)...(19): siRNA sense strand
gaugaccuggagccuauaa

SEQ ID NO: 681640 - RNA, 19 nt, Homo sapiens
  misc_RNA (1)...(19): siRNA sense strand
gcuacuugguggacucugu

SEQ ID NO: 681641 - RNA, 19 nt, Homo sapiens
  misc_RNA (1)...(19): siRNA sense strand
gcuugcauuucuauuggaa

SEQ ID NO: 681642 - RNA, 19 nt, Homo sapiens
  misc_RNA (1)...(19): siRNA sense strand
cugauggauuuggauauuu

SEQ ID NO: 681643 - RNA, 19 nt, Homo sapiens
  misc_RNA (1)...(19): siRNA sense strand
ccuggagccuauaauggaa

SEQ ID NO: 681644 - RNA, 19 nt, Homo sapiens
  misc_RNA (1)...(19): siRNA sense strand
gcagaguuuguugacuuua

SEQ ID NO: 681645 - RNA, 19 nt, Homo sapiens
  misc_RNA (1)...(19): siRNA sense strand
agugugaagucugacauuu

SEQ ID NO: 681646 - RNA, 19 nt, Homo sapiens
  misc_RNA (1)...(19): siRNA sense strand
gacuguccauucacuguca

SEQ ID NO: 681647 - RNA, 19 nt, Homo sapiens
  misc_RNA (1)...(19): siRNA sense strand
ugcagaguuuguugacuuu

SEQ ID NO: 681648 - RNA, 19 nt, Homo sapiens
  misc_RNA (1)...(19): siRNA sense strand
gacgucaagccuucuaaug

SEQ ID NO: 681649 - RNA, 19 nt, Homo sapiens
  misc_RNA (1)...(19): siRNA sense strand
cacagugcuuaaagaagaa

SEQ ID NO: 681650 - RNA, 19 nt, Homo sapiens
  misc_RNA (1)...(19): siRNA sense strand
cuucuaauguacucaucaa

SEQ ID NO: 681651 - RNA, 19 nt, Homo sapiens
  misc_RNA (1)...(19): siRNA sense strand
ccucacagugcuuaaagaa

SEQ ID NO: 681652 - RNA, 19 nt, Homo sapiens
  misc_RNA (1)...(19): siRNA sense strand
cagaguuuguugacuuuac

SEQ ID NO: 681653 - RNA, 19 nt, Homo sapiens
  misc_RNA (1)...(19): siRNA sense strand
aaagaagcauuugaacaac

SEQ ID NO: 681654 - RNA, 19 nt, Homo sapiens
  misc_RNA (1)...(19): siRNA sense strand
uuggaaaucagaacuuuga

SEQ ID NO: 681655 - RNA, 19 nt, Homo sapiens
  misc_RNA (1)...(19): siRNA sense strand
ucuaauguacucaucaaug

SEQ ID NO: 681656 - RNA, 19 nt, Homo sapiens
  misc_RNA (1)...(19): siRNA sense strand
gcauuugaacaaccucaga

SEQ ID NO: 681657 - RNA, 19 nt, Homo sapiens
  misc_RNA (1)...(19): siRNA sense strand
gagcuaaugcaacauccau

SEQ ID NO: 681658 - RNA, 19 nt, Homo sapiens
  misc_RNA (1)...(19): siRNA sense strand
ccacaacucccagcagaca

SEQ ID NO: 681659 - RNA, 19 nt, Homo sapiens
  misc_RNA (1)...(19): siRNA sense strand
ggacaucuuagggaaaaua

SEQ ID NO: 681660 - RNA, 19 nt, Homo sapiens
  misc_RNA (1)...(19): siRNA sense strand
gaauccaaaggaacagaug

SEQ ID NO: 681661 - RNA, 19 nt, Homo sapiens
  misc_RNA (1)...(19): siRNA sense strand
aaauagccaggaacagaaa

SEQ ID NO: 681662 - RNA, 19 nt, Homo sapiens
  misc_RNA (1)...(19): siRNA sense strand
gcggauccgagccacagua

SEQ ID NO: 681663 - RNA, 19 nt, Homo sapiens
  misc_RNA (1)...(19): siRNA sense strand
gggauacagugugaagucu

SEQ ID NO: 681664 - RNA, 19 nt, Homo sapiens
  misc_RNA (1)...(19): siRNA sense strand
gaagaugugcgauuuugga

SEQ ID NO: 681665 - RNA, 19 nt, Homo sapiens
  misc_RNA (1)...(19): siRNA sense strand
ugaccuggagccuauaaug

SEQ ID NO: 681666 - RNA, 19 nt, Homo sapiens
  misc_RNA (1)...(19): siRNA sense strand
gaccuggagccuauaaugg

SEQ ID NO: 681667 - RNA, 19 nt, Homo sapiens
  misc_RNA (1)...(19): siRNA sense strand
cauggccccugaaagaaua

SEQ ID NO: 681668 - RNA, 19 nt, Homo sapiens
  misc_RNA (1)...(19): siRNA sense strand
acagaaacggcuacugaug

SEQ ID NO: 681669 - RNA, 19 nt, Homo sapiens
  misc_RNA (1)...(19): siRNA sense strand
gagacgucaagccuucuaa

SEQ ID NO: 681670 - RNA, 19 nt, Homo sapiens
  misc_RNA (1)...(19): siRNA sense strand
gugaagaugugcgauuuug

SEQ ID NO: 681671 - RNA, 19 nt, Homo sapiens
  misc_RNA (1)...(19): siRNA sense strand
gucaagccuucuaauguac

SEQ ID NO: 681672 - RNA, 19 nt, Homo sapiens
  misc_RNA (1)...(19): siRNA sense strand
acugauucuuggagacuaa

SEQ ID NO: 681673 - RNA, 19 nt, Homo sapiens
  misc_RNA (1)...(19): siRNA sense strand
gugugaagucugacauuug

SEQ ID NO: 681674 - RNA, 19 nt, Homo sapiens
  misc_RNA (1)...(19): siRNA sense strand
aguaagcugucugucauuc

SEQ ID NO: 681675 - RNA, 19 nt, Homo sapiens
  misc_RNA (1)...(19): siRNA sense strand
gcagaucauggcagugaag

SEQ ID NO: 681676 - RNA, 19 nt, Homo sapiens
  misc_RNA (1)...(19): siRNA sense strand
ggcagaucauggcagugaa

SEQ ID NO: 681677 - RNA, 19 nt, Homo sapiens
  misc_RNA (1)...(19): siRNA sense strand
uaagcugucugucauucac

SEQ ID NO: 681678 - RNA, 19 nt, Homo sapiens
  misc_RNA (1)...(19): siRNA sense strand
gccuuaaaauuccaaaaga

SEQ ID NO: 681679 - RNA, 19 nt, Homo sapiens
  misc_RNA (1)...(19): siRNA sense strand
ccagagcuaaugcaacauc

SEQ ID NO: 681680 - RNA, 19 nt, Homo sapiens
  misc_RNA (1)...(19): siRNA sense strand
cauuucagcagcucaaaca

SEQ ID NO: 681681 - RNA, 19 nt, Homo sapiens
  misc_RNA (1)...(19): siRNA sense strand
guaagcugucugucauuca

SEQ ID NO: 681682 - RNA, 19 nt, Homo sapiens
  misc_RNA (1)...(19): siRNA sense strand
aacggcuacugauggauuu

SEQ ID NO: 681683 - RNA, 19 nt, Homo sapiens
  misc_RNA (1)...(19): siRNA sense strand
gaacagaaacggcuacuga

SEQ ID NO: 681684 - RNA, 19 nt, Homo sapiens
  misc_RNA (1)...(19): siRNA sense strand
ccaaagaacggccuacaua

SEQ ID NO: 681685 - RNA, 19 nt, Homo sapiens
  misc_RNA (1)...(19): siRNA sense strand
ucacagugcuuaaagaaga

SEQ ID NO: 681686 - RNA, 19 nt, Homo sapiens
  misc_RNA (1)...(19): siRNA sense strand
cgucaagccuucuaaugua

SEQ ID NO: 681687 - RNA, 19 nt, Homo sapiens
  misc_RNA (1)...(19): siRNA sense strand
gauaaaggccagacaauuc

SEQ ID NO: 681688 - RNA, 19 nt, Homo sapiens
  misc_RNA (1)...(19): siRNA sense strand
gcucauggauacaucacua

SEQ ID NO: 681689 - RNA, 19 nt, Homo sapiens
  misc_RNA (1)...(19): siRNA sense strand
gauacagugugaagucuga

SEQ ID NO: 681690 - RNA, 19 nt, Homo sapiens
  misc_RNA (1)...(19): siRNA sense strand
cagaagggauacaguguga

SEQ ID NO: 681691 - RNA, 19 nt, Homo sapiens
  misc_RNA (1)...(19): siRNA sense strand
cuacaugaauccaaaggaa

SEQ ID NO: 681692 - RNA, 19 nt, Homo sapiens
  misc_RNA (1)...(19): siRNA sense strand
guaaauagccaggaacaga

SEQ ID NO: 681693 - RNA, 19 nt, Homo sapiens
  misc_RNA (1)...(19): siRNA sense strand
ggauacaucacuagauaaa

SEQ ID NO: 681694 - RNA, 19 nt, Homo sapiens
  misc_RNA (1)...(19): siRNA sense strand
gguggacucuguugcuaaa

SEQ ID NO: 681695 - RNA, 19 nt, Homo sapiens
  misc_RNA (1)...(19): siRNA sense strand
gauccgagccacaguaaau

SEQ ID NO: 681696 - RNA, 19 nt, Homo sapiens
  misc_RNA (1)...(19): siRNA sense strand
gaauaaacccagagcucaa

SEQ ID NO: 681697 - RNA, 19 nt, Homo sapiens
  misc_RNA (1)...(19): siRNA sense strand
acccagagcucaaccagaa

SEQ ID NO: 681698 - RNA, 19 nt, Homo sapiens
  misc_RNA (1)...(19): siRNA sense strand
auggauacaucacuagaua

SEQ ID NO: 681699 - RNA, 19 nt, Homo sapiens
  misc_RNA (1)...(19): siRNA sense strand
caucaaugcucucggucaa

SEQ ID NO: 681700 - RNA, 19 nt, Homo sapiens
  misc_RNA (1)...(19): siRNA sense strand
uaaauagccaggaacagaa

SEQ ID NO: 681701 - RNA, 19 nt, Homo sapiens
  misc_RNA (1)...(19): siRNA sense strand
uggaaucaguggcuacuug

SEQ ID NO: 681702 - RNA, 19 nt, Homo sapiens
  misc_RNA (1)...(19): siRNA sense strand
agaaacggcuacugaugga

SEQ ID NO: 681703 - RNA, 19 nt, Homo sapiens
  misc_RNA (1)...(19): siRNA sense strand
uccauucacugucaccuuu

SEQ ID NO: 681704 - RNA, 19 nt, Homo sapiens
  misc_RNA (1)...(19): siRNA sense strand
gaagggauacagugugaag

SEQ ID NO: 681705 - RNA, 19 nt, Homo sapiens
  misc_RNA (1)...(19): siRNA sense strand
gggcagaucauggcaguga

SEQ ID NO: 681706 - RNA, 19 nt, Homo sapiens
  misc_RNA (1)...(19): siRNA sense strand
caagugaagaugugcgauu

SEQ ID NO: 681707 - RNA, 19 nt, Homo sapiens
  misc_RNA (1)...(19): siRNA sense strand
cugcagaguuuguugacuu

SEQ ID NO: 681708 - RNA, 19 nt, Homo sapiens
  misc_RNA (1)...(19): siRNA sense strand
ugauggauuuggauauuuc

SEQ ID NO: 681709 - RNA, 19 nt, Homo sapiens
  misc_RNA (1)...(19): siRNA sense strand
cacccuacaugaauccaaa

SEQ ID NO: 681710 - RNA, 19 nt, Homo sapiens
  misc_RNA (1)...(19): siRNA sense strand
cacaguaaauagccaggaa

SEQ ID NO: 681711 - RNA, 19 nt, Homo sapiens
  misc_RNA (1)...(19): siRNA sense strand
cuaauguacucaucaaugc

SEQ ID NO: 681712 - RNA, 19 nt, Homo sapiens
  misc_RNA (1)...(19): siRNA sense strand
cauaguaagcugucuguca

SEQ ID NO: 681713 - RNA, 19 nt, Homo sapiens
  misc_RNA (1)...(19): siRNA sense strand
aagugaagaugugcgauuu

SEQ ID NO: 681714 - RNA, 19 nt, Homo sapiens
  misc_RNA (1)...(19): siRNA sense strand
gaggacaucuuagggaaaa

SEQ ID NO: 681715 - RNA, 19 nt, Homo sapiens
  misc_RNA (1)...(19): siRNA sense strand
ugauaaaggccagacaauu

SEQ ID NO: 681716 - RNA, 19 nt, Homo sapiens
  misc_RNA (1)...(19): siRNA sense strand
cuacauacccagagcuaau

SEQ ID NO: 681717 - RNA, 19 nt, Homo sapiens
  misc_RNA (1)...(19): siRNA sense strand
caaagaacggccuacauac

SEQ ID NO: 681718 - RNA, 19 nt, Homo sapiens
  misc_RNA (1)...(19): siRNA sense strand
gcuuaaagaagaauuccaa

SEQ ID NO: 681719 - RNA, 19 nt, Homo sapiens
  misc_RNA (1)...(19): siRNA sense strand
auaguaagcugucugucau

SEQ ID NO: 681720 - RNA, 19 nt, Homo sapiens
  misc_RNA (1)...(19): siRNA sense strand
ucaaugcucucggucaagu

SEQ ID NO: 681721 - RNA, 19 nt, Homo sapiens
  misc_RNA (1)...(19): siRNA sense strand
aaacggcuacugauggauu

SEQ ID NO: 681722 - RNA, 19 nt, Homo sapiens
  misc_RNA (1)...(19): siRNA sense strand
acccagagcuaaugcaaca

SEQ ID NO: 681723 - RNA, 19 nt, Homo sapiens
  misc_RNA (1)...(19): siRNA sense strand
gaggagccaucgccacaac

SEQ ID NO: 681724 - RNA, 19 nt, Homo sapiens
  misc_RNA (1)...(19): siRNA sense strand
ugugaagucugacauuugg

SEQ ID NO: 681725 - RNA, 19 nt, Homo sapiens
  misc_RNA (1)...(19): siRNA sense strand
cuacugauggauuuggaua

SEQ ID NO: 681726 - RNA, 19 nt, Homo sapiens
  misc_RNA (1)...(19): siRNA sense strand
gcuacuugguggacucugu

SEQ ID NO: 681727 - RNA, 19 nt, Homo sapiens
  misc_RNA (1)...(19): siRNA sense strand
aagaagaauuccaaagaac

SEQ ID NO: 681728 - RNA, 19 nt, Homo sapiens
  misc_RNA (1)...(19): siRNA sense strand
acugauggauuuggauauu

SEQ ID NO: 681729 - RNA, 19 nt, Homo sapiens
  misc_RNA (1)...(19): siRNA sense strand
agugugaagucugacauuu

SEQ ID NO: 681730 - RNA, 19 nt, Homo sapiens
  misc_RNA (1)...(19): siRNA sense strand
gcagaguuuguugacuuua

SEQ ID NO: 681731 - RNA, 19 nt, Homo sapiens
  misc_RNA (1)...(19): siRNA sense strand
gacuguccauucacuguca

SEQ ID NO: 681732 - RNA, 19 nt, Homo sapiens
  misc_RNA (1)...(19): siRNA sense strand
cugauggauuuggauauuu

SEQ ID NO: 681733 - RNA, 19 nt, Homo sapiens
  misc_RNA (1)...(19): siRNA sense strand
ugcagaguuuguugacuuu

SEQ ID NO: 681734 - RNA, 19 nt, Homo sapiens
  misc_RNA (1)...(19): siRNA sense strand
gacgucaagccuucuaaug

SEQ ID NO: 681735 - RNA, 19 nt, Homo sapiens
  misc_RNA (1)...(19): siRNA sense strand
cacagugcuuaaagaagaa

SEQ ID NO: 681736 - RNA, 19 nt, Homo sapiens
  misc_RNA (1)...(19): siRNA sense strand
cuucuaauguacucaucaa

SEQ ID NO: 681737 - RNA, 19 nt, Homo sapiens
  misc_RNA (1)...(19): siRNA sense strand
ccucacagugcuuaaagaa

SEQ ID NO: 681738 - RNA, 19 nt, Homo sapiens
  misc_RNA (1)...(19): siRNA sense strand
cagaguuuguugacuuuac

SEQ ID NO: 681739 - RNA, 19 nt, Homo sapiens
  misc_RNA (1)...(19): siRNA sense strand
ucuaauguacucaucaaug

SEQ ID NO: 681740 - RNA, 19 nt, Homo sapiens
  misc_RNA (1)...(19): siRNA sense strand
ccacaacucccagcagaca

SEQ ID NO: 681741 - RNA, 19 nt, Homo sapiens
  misc_RNA (1)...(19): siRNA sense strand
gagcuaaugcaacauccau

SEQ ID NO: 681742 - RNA, 19 nt, Homo sapiens
  misc_RNA (1)...(19): siRNA sense strand
aaauagccaggaacagaaa

SEQ ID NO: 681743 - RNA, 19 nt, Homo sapiens
  misc_RNA (1)...(19): siRNA sense strand
gaauccaaaggaacagaug

SEQ ID NO: 681744 - RNA, 19 nt, Homo sapiens
  misc_RNA (1)...(19): siRNA sense strand
gggauacagugugaagucu

SEQ ID NO: 681745 - RNA, 19 nt, Homo sapiens
  misc_RNA (1)...(19): siRNA sense strand
gaagaugugcgauuuugga

SEQ ID NO: 681746 - RNA, 19 nt, Homo sapiens
  misc_RNA (1)...(19): siRNA sense strand
ggacaucuuagggaaaaua

SEQ ID NO: 681747 - RNA, 19 nt, Homo sapiens
  misc_RNA (1)...(19): siRNA sense strand
gcggauccgagccacagua

SEQ ID NO: 681748 - RNA, 19 nt, Homo sapiens
  misc_RNA (1)...(19): siRNA sense strand
acagaaacggcuacugaug

SEQ ID NO: 681749 - RNA, 19 nt, Homo sapiens
  misc_RNA (1)...(19): siRNA sense strand
cauggccccugaaagaaua

SEQ ID NO: 681750 - RNA, 19 nt, Homo sapiens
  misc_RNA (1)...(19): siRNA sense strand
gagacgucaagccuucuaa

SEQ ID NO: 681751 - RNA, 19 nt, Homo sapiens
  misc_RNA (1)...(19): siRNA sense strand
gugaagaugugcgauuuug

SEQ ID NO: 681752 - RNA, 19 nt, Homo sapiens
  misc_RNA (1)...(19): siRNA sense strand
gucaagccuucuaauguac

SEQ ID NO: 681753 - RNA, 19 nt, Homo sapiens
  misc_RNA (1)...(19): siRNA sense strand
acugauucuuggagacuaa

SEQ ID NO: 681754 - RNA, 19 nt, Homo sapiens
  misc_RNA (1)...(19): siRNA sense strand
gugugaagucugacauuug

SEQ ID NO: 681755 - RNA, 19 nt, Homo sapiens
  misc_RNA (1)...(19): siRNA sense strand
aguaagcugucugucauuc

SEQ ID NO: 681756 - RNA, 19 nt, Homo sapiens
  misc_RNA (1)...(19): siRNA sense strand
ggcagaucauggcagugaa

SEQ ID NO: 681757 - RNA, 19 nt, Homo sapiens
  misc_RNA (1)...(19): siRNA sense strand
gcagaucauggcagugaag

SEQ ID NO: 681758 - RNA, 19 nt, Homo sapiens
  misc_RNA (1)...(19): siRNA sense strand
uaagcugucugucauucac

SEQ ID NO: 681759 - RNA, 19 nt, Homo sapiens
  misc_RNA (1)...(19): siRNA sense strand
cauuucagcagcucaaaca

SEQ ID NO: 681760 - RNA, 19 nt, Homo sapiens
  misc_RNA (1)...(19): siRNA sense strand
ccagagcuaaugcaacauc

SEQ ID NO: 681761 - RNA, 19 nt, Homo sapiens
  misc_RNA (1)...(19): siRNA sense strand
guaagcugucugucauuca

SEQ ID NO: 681762 - RNA, 19 nt, Homo sapiens
  misc_RNA (1)...(19): siRNA sense strand
aacggcuacugauggauuu

SEQ ID NO: 681763 - RNA, 19 nt, Homo sapiens
  misc_RNA (1)...(19): siRNA sense strand
gcaagaagaagcugaaaua

SEQ ID NO: 681764 - RNA, 19 nt, Homo sapiens
  misc_RNA (1)...(19): siRNA sense strand
gcacuacgcuggagaagau

SEQ ID NO: 681765 - RNA, 19 nt, Homo sapiens
  misc_RNA (1)...(19): siRNA sense strand
ugaaauaccugcccuacaa

SEQ ID NO: 681766 - RNA, 19 nt, Homo sapiens
  misc_RNA (1)...(19): siRNA sense strand
ggcaagaacucaaagauca

SEQ ID NO: 681767 - RNA, 19 nt, Homo sapiens
  misc_RNA (1)...(19): siRNA sense strand
ggcaauggcuggauuccua

SEQ ID NO: 681768 - RNA, 19 nt, Homo sapiens
  misc_RNA (1)...(19): siRNA sense strand
gaauacuucuuccugauug

SEQ ID NO: 681769 - RNA, 19 nt, Homo sapiens
  misc_RNA (1)...(19): siRNA sense strand
gaagacggcugaggacaug

SEQ ID NO: 681770 - RNA, 19 nt, Homo sapiens
  misc_RNA (1)...(19): siRNA sense strand
caccuuaacuuccagauug

SEQ ID NO: 681771 - RNA, 19 nt, Homo sapiens
  misc_RNA (1)...(19): siRNA sense strand
gggaggagauucagaagca

SEQ ID NO: 681772 - RNA, 19 nt, Homo sapiens
  misc_RNA (1)...(19): siRNA sense strand
acagguggcuggucauuga

SEQ ID NO: 681773 - RNA, 19 nt, Homo sapiens
  misc_RNA (1)...(19): siRNA sense strand
cggcacaacuuacacaaga

SEQ ID NO: 681774 - RNA, 19 nt, Homo sapiens
  misc_RNA (1)...(19): siRNA sense strand
gagagccacugguuugugu

SEQ ID NO: 681775 - RNA, 19 nt, Homo sapiens
  misc_RNA (1)...(19): siRNA sense strand
ucaccuacaucccuuucua

SEQ ID NO: 681776 - RNA, 19 nt, Homo sapiens
  misc_RNA (1)...(19): siRNA sense strand
ucacacagaugaaucacau

SEQ ID NO: 681777 - RNA, 19 nt, Homo sapiens
  misc_RNA (1)...(19): siRNA sense strand
agaagaagcugaaauaccu

SEQ ID NO: 681778 - RNA, 19 nt, Homo sapiens
  misc_RNA (1)...(19): siRNA sense strand
ugaccaugaucguccauaa

SEQ ID NO: 681779 - RNA, 19 nt, Homo sapiens
  misc_RNA (1)...(19): siRNA sense strand
cuggauggcugcaacauga

SEQ ID NO: 681780 - RNA, 19 nt, Homo sapiens
  misc_RNA (1)...(19): siRNA sense strand
aaagaucacugaggacuuc

SEQ ID NO: 681781 - RNA, 19 nt, Homo sapiens
  misc_RNA (1)...(19): siRNA sense strand
ccaagcauggcauugaaua

SEQ ID NO: 681782 - RNA, 19 nt, Homo sapiens
  misc_RNA (1)...(19): siRNA sense strand
gaggagauucagaagcaua

SEQ ID NO: 681783 - RNA, 19 nt, Homo sapiens
  misc_RNA (1)...(19): siRNA sense strand
acaaucaccagcacgaaua

SEQ ID NO: 681784 - RNA, 19 nt, Homo sapiens
  misc_RNA (1)...(19): siRNA sense strand
ggacgccuaccuucacaaa

SEQ ID NO: 681785 - RNA, 19 nt, Homo sapiens
  misc_RNA (1)...(19): siRNA sense strand
ugaaucacaucgucaugga

SEQ ID NO: 681786 - RNA, 19 nt, Homo sapiens
  misc_RNA (1)...(19): siRNA sense strand
ucauugaccgcaagguuua

SEQ ID NO: 681787 - RNA, 19 nt, Homo sapiens
  misc_RNA (1)...(19): siRNA sense strand
gaaauaccugcccuacaau

SEQ ID NO: 681788 - RNA, 19 nt, Homo sapiens
  misc_RNA (1)...(19): siRNA sense strand
acgccuaccuucacaaaug

SEQ ID NO: 681789 - RNA, 19 nt, Homo sapiens
  misc_RNA (1)...(19): siRNA sense strand
ggaauucgugggcaaguuc

SEQ ID NO: 681790 - RNA, 19 nt, Homo sapiens
  misc_RNA (1)...(19): siRNA sense strand
gauggcugcaacaugauua

SEQ ID NO: 681791 - RNA, 19 nt, Homo sapiens
  misc_RNA (1)...(19): siRNA sense strand
cgaauacuucuuccugauu

SEQ ID NO: 681792 - RNA, 19 nt, Homo sapiens
  misc_RNA (1)...(19): siRNA sense strand
ccgcaagguuuacaacauc

SEQ ID NO: 681793 - RNA, 19 nt, Homo sapiens
  misc_RNA (1)...(19): siRNA sense strand
caggagaagccgcuacuga

SEQ ID NO: 681794 - RNA, 19 nt, Homo sapiens
  misc_RNA (1)...(19): siRNA sense strand
acaaggaucccgaugugaa

SEQ ID NO: 681795 - RNA, 19 nt, Homo sapiens
  misc_RNA (1)...(19): siRNA sense strand
ggaagacggcugaggacau

SEQ ID NO: 681796 - RNA, 19 nt, Homo sapiens
  misc_RNA (1)...(19): siRNA sense strand
gcacaacuuacacaagauc

SEQ ID NO: 681797 - RNA, 19 nt, Homo sapiens
  misc_RNA (1)...(19): siRNA sense strand
guccacaaauucgucauug

SEQ ID NO: 681798 - RNA, 19 nt, Homo sapiens
  misc_RNA (1)...(19): siRNA sense strand
ccaugaucguccauaagaa

SEQ ID NO: 681799 - RNA, 19 nt, Homo sapiens
  misc_RNA (1)...(19): siRNA sense strand
caucacggccuuuguccuu

SEQ ID NO: 681800 - RNA, 19 nt, Homo sapiens
  misc_RNA (1)...(19): siRNA sense strand
uuuacaacaucaccaaaug

SEQ ID NO: 681801 - RNA, 19 nt, Homo sapiens
  misc_RNA (1)...(19): siRNA sense strand
gcugggaggagauucagaa

SEQ ID NO: 681802 - RNA, 19 nt, Homo sapiens
  misc_RNA (1)...(19): siRNA sense strand
cgccaagccuaacaucuuc

SEQ ID NO: 681803 - RNA, 19 nt, Homo sapiens
  misc_RNA (1)...(19): siRNA sense strand
uaacaucuuccacaaggau

SEQ ID NO: 681804 - RNA, 19 nt, Homo sapiens
  misc_RNA (1)...(19): siRNA sense strand
cgccuaccuucacaaauga

SEQ ID NO: 681805 - RNA, 19 nt, Homo sapiens
  misc_RNA (1)...(19): siRNA sense strand
caagaccaaccacguguuc

SEQ ID NO: 681806 - RNA, 19 nt, Homo sapiens
  misc_RNA (1)...(19): siRNA sense strand
auucgucauuggccacuua

SEQ ID NO: 681807 - RNA, 19 nt, Homo sapiens
  misc_RNA (1)...(19): siRNA sense strand
uggagagcauugcaugguu

SEQ ID NO: 681808 - RNA, 19 nt, Homo sapiens
  misc_RNA (1)...(19): siRNA sense strand
guggagcaguccuucuuca

SEQ ID NO: 681809 - RNA, 19 nt, Homo sapiens
  misc_RNA (1)...(19): siRNA sense strand
gcuacuacauccgguucuu

SEQ ID NO: 681810 - RNA, 19 nt, Homo sapiens
  misc_RNA (1)...(19): siRNA sense strand
cugaggacaugaaccuguu

SEQ ID NO: 681811 - RNA, 19 nt, Homo sapiens
  misc_RNA (1)...(19): siRNA sense strand
gcauugaauaccaggagaa

SEQ ID NO: 681812 - RNA, 19 nt, Homo sapiens
  misc_RNA (1)...(19): siRNA sense strand
uacauccgguucuucauca

SEQ ID NO: 681813 - RNA, 19 nt, Homo sapiens
  misc_RNA (1)...(19): siRNA sense strand
ggauggcugcaacaugauu

SEQ ID NO: 681814 - RNA, 19 nt, Homo sapiens
  misc_RNA (1)...(19): siRNA sense strand
caaagaucacugaggacuu

SEQ ID NO: 681815 - RNA, 19 nt, Homo sapiens
  misc_RNA (1)...(19): siRNA sense strand
gccaacugguggaaucauc

SEQ ID NO: 681816 - RNA, 19 nt, Homo sapiens
  misc_RNA (1)...(19): siRNA sense strand
ccauguauuuccaguacca

SEQ ID NO: 681817 - RNA, 19 nt, Homo sapiens
  misc_RNA (1)...(19): siRNA sense strand
ucaguggacaccuuaacuu

SEQ ID NO: 681818 - RNA, 19 nt, Homo sapiens
  misc_RNA (1)...(19): siRNA sense strand
ugagggcccugcuggacau

SEQ ID NO: 681819 - RNA, 19 nt, Homo sapiens
  misc_RNA (1)...(19): siRNA sense strand
caagaagaagcugaaauac

SEQ ID NO: 681820 - RNA, 19 nt, Homo sapiens
  misc_RNA (1)...(19): siRNA sense strand
ggagcaguccuucuucaac

SEQ ID NO: 681821 - RNA, 19 nt, Homo sapiens
  misc_RNA (1)...(19): siRNA sense strand
ggagagccacugguuugug

SEQ ID NO: 681822 - RNA, 19 nt, Homo sapiens
  misc_RNA (1)...(19): siRNA sense strand
gaccaaccacguguucuuc

SEQ ID NO: 681823 - RNA, 19 nt, Homo sapiens
  misc_RNA (1)...(19): siRNA sense strand
ggaggagauucagaagcau

SEQ ID NO: 681824 - RNA, 19 nt, Homo sapiens
  misc_RNA (1)...(19): siRNA sense strand
ggcacaacuuacacaagau

SEQ ID NO: 681825 - RNA, 19 nt, Homo sapiens
  misc_RNA (1)...(19): siRNA sense strand
ucacaucgucauggagauu

SEQ ID NO: 681826 - RNA, 19 nt, Homo sapiens
  misc_RNA (1)...(19): siRNA sense strand
acgaauacuucuuccugau

SEQ ID NO: 681827 - RNA, 19 nt, Homo sapiens
  misc_RNA (1)...(19): siRNA sense strand
cgacagguggcuggucauu

SEQ ID NO: 681828 - RNA, 19 nt, Homo sapiens
  misc_RNA (1)...(19): siRNA sense strand
agccuaacaucuuccacaa

SEQ ID NO: 681829 - RNA, 19 nt, Homo sapiens
  misc_RNA (1)...(19): siRNA sense strand
cuggugaagucucuaugug

SEQ ID NO: 681830 - RNA, 19 nt, Homo sapiens
  misc_RNA (1)...(19): siRNA sense strand
cuggagagccacugguuug

SEQ ID NO: 681831 - RNA, 19 nt, Homo sapiens
  misc_RNA (1)...(19): siRNA sense strand
ggcaagaagaagcugaaau

SEQ ID NO: 681832 - RNA, 19 nt, Homo sapiens
  misc_RNA (1)...(19): siRNA sense strand
ucgaguacggcaagaagaa

SEQ ID NO: 681833 - RNA, 19 nt, Homo sapiens
  misc_RNA (1)...(19): siRNA sense strand
gcuggugaagucucuaugu

SEQ ID NO: 681834 - RNA, 19 nt, Homo sapiens
  misc_RNA (1)...(19): siRNA sense strand
gauugagcaccaccucuuc

SEQ ID NO: 681835 - RNA, 19 nt, Homo sapiens
  misc_RNA (1)...(19): siRNA sense strand
ggaccacggcaagaacuca

SEQ ID NO: 681836 - RNA, 19 nt, Homo sapiens
  misc_RNA (1)...(19): siRNA sense strand
guuuacaacaucaccaaau

SEQ ID NO: 681837 - RNA, 19 nt, Homo sapiens
  misc_RNA (1)...(19): siRNA sense strand
gccaggaccacggcaagaa

SEQ ID NO: 681838 - RNA, 19 nt, Homo sapiens
  misc_RNA (1)...(19): siRNA sense strand
cggcaagaacucaaagauc

SEQ ID NO: 681839 - RNA, 19 nt, Homo sapiens
  misc_RNA (1)...(19): siRNA sense strand
gaccaugaucguccauaag

SEQ ID NO: 681840 - RNA, 19 nt, Homo sapiens
  misc_RNA (1)...(19): siRNA sense strand
ucaccagcacgaauacuuc

SEQ ID NO: 681841 - RNA, 19 nt, Homo sapiens
  misc_RNA (1)...(19): siRNA sense strand
cgucauuggccacuuaaag

SEQ ID NO: 681842 - RNA, 19 nt, Homo sapiens
  misc_RNA (1)...(19): siRNA sense strand
gaagaagucuggugacauc

SEQ ID NO: 681843 - RNA, 19 nt, Homo sapiens
  misc_RNA (1)...(19): siRNA sense strand
gcagauaccuacccuacaa

SEQ ID NO: 681844 - RNA, 19 nt, Homo sapiens
  misc_RNA (1)...(19): siRNA sense strand
gaagaaacgcagauaccua

SEQ ID NO: 681845 - RNA, 19 nt, Homo sapiens
  misc_RNA (1)...(19): siRNA sense strand
gugcuggccuggcuccuua

SEQ ID NO: 681846 - RNA, 19 nt, Homo sapiens
  misc_RNA (1)...(19): siRNA sense strand
gugcugcucuucuuuguug

SEQ ID NO: 681847 - RNA, 19 nt, Homo sapiens
  misc_RNA (1)...(19): siRNA sense strand
gcaagaagaaacgcagaua

SEQ ID NO: 681848 - RNA, 19 nt, Homo sapiens
  misc_RNA (1)...(19): siRNA sense strand
ggagucauccgucgaguau

SEQ ID NO: 681849 - RNA, 19 nt, Homo sapiens
  misc_RNA (1)...(19): siRNA sense strand
ggaaccacguggcccagaa

SEQ ID NO: 681850 - RNA, 19 nt, Homo sapiens
  misc_RNA (1)...(19): siRNA sense strand
ucacacagaugaaccacau

SEQ ID NO: 681851 - RNA, 19 nt, Homo sapiens
  misc_RNA (1)...(19): siRNA sense strand
ggccaugccuccaucuuca

SEQ ID NO: 681852 - RNA, 19 nt, Homo sapiens
  misc_RNA (1)...(19): siRNA sense strand
ggaagaacccagccaggau

SEQ ID NO: 681853 - RNA, 19 nt, Homo sapiens
  misc_RNA (1)...(19): siRNA sense strand
acaaguggcuggucaucga

SEQ ID NO: 681854 - RNA, 19 nt, Homo sapiens
  misc_RNA (1)...(19): siRNA sense strand
gacaugaagcuguuugaug

SEQ ID NO: 681855 - RNA, 19 nt, Homo sapiens
  misc_RNA (1)...(19): siRNA sense strand
ccuggugucugcagcauga

SEQ ID NO: 681856 - RNA, 19 nt, Homo sapiens
  misc_RNA (1)...(19): siRNA sense strand
ggagaucggccacgagaag

SEQ ID NO: 681857 - RNA, 19 nt, Homo sapiens
  misc_RNA (1)...(19): siRNA sense strand
uggccuggcuccuuaucua

SEQ ID NO: 681858 - RNA, 19 nt, Homo sapiens
  misc_RNA (1)...(19): siRNA sense strand
ggccucagcuacgaaguga

SEQ ID NO: 681859 - RNA, 19 nt, Homo sapiens
  misc_RNA (1)...(19): siRNA sense strand
ccaucaagaucucaauuuu

SEQ ID NO: 681860 - RNA, 19 nt, Homo sapiens
  misc_RNA (1)...(19): siRNA sense strand
ccgaggacaugaagcuguu

SEQ ID NO: 681861 - RNA, 19 nt, Homo sapiens
  misc_RNA (1)...(19): siRNA sense strand
cccaacaucuuccacaaag

SEQ ID NO: 681862 - RNA, 19 nt, Homo sapiens
  misc_RNA (1)...(19): siRNA sense strand
gaucgagcaccaccucuuc

SEQ ID NO: 681863 - RNA, 19 nt, Homo sapiens
  misc_RNA (1)...(19): siRNA sense strand
caccuucuuugcuuuccua

SEQ ID NO: 681864 - RNA, 19 nt, Homo sapiens
  misc_RNA (1)...(19): siRNA sense strand
ccacguggcccagaaguuc

SEQ ID NO: 681865 - RNA, 19 nt, Homo sapiens
  misc_RNA (1)...(19): siRNA sense strand
gcaugcagugggcggauuu

SEQ ID NO: 681866 - RNA, 19 nt, Homo sapiens
  misc_RNA (1)...(19): siRNA sense strand
caacguggagcccucacuu

SEQ ID NO: 681867 - RNA, 19 nt, Homo sapiens
  misc_RNA (1)...(19): siRNA sense strand
gcaccucaacuuccagauc

SEQ ID NO: 681868 - RNA, 19 nt, Homo sapiens
  misc_RNA (1)...(19): siRNA sense strand
cuucuuugcuuuccuacug

SEQ ID NO: 681869 - RNA, 19 nt, Homo sapiens
  misc_RNA (1)...(19): siRNA sense strand
ggacaugaagcuguuugau

SEQ ID NO: 681870 - RNA, 19 nt, Homo sapiens
  misc_RNA (1)...(19): siRNA sense strand
uaugcccgcuucuucuuau

SEQ ID NO: 681871 - RNA, 19 nt, Homo sapiens
  misc_RNA (1)...(19): siRNA sense strand
gggagucauccgucgagua

SEQ ID NO: 681872 - RNA, 19 nt, Homo sapiens
  misc_RNA (1)...(19): siRNA sense strand
gcccaacaucuuccacaaa

SEQ ID NO: 681873 - RNA, 19 nt, Homo sapiens
  misc_RNA (1)...(19): siRNA sense strand
caagaagaaacgcagauac

SEQ ID NO: 681874 - RNA, 19 nt, Homo sapiens
  misc_RNA (1)...(19): siRNA sense strand
gggacugggucagcucuca

SEQ ID NO: 681875 - RNA, 19 nt, Homo sapiens
  misc_RNA (1)...(19): siRNA sense strand
ucaagaaguccugguggaa

SEQ ID NO: 681876 - RNA, 19 nt, Homo sapiens
  misc_RNA (1)...(19): siRNA sense strand
agucauccgucgaguaugg

SEQ ID NO: 681877 - RNA, 19 nt, Homo sapiens
  misc_RNA (1)...(19): siRNA sense strand
acaaccagcagcaccugua

SEQ ID NO: 681878 - RNA, 19 nt, Homo sapiens
  misc_RNA (1)...(19): siRNA sense strand
gggugcugcucuucuuugu

SEQ ID NO: 681879 - RNA, 19 nt, Homo sapiens
  misc_RNA (1)...(19): siRNA sense strand
cgucgaguauggcaagaag

SEQ ID NO: 681880 - RNA, 19 nt, Homo sapiens
  misc_RNA (1)...(19): siRNA sense strand
gcacggccucagcuacgaa

SEQ ID NO: 681881 - RNA, 19 nt, Homo sapiens
  misc_RNA (1)...(19): siRNA sense strand
gcgggcaccucaacuucca

SEQ ID NO: 681882 - RNA, 19 nt, Homo sapiens
  misc_RNA (1)...(19): siRNA sense strand
ucgaguauggcaagaagaa

SEQ ID NO: 681883 - RNA, 19 nt, Homo sapiens
  misc_RNA (1)...(19): siRNA sense strand
ccaagcacggccucagcua

SEQ ID NO: 681884 - RNA, 19 nt, Homo sapiens
  misc_RNA (1)...(19): siRNA sense strand
cagcagcaccuguacuucu

SEQ ID NO: 681885 - RNA, 19 nt, Homo sapiens
  misc_RNA (1)...(19): siRNA sense strand
gggccaugccuccaucuuc

SEQ ID NO: 681886 - RNA, 19 nt, Homo sapiens
  misc_RNA (1)...(19): siRNA sense strand
cugaagaagucuggugaca

SEQ ID NO: 681887 - RNA, 19 nt, Homo sapiens
  misc_RNA (1)...(19): siRNA sense strand
uauccuaccuccccuucua

SEQ ID NO: 681888 - RNA, 19 nt, Homo sapiens
  misc_RNA (1)...(19): siRNA sense strand
gaggacaugaagcuguuug

SEQ ID NO: 681889 - RNA, 19 nt, Homo sapiens
  misc_RNA (1)...(19): siRNA sense strand
gaaccacguggcccagaag

SEQ ID NO: 681890 - RNA, 19 nt, Homo sapiens
  misc_RNA (1)...(19): siRNA sense strand
uggaaaaucuggcguacau

SEQ ID NO: 681891 - RNA, 19 nt, Homo sapiens
  misc_RNA (1)...(19): siRNA sense strand
ggaugccgagacacaacua

SEQ ID NO: 681892 - RNA, 19 nt, Homo sapiens
  misc_RNA (1)...(19): siRNA sense strand
cuaugcccgcuucuucuua

SEQ ID NO: 681893 - RNA, 19 nt, Homo sapiens
  misc_RNA (1)...(19): siRNA sense strand
uccaucaagaucucaauuu

SEQ ID NO: 681894 - RNA, 19 nt, Homo sapiens
  misc_RNA (1)...(19): siRNA sense strand
gucccaccuucuuugcuuu

SEQ ID NO: 681895 - RNA, 19 nt, Homo sapiens
  misc_RNA (1)...(19): siRNA sense strand
gccagucccaccuucuuug

SEQ ID NO: 681896 - RNA, 19 nt, Homo sapiens
  misc_RNA (1)...(19): siRNA sense strand
gaagguggauuaaauguca

SEQ ID NO: 681897 - RNA, 19 nt, Homo sapiens
  misc_RNA (1)...(19): siRNA sense strand
gaaaggaaguuggcaguau

SEQ ID NO: 681898 - RNA, 19 nt, Homo sapiens
  misc_RNA (1)...(19): siRNA sense strand
gagaaucaguuaagaagau

SEQ ID NO: 681899 - RNA, 19 nt, Homo sapiens
  misc_RNA (1)...(19): siRNA sense strand
gauugaagguggauuaaau

SEQ ID NO: 681900 - RNA, 19 nt, Homo sapiens
  misc_RNA (1)...(19): siRNA sense strand
gaagggaauuguccugaga

SEQ ID NO: 681901 - RNA, 19 nt, Homo sapiens
  misc_RNA (1)...(19): siRNA sense strand
guggaaggaucuacugaua

SEQ ID NO: 681902 - RNA, 19 nt, Homo sapiens
  misc_RNA (1)...(19): siRNA sense strand
ugaccaagcugcaccaguu

SEQ ID NO: 681903 - RNA, 19 nt, Homo sapiens
  misc_RNA (1)...(19): siRNA sense strand
gaaaggagaaucaguuaag

SEQ ID NO: 681904 - RNA, 19 nt, Homo sapiens
  misc_RNA (1)...(19): siRNA sense strand
ggaaggaucuacugauagg

SEQ ID NO: 681905 - RNA, 19 nt, Homo sapiens
  misc_RNA (1)...(19): siRNA sense strand
gaugcaagaucaaggaaau

SEQ ID NO: 681906 - RNA, 19 nt, Homo sapiens
  misc_RNA (1)...(19): siRNA sense strand
ggaauuguccugagagaau

SEQ ID NO: 681907 - RNA, 19 nt, Homo sapiens
  misc_RNA (1)...(19): siRNA sense strand
uagcacagcugccaguaga

SEQ ID NO: 681908 - RNA, 19 nt, Homo sapiens
  misc_RNA (1)...(19): siRNA sense strand
aaagguggaugcaagauca

SEQ ID NO: 681909 - RNA, 19 nt, Homo sapiens
  misc_RNA (1)...(19): siRNA sense strand
caguguggcucucucauug

SEQ ID NO: 681910 - RNA, 19 nt, Homo sapiens
  misc_RNA (1)...(19): siRNA sense strand
aaagaaaggagaaucaguu

SEQ ID NO: 681911 - RNA, 19 nt, Homo sapiens
  misc_RNA (1)...(19): siRNA sense strand
ggaaaggaaguuggcagua

SEQ ID NO: 681912 - RNA, 19 nt, Homo sapiens
  misc_RNA (1)...(19): siRNA sense strand
ugagagaauuaucacuuug

SEQ ID NO: 681913 - RNA, 19 nt, Homo sapiens
  misc_RNA (1)...(19): siRNA sense strand
cugagagaauuaucacuuu

SEQ ID NO: 681914 - RNA, 19 nt, Homo sapiens
  misc_RNA (1)...(19): siRNA sense strand
gaaagaaaggagaaucagu

SEQ ID NO: 681915 - RNA, 19 nt, Homo sapiens
  misc_RNA (1)...(19): siRNA sense strand
caacaucucagaagggaau

SEQ ID NO: 681916 - RNA, 19 nt, Homo sapiens
  misc_RNA (1)...(19): siRNA sense strand
ggagaguggugcacguauc

SEQ ID NO: 681917 - RNA, 19 nt, Homo sapiens
  misc_RNA (1)...(19): siRNA sense strand
gcaguaucaucggaaagaa

SEQ ID NO: 681918 - RNA, 19 nt, Homo sapiens
  misc_RNA (1)...(19): siRNA sense strand
ucaaugagauccgucagau

SEQ ID NO: 681919 - RNA, 19 nt, Homo sapiens
  misc_RNA (1)...(19): siRNA sense strand
aagaaaggagaaucaguua

SEQ ID NO: 681920 - RNA, 19 nt, Homo sapiens
  misc_RNA (1)...(19): siRNA sense strand
cuagaggccuauaccauuc

SEQ ID NO: 681921 - RNA, 19 nt, Homo sapiens
  misc_RNA (1)...(19): siRNA sense strand
aaaggagaaucaguuaaga

SEQ ID NO: 681922 - RNA, 19 nt, Homo sapiens
  misc_RNA (1)...(19): siRNA sense strand
gaucauugacaaacuggaa

SEQ ID NO: 681923 - RNA, 19 nt, Homo sapiens
  misc_RNA (1)...(19): siRNA sense strand
ucagacuacuucucaugaa

SEQ ID NO: 681924 - RNA, 19 nt, Homo sapiens
  misc_RNA (1)...(19): siRNA sense strand
ccacuaaugccaucuucaa

SEQ ID NO: 681925 - RNA, 19 nt, Homo sapiens
  misc_RNA (1)...(19): siRNA sense strand
cgauuugauuggcugcaua

SEQ ID NO: 681926 - RNA, 19 nt, Homo sapiens
  misc_RNA (1)...(19): siRNA sense strand
gaacucaccauuccaaacg

SEQ ID NO: 681927 - RNA, 19 nt, Homo sapiens
  misc_RNA (1)...(19): siRNA sense strand
aaaggaaguuggcaguauc

SEQ ID NO: 681928 - RNA, 19 nt, Homo sapiens
  misc_RNA (1)...(19): siRNA sense strand
caaacuggaagaggacaua

SEQ ID NO: 681929 - RNA, 19 nt, Homo sapiens
  misc_RNA (1)...(19): siRNA sense strand
ggagaaucaguuaagaaga

SEQ ID NO: 681930 - RNA, 19 nt, Homo sapiens
  misc_RNA (1)...(19): siRNA sense strand
gaucugcguggucauguug

SEQ ID NO: 681931 - RNA, 19 nt, Homo sapiens
  misc_RNA (1)...(19): siRNA sense strand
caagaucaaggaaauacga

SEQ ID NO: 681932 - RNA, 19 nt, Homo sapiens
  misc_RNA (1)...(19): siRNA sense strand
gauuugauuggcugcauaa

SEQ ID NO: 681933 - RNA, 19 nt, Homo sapiens
  misc_RNA (1)...(19): siRNA sense strand
gaaauacgagagaguacag

SEQ ID NO: 681934 - RNA, 19 nt, Homo sapiens
  misc_RNA (1)...(19): siRNA sense strand
gagaguggugcacguauca

SEQ ID NO: 681935 - RNA, 19 nt, Homo sapiens
  misc_RNA (1)...(19): siRNA sense strand
guggcucucucauuggaaa

SEQ ID NO: 681936 - RNA, 19 nt, Homo sapiens
  misc_RNA (1)...(19): siRNA sense strand
gaggagaguggugcacgua

SEQ ID NO: 681937 - RNA, 19 nt, Homo sapiens
  misc_RNA (1)...(19): siRNA sense strand
aaugagauccgucagaugu

SEQ ID NO: 681938 - RNA, 19 nt, Homo sapiens
  misc_RNA (1)...(19): siRNA sense strand
ucaaggacaguaugccauu

SEQ ID NO: 681939 - RNA, 19 nt, Homo sapiens
  misc_RNA (1)...(19): siRNA sense strand
ucuagaggccuauaccauu

SEQ ID NO: 681940 - RNA, 19 nt, Homo sapiens
  misc_RNA (1)...(19): siRNA sense strand
ggaaauacgagagaguaca

SEQ ID NO: 681941 - RNA, 19 nt, Homo sapiens
  misc_RNA (1)...(19): siRNA sense strand
gggauaugcuacccaacuc

SEQ ID NO: 681942 - RNA, 19 nt, Homo sapiens
  misc_RNA (1)...(19): siRNA sense strand
gcucagacuacuucucaug

SEQ ID NO: 681943 - RNA, 19 nt, Homo sapiens
  misc_RNA (1)...(19): siRNA sense strand
ccuuugcuaugaucauuga

SEQ ID NO: 681944 - RNA, 19 nt, Homo sapiens
  misc_RNA (1)...(19): siRNA sense strand
gauaggcagguuaccauca

SEQ ID NO: 681945 - RNA, 19 nt, Homo sapiens
  misc_RNA (1)...(19): siRNA sense strand
cagcgacagugcgagcuuu

SEQ ID NO: 681946 - RNA, 19 nt, Homo sapiens
  misc_RNA (1)...(19): siRNA sense strand
uaugaucauugacaaacug

SEQ ID NO: 681947 - RNA, 19 nt, Homo sapiens
  misc_RNA (1)...(19): siRNA sense strand
caaggacaguaugccauuc

SEQ ID NO: 681948 - RNA, 19 nt, Homo sapiens
  misc_RNA (1)...(19): siRNA sense strand
gauaugcuacccaacucaa

SEQ ID NO: 681949 - RNA, 19 nt, Homo sapiens
  misc_RNA (1)...(19): siRNA sense strand
ggaaguuggcaguaucauc

SEQ ID NO: 681950 - RNA, 19 nt, Homo sapiens
  misc_RNA (1)...(19): siRNA sense strand
ggauuaaaugucacucuca

SEQ ID NO: 681951 - RNA, 19 nt, Homo sapiens
  misc_RNA (1)...(19): siRNA sense strand
cuaaugccaucuucaaagc

SEQ ID NO: 681952 - RNA, 19 nt, Homo sapiens
  misc_RNA (1)...(19): siRNA sense strand
gaagaugcgcgaggagagu

SEQ ID NO: 681953 - RNA, 19 nt, Homo sapiens
  misc_RNA (1)...(19): siRNA sense strand
gaggacauaagcagcucua

SEQ ID NO: 681954 - RNA, 19 nt, Homo sapiens
  misc_RNA (1)...(19): siRNA sense strand
gagagaauuaucacuuugg

SEQ ID NO: 681955 - RNA, 19 nt, Homo sapiens
  misc_RNA (1)...(19): siRNA sense strand
ugugauugaagguggauua

SEQ ID NO: 681956 - RNA, 19 nt, Homo sapiens
  misc_RNA (1)...(19): siRNA sense strand
agaaaggagaaucaguuaa

SEQ ID NO: 681957 - RNA, 19 nt, Homo sapiens
  misc_RNA (1)...(19): siRNA sense strand
ggcaguaucaucggaaaga

SEQ ID NO: 681958 - RNA, 19 nt, Homo sapiens
  misc_RNA (1)...(19): siRNA sense strand
gcucuccggucaucuuugc

SEQ ID NO: 681959 - RNA, 19 nt, Homo sapiens
  misc_RNA (1)...(19): siRNA sense strand
ggaugcaagaucaaggaaa

SEQ ID NO: 681960 - RNA, 19 nt, Homo sapiens
  misc_RNA (1)...(19): siRNA sense strand
ccugagagaauuaucacuu

SEQ ID NO: 681961 - RNA, 19 nt, Homo sapiens
  misc_RNA (1)...(19): siRNA sense strand
ucaccauuccaaacgauuu

SEQ ID NO: 681962 - RNA, 19 nt, Homo sapiens
  misc_RNA (1)...(19): siRNA sense strand
agaaucaguuaagaagaug

SEQ ID NO: 681963 - RNA, 19 nt, Homo sapiens
  misc_RNA (1)...(19): siRNA sense strand
aaggaaauacgagagagua

SEQ ID NO: 681964 - RNA, 19 nt, Homo sapiens
  misc_RNA (1)...(19): siRNA sense strand
gaacccaguggaaggaucu

SEQ ID NO: 681965 - RNA, 19 nt, Homo sapiens
  misc_RNA (1)...(19): siRNA sense strand
ggaaagaaaggagaaucag

SEQ ID NO: 681966 - RNA, 19 nt, Homo sapiens
  misc_RNA (1)...(19): siRNA sense strand
guguggcucucucauugga

SEQ ID NO: 681967 - RNA, 19 nt, Homo sapiens
  misc_RNA (1)...(19): siRNA sense strand
caugaacucaccauuccaa

SEQ ID NO: 681968 - RNA, 19 nt, Homo sapiens
  misc_RNA (1)...(19): siRNA sense strand
cggaaagaaaggagaauca

SEQ ID NO: 681969 - RNA, 19 nt, Homo sapiens
  misc_RNA (1)...(19): siRNA sense strand
cagguggucaggacaggua

SEQ ID NO: 681970 - RNA, 19 nt, Homo sapiens
  misc_RNA (1)...(19): siRNA sense strand
caucacuauugcuggcauu

SEQ ID NO: 681971 - RNA, 19 nt, Homo sapiens
  misc_RNA (1)...(19): siRNA sense strand
ucaguguggcucucucauu

SEQ ID NO: 681972 - RNA, 19 nt, Homo sapiens
  misc_RNA (1)...(19): siRNA sense strand
ccauuccacagccagauuu

SEQ ID NO: 681973 - RNA, 19 nt, Homo sapiens
  misc_RNA (1)...(19): siRNA sense strand
uaaucaaugucaggcuuuc

SEQ ID NO: 681974 - RNA, 19 nt, Homo sapiens
  misc_RNA (1)...(19): siRNA sense strand
gaccaagcugcaccaguug

SEQ ID NO: 681975 - RNA, 19 nt, Homo sapiens
  misc_RNA (1)...(19): siRNA sense strand
ggaaaagguggaugcaaga

SEQ ID NO: 681976 - RNA, 19 nt, Homo sapiens
  misc_RNA (1)...(19): siRNA sense strand
caucggaaagaaaggagaa

SEQ ID NO: 681977 - RNA, 19 nt, Homo sapiens
  misc_RNA (1)...(19): siRNA sense strand
ugagauccgucagaugucu

SEQ ID NO: 681978 - RNA, 19 nt, Homo sapiens
  misc_RNA (1)...(19): siRNA sense strand
ucucaugaacucaccauuc

SEQ ID NO: 681979 - RNA, 19 nt, Homo sapiens
  misc_RNA (1)...(19): siRNA sense strand
cagacuacuucucaugaac

SEQ ID NO: 681980 - RNA, 19 nt, Homo sapiens
  misc_RNA (1)...(19): siRNA sense strand
ggauaugcuacccaacuca

SEQ ID NO: 681981 - RNA, 19 nt, Homo sapiens
  misc_RNA (1)...(19): siRNA sense strand
ggucccugcuagucagugu

SEQ ID NO: 681982 - RNA, 19 nt, Homo sapiens
  misc_RNA (1)...(19): siRNA sense strand
acuuaugcauggaaaggaa

SEQ ID NO: 681983 - RNA, 19 nt, Homo sapiens
  misc_RNA (1)...(19): siRNA sense strand
caaggaaauacgagagagu

SEQ ID NO: 681984 - RNA, 19 nt, Homo sapiens
  misc_RNA (1)...(19): siRNA sense strand
gcuaugaucauugacaaac

SEQ ID NO: 681985 - RNA, 19 nt, Homo sapiens
  misc_RNA (1)...(19): siRNA sense strand
cagguuaccaucacuggau

SEQ ID NO: 681986 - RNA, 19 nt, Homo sapiens
  misc_RNA (1)...(19): siRNA sense strand
guccagcucuccggucauc

SEQ ID NO: 681987 - RNA, 19 nt, Homo sapiens
  misc_RNA (1)...(19): siRNA sense strand
caguaucaucggaaagaaa

SEQ ID NO: 681988 - RNA, 19 nt, Homo sapiens
  misc_RNA (1)...(19): siRNA sense strand
aaggagaaucaguuaagaa

SEQ ID NO: 681989 - RNA, 19 nt, Homo sapiens
  misc_RNA (1)...(19): siRNA sense strand
aagcagcucuaugaccaau

SEQ ID NO: 681990 - RNA, 19 nt, Homo sapiens
  misc_RNA (1)...(19): siRNA sense strand
uugcuaugaucauugacaa

SEQ ID NO: 681991 - RNA, 19 nt, Homo sapiens
  misc_RNA (1)...(19): siRNA sense strand
gugauugaagguggauuaa

SEQ ID NO: 681992 - RNA, 19 nt, Homo sapiens
  misc_RNA (1)...(19): siRNA sense strand
cucaccauccggcuacuua

SEQ ID NO: 681993 - RNA, 19 nt, Homo sapiens
  misc_RNA (1)...(19): siRNA sense strand
gcagcgacagugcgagcuu

SEQ ID NO: 681994 - RNA, 19 nt, Homo sapiens
  misc_RNA (1)...(19): siRNA sense strand
aaacuggaagaggacauaa

SEQ ID NO: 681995 - RNA, 19 nt, Homo sapiens
  misc_RNA (1)...(19): siRNA sense strand
gaagguggauuaaauguca

SEQ ID NO: 681996 - RNA, 19 nt, Homo sapiens
  misc_RNA (1)...(19): siRNA sense strand
gaaaggaaguuggcaguau

SEQ ID NO: 681997 - RNA, 19 nt, Homo sapiens
  misc_RNA (1)...(19): siRNA sense strand
gagaaucaguuaagaagau

SEQ ID NO: 681998 - RNA, 19 nt, Homo sapiens
  misc_RNA (1)...(19): siRNA sense strand
gauugaagguggauuaaau

SEQ ID NO: 681999 - RNA, 19 nt, Homo sapiens
  misc_RNA (1)...(19): siRNA sense strand
gaagggaauuguccugaga

SEQ ID NO: 682000 - RNA, 19 nt, Homo sapiens
  misc_RNA (1)...(19): siRNA sense strand
guggaaggaucuacugaua

SEQ ID NO: 682001 - RNA, 19 nt, Homo sapiens
  misc_RNA (1)...(19): siRNA sense strand
ugaccaagcugcaccaguu

SEQ ID NO: 682002 - RNA, 19 nt, Homo sapiens
  misc_RNA (1)...(19): siRNA sense strand
gaaaggagaaucaguuaag

SEQ ID NO: 682003 - RNA, 19 nt, Homo sapiens
  misc_RNA (1)...(19): siRNA sense strand
ggaaggaucuacugauagg

SEQ ID NO: 682004 - RNA, 19 nt, Homo sapiens
  misc_RNA (1)...(19): siRNA sense strand
gaugcaagaucaaggaaau

SEQ ID NO: 682005 - RNA, 19 nt, Homo sapiens
  misc_RNA (1)...(19): siRNA sense strand
ggaauuguccugagagaau

SEQ ID NO: 682006 - RNA, 19 nt, Homo sapiens
  misc_RNA (1)...(19): siRNA sense strand
uagcacagcugccaguaga

SEQ ID NO: 682007 - RNA, 19 nt, Homo sapiens
  misc_RNA (1)...(19): siRNA sense strand
aaagguggaugcaagauca

SEQ ID NO: 682008 - RNA, 19 nt, Homo sapiens
  misc_RNA (1)...(19): siRNA sense strand
caguguggcucucucauug

SEQ ID NO: 682009 - RNA, 19 nt, Homo sapiens
  misc_RNA (1)...(19): siRNA sense strand
aaagaaaggagaaucaguu

SEQ ID NO: 682010 - RNA, 19 nt, Homo sapiens
  misc_RNA (1)...(19): siRNA sense strand
ggaaaggaaguuggcagua

SEQ ID NO: 682011 - RNA, 19 nt, Homo sapiens
  misc_RNA (1)...(19): siRNA sense strand
ugagagaauuaucacuuug

SEQ ID NO: 682012 - RNA, 19 nt, Homo sapiens
  misc_RNA (1)...(19): siRNA sense strand
cugagagaauuaucacuuu

SEQ ID NO: 682013 - RNA, 19 nt, Homo sapiens
  misc_RNA (1)...(19): siRNA sense strand
gaaagaaaggagaaucagu

SEQ ID NO: 682014 - RNA, 19 nt, Homo sapiens
  misc_RNA (1)...(19): siRNA sense strand
caacaucucagaagggaau

SEQ ID NO: 682015 - RNA, 19 nt, Homo sapiens
  misc_RNA (1)...(19): siRNA sense strand
ggagaguggugcacguauc

SEQ ID NO: 682016 - RNA, 19 nt, Homo sapiens
  misc_RNA (1)...(19): siRNA sense strand
gcaguaucaucggaaagaa

SEQ ID NO: 682017 - RNA, 19 nt, Homo sapiens
  misc_RNA (1)...(19): siRNA sense strand
ucaaugagauccgucagau

SEQ ID NO: 682018 - RNA, 19 nt, Homo sapiens
  misc_RNA (1)...(19): siRNA sense strand
aagaaaggagaaucaguua

SEQ ID NO: 682019 - RNA, 19 nt, Homo sapiens
  misc_RNA (1)...(19): siRNA sense strand
cuagaggccuauaccauuc

SEQ ID NO: 682020 - RNA, 19 nt, Homo sapiens
  misc_RNA (1)...(19): siRNA sense strand
aaaggagaaucaguuaaga

SEQ ID NO: 682021 - RNA, 19 nt, Homo sapiens
  misc_RNA (1)...(19): siRNA sense strand
gaucauugacaaacuggaa

SEQ ID NO: 682022 - RNA, 19 nt, Homo sapiens
  misc_RNA (1)...(19): siRNA sense strand
ucagacuacuucucaugaa

SEQ ID NO: 682023 - RNA, 19 nt, Homo sapiens
  misc_RNA (1)...(19): siRNA sense strand
ccacuaaugccaucuucaa

SEQ ID NO: 682024 - RNA, 19 nt, Homo sapiens
  misc_RNA (1)...(19): siRNA sense strand
cgauuugauuggcugcaua

SEQ ID NO: 682025 - RNA, 19 nt, Homo sapiens
  misc_RNA (1)...(19): siRNA sense strand
gaacucaccauuccaaacg

SEQ ID NO: 682026 - RNA, 19 nt, Homo sapiens
  misc_RNA (1)...(19): siRNA sense strand
aaaggaaguuggcaguauc

SEQ ID NO: 682027 - RNA, 19 nt, Homo sapiens
  misc_RNA (1)...(19): siRNA sense strand
caaacuggaagaggacaua

SEQ ID NO: 682028 - RNA, 19 nt, Homo sapiens
  misc_RNA (1)...(19): siRNA sense strand
ggagaaucaguuaagaaga

SEQ ID NO: 682029 - RNA, 19 nt, Homo sapiens
  misc_RNA (1)...(19): siRNA sense strand
gaucugcguggucauguug

SEQ ID NO: 682030 - RNA, 19 nt, Homo sapiens
  misc_RNA (1)...(19): siRNA sense strand
caagaucaaggaaauacga

SEQ ID NO: 682031 - RNA, 19 nt, Homo sapiens
  misc_RNA (1)...(19): siRNA sense strand
gauuugauuggcugcauaa

SEQ ID NO: 682032 - RNA, 19 nt, Homo sapiens
  misc_RNA (1)...(19): siRNA sense strand
gaaauacgagagaguacag

SEQ ID NO: 682033 - RNA, 19 nt, Homo sapiens
  misc_RNA (1)...(19): siRNA sense strand
gagaguggugcacguauca

SEQ ID NO: 682034 - RNA, 19 nt, Homo sapiens
  misc_RNA (1)...(19): siRNA sense strand
guggcucucucauuggaaa

SEQ ID NO: 682035 - RNA, 19 nt, Homo sapiens
  misc_RNA (1)...(19): siRNA sense strand
gaggagaguggugcacgua

SEQ ID NO: 682036 - RNA, 19 nt, Homo sapiens
  misc_RNA (1)...(19): siRNA sense strand
aaugagauccgucagaugu

SEQ ID NO: 682037 - RNA, 19 nt, Homo sapiens
  misc_RNA (1)...(19): siRNA sense strand
ucaaggacaguaugccauu

SEQ ID NO: 682038 - RNA, 19 nt, Homo sapiens
  misc_RNA (1)...(19): siRNA sense strand
ucuagaggccuauaccauu

SEQ ID NO: 682039 - RNA, 19 nt, Homo sapiens
  misc_RNA (1)...(19): siRNA sense strand
ggaaauacgagagaguaca

SEQ ID NO: 682040 - RNA, 19 nt, Homo sapiens
  misc_RNA (1)...(19): siRNA sense strand
gggauaugcuacccaacuc

SEQ ID NO: 682041 - RNA, 19 nt, Homo sapiens
  misc_RNA (1)...(19): siRNA sense strand
gcucagacuacuucucaug

SEQ ID NO: 682042 - RNA, 19 nt, Homo sapiens
  misc_RNA (1)...(19): siRNA sense strand
ccuuugcuaugaucauuga

SEQ ID NO: 682043 - RNA, 19 nt, Homo sapiens
  misc_RNA (1)...(19): siRNA sense strand
gauaggcagguuaccauca

SEQ ID NO: 682044 - RNA, 19 nt, Homo sapiens
  misc_RNA (1)...(19): siRNA sense strand
cagcgacagugcgagcuuu

SEQ ID NO: 682045 - RNA, 19 nt, Homo sapiens
  misc_RNA (1)...(19): siRNA sense strand
uaugaucauugacaaacug

SEQ ID NO: 682046 - RNA, 19 nt, Homo sapiens
  misc_RNA (1)...(19): siRNA sense strand
caaggacaguaugccauuc

SEQ ID NO: 682047 - RNA, 19 nt, Homo sapiens
  misc_RNA (1)...(19): siRNA sense strand
gauaugcuacccaacucaa

SEQ ID NO: 682048 - RNA, 19 nt, Homo sapiens
  misc_RNA (1)...(19): siRNA sense strand
ggaaguuggcaguaucauc

SEQ ID NO: 682049 - RNA, 19 nt, Homo sapiens
  misc_RNA (1)...(19): siRNA sense strand
ggauuaaaugucacucuca

SEQ ID NO: 682050 - RNA, 19 nt, Homo sapiens
  misc_RNA (1)...(19): siRNA sense strand
cuaaugccaucuucaaagc

SEQ ID NO: 682051 - RNA, 19 nt, Homo sapiens
  misc_RNA (1)...(19): siRNA sense strand
gaagaugcgcgaggagagu

SEQ ID NO: 682052 - RNA, 19 nt, Homo sapiens
  misc_RNA (1)...(19): siRNA sense strand
gaggacauaagcagcucua

SEQ ID NO: 682053 - RNA, 19 nt, Homo sapiens
  misc_RNA (1)...(19): siRNA sense strand
gagagaauuaucacuuugg

SEQ ID NO: 682054 - RNA, 19 nt, Homo sapiens
  misc_RNA (1)...(19): siRNA sense strand
ugugauugaagguggauua

SEQ ID NO: 682055 - RNA, 19 nt, Homo sapiens
  misc_RNA (1)...(19): siRNA sense strand
agaaaggagaaucaguuaa

SEQ ID NO: 682056 - RNA, 19 nt, Homo sapiens
  misc_RNA (1)...(19): siRNA sense strand
ggcaguaucaucggaaaga

SEQ ID NO: 682057 - RNA, 19 nt, Homo sapiens
  misc_RNA (1)...(19): siRNA sense strand
gcucuccggucaucuuugc

SEQ ID NO: 682058 - RNA, 19 nt, Homo sapiens
  misc_RNA (1)...(19): siRNA sense strand
ggaugcaagaucaaggaaa

SEQ ID NO: 682059 - RNA, 19 nt, Homo sapiens
  misc_RNA (1)...(19): siRNA sense strand
ccugagagaauuaucacuu

SEQ ID NO: 682060 - RNA, 19 nt, Homo sapiens
  misc_RNA (1)...(19): siRNA sense strand
ucaccauuccaaacgauuu

SEQ ID NO: 682061 - RNA, 19 nt, Homo sapiens
  misc_RNA (1)...(19): siRNA sense strand
agaaucaguuaagaagaug

SEQ ID NO: 682062 - RNA, 19 nt, Homo sapiens
  misc_RNA (1)...(19): siRNA sense strand
aaggaaauacgagagagua

SEQ ID NO: 682063 - RNA, 19 nt, Homo sapiens
  misc_RNA (1)...(19): siRNA sense strand
gaacccaguggaaggaucu

SEQ ID NO: 682064 - RNA, 19 nt, Homo sapiens
  misc_RNA (1)...(19): siRNA sense strand
ggaaagaaaggagaaucag

SEQ ID NO: 682065 - RNA, 19 nt, Homo sapiens
  misc_RNA (1)...(19): siRNA sense strand
guguggcucucucauugga

SEQ ID NO: 682066 - RNA, 19 nt, Homo sapiens
  misc_RNA (1)...(19): siRNA sense strand
caugaacucaccauuccaa

SEQ ID NO: 682067 - RNA, 19 nt, Homo sapiens
  misc_RNA (1)...(19): siRNA sense strand
cggaaagaaaggagaauca

SEQ ID NO: 682068 - RNA, 19 nt, Homo sapiens
  misc_RNA (1)...(19): siRNA sense strand
cagguggucaggacaggua

SEQ ID NO: 682069 - RNA, 19 nt, Homo sapiens
  misc_RNA (1)...(19): siRNA sense strand
caucacuauugcuggcauu

SEQ ID NO: 682070 - RNA, 19 nt, Homo sapiens
  misc_RNA (1)...(19): siRNA sense strand
ucaguguggcucucucauu

SEQ ID NO: 682071 - RNA, 19 nt, Homo sapiens
  misc_RNA (1)...(19): siRNA sense strand
ccauuccacagccagauuu

SEQ ID NO: 682072 - RNA, 19 nt, Homo sapiens
  misc_RNA (1)...(19): siRNA sense strand
uaaucaaugucaggcuuuc

SEQ ID NO: 682073 - RNA, 19 nt, Homo sapiens
  misc_RNA (1)...(19): siRNA sense strand
gaccaagcugcaccaguug

SEQ ID NO: 682074 - RNA, 19 nt, Homo sapiens
  misc_RNA (1)...(19): siRNA sense strand
ggaaaagguggaugcaaga

SEQ ID NO: 682075 - RNA, 19 nt, Homo sapiens
  misc_RNA (1)...(19): siRNA sense strand
caucggaaagaaaggagaa

SEQ ID NO: 682076 - RNA, 19 nt, Homo sapiens
  misc_RNA (1)...(19): siRNA sense strand
ugagauccgucagaugucu

SEQ ID NO: 682077 - RNA, 19 nt, Homo sapiens
  misc_RNA (1)...(19): siRNA sense strand
ucucaugaacucaccauuc

SEQ ID NO: 682078 - RNA, 19 nt, Homo sapiens
  misc_RNA (1)...(19): siRNA sense strand
cagacuacuucucaugaac

SEQ ID NO: 682079 - RNA, 19 nt, Homo sapiens
  misc_RNA (1)...(19): siRNA sense strand
ggauaugcuacccaacuca

SEQ ID NO: 682080 - RNA, 19 nt, Homo sapiens
  misc_RNA (1)...(19): siRNA sense strand
ggucccugcuagucagugu

SEQ ID NO: 682081 - RNA, 19 nt, Homo sapiens
  misc_RNA (1)...(19): siRNA sense strand
acuuaugcauggaaaggaa

SEQ ID NO: 682082 - RNA, 19 nt, Homo sapiens
  misc_RNA (1)...(19): siRNA sense strand
caaggaaauacgagagagu

SEQ ID NO: 682083 - RNA, 19 nt, Homo sapiens
  misc_RNA (1)...(19): siRNA sense strand
gcuaugaucauugacaaac

SEQ ID NO: 682084 - RNA, 19 nt, Homo sapiens
  misc_RNA (1)...(19): siRNA sense strand
cagguuaccaucacuggau

SEQ ID NO: 682085 - RNA, 19 nt, Homo sapiens
  misc_RNA (1)...(19): siRNA sense strand
guccagcucuccggucauc

SEQ ID NO: 682086 - RNA, 19 nt, Homo sapiens
  misc_RNA (1)...(19): siRNA sense strand
caguaucaucggaaagaaa

SEQ ID NO: 682087 - RNA, 19 nt, Homo sapiens
  misc_RNA (1)...(19): siRNA sense strand
aaggagaaucaguuaagaa

SEQ ID NO: 682088 - RNA, 19 nt, Homo sapiens
  misc_RNA (1)...(19): siRNA sense strand
aagcagcucuaugaccaau

SEQ ID NO: 682089 - RNA, 19 nt, Homo sapiens
  misc_RNA (1)...(19): siRNA sense strand
uugcuaugaucauugacaa

SEQ ID NO: 682090 - RNA, 19 nt, Homo sapiens
  misc_RNA (1)...(19): siRNA sense strand
gugauugaagguggauuaa

SEQ ID NO: 682091 - RNA, 19 nt, Homo sapiens
  misc_RNA (1)...(19): siRNA sense strand
cucaccauccggcuacuua

SEQ ID NO: 682092 - RNA, 19 nt, Homo sapiens
  misc_RNA (1)...(19): siRNA sense strand
gcagcgacagugcgagcuu

SEQ ID NO: 682093 - RNA, 19 nt, Homo sapiens
  misc_RNA (1)...(19): siRNA sense strand
aaacuggaagaggacauaa

SEQ ID NO: 682094 - RNA, 19 nt, Homo sapiens
  misc_RNA (1)...(19): siRNA sense strand
gaacuuccagaacauauuc

SEQ ID NO: 682095 - RNA, 19 nt, Homo sapiens
  misc_RNA (1)...(19): siRNA sense strand
gcaucacgcucucgaagca

SEQ ID NO: 682096 - RNA, 19 nt, Homo sapiens
  misc_RNA (1)...(19): siRNA sense strand
ucaaaggauucaaguucuu

SEQ ID NO: 682097 - RNA, 19 nt, Homo sapiens
  misc_RNA (1)...(19): siRNA sense strand
ccaagaacuuccagaacau

SEQ ID NO: 682098 - RNA, 19 nt, Homo sapiens
  misc_RNA (1)...(19): siRNA sense strand
gaaggagaacgcccuagug

SEQ ID NO: 682099 - RNA, 19 nt, Homo sapiens
  misc_RNA (1)...(19): siRNA sense strand
uccaagaacuuccagaaca

SEQ ID NO: 682100 - RNA, 19 nt, Homo sapiens
  misc_RNA (1)...(19): siRNA sense strand
caagaacuuccagaacaua

SEQ ID NO: 682101 - RNA, 19 nt, Homo sapiens
  misc_RNA (1)...(19): siRNA sense strand
cgucaaaggauucaaguuc

SEQ ID NO: 682102 - RNA, 19 nt, Homo sapiens
  misc_RNA (1)...(19): siRNA sense strand
ccagaaggaccgcaagaug

SEQ ID NO: 682103 - RNA, 19 nt, Homo sapiens
  misc_RNA (1)...(19): siRNA sense strand
aagauccuguucaauaaga

SEQ ID NO: 682104 - RNA, 19 nt, Homo sapiens
  misc_RNA (1)...(19): siRNA sense strand
gaagauccuguucaauaag

SEQ ID NO: 682105 - RNA, 19 nt, Homo sapiens
  misc_RNA (1)...(19): siRNA sense strand
ucauugaccugcacaacca

SEQ ID NO: 682106 - RNA, 19 nt, Homo sapiens
  misc_RNA (1)...(19): siRNA sense strand
gucaaaggauucaaguucu

SEQ ID NO: 682107 - RNA, 19 nt, Homo sapiens
  misc_RNA (1)...(19): siRNA sense strand
ccagauauagccguuggua

SEQ ID NO: 682108 - RNA, 19 nt, Homo sapiens
  misc_RNA (1)...(19): siRNA sense strand
gcuccaagaacuuccagaa

SEQ ID NO: 682109 - RNA, 19 nt, Homo sapiens
  misc_RNA (1)...(19): siRNA sense strand
gauauagccguugguacaa

SEQ ID NO: 682110 - RNA, 19 nt, Homo sapiens
  misc_RNA (1)...(19): siRNA sense strand
caaggacuacggcaacuca

SEQ ID NO: 682111 - RNA, 19 nt, Homo sapiens
  misc_RNA (1)...(19): siRNA sense strand
agauauagccguugguaca

SEQ ID NO: 682112 - RNA, 19 nt, Homo sapiens
  misc_RNA (1)...(19): siRNA sense strand
ggaucucaagguccuguuu

SEQ ID NO: 682113 - RNA, 19 nt, Homo sapiens
  misc_RNA (1)...(19): siRNA sense strand
caaaggauucaaguucuuc

SEQ ID NO: 682114 - RNA, 19 nt, Homo sapiens
  misc_RNA (1)...(19): siRNA sense strand
agauggcacugauccagau

SEQ ID NO: 682115 - RNA, 19 nt, Homo sapiens
  misc_RNA (1)...(19): siRNA sense strand
uauagccguugguacaaag

SEQ ID NO: 682116 - RNA, 19 nt, Homo sapiens
  misc_RNA (1)...(19): siRNA sense strand
auauagccguugguacaaa

SEQ ID NO: 682117 - RNA, 19 nt, Homo sapiens
  misc_RNA (1)...(19): siRNA sense strand
agaacgcccuagugcagau

SEQ ID NO: 682118 - RNA, 19 nt, Homo sapiens
  misc_RNA (1)...(19): siRNA sense strand
gaacuuccagaacauauuc

SEQ ID NO: 682119 - RNA, 19 nt, Homo sapiens
  misc_RNA (1)...(19): siRNA sense strand
gcaucacgcucucgaagca

SEQ ID NO: 682120 - RNA, 19 nt, Homo sapiens
  misc_RNA (1)...(19): siRNA sense strand
ucaaaggauucaaguucuu

SEQ ID NO: 682121 - RNA, 19 nt, Homo sapiens
  misc_RNA (1)...(19): siRNA sense strand
ccaagaacuuccagaacau

SEQ ID NO: 682122 - RNA, 19 nt, Homo sapiens
  misc_RNA (1)...(19): siRNA sense strand
gaaggagaacgcccuagug

SEQ ID NO: 682123 - RNA, 19 nt, Homo sapiens
  misc_RNA (1)...(19): siRNA sense strand
uccaagaacuuccagaaca

SEQ ID NO: 682124 - RNA, 19 nt, Homo sapiens
  misc_RNA (1)...(19): siRNA sense strand
caagaacuuccagaacaua

SEQ ID NO: 682125 - RNA, 19 nt, Homo sapiens
  misc_RNA (1)...(19): siRNA sense strand
cgucaaaggauucaaguuc

SEQ ID NO: 682126 - RNA, 19 nt, Homo sapiens
  misc_RNA (1)...(19): siRNA sense strand
ccagaaggaccgcaagaug

SEQ ID NO: 682127 - RNA, 19 nt, Homo sapiens
  misc_RNA (1)...(19): siRNA sense strand
aagauccuguucaauaaga

SEQ ID NO: 682128 - RNA, 19 nt, Homo sapiens
  misc_RNA (1)...(19): siRNA sense strand
gaagauccuguucaauaag

SEQ ID NO: 682129 - RNA, 19 nt, Homo sapiens
  misc_RNA (1)...(19): siRNA sense strand
ucauugaccugcacaacca

SEQ ID NO: 682130 - RNA, 19 nt, Homo sapiens
  misc_RNA (1)...(19): siRNA sense strand
gucaaaggauucaaguucu

SEQ ID NO: 682131 - RNA, 19 nt, Homo sapiens
  misc_RNA (1)...(19): siRNA sense strand
ccagauauagccguuggua

SEQ ID NO: 682132 - RNA, 19 nt, Homo sapiens
  misc_RNA (1)...(19): siRNA sense strand
gcuccaagaacuuccagaa

SEQ ID NO: 682133 - RNA, 19 nt, Homo sapiens
  misc_RNA (1)...(19): siRNA sense strand
gauauagccguugguacaa

SEQ ID NO: 682134 - RNA, 19 nt, Homo sapiens
  misc_RNA (1)...(19): siRNA sense strand
caaggacuacggcaacuca

SEQ ID NO: 682135 - RNA, 19 nt, Homo sapiens
  misc_RNA (1)...(19): siRNA sense strand
agauauagccguugguaca

SEQ ID NO: 682136 - RNA, 19 nt, Homo sapiens
  misc_RNA (1)...(19): siRNA sense strand
ggaucucaagguccuguuu

SEQ ID NO: 682137 - RNA, 19 nt, Homo sapiens
  misc_RNA (1)...(19): siRNA sense strand
caaaggauucaaguucuuc

SEQ ID NO: 682138 - RNA, 19 nt, Homo sapiens
  misc_RNA (1)...(19): siRNA sense strand
agauggcacugauccagau

SEQ ID NO: 682139 - RNA, 19 nt, Homo sapiens
  misc_RNA (1)...(19): siRNA sense strand
uauagccguugguacaaag

SEQ ID NO: 682140 - RNA, 19 nt, Homo sapiens
  misc_RNA (1)...(19): siRNA sense strand
auauagccguugguacaaa

SEQ ID NO: 682141 - RNA, 19 nt, Homo sapiens
  misc_RNA (1)...(19): siRNA sense strand
agaacgcccuagugcagau

SEQ ID NO: 682142 - RNA, 19 nt, Homo sapiens
  misc_RNA (1)...(19): siRNA sense strand
gaacuuccagaacauauuc

SEQ ID NO: 682143 - RNA, 19 nt, Homo sapiens
  misc_RNA (1)...(19): siRNA sense strand
gcaucacgcucucgaagca

SEQ ID NO: 682144 - RNA, 19 nt, Homo sapiens
  misc_RNA (1)...(19): siRNA sense strand
ucaaaggauucaaguucuu

SEQ ID NO: 682145 - RNA, 19 nt, Homo sapiens
  misc_RNA (1)...(19): siRNA sense strand
ccaagaacuuccagaacau

SEQ ID NO: 682146 - RNA, 19 nt, Homo sapiens
  misc_RNA (1)...(19): siRNA sense strand
gaaggagaacgcccuagug

SEQ ID NO: 682147 - RNA, 19 nt, Homo sapiens
  misc_RNA (1)...(19): siRNA sense strand
uccaagaacuuccagaaca

SEQ ID NO: 682148 - RNA, 19 nt, Homo sapiens
  misc_RNA (1)...(19): siRNA sense strand
caagaacuuccagaacaua

SEQ ID NO: 682149 - RNA, 19 nt, Homo sapiens
  misc_RNA (1)...(19): siRNA sense strand
cgucaaaggauucaaguuc

SEQ ID NO: 682150 - RNA, 19 nt, Homo sapiens
  misc_RNA (1)...(19): siRNA sense strand
ccagaaggaccgcaagaug

SEQ ID NO: 682151 - RNA, 19 nt, Homo sapiens
  misc_RNA (1)...(19): siRNA sense strand
aagauccuguucaauaaga

SEQ ID NO: 682152 - RNA, 19 nt, Homo sapiens
  misc_RNA (1)...(19): siRNA sense strand
gaagauccuguucaauaag

SEQ ID NO: 682153 - RNA, 19 nt, Homo sapiens
  misc_RNA (1)...(19): siRNA sense strand
ucauugaccugcacaacca

SEQ ID NO: 682154 - RNA, 19 nt, Homo sapiens
  misc_RNA (1)...(19): siRNA sense strand
gucaaaggauucaaguucu

SEQ ID NO: 682155 - RNA, 19 nt, Homo sapiens
  misc_RNA (1)...(19): siRNA sense strand
ccagauauagccguuggua

SEQ ID NO: 682156 - RNA, 19 nt, Homo sapiens
  misc_RNA (1)...(19): siRNA sense strand
gcuccaagaacuuccagaa

SEQ ID NO: 682157 - RNA, 19 nt, Homo sapiens
  misc_RNA (1)...(19): siRNA sense strand
gauauagccguugguacaa

SEQ ID NO: 682158 - RNA, 19 nt, Homo sapiens
  misc_RNA (1)...(19): siRNA sense strand
caaggacuacggcaacuca

SEQ ID NO: 682159 - RNA, 19 nt, Homo sapiens
  misc_RNA (1)...(19): siRNA sense strand
agauauagccguugguaca

SEQ ID NO: 682160 - RNA, 19 nt, Homo sapiens
  misc_RNA (1)...(19): siRNA sense strand
ggaucucaagguccuguuu

SEQ ID NO: 682161 - RNA, 19 nt, Homo sapiens
  misc_RNA (1)...(19): siRNA sense strand
caaaggauucaaguucuuc

SEQ ID NO: 682162 - RNA, 19 nt, Homo sapiens
  misc_RNA (1)...(19): siRNA sense strand
agauggcacugauccagau

SEQ ID NO: 682163 - RNA, 19 nt, Homo sapiens
  misc_RNA (1)...(19): siRNA sense strand
uauagccguugguacaaag

SEQ ID NO: 682164 - RNA, 19 nt, Homo sapiens
  misc_RNA (1)...(19): siRNA sense strand
auauagccguugguacaaa

SEQ ID NO: 682165 - RNA, 19 nt, Homo sapiens
  misc_RNA (1)...(19): siRNA sense strand
agaacgcccuagugcagau

SEQ ID NO: 682166 - RNA, 19 nt, Homo sapiens
  misc_RNA (1)...(19): siRNA sense strand
gaacuuccagaacauauuc

SEQ ID NO: 682167 - RNA, 19 nt, Homo sapiens
  misc_RNA (1)...(19): siRNA sense strand
gcaucacgcucucgaagca

SEQ ID NO: 682168 - RNA, 19 nt, Homo sapiens
  misc_RNA (1)...(19): siRNA sense strand
ucaaaggauucaaguucuu

SEQ ID NO: 682169 - RNA, 19 nt, Homo sapiens
  misc_RNA (1)...(19): siRNA sense strand
ccaagaacuuccagaacau

SEQ ID NO: 682170 - RNA, 19 nt, Homo sapiens
  misc_RNA (1)...(19): siRNA sense strand
gaaggagaacgcccuagug

SEQ ID NO: 682171 - RNA, 19 nt, Homo sapiens
  misc_RNA (1)...(19): siRNA sense strand
uccaagaacuuccagaaca

SEQ ID NO: 682172 - RNA, 19 nt, Homo sapiens
  misc_RNA (1)...(19): siRNA sense strand
caagaacuuccagaacaua

SEQ ID NO: 682173 - RNA, 19 nt, Homo sapiens
  misc_RNA (1)...(19): siRNA sense strand
cgucaaaggauucaaguuc

SEQ ID NO: 682174 - RNA, 19 nt, Homo sapiens
  misc_RNA (1)...(19): siRNA sense strand
ccagaaggaccgcaagaug

SEQ ID NO: 682175 - RNA, 19 nt, Homo sapiens
  misc_RNA (1)...(19): siRNA sense strand
aagauccuguucaauaaga

SEQ ID NO: 682176 - RNA, 19 nt, Homo sapiens
  misc_RNA (1)...(19): siRNA sense strand
gaagauccuguucaauaag

SEQ ID NO: 682177 - RNA, 19 nt, Homo sapiens
  misc_RNA (1)...(19): siRNA sense strand
ucauugaccugcacaacca

SEQ ID NO: 682178 - RNA, 19 nt, Homo sapiens
  misc_RNA (1)...(19): siRNA sense strand
ccagauauagccguuggua

SEQ ID NO: 682179 - RNA, 19 nt, Homo sapiens
  misc_RNA (1)...(19): siRNA sense strand
gucaaaggauucaaguucu

SEQ ID NO: 682180 - RNA, 19 nt, Homo sapiens
  misc_RNA (1)...(19): siRNA sense strand
gcuccaagaacuuccagaa

SEQ ID NO: 682181 - RNA, 19 nt, Homo sapiens
  misc_RNA (1)...(19): siRNA sense strand
gauauagccguugguacaa

SEQ ID NO: 682182 - RNA, 19 nt, Homo sapiens
  misc_RNA (1)...(19): siRNA sense strand
caaggacuacggcaacuca

SEQ ID NO: 682183 - RNA, 19 nt, Homo sapiens
  misc_RNA (1)...(19): siRNA sense strand
agauauagccguugguaca

SEQ ID NO: 682184 - RNA, 19 nt, Homo sapiens
  misc_RNA (1)...(19): siRNA sense strand
cggcauugucccagauaua

SEQ ID NO: 682185 - RNA, 19 nt, Homo sapiens
  misc_RNA (1)...(19): siRNA sense strand
ggaucucaagguccuguuu

SEQ ID NO: 682186 - RNA, 19 nt, Homo sapiens
  misc_RNA (1)...(19): siRNA sense strand
caaaggauucaaguucuuc

SEQ ID NO: 682187 - RNA, 19 nt, Homo sapiens
  misc_RNA (1)...(19): siRNA sense strand
agauggcacugauccagau

SEQ ID NO: 682188 - RNA, 19 nt, Homo sapiens
  misc_RNA (1)...(19): siRNA sense strand
ggcauugucccagauauag

SEQ ID NO: 682189 - RNA, 19 nt, Homo sapiens
  misc_RNA (1)...(19): siRNA sense strand
uauagccguugguacaaag

SEQ ID NO: 682190 - RNA, 19 nt, Homo sapiens
  misc_RNA (1)...(19): siRNA sense strand
auauagccguugguacaaa

SEQ ID NO: 682191 - RNA, 19 nt, Homo sapiens
  misc_RNA (1)...(19): siRNA sense strand
gacggcauugucccagaua

SEQ ID NO: 682192 - RNA, 19 nt, Homo sapiens
  misc_RNA (1)...(19): siRNA sense strand
agaacgcccuagugcagau

SEQ ID NO: 682193 - RNA, 19 nt, Homo sapiens
  misc_RNA (1)...(19): siRNA sense strand
gaacuuccagaacauauuc

SEQ ID NO: 682194 - RNA, 19 nt, Homo sapiens
  misc_RNA (1)...(19): siRNA sense strand
gcaucacgcucucgaagca

SEQ ID NO: 682195 - RNA, 19 nt, Homo sapiens
  misc_RNA (1)...(19): siRNA sense strand
ucaaaggauucaaguucuu

SEQ ID NO: 682196 - RNA, 19 nt, Homo sapiens
  misc_RNA (1)...(19): siRNA sense strand
ccaagaacuuccagaacau

SEQ ID NO: 682197 - RNA, 19 nt, Homo sapiens
  misc_RNA (1)...(19): siRNA sense strand
gaaggagaacgcccuagug

SEQ ID NO: 682198 - RNA, 19 nt, Homo sapiens
  misc_RNA (1)...(19): siRNA sense strand
uccaagaacuuccagaaca

SEQ ID NO: 682199 - RNA, 19 nt, Homo sapiens
  misc_RNA (1)...(19): siRNA sense strand
caagaacuuccagaacaua

SEQ ID NO: 682200 - RNA, 19 nt, Homo sapiens
  misc_RNA (1)...(19): siRNA sense strand
cgucaaaggauucaaguuc

SEQ ID NO: 682201 - RNA, 19 nt, Homo sapiens
  misc_RNA (1)...(19): siRNA sense strand
ccagaaggaccgcaagaug

SEQ ID NO: 682202 - RNA, 19 nt, Homo sapiens
  misc_RNA (1)...(19): siRNA sense strand
aagauccuguucaauaaga

SEQ ID NO: 682203 - RNA, 19 nt, Homo sapiens
  misc_RNA (1)...(19): siRNA sense strand
gaagauccuguucaauaag

SEQ ID NO: 682204 - RNA, 19 nt, Homo sapiens
  misc_RNA (1)...(19): siRNA sense strand
ucauugaccugcacaacca

SEQ ID NO: 682205 - RNA, 19 nt, Homo sapiens
  misc_RNA (1)...(19): siRNA sense strand
gucaaaggauucaaguucu

SEQ ID NO: 682206 - RNA, 19 nt, Homo sapiens
  misc_RNA (1)...(19): siRNA sense strand
ccagauauagccguuggua

SEQ ID NO: 682207 - RNA, 19 nt, Homo sapiens
  misc_RNA (1)...(19): siRNA sense strand
gcuccaagaacuuccagaa

SEQ ID NO: 682208 - RNA, 19 nt, Homo sapiens
  misc_RNA (1)...(19): siRNA sense strand
gauauagccguugguacaa

SEQ ID NO: 682209 - RNA, 19 nt, Homo sapiens
  misc_RNA (1)...(19): siRNA sense strand
caaggacuacggcaacuca

SEQ ID NO: 682210 - RNA, 19 nt, Homo sapiens
  misc_RNA (1)...(19): siRNA sense strand
agauauagccguugguaca

SEQ ID NO: 682211 - RNA, 19 nt, Homo sapiens
  misc_RNA (1)...(19): siRNA sense strand
ggaucucaagguccuguuu

SEQ ID NO: 682212 - RNA, 19 nt, Homo sapiens
  misc_RNA (1)...(19): siRNA sense strand
caaaggauucaaguucuuc

SEQ ID NO: 682213 - RNA, 19 nt, Homo sapiens
  misc_RNA (1)...(19): siRNA sense strand
agauggcacugauccagau

SEQ ID NO: 682214 - RNA, 19 nt, Homo sapiens
  misc_RNA (1)...(19): siRNA sense strand
uauagccguugguacaaag

SEQ ID NO: 682215 - RNA, 19 nt, Homo sapiens
  misc_RNA (1)...(19): siRNA sense strand
auauagccguugguacaaa

SEQ ID NO: 682216 - RNA, 19 nt, Homo sapiens
  misc_RNA (1)...(19): siRNA sense strand
agaacgcccuagugcagau

SEQ ID NO: 682217 - RNA, 19 nt, Homo sapiens
  misc_RNA (1)...(19): siRNA sense strand
gaacuuccagaacauauuc

SEQ ID NO: 682218 - RNA, 19 nt, Homo sapiens
  misc_RNA (1)...(19): siRNA sense strand
gcaucacgcucucgaagca

SEQ ID NO: 682219 - RNA, 19 nt, Homo sapiens
  misc_RNA (1)...(19): siRNA sense strand
ucaaaggauucaaguucuu

SEQ ID NO: 682220 - RNA, 19 nt, Homo sapiens
  misc_RNA (1)...(19): siRNA sense strand
ccaagaacuuccagaacau

SEQ ID NO: 682221 - RNA, 19 nt, Homo sapiens
  misc_RNA (1)...(19): siRNA sense strand
gaaggagaacgcccuagug

SEQ ID NO: 682222 - RNA, 19 nt, Homo sapiens
  misc_RNA (1)...(19): siRNA sense strand
uccaagaacuuccagaaca

SEQ ID NO: 682223 - RNA, 19 nt, Homo sapiens
  misc_RNA (1)...(19): siRNA sense strand
caagaacuuccagaacaua

SEQ ID NO: 682224 - RNA, 19 nt, Homo sapiens
  misc_RNA (1)...(19): siRNA sense strand
cgucaaaggauucaaguuc

SEQ ID NO: 682225 - RNA, 19 nt, Homo sapiens
  misc_RNA (1)...(19): siRNA sense strand
ccagaaggaccgcaagaug

SEQ ID NO: 682226 - RNA, 19 nt, Homo sapiens
  misc_RNA (1)...(19): siRNA sense strand
aagauccuguucaauaaga

SEQ ID NO: 682227 - RNA, 19 nt, Homo sapiens
  misc_RNA (1)...(19): siRNA sense strand
gaagauccuguucaauaag

SEQ ID NO: 682228 - RNA, 19 nt, Homo sapiens
  misc_RNA (1)...(19): siRNA sense strand
ucauugaccugcacaacca

SEQ ID NO: 682229 - RNA, 19 nt, Homo sapiens
  misc_RNA (1)...(19): siRNA sense strand
gucaaaggauucaaguucu

SEQ ID NO: 682230 - RNA, 19 nt, Homo sapiens
  misc_RNA (1)...(19): siRNA sense strand
ccagauauagccguuggua

SEQ ID NO: 682231 - RNA, 19 nt, Homo sapiens
  misc_RNA (1)...(19): siRNA sense strand
gcuccaagaacuuccagaa

SEQ ID NO: 682232 - RNA, 19 nt, Homo sapiens
  misc_RNA (1)...(19): siRNA sense strand
gauauagccguugguacaa

SEQ ID NO: 682233 - RNA, 19 nt, Homo sapiens
  misc_RNA (1)...(19): siRNA sense strand
caaggacuacggcaacuca

SEQ ID NO: 682234 - RNA, 19 nt, Homo sapiens
  misc_RNA (1)...(19): siRNA sense strand
agauauagccguugguaca

SEQ ID NO: 682235 - RNA, 19 nt, Homo sapiens
  misc_RNA (1)...(19): siRNA sense strand
ggaucucaagguccuguuu

SEQ ID NO: 682236 - RNA, 19 nt, Homo sapiens
  misc_RNA (1)...(19): siRNA sense strand
caaaggauucaaguucuuc

SEQ ID NO: 682237 - RNA, 19 nt, Homo sapiens
  misc_RNA (1)...(19): siRNA sense strand
agauggcacugauccagau

SEQ ID NO: 682238 - RNA, 19 nt, Homo sapiens
  misc_RNA (1)...(19): siRNA sense strand
uauagccguugguacaaag

SEQ ID NO: 682239 - RNA, 19 nt, Homo sapiens
  misc_RNA (1)...(19): siRNA sense strand
auauagccguugguacaaa

SEQ ID NO: 682240 - RNA, 19 nt, Homo sapiens
  misc_RNA (1)...(19): siRNA sense strand
agaacgcccuagugcagau

SEQ ID NO: 682241 - RNA, 19 nt, Homo sapiens
  misc_RNA (1)...(19): siRNA sense strand
gaacuuccagaacauauuc

SEQ ID NO: 682242 - RNA, 19 nt, Homo sapiens
  misc_RNA (1)...(19): siRNA sense strand
gcaucacgcucucgaagca

SEQ ID NO: 682243 - RNA, 19 nt, Homo sapiens
  misc_RNA (1)...(19): siRNA sense strand
ucaaaggauucaaguucuu

SEQ ID NO: 682244 - RNA, 19 nt, Homo sapiens
  misc_RNA (1)...(19): siRNA sense strand
ccaagaacuuccagaacau

SEQ ID NO: 682245 - RNA, 19 nt, Homo sapiens
  misc_RNA (1)...(19): siRNA sense strand
gaaggagaacgcccuagug

SEQ ID NO: 682246 - RNA, 19 nt, Homo sapiens
  misc_RNA (1)...(19): siRNA sense strand
uccaagaacuuccagaaca

SEQ ID NO: 682247 - RNA, 19 nt, Homo sapiens
  misc_RNA (1)...(19): siRNA sense strand
caagaacuuccagaacaua

SEQ ID NO: 682248 - RNA, 19 nt, Homo sapiens
  misc_RNA (1)...(19): siRNA sense strand
cgucaaaggauucaaguuc

SEQ ID NO: 682249 - RNA, 19 nt, Homo sapiens
  misc_RNA (1)...(19): siRNA sense strand
ccagaaggaccgcaagaug

SEQ ID NO: 682250 - RNA, 19 nt, Homo sapiens
  misc_RNA (1)...(19): siRNA sense strand
aagauccuguucaauaaga

SEQ ID NO: 682251 - RNA, 19 nt, Homo sapiens
  misc_RNA (1)...(19): siRNA sense strand
gaagauccuguucaauaag

SEQ ID NO: 682252 - RNA, 19 nt, Homo sapiens
  misc_RNA (1)...(19): siRNA sense strand
ucauugaccugcacaacca

SEQ ID NO: 682253 - RNA, 19 nt, Homo sapiens
  misc_RNA (1)...(19): siRNA sense strand
gucaaaggauucaaguucu

SEQ ID NO: 682254 - RNA, 19 nt, Homo sapiens
  misc_RNA (1)...(19): siRNA sense strand
ccagauauagccguuggua

SEQ ID NO: 682255 - RNA, 19 nt, Homo sapiens
  misc_RNA (1)...(19): siRNA sense strand
gcuccaagaacuuccagaa

SEQ ID NO: 682256 - RNA, 19 nt, Homo sapiens
  misc_RNA (1)...(19): siRNA sense strand
gauauagccguugguacaa

SEQ ID NO: 682257 - RNA, 19 nt, Homo sapiens
  misc_RNA (1)...(19): siRNA sense strand
caaggacuacggcaacuca

SEQ ID NO: 682258 - RNA, 19 nt, Homo sapiens
  misc_RNA (1)...(19): siRNA sense strand
agauauagccguugguaca

SEQ ID NO: 682259 - RNA, 19 nt, Homo sapiens
  misc_RNA (1)...(19): siRNA sense strand
ggaucucaagguccuguuu

SEQ ID NO: 682260 - RNA, 19 nt, Homo sapiens
  misc_RNA (1)...(19): siRNA sense strand
caaaggauucaaguucuuc

SEQ ID NO: 682261 - RNA, 19 nt, Homo sapiens
  misc_RNA (1)...(19): siRNA sense strand
agauggcacugauccagau

SEQ ID NO: 682262 - RNA, 19 nt, Homo sapiens
  misc_RNA (1)...(19): siRNA sense strand
uauagccguugguacaaag

SEQ ID NO: 682263 - RNA, 19 nt, Homo sapiens
  misc_RNA (1)...(19): siRNA sense strand
auauagccguugguacaaa

SEQ ID NO: 682264 - RNA, 19 nt, Homo sapiens
  misc_RNA (1)...(19): siRNA sense strand
agaacgcccuagugcagau

SEQ ID NO: 682265 - RNA, 19 nt, Homo sapiens
  misc_RNA (1)...(19): siRNA sense strand
gaacuuccagaacauauuc

SEQ ID NO: 682266 - RNA, 19 nt, Homo sapiens
  misc_RNA (1)...(19): siRNA sense strand
gcaucacgcucucgaagca

SEQ ID NO: 682267 - RNA, 19 nt, Homo sapiens
  misc_RNA (1)...(19): siRNA sense strand
ucaaaggauucaaguucuu

SEQ ID NO: 682268 - RNA, 19 nt, Homo sapiens
  misc_RNA (1)...(19): siRNA sense strand
ccaagaacuuccagaacau

SEQ ID NO: 682269 - RNA, 19 nt, Homo sapiens
  misc_RNA (1)...(19): siRNA sense strand
gaaggagaacgcccuagug

SEQ ID NO: 682270 - RNA, 19 nt, Homo sapiens
  misc_RNA (1)...(19): siRNA sense strand
uccaagaacuuccagaaca

SEQ ID NO: 682271 - RNA, 19 nt, Homo sapiens
  misc_RNA (1)...(19): siRNA sense strand
caagaacuuccagaacaua

SEQ ID NO: 682272 - RNA, 19 nt, Homo sapiens
  misc_RNA (1)...(19): siRNA sense strand
cgucaaaggauucaaguuc

SEQ ID NO: 682273 - RNA, 19 nt, Homo sapiens
  misc_RNA (1)...(19): siRNA sense strand
ccagaaggaccgcaagaug

SEQ ID NO: 682274 - RNA, 19 nt, Homo sapiens
  misc_RNA (1)...(19): siRNA sense strand
aagauccuguucaauaaga

SEQ ID NO: 682275 - RNA, 19 nt, Homo sapiens
  misc_RNA (1)...(19): siRNA sense strand
gaagauccuguucaauaag

SEQ ID NO: 682276 - RNA, 19 nt, Homo sapiens
  misc_RNA (1)...(19): siRNA sense strand
ucauugaccugcacaacca

SEQ ID NO: 682277 - RNA, 19 nt, Homo sapiens
  misc_RNA (1)...(19): siRNA sense strand
ccagauauagccguuggua

SEQ ID NO: 682278 - RNA, 19 nt, Homo sapiens
  misc_RNA (1)...(19): siRNA sense strand
gucaaaggauucaaguucu

SEQ ID NO: 682279 - RNA, 19 nt, Homo sapiens
  misc_RNA (1)...(19): siRNA sense strand
gcuccaagaacuuccagaa

SEQ ID NO: 682280 - RNA, 19 nt, Homo sapiens
  misc_RNA (1)...(19): siRNA sense strand
gauauagccguugguacaa

SEQ ID NO: 682281 - RNA, 19 nt, Homo sapiens
  misc_RNA (1)...(19): siRNA sense strand
caaggacuacggcaacuca

SEQ ID NO: 682282 - RNA, 19 nt, Homo sapiens
  misc_RNA (1)...(19): siRNA sense strand
agauauagccguugguaca

SEQ ID NO: 682283 - RNA, 19 nt, Homo sapiens
  misc_RNA (1)...(19): siRNA sense strand
cggcauugucccagauaua

SEQ ID NO: 682284 - RNA, 19 nt, Homo sapiens
  misc_RNA (1)...(19): siRNA sense strand
ggaucucaagguccuguuu

SEQ ID NO: 682285 - RNA, 19 nt, Homo sapiens
  misc_RNA (1)...(19): siRNA sense strand
caaaggauucaaguucuuc

SEQ ID NO: 682286 - RNA, 19 nt, Homo sapiens
  misc_RNA (1)...(19): siRNA sense strand
agauggcacugauccagau

SEQ ID NO: 682287 - RNA, 19 nt, Homo sapiens
  misc_RNA (1)...(19): siRNA sense strand
ggcauugucccagauauag

SEQ ID NO: 682288 - RNA, 19 nt, Homo sapiens
  misc_RNA (1)...(19): siRNA sense strand
uauagccguugguacaaag

SEQ ID NO: 682289 - RNA, 19 nt, Homo sapiens
  misc_RNA (1)...(19): siRNA sense strand
auauagccguugguacaaa

SEQ ID NO: 682290 - RNA, 19 nt, Homo sapiens
  misc_RNA (1)...(19): siRNA sense strand
gacggcauugucccagaua

SEQ ID NO: 682291 - RNA, 19 nt, Homo sapiens
  misc_RNA (1)...(19): siRNA sense strand
agaacgcccuagugcagau

SEQ ID NO: 682292 - RNA, 19 nt, Homo sapiens
  misc_RNA (1)...(19): siRNA sense strand
gaacuuccagaacauauuc

SEQ ID NO: 682293 - RNA, 19 nt, Homo sapiens
  misc_RNA (1)...(19): siRNA sense strand
gcaucacgcucucgaagca

SEQ ID NO: 682294 - RNA, 19 nt, Homo sapiens
  misc_RNA (1)...(19): siRNA sense strand
ucaaaggauucaaguucuu

SEQ ID NO: 682295 - RNA, 19 nt, Homo sapiens
  misc_RNA (1)...(19): siRNA sense strand
ccaagaacuuccagaacau

SEQ ID NO: 682296 - RNA, 19 nt, Homo sapiens
  misc_RNA (1)...(19): siRNA sense strand
gaaggagaacgcccuagug

SEQ ID NO: 682297 - RNA, 19 nt, Homo sapiens
  misc_RNA (1)...(19): siRNA sense strand
uccaagaacuuccagaaca

SEQ ID NO: 682298 - RNA, 19 nt, Homo sapiens
  misc_RNA (1)...(19): siRNA sense strand
caagaacuuccagaacaua

SEQ ID NO: 682299 - RNA, 19 nt, Homo sapiens
  misc_RNA (1)...(19): siRNA sense strand
cgucaaaggauucaaguuc

SEQ ID NO: 682300 - RNA, 19 nt, Homo sapiens
  misc_RNA (1)...(19): siRNA sense strand
ccagaaggaccgcaagaug

SEQ ID NO: 682301 - RNA, 19 nt, Homo sapiens
  misc_RNA (1)...(19): siRNA sense strand
aagauccuguucaauaaga

SEQ ID NO: 682302 - RNA, 19 nt, Homo sapiens
  misc_RNA (1)...(19): siRNA sense strand
gaagauccuguucaauaag

SEQ ID NO: 682303 - RNA, 19 nt, Homo sapiens
  misc_RNA (1)...(19): siRNA sense strand
ucauugaccugcacaacca

SEQ ID NO: 682304 - RNA, 19 nt, Homo sapiens
  misc_RNA (1)...(19): siRNA sense strand
gucaaaggauucaaguucu

SEQ ID NO: 682305 - RNA, 19 nt, Homo sapiens
  misc_RNA (1)...(19): siRNA sense strand
ccagauauagccguuggua

SEQ ID NO: 682306 - RNA, 19 nt, Homo sapiens
  misc_RNA (1)...(19): siRNA sense strand
gcuccaagaacuuccagaa

SEQ ID NO: 682307 - RNA, 19 nt, Homo sapiens
  misc_RNA (1)...(19): siRNA sense strand
gauauagccguugguacaa

SEQ ID NO: 682308 - RNA, 19 nt, Homo sapiens
  misc_RNA (1)...(19): siRNA sense strand
caaggacuacggcaacuca

SEQ ID NO: 682309 - RNA, 19 nt, Homo sapiens
  misc_RNA (1)...(19): siRNA sense strand
agauauagccguugguaca

SEQ ID NO: 682310 - RNA, 19 nt, Homo sapiens
  misc_RNA (1)...(19): siRNA sense strand
ggaucucaagguccuguuu

SEQ ID NO: 682311 - RNA, 19 nt, Homo sapiens
  misc_RNA (1)...(19): siRNA sense strand
caaaggauucaaguucuuc

SEQ ID NO: 682312 - RNA, 19 nt, Homo sapiens
  misc_RNA (1)...(19): siRNA sense strand
agauggcacugauccagau

SEQ ID NO: 682313 - RNA, 19 nt, Homo sapiens
  misc_RNA (1)...(19): siRNA sense strand
uauagccguugguacaaag

SEQ ID NO: 682314 - RNA, 19 nt, Homo sapiens
  misc_RNA (1)...(19): siRNA sense strand
auauagccguugguacaaa

SEQ ID NO: 682315 - RNA, 19 nt, Homo sapiens
  misc_RNA (1)...(19): siRNA sense strand
agaacgcccuagugcagau

SEQ ID NO: 682316 - RNA, 19 nt, Homo sapiens
  misc_RNA (1)...(19): siRNA sense strand
gaacuuccagaacauauuc

SEQ ID NO: 682317 - RNA, 19 nt, Homo sapiens
  misc_RNA (1)...(19): siRNA sense strand
gcaucacgcucucgaagca

SEQ ID NO: 682318 - RNA, 19 nt, Homo sapiens
  misc_RNA (1)...(19): siRNA sense strand
ucaaaggauucaaguucuu

SEQ ID NO: 682319 - RNA, 19 nt, Homo sapiens
  misc_RNA (1)...(19): siRNA sense strand
ccaagaacuuccagaacau

SEQ ID NO: 682320 - RNA, 19 nt, Homo sapiens
  misc_RNA (1)...(19): siRNA sense strand
gaaggagaacgcccuagug

SEQ ID NO: 682321 - RNA, 19 nt, Homo sapiens
  misc_RNA (1)...(19): siRNA sense strand
uccaagaacuuccagaaca

SEQ ID NO: 682322 - RNA, 19 nt, Homo sapiens
  misc_RNA (1)...(19): siRNA sense strand
caagaacuuccagaacaua

SEQ ID NO: 682323 - RNA, 19 nt, Homo sapiens
  misc_RNA (1)...(19): siRNA sense strand
cgucaaaggauucaaguuc

SEQ ID NO: 682324 - RNA, 19 nt, Homo sapiens
  misc_RNA (1)...(19): siRNA sense strand
ccagaaggaccgcaagaug

SEQ ID NO: 682325 - RNA, 19 nt, Homo sapiens
  misc_RNA (1)...(19): siRNA sense strand
aagauccuguucaauaaga

SEQ ID NO: 682326 - RNA, 19 nt, Homo sapiens
  misc_RNA (1)...(19): siRNA sense strand
gaagauccuguucaauaag

SEQ ID NO: 682327 - RNA, 19 nt, Homo sapiens
  misc_RNA (1)...(19): siRNA sense strand
ucauugaccugcacaacca

SEQ ID NO: 682328 - RNA, 19 nt, Homo sapiens
  misc_RNA (1)...(19): siRNA sense strand
gucaaaggauucaaguucu

SEQ ID NO: 682329 - RNA, 19 nt, Homo sapiens
  misc_RNA (1)...(19): siRNA sense strand
ccagauauagccguuggua

SEQ ID NO: 682330 - RNA, 19 nt, Homo sapiens
  misc_RNA (1)...(19): siRNA sense strand
gcuccaagaacuuccagaa

SEQ ID NO: 682331 - RNA, 19 nt, Homo sapiens
  misc_RNA (1)...(19): siRNA sense strand
gauauagccguugguacaa

SEQ ID NO: 682332 - RNA, 19 nt, Homo sapiens
  misc_RNA (1)...(19): siRNA sense strand
caaggacuacggcaacuca

SEQ ID NO: 682333 - RNA, 19 nt, Homo sapiens
  misc_RNA (1)...(19): siRNA sense strand
agauauagccguugguaca

SEQ ID NO: 682334 - RNA, 19 nt, Homo sapiens
  misc_RNA (1)...(19): siRNA sense strand
ggaucucaagguccuguuu

SEQ ID NO: 682335 - RNA, 19 nt, Homo sapiens
  misc_RNA (1)...(19): siRNA sense strand
caaaggauucaaguucuuc

SEQ ID NO: 682336 - RNA, 19 nt, Homo sapiens
  misc_RNA (1)...(19): siRNA sense strand
agauggcacugauccagau

SEQ ID NO: 682337 - RNA, 19 nt, Homo sapiens
  misc_RNA (1)...(19): siRNA sense strand
uauagccguugguacaaag

SEQ ID NO: 682338 - RNA, 19 nt, Homo sapiens
  misc_RNA (1)...(19): siRNA sense strand
auauagccguugguacaaa

SEQ ID NO: 682339 - RNA, 19 nt, Homo sapiens
  misc_RNA (1)...(19): siRNA sense strand
agaacgcccuagugcagau

SEQ ID NO: 682340 - RNA, 19 nt, Homo sapiens
  misc_RNA (1)...(19): siRNA sense strand
gaacuuccagaacauauuc

SEQ ID NO: 682341 - RNA, 19 nt, Homo sapiens
  misc_RNA (1)...(19): siRNA sense strand
gcaucacgcucucgaagca

SEQ ID NO: 682342 - RNA, 19 nt, Homo sapiens
  misc_RNA (1)...(19): siRNA sense strand
ucaaaggauucaaguucuu

SEQ ID NO: 682343 - RNA, 19 nt, Homo sapiens
  misc_RNA (1)...(19): siRNA sense strand
ccaagaacuuccagaacau

SEQ ID NO: 682344 - RNA, 19 nt, Homo sapiens
  misc_RNA (1)...(19): siRNA sense strand
gaaggagaacgcccuagug

SEQ ID NO: 682345 - RNA, 19 nt, Homo sapiens
  misc_RNA (1)...(19): siRNA sense strand
uccaagaacuuccagaaca

SEQ ID NO: 682346 - RNA, 19 nt, Homo sapiens
  misc_RNA (1)...(19): siRNA sense strand
caagaacuuccagaacaua

SEQ ID NO: 682347 - RNA, 19 nt, Homo sapiens
  misc_RNA (1)...(19): siRNA sense strand
cgucaaaggauucaaguuc

SEQ ID NO: 682348 - RNA, 19 nt, Homo sapiens
  misc_RNA (1)...(19): siRNA sense strand
ccagaaggaccgcaagaug

SEQ ID NO: 682349 - RNA, 19 nt, Homo sapiens
  misc_RNA (1)...(19): siRNA sense strand
aagauccuguucaauaaga

SEQ ID NO: 682350 - RNA, 19 nt, Homo sapiens
  misc_RNA (1)...(19): siRNA sense strand
gaagauccuguucaauaag

SEQ ID NO: 682351 - RNA, 19 nt, Homo sapiens
  misc_RNA (1)...(19): siRNA sense strand
ucauugaccugcacaacca

SEQ ID NO: 682352 - RNA, 19 nt, Homo sapiens
  misc_RNA (1)...(19): siRNA sense strand
gucaaaggauucaaguucu

SEQ ID NO: 682353 - RNA, 19 nt, Homo sapiens
  misc_RNA (1)...(19): siRNA sense strand
ccagauauagccguuggua

SEQ ID NO: 682354 - RNA, 19 nt, Homo sapiens
  misc_RNA (1)...(19): siRNA sense strand
gcuccaagaacuuccagaa

SEQ ID NO: 682355 - RNA, 19 nt, Homo sapiens
  misc_RNA (1)...(19): siRNA sense strand
gauauagccguugguacaa

SEQ ID NO: 682356 - RNA, 19 nt, Homo sapiens
  misc_RNA (1)...(19): siRNA sense strand
caaggacuacggcaacuca

SEQ ID NO: 682357 - RNA, 19 nt, Homo sapiens
  misc_RNA (1)...(19): siRNA sense strand
agauauagccguugguaca

SEQ ID NO: 682358 - RNA, 19 nt, Homo sapiens
  misc_RNA (1)...(19): siRNA sense strand
ggaucucaagguccuguuu

SEQ ID NO: 682359 - RNA, 19 nt, Homo sapiens
  misc_RNA (1)...(19): siRNA sense strand
caaaggauucaaguucuuc

SEQ ID NO: 682360 - RNA, 19 nt, Homo sapiens
  misc_RNA (1)...(19): siRNA sense strand
agauggcacugauccagau

SEQ ID NO: 682361 - RNA, 19 nt, Homo sapiens
  misc_RNA (1)...(19): siRNA sense strand
uauagccguugguacaaag

SEQ ID NO: 682362 - RNA, 19 nt, Homo sapiens
  misc_RNA (1)...(19): siRNA sense strand
auauagccguugguacaaa

SEQ ID NO: 682363 - RNA, 19 nt, Homo sapiens
  misc_RNA (1)...(19): siRNA sense strand
agaacgcccuagugcagau

SEQ ID NO: 682364 - RNA, 19 nt, Homo sapiens
  misc_RNA (1)...(19): siRNA sense strand
gaacuuccagaacauauuc

SEQ ID NO: 682365 - RNA, 19 nt, Homo sapiens
  misc_RNA (1)...(19): siRNA sense strand
gcaucacgcucucgaagca

SEQ ID NO: 682366 - RNA, 19 nt, Homo sapiens
  misc_RNA (1)...(19): siRNA sense strand
ucaaaggauucaaguucuu

SEQ ID NO: 682367 - RNA, 19 nt, Homo sapiens
  misc_RNA (1)...(19): siRNA sense strand
ccaagaacuuccagaacau

SEQ ID NO: 682368 - RNA, 19 nt, Homo sapiens
  misc_RNA (1)...(19): siRNA sense strand
gaaggagaacgcccuagug

SEQ ID NO: 682369 - RNA, 19 nt, Homo sapiens
  misc_RNA (1)...(19): siRNA sense strand
uccaagaacuuccagaaca

SEQ ID NO: 682370 - RNA, 19 nt, Homo sapiens
  misc_RNA (1)...(19): siRNA sense strand
caagaacuuccagaacaua

SEQ ID NO: 682371 - RNA, 19 nt, Homo sapiens
  misc_RNA (1)...(19): siRNA sense strand
cgucaaaggauucaaguuc

SEQ ID NO: 682372 - RNA, 19 nt, Homo sapiens
  misc_RNA (1)...(19): siRNA sense strand
ccagaaggaccgcaagaug

SEQ ID NO: 682373 - RNA, 19 nt, Homo sapiens
  misc_RNA (1)...(19): siRNA sense strand
aagauccuguucaauaaga

SEQ ID NO: 682374 - RNA, 19 nt, Homo sapiens
  misc_RNA (1)...(19): siRNA sense strand
gaagauccuguucaauaag

SEQ ID NO: 682375 - RNA, 19 nt, Homo sapiens
  misc_RNA (1)...(19): siRNA sense strand
ucauugaccugcacaacca

SEQ ID NO: 682376 - RNA, 19 nt, Homo sapiens
  misc_RNA (1)...(19): siRNA sense strand
ccagauauagccguuggua

SEQ ID NO: 682377 - RNA, 19 nt, Homo sapiens
  misc_RNA (1)...(19): siRNA sense strand
gucaaaggauucaaguucu

SEQ ID NO: 682378 - RNA, 19 nt, Homo sapiens
  misc_RNA (1)...(19): siRNA sense strand
gcuccaagaacuuccagaa

SEQ ID NO: 682379 - RNA, 19 nt, Homo sapiens
  misc_RNA (1)...(19): siRNA sense strand
gauauagccguugguacaa

SEQ ID NO: 682380 - RNA, 19 nt, Homo sapiens
  misc_RNA (1)...(19): siRNA sense strand
caaggacuacggcaacuca

SEQ ID NO: 682381 - RNA, 19 nt, Homo sapiens
  misc_RNA (1)...(19): siRNA sense strand
agauauagccguugguaca

SEQ ID NO: 682382 - RNA, 19 nt, Homo sapiens
  misc_RNA (1)...(19): siRNA sense strand
cggcauugucccagauaua

SEQ ID NO: 682383 - RNA, 19 nt, Homo sapiens
  misc_RNA (1)...(19): siRNA sense strand
ggaucucaagguccuguuu

SEQ ID NO: 682384 - RNA, 19 nt, Homo sapiens
  misc_RNA (1)...(19): siRNA sense strand
caaaggauucaaguucuuc

SEQ ID NO: 682385 - RNA, 19 nt, Homo sapiens
  misc_RNA (1)...(19): siRNA sense strand
agauggcacugauccagau

SEQ ID NO: 682386 - RNA, 19 nt, Homo sapiens
  misc_RNA (1)...(19): siRNA sense strand
ggcauugucccagauauag

SEQ ID NO: 682387 - RNA, 19 nt, Homo sapiens
  misc_RNA (1)...(19): siRNA sense strand
uauagccguugguacaaag

SEQ ID NO: 682388 - RNA, 19 nt, Homo sapiens
  misc_RNA (1)...(19): siRNA sense strand
auauagccguugguacaaa

SEQ ID NO: 682389 - RNA, 19 nt, Homo sapiens
  misc_RNA (1)...(19): siRNA sense strand
gacggcauugucccagaua

SEQ ID NO: 682390 - RNA, 19 nt, Homo sapiens
  misc_RNA (1)...(19): siRNA sense strand
agaacgcccuagugcagau

SEQ ID NO: 682391 - RNA, 19 nt, Homo sapiens
  misc_RNA (1)...(19): siRNA sense strand
gaacaaauggugaaauaug

SEQ ID NO: 682392 - RNA, 19 nt, Homo sapiens
  misc_RNA (1)...(19): siRNA sense strand
acaaggcgcuggauuauga

SEQ ID NO: 682393 - RNA, 19 nt, Homo sapiens
  misc_RNA (1)...(19): siRNA sense strand
gggauuugcucuuaaguga

SEQ ID NO: 682394 - RNA, 19 nt, Homo sapiens
  misc_RNA (1)...(19): siRNA sense strand
uggaacaaauggugaaaua

SEQ ID NO: 682395 - RNA, 19 nt, Homo sapiens
  misc_RNA (1)...(19): siRNA sense strand
gauuugcucuuaagugaaa

SEQ ID NO: 682396 - RNA, 19 nt, Homo sapiens
  misc_RNA (1)...(19): siRNA sense strand
ggauauaaaugaucacucu

SEQ ID NO: 682397 - RNA, 19 nt, Homo sapiens
  misc_RNA (1)...(19): siRNA sense strand
ugacaaugcuccugaaauc

SEQ ID NO: 682398 - RNA, 19 nt, Homo sapiens
  misc_RNA (1)...(19): siRNA sense strand
aaacaaaugcuccuagaaa

SEQ ID NO: 682399 - RNA, 19 nt, Homo sapiens
  misc_RNA (1)...(19): siRNA sense strand
ugucucagcuugggauuua

SEQ ID NO: 682400 - RNA, 19 nt, Homo sapiens
  misc_RNA (1)...(19): siRNA sense strand
uugaaacgauugagucaua

SEQ ID NO: 682401 - RNA, 19 nt, Homo sapiens
  misc_RNA (1)...(19): siRNA sense strand
agucauaauucacgugaua

SEQ ID NO: 682402 - RNA, 19 nt, Homo sapiens
  misc_RNA (1)...(19): siRNA sense strand
gcacagccgaguacaauau

SEQ ID NO: 682403 - RNA, 19 nt, Homo sapiens
  misc_RNA (1)...(19): siRNA sense strand
ucaaaagucuggagaaauu

SEQ ID NO: 682404 - RNA, 19 nt, Homo sapiens
  misc_RNA (1)...(19): siRNA sense strand
ugaaaucacugugucauca

SEQ ID NO: 682405 - RNA, 19 nt, Homo sapiens
  misc_RNA (1)...(19): siRNA sense strand
cggguggucucuaaugaua

SEQ ID NO: 682406 - RNA, 19 nt, Homo sapiens
  misc_RNA (1)...(19): siRNA sense strand
gggcucggguggucucuaa

SEQ ID NO: 682407 - RNA, 19 nt, Homo sapiens
  misc_RNA (1)...(19): siRNA sense strand
ggacaaggcgcuggauuau

SEQ ID NO: 682408 - RNA, 19 nt, Homo sapiens
  misc_RNA (1)...(19): siRNA sense strand
caucgagccuugcgugcua

SEQ ID NO: 682409 - RNA, 19 nt, Homo sapiens
  misc_RNA (1)...(19): siRNA sense strand
gauauucgcaagacauuug

SEQ ID NO: 682410 - RNA, 19 nt, Homo sapiens
  misc_RNA (1)...(19): siRNA sense strand
ggucagggauauaaaugau

SEQ ID NO: 682411 - RNA, 19 nt, Homo sapiens
  misc_RNA (1)...(19): siRNA sense strand
guuugcagcuggacauaaa

SEQ ID NO: 682412 - RNA, 19 nt, Homo sapiens
  misc_RNA (1)...(19): siRNA sense strand
gacacgcacucagcagaua

SEQ ID NO: 682413 - RNA, 19 nt, Homo sapiens
  misc_RNA (1)...(19): siRNA sense strand
cgagacaaaugaauucaag

SEQ ID NO: 682414 - RNA, 19 nt, Homo sapiens
  misc_RNA (1)...(19): siRNA sense strand
gagagucauuccagacaau

SEQ ID NO: 682415 - RNA, 19 nt, Homo sapiens
  misc_RNA (1)...(19): siRNA sense strand
gaagauauucgcaagacau

SEQ ID NO: 682416 - RNA, 19 nt, Homo sapiens
  misc_RNA (1)...(19): siRNA sense strand
ucagggauauaaaugauca

SEQ ID NO: 682417 - RNA, 19 nt, Homo sapiens
  misc_RNA (1)...(19): siRNA sense strand
ucaggucgcuggacuacga

SEQ ID NO: 682418 - RNA, 19 nt, Homo sapiens
  misc_RNA (1)...(19): siRNA sense strand
gagcacagccgaguacaau

SEQ ID NO: 682419 - RNA, 19 nt, Homo sapiens
  misc_RNA (1)...(19): siRNA sense strand
ggauuuagacucuggaaca

SEQ ID NO: 682420 - RNA, 19 nt, Homo sapiens
  misc_RNA (1)...(19): siRNA sense strand
uaaaaccgguuaucccuaa

SEQ ID NO: 682421 - RNA, 19 nt, Homo sapiens
  misc_RNA (1)...(19): siRNA sense strand
gcaaguccugcuucucuuu

SEQ ID NO: 682422 - RNA, 19 nt, Homo sapiens
  misc_RNA (1)...(19): siRNA sense strand
ggucucuaaugauaagaaa

SEQ ID NO: 682423 - RNA, 19 nt, Homo sapiens
  misc_RNA (1)...(19): siRNA sense strand
gagcaccucuggauuuuga

SEQ ID NO: 682424 - RNA, 19 nt, Homo sapiens
  misc_RNA (1)...(19): siRNA sense strand
uagaaagugcgaaggauuu

SEQ ID NO: 682425 - RNA, 19 nt, Homo sapiens
  misc_RNA (1)...(19): siRNA sense strand
ugcgaaggauuuagaugua

SEQ ID NO: 682426 - RNA, 19 nt, Homo sapiens
  misc_RNA (1)...(19): siRNA sense strand
uggaaaaucuacagucaua

SEQ ID NO: 682427 - RNA, 19 nt, Homo sapiens
  misc_RNA (1)...(19): siRNA sense strand
gauuuagacucuggaacaa

SEQ ID NO: 682428 - RNA, 19 nt, Homo sapiens
  misc_RNA (1)...(19): siRNA sense strand
uaauucacgugauagaugu

SEQ ID NO: 682429 - RNA, 19 nt, Homo sapiens
  misc_RNA (1)...(19): siRNA sense strand
gacgggagguuccgagaca

SEQ ID NO: 682430 - RNA, 19 nt, Homo sapiens
  misc_RNA (1)...(19): siRNA sense strand
gaagaauuguuuguuccau

SEQ ID NO: 682431 - RNA, 19 nt, Homo sapiens
  misc_RNA (1)...(19): siRNA sense strand
aacaaaugcuccuagaaau

SEQ ID NO: 682432 - RNA, 19 nt, Homo sapiens
  misc_RNA (1)...(19): siRNA sense strand
uaggcaaucuggcaaagga

SEQ ID NO: 682433 - RNA, 19 nt, Homo sapiens
  misc_RNA (1)...(19): siRNA sense strand
ggagaaauuacuuuaagag

SEQ ID NO: 682434 - RNA, 19 nt, Homo sapiens
  misc_RNA (1)...(19): siRNA sense strand
ucccaugccucagaagaua

SEQ ID NO: 682435 - RNA, 19 nt, Homo sapiens
  misc_RNA (1)...(19): siRNA sense strand
ggugaaauaugcuauaccu

SEQ ID NO: 682436 - RNA, 19 nt, Homo sapiens
  misc_RNA (1)...(19): siRNA sense strand
gagcuucaggucagggaua

SEQ ID NO: 682437 - RNA, 19 nt, Homo sapiens
  misc_RNA (1)...(19): siRNA sense strand
agagaccacuggacagaga

SEQ ID NO: 682438 - RNA, 19 nt, Homo sapiens
  misc_RNA (1)...(19): siRNA sense strand
gaaaucacugugucaucaa

SEQ ID NO: 682439 - RNA, 19 nt, Homo sapiens
  misc_RNA (1)...(19): siRNA sense strand
uggacaaggcgcuggauua

SEQ ID NO: 682440 - RNA, 19 nt, Homo sapiens
  misc_RNA (1)...(19): siRNA sense strand
guaggaaucaaugcuguaa

SEQ ID NO: 682441 - RNA, 19 nt, Homo sapiens
  misc_RNA (1)...(19): siRNA sense strand
caaaugaauucaaguuccu

SEQ ID NO: 682442 - RNA, 19 nt, Homo sapiens
  misc_RNA (1)...(19): siRNA sense strand
guuggucucugacgucaau

SEQ ID NO: 682443 - RNA, 19 nt, Homo sapiens
  misc_RNA (1)...(19): siRNA sense strand
gcuaaaaucuucaguugag

SEQ ID NO: 682444 - RNA, 19 nt, Homo sapiens
  misc_RNA (1)...(19): siRNA sense strand
ugacaacuccccugaauuu

SEQ ID NO: 682445 - RNA, 19 nt, Homo sapiens
  misc_RNA (1)...(19): siRNA sense strand
ggaaauaccccgaguuagu

SEQ ID NO: 682446 - RNA, 19 nt, Homo sapiens
  misc_RNA (1)...(19): siRNA sense strand
ggaagaauagugaagaaaa

SEQ ID NO: 682447 - RNA, 19 nt, Homo sapiens
  misc_RNA (1)...(19): siRNA sense strand
ggaacaaauggugaaauau

SEQ ID NO: 682448 - RNA, 19 nt, Homo sapiens
  misc_RNA (1)...(19): siRNA sense strand
gagguuccgagacaaauga

SEQ ID NO: 682449 - RNA, 19 nt, Homo sapiens
  misc_RNA (1)...(19): siRNA sense strand
cgugauagauguaaaugac

SEQ ID NO: 682450 - RNA, 19 nt, Homo sapiens
  misc_RNA (1)...(19): siRNA sense strand
caaauggugaaauaugcua

SEQ ID NO: 682451 - RNA, 19 nt, Homo sapiens
  misc_RNA (1)...(19): siRNA sense strand
gguggucucuaaugauaag

SEQ ID NO: 682452 - RNA, 19 nt, Homo sapiens
  misc_RNA (1)...(19): siRNA sense strand
caacggaagaauuguuugu

SEQ ID NO: 682453 - RNA, 19 nt, Homo sapiens
  misc_RNA (1)...(19): siRNA sense strand
gcgaaggauuuagauguag

SEQ ID NO: 682454 - RNA, 19 nt, Homo sapiens
  misc_RNA (1)...(19): siRNA sense strand
cguuggugcuguguucuua

SEQ ID NO: 682455 - RNA, 19 nt, Homo sapiens
  misc_RNA (1)...(19): siRNA sense strand
agaaagugcgaaggauuua

SEQ ID NO: 682456 - RNA, 19 nt, Homo sapiens
  misc_RNA (1)...(19): siRNA sense strand
gacaaaugaauucaaguuc

SEQ ID NO: 682457 - RNA, 19 nt, Homo sapiens
  misc_RNA (1)...(19): siRNA sense strand
ugucuucgcucuuccucuu

SEQ ID NO: 682458 - RNA, 19 nt, Homo sapiens
  misc_RNA (1)...(19): siRNA sense strand
gagagagcacagccgagua

SEQ ID NO: 682459 - RNA, 19 nt, Homo sapiens
  misc_RNA (1)...(19): siRNA sense strand
cggaagaccucccauucgu

SEQ ID NO: 682460 - RNA, 19 nt, Homo sapiens
  misc_RNA (1)...(19): siRNA sense strand
auccuuggcucgcugauuu

SEQ ID NO: 682461 - RNA, 19 nt, Homo sapiens
  misc_RNA (1)...(19): siRNA sense strand
gaaauaccccgaguuaguu

SEQ ID NO: 682462 - RNA, 19 nt, Homo sapiens
  misc_RNA (1)...(19): siRNA sense strand
ccgacucgcucaccgucua

SEQ ID NO: 682463 - RNA, 19 nt, Homo sapiens
  misc_RNA (1)...(19): siRNA sense strand
cagaagauauucgcaagac

SEQ ID NO: 682464 - RNA, 19 nt, Homo sapiens
  misc_RNA (1)...(19): siRNA sense strand
uuuagacucuggaacaaau

SEQ ID NO: 682465 - RNA, 19 nt, Homo sapiens
  misc_RNA (1)...(19): siRNA sense strand
gagccuugcgugcuacauu

SEQ ID NO: 682466 - RNA, 19 nt, Homo sapiens
  misc_RNA (1)...(19): siRNA sense strand
aacuccaccuuucgaaaua

SEQ ID NO: 682467 - RNA, 19 nt, Homo sapiens
  misc_RNA (1)...(19): siRNA sense strand
aaacuccaccuuucgaaau

SEQ ID NO: 682468 - RNA, 19 nt, Homo sapiens
  misc_RNA (1)...(19): siRNA sense strand
gaagaauagugaagaaaac

SEQ ID NO: 682469 - RNA, 19 nt, Homo sapiens
  misc_RNA (1)...(19): siRNA sense strand
ucccuaauauccaggcaaa

SEQ ID NO: 682470 - RNA, 19 nt, Homo sapiens
  misc_RNA (1)...(19): siRNA sense strand
gaagcugcucggugccuaa

SEQ ID NO: 682471 - RNA, 19 nt, Homo sapiens
  misc_RNA (1)...(19): siRNA sense strand
agacaacggccaccuguuc

SEQ ID NO: 682472 - RNA, 19 nt, Homo sapiens
  misc_RNA (1)...(19): siRNA sense strand
gugcuaaaaucuucaguug

SEQ ID NO: 682473 - RNA, 19 nt, Homo sapiens
  misc_RNA (1)...(19): siRNA sense strand
cuggagaaauuacuuuaag

SEQ ID NO: 682474 - RNA, 19 nt, Homo sapiens
  misc_RNA (1)...(19): siRNA sense strand
aaugaucacucucccaucu

SEQ ID NO: 682475 - RNA, 19 nt, Homo sapiens
  misc_RNA (1)...(19): siRNA sense strand
gaaaugcagagcgggaguu

SEQ ID NO: 682476 - RNA, 19 nt, Homo sapiens
  misc_RNA (1)...(19): siRNA sense strand
ugggaagaauagugaagaa

SEQ ID NO: 682477 - RNA, 19 nt, Homo sapiens
  misc_RNA (1)...(19): siRNA sense strand
guuccgagacaaaugaauu

SEQ ID NO: 682478 - RNA, 19 nt, Homo sapiens
  misc_RNA (1)...(19): siRNA sense strand
ccugcaggcuuucgacuuc

SEQ ID NO: 682479 - RNA, 19 nt, Homo sapiens
  misc_RNA (1)...(19): siRNA sense strand
acgaggcccugcaggcuuu

SEQ ID NO: 682480 - RNA, 19 nt, Homo sapiens
  misc_RNA (1)...(19): siRNA sense strand
gauaaggcaaguccugcuu

SEQ ID NO: 682481 - RNA, 19 nt, Homo sapiens
  misc_RNA (1)...(19): siRNA sense strand
gguggugguuguggacauu

SEQ ID NO: 682482 - RNA, 19 nt, Homo sapiens
  misc_RNA (1)...(19): siRNA sense strand
ggacacgcacucagcagau

SEQ ID NO: 682483 - RNA, 19 nt, Homo sapiens
  misc_RNA (1)...(19): siRNA sense strand
cgaguuaguucuggacaag

SEQ ID NO: 682484 - RNA, 19 nt, Homo sapiens
  misc_RNA (1)...(19): siRNA sense strand
ugagagucauuccagacaa

SEQ ID NO: 682485 - RNA, 19 nt, Homo sapiens
  misc_RNA (1)...(19): siRNA sense strand
aaaugacaaugcuccugaa

SEQ ID NO: 682486 - RNA, 19 nt, Homo sapiens
  misc_RNA (1)...(19): siRNA sense strand
gggaagaauagugaagaaa

SEQ ID NO: 682487 - RNA, 19 nt, Homo sapiens
  misc_RNA (1)...(19): siRNA sense strand
aaaccgguuaucccuaaua

SEQ ID NO: 682488 - RNA, 19 nt, Homo sapiens
  misc_RNA (1)...(19): siRNA sense strand
ccaacgcccaggucaacua

SEQ ID NO: 682489 - RNA, 19 nt, Homo sapiens
  misc_RNA (1)...(19): siRNA sense strand
aucacugugucaucaauua

SEQ ID NO: 682490 - RNA, 19 nt, Homo sapiens
  misc_RNA (1)...(19): siRNA sense strand
ggcaaguccugcuucucuu

SEQ ID NO: 682491 - RNA, 19 nt, Homo sapiens
  misc_RNA (1)...(19): siRNA sense strand
gaaauacccugaguuaguu

SEQ ID NO: 682492 - RNA, 19 nt, Homo sapiens
  misc_RNA (1)...(19): siRNA sense strand
cgacaacgcuccugaaauc

SEQ ID NO: 682493 - RNA, 19 nt, Homo sapiens
  misc_RNA (1)...(19): siRNA sense strand
acaaggcgcuggauuauga

SEQ ID NO: 682494 - RNA, 19 nt, Homo sapiens
  misc_RNA (1)...(19): siRNA sense strand
uaacagcaccuuuggauuu

SEQ ID NO: 682495 - RNA, 19 nt, Homo sapiens
  misc_RNA (1)...(19): siRNA sense strand
ggacaacggccaccuguuu

SEQ ID NO: 682496 - RNA, 19 nt, Homo sapiens
  misc_RNA (1)...(19): siRNA sense strand
gaaagaugguuuguucuau

SEQ ID NO: 682497 - RNA, 19 nt, Homo sapiens
  misc_RNA (1)...(19): siRNA sense strand
ggaaauacccugaguuagu

SEQ ID NO: 682498 - RNA, 19 nt, Homo sapiens
  misc_RNA (1)...(19): siRNA sense strand
ggaaagaugguuuguucua

SEQ ID NO: 682499 - RNA, 19 nt, Homo sapiens
  misc_RNA (1)...(19): siRNA sense strand
gaauucaggugauggaugu

SEQ ID NO: 682500 - RNA, 19 nt, Homo sapiens
  misc_RNA (1)...(19): siRNA sense strand
ggauauaaaugaucacucu

SEQ ID NO: 682501 - RNA, 19 nt, Homo sapiens
  misc_RNA (1)...(19): siRNA sense strand
gaaaugcucuuagaaaucc

SEQ ID NO: 682502 - RNA, 19 nt, Homo sapiens
  misc_RNA (1)...(19): siRNA sense strand
ggacaucccauucgugcua

SEQ ID NO: 682503 - RNA, 19 nt, Homo sapiens
  misc_RNA (1)...(19): siRNA sense strand
gaacaaacagugaacuauc

SEQ ID NO: 682504 - RNA, 19 nt, Homo sapiens
  misc_RNA (1)...(19): siRNA sense strand
caauaaauccgaacucuca

SEQ ID NO: 682505 - RNA, 19 nt, Homo sapiens
  misc_RNA (1)...(19): siRNA sense strand
gggcucgggugguuucuaa

SEQ ID NO: 682506 - RNA, 19 nt, Homo sapiens
  misc_RNA (1)...(19): siRNA sense strand
uaggaaauacccugaguua

SEQ ID NO: 682507 - RNA, 19 nt, Homo sapiens
  misc_RNA (1)...(19): siRNA sense strand
gaacucucauuuccacguu

SEQ ID NO: 682508 - RNA, 19 nt, Homo sapiens
  misc_RNA (1)...(19): siRNA sense strand
gggauuugcuccugagaga

SEQ ID NO: 682509 - RNA, 19 nt, Homo sapiens
  misc_RNA (1)...(19): siRNA sense strand
ugaaaucacugugucauca

SEQ ID NO: 682510 - RNA, 19 nt, Homo sapiens
  misc_RNA (1)...(19): siRNA sense strand
gcaaaggauuuagauguag

SEQ ID NO: 682511 - RNA, 19 nt, Homo sapiens
  misc_RNA (1)...(19): siRNA sense strand
gagcacagguagugaaguc

SEQ ID NO: 682512 - RNA, 19 nt, Homo sapiens
  misc_RNA (1)...(19): siRNA sense strand
ugcaaaggauuuagaugua

SEQ ID NO: 682513 - RNA, 19 nt, Homo sapiens
  misc_RNA (1)...(19): siRNA sense strand
ugaacuauccuauaccuuu

SEQ ID NO: 682514 - RNA, 19 nt, Homo sapiens
  misc_RNA (1)...(19): siRNA sense strand
ggacaaggcgcuggauuau

SEQ ID NO: 682515 - RNA, 19 nt, Homo sapiens
  misc_RNA (1)...(19): siRNA sense strand
ggucagggauauaaaugau

SEQ ID NO: 682516 - RNA, 19 nt, Homo sapiens
  misc_RNA (1)...(19): siRNA sense strand
gauauucgcaagacauuug

SEQ ID NO: 682517 - RNA, 19 nt, Homo sapiens
  misc_RNA (1)...(19): siRNA sense strand
gcuguguucuugcuugaaa

SEQ ID NO: 682518 - RNA, 19 nt, Homo sapiens
  misc_RNA (1)...(19): siRNA sense strand
uugaagcaauugagucaua

SEQ ID NO: 682519 - RNA, 19 nt, Homo sapiens
  misc_RNA (1)...(19): siRNA sense strand
gguggugguuguagauauu

SEQ ID NO: 682520 - RNA, 19 nt, Homo sapiens
  misc_RNA (1)...(19): siRNA sense strand
gaacuauccuauaccuuuu

SEQ ID NO: 682521 - RNA, 19 nt, Homo sapiens
  misc_RNA (1)...(19): siRNA sense strand
gaagauauucgcaagacau

SEQ ID NO: 682522 - RNA, 19 nt, Homo sapiens
  misc_RNA (1)...(19): siRNA sense strand
ucaaaagucuggugacauu

SEQ ID NO: 682523 - RNA, 19 nt, Homo sapiens
  misc_RNA (1)...(19): siRNA sense strand
ucagggauauaaaugauca

SEQ ID NO: 682524 - RNA, 19 nt, Homo sapiens
  misc_RNA (1)...(19): siRNA sense strand
ucaggucgcuggacuacga

SEQ ID NO: 682525 - RNA, 19 nt, Homo sapiens
  misc_RNA (1)...(19): siRNA sense strand
gcuaaaaucuucgguaaau

SEQ ID NO: 682526 - RNA, 19 nt, Homo sapiens
  misc_RNA (1)...(19): siRNA sense strand
ggaacaaacagugaacuau

SEQ ID NO: 682527 - RNA, 19 nt, Homo sapiens
  misc_RNA (1)...(19): siRNA sense strand
ggauuuagacucuggaaca

SEQ ID NO: 682528 - RNA, 19 nt, Homo sapiens
  misc_RNA (1)...(19): siRNA sense strand
agagaccgcuggacagaga

SEQ ID NO: 682529 - RNA, 19 nt, Homo sapiens
  misc_RNA (1)...(19): siRNA sense strand
acagugaacuauccuauac

SEQ ID NO: 682530 - RNA, 19 nt, Homo sapiens
  misc_RNA (1)...(19): siRNA sense strand
gcagagcgggagcuuugua

SEQ ID NO: 682531 - RNA, 19 nt, Homo sapiens
  misc_RNA (1)...(19): siRNA sense strand
acggaaagaugguuuguuc

SEQ ID NO: 682532 - RNA, 19 nt, Homo sapiens
  misc_RNA (1)...(19): siRNA sense strand
gauuuagacucuggaacaa

SEQ ID NO: 682533 - RNA, 19 nt, Homo sapiens
  misc_RNA (1)...(19): siRNA sense strand
aaagaugguuuguucuauc

SEQ ID NO: 682534 - RNA, 19 nt, Homo sapiens
  misc_RNA (1)...(19): siRNA sense strand
gauuugcuccugagagaaa

SEQ ID NO: 682535 - RNA, 19 nt, Homo sapiens
  misc_RNA (1)...(19): siRNA sense strand
guagugaagucgaagaaaa

SEQ ID NO: 682536 - RNA, 19 nt, Homo sapiens
  misc_RNA (1)...(19): siRNA sense strand
cgucucagccugggauuua

SEQ ID NO: 682537 - RNA, 19 nt, Homo sapiens
  misc_RNA (1)...(19): siRNA sense strand
ugaaagugcaaaggauuua

SEQ ID NO: 682538 - RNA, 19 nt, Homo sapiens
  misc_RNA (1)...(19): siRNA sense strand
gugcaaaggauuuagaugu

SEQ ID NO: 682539 - RNA, 19 nt, Homo sapiens
  misc_RNA (1)...(19): siRNA sense strand
ucccaugccucagaagaua

SEQ ID NO: 682540 - RNA, 19 nt, Homo sapiens
  misc_RNA (1)...(19): siRNA sense strand
gagcagagccgaguacaac

SEQ ID NO: 682541 - RNA, 19 nt, Homo sapiens
  misc_RNA (1)...(19): siRNA sense strand
uggacaaggcgcuggauua

SEQ ID NO: 682542 - RNA, 19 nt, Homo sapiens
  misc_RNA (1)...(19): siRNA sense strand
uuacuacacuuuggaaaca

SEQ ID NO: 682543 - RNA, 19 nt, Homo sapiens
  misc_RNA (1)...(19): siRNA sense strand
gaaaucacugugucaucaa

SEQ ID NO: 682544 - RNA, 19 nt, Homo sapiens
  misc_RNA (1)...(19): siRNA sense strand
ggagcuuuguaggaaauuu

SEQ ID NO: 682545 - RNA, 19 nt, Homo sapiens
  misc_RNA (1)...(19): siRNA sense strand
cgggugguuucuaaugaua

SEQ ID NO: 682546 - RNA, 19 nt, Homo sapiens
  misc_RNA (1)...(19): siRNA sense strand
guaggaaucaaugcuguaa

SEQ ID NO: 682547 - RNA, 19 nt, Homo sapiens
  misc_RNA (1)...(19): siRNA sense strand
caucagcgccacagacaga

SEQ ID NO: 682548 - RNA, 19 nt, Homo sapiens
  misc_RNA (1)...(19): siRNA sense strand
ccgacucgcucacugucua

SEQ ID NO: 682549 - RNA, 19 nt, Homo sapiens
  misc_RNA (1)...(19): siRNA sense strand
ucccagagcuaccacuaug

SEQ ID NO: 682550 - RNA, 19 nt, Homo sapiens
  misc_RNA (1)...(19): siRNA sense strand
ucuuagaaaucccagagaa

SEQ ID NO: 682551 - RNA, 19 nt, Homo sapiens
  misc_RNA (1)...(19): siRNA sense strand
gaauaauuuggguuucuga

SEQ ID NO: 682552 - RNA, 19 nt, Homo sapiens
  misc_RNA (1)...(19): siRNA sense strand
gcuugaaagugcaaaggau

SEQ ID NO: 682553 - RNA, 19 nt, Homo sapiens
  misc_RNA (1)...(19): siRNA sense strand
agccuugugugcuguauuu

SEQ ID NO: 682554 - RNA, 19 nt, Homo sapiens
  misc_RNA (1)...(19): siRNA sense strand
gagcgggagcuuuguagga

SEQ ID NO: 682555 - RNA, 19 nt, Homo sapiens
  misc_RNA (1)...(19): siRNA sense strand
cagaagauauucgcaagac

SEQ ID NO: 682556 - RNA, 19 nt, Homo sapiens
  misc_RNA (1)...(19): siRNA sense strand
gaggcuccaggucaaauaa

SEQ ID NO: 682557 - RNA, 19 nt, Homo sapiens
  misc_RNA (1)...(19): siRNA sense strand
gugcuaaaaucuucgguaa

SEQ ID NO: 682558 - RNA, 19 nt, Homo sapiens
  misc_RNA (1)...(19): siRNA sense strand
ggacaacggaaagaugguu

SEQ ID NO: 682559 - RNA, 19 nt, Homo sapiens
  misc_RNA (1)...(19): siRNA sense strand
gcuguauuuccaaguguua

SEQ ID NO: 682560 - RNA, 19 nt, Homo sapiens
  misc_RNA (1)...(19): siRNA sense strand
gacaucccauucgugcuaa

SEQ ID NO: 682561 - RNA, 19 nt, Homo sapiens
  misc_RNA (1)...(19): siRNA sense strand
uuuaugaggugaagauucu

SEQ ID NO: 682562 - RNA, 19 nt, Homo sapiens
  misc_RNA (1)...(19): siRNA sense strand
ggguggugguuguagauau

SEQ ID NO: 682563 - RNA, 19 nt, Homo sapiens
  misc_RNA (1)...(19): siRNA sense strand
gcccggagcucaguuucau

SEQ ID NO: 682564 - RNA, 19 nt, Homo sapiens
  misc_RNA (1)...(19): siRNA sense strand
aagagucaauccagacaau

SEQ ID NO: 682565 - RNA, 19 nt, Homo sapiens
  misc_RNA (1)...(19): siRNA sense strand
cacaauaaauccgaacucu

SEQ ID NO: 682566 - RNA, 19 nt, Homo sapiens
  misc_RNA (1)...(19): siRNA sense strand
ugucgucgcucuuccucuu

SEQ ID NO: 682567 - RNA, 19 nt, Homo sapiens
  misc_RNA (1)...(19): siRNA sense strand
gacaacggccaccuguuug

SEQ ID NO: 682568 - RNA, 19 nt, Homo sapiens
  misc_RNA (1)...(19): siRNA sense strand
gcgggagcuuuguaggaaa

SEQ ID NO: 682569 - RNA, 19 nt, Homo sapiens
  misc_RNA (1)...(19): siRNA sense strand
gagacugugguuaugguuu

SEQ ID NO: 682570 - RNA, 19 nt, Homo sapiens
  misc_RNA (1)...(19): siRNA sense strand
caacgcuccugaaaucacu

SEQ ID NO: 682571 - RNA, 19 nt, Homo sapiens
  misc_RNA (1)...(19): siRNA sense strand
gauaaggcaaguccugcuu

SEQ ID NO: 682572 - RNA, 19 nt, Homo sapiens
  misc_RNA (1)...(19): siRNA sense strand
aaacagugaacuauccuau

SEQ ID NO: 682573 - RNA, 19 nt, Homo sapiens
  misc_RNA (1)...(19): siRNA sense strand
gagcuuuguaggaaauuug

SEQ ID NO: 682574 - RNA, 19 nt, Homo sapiens
  misc_RNA (1)...(19): siRNA sense strand
ccaacgcccaggucaacua

SEQ ID NO: 682575 - RNA, 19 nt, Homo sapiens
  misc_RNA (1)...(19): siRNA sense strand
aucacugugucaucaauua

SEQ ID NO: 682576 - RNA, 19 nt, Homo sapiens
  misc_RNA (1)...(19): siRNA sense strand
gaaaaucuacagucagaau

SEQ ID NO: 682577 - RNA, 19 nt, Homo sapiens
  misc_RNA (1)...(19): siRNA sense strand
agaaaugcucuuagaaauc

SEQ ID NO: 682578 - RNA, 19 nt, Homo sapiens
  misc_RNA (1)...(19): siRNA sense strand
ugauggauguaaacgacaa

SEQ ID NO: 682579 - RNA, 19 nt, Homo sapiens
  misc_RNA (1)...(19): siRNA sense strand
gagucaauccagacaauag

SEQ ID NO: 682580 - RNA, 19 nt, Homo sapiens
  misc_RNA (1)...(19): siRNA sense strand
gugcuguguucuugcuuga

SEQ ID NO: 682581 - RNA, 19 nt, Homo sapiens
  misc_RNA (1)...(19): siRNA sense strand
ugaguuaguucuggacaag

SEQ ID NO: 682582 - RNA, 19 nt, Homo sapiens
  misc_RNA (1)...(19): siRNA sense strand
ccagagcacagguagugaa

SEQ ID NO: 682583 - RNA, 19 nt, Homo sapiens
  misc_RNA (1)...(19): siRNA sense strand
caggucaaauaaguucaaa

SEQ ID NO: 682584 - RNA, 19 nt, Homo sapiens
  misc_RNA (1)...(19): siRNA sense strand
gcaccaacgcccaggucaa

SEQ ID NO: 682585 - RNA, 19 nt, Homo sapiens
  misc_RNA (1)...(19): siRNA sense strand
gacaacggaaagaugguuu

SEQ ID NO: 682586 - RNA, 19 nt, Homo sapiens
  misc_RNA (1)...(19): siRNA sense strand
gguuaugguuuucaggaua

SEQ ID NO: 682587 - RNA, 19 nt, Homo sapiens
  misc_RNA (1)...(19): siRNA sense strand
cagagacugugguuauggu

SEQ ID NO: 682588 - RNA, 19 nt, Homo sapiens
  misc_RNA (1)...(19): siRNA sense strand
gcagagccgaguacaacau

SEQ ID NO: 682589 - RNA, 19 nt, Homo sapiens
  misc_RNA (1)...(19): siRNA sense strand
gagagagcagagccgagua

SEQ ID NO: 682590 - RNA, 19 nt, Homo sapiens
  misc_RNA (1)...(19): siRNA sense strand
gagcuccaggucagggaua

SEQ ID NO: 682591 - RNA, 19 nt, Homo sapiens
  misc_RNA (1)...(19): siRNA sense strand
uaaaaugugcggagaagga

SEQ ID NO: 682592 - RNA, 19 nt, Homo sapiens
  misc_RNA (1)...(19): siRNA sense strand
uuucaaaccccucgagaua

SEQ ID NO: 682593 - RNA, 19 nt, Homo sapiens
  misc_RNA (1)...(19): siRNA sense strand
uaaaaugugcggagaagga

SEQ ID NO: 682594 - RNA, 19 nt, Homo sapiens
  misc_RNA (1)...(19): siRNA sense strand
uuucaaaccccucgagaua

SEQ ID NO: 682595 - RNA, 19 nt, Homo sapiens
  misc_RNA (1)...(19): siRNA sense strand
uaaaaugugcggagaagga

SEQ ID NO: 682596 - RNA, 19 nt, Homo sapiens
  misc_RNA (1)...(19): siRNA sense strand
uuucaaaccccucgagaua

SEQ ID NO: 682597 - RNA, 19 nt, Homo sapiens
  misc_RNA (1)...(19): siRNA sense strand
uaaaaugugcggagaagga

SEQ ID NO: 682598 - RNA, 19 nt, Homo sapiens
  misc_RNA (1)...(19): siRNA sense strand
uuucaaaccccucgagaua

SEQ ID NO: 682599 - RNA, 19 nt, Homo sapiens
  misc_RNA (1)...(19): siRNA sense strand
uaaaaugugcggagaagga

SEQ ID NO: 682600 - RNA, 19 nt, Homo sapiens
  misc_RNA (1)...(19): siRNA sense strand
uuucaaaccccucgagaua

SEQ ID NO: 682601 - RNA, 19 nt, Homo sapiens
  misc_RNA (1)...(19): siRNA sense strand
uaaaaugugcggagaagga

SEQ ID NO: 682602 - RNA, 19 nt, Homo sapiens
  misc_RNA (1)...(19): siRNA sense strand
uuucaaaccccucgagaua

SEQ ID NO: 682603 - RNA, 19 nt, Homo sapiens
  misc_RNA (1)...(19): siRNA sense strand
uaaaaugugcggagaagga

SEQ ID NO: 682604 - RNA, 19 nt, Homo sapiens
  misc_RNA (1)...(19): siRNA sense strand
uuucaaaccccucgagaua

SEQ ID NO: 682605 - RNA, 19 nt, Homo sapiens
  misc_RNA (1)...(19): siRNA sense strand
uaaaaugugcggagaagga

SEQ ID NO: 682606 - RNA, 19 nt, Homo sapiens
  misc_RNA (1)...(19): siRNA sense strand
uuucaaaccccucgagaua

SEQ ID NO: 682607 - RNA, 19 nt, Homo sapiens
  misc_RNA (1)...(19): siRNA sense strand
uaaaaugugcggagaagga

SEQ ID NO: 682608 - RNA, 19 nt, Homo sapiens
  misc_RNA (1)...(19): siRNA sense strand
uuucaaaccccucgagaua

SEQ ID NO: 682609 - RNA, 19 nt, Homo sapiens
  misc_RNA (1)...(19): siRNA sense strand
uaaaaugugcggagaagga

SEQ ID NO: 682610 - RNA, 19 nt, Homo sapiens
  misc_RNA (1)...(19): siRNA sense strand
uuucaaaccccucgagaua

SEQ ID NO: 682611 - RNA, 19 nt, Homo sapiens
  misc_RNA (1)...(19): siRNA sense strand
uaaaaugugcggagaagga

SEQ ID NO: 682612 - RNA, 19 nt, Homo sapiens
  misc_RNA (1)...(19): siRNA sense strand
uuucaaaccccucgagaua

SEQ ID NO: 682613 - RNA, 19 nt, Homo sapiens
  misc_RNA (1)...(19): siRNA sense strand
uaaaaugugcggagaagga

SEQ ID NO: 682614 - RNA, 19 nt, Homo sapiens
  misc_RNA (1)...(19): siRNA sense strand
uuucaaaccccucgagaua

SEQ ID NO: 682615 - RNA, 19 nt, Homo sapiens
  misc_RNA (1)...(19): siRNA sense strand
uaaaaugugcggagaagga

SEQ ID NO: 682616 - RNA, 19 nt, Homo sapiens
  misc_RNA (1)...(19): siRNA sense strand
uuucaaaccccucgagaua

SEQ ID NO: 682617 - RNA, 19 nt, Homo sapiens
  misc_RNA (1)...(19): siRNA sense strand
uaaaaugugcggagaagga

SEQ ID NO: 682618 - RNA, 19 nt, Homo sapiens
  misc_RNA (1)...(19): siRNA sense strand
uuucaaaccccucgagaua

SEQ ID NO: 682619 - RNA, 19 nt, Homo sapiens
  misc_RNA (1)...(19): siRNA sense strand
uaaaaugugcggagaagga

SEQ ID NO: 682620 - RNA, 19 nt, Homo sapiens
  misc_RNA (1)...(19): siRNA sense strand
uuucaaaccccucgagaua

SEQ ID NO: 682621 - RNA, 19 nt, Homo sapiens
  misc_RNA (1)...(19): siRNA sense strand
uaaaaugugcggagaagga

SEQ ID NO: 682622 - RNA, 19 nt, Homo sapiens
  misc_RNA (1)...(19): siRNA sense strand
uuucaaaccccucgagaua

SEQ ID NO: 682623 - RNA, 19 nt, Homo sapiens
  misc_RNA (1)...(19): siRNA sense strand
uaaaaugugcggagaagga

SEQ ID NO: 682624 - RNA, 19 nt, Homo sapiens
  misc_RNA (1)...(19): siRNA sense strand
uuucaaaccccucgagaua

SEQ ID NO: 682625 - RNA, 19 nt, Homo sapiens
  misc_RNA (1)...(19): siRNA sense strand
uaaaaugugcggagaagga

SEQ ID NO: 682626 - RNA, 19 nt, Homo sapiens
  misc_RNA (1)...(19): siRNA sense strand
uuucaaaccccucgagaua

SEQ ID NO: 682627 - RNA, 19 nt, Homo sapiens
  misc_RNA (1)...(19): siRNA sense strand
ggaaagaaauacaaggaaa

SEQ ID NO: 682628 - RNA, 19 nt, Homo sapiens
  misc_RNA (1)...(19): siRNA sense strand
cgaccacucuccaguauuu

SEQ ID NO: 682629 - RNA, 19 nt, Homo sapiens
  misc_RNA (1)...(19): siRNA sense strand
gagauuuccuauucacuuu

SEQ ID NO: 682630 - RNA, 19 nt, Homo sapiens
  misc_RNA (1)...(19): siRNA sense strand
gagcucagguuaacacuca

SEQ ID NO: 682631 - RNA, 19 nt, Homo sapiens
  misc_RNA (1)...(19): siRNA sense strand
uaacacagcucaauaugac

SEQ ID NO: 682632 - RNA, 19 nt, Homo sapiens
  misc_RNA (1)...(19): siRNA sense strand
gagggcagcuccuuuguca

SEQ ID NO: 682633 - RNA, 19 nt, Homo sapiens
  misc_RNA (1)...(19): siRNA sense strand
gaauacaacaucacuauca

SEQ ID NO: 682634 - RNA, 19 nt, Homo sapiens
  misc_RNA (1)...(19): siRNA sense strand
ggacuacguuuccucugaa

SEQ ID NO: 682635 - RNA, 19 nt, Homo sapiens
  misc_RNA (1)...(19): siRNA sense strand
caggagaaauugaacuaaa

SEQ ID NO: 682636 - RNA, 19 nt, Homo sapiens
  misc_RNA (1)...(19): siRNA sense strand
ggagagaccacuagacaga

SEQ ID NO: 682637 - RNA, 19 nt, Homo sapiens
  misc_RNA (1)...(19): siRNA sense strand
ggacaacggccaccuguuc

SEQ ID NO: 682638 - RNA, 19 nt, Homo sapiens
  misc_RNA (1)...(19): siRNA sense strand
gaaauuggaccgugaggau

SEQ ID NO: 682639 - RNA, 19 nt, Homo sapiens
  misc_RNA (1)...(19): siRNA sense strand
gggacuacguuuccucuga

SEQ ID NO: 682640 - RNA, 19 nt, Homo sapiens
  misc_RNA (1)...(19): siRNA sense strand
ccacggagcucggucuguu

SEQ ID NO: 682641 - RNA, 19 nt, Homo sapiens
  misc_RNA (1)...(19): siRNA sense strand
ggagaccgcggauuuguug

SEQ ID NO: 682642 - RNA, 19 nt, Homo sapiens
  misc_RNA (1)...(19): siRNA sense strand
gcagugauggcaggaaaua

SEQ ID NO: 682643 - RNA, 19 nt, Homo sapiens
  misc_RNA (1)...(19): siRNA sense strand
ggagaaaaugggaaaauua

SEQ ID NO: 682644 - RNA, 19 nt, Homo sapiens
  misc_RNA (1)...(19): siRNA sense strand
gaaaauuaguugcuccauu

SEQ ID NO: 682645 - RNA, 19 nt, Homo sapiens
  misc_RNA (1)...(19): siRNA sense strand
gcuccuuugucaccaauuu

SEQ ID NO: 682646 - RNA, 19 nt, Homo sapiens
  misc_RNA (1)...(19): siRNA sense strand
acggagagauuuccuauuc

SEQ ID NO: 682647 - RNA, 19 nt, Homo sapiens
  misc_RNA (1)...(19): siRNA sense strand
ggaccaaugaguucaaguu

SEQ ID NO: 682648 - RNA, 19 nt, Homo sapiens
  misc_RNA (1)...(19): siRNA sense strand
aagagaugcuggaaccuuu

SEQ ID NO: 682649 - RNA, 19 nt, Homo sapiens
  misc_RNA (1)...(19): siRNA sense strand
cgucagcgcuacagacaga

SEQ ID NO: 682650 - RNA, 19 nt, Homo sapiens
  misc_RNA (1)...(19): siRNA sense strand
gaucuugauucaggagaaa

SEQ ID NO: 682651 - RNA, 19 nt, Homo sapiens
  misc_RNA (1)...(19): siRNA sense strand
gagcagccuuucuauagag

SEQ ID NO: 682652 - RNA, 19 nt, Homo sapiens
  misc_RNA (1)...(19): siRNA sense strand
gaaguuaccaugucugcau

SEQ ID NO: 682653 - RNA, 19 nt, Homo sapiens
  misc_RNA (1)...(19): siRNA sense strand
gcaccguucugauucaagu

SEQ ID NO: 682654 - RNA, 19 nt, Homo sapiens
  misc_RNA (1)...(19): siRNA sense strand
gaagcucauuugcagacaa

SEQ ID NO: 682655 - RNA, 19 nt, Homo sapiens
  misc_RNA (1)...(19): siRNA sense strand
gagaaagcagagcggaaua

SEQ ID NO: 682656 - RNA, 19 nt, Homo sapiens
  misc_RNA (1)...(19): siRNA sense strand
gacaggagaaauugaacua

SEQ ID NO: 682657 - RNA, 19 nt, Homo sapiens
  misc_RNA (1)...(19): siRNA sense strand
ucacaucccuggucuccau

SEQ ID NO: 682658 - RNA, 19 nt, Homo sapiens
  misc_RNA (1)...(19): siRNA sense strand
gaaauccgcggaaaacuuu

SEQ ID NO: 682659 - RNA, 19 nt, Homo sapiens
  misc_RNA (1)...(19): siRNA sense strand
ggcaaaaccuuuaagauca

SEQ ID NO: 682660 - RNA, 19 nt, Homo sapiens
  misc_RNA (1)...(19): siRNA sense strand
gauaacacagcucaauaug

SEQ ID NO: 682661 - RNA, 19 nt, Homo sapiens
  misc_RNA (1)...(19): siRNA sense strand
guuaccaugucugcauuua

SEQ ID NO: 682662 - RNA, 19 nt, Homo sapiens
  misc_RNA (1)...(19): siRNA sense strand
ggagucaacggagagauuu

SEQ ID NO: 682663 - RNA, 19 nt, Homo sapiens
  misc_RNA (1)...(19): siRNA sense strand
caacggagagauuuccuau

SEQ ID NO: 682664 - RNA, 19 nt, Homo sapiens
  misc_RNA (1)...(19): siRNA sense strand
ugagcagccuuucuauaga

SEQ ID NO: 682665 - RNA, 19 nt, Homo sapiens
  misc_RNA (1)...(19): siRNA sense strand
gagggaacaaacuacauuu

SEQ ID NO: 682666 - RNA, 19 nt, Homo sapiens
  misc_RNA (1)...(19): siRNA sense strand
gaaacugugguugcacuuu

SEQ ID NO: 682667 - RNA, 19 nt, Homo sapiens
  misc_RNA (1)...(19): siRNA sense strand
gaacgaccaugccccagaa

SEQ ID NO: 682668 - RNA, 19 nt, Homo sapiens
  misc_RNA (1)...(19): siRNA sense strand
ggagagauuuccuauucac

SEQ ID NO: 682669 - RNA, 19 nt, Homo sapiens
  misc_RNA (1)...(19): siRNA sense strand
aaacgaccacucuccagua

SEQ ID NO: 682670 - RNA, 19 nt, Homo sapiens
  misc_RNA (1)...(19): siRNA sense strand
ucaggucucuggacuacga

SEQ ID NO: 682671 - RNA, 19 nt, Homo sapiens
  misc_RNA (1)...(19): siRNA sense strand
guugcuaaaugagaaauug

SEQ ID NO: 682672 - RNA, 19 nt, Homo sapiens
  misc_RNA (1)...(19): siRNA sense strand
gcauuuaccagcccaauac

SEQ ID NO: 682673 - RNA, 19 nt, Homo sapiens
  misc_RNA (1)...(19): siRNA sense strand
gcaaaaccuuuaagaucaa

SEQ ID NO: 682674 - RNA, 19 nt, Homo sapiens
  misc_RNA (1)...(19): siRNA sense strand
gcaaguaauagacauaaac

SEQ ID NO: 682675 - RNA, 19 nt, Homo sapiens
  misc_RNA (1)...(19): siRNA sense strand
gcacugcucaggucuacau

SEQ ID NO: 682676 - RNA, 19 nt, Homo sapiens
  misc_RNA (1)...(19): siRNA sense strand
gggaaagaaauacaaggaa

SEQ ID NO: 682677 - RNA, 19 nt, Homo sapiens
  misc_RNA (1)...(19): siRNA sense strand
ugauaacacagcucaauau

SEQ ID NO: 682678 - RNA, 19 nt, Homo sapiens
  misc_RNA (1)...(19): siRNA sense strand
aaaauuaguugcuccauuc

SEQ ID NO: 682679 - RNA, 19 nt, Homo sapiens
  misc_RNA (1)...(19): siRNA sense strand
ggcggaaccuagaagcuau

SEQ ID NO: 682680 - RNA, 19 nt, Homo sapiens
  misc_RNA (1)...(19): siRNA sense strand
ccgcggauuuguugcuaaa

SEQ ID NO: 682681 - RNA, 19 nt, Homo sapiens
  misc_RNA (1)...(19): siRNA sense strand
ucccagagcuaccaguaug

SEQ ID NO: 682682 - RNA, 19 nt, Homo sapiens
  misc_RNA (1)...(19): siRNA sense strand
caguauuucuggacaaaca

SEQ ID NO: 682683 - RNA, 19 nt, Homo sapiens
  misc_RNA (1)...(19): siRNA sense strand
gugcuacguuuccaagugu

SEQ ID NO: 682684 - RNA, 19 nt, Homo sapiens
  misc_RNA (1)...(19): siRNA sense strand
gaaagcagagcggaauaca

SEQ ID NO: 682685 - RNA, 19 nt, Homo sapiens
  misc_RNA (1)...(19): siRNA sense strand
ucaccaauuuagcaaagga

SEQ ID NO: 682686 - RNA, 19 nt, Homo sapiens
  misc_RNA (1)...(19): siRNA sense strand
ugucuucgcucuuccucuu

SEQ ID NO: 682687 - RNA, 19 nt, Homo sapiens
  misc_RNA (1)...(19): siRNA sense strand
cggaauacaacaucacuau

SEQ ID NO: 682688 - RNA, 19 nt, Homo sapiens
  misc_RNA (1)...(19): siRNA sense strand
ugauucaagugauagaugu

SEQ ID NO: 682689 - RNA, 19 nt, Homo sapiens
  misc_RNA (1)...(19): siRNA sense strand
gcuggaaccuuuucuggaa

SEQ ID NO: 682690 - RNA, 19 nt, Homo sapiens
  misc_RNA (1)...(19): siRNA sense strand
gauguaggccaaaacaaua

SEQ ID NO: 682691 - RNA, 19 nt, Homo sapiens
  misc_RNA (1)...(19): siRNA sense strand
caaauguuggugaaaguau

SEQ ID NO: 682692 - RNA, 19 nt, Homo sapiens
  misc_RNA (1)...(19): siRNA sense strand
gaccgcggauuuguugcua

SEQ ID NO: 682693 - RNA, 19 nt, Homo sapiens
  misc_RNA (1)...(19): siRNA sense strand
agagagucccuucgaguuu

SEQ ID NO: 682694 - RNA, 19 nt, Homo sapiens
  misc_RNA (1)...(19): siRNA sense strand
caauaacuuuggguucaau

SEQ ID NO: 682695 - RNA, 19 nt, Homo sapiens
  misc_RNA (1)...(19): siRNA sense strand
ccaaugaguucaaguuccu

SEQ ID NO: 682696 - RNA, 19 nt, Homo sapiens
  misc_RNA (1)...(19): siRNA sense strand
gcucccgccuucacccaaa

SEQ ID NO: 682697 - RNA, 19 nt, Homo sapiens
  misc_RNA (1)...(19): siRNA sense strand
gagauuggcaaaaccuuua

SEQ ID NO: 682698 - RNA, 19 nt, Homo sapiens
  misc_RNA (1)...(19): siRNA sense strand
cuacguuuccucugaagaa

SEQ ID NO: 682699 - RNA, 19 nt, Homo sapiens
  misc_RNA (1)...(19): siRNA sense strand
agagaccacuagacagaga

SEQ ID NO: 682700 - RNA, 19 nt, Homo sapiens
  misc_RNA (1)...(19): siRNA sense strand
gcagcuccuuugucaccaa

SEQ ID NO: 682701 - RNA, 19 nt, Homo sapiens
  misc_RNA (1)...(19): siRNA sense strand
gagagucccuucgaguuuu

SEQ ID NO: 682702 - RNA, 19 nt, Homo sapiens
  misc_RNA (1)...(19): siRNA sense strand
ggaauacaacaucacuauc

SEQ ID NO: 682703 - RNA, 19 nt, Homo sapiens
  misc_RNA (1)...(19): siRNA sense strand
caagagaugcuggaaccuu

SEQ ID NO: 682704 - RNA, 19 nt, Homo sapiens
  misc_RNA (1)...(19): siRNA sense strand
agacauaaacgaccacucu

SEQ ID NO: 682705 - RNA, 19 nt, Homo sapiens
  misc_RNA (1)...(19): siRNA sense strand
uaacggagagaccacuaga

SEQ ID NO: 682706 - RNA, 19 nt, Homo sapiens
  misc_RNA (1)...(19): siRNA sense strand
ccugagaacgcgccugaaa

SEQ ID NO: 682707 - RNA, 19 nt, Homo sapiens
  misc_RNA (1)...(19): siRNA sense strand
ucaguccuaugaagucaau

SEQ ID NO: 682708 - RNA, 19 nt, Homo sapiens
  misc_RNA (1)...(19): siRNA sense strand
gaccaaugaguucaaguuc

SEQ ID NO: 682709 - RNA, 19 nt, Homo sapiens
  misc_RNA (1)...(19): siRNA sense strand
uagagagucccuucgaguu

SEQ ID NO: 682710 - RNA, 19 nt, Homo sapiens
  misc_RNA (1)...(19): siRNA sense strand
cugauaacacagcucaaua

SEQ ID NO: 682711 - RNA, 19 nt, Homo sapiens
  misc_RNA (1)...(19): siRNA sense strand
gcagagcggaauacaacau

SEQ ID NO: 682712 - RNA, 19 nt, Homo sapiens
  misc_RNA (1)...(19): siRNA sense strand
gcugcaaguaauagacaua

SEQ ID NO: 682713 - RNA, 19 nt, Homo sapiens
  misc_RNA (1)...(19): siRNA sense strand
agagggaacaaacuacauu

SEQ ID NO: 682714 - RNA, 19 nt, Homo sapiens
  misc_RNA (1)...(19): siRNA sense strand
aaacugugguugcacuuuu

SEQ ID NO: 682715 - RNA, 19 nt, Homo sapiens
  misc_RNA (1)...(19): siRNA sense strand
cggagagauuuccuauuca

SEQ ID NO: 682716 - RNA, 19 nt, Homo sapiens
  misc_RNA (1)...(19): siRNA sense strand
uccuggaugucaacgauaa

SEQ ID NO: 682717 - RNA, 19 nt, Homo sapiens
  misc_RNA (1)...(19): siRNA sense strand
gagcugcaaguaauagaca

SEQ ID NO: 682718 - RNA, 19 nt, Homo sapiens
  misc_RNA (1)...(19): siRNA sense strand
aacuuuggguucaauauuc

SEQ ID NO: 682719 - RNA, 19 nt, Homo sapiens
  misc_RNA (1)...(19): siRNA sense strand
cagggcaucuuguggacau

SEQ ID NO: 682720 - RNA, 19 nt, Homo sapiens
  misc_RNA (1)...(19): siRNA sense strand
ucacuaucacugucacuga

SEQ ID NO: 682721 - RNA, 19 nt, Homo sapiens
  misc_RNA (1)...(19): siRNA sense strand
uguuucagaucuugauuca

SEQ ID NO: 682722 - RNA, 19 nt, Homo sapiens
  misc_RNA (1)...(19): siRNA sense strand
acgcagugauggcaggaaa

SEQ ID NO: 682723 - RNA, 19 nt, Homo sapiens
  misc_RNA (1)...(19): siRNA sense strand
agaacgcgccugaaacugu

SEQ ID NO: 682724 - RNA, 19 nt, Homo sapiens
  misc_RNA (1)...(19): siRNA sense strand
gaccaugccccagaaguua

SEQ ID NO: 682725 - RNA, 19 nt, Homo sapiens
  misc_RNA (1)...(19): siRNA sense strand
ggaccgagaggaagaagcu

SEQ ID NO: 682726 - RNA, 19 nt, Homo sapiens
  misc_RNA (1)...(19): siRNA sense strand
uggguucaauauucaguga

SEQ ID NO: 682727 - RNA, 19 nt, Homo sapiens
  misc_RNA (1)...(19): siRNA sense strand
cgaaauagcuuuggacuua

SEQ ID NO: 682728 - RNA, 19 nt, Homo sapiens
  misc_RNA (1)...(19): siRNA sense strand
gaacucagauuaacacuca

SEQ ID NO: 682729 - RNA, 19 nt, Homo sapiens
  misc_RNA (1)...(19): siRNA sense strand
ggagagugcucaagauuug

SEQ ID NO: 682730 - RNA, 19 nt, Homo sapiens
  misc_RNA (1)...(19): siRNA sense strand
ggacaaaugaguucaaauu

SEQ ID NO: 682731 - RNA, 19 nt, Homo sapiens
  misc_RNA (1)...(19): siRNA sense strand
aaacagaaauuggcucuuu

SEQ ID NO: 682732 - RNA, 19 nt, Homo sapiens
  misc_RNA (1)...(19): siRNA sense strand
gguccuagauagagcuuua

SEQ ID NO: 682733 - RNA, 19 nt, Homo sapiens
  misc_RNA (1)...(19): siRNA sense strand
gaaauagcuuuggacuuaa

SEQ ID NO: 682734 - RNA, 19 nt, Homo sapiens
  misc_RNA (1)...(19): siRNA sense strand
ggagcuaccuuucuaaugg

SEQ ID NO: 682735 - RNA, 19 nt, Homo sapiens
  misc_RNA (1)...(19): siRNA sense strand
caaagagaauuccagagaa

SEQ ID NO: 682736 - RNA, 19 nt, Homo sapiens
  misc_RNA (1)...(19): siRNA sense strand
guaauacaguccuacacua

SEQ ID NO: 682737 - RNA, 19 nt, Homo sapiens
  misc_RNA (1)...(19): siRNA sense strand
ggacaauggccaccuguuu

SEQ ID NO: 682738 - RNA, 19 nt, Homo sapiens
  misc_RNA (1)...(19): siRNA sense strand
gguagugucugaugauaau

SEQ ID NO: 682739 - RNA, 19 nt, Homo sapiens
  misc_RNA (1)...(19): siRNA sense strand
ccaagacucuggagacaau

SEQ ID NO: 682740 - RNA, 19 nt, Homo sapiens
  misc_RNA (1)...(19): siRNA sense strand
caacuuugguucucaucaa

SEQ ID NO: 682741 - RNA, 19 nt, Homo sapiens
  misc_RNA (1)...(19): siRNA sense strand
uaaccgugcugcucucuga

SEQ ID NO: 682742 - RNA, 19 nt, Homo sapiens
  misc_RNA (1)...(19): siRNA sense strand
auacaguccuacacuauaa

SEQ ID NO: 682743 - RNA, 19 nt, Homo sapiens
  misc_RNA (1)...(19): siRNA sense strand
gaggaugauuugcucuauu

SEQ ID NO: 682744 - RNA, 19 nt, Homo sapiens
  misc_RNA (1)...(19): siRNA sense strand
gacaaugggaggaugauuu

SEQ ID NO: 682745 - RNA, 19 nt, Homo sapiens
  misc_RNA (1)...(19): siRNA sense strand
gcuccuaaaugagaaacua

SEQ ID NO: 682746 - RNA, 19 nt, Homo sapiens
  misc_RNA (1)...(19): siRNA sense strand
aaaugcacccuucuaguua

SEQ ID NO: 682747 - RNA, 19 nt, Homo sapiens
  misc_RNA (1)...(19): siRNA sense strand
gcaacagucuccaaaacua

SEQ ID NO: 682748 - RNA, 19 nt, Homo sapiens
  misc_RNA (1)...(19): siRNA sense strand
ggaagcaacagucuccaaa

SEQ ID NO: 682749 - RNA, 19 nt, Homo sapiens
  misc_RNA (1)...(19): siRNA sense strand
caucagaagauauucguaa

SEQ ID NO: 682750 - RNA, 19 nt, Homo sapiens
  misc_RNA (1)...(19): siRNA sense strand
ggaaguuaauuugagauca

SEQ ID NO: 682751 - RNA, 19 nt, Homo sapiens
  misc_RNA (1)...(19): siRNA sense strand
cuagauagagcuuuagauu

SEQ ID NO: 682752 - RNA, 19 nt, Homo sapiens
  misc_RNA (1)...(19): siRNA sense strand
gaaaaccgaguacaacaua

SEQ ID NO: 682753 - RNA, 19 nt, Homo sapiens
  misc_RNA (1)...(19): siRNA sense strand
ggaggaugauuugcucuau

SEQ ID NO: 682754 - RNA, 19 nt, Homo sapiens
  misc_RNA (1)...(19): siRNA sense strand
guagugacagaaagauaua

SEQ ID NO: 682755 - RNA, 19 nt, Homo sapiens
  misc_RNA (1)...(19): siRNA sense strand
gcuuuggacuuaacauuca

SEQ ID NO: 682756 - RNA, 19 nt, Homo sapiens
  misc_RNA (1)...(19): siRNA sense strand
gaaguuaauuugagaucac

SEQ ID NO: 682757 - RNA, 19 nt, Homo sapiens
  misc_RNA (1)...(19): siRNA sense strand
cuacauuucuagacaagga

SEQ ID NO: 682758 - RNA, 19 nt, Homo sapiens
  misc_RNA (1)...(19): siRNA sense strand
ucaggucgcuggacuacga

SEQ ID NO: 682759 - RNA, 19 nt, Homo sapiens
  misc_RNA (1)...(19): siRNA sense strand
guacugaaucugcacacua

SEQ ID NO: 682760 - RNA, 19 nt, Homo sapiens
  misc_RNA (1)...(19): siRNA sense strand
gauuugcucuauucaagau

SEQ ID NO: 682761 - RNA, 19 nt, Homo sapiens
  misc_RNA (1)...(19): siRNA sense strand
acaaagagaauuccagaga

SEQ ID NO: 682762 - RNA, 19 nt, Homo sapiens
  misc_RNA (1)...(19): siRNA sense strand
ggacaacuuugguucucau

SEQ ID NO: 682763 - RNA, 19 nt, Homo sapiens
  misc_RNA (1)...(19): siRNA sense strand
gagcuaccuuucuaaugga

SEQ ID NO: 682764 - RNA, 19 nt, Homo sapiens
  misc_RNA (1)...(19): siRNA sense strand
gaucaccccuggauuuuga

SEQ ID NO: 682765 - RNA, 19 nt, Homo sapiens
  misc_RNA (1)...(19): siRNA sense strand
gacaauggccaccuguuug

SEQ ID NO: 682766 - RNA, 19 nt, Homo sapiens
  misc_RNA (1)...(19): siRNA sense strand
gauagagcuuuagauuaug

SEQ ID NO: 682767 - RNA, 19 nt, Homo sapiens
  misc_RNA (1)...(19): siRNA sense strand
aaaccgaccuucaagaacu

SEQ ID NO: 682768 - RNA, 19 nt, Homo sapiens
  misc_RNA (1)...(19): siRNA sense strand
caccagaagugaccauauc

SEQ ID NO: 682769 - RNA, 19 nt, Homo sapiens
  misc_RNA (1)...(19): siRNA sense strand
cuccaaaacuacacaauua

SEQ ID NO: 682770 - RNA, 19 nt, Homo sapiens
  misc_RNA (1)...(19): siRNA sense strand
gaacuuucgaaauagcuuu

SEQ ID NO: 682771 - RNA, 19 nt, Homo sapiens
  misc_RNA (1)...(19): siRNA sense strand
gcagaggaaacagaaauug

SEQ ID NO: 682772 - RNA, 19 nt, Homo sapiens
  misc_RNA (1)...(19): siRNA sense strand
gaccaagacucuggagaca

SEQ ID NO: 682773 - RNA, 19 nt, Homo sapiens
  misc_RNA (1)...(19): siRNA sense strand
gaacaggaagcugaacuca

SEQ ID NO: 682774 - RNA, 19 nt, Homo sapiens
  misc_RNA (1)...(19): siRNA sense strand
gaaguaauacaguccuaca

SEQ ID NO: 682775 - RNA, 19 nt, Homo sapiens
  misc_RNA (1)...(19): siRNA sense strand
cgacaguagugacagaaag

SEQ ID NO: 682776 - RNA, 19 nt, Homo sapiens
  misc_RNA (1)...(19): siRNA sense strand
cuagacaaggaaauacuua

SEQ ID NO: 682777 - RNA, 19 nt, Homo sapiens
  misc_RNA (1)...(19): siRNA sense strand
uacugaaucugcacacuau

SEQ ID NO: 682778 - RNA, 19 nt, Homo sapiens
  misc_RNA (1)...(19): siRNA sense strand
cgacaacccaccagaagug

SEQ ID NO: 682779 - RNA, 19 nt, Homo sapiens
  misc_RNA (1)...(19): siRNA sense strand
aaggcaaguucuaauauuc

SEQ ID NO: 682780 - RNA, 19 nt, Homo sapiens
  misc_RNA (1)...(19): siRNA sense strand
ggagacaaugggaggauga

SEQ ID NO: 682781 - RNA, 19 nt, Homo sapiens
  misc_RNA (1)...(19): siRNA sense strand
uaauacaguccuacacuau

SEQ ID NO: 682782 - RNA, 19 nt, Homo sapiens
  misc_RNA (1)...(19): siRNA sense strand
uguuggagcuaccuuucua

SEQ ID NO: 682783 - RNA, 19 nt, Homo sapiens
  misc_RNA (1)...(19): siRNA sense strand
gcugcucucugacgucaau

SEQ ID NO: 682784 - RNA, 19 nt, Homo sapiens
  misc_RNA (1)...(19): siRNA sense strand
gagagagccaagccgagua

SEQ ID NO: 682785 - RNA, 19 nt, Homo sapiens
  misc_RNA (1)...(19): siRNA sense strand
gcacccuucuaguuaaagu

SEQ ID NO: 682786 - RNA, 19 nt, Homo sapiens
  misc_RNA (1)...(19): siRNA sense strand
aaugcacccuucuaguuaa

SEQ ID NO: 682787 - RNA, 19 nt, Homo sapiens
  misc_RNA (1)...(19): siRNA sense strand
uaaauauucaggcaacaga

SEQ ID NO: 682788 - RNA, 19 nt, Homo sapiens
  misc_RNA (1)...(19): siRNA sense strand
aggaugauuugcucuauuc

SEQ ID NO: 682789 - RNA, 19 nt, Homo sapiens
  misc_RNA (1)...(19): siRNA sense strand
gagguuccgggacaaauga

SEQ ID NO: 682790 - RNA, 19 nt, Homo sapiens
  misc_RNA (1)...(19): siRNA sense strand
gaguacaacaucacgauca

SEQ ID NO: 682791 - RNA, 19 nt, Homo sapiens
  misc_RNA (1)...(19): siRNA sense strand
uaauggagagugcucaaga

SEQ ID NO: 682792 - RNA, 19 nt, Homo sapiens
  misc_RNA (1)...(19): siRNA sense strand
ucaugacacugguaggaau

SEQ ID NO: 682793 - RNA, 19 nt, Homo sapiens
  misc_RNA (1)...(19): siRNA sense strand
ggagguuccgggacaaaug

SEQ ID NO: 682794 - RNA, 19 nt, Homo sapiens
  misc_RNA (1)...(19): siRNA sense strand
guauuugcaccuugauuug

SEQ ID NO: 682795 - RNA, 19 nt, Homo sapiens
  misc_RNA (1)...(19): siRNA sense strand
ccaauucucacuucuacau

SEQ ID NO: 682796 - RNA, 19 nt, Homo sapiens
  misc_RNA (1)...(19): siRNA sense strand
cgggacaaaugaguucaaa

SEQ ID NO: 682797 - RNA, 19 nt, Homo sapiens
  misc_RNA (1)...(19): siRNA sense strand
ugucgucgcucuuccucuu

SEQ ID NO: 682798 - RNA, 19 nt, Homo sapiens
  misc_RNA (1)...(19): siRNA sense strand
gaucaccgucacagacuug

SEQ ID NO: 682799 - RNA, 19 nt, Homo sapiens
  misc_RNA (1)...(19): siRNA sense strand
gaaaccgaccuucaagaac

SEQ ID NO: 682800 - RNA, 19 nt, Homo sapiens
  misc_RNA (1)...(19): siRNA sense strand
acaaugggaggaugauuug

SEQ ID NO: 682801 - RNA, 19 nt, Homo sapiens
  misc_RNA (1)...(19): siRNA sense strand
aauacaguccuacacuaua

SEQ ID NO: 682802 - RNA, 19 nt, Homo sapiens
  misc_RNA (1)...(19): siRNA sense strand
gacaguagugacagaaaga

SEQ ID NO: 682803 - RNA, 19 nt, Homo sapiens
  misc_RNA (1)...(19): siRNA sense strand
ucaagguguuggacaucaa

SEQ ID NO: 682804 - RNA, 19 nt, Homo sapiens
  misc_RNA (1)...(19): siRNA sense strand
ccaacgcccaggucaacua

SEQ ID NO: 682805 - RNA, 19 nt, Homo sapiens
  misc_RNA (1)...(19): siRNA sense strand
cggguagugucugaugaua

SEQ ID NO: 682806 - RNA, 19 nt, Homo sapiens
  misc_RNA (1)...(19): siRNA sense strand
aaacgacaacccaccagaa

SEQ ID NO: 682807 - RNA, 19 nt, Homo sapiens
  misc_RNA (1)...(19): siRNA sense strand
ggaucuggaugcaggaaac

SEQ ID NO: 682808 - RNA, 19 nt, Homo sapiens
  misc_RNA (1)...(19): siRNA sense strand
cuacaggaguucgaguuuc

SEQ ID NO: 682809 - RNA, 19 nt, Homo sapiens
  misc_RNA (1)...(19): siRNA sense strand
gaugauuugcucuauucaa

SEQ ID NO: 682810 - RNA, 19 nt, Homo sapiens
  misc_RNA (1)...(19): siRNA sense strand
gggaggaugauuugcucua

SEQ ID NO: 682811 - RNA, 19 nt, Homo sapiens
  misc_RNA (1)...(19): siRNA sense strand
aaaaguauuugcaccuuga

SEQ ID NO: 682812 - RNA, 19 nt, Homo sapiens
  misc_RNA (1)...(19): siRNA sense strand
ccaugcaucagaagauauu

SEQ ID NO: 682813 - RNA, 19 nt, Homo sapiens
  misc_RNA (1)...(19): siRNA sense strand
uaucagaagguaccacugu

SEQ ID NO: 682814 - RNA, 19 nt, Homo sapiens
  misc_RNA (1)...(19): siRNA sense strand
caugacacugguaggaaua

SEQ ID NO: 682815 - RNA, 19 nt, Homo sapiens
  misc_RNA (1)...(19): siRNA sense strand
gcaccaacgcccaggucaa

SEQ ID NO: 682816 - RNA, 19 nt, Homo sapiens
  misc_RNA (1)...(19): siRNA sense strand
gggacaacuuugguucuca

SEQ ID NO: 682817 - RNA, 19 nt, Homo sapiens
  misc_RNA (1)...(19): siRNA sense strand
acugggaauuugcuccuaa

SEQ ID NO: 682818 - RNA, 19 nt, Homo sapiens
  misc_RNA (1)...(19): siRNA sense strand
cgucagcgccacagacaga

SEQ ID NO: 682819 - RNA, 19 nt, Homo sapiens
  misc_RNA (1)...(19): siRNA sense strand
ggcagaggaaacagaaauu

SEQ ID NO: 682820 - RNA, 19 nt, Homo sapiens
  misc_RNA (1)...(19): siRNA sense strand
ggguagugucugaugauaa

SEQ ID NO: 682821 - RNA, 19 nt, Homo sapiens
  misc_RNA (1)...(19): siRNA sense strand
gcuccuggauugccaccau

SEQ ID NO: 682822 - RNA, 19 nt, Homo sapiens
  misc_RNA (1)...(19): siRNA sense strand
ucagaagguaccacuguug

SEQ ID NO: 682823 - RNA, 19 nt, Homo sapiens
  misc_RNA (1)...(19): siRNA sense strand
aaauuucugaagccgauua

SEQ ID NO: 682824 - RNA, 19 nt, Homo sapiens
  misc_RNA (1)...(19): siRNA sense strand
ccagagaaugccucagaga

SEQ ID NO: 682825 - RNA, 19 nt, Homo sapiens
  misc_RNA (1)...(19): siRNA sense strand
caucucagcuaaggaucug

SEQ ID NO: 682826 - RNA, 19 nt, Homo sapiens
  misc_RNA (1)...(19): siRNA sense strand
uggagagugcucaagauuu

SEQ ID NO: 682827 - RNA, 19 nt, Homo sapiens
  misc_RNA (1)...(19): siRNA sense strand
gagcucagauuaaccuuga

SEQ ID NO: 682828 - RNA, 19 nt, Homo sapiens
  misc_RNA (1)...(19): siRNA sense strand
ggaaguauuucgagcugaa

SEQ ID NO: 682829 - RNA, 19 nt, Homo sapiens
  misc_RNA (1)...(19): siRNA sense strand
ggaacuaaguauuucauca

SEQ ID NO: 682830 - RNA, 19 nt, Homo sapiens
  misc_RNA (1)...(19): siRNA sense strand
ugacagacauaaacgauca

SEQ ID NO: 682831 - RNA, 19 nt, Homo sapiens
  misc_RNA (1)...(19): siRNA sense strand
caaauggagagauaucaua

SEQ ID NO: 682832 - RNA, 19 nt, Homo sapiens
  misc_RNA (1)...(19): siRNA sense strand
aaagagaaaugacccugaa

SEQ ID NO: 682833 - RNA, 19 nt, Homo sapiens
  misc_RNA (1)...(19): siRNA sense strand
gaaguggcccuguuuagga

SEQ ID NO: 682834 - RNA, 19 nt, Homo sapiens
  misc_RNA (1)...(19): siRNA sense strand
ggacaacggccaccuguuc

SEQ ID NO: 682835 - RNA, 19 nt, Homo sapiens
  misc_RNA (1)...(19): siRNA sense strand
gcucugaaaguaaugauuu

SEQ ID NO: 682836 - RNA, 19 nt, Homo sapiens
  misc_RNA (1)...(19): siRNA sense strand
uauaaugcauuuccaagug

SEQ ID NO: 682837 - RNA, 19 nt, Homo sapiens
  misc_RNA (1)...(19): siRNA sense strand
ggcaguugauauuaaauga

SEQ ID NO: 682838 - RNA, 19 nt, Homo sapiens
  misc_RNA (1)...(19): siRNA sense strand
gggaggcucugaaaguaau

SEQ ID NO: 682839 - RNA, 19 nt, Homo sapiens
  misc_RNA (1)...(19): siRNA sense strand
gauaucauacucccuuuau

SEQ ID NO: 682840 - RNA, 19 nt, Homo sapiens
  misc_RNA (1)...(19): siRNA sense strand
gcaggccgagcucagauua

SEQ ID NO: 682841 - RNA, 19 nt, Homo sapiens
  misc_RNA (1)...(19): siRNA sense strand
ggacuguguuuccucugaa

SEQ ID NO: 682842 - RNA, 19 nt, Homo sapiens
  misc_RNA (1)...(19): siRNA sense strand
gagauaucauacucccuuu

SEQ ID NO: 682843 - RNA, 19 nt, Homo sapiens
  misc_RNA (1)...(19): siRNA sense strand
ugggacaaauggagagaua

SEQ ID NO: 682844 - RNA, 19 nt, Homo sapiens
  misc_RNA (1)...(19): siRNA sense strand
ggucucugcuagggauuua

SEQ ID NO: 682845 - RNA, 19 nt, Homo sapiens
  misc_RNA (1)...(19): siRNA sense strand
caauauuucucccaauucu

SEQ ID NO: 682846 - RNA, 19 nt, Homo sapiens
  misc_RNA (1)...(19): siRNA sense strand
agagagagguucuuuugua

SEQ ID NO: 682847 - RNA, 19 nt, Homo sapiens
  misc_RNA (1)...(19): siRNA sense strand
ucacuuaccagcccuauuc

SEQ ID NO: 682848 - RNA, 19 nt, Homo sapiens
  misc_RNA (1)...(19): siRNA sense strand
gggacuguguuuccucuga

SEQ ID NO: 682849 - RNA, 19 nt, Homo sapiens
  misc_RNA (1)...(19): siRNA sense strand
gggcagcaauaauguucaa

SEQ ID NO: 682850 - RNA, 19 nt, Homo sapiens
  misc_RNA (1)...(19): siRNA sense strand
ggacaaauggagagauauc

SEQ ID NO: 682851 - RNA, 19 nt, Homo sapiens
  misc_RNA (1)...(19): siRNA sense strand
aaacagagagagguucuuu

SEQ ID NO: 682852 - RNA, 19 nt, Homo sapiens
  misc_RNA (1)...(19): siRNA sense strand
caaccuggccaaugaccua

SEQ ID NO: 682853 - RNA, 19 nt, Homo sapiens
  misc_RNA (1)...(19): siRNA sense strand
guuaaggugcuggauguua

SEQ ID NO: 682854 - RNA, 19 nt, Homo sapiens
  misc_RNA (1)...(19): siRNA sense strand
cgaucauucuccugaguuu

SEQ ID NO: 682855 - RNA, 19 nt, Homo sapiens
  misc_RNA (1)...(19): siRNA sense strand
ggagauagacaaaccuuuu

SEQ ID NO: 682856 - RNA, 19 nt, Homo sapiens
  misc_RNA (1)...(19): siRNA sense strand
ggacgugggcagcaauaau

SEQ ID NO: 682857 - RNA, 19 nt, Homo sapiens
  misc_RNA (1)...(19): siRNA sense strand
ccaauucucauuuccaugu

SEQ ID NO: 682858 - RNA, 19 nt, Homo sapiens
  misc_RNA (1)...(19): siRNA sense strand
ucuacaggcugguaacaga

SEQ ID NO: 682859 - RNA, 19 nt, Homo sapiens
  misc_RNA (1)...(19): siRNA sense strand
gcagaccgggcaguugaua

SEQ ID NO: 682860 - RNA, 19 nt, Homo sapiens
  misc_RNA (1)...(19): siRNA sense strand
ccagagaacagcccaguag

SEQ ID NO: 682861 - RNA, 19 nt, Homo sapiens
  misc_RNA (1)...(19): siRNA sense strand
cuacugagcccuguauaau

SEQ ID NO: 682862 - RNA, 19 nt, Homo sapiens
  misc_RNA (1)...(19): siRNA sense strand
gaccgggcaguugauauua

SEQ ID NO: 682863 - RNA, 19 nt, Homo sapiens
  misc_RNA (1)...(19): siRNA sense strand
ccgggcaguugauauuaaa

SEQ ID NO: 682864 - RNA, 19 nt, Homo sapiens
  misc_RNA (1)...(19): siRNA sense strand
ccgacucgcuuaccgucua

SEQ ID NO: 682865 - RNA, 19 nt, Homo sapiens
  misc_RNA (1)...(19): siRNA sense strand
gaacuaaguauuucaucac

SEQ ID NO: 682866 - RNA, 19 nt, Homo sapiens
  misc_RNA (1)...(19): siRNA sense strand
agacauaaacgaucauucu

SEQ ID NO: 682867 - RNA, 19 nt, Homo sapiens
  misc_RNA (1)...(19): siRNA sense strand
gcuaaaaccuucuguugag

SEQ ID NO: 682868 - RNA, 19 nt, Homo sapiens
  misc_RNA (1)...(19): siRNA sense strand
guggcccuguuuaggauua

SEQ ID NO: 682869 - RNA, 19 nt, Homo sapiens
  misc_RNA (1)...(19): siRNA sense strand
ggagcgcuuucccgaacaa

SEQ ID NO: 682870 - RNA, 19 nt, Homo sapiens
  misc_RNA (1)...(19): siRNA sense strand
gacgugggcagcaauaaug

SEQ ID NO: 682871 - RNA, 19 nt, Homo sapiens
  misc_RNA (1)...(19): siRNA sense strand
caaaggcaaguccugauuc

SEQ ID NO: 682872 - RNA, 19 nt, Homo sapiens
  misc_RNA (1)...(19): siRNA sense strand
acgggaggcucugaaagua

SEQ ID NO: 682873 - RNA, 19 nt, Homo sapiens
  misc_RNA (1)...(19): siRNA sense strand
ugucuucgcucuuccucuu

SEQ ID NO: 682874 - RNA, 19 nt, Homo sapiens
  misc_RNA (1)...(19): siRNA sense strand
caggagaaauucgacuaau

SEQ ID NO: 682875 - RNA, 19 nt, Homo sapiens
  misc_RNA (1)...(19): siRNA sense strand
cauacucccuuuauuacag

SEQ ID NO: 682876 - RNA, 19 nt, Homo sapiens
  misc_RNA (1)...(19): siRNA sense strand
ugaagccuauauucccaaa

SEQ ID NO: 682877 - RNA, 19 nt, Homo sapiens
  misc_RNA (1)...(19): siRNA sense strand
gaguacaacaucaccauca

SEQ ID NO: 682878 - RNA, 19 nt, Homo sapiens
  misc_RNA (1)...(19): siRNA sense strand
gagcuaagcagccuuucag

SEQ ID NO: 682879 - RNA, 19 nt, Homo sapiens
  misc_RNA (1)...(19): siRNA sense strand
gaaaugacccugaaaaucc

SEQ ID NO: 682880 - RNA, 19 nt, Homo sapiens
  misc_RNA (1)...(19): siRNA sense strand
ggugcuggauguuaacgau

SEQ ID NO: 682881 - RNA, 19 nt, Homo sapiens
  misc_RNA (1)...(19): siRNA sense strand
ccugcaggcuuucgaguuc

SEQ ID NO: 682882 - RNA, 19 nt, Homo sapiens
  misc_RNA (1)...(19): siRNA sense strand
acgaggcccugcaggcuuu

SEQ ID NO: 682883 - RNA, 19 nt, Homo sapiens
  misc_RNA (1)...(19): siRNA sense strand
gaggaaacagagagagguu

SEQ ID NO: 682884 - RNA, 19 nt, Homo sapiens
  misc_RNA (1)...(19): siRNA sense strand
gggcaguugauauuaaaug

SEQ ID NO: 682885 - RNA, 19 nt, Homo sapiens
  misc_RNA (1)...(19): siRNA sense strand
ccaggacucuaggaggaaa

SEQ ID NO: 682886 - RNA, 19 nt, Homo sapiens
  misc_RNA (1)...(19): siRNA sense strand
gacgggaggcucugaaagu

SEQ ID NO: 682887 - RNA, 19 nt, Homo sapiens
  misc_RNA (1)...(19): siRNA sense strand
aaaggcaaguccugauucu

SEQ ID NO: 682888 - RNA, 19 nt, Homo sapiens
  misc_RNA (1)...(19): siRNA sense strand
gaccagagccgaguacaac

SEQ ID NO: 682889 - RNA, 19 nt, Homo sapiens
  misc_RNA (1)...(19): siRNA sense strand
ugcuggauguuaacgauaa

SEQ ID NO: 682890 - RNA, 19 nt, Homo sapiens
  misc_RNA (1)...(19): siRNA sense strand
ucaggagaaauucgacuaa

SEQ ID NO: 682891 - RNA, 19 nt, Homo sapiens
  misc_RNA (1)...(19): siRNA sense strand
aagcagccuuucaggagaa

SEQ ID NO: 682892 - RNA, 19 nt, Homo sapiens
  misc_RNA (1)...(19): siRNA sense strand
uaaugcauuuccaaguguu

SEQ ID NO: 682893 - RNA, 19 nt, Homo sapiens
  misc_RNA (1)...(19): siRNA sense strand
gaauuucuacaggcuggua

SEQ ID NO: 682894 - RNA, 19 nt, Homo sapiens
  misc_RNA (1)...(19): siRNA sense strand
gcucaauucaggaugaugu

SEQ ID NO: 682895 - RNA, 19 nt, Homo sapiens
  misc_RNA (1)...(19): siRNA sense strand
ggaaacagagagagguucu

SEQ ID NO: 682896 - RNA, 19 nt, Homo sapiens
  misc_RNA (1)...(19): siRNA sense strand
acaaaggcaaguccugauu

SEQ ID NO: 682897 - RNA, 19 nt, Homo sapiens
  misc_RNA (1)...(19): siRNA sense strand
caauucucauuuccauguu

SEQ ID NO: 682898 - RNA, 19 nt, Homo sapiens
  misc_RNA (1)...(19): siRNA sense strand
auuucgagcugaacuacua

SEQ ID NO: 682899 - RNA, 19 nt, Homo sapiens
  misc_RNA (1)...(19): siRNA sense strand
cuacaauauuucucccaau

SEQ ID NO: 682900 - RNA, 19 nt, Homo sapiens
  misc_RNA (1)...(19): siRNA sense strand
gagagagguucuuuuguag

SEQ ID NO: 682901 - RNA, 19 nt, Homo sapiens
  misc_RNA (1)...(19): siRNA sense strand
gauguuccuuuuaagcuaa

SEQ ID NO: 682902 - RNA, 19 nt, Homo sapiens
  misc_RNA (1)...(19): siRNA sense strand
aaaaugcucugucucuguu

SEQ ID NO: 682903 - RNA, 19 nt, Homo sapiens
  misc_RNA (1)...(19): siRNA sense strand
guccugauucuccuucuuu

SEQ ID NO: 682904 - RNA, 19 nt, Homo sapiens
  misc_RNA (1)...(19): siRNA sense strand
gcauuggccucggugucuu

SEQ ID NO: 682905 - RNA, 19 nt, Homo sapiens
  misc_RNA (1)...(19): siRNA sense strand
ucccuggucuccauuaaca

SEQ ID NO: 682906 - RNA, 19 nt, Homo sapiens
  misc_RNA (1)...(19): siRNA sense strand
agaccgggcaguugauauu

SEQ ID NO: 682907 - RNA, 19 nt, Homo sapiens
  misc_RNA (1)...(19): siRNA sense strand
guauaaugcauuuccaagu

SEQ ID NO: 682908 - RNA, 19 nt, Homo sapiens
  misc_RNA (1)...(19): siRNA sense strand
gagagaccagagccgagua

SEQ ID NO: 682909 - RNA, 19 nt, Homo sapiens
  misc_RNA (1)...(19): siRNA sense strand
ccuacugagcccuguauaa

SEQ ID NO: 682910 - RNA, 19 nt, Homo sapiens
  misc_RNA (1)...(19): siRNA sense strand
gaagcuguguggcccuacu

SEQ ID NO: 682911 - RNA, 19 nt, Homo sapiens
  misc_RNA (1)...(19): siRNA sense strand
gaaaaugcucugucucugu

SEQ ID NO: 682912 - RNA, 19 nt, Homo sapiens
  misc_RNA (1)...(19): siRNA sense strand
auaaugcauuuccaagugu

SEQ ID NO: 682913 - RNA, 19 nt, Homo sapiens
  misc_RNA (1)...(19): siRNA sense strand
aaugcucugucucuguuaa

SEQ ID NO: 682914 - RNA, 19 nt, Homo sapiens
  misc_RNA (1)...(19): siRNA sense strand
ucaccucccuggucuccau

SEQ ID NO: 682915 - RNA, 19 nt, Homo sapiens
  misc_RNA (1)...(19): siRNA sense strand
ccggguaguuucugaggau

SEQ ID NO: 682916 - RNA, 19 nt, Homo sapiens
  misc_RNA (1)...(19): siRNA sense strand
guucuugaagccuauauuc

SEQ ID NO: 682917 - RNA, 19 nt, Homo sapiens
  misc_RNA (1)...(19): siRNA sense strand
uaguggugcuggucaagga

SEQ ID NO: 682918 - RNA, 19 nt, Homo sapiens
  misc_RNA (1)...(19): siRNA sense strand
acugagcccuguauaaugc

SEQ ID NO: 682919 - RNA, 19 nt, Homo sapiens
  misc_RNA (1)...(19): siRNA sense strand
gaaaaccgagcagagcaua

SEQ ID NO: 682920 - RNA, 19 nt, Homo sapiens
  misc_RNA (1)...(19): siRNA sense strand
gagaaaugacccugaaaau

SEQ ID NO: 682921 - RNA, 19 nt, Homo sapiens
  misc_RNA (1)...(19): siRNA sense strand
gauggaggaaacagagaga

SEQ ID NO: 682922 - RNA, 19 nt, Homo sapiens
  misc_RNA (1)...(19): siRNA sense strand
ccucccuggucuccauuaa

SEQ ID NO: 682923 - RNA, 19 nt, Homo sapiens
  misc_RNA (1)...(19): siRNA sense strand
cagaaguggcccuguuuag

SEQ ID NO: 682924 - RNA, 19 nt, Homo sapiens
  misc_RNA (1)...(19): siRNA sense strand
cuguuaaggugcuggaugu

SEQ ID NO: 682925 - RNA, 19 nt, Homo sapiens
  misc_RNA (1)...(19): siRNA sense strand
gacaaauggagagauauca

SEQ ID NO: 682926 - RNA, 19 nt, Homo sapiens
  misc_RNA (1)...(19): siRNA sense strand
accgggcaguugauauuaa

SEQ ID NO: 682927 - RNA, 19 nt, Homo sapiens
  misc_RNA (1)...(19): siRNA sense strand
gaaaccaucugccguguga

SEQ ID NO: 682928 - RNA, 19 nt, Homo sapiens
  misc_RNA (1)...(19): siRNA sense strand
gaugaauccucaccauaug

SEQ ID NO: 682929 - RNA, 19 nt, Homo sapiens
  misc_RNA (1)...(19): siRNA sense strand
ugaaggagagaauguauuu

SEQ ID NO: 682930 - RNA, 19 nt, Homo sapiens
  misc_RNA (1)...(19): siRNA sense strand
gagaugaauccucaccaua

SEQ ID NO: 682931 - RNA, 19 nt, Homo sapiens
  misc_RNA (1)...(19): siRNA sense strand
gcaaggagcuggguaucac

SEQ ID NO: 682932 - RNA, 19 nt, Homo sapiens
  misc_RNA (1)...(19): siRNA sense strand
gagaauguauuuggugucu

SEQ ID NO: 682933 - RNA, 19 nt, Homo sapiens
  misc_RNA (1)...(19): siRNA sense strand
gguaaaggcagaccgagau

SEQ ID NO: 682934 - RNA, 19 nt, Homo sapiens
  misc_RNA (1)...(19): siRNA sense strand
cgagaugaauccucaccau

SEQ ID NO: 682935 - RNA, 19 nt, Homo sapiens
  misc_RNA (1)...(19): siRNA sense strand
uauguuggcugcccaggau

SEQ ID NO: 682936 - RNA, 19 nt, Homo sapiens
  misc_RNA (1)...(19): siRNA sense strand
ggaggaaauaggaccaaga

SEQ ID NO: 682937 - RNA, 19 nt, Homo sapiens
  misc_RNA (1)...(19): siRNA sense strand
agaugaauccucaccauau

SEQ ID NO: 682938 - RNA, 19 nt, Homo sapiens
  misc_RNA (1)...(19): siRNA sense strand
aaaggcagaccgagaugaa

SEQ ID NO: 682939 - RNA, 19 nt, Homo sapiens
  misc_RNA (1)...(19): siRNA sense strand
gcugaaggagagaauguau

SEQ ID NO: 682940 - RNA, 19 nt, Homo sapiens
  misc_RNA (1)...(19): siRNA sense strand
gaaggagagaauguauuug

SEQ ID NO: 682941 - RNA, 19 nt, Homo sapiens
  misc_RNA (1)...(19): siRNA sense strand
ucaccgcccuacacaucaa

SEQ ID NO: 682942 - RNA, 19 nt, Homo sapiens
  misc_RNA (1)...(19): siRNA sense strand
guauuuggugucugccaua

SEQ ID NO: 682943 - RNA, 19 nt, Homo sapiens
  misc_RNA (1)...(19): siRNA sense strand
cuggugggaugaagguaaa

SEQ ID NO: 682944 - RNA, 19 nt, Homo sapiens
  misc_RNA (1)...(19): siRNA sense strand
uaucaccgcccuacacauc

SEQ ID NO: 682945 - RNA, 19 nt, Homo sapiens
  misc_RNA (1)...(19): siRNA sense strand
guaaaggcagaccgagaug

SEQ ID NO: 682946 - RNA, 19 nt, Homo sapiens
  misc_RNA (1)...(19): siRNA sense strand
gaggaaauaggaccaagac

SEQ ID NO: 682947 - RNA, 19 nt, Homo sapiens
  misc_RNA (1)...(19): siRNA sense strand
uaucuuugcauccuucaau

SEQ ID NO: 682948 - RNA, 19 nt, Homo sapiens
  misc_RNA (1)...(19): siRNA sense strand
uaaaggcagaccgagauga

SEQ ID NO: 682949 - RNA, 19 nt, Homo sapiens
  misc_RNA (1)...(19): siRNA sense strand
gguaucaccgcccuacaca

SEQ ID NO: 682950 - RNA, 19 nt, Homo sapiens
  misc_RNA (1)...(19): siRNA sense strand
uuuggugucugccauaucu

SEQ ID NO: 682951 - RNA, 19 nt, Homo sapiens
  misc_RNA (1)...(19): siRNA sense strand
aaggagagaauguauuugg

SEQ ID NO: 682952 - RNA, 19 nt, Homo sapiens
  misc_RNA (1)...(19): siRNA sense strand
caacauggauuucagagaa

SEQ ID NO: 682953 - RNA, 19 nt, Homo sapiens
  misc_RNA (1)...(19): siRNA sense strand
cuucagggaugacuucuua

SEQ ID NO: 682954 - RNA, 19 nt, Homo sapiens
  misc_RNA (1)...(19): siRNA sense strand
gaccacgacuccagcuuaa

SEQ ID NO: 682955 - RNA, 19 nt, Homo sapiens
  misc_RNA (1)...(19): siRNA sense strand
uaaaggauucugcuaugua

SEQ ID NO: 682956 - RNA, 19 nt, Homo sapiens
  misc_RNA (1)...(19): siRNA sense strand
agacaaagacacagauaaa

SEQ ID NO: 682957 - RNA, 19 nt, Homo sapiens
  misc_RNA (1)...(19): siRNA sense strand
gagacaaagacacagauaa

SEQ ID NO: 682958 - RNA, 19 nt, Homo sapiens
  misc_RNA (1)...(19): siRNA sense strand
gaaguggauucccuuaagg

SEQ ID NO: 682959 - RNA, 19 nt, Homo sapiens
  misc_RNA (1)...(19): siRNA sense strand
ucagagaacccacagaaga

SEQ ID NO: 682960 - RNA, 19 nt, Homo sapiens
  misc_RNA (1)...(19): siRNA sense strand
agaaggaguugcccacaga

SEQ ID NO: 682961 - RNA, 19 nt, Homo sapiens
  misc_RNA (1)...(19): siRNA sense strand
gagaggaagucguucaaaa

SEQ ID NO: 682962 - RNA, 19 nt, Homo sapiens
  misc_RNA (1)...(19): siRNA sense strand
ugaaguggauucccuuaag

SEQ ID NO: 682963 - RNA, 19 nt, Homo sapiens
  misc_RNA (1)...(19): siRNA sense strand
agaauucgaugaaguggau

SEQ ID NO: 682964 - RNA, 19 nt, Homo sapiens
  misc_RNA (1)...(19): siRNA sense strand
aaaggauucugcuauguag

SEQ ID NO: 682965 - RNA, 19 nt, Homo sapiens
  misc_RNA (1)...(19): siRNA sense strand
gaugaaguggauucccuua

SEQ ID NO: 682966 - RNA, 19 nt, Homo sapiens
  misc_RNA (1)...(19): siRNA sense strand
ggcagccgcuucagagaug

SEQ ID NO: 682967 - RNA, 19 nt, Homo sapiens
  misc_RNA (1)...(19): siRNA sense strand
cuuuaaggaucucagcaua

SEQ ID NO: 682968 - RNA, 19 nt, Homo sapiens
  misc_RNA (1)...(19): siRNA sense strand
uuaaggaucucagcauaag

SEQ ID NO: 682969 - RNA, 19 nt, Homo sapiens
  misc_RNA (1)...(19): siRNA sense strand
ucccaacucugcuaucuuc

SEQ ID NO: 682970 - RNA, 19 nt, Homo sapiens
  misc_RNA (1)...(19): siRNA sense strand
gacaaagacacagauaaau

SEQ ID NO: 682971 - RNA, 19 nt, Homo sapiens
  misc_RNA (1)...(19): siRNA sense strand
uuuaaaggauucugcuaug

SEQ ID NO: 682972 - RNA, 19 nt, Homo sapiens
  misc_RNA (1)...(19): siRNA sense strand
gaagaggaaagagcacaga

SEQ ID NO: 682973 - RNA, 19 nt, Homo sapiens
  misc_RNA (1)...(19): siRNA sense strand
agaccacgacuccagcuua

SEQ ID NO: 682974 - RNA, 19 nt, Homo sapiens
  misc_RNA (1)...(19): siRNA sense strand
auacgauggugcacuguug

SEQ ID NO: 682975 - RNA, 19 nt, Homo sapiens
  misc_RNA (1)...(19): siRNA sense strand
uuaaaggauucugcuaugu

SEQ ID NO: 682976 - RNA, 19 nt, Homo sapiens
  misc_RNA (1)...(19): siRNA sense strand
gaaggcagaaaacaagaua

SEQ ID NO: 682977 - RNA, 19 nt, Homo sapiens
  misc_RNA (1)...(19): siRNA sense strand
cagaaaagguggaccagau

SEQ ID NO: 682978 - RNA, 19 nt, Homo sapiens
  misc_RNA (1)...(19): siRNA sense strand
guucagggcgacauagaug

SEQ ID NO: 682979 - RNA, 19 nt, Homo sapiens
  misc_RNA (1)...(19): siRNA sense strand
agagacaaagacacagaua

SEQ ID NO: 682980 - RNA, 19 nt, Homo sapiens
  misc_RNA (1)...(19): siRNA sense strand
ucaaaaggagcaagaauga

SEQ ID NO: 682981 - RNA, 19 nt, Homo sapiens
  misc_RNA (1)...(19): siRNA sense strand
gaaaagguggaccagauga

SEQ ID NO: 682982 - RNA, 19 nt, Homo sapiens
  misc_RNA (1)...(19): siRNA sense strand
aaaucuaccuuucaauacg

SEQ ID NO: 682983 - RNA, 19 nt, Homo sapiens
  misc_RNA (1)...(19): siRNA sense strand
cuauguagaauucgaugaa

SEQ ID NO: 682984 - RNA, 19 nt, Homo sapiens
  misc_RNA (1)...(19): siRNA sense strand
ucagagacaaagacacaga

SEQ ID NO: 682985 - RNA, 19 nt, Homo sapiens
  misc_RNA (1)...(19): siRNA sense strand
ugccaggccuagagaggaa

SEQ ID NO: 682986 - RNA, 19 nt, Homo sapiens
  misc_RNA (1)...(19): siRNA sense strand
gccaaucccaacucugcua

SEQ ID NO: 682987 - RNA, 19 nt, Homo sapiens
  misc_RNA (1)...(19): siRNA sense strand
cagagaacccacagaagag

SEQ ID NO: 682988 - RNA, 19 nt, Homo sapiens
  misc_RNA (1)...(19): siRNA sense strand
ccacgacuccagcuuaaac

SEQ ID NO: 682989 - RNA, 19 nt, Homo sapiens
  misc_RNA (1)...(19): siRNA sense strand
gcagaaggcagaaaacaag

SEQ ID NO: 682990 - RNA, 19 nt, Homo sapiens
  misc_RNA (1)...(19): siRNA sense strand
ucaaucaaguagccaaucc

SEQ ID NO: 682991 - RNA, 19 nt, Homo sapiens
  misc_RNA (1)...(19): siRNA sense strand
uuucagagaacccacagaa

SEQ ID NO: 682992 - RNA, 19 nt, Homo sapiens
  misc_RNA (1)...(19): siRNA sense strand
gggcagccgcuucagagau

SEQ ID NO: 682993 - RNA, 19 nt, Homo sapiens
  misc_RNA (1)...(19): siRNA sense strand
uuuaaggaucucagcauaa

SEQ ID NO: 682994 - RNA, 19 nt, Homo sapiens
  misc_RNA (1)...(19): siRNA sense strand
gccuagagaggaagucguu

SEQ ID NO: 682995 - RNA, 19 nt, Homo sapiens
  misc_RNA (1)...(19): siRNA sense strand
gcagaaaacaagauaaagg

SEQ ID NO: 682996 - RNA, 19 nt, Homo sapiens
  misc_RNA (1)...(19): siRNA sense strand
aaggaucucagcauaagga

SEQ ID NO: 682997 - RNA, 19 nt, Homo sapiens
  misc_RNA (1)...(19): siRNA sense strand
cagcuuaaaccucgaacag

SEQ ID NO: 682998 - RNA, 19 nt, Homo sapiens
  misc_RNA (1)...(19): siRNA sense strand
caacauggauuucagagaa

SEQ ID NO: 682999 - RNA, 19 nt, Homo sapiens
  misc_RNA (1)...(19): siRNA sense strand
cuucagggaugacuucuua

SEQ ID NO: 683000 - RNA, 19 nt, Homo sapiens
  misc_RNA (1)...(19): siRNA sense strand
gaccacgacuccagcuuaa

SEQ ID NO: 683001 - RNA, 19 nt, Homo sapiens
  misc_RNA (1)...(19): siRNA sense strand
uaaaggauucugcuaugua

SEQ ID NO: 683002 - RNA, 19 nt, Homo sapiens
  misc_RNA (1)...(19): siRNA sense strand
agacaaagacacagauaaa

SEQ ID NO: 683003 - RNA, 19 nt, Homo sapiens
  misc_RNA (1)...(19): siRNA sense strand
gagacaaagacacagauaa

SEQ ID NO: 683004 - RNA, 19 nt, Homo sapiens
  misc_RNA (1)...(19): siRNA sense strand
gaaguggauucccuuaagg

SEQ ID NO: 683005 - RNA, 19 nt, Homo sapiens
  misc_RNA (1)...(19): siRNA sense strand
ucagagaacccacagaaga

SEQ ID NO: 683006 - RNA, 19 nt, Homo sapiens
  misc_RNA (1)...(19): siRNA sense strand
agaaggaguugcccacaga

SEQ ID NO: 683007 - RNA, 19 nt, Homo sapiens
  misc_RNA (1)...(19): siRNA sense strand
gagaggaagucguucaaaa

SEQ ID NO: 683008 - RNA, 19 nt, Homo sapiens
  misc_RNA (1)...(19): siRNA sense strand
ugaaguggauucccuuaag

SEQ ID NO: 683009 - RNA, 19 nt, Homo sapiens
  misc_RNA (1)...(19): siRNA sense strand
agaauucgaugaaguggau

SEQ ID NO: 683010 - RNA, 19 nt, Homo sapiens
  misc_RNA (1)...(19): siRNA sense strand
aaaggauucugcuauguag

SEQ ID NO: 683011 - RNA, 19 nt, Homo sapiens
  misc_RNA (1)...(19): siRNA sense strand
gaugaaguggauucccuua

SEQ ID NO: 683012 - RNA, 19 nt, Homo sapiens
  misc_RNA (1)...(19): siRNA sense strand
ggcagccgcuucagagaug

SEQ ID NO: 683013 - RNA, 19 nt, Homo sapiens
  misc_RNA (1)...(19): siRNA sense strand
cuuuaaggaucucagcaua

SEQ ID NO: 683014 - RNA, 19 nt, Homo sapiens
  misc_RNA (1)...(19): siRNA sense strand
uuaaggaucucagcauaag

SEQ ID NO: 683015 - RNA, 19 nt, Homo sapiens
  misc_RNA (1)...(19): siRNA sense strand
ucccaacucugcuaucuuc

SEQ ID NO: 683016 - RNA, 19 nt, Homo sapiens
  misc_RNA (1)...(19): siRNA sense strand
gacaaagacacagauaaau

SEQ ID NO: 683017 - RNA, 19 nt, Homo sapiens
  misc_RNA (1)...(19): siRNA sense strand
uuuaaaggauucugcuaug

SEQ ID NO: 683018 - RNA, 19 nt, Homo sapiens
  misc_RNA (1)...(19): siRNA sense strand
gaagaggaaagagcacaga

SEQ ID NO: 683019 - RNA, 19 nt, Homo sapiens
  misc_RNA (1)...(19): siRNA sense strand
agaccacgacuccagcuua

SEQ ID NO: 683020 - RNA, 19 nt, Homo sapiens
  misc_RNA (1)...(19): siRNA sense strand
auacgauggugcacuguug

SEQ ID NO: 683021 - RNA, 19 nt, Homo sapiens
  misc_RNA (1)...(19): siRNA sense strand
uuaaaggauucugcuaugu

SEQ ID NO: 683022 - RNA, 19 nt, Homo sapiens
  misc_RNA (1)...(19): siRNA sense strand
gaaggcagaaaacaagaua

SEQ ID NO: 683023 - RNA, 19 nt, Homo sapiens
  misc_RNA (1)...(19): siRNA sense strand
cagaaaagguggaccagau

SEQ ID NO: 683024 - RNA, 19 nt, Homo sapiens
  misc_RNA (1)...(19): siRNA sense strand
guucagggcgacauagaug

SEQ ID NO: 683025 - RNA, 19 nt, Homo sapiens
  misc_RNA (1)...(19): siRNA sense strand
agagacaaagacacagaua

SEQ ID NO: 683026 - RNA, 19 nt, Homo sapiens
  misc_RNA (1)...(19): siRNA sense strand
ucaaaaggagcaagaauga

SEQ ID NO: 683027 - RNA, 19 nt, Homo sapiens
  misc_RNA (1)...(19): siRNA sense strand
gaaaagguggaccagauga

SEQ ID NO: 683028 - RNA, 19 nt, Homo sapiens
  misc_RNA (1)...(19): siRNA sense strand
aaaucuaccuuucaauacg

SEQ ID NO: 683029 - RNA, 19 nt, Homo sapiens
  misc_RNA (1)...(19): siRNA sense strand
cuauguagaauucgaugaa

SEQ ID NO: 683030 - RNA, 19 nt, Homo sapiens
  misc_RNA (1)...(19): siRNA sense strand
ucagagacaaagacacaga

SEQ ID NO: 683031 - RNA, 19 nt, Homo sapiens
  misc_RNA (1)...(19): siRNA sense strand
ugccaggccuagagaggaa

SEQ ID NO: 683032 - RNA, 19 nt, Homo sapiens
  misc_RNA (1)...(19): siRNA sense strand
gccaaucccaacucugcua

SEQ ID NO: 683033 - RNA, 19 nt, Homo sapiens
  misc_RNA (1)...(19): siRNA sense strand
cagagaacccacagaagag

SEQ ID NO: 683034 - RNA, 19 nt, Homo sapiens
  misc_RNA (1)...(19): siRNA sense strand
ccacgacuccagcuuaaac

SEQ ID NO: 683035 - RNA, 19 nt, Homo sapiens
  misc_RNA (1)...(19): siRNA sense strand
gcagaaggcagaaaacaag

SEQ ID NO: 683036 - RNA, 19 nt, Homo sapiens
  misc_RNA (1)...(19): siRNA sense strand
ucaaucaaguagccaaucc

SEQ ID NO: 683037 - RNA, 19 nt, Homo sapiens
  misc_RNA (1)...(19): siRNA sense strand
uuucagagaacccacagaa

SEQ ID NO: 683038 - RNA, 19 nt, Homo sapiens
  misc_RNA (1)...(19): siRNA sense strand
gggcagccgcuucagagau

SEQ ID NO: 683039 - RNA, 19 nt, Homo sapiens
  misc_RNA (1)...(19): siRNA sense strand
uuuaaggaucucagcauaa

SEQ ID NO: 683040 - RNA, 19 nt, Homo sapiens
  misc_RNA (1)...(19): siRNA sense strand
gccuagagaggaagucguu

SEQ ID NO: 683041 - RNA, 19 nt, Homo sapiens
  misc_RNA (1)...(19): siRNA sense strand
gcagaaaacaagauaaagg

SEQ ID NO: 683042 - RNA, 19 nt, Homo sapiens
  misc_RNA (1)...(19): siRNA sense strand
aaggaucucagcauaagga

SEQ ID NO: 683043 - RNA, 19 nt, Homo sapiens
  misc_RNA (1)...(19): siRNA sense strand
cagcuuaaaccucgaacag

SEQ ID NO: 683044 - RNA, 19 nt, Homo sapiens
  misc_RNA (1)...(19): siRNA sense strand
gcauaaggcugacauaauu

SEQ ID NO: 683045 - RNA, 19 nt, Homo sapiens
  misc_RNA (1)...(19): siRNA sense strand
gaaaugaaaugcagcagaa

SEQ ID NO: 683046 - RNA, 19 nt, Homo sapiens
  misc_RNA (1)...(19): siRNA sense strand
gaaaggauuugcagagaaa

SEQ ID NO: 683047 - RNA, 19 nt, Homo sapiens
  misc_RNA (1)...(19): siRNA sense strand
caacaugccuuuaaauuca

SEQ ID NO: 683048 - RNA, 19 nt, Homo sapiens
  misc_RNA (1)...(19): siRNA sense strand
gcagagaaaugcagacuug

SEQ ID NO: 683049 - RNA, 19 nt, Homo sapiens
  misc_RNA (1)...(19): siRNA sense strand
gggaagaggugcuuaagaa

SEQ ID NO: 683050 - RNA, 19 nt, Homo sapiens
  misc_RNA (1)...(19): siRNA sense strand
uaacucagcugcgcaauaa

SEQ ID NO: 683051 - RNA, 19 nt, Homo sapiens
  misc_RNA (1)...(19): siRNA sense strand
caagauuuaugguggauua

SEQ ID NO: 683052 - RNA, 19 nt, Homo sapiens
  misc_RNA (1)...(19): siRNA sense strand
ggauuugacuaaccacuua

SEQ ID NO: 683053 - RNA, 19 nt, Homo sapiens
  misc_RNA (1)...(19): siRNA sense strand
gaugaagggugcuuuacua

SEQ ID NO: 683054 - RNA, 19 nt, Homo sapiens
  misc_RNA (1)...(19): siRNA sense strand
gcaaagagcuggagauagc

SEQ ID NO: 683055 - RNA, 19 nt, Homo sapiens
  misc_RNA (1)...(19): siRNA sense strand
gaaaaugacucuugacuug

SEQ ID NO: 683056 - RNA, 19 nt, Homo sapiens
  misc_RNA (1)...(19): siRNA sense strand
gaagauacacauuacgaua

SEQ ID NO: 683057 - RNA, 19 nt, Homo sapiens
  misc_RNA (1)...(19): siRNA sense strand
gaacuuggauaaauguaug

SEQ ID NO: 683058 - RNA, 19 nt, Homo sapiens
  misc_RNA (1)...(19): siRNA sense strand
ggaaauuuaucaugagaga

SEQ ID NO: 683059 - RNA, 19 nt, Homo sapiens
  misc_RNA (1)...(19): siRNA sense strand
ggagauagcucugguugau

SEQ ID NO: 683060 - RNA, 19 nt, Homo sapiens
  misc_RNA (1)...(19): siRNA sense strand
cugaagaccuauauagaua

SEQ ID NO: 683061 - RNA, 19 nt, Homo sapiens
  misc_RNA (1)...(19): siRNA sense strand
ggaacgagaucuucuugau

SEQ ID NO: 683062 - RNA, 19 nt, Homo sapiens
  misc_RNA (1)...(19): siRNA sense strand
ccugauggcucucaaauug

SEQ ID NO: 683063 - RNA, 19 nt, Homo sapiens
  misc_RNA (1)...(19): siRNA sense strand
cauagaagaugcaguaaca

SEQ ID NO: 683064 - RNA, 19 nt, Homo sapiens
  misc_RNA (1)...(19): siRNA sense strand
ucaagaaguuacccaguuu

SEQ ID NO: 683065 - RNA, 19 nt, Homo sapiens
  misc_RNA (1)...(19): siRNA sense strand
guucagacuuauaugcuua

SEQ ID NO: 683066 - RNA, 19 nt, Homo sapiens
  misc_RNA (1)...(19): siRNA sense strand
gaagaucaguguugguaca

SEQ ID NO: 683067 - RNA, 19 nt, Homo sapiens
  misc_RNA (1)...(19): siRNA sense strand
ugaaggagacucaggguua

SEQ ID NO: 683068 - RNA, 19 nt, Homo sapiens
  misc_RNA (1)...(19): siRNA sense strand
ugacauaauucauggauca

SEQ ID NO: 683069 - RNA, 19 nt, Homo sapiens
  misc_RNA (1)...(19): siRNA sense strand
ucacauagaagaugcagua

SEQ ID NO: 683070 - RNA, 19 nt, Homo sapiens
  misc_RNA (1)...(19): siRNA sense strand
ucaaaucccuccucuguag

SEQ ID NO: 683071 - RNA, 19 nt, Homo sapiens
  misc_RNA (1)...(19): siRNA sense strand
caaggacaguauugaguuu

SEQ ID NO: 683072 - RNA, 19 nt, Homo sapiens
  misc_RNA (1)...(19): siRNA sense strand
gagaggaguucaccagugu

SEQ ID NO: 683073 - RNA, 19 nt, Homo sapiens
  misc_RNA (1)...(19): siRNA sense strand
gaagggugcuuuacuacuc

SEQ ID NO: 683074 - RNA, 19 nt, Homo sapiens
  misc_RNA (1)...(19): siRNA sense strand
gaagauggaacaguuauug

SEQ ID NO: 683075 - RNA, 19 nt, Homo sapiens
  misc_RNA (1)...(19): siRNA sense strand
caggcaaucuuauaacauu

SEQ ID NO: 683076 - RNA, 19 nt, Homo sapiens
  misc_RNA (1)...(19): siRNA sense strand
ccauagagcuuggagagaa

SEQ ID NO: 683077 - RNA, 19 nt, Homo sapiens
  misc_RNA (1)...(19): siRNA sense strand
gaagccaacuuugauuguu

SEQ ID NO: 683078 - RNA, 19 nt, Homo sapiens
  misc_RNA (1)...(19): siRNA sense strand
cagcaagcguccuuuggua

SEQ ID NO: 683079 - RNA, 19 nt, Homo sapiens
  misc_RNA (1)...(19): siRNA sense strand
cuaaaucgaucugauauag

SEQ ID NO: 683080 - RNA, 19 nt, Homo sapiens
  misc_RNA (1)...(19): siRNA sense strand
gaugucaccugaguugaaa

SEQ ID NO: 683081 - RNA, 19 nt, Homo sapiens
  misc_RNA (1)...(19): siRNA sense strand
gaauaugagaugcuaacua

SEQ ID NO: 683082 - RNA, 19 nt, Homo sapiens
  misc_RNA (1)...(19): siRNA sense strand
gaaguuacccaguuugauc

SEQ ID NO: 683083 - RNA, 19 nt, Homo sapiens
  misc_RNA (1)...(19): siRNA sense strand
gcuuauggcugccucuuau

SEQ ID NO: 683084 - RNA, 19 nt, Homo sapiens
  misc_RNA (1)...(19): siRNA sense strand
ggacaguauugaguuuaaa

SEQ ID NO: 683085 - RNA, 19 nt, Homo sapiens
  misc_RNA (1)...(19): siRNA sense strand
gcagacaaggagauaauuu

SEQ ID NO: 683086 - RNA, 19 nt, Homo sapiens
  misc_RNA (1)...(19): siRNA sense strand
ggauuugucagucucuuua

SEQ ID NO: 683087 - RNA, 19 nt, Homo sapiens
  misc_RNA (1)...(19): siRNA sense strand
gagauaauaugggcagaau

SEQ ID NO: 683088 - RNA, 19 nt, Homo sapiens
  misc_RNA (1)...(19): siRNA sense strand
gaucaaaccagucaaccuu

SEQ ID NO: 683089 - RNA, 19 nt, Homo sapiens
  misc_RNA (1)...(19): siRNA sense strand
aauaugagaugcuaacuag

SEQ ID NO: 683090 - RNA, 19 nt, Homo sapiens
  misc_RNA (1)...(19): siRNA sense strand
gaucacuugcuauccauua

SEQ ID NO: 683091 - RNA, 19 nt, Homo sapiens
  misc_RNA (1)...(19): siRNA sense strand
ggaaauacugaaagaaaug

SEQ ID NO: 683092 - RNA, 19 nt, Homo sapiens
  misc_RNA (1)...(19): siRNA sense strand
guuauaaggcguuagaauu

SEQ ID NO: 683093 - RNA, 19 nt, Homo sapiens
  misc_RNA (1)...(19): siRNA sense strand
aagccaacuuugauuguua

SEQ ID NO: 683094 - RNA, 19 nt, Homo sapiens
  misc_RNA (1)...(19): siRNA sense strand
ggaugaagauacacauuac

SEQ ID NO: 683095 - RNA, 19 nt, Homo sapiens
  misc_RNA (1)...(19): siRNA sense strand
gcuauucuguggauguuga

SEQ ID NO: 683096 - RNA, 19 nt, Homo sapiens
  misc_RNA (1)...(19): siRNA sense strand
gaauuaaagcaaccucuga

SEQ ID NO: 683097 - RNA, 19 nt, Homo sapiens
  misc_RNA (1)...(19): siRNA sense strand
gaacucugguggucuccuu

SEQ ID NO: 683098 - RNA, 19 nt, Homo sapiens
  misc_RNA (1)...(19): siRNA sense strand
gaugaaauccuagagaaga

SEQ ID NO: 683099 - RNA, 19 nt, Homo sapiens
  misc_RNA (1)...(19): siRNA sense strand
gaagacgcaauggauaaua

SEQ ID NO: 683100 - RNA, 19 nt, Homo sapiens
  misc_RNA (1)...(19): siRNA sense strand
gaggaguucaccaguguua

SEQ ID NO: 683101 - RNA, 19 nt, Homo sapiens
  misc_RNA (1)...(19): siRNA sense strand
gagcaaauucugaugaaau

SEQ ID NO: 683102 - RNA, 19 nt, Homo sapiens
  misc_RNA (1)...(19): siRNA sense strand
ugaaagaaaugaggcaugu

SEQ ID NO: 683103 - RNA, 19 nt, Homo sapiens
  misc_RNA (1)...(19): siRNA sense strand
ucagauggaugaagauaca

SEQ ID NO: 683104 - RNA, 19 nt, Homo sapiens
  misc_RNA (1)...(19): siRNA sense strand
cugaauacacccuauauaa

SEQ ID NO: 683105 - RNA, 19 nt, Homo sapiens
  misc_RNA (1)...(19): siRNA sense strand
guuggugacuugaguuuga

SEQ ID NO: 683106 - RNA, 19 nt, Homo sapiens
  misc_RNA (1)...(19): siRNA sense strand
gguuggaagucacauagaa

SEQ ID NO: 683107 - RNA, 19 nt, Homo sapiens
  misc_RNA (1)...(19): siRNA sense strand
uaacuaguuuggcacagaa

SEQ ID NO: 683108 - RNA, 19 nt, Homo sapiens
  misc_RNA (1)...(19): siRNA sense strand
ggaagaggugcuuaagaaa

SEQ ID NO: 683109 - RNA, 19 nt, Homo sapiens
  misc_RNA (1)...(19): siRNA sense strand
gaacgagaucuucuugaug

SEQ ID NO: 683110 - RNA, 19 nt, Homo sapiens
  misc_RNA (1)...(19): siRNA sense strand
gauaauaugggcagaauac

SEQ ID NO: 683111 - RNA, 19 nt, Homo sapiens
  misc_RNA (1)...(19): siRNA sense strand
gaagaggugcuuaagaaag

SEQ ID NO: 683112 - RNA, 19 nt, Homo sapiens
  misc_RNA (1)...(19): siRNA sense strand
caugaugguuggugacuug

SEQ ID NO: 683113 - RNA, 19 nt, Homo sapiens
  misc_RNA (1)...(19): siRNA sense strand
ugaaggaacuuagcagcaa

SEQ ID NO: 683114 - RNA, 19 nt, Homo sapiens
  misc_RNA (1)...(19): siRNA sense strand
ggagcaaauucugaugaaa

SEQ ID NO: 683115 - RNA, 19 nt, Homo sapiens
  misc_RNA (1)...(19): siRNA sense strand
guacaugucaguagaagau

SEQ ID NO: 683116 - RNA, 19 nt, Homo sapiens
  misc_RNA (1)...(19): siRNA sense strand
cuauauagauaccagaaug

SEQ ID NO: 683117 - RNA, 19 nt, Homo sapiens
  misc_RNA (1)...(19): siRNA sense strand
aaaugacucuugacuugaa

SEQ ID NO: 683118 - RNA, 19 nt, Homo sapiens
  misc_RNA (1)...(19): siRNA sense strand
gacuacacauuccuucuga

SEQ ID NO: 683119 - RNA, 19 nt, Homo sapiens
  misc_RNA (1)...(19): siRNA sense strand
uaaauaagagucccagugu

SEQ ID NO: 683120 - RNA, 19 nt, Homo sapiens
  misc_RNA (1)...(19): siRNA sense strand
cagaagacgcaauggauaa

SEQ ID NO: 683121 - RNA, 19 nt, Homo sapiens
  misc_RNA (1)...(19): siRNA sense strand
ugagguacauugacuaugg

SEQ ID NO: 683122 - RNA, 19 nt, Homo sapiens
  misc_RNA (1)...(19): siRNA sense strand
agacggagaacuuggauaa

SEQ ID NO: 683123 - RNA, 19 nt, Homo sapiens
  misc_RNA (1)...(19): siRNA sense strand
gccuuuaaauucagaagaa

SEQ ID NO: 683124 - RNA, 19 nt, Homo sapiens
  misc_RNA (1)...(19): siRNA sense strand
gguggucuccuuacaauga

SEQ ID NO: 683125 - RNA, 19 nt, Homo sapiens
  misc_RNA (1)...(19): siRNA sense strand
cagcuaagauggaaauacu

SEQ ID NO: 683126 - RNA, 19 nt, Homo sapiens
  misc_RNA (1)...(19): siRNA sense strand
gaugcaggcaaucuuauaa

SEQ ID NO: 683127 - RNA, 19 nt, Homo sapiens
  misc_RNA (1)...(19): siRNA sense strand
uaaagcaaccucugaagau

SEQ ID NO: 683128 - RNA, 19 nt, Homo sapiens
  misc_RNA (1)...(19): siRNA sense strand
guacauugacuauggaaau

SEQ ID NO: 683129 - RNA, 19 nt, Homo sapiens
  misc_RNA (1)...(19): siRNA sense strand
gaucaguguugguacagau

SEQ ID NO: 683130 - RNA, 19 nt, Homo sapiens
  misc_RNA (1)...(19): siRNA sense strand
aaucaggaguuugagauaa

SEQ ID NO: 683131 - RNA, 19 nt, Homo sapiens
  misc_RNA (1)...(19): siRNA sense strand
uauuauggcuuucuguuca

SEQ ID NO: 683132 - RNA, 19 nt, Homo sapiens
  misc_RNA (1)...(19): siRNA sense strand
gccaacaugccuuuaaauu

SEQ ID NO: 683133 - RNA, 19 nt, Homo sapiens
  misc_RNA (1)...(19): siRNA sense strand
cccaggagcugcagcaaga

SEQ ID NO: 683134 - RNA, 19 nt, Homo sapiens
  misc_RNA (1)...(19): siRNA sense strand
guuggugacuuuaauuuag

SEQ ID NO: 683135 - RNA, 19 nt, Homo sapiens
  misc_RNA (1)...(19): siRNA sense strand
acacauuccuucugaucaa

SEQ ID NO: 683136 - RNA, 19 nt, Homo sapiens
  misc_RNA (1)...(19): siRNA sense strand
aaauaaagacggagaacuu

SEQ ID NO: 683137 - RNA, 19 nt, Homo sapiens
  misc_RNA (1)...(19): siRNA sense strand
aaagauucauucagaggaa

SEQ ID NO: 683138 - RNA, 19 nt, Homo sapiens
  misc_RNA (1)...(19): siRNA sense strand
guagcaugguuccaaagaa

SEQ ID NO: 683139 - RNA, 19 nt, Homo sapiens
  misc_RNA (1)...(19): siRNA sense strand
cuauacaaguguuggauga

SEQ ID NO: 683140 - RNA, 19 nt, Homo sapiens
  misc_RNA (1)...(19): siRNA sense strand
uauaaggcguuagaauuga

SEQ ID NO: 683141 - RNA, 19 nt, Homo sapiens
  misc_RNA (1)...(19): siRNA sense strand
agaaaggauuugcagagaa

SEQ ID NO: 683142 - RNA, 19 nt, Homo sapiens
  misc_RNA (1)...(19): siRNA sense strand
agucugauccuauggcuua

SEQ ID NO: 683143 - RNA, 19 nt, Homo sapiens
  misc_RNA (1)...(19): siRNA sense strand
cggagaacuuggauaaaug

SEQ ID NO: 683144 - RNA, 19 nt, Homo sapiens
  misc_RNA (1)...(19): siRNA sense strand
gcauaaggcugacauaauu

SEQ ID NO: 683145 - RNA, 19 nt, Homo sapiens
  misc_RNA (1)...(19): siRNA sense strand
gaaaugaaaugcagcagaa

SEQ ID NO: 683146 - RNA, 19 nt, Homo sapiens
  misc_RNA (1)...(19): siRNA sense strand
gaaaggauuugcagagaaa

SEQ ID NO: 683147 - RNA, 19 nt, Homo sapiens
  misc_RNA (1)...(19): siRNA sense strand
caacaugccuuuaaauuca

SEQ ID NO: 683148 - RNA, 19 nt, Homo sapiens
  misc_RNA (1)...(19): siRNA sense strand
gcagagaaaugcagacuug

SEQ ID NO: 683149 - RNA, 19 nt, Homo sapiens
  misc_RNA (1)...(19): siRNA sense strand
gggaagaggugcuuaagaa

SEQ ID NO: 683150 - RNA, 19 nt, Homo sapiens
  misc_RNA (1)...(19): siRNA sense strand
uaacucagcugcgcaauaa

SEQ ID NO: 683151 - RNA, 19 nt, Homo sapiens
  misc_RNA (1)...(19): siRNA sense strand
caagauuuaugguggauua

SEQ ID NO: 683152 - RNA, 19 nt, Homo sapiens
  misc_RNA (1)...(19): siRNA sense strand
ggauuugacuaaccacuua

SEQ ID NO: 683153 - RNA, 19 nt, Homo sapiens
  misc_RNA (1)...(19): siRNA sense strand
gaugaagggugcuuuacua

SEQ ID NO: 683154 - RNA, 19 nt, Homo sapiens
  misc_RNA (1)...(19): siRNA sense strand
gcaaagagcuggagauagc

SEQ ID NO: 683155 - RNA, 19 nt, Homo sapiens
  misc_RNA (1)...(19): siRNA sense strand
gaaaaugacucuugacuug

SEQ ID NO: 683156 - RNA, 19 nt, Homo sapiens
  misc_RNA (1)...(19): siRNA sense strand
gaagauacacauuacgaua

SEQ ID NO: 683157 - RNA, 19 nt, Homo sapiens
  misc_RNA (1)...(19): siRNA sense strand
gaacuuggauaaauguaug

SEQ ID NO: 683158 - RNA, 19 nt, Homo sapiens
  misc_RNA (1)...(19): siRNA sense strand
ggaaauuuaucaugagaga

SEQ ID NO: 683159 - RNA, 19 nt, Homo sapiens
  misc_RNA (1)...(19): siRNA sense strand
ggagauagcucugguugau

SEQ ID NO: 683160 - RNA, 19 nt, Homo sapiens
  misc_RNA (1)...(19): siRNA sense strand
cugaagaccuauauagaua

SEQ ID NO: 683161 - RNA, 19 nt, Homo sapiens
  misc_RNA (1)...(19): siRNA sense strand
ggaacgagaucuucuugau

SEQ ID NO: 683162 - RNA, 19 nt, Homo sapiens
  misc_RNA (1)...(19): siRNA sense strand
ccugauggcucucaaauug

SEQ ID NO: 683163 - RNA, 19 nt, Homo sapiens
  misc_RNA (1)...(19): siRNA sense strand
cauagaagaugcaguaaca

SEQ ID NO: 683164 - RNA, 19 nt, Homo sapiens
  misc_RNA (1)...(19): siRNA sense strand
ucaagaaguuacccaguuu

SEQ ID NO: 683165 - RNA, 19 nt, Homo sapiens
  misc_RNA (1)...(19): siRNA sense strand
guucagacuuauaugcuua

SEQ ID NO: 683166 - RNA, 19 nt, Homo sapiens
  misc_RNA (1)...(19): siRNA sense strand
gaagaucaguguugguaca

SEQ ID NO: 683167 - RNA, 19 nt, Homo sapiens
  misc_RNA (1)...(19): siRNA sense strand
ugaaggagacucaggguua

SEQ ID NO: 683168 - RNA, 19 nt, Homo sapiens
  misc_RNA (1)...(19): siRNA sense strand
ugacauaauucauggauca

SEQ ID NO: 683169 - RNA, 19 nt, Homo sapiens
  misc_RNA (1)...(19): siRNA sense strand
gaagauggaacaguuauug

SEQ ID NO: 683170 - RNA, 19 nt, Homo sapiens
  misc_RNA (1)...(19): siRNA sense strand
ucaaaucccuccucuguag

SEQ ID NO: 683171 - RNA, 19 nt, Homo sapiens
  misc_RNA (1)...(19): siRNA sense strand
caaggacaguauugaguuu

SEQ ID NO: 683172 - RNA, 19 nt, Homo sapiens
  misc_RNA (1)...(19): siRNA sense strand
gagaggaguucaccagugu

SEQ ID NO: 683173 - RNA, 19 nt, Homo sapiens
  misc_RNA (1)...(19): siRNA sense strand
ucacauagaagaugcagua

SEQ ID NO: 683174 - RNA, 19 nt, Homo sapiens
  misc_RNA (1)...(19): siRNA sense strand
gaagggugcuuuacuacuc

SEQ ID NO: 683175 - RNA, 19 nt, Homo sapiens
  misc_RNA (1)...(19): siRNA sense strand
caggcaaucuuauaacauu

SEQ ID NO: 683176 - RNA, 19 nt, Homo sapiens
  misc_RNA (1)...(19): siRNA sense strand
ccauagagcuuggagagaa

SEQ ID NO: 683177 - RNA, 19 nt, Homo sapiens
  misc_RNA (1)...(19): siRNA sense strand
gaagccaacuuugauuguu

SEQ ID NO: 683178 - RNA, 19 nt, Homo sapiens
  misc_RNA (1)...(19): siRNA sense strand
cagcaagcguccuuuggua

SEQ ID NO: 683179 - RNA, 19 nt, Homo sapiens
  misc_RNA (1)...(19): siRNA sense strand
cuaaaucgaucugauauag

SEQ ID NO: 683180 - RNA, 19 nt, Homo sapiens
  misc_RNA (1)...(19): siRNA sense strand
gaugucaccugaguugaaa

SEQ ID NO: 683181 - RNA, 19 nt, Homo sapiens
  misc_RNA (1)...(19): siRNA sense strand
gaauaugagaugcuaacua

SEQ ID NO: 683182 - RNA, 19 nt, Homo sapiens
  misc_RNA (1)...(19): siRNA sense strand
gaaguuacccaguuugauc

SEQ ID NO: 683183 - RNA, 19 nt, Homo sapiens
  misc_RNA (1)...(19): siRNA sense strand
gcuuauggcugccucuuau

SEQ ID NO: 683184 - RNA, 19 nt, Homo sapiens
  misc_RNA (1)...(19): siRNA sense strand
ggacaguauugaguuuaaa

SEQ ID NO: 683185 - RNA, 19 nt, Homo sapiens
  misc_RNA (1)...(19): siRNA sense strand
gcagacaaggagauaauuu

SEQ ID NO: 683186 - RNA, 19 nt, Homo sapiens
  misc_RNA (1)...(19): siRNA sense strand
ggauuugucagucucuuua

SEQ ID NO: 683187 - RNA, 19 nt, Homo sapiens
  misc_RNA (1)...(19): siRNA sense strand
gagauaauaugggcagaau

SEQ ID NO: 683188 - RNA, 19 nt, Homo sapiens
  misc_RNA (1)...(19): siRNA sense strand
gaucaaaccagucaaccuu

SEQ ID NO: 683189 - RNA, 19 nt, Homo sapiens
  misc_RNA (1)...(19): siRNA sense strand
aauaugagaugcuaacuag

SEQ ID NO: 683190 - RNA, 19 nt, Homo sapiens
  misc_RNA (1)...(19): siRNA sense strand
gaucacuugcuauccauua

SEQ ID NO: 683191 - RNA, 19 nt, Homo sapiens
  misc_RNA (1)...(19): siRNA sense strand
ggaaauacugaaagaaaug

SEQ ID NO: 683192 - RNA, 19 nt, Homo sapiens
  misc_RNA (1)...(19): siRNA sense strand
guuauaaggcguuagaauu

SEQ ID NO: 683193 - RNA, 19 nt, Homo sapiens
  misc_RNA (1)...(19): siRNA sense strand
aagccaacuuugauuguua

SEQ ID NO: 683194 - RNA, 19 nt, Homo sapiens
  misc_RNA (1)...(19): siRNA sense strand
ggaugaagauacacauuac

SEQ ID NO: 683195 - RNA, 19 nt, Homo sapiens
  misc_RNA (1)...(19): siRNA sense strand
gcuauucuguggauguuga

SEQ ID NO: 683196 - RNA, 19 nt, Homo sapiens
  misc_RNA (1)...(19): siRNA sense strand
gaauuaaagcaaccucuga

SEQ ID NO: 683197 - RNA, 19 nt, Homo sapiens
  misc_RNA (1)...(19): siRNA sense strand
gaacucugguggucuccuu

SEQ ID NO: 683198 - RNA, 19 nt, Homo sapiens
  misc_RNA (1)...(19): siRNA sense strand
gaugaaauccuagagaaga

SEQ ID NO: 683199 - RNA, 19 nt, Homo sapiens
  misc_RNA (1)...(19): siRNA sense strand
gaagacgcaauggauaaua

SEQ ID NO: 683200 - RNA, 19 nt, Homo sapiens
  misc_RNA (1)...(19): siRNA sense strand
gaggaguucaccaguguua

SEQ ID NO: 683201 - RNA, 19 nt, Homo sapiens
  misc_RNA (1)...(19): siRNA sense strand
gagcaaauucugaugaaau

SEQ ID NO: 683202 - RNA, 19 nt, Homo sapiens
  misc_RNA (1)...(19): siRNA sense strand
ugaaagaaaugaggcaugu

SEQ ID NO: 683203 - RNA, 19 nt, Homo sapiens
  misc_RNA (1)...(19): siRNA sense strand
gguuggaagucacauagaa

SEQ ID NO: 683204 - RNA, 19 nt, Homo sapiens
  misc_RNA (1)...(19): siRNA sense strand
cugaauacacccuauauaa

SEQ ID NO: 683205 - RNA, 19 nt, Homo sapiens
  misc_RNA (1)...(19): siRNA sense strand
guuggugacuugaguuuga

SEQ ID NO: 683206 - RNA, 19 nt, Homo sapiens
  misc_RNA (1)...(19): siRNA sense strand
uaacuaguuuggcacagaa

SEQ ID NO: 683207 - RNA, 19 nt, Homo sapiens
  misc_RNA (1)...(19): siRNA sense strand
ggaagaggugcuuaagaaa

SEQ ID NO: 683208 - RNA, 19 nt, Homo sapiens
  misc_RNA (1)...(19): siRNA sense strand
gaacgagaucuucuugaug

SEQ ID NO: 683209 - RNA, 19 nt, Homo sapiens
  misc_RNA (1)...(19): siRNA sense strand
gauaauaugggcagaauac

SEQ ID NO: 683210 - RNA, 19 nt, Homo sapiens
  misc_RNA (1)...(19): siRNA sense strand
gaagaggugcuuaagaaag

SEQ ID NO: 683211 - RNA, 19 nt, Homo sapiens
  misc_RNA (1)...(19): siRNA sense strand
caugaugguuggugacuug

SEQ ID NO: 683212 - RNA, 19 nt, Homo sapiens
  misc_RNA (1)...(19): siRNA sense strand
ugaaggaacuuagcagcaa

SEQ ID NO: 683213 - RNA, 19 nt, Homo sapiens
  misc_RNA (1)...(19): siRNA sense strand
ggagcaaauucugaugaaa

SEQ ID NO: 683214 - RNA, 19 nt, Homo sapiens
  misc_RNA (1)...(19): siRNA sense strand
guacaugucaguagaagau

SEQ ID NO: 683215 - RNA, 19 nt, Homo sapiens
  misc_RNA (1)...(19): siRNA sense strand
cuauauagauaccagaaug

SEQ ID NO: 683216 - RNA, 19 nt, Homo sapiens
  misc_RNA (1)...(19): siRNA sense strand
aaaugacucuugacuugaa

SEQ ID NO: 683217 - RNA, 19 nt, Homo sapiens
  misc_RNA (1)...(19): siRNA sense strand
gacuacacauuccuucuga

SEQ ID NO: 683218 - RNA, 19 nt, Homo sapiens
  misc_RNA (1)...(19): siRNA sense strand
uaaauaagagucccagugu

SEQ ID NO: 683219 - RNA, 19 nt, Homo sapiens
  misc_RNA (1)...(19): siRNA sense strand
cagaagacgcaauggauaa

SEQ ID NO: 683220 - RNA, 19 nt, Homo sapiens
  misc_RNA (1)...(19): siRNA sense strand
ugagguacauugacuaugg

SEQ ID NO: 683221 - RNA, 19 nt, Homo sapiens
  misc_RNA (1)...(19): siRNA sense strand
agacggagaacuuggauaa

SEQ ID NO: 683222 - RNA, 19 nt, Homo sapiens
  misc_RNA (1)...(19): siRNA sense strand
gccuuuaaauucagaagaa

SEQ ID NO: 683223 - RNA, 19 nt, Homo sapiens
  misc_RNA (1)...(19): siRNA sense strand
gguggucuccuuacaauga

SEQ ID NO: 683224 - RNA, 19 nt, Homo sapiens
  misc_RNA (1)...(19): siRNA sense strand
cagcuaagauggaaauacu

SEQ ID NO: 683225 - RNA, 19 nt, Homo sapiens
  misc_RNA (1)...(19): siRNA sense strand
gaugcaggcaaucuuauaa

SEQ ID NO: 683226 - RNA, 19 nt, Homo sapiens
  misc_RNA (1)...(19): siRNA sense strand
uaaagcaaccucugaagau

SEQ ID NO: 683227 - RNA, 19 nt, Homo sapiens
  misc_RNA (1)...(19): siRNA sense strand
guacauugacuauggaaau

SEQ ID NO: 683228 - RNA, 19 nt, Homo sapiens
  misc_RNA (1)...(19): siRNA sense strand
gaucaguguugguacagau

SEQ ID NO: 683229 - RNA, 19 nt, Homo sapiens
  misc_RNA (1)...(19): siRNA sense strand
aaucaggaguuugagauaa

SEQ ID NO: 683230 - RNA, 19 nt, Homo sapiens
  misc_RNA (1)...(19): siRNA sense strand
uauuauggcuuucuguuca

SEQ ID NO: 683231 - RNA, 19 nt, Homo sapiens
  misc_RNA (1)...(19): siRNA sense strand
gccaacaugccuuuaaauu

SEQ ID NO: 683232 - RNA, 19 nt, Homo sapiens
  misc_RNA (1)...(19): siRNA sense strand
cccaggagcugcagcaaga

SEQ ID NO: 683233 - RNA, 19 nt, Homo sapiens
  misc_RNA (1)...(19): siRNA sense strand
guuggugacuuuaauuuag

SEQ ID NO: 683234 - RNA, 19 nt, Homo sapiens
  misc_RNA (1)...(19): siRNA sense strand
acacauuccuucugaucaa

SEQ ID NO: 683235 - RNA, 19 nt, Homo sapiens
  misc_RNA (1)...(19): siRNA sense strand
aaauaaagacggagaacuu

SEQ ID NO: 683236 - RNA, 19 nt, Homo sapiens
  misc_RNA (1)...(19): siRNA sense strand
aaagauucauucagaggaa

SEQ ID NO: 683237 - RNA, 19 nt, Homo sapiens
  misc_RNA (1)...(19): siRNA sense strand
guagcaugguuccaaagaa

SEQ ID NO: 683238 - RNA, 19 nt, Homo sapiens
  misc_RNA (1)...(19): siRNA sense strand
cuauacaaguguuggauga

SEQ ID NO: 683239 - RNA, 19 nt, Homo sapiens
  misc_RNA (1)...(19): siRNA sense strand
uauaaggcguuagaauuga

SEQ ID NO: 683240 - RNA, 19 nt, Homo sapiens
  misc_RNA (1)...(19): siRNA sense strand
agaaaggauuugcagagaa

SEQ ID NO: 683241 - RNA, 19 nt, Homo sapiens
  misc_RNA (1)...(19): siRNA sense strand
gaaggagacucaggguuac

SEQ ID NO: 683242 - RNA, 19 nt, Homo sapiens
  misc_RNA (1)...(19): siRNA sense strand
cggagaacuuggauaaaug

SEQ ID NO: 683243 - RNA, 19 nt, Homo sapiens
  misc_RNA (1)...(19): siRNA sense strand
agucugauccuauggcuua

SEQ ID NO: 683244 - RNA, 19 nt, Homo sapiens
  misc_RNA (1)...(19): siRNA sense strand
gaaauaacgacuccaggua

SEQ ID NO: 683245 - RNA, 19 nt, Homo sapiens
  misc_RNA (1)...(19): siRNA sense strand
gaacuuaucucuggguaca

SEQ ID NO: 683246 - RNA, 19 nt, Homo sapiens
  misc_RNA (1)...(19): siRNA sense strand
ugacaauccuccagcauuu

SEQ ID NO: 683247 - RNA, 19 nt, Homo sapiens
  misc_RNA (1)...(19): siRNA sense strand
ccaaggaacuccagcucua

SEQ ID NO: 683248 - RNA, 19 nt, Homo sapiens
  misc_RNA (1)...(19): siRNA sense strand
ugacagauaucaaugacaa

SEQ ID NO: 683249 - RNA, 19 nt, Homo sapiens
  misc_RNA (1)...(19): siRNA sense strand
cagaguggcccaaauauuu

SEQ ID NO: 683250 - RNA, 19 nt, Homo sapiens
  misc_RNA (1)...(19): siRNA sense strand
aaagaacacuggacagaga

SEQ ID NO: 683251 - RNA, 19 nt, Homo sapiens
  misc_RNA (1)...(19): siRNA sense strand
gcacaauaccauauaaaug

SEQ ID NO: 683252 - RNA, 19 nt, Homo sapiens
  misc_RNA (1)...(19): siRNA sense strand
gcaaugagaaugcacaaau

SEQ ID NO: 683253 - RNA, 19 nt, Homo sapiens
  misc_RNA (1)...(19): siRNA sense strand
gcccaaauauuucguuuag

SEQ ID NO: 683254 - RNA, 19 nt, Homo sapiens
  misc_RNA (1)...(19): siRNA sense strand
gcacaagucacgucugcua

SEQ ID NO: 683255 - RNA, 19 nt, Homo sapiens
  misc_RNA (1)...(19): siRNA sense strand
gcucauggcuaaaguuaag

SEQ ID NO: 683256 - RNA, 19 nt, Homo sapiens
  misc_RNA (1)...(19): siRNA sense strand
guacucagcugcucauggu

SEQ ID NO: 683257 - RNA, 19 nt, Homo sapiens
  misc_RNA (1)...(19): siRNA sense strand
caaaucacuuacucccuaa

SEQ ID NO: 683258 - RNA, 19 nt, Homo sapiens
  misc_RNA (1)...(19): siRNA sense strand
uaaagaaccacuagauuuc

SEQ ID NO: 683259 - RNA, 19 nt, Homo sapiens
  misc_RNA (1)...(19): siRNA sense strand
guacuccuuucacaaugua

SEQ ID NO: 683260 - RNA, 19 nt, Homo sapiens
  misc_RNA (1)...(19): siRNA sense strand
cggaagagccaccugauuu

SEQ ID NO: 683261 - RNA, 19 nt, Homo sapiens
  misc_RNA (1)...(19): siRNA sense strand
uaauugcucuuaucagugu

SEQ ID NO: 683262 - RNA, 19 nt, Homo sapiens
  misc_RNA (1)...(19): siRNA sense strand
gaagagacagacaaagguu

SEQ ID NO: 683263 - RNA, 19 nt, Homo sapiens
  misc_RNA (1)...(19): siRNA sense strand
ugaacucacuccagagcua

SEQ ID NO: 683264 - RNA, 19 nt, Homo sapiens
  misc_RNA (1)...(19): siRNA sense strand
ccuggaaauuuacccuuua

SEQ ID NO: 683265 - RNA, 19 nt, Homo sapiens
  misc_RNA (1)...(19): siRNA sense strand
gcuaccaacucagcucuaa

SEQ ID NO: 683266 - RNA, 19 nt, Homo sapiens
  misc_RNA (1)...(19): siRNA sense strand
cacuagauuucgaagaaua

SEQ ID NO: 683267 - RNA, 19 nt, Homo sapiens
  misc_RNA (1)...(19): siRNA sense strand
gacaauggcuacaccacau

SEQ ID NO: 683268 - RNA, 19 nt, Homo sapiens
  misc_RNA (1)...(19): siRNA sense strand
ggguacaacaucacaauaa

SEQ ID NO: 683269 - RNA, 19 nt, Homo sapiens
  misc_RNA (1)...(19): siRNA sense strand
caaugagaaugcacaaauc

SEQ ID NO: 683270 - RNA, 19 nt, Homo sapiens
  misc_RNA (1)...(19): siRNA sense strand
caacaucgccaaggaccua

SEQ ID NO: 683271 - RNA, 19 nt, Homo sapiens
  misc_RNA (1)...(19): siRNA sense strand
gggcuuuccugcagaccua

SEQ ID NO: 683272 - RNA, 19 nt, Homo sapiens
  misc_RNA (1)...(19): siRNA sense strand
ggacagcaaugagaaugca

SEQ ID NO: 683273 - RNA, 19 nt, Homo sapiens
  misc_RNA (1)...(19): siRNA sense strand
gggcucauggcuaaaguua

SEQ ID NO: 683274 - RNA, 19 nt, Homo sapiens
  misc_RNA (1)...(19): siRNA sense strand
gcagagucccuuagacaga

SEQ ID NO: 683275 - RNA, 19 nt, Homo sapiens
  misc_RNA (1)...(19): siRNA sense strand
agaaugcacaaaucacuua

SEQ ID NO: 683276 - RNA, 19 nt, Homo sapiens
  misc_RNA (1)...(19): siRNA sense strand
ccagcucuaucuacugaaa

SEQ ID NO: 683277 - RNA, 19 nt, Homo sapiens
  misc_RNA (1)...(19): siRNA sense strand
ggacagagacgcgcucaag

SEQ ID NO: 683278 - RNA, 19 nt, Homo sapiens
  misc_RNA (1)...(19): siRNA sense strand
gagccuccaucuucucugu

SEQ ID NO: 683279 - RNA, 19 nt, Homo sapiens
  misc_RNA (1)...(19): siRNA sense strand
ugacaacacuccccaauuc

SEQ ID NO: 683280 - RNA, 19 nt, Homo sapiens
  misc_RNA (1)...(19): siRNA sense strand
guaacguacuccuuucaca

SEQ ID NO: 683281 - RNA, 19 nt, Homo sapiens
  misc_RNA (1)...(19): siRNA sense strand
caggcacaauaccauauaa

SEQ ID NO: 683282 - RNA, 19 nt, Homo sapiens
  misc_RNA (1)...(19): siRNA sense strand
ggaagagacagacaaaggu

SEQ ID NO: 683283 - RNA, 19 nt, Homo sapiens
  misc_RNA (1)...(19): siRNA sense strand
gacaauccuccagcauuua

SEQ ID NO: 683284 - RNA, 19 nt, Homo sapiens
  misc_RNA (1)...(19): siRNA sense strand
gacaugcaacugaaaguga

SEQ ID NO: 683285 - RNA, 19 nt, Homo sapiens
  misc_RNA (1)...(19): siRNA sense strand
ugccgugucucgugaguuu

SEQ ID NO: 683286 - RNA, 19 nt, Homo sapiens
  misc_RNA (1)...(19): siRNA sense strand
gaccaggacucaggagaca

SEQ ID NO: 683287 - RNA, 19 nt, Homo sapiens
  misc_RNA (1)...(19): siRNA sense strand
uuaagguacugaucaaagu

SEQ ID NO: 683288 - RNA, 19 nt, Homo sapiens
  misc_RNA (1)...(19): siRNA sense strand
cuccagagcuaccaacuca

SEQ ID NO: 683289 - RNA, 19 nt, Homo sapiens
  misc_RNA (1)...(19): siRNA sense strand
gagcccugcuggacagaga

SEQ ID NO: 683290 - RNA, 19 nt, Homo sapiens
  misc_RNA (1)...(19): siRNA sense strand
gguacaacaucacaauaac

SEQ ID NO: 683291 - RNA, 19 nt, Homo sapiens
  misc_RNA (1)...(19): siRNA sense strand
uuacacaggagaaauauca

SEQ ID NO: 683292 - RNA, 19 nt, Homo sapiens
  misc_RNA (1)...(19): siRNA sense strand
cuggaaauuuacccuuuaa

SEQ ID NO: 683293 - RNA, 19 nt, Homo sapiens
  misc_RNA (1)...(19): siRNA sense strand
gaacuccagcucuaucuac

SEQ ID NO: 683294 - RNA, 19 nt, Homo sapiens
  misc_RNA (1)...(19): siRNA sense strand
ugaaagaacacuggacaga

SEQ ID NO: 683295 - RNA, 19 nt, Homo sapiens
  misc_RNA (1)...(19): siRNA sense strand
uaacguacuccuuucacaa

SEQ ID NO: 683296 - RNA, 19 nt, Homo sapiens
  misc_RNA (1)...(19): siRNA sense strand
caggagagcugugagaaaa

SEQ ID NO: 683297 - RNA, 19 nt, Homo sapiens
  misc_RNA (1)...(19): siRNA sense strand
auucggaccucacucugua

SEQ ID NO: 683298 - RNA, 19 nt, Homo sapiens
  misc_RNA (1)...(19): siRNA sense strand
gagaaugcacaaaucacuu

SEQ ID NO: 683299 - RNA, 19 nt, Homo sapiens
  misc_RNA (1)...(19): siRNA sense strand
acacuggacagagaacuua

SEQ ID NO: 683300 - RNA, 19 nt, Homo sapiens
  misc_RNA (1)...(19): siRNA sense strand
caaauaaagaaccacuaga

SEQ ID NO: 683301 - RNA, 19 nt, Homo sapiens
  misc_RNA (1)...(19): siRNA sense strand
gggcugggaauauucacua

SEQ ID NO: 683302 - RNA, 19 nt, Homo sapiens
  misc_RNA (1)...(19): siRNA sense strand
ggaauauucacuacucagu

SEQ ID NO: 683303 - RNA, 19 nt, Homo sapiens
  misc_RNA (1)...(19): siRNA sense strand
cuacaccacauguuucauu

SEQ ID NO: 683304 - RNA, 19 nt, Homo sapiens
  misc_RNA (1)...(19): siRNA sense strand
accacuagauuucgaagaa

SEQ ID NO: 683305 - RNA, 19 nt, Homo sapiens
  misc_RNA (1)...(19): siRNA sense strand
ggacaugcaacugaaagug

SEQ ID NO: 683306 - RNA, 19 nt, Homo sapiens
  misc_RNA (1)...(19): siRNA sense strand
gcugcgauccuucgacuau

SEQ ID NO: 683307 - RNA, 19 nt, Homo sapiens
  misc_RNA (1)...(19): siRNA sense strand
ucacuuacucccuaauaga

SEQ ID NO: 683308 - RNA, 19 nt, Homo sapiens
  misc_RNA (1)...(19): siRNA sense strand
ggaacuccagcucuaucua

SEQ ID NO: 683309 - RNA, 19 nt, Homo sapiens
  misc_RNA (1)...(19): siRNA sense strand
guacaacaucacaauaaca

SEQ ID NO: 683310 - RNA, 19 nt, Homo sapiens
  misc_RNA (1)...(19): siRNA sense strand
ucaaauaaagaaccacuag

SEQ ID NO: 683311 - RNA, 19 nt, Homo sapiens
  misc_RNA (1)...(19): siRNA sense strand
ggaagagccaccugauuuu

SEQ ID NO: 683312 - RNA, 19 nt, Homo sapiens
  misc_RNA (1)...(19): siRNA sense strand
ucaggcacaauaccauaua

SEQ ID NO: 683313 - RNA, 19 nt, Homo sapiens
  misc_RNA (1)...(19): siRNA sense strand
gcucugaauccuagaagug

SEQ ID NO: 683314 - RNA, 19 nt, Homo sapiens
  misc_RNA (1)...(19): siRNA sense strand
gagguaggaugccgcuuuu

SEQ ID NO: 683315 - RNA, 19 nt, Homo sapiens
  misc_RNA (1)...(19): siRNA sense strand
ccacuagauuucgaagaau

SEQ ID NO: 683316 - RNA, 19 nt, Homo sapiens
  misc_RNA (1)...(19): siRNA sense strand
ggcacaauaccauauaaau

SEQ ID NO: 683317 - RNA, 19 nt, Homo sapiens
  misc_RNA (1)...(19): siRNA sense strand
gcucuaacccucauuucuc

SEQ ID NO: 683318 - RNA, 19 nt, Homo sapiens
  misc_RNA (1)...(19): siRNA sense strand
gcggaagagccaccugauu

SEQ ID NO: 683319 - RNA, 19 nt, Homo sapiens
  misc_RNA (1)...(19): siRNA sense strand
cuccuacucugccuacauu

SEQ ID NO: 683320 - RNA, 19 nt, Homo sapiens
  misc_RNA (1)...(19): siRNA sense strand
aaacucacauuucacuacu

SEQ ID NO: 683321 - RNA, 19 nt, Homo sapiens
  misc_RNA (1)...(19): siRNA sense strand
cuccagcucuaucuacuga

SEQ ID NO: 683322 - RNA, 19 nt, Homo sapiens
  misc_RNA (1)...(19): siRNA sense strand
agaaguggcagcuugauca

SEQ ID NO: 683323 - RNA, 19 nt, Homo sapiens
  misc_RNA (1)...(19): siRNA sense strand
cgcaucgucuccagaggua

SEQ ID NO: 683324 - RNA, 19 nt, Homo sapiens
  misc_RNA (1)...(19): siRNA sense strand
aaaguuaagguacugauca

SEQ ID NO: 683325 - RNA, 19 nt, Homo sapiens
  misc_RNA (1)...(19): siRNA sense strand
cauuuacucaggcacaaua

SEQ ID NO: 683326 - RNA, 19 nt, Homo sapiens
  misc_RNA (1)...(19): siRNA sense strand
ucguuuagauucuuacaca

SEQ ID NO: 683327 - RNA, 19 nt, Homo sapiens
  misc_RNA (1)...(19): siRNA sense strand
ccaggagagcugugagaaa

SEQ ID NO: 683328 - RNA, 19 nt, Homo sapiens
  misc_RNA (1)...(19): siRNA sense strand
caucacaauaacagcaaua

SEQ ID NO: 683329 - RNA, 19 nt, Homo sapiens
  misc_RNA (1)...(19): siRNA sense strand
ccacugcaguuccagaaaa

SEQ ID NO: 683330 - RNA, 19 nt, Homo sapiens
  misc_RNA (1)...(19): siRNA sense strand
uguauucaauggaaguuca

SEQ ID NO: 683331 - RNA, 19 nt, Homo sapiens
  misc_RNA (1)...(19): siRNA sense strand
aaucacuuacucccuaaua

SEQ ID NO: 683332 - RNA, 19 nt, Homo sapiens
  misc_RNA (1)...(19): siRNA sense strand
uuuagugacugaaagaaca

SEQ ID NO: 683333 - RNA, 19 nt, Homo sapiens
  misc_RNA (1)...(19): siRNA sense strand
gccuccaucuucucuguga

SEQ ID NO: 683334 - RNA, 19 nt, Homo sapiens
  misc_RNA (1)...(19): siRNA sense strand
agagguaggaugccgcuuu

SEQ ID NO: 683335 - RNA, 19 nt, Homo sapiens
  misc_RNA (1)...(19): siRNA sense strand
ugugagggcccacgacuug

SEQ ID NO: 683336 - RNA, 19 nt, Homo sapiens
  misc_RNA (1)...(19): siRNA sense strand
acagaguggcccaaauauu

SEQ ID NO: 683337 - RNA, 19 nt, Homo sapiens
  misc_RNA (1)...(19): siRNA sense strand
gaggauaaaaugaagcuuu

SEQ ID NO: 683338 - RNA, 19 nt, Homo sapiens
  misc_RNA (1)...(19): siRNA sense strand
uaggcaacaucgccaagga

SEQ ID NO: 683339 - RNA, 19 nt, Homo sapiens
  misc_RNA (1)...(19): siRNA sense strand
acacaggagaaauaucaaa

SEQ ID NO: 683340 - RNA, 19 nt, Homo sapiens
  misc_RNA (1)...(19): siRNA sense strand
ggcccaaauauuucguuua

SEQ ID NO: 683341 - RNA, 19 nt, Homo sapiens
  misc_RNA (1)...(19): siRNA sense strand
uaagguacugaucaaaguu

SEQ ID NO: 683342 - RNA, 19 nt, Homo sapiens
  misc_RNA (1)...(19): siRNA sense strand
cugccuaccucuccaucaa

SEQ ID NO: 683343 - RNA, 19 nt, Homo sapiens
  misc_RNA (1)...(19): siRNA sense strand
gggaccauaauugcucuua

SEQ ID NO: 683344 - RNA, 19 nt, Homo sapiens
  misc_RNA (1)...(19): siRNA sense strand
gaaauaacgacuccaggua

SEQ ID NO: 683345 - RNA, 19 nt, Homo sapiens
  misc_RNA (1)...(19): siRNA sense strand
gaacuuaucucuggguaca

SEQ ID NO: 683346 - RNA, 19 nt, Homo sapiens
  misc_RNA (1)...(19): siRNA sense strand
ugacaauccuccagcauuu

SEQ ID NO: 683347 - RNA, 19 nt, Homo sapiens
  misc_RNA (1)...(19): siRNA sense strand
ccaaggaacuccagcucua

SEQ ID NO: 683348 - RNA, 19 nt, Homo sapiens
  misc_RNA (1)...(19): siRNA sense strand
ugacagauaucaaugacaa

SEQ ID NO: 683349 - RNA, 19 nt, Homo sapiens
  misc_RNA (1)...(19): siRNA sense strand
cagaguggcccaaauauuu

SEQ ID NO: 683350 - RNA, 19 nt, Homo sapiens
  misc_RNA (1)...(19): siRNA sense strand
aaagaacacuggacagaga

SEQ ID NO: 683351 - RNA, 19 nt, Homo sapiens
  misc_RNA (1)...(19): siRNA sense strand
gcacaauaccauauaaaug

SEQ ID NO: 683352 - RNA, 19 nt, Homo sapiens
  misc_RNA (1)...(19): siRNA sense strand
gcaaugagaaugcacaaau

SEQ ID NO: 683353 - RNA, 19 nt, Homo sapiens
  misc_RNA (1)...(19): siRNA sense strand
gcccaaauauuucguuuag

SEQ ID NO: 683354 - RNA, 19 nt, Homo sapiens
  misc_RNA (1)...(19): siRNA sense strand
gcacaagucacgucugcua

SEQ ID NO: 683355 - RNA, 19 nt, Homo sapiens
  misc_RNA (1)...(19): siRNA sense strand
gcucauggcuaaaguuaag

SEQ ID NO: 683356 - RNA, 19 nt, Homo sapiens
  misc_RNA (1)...(19): siRNA sense strand
guacucagcugcucauggu

SEQ ID NO: 683357 - RNA, 19 nt, Homo sapiens
  misc_RNA (1)...(19): siRNA sense strand
caaaucacuuacucccuaa

SEQ ID NO: 683358 - RNA, 19 nt, Homo sapiens
  misc_RNA (1)...(19): siRNA sense strand
uaaagaaccacuagauuuc

SEQ ID NO: 683359 - RNA, 19 nt, Homo sapiens
  misc_RNA (1)...(19): siRNA sense strand
guacuccuuucacaaugua

SEQ ID NO: 683360 - RNA, 19 nt, Homo sapiens
  misc_RNA (1)...(19): siRNA sense strand
cggaagagccaccugauuu

SEQ ID NO: 683361 - RNA, 19 nt, Homo sapiens
  misc_RNA (1)...(19): siRNA sense strand
uaauugcucuuaucagugu

SEQ ID NO: 683362 - RNA, 19 nt, Homo sapiens
  misc_RNA (1)...(19): siRNA sense strand
gaagagacagacaaagguu

SEQ ID NO: 683363 - RNA, 19 nt, Homo sapiens
  misc_RNA (1)...(19): siRNA sense strand
ugaacucacuccagagcua

SEQ ID NO: 683364 - RNA, 19 nt, Homo sapiens
  misc_RNA (1)...(19): siRNA sense strand
ccuggaaauuuacccuuua

SEQ ID NO: 683365 - RNA, 19 nt, Homo sapiens
  misc_RNA (1)...(19): siRNA sense strand
gcuaccaacucagcucuaa

SEQ ID NO: 683366 - RNA, 19 nt, Homo sapiens
  misc_RNA (1)...(19): siRNA sense strand
cacuagauuucgaagaaua

SEQ ID NO: 683367 - RNA, 19 nt, Homo sapiens
  misc_RNA (1)...(19): siRNA sense strand
gacaauggcuacaccacau

SEQ ID NO: 683368 - RNA, 19 nt, Homo sapiens
  misc_RNA (1)...(19): siRNA sense strand
ggguacaacaucacaauaa

SEQ ID NO: 683369 - RNA, 19 nt, Homo sapiens
  misc_RNA (1)...(19): siRNA sense strand
caaugagaaugcacaaauc

SEQ ID NO: 683370 - RNA, 19 nt, Homo sapiens
  misc_RNA (1)...(19): siRNA sense strand
caacaucgccaaggaccua

SEQ ID NO: 683371 - RNA, 19 nt, Homo sapiens
  misc_RNA (1)...(19): siRNA sense strand
gggcuuuccugcagaccua

SEQ ID NO: 683372 - RNA, 19 nt, Homo sapiens
  misc_RNA (1)...(19): siRNA sense strand
ggacagcaaugagaaugca

SEQ ID NO: 683373 - RNA, 19 nt, Homo sapiens
  misc_RNA (1)...(19): siRNA sense strand
gggcucauggcuaaaguua

SEQ ID NO: 683374 - RNA, 19 nt, Homo sapiens
  misc_RNA (1)...(19): siRNA sense strand
gcagagucccuuagacaga

SEQ ID NO: 683375 - RNA, 19 nt, Homo sapiens
  misc_RNA (1)...(19): siRNA sense strand
agaaugcacaaaucacuua

SEQ ID NO: 683376 - RNA, 19 nt, Homo sapiens
  misc_RNA (1)...(19): siRNA sense strand
ccagcucuaucuacugaaa

SEQ ID NO: 683377 - RNA, 19 nt, Homo sapiens
  misc_RNA (1)...(19): siRNA sense strand
ggacagagacgcgcucaag

SEQ ID NO: 683378 - RNA, 19 nt, Homo sapiens
  misc_RNA (1)...(19): siRNA sense strand
gagccuccaucuucucugu

SEQ ID NO: 683379 - RNA, 19 nt, Homo sapiens
  misc_RNA (1)...(19): siRNA sense strand
ugacaacacuccccaauuc

SEQ ID NO: 683380 - RNA, 19 nt, Homo sapiens
  misc_RNA (1)...(19): siRNA sense strand
guaacguacuccuuucaca

SEQ ID NO: 683381 - RNA, 19 nt, Homo sapiens
  misc_RNA (1)...(19): siRNA sense strand
caggcacaauaccauauaa

SEQ ID NO: 683382 - RNA, 19 nt, Homo sapiens
  misc_RNA (1)...(19): siRNA sense strand
ggaagagacagacaaaggu

SEQ ID NO: 683383 - RNA, 19 nt, Homo sapiens
  misc_RNA (1)...(19): siRNA sense strand
gacaauccuccagcauuua

SEQ ID NO: 683384 - RNA, 19 nt, Homo sapiens
  misc_RNA (1)...(19): siRNA sense strand
gacaugcaacugaaaguga

SEQ ID NO: 683385 - RNA, 19 nt, Homo sapiens
  misc_RNA (1)...(19): siRNA sense strand
ugccgugucucgugaguuu

SEQ ID NO: 683386 - RNA, 19 nt, Homo sapiens
  misc_RNA (1)...(19): siRNA sense strand
gaccaggacucaggagaca

SEQ ID NO: 683387 - RNA, 19 nt, Homo sapiens
  misc_RNA (1)...(19): siRNA sense strand
uuaagguacugaucaaagu

SEQ ID NO: 683388 - RNA, 19 nt, Homo sapiens
  misc_RNA (1)...(19): siRNA sense strand
cuccagagcuaccaacuca

SEQ ID NO: 683389 - RNA, 19 nt, Homo sapiens
  misc_RNA (1)...(19): siRNA sense strand
gagcccugcuggacagaga

SEQ ID NO: 683390 - RNA, 19 nt, Homo sapiens
  misc_RNA (1)...(19): siRNA sense strand
gguacaacaucacaauaac

SEQ ID NO: 683391 - RNA, 19 nt, Homo sapiens
  misc_RNA (1)...(19): siRNA sense strand
uuacacaggagaaauauca

SEQ ID NO: 683392 - RNA, 19 nt, Homo sapiens
  misc_RNA (1)...(19): siRNA sense strand
cuggaaauuuacccuuuaa

SEQ ID NO: 683393 - RNA, 19 nt, Homo sapiens
  misc_RNA (1)...(19): siRNA sense strand
gaacuccagcucuaucuac

SEQ ID NO: 683394 - RNA, 19 nt, Homo sapiens
  misc_RNA (1)...(19): siRNA sense strand
ugaaagaacacuggacaga

SEQ ID NO: 683395 - RNA, 19 nt, Homo sapiens
  misc_RNA (1)...(19): siRNA sense strand
uaacguacuccuuucacaa

SEQ ID NO: 683396 - RNA, 19 nt, Homo sapiens
  misc_RNA (1)...(19): siRNA sense strand
caggagagcugugagaaaa

SEQ ID NO: 683397 - RNA, 19 nt, Homo sapiens
  misc_RNA (1)...(19): siRNA sense strand
auucggaccucacucugua

SEQ ID NO: 683398 - RNA, 19 nt, Homo sapiens
  misc_RNA (1)...(19): siRNA sense strand
gagaaugcacaaaucacuu

SEQ ID NO: 683399 - RNA, 19 nt, Homo sapiens
  misc_RNA (1)...(19): siRNA sense strand
acacuggacagagaacuua

SEQ ID NO: 683400 - RNA, 19 nt, Homo sapiens
  misc_RNA (1)...(19): siRNA sense strand
caaauaaagaaccacuaga

SEQ ID NO: 683401 - RNA, 19 nt, Homo sapiens
  misc_RNA (1)...(19): siRNA sense strand
gggcugggaauauucacua

SEQ ID NO: 683402 - RNA, 19 nt, Homo sapiens
  misc_RNA (1)...(19): siRNA sense strand
ggaauauucacuacucagu

SEQ ID NO: 683403 - RNA, 19 nt, Homo sapiens
  misc_RNA (1)...(19): siRNA sense strand
cuacaccacauguuucauu

SEQ ID NO: 683404 - RNA, 19 nt, Homo sapiens
  misc_RNA (1)...(19): siRNA sense strand
accacuagauuucgaagaa

SEQ ID NO: 683405 - RNA, 19 nt, Homo sapiens
  misc_RNA (1)...(19): siRNA sense strand
ggacaugcaacugaaagug

SEQ ID NO: 683406 - RNA, 19 nt, Homo sapiens
  misc_RNA (1)...(19): siRNA sense strand
gcugcgauccuucgacuau

SEQ ID NO: 683407 - RNA, 19 nt, Homo sapiens
  misc_RNA (1)...(19): siRNA sense strand
ucacuuacucccuaauaga

SEQ ID NO: 683408 - RNA, 19 nt, Homo sapiens
  misc_RNA (1)...(19): siRNA sense strand
ggaacuccagcucuaucua

SEQ ID NO: 683409 - RNA, 19 nt, Homo sapiens
  misc_RNA (1)...(19): siRNA sense strand
guacaacaucacaauaaca

SEQ ID NO: 683410 - RNA, 19 nt, Homo sapiens
  misc_RNA (1)...(19): siRNA sense strand
ucaaauaaagaaccacuag

SEQ ID NO: 683411 - RNA, 19 nt, Homo sapiens
  misc_RNA (1)...(19): siRNA sense strand
ggaagagccaccugauuuu

SEQ ID NO: 683412 - RNA, 19 nt, Homo sapiens
  misc_RNA (1)...(19): siRNA sense strand
ucaggcacaauaccauaua

SEQ ID NO: 683413 - RNA, 19 nt, Homo sapiens
  misc_RNA (1)...(19): siRNA sense strand
gcucugaauccuagaagug

SEQ ID NO: 683414 - RNA, 19 nt, Homo sapiens
  misc_RNA (1)...(19): siRNA sense strand
gagguaggaugccgcuuuu

SEQ ID NO: 683415 - RNA, 19 nt, Homo sapiens
  misc_RNA (1)...(19): siRNA sense strand
ccacuagauuucgaagaau

SEQ ID NO: 683416 - RNA, 19 nt, Homo sapiens
  misc_RNA (1)...(19): siRNA sense strand
ggcacaauaccauauaaau

SEQ ID NO: 683417 - RNA, 19 nt, Homo sapiens
  misc_RNA (1)...(19): siRNA sense strand
gcucuaacccucauuucuc

SEQ ID NO: 683418 - RNA, 19 nt, Homo sapiens
  misc_RNA (1)...(19): siRNA sense strand
gcggaagagccaccugauu

SEQ ID NO: 683419 - RNA, 19 nt, Homo sapiens
  misc_RNA (1)...(19): siRNA sense strand
cuccuacucugccuacauu

SEQ ID NO: 683420 - RNA, 19 nt, Homo sapiens
  misc_RNA (1)...(19): siRNA sense strand
aaacucacauuucacuacu

SEQ ID NO: 683421 - RNA, 19 nt, Homo sapiens
  misc_RNA (1)...(19): siRNA sense strand
cuccagcucuaucuacuga

SEQ ID NO: 683422 - RNA, 19 nt, Homo sapiens
  misc_RNA (1)...(19): siRNA sense strand
agaaguggcagcuugauca

SEQ ID NO: 683423 - RNA, 19 nt, Homo sapiens
  misc_RNA (1)...(19): siRNA sense strand
cgcaucgucuccagaggua

SEQ ID NO: 683424 - RNA, 19 nt, Homo sapiens
  misc_RNA (1)...(19): siRNA sense strand
aaaguuaagguacugauca

SEQ ID NO: 683425 - RNA, 19 nt, Homo sapiens
  misc_RNA (1)...(19): siRNA sense strand
cauuuacucaggcacaaua

SEQ ID NO: 683426 - RNA, 19 nt, Homo sapiens
  misc_RNA (1)...(19): siRNA sense strand
ucguuuagauucuuacaca

SEQ ID NO: 683427 - RNA, 19 nt, Homo sapiens
  misc_RNA (1)...(19): siRNA sense strand
ccaggagagcugugagaaa

SEQ ID NO: 683428 - RNA, 19 nt, Homo sapiens
  misc_RNA (1)...(19): siRNA sense strand
caucacaauaacagcaaua

SEQ ID NO: 683429 - RNA, 19 nt, Homo sapiens
  misc_RNA (1)...(19): siRNA sense strand
ccacugcaguuccagaaaa

SEQ ID NO: 683430 - RNA, 19 nt, Homo sapiens
  misc_RNA (1)...(19): siRNA sense strand
uguauucaauggaaguuca

SEQ ID NO: 683431 - RNA, 19 nt, Homo sapiens
  misc_RNA (1)...(19): siRNA sense strand
aaucacuuacucccuaaua

SEQ ID NO: 683432 - RNA, 19 nt, Homo sapiens
  misc_RNA (1)...(19): siRNA sense strand
uuuagugacugaaagaaca

SEQ ID NO: 683433 - RNA, 19 nt, Homo sapiens
  misc_RNA (1)...(19): siRNA sense strand
gccuccaucuucucuguga

SEQ ID NO: 683434 - RNA, 19 nt, Homo sapiens
  misc_RNA (1)...(19): siRNA sense strand
agagguaggaugccgcuuu

SEQ ID NO: 683435 - RNA, 19 nt, Homo sapiens
  misc_RNA (1)...(19): siRNA sense strand
ugugagggcccacgacuug

SEQ ID NO: 683436 - RNA, 19 nt, Homo sapiens
  misc_RNA (1)...(19): siRNA sense strand
acagaguggcccaaauauu

SEQ ID NO: 683437 - RNA, 19 nt, Homo sapiens
  misc_RNA (1)...(19): siRNA sense strand
gaggauaaaaugaagcuuu

SEQ ID NO: 683438 - RNA, 19 nt, Homo sapiens
  misc_RNA (1)...(19): siRNA sense strand
uaggcaacaucgccaagga

SEQ ID NO: 683439 - RNA, 19 nt, Homo sapiens
  misc_RNA (1)...(19): siRNA sense strand
acacaggagaaauaucaaa

SEQ ID NO: 683440 - RNA, 19 nt, Homo sapiens
  misc_RNA (1)...(19): siRNA sense strand
ggcccaaauauuucguuua

SEQ ID NO: 683441 - RNA, 19 nt, Homo sapiens
  misc_RNA (1)...(19): siRNA sense strand
uaagguacugaucaaaguu

SEQ ID NO: 683442 - RNA, 19 nt, Homo sapiens
  misc_RNA (1)...(19): siRNA sense strand
cugccuaccucuccaucaa

SEQ ID NO: 683443 - RNA, 19 nt, Homo sapiens
  misc_RNA (1)...(19): siRNA sense strand
gggaccauaauugcucuua

SEQ ID NO: 683444 - RNA, 19 nt, Homo sapiens
  misc_RNA (1)...(19): siRNA sense strand
gaacuaugcuuguuaauga

SEQ ID NO: 683445 - RNA, 19 nt, Homo sapiens
  misc_RNA (1)...(19): siRNA sense strand
gaacauagcaagagcauua

SEQ ID NO: 683446 - RNA, 19 nt, Homo sapiens
  misc_RNA (1)...(19): siRNA sense strand
gaagaaugcaccacaauua

SEQ ID NO: 683447 - RNA, 19 nt, Homo sapiens
  misc_RNA (1)...(19): siRNA sense strand
gaaccugugugaagaauuu

SEQ ID NO: 683448 - RNA, 19 nt, Homo sapiens
  misc_RNA (1)...(19): siRNA sense strand
ggaaagagaaagaguuaua

SEQ ID NO: 683449 - RNA, 19 nt, Homo sapiens
  misc_RNA (1)...(19): siRNA sense strand
gcaagagcauuacaauuau

SEQ ID NO: 683450 - RNA, 19 nt, Homo sapiens
  misc_RNA (1)...(19): siRNA sense strand
gcaguuaacuucagauagu

SEQ ID NO: 683451 - RNA, 19 nt, Homo sapiens
  misc_RNA (1)...(19): siRNA sense strand
caagaacuacugaugauua

SEQ ID NO: 683452 - RNA, 19 nt, Homo sapiens
  misc_RNA (1)...(19): siRNA sense strand
gaacuuucuuguuacgaua

SEQ ID NO: 683453 - RNA, 19 nt, Homo sapiens
  misc_RNA (1)...(19): siRNA sense strand
gaaauuagacagaauguuc

SEQ ID NO: 683454 - RNA, 19 nt, Homo sapiens
  misc_RNA (1)...(19): siRNA sense strand
gaggaaagagaaagaguua

SEQ ID NO: 683455 - RNA, 19 nt, Homo sapiens
  misc_RNA (1)...(19): siRNA sense strand
ccaaaguacuggagaagaa

SEQ ID NO: 683456 - RNA, 19 nt, Homo sapiens
  misc_RNA (1)...(19): siRNA sense strand
gaacucaucagcuguaaug

SEQ ID NO: 683457 - RNA, 19 nt, Homo sapiens
  misc_RNA (1)...(19): siRNA sense strand
acaauuauaugcccugauu

SEQ ID NO: 683458 - RNA, 19 nt, Homo sapiens
  misc_RNA (1)...(19): siRNA sense strand
gagaaagaguuauagaagu

SEQ ID NO: 683459 - RNA, 19 nt, Homo sapiens
  misc_RNA (1)...(19): siRNA sense strand
cuaagacgauaaagaauug

SEQ ID NO: 683460 - RNA, 19 nt, Homo sapiens
  misc_RNA (1)...(19): siRNA sense strand
gaauuguucucaggacuuu

SEQ ID NO: 683461 - RNA, 19 nt, Homo sapiens
  misc_RNA (1)...(19): siRNA sense strand
ucagcuaacuacugguuua

SEQ ID NO: 683462 - RNA, 19 nt, Homo sapiens
  misc_RNA (1)...(19): siRNA sense strand
cccaauggcuggauauauu

SEQ ID NO: 683463 - RNA, 19 nt, Homo sapiens
  misc_RNA (1)...(19): siRNA sense strand
agcaagagcauuacaauua

SEQ ID NO: 683464 - RNA, 19 nt, Homo sapiens
  misc_RNA (1)...(19): siRNA sense strand
agaaauugaugaagcauug

SEQ ID NO: 683465 - RNA, 19 nt, Homo sapiens
  misc_RNA (1)...(19): siRNA sense strand
gcccugaugugauaauuga

SEQ ID NO: 683466 - RNA, 19 nt, Homo sapiens
  misc_RNA (1)...(19): siRNA sense strand
gaaugcaccacaauuauau

SEQ ID NO: 683467 - RNA, 19 nt, Homo sapiens
  misc_RNA (1)...(19): siRNA sense strand
gaacacaugcagaagcaaa

SEQ ID NO: 683468 - RNA, 19 nt, Homo sapiens
  misc_RNA (1)...(19): siRNA sense strand
uaaggaagacuccauaaug

SEQ ID NO: 683469 - RNA, 19 nt, Homo sapiens
  misc_RNA (1)...(19): siRNA sense strand
gaaggaggguauccagauc

SEQ ID NO: 683470 - RNA, 19 nt, Homo sapiens
  misc_RNA (1)...(19): siRNA sense strand
gaacauacugugaccugaa

SEQ ID NO: 683471 - RNA, 19 nt, Homo sapiens
  misc_RNA (1)...(19): siRNA sense strand
guuaaugacugaagaaugc

SEQ ID NO: 683472 - RNA, 19 nt, Homo sapiens
  misc_RNA (1)...(19): siRNA sense strand
uaauagauccuugccauuu

SEQ ID NO: 683473 - RNA, 19 nt, Homo sapiens
  misc_RNA (1)...(19): siRNA sense strand
gaaaagcacuugaacacau

SEQ ID NO: 683474 - RNA, 19 nt, Homo sapiens
  misc_RNA (1)...(19): siRNA sense strand
ucucaggacuuuaagaaga

SEQ ID NO: 683475 - RNA, 19 nt, Homo sapiens
  misc_RNA (1)...(19): siRNA sense strand
ccaauggcuggauauauua

SEQ ID NO: 683476 - RNA, 19 nt, Homo sapiens
  misc_RNA (1)...(19): siRNA sense strand
ggaacuuucuuguuacgau

SEQ ID NO: 683477 - RNA, 19 nt, Homo sapiens
  misc_RNA (1)...(19): siRNA sense strand
ugggaaagauugaauuuag

SEQ ID NO: 683478 - RNA, 19 nt, Homo sapiens
  misc_RNA (1)...(19): siRNA sense strand
gaacuacugaugauuaucu

SEQ ID NO: 683479 - RNA, 19 nt, Homo sapiens
  misc_RNA (1)...(19): siRNA sense strand
ggacuuugcaguuaacuuc

SEQ ID NO: 683480 - RNA, 19 nt, Homo sapiens
  misc_RNA (1)...(19): siRNA sense strand
gaauacagcacaccauagu

SEQ ID NO: 683481 - RNA, 19 nt, Homo sapiens
  misc_RNA (1)...(19): siRNA sense strand
uauccggacuuugcaguua

SEQ ID NO: 683482 - RNA, 19 nt, Homo sapiens
  misc_RNA (1)...(19): siRNA sense strand
aaagcuacauugaagagaa

SEQ ID NO: 683483 - RNA, 19 nt, Homo sapiens
  misc_RNA (1)...(19): siRNA sense strand
caaguuaguucuccacaac

SEQ ID NO: 683484 - RNA, 19 nt, Homo sapiens
  misc_RNA (1)...(19): siRNA sense strand
ggacacuaauacugcagaa

SEQ ID NO: 683485 - RNA, 19 nt, Homo sapiens
  misc_RNA (1)...(19): siRNA sense strand
uauagaaguuguggagaaa

SEQ ID NO: 683486 - RNA, 19 nt, Homo sapiens
  misc_RNA (1)...(19): siRNA sense strand
agaaugcaccacaauuaua

SEQ ID NO: 683487 - RNA, 19 nt, Homo sapiens
  misc_RNA (1)...(19): siRNA sense strand
gaagaauuugcaagaacua

SEQ ID NO: 683488 - RNA, 19 nt, Homo sapiens
  misc_RNA (1)...(19): siRNA sense strand
ggaaggaggguauccagau

SEQ ID NO: 683489 - RNA, 19 nt, Homo sapiens
  misc_RNA (1)...(19): siRNA sense strand
gaugaagcauugaauacag

SEQ ID NO: 683490 - RNA, 19 nt, Homo sapiens
  misc_RNA (1)...(19): siRNA sense strand
gaagcaaacgauagaggaa

SEQ ID NO: 683491 - RNA, 19 nt, Homo sapiens
  misc_RNA (1)...(19): siRNA sense strand
uaaaaccauugcuguguua

SEQ ID NO: 683492 - RNA, 19 nt, Homo sapiens
  misc_RNA (1)...(19): siRNA sense strand
gaauuuagggacucaacaa

SEQ ID NO: 683493 - RNA, 19 nt, Homo sapiens
  misc_RNA (1)...(19): siRNA sense strand
ugaauuagcacaaguuagu

SEQ ID NO: 683494 - RNA, 19 nt, Homo sapiens
  misc_RNA (1)...(19): siRNA sense strand
gaaagagaaagaguuauag

SEQ ID NO: 683495 - RNA, 19 nt, Homo sapiens
  misc_RNA (1)...(19): siRNA sense strand
gcuguaauguuggacacua

SEQ ID NO: 683496 - RNA, 19 nt, Homo sapiens
  misc_RNA (1)...(19): siRNA sense strand
uuauagaaguuguggagaa

SEQ ID NO: 683497 - RNA, 19 nt, Homo sapiens
  misc_RNA (1)...(19): siRNA sense strand
cuggauauauuaaggaaga

SEQ ID NO: 683498 - RNA, 19 nt, Homo sapiens
  misc_RNA (1)...(19): siRNA sense strand
ugagacaaaugauguacau

SEQ ID NO: 683499 - RNA, 19 nt, Homo sapiens
  misc_RNA (1)...(19): siRNA sense strand
gacagaauguucaaaagaa

SEQ ID NO: 683500 - RNA, 19 nt, Homo sapiens
  misc_RNA (1)...(19): siRNA sense strand
gcuaaaagcuacauugaag

SEQ ID NO: 683501 - RNA, 19 nt, Homo sapiens
  misc_RNA (1)...(19): siRNA sense strand
ugugaacuaugcuuguuaa

SEQ ID NO: 683502 - RNA, 19 nt, Homo sapiens
  misc_RNA (1)...(19): siRNA sense strand
cucaucagcuguaauguug

SEQ ID NO: 683503 - RNA, 19 nt, Homo sapiens
  misc_RNA (1)...(19): siRNA sense strand
uaagaagacugcugaucag

SEQ ID NO: 683504 - RNA, 19 nt, Homo sapiens
  misc_RNA (1)...(19): siRNA sense strand
gaucauccggucaccauug

SEQ ID NO: 683505 - RNA, 19 nt, Homo sapiens
  misc_RNA (1)...(19): siRNA sense strand
caagagcauuacaauuauc

SEQ ID NO: 683506 - RNA, 19 nt, Homo sapiens
  misc_RNA (1)...(19): siRNA sense strand
agaagaaauugaugaagca

SEQ ID NO: 683507 - RNA, 19 nt, Homo sapiens
  misc_RNA (1)...(19): siRNA sense strand
ggaucuagcccugauguga

SEQ ID NO: 683508 - RNA, 19 nt, Homo sapiens
  misc_RNA (1)...(19): siRNA sense strand
gauagaggaaagagaaaga

SEQ ID NO: 683509 - RNA, 19 nt, Homo sapiens
  misc_RNA (1)...(19): siRNA sense strand
gaucagcuaacuacugguu

SEQ ID NO: 683510 - RNA, 19 nt, Homo sapiens
  misc_RNA (1)...(19): siRNA sense strand
uguaagccauguaauagau

SEQ ID NO: 683511 - RNA, 19 nt, Homo sapiens
  misc_RNA (1)...(19): siRNA sense strand
gaugggaucuagcccugau

SEQ ID NO: 683512 - RNA, 19 nt, Homo sapiens
  misc_RNA (1)...(19): siRNA sense strand
gcaacagcauccccuaaaa

SEQ ID NO: 683513 - RNA, 19 nt, Homo sapiens
  misc_RNA (1)...(19): siRNA sense strand
gaaagaguuauagaaguug

SEQ ID NO: 683514 - RNA, 19 nt, Homo sapiens
  misc_RNA (1)...(19): siRNA sense strand
ccuaagacgauaaagaauu

SEQ ID NO: 683515 - RNA, 19 nt, Homo sapiens
  misc_RNA (1)...(19): siRNA sense strand
gaauugcagugagaucauc

SEQ ID NO: 683516 - RNA, 19 nt, Homo sapiens
  misc_RNA (1)...(19): siRNA sense strand
gauagugaauuagcacaag

SEQ ID NO: 683517 - RNA, 19 nt, Homo sapiens
  misc_RNA (1)...(19): siRNA sense strand
guaauguuggacacuaaua

SEQ ID NO: 683518 - RNA, 19 nt, Homo sapiens
  misc_RNA (1)...(19): siRNA sense strand
uuaagaagacugcugauca

SEQ ID NO: 683519 - RNA, 19 nt, Homo sapiens
  misc_RNA (1)...(19): siRNA sense strand
auacagcacaccauaguuu

SEQ ID NO: 683520 - RNA, 19 nt, Homo sapiens
  misc_RNA (1)...(19): siRNA sense strand
ugauguacauuuagaagca

SEQ ID NO: 683521 - RNA, 19 nt, Homo sapiens
  misc_RNA (1)...(19): siRNA sense strand
gcaagaacuacugaugauu

SEQ ID NO: 683522 - RNA, 19 nt, Homo sapiens
  misc_RNA (1)...(19): siRNA sense strand
ugaagaaugcaccacaauu

SEQ ID NO: 683523 - RNA, 19 nt, Homo sapiens
  misc_RNA (1)...(19): siRNA sense strand
caucagcuguaauguugga

SEQ ID NO: 683524 - RNA, 19 nt, Homo sapiens
  misc_RNA (1)...(19): siRNA sense strand
gggaaagauugaauuuagg

SEQ ID NO: 683525 - RNA, 19 nt, Homo sapiens
  misc_RNA (1)...(19): siRNA sense strand
uaauuugaaugcagcuaug

SEQ ID NO: 683526 - RNA, 19 nt, Homo sapiens
  misc_RNA (1)...(19): siRNA sense strand
acacuaauacugcagaaga

SEQ ID NO: 683527 - RNA, 19 nt, Homo sapiens
  misc_RNA (1)...(19): siRNA sense strand
gugaagaauuugcaagaac

SEQ ID NO: 683528 - RNA, 19 nt, Homo sapiens
  misc_RNA (1)...(19): siRNA sense strand
ucaacaauaugggaaagau

SEQ ID NO: 683529 - RNA, 19 nt, Homo sapiens
  misc_RNA (1)...(19): siRNA sense strand
acaauuaucgccuucucua

SEQ ID NO: 683530 - RNA, 19 nt, Homo sapiens
  misc_RNA (1)...(19): siRNA sense strand
aagcuacauugaagagaaa

SEQ ID NO: 683531 - RNA, 19 nt, Homo sapiens
  misc_RNA (1)...(19): siRNA sense strand
ugaagaauuugcaagaacu

SEQ ID NO: 683532 - RNA, 19 nt, Homo sapiens
  misc_RNA (1)...(19): siRNA sense strand
uagaaguuguggagaaaca

SEQ ID NO: 683533 - RNA, 19 nt, Homo sapiens
  misc_RNA (1)...(19): siRNA sense strand
caacaauaugggaaagauu

SEQ ID NO: 683534 - RNA, 19 nt, Homo sapiens
  misc_RNA (1)...(19): siRNA sense strand
ccucccagguugaguguga

SEQ ID NO: 683535 - RNA, 19 nt, Homo sapiens
  misc_RNA (1)...(19): siRNA sense strand
cacuaauacugcagaagaa

SEQ ID NO: 683536 - RNA, 19 nt, Homo sapiens
  misc_RNA (1)...(19): siRNA sense strand
guaauagauccuugccauu

SEQ ID NO: 683537 - RNA, 19 nt, Homo sapiens
  misc_RNA (1)...(19): siRNA sense strand
acagaaagacguugcaaca

SEQ ID NO: 683538 - RNA, 19 nt, Homo sapiens
  misc_RNA (1)...(19): siRNA sense strand
caacgcuacuacccaaugg

SEQ ID NO: 683539 - RNA, 19 nt, Homo sapiens
  misc_RNA (1)...(19): siRNA sense strand
aauaaaagacgccaaagua

SEQ ID NO: 683540 - RNA, 19 nt, Homo sapiens
  misc_RNA (1)...(19): siRNA sense strand
aauagauccuugccauuuc

SEQ ID NO: 683541 - RNA, 19 nt, Homo sapiens
  misc_RNA (1)...(19): siRNA sense strand
ccauaguuucgaacaguua

SEQ ID NO: 683542 - RNA, 19 nt, Homo sapiens
  misc_RNA (1)...(19): siRNA sense strand
gaucuagcccugaugugau

SEQ ID NO: 683543 - RNA, 19 nt, Homo sapiens
  misc_RNA (1)...(19): siRNA sense strand
caauuaucgccuucucuaa

SEQ ID NO: 683544 - RNA, 19 nt, Homo sapiens
  misc_RNA (1)...(19): siRNA sense strand
gaacuaugcuuguuaauga

SEQ ID NO: 683545 - RNA, 19 nt, Homo sapiens
  misc_RNA (1)...(19): siRNA sense strand
gaacauagcaagagcauua

SEQ ID NO: 683546 - RNA, 19 nt, Homo sapiens
  misc_RNA (1)...(19): siRNA sense strand
gaagaaugcaccacaauua

SEQ ID NO: 683547 - RNA, 19 nt, Homo sapiens
  misc_RNA (1)...(19): siRNA sense strand
gaaccugugugaagaauuu

SEQ ID NO: 683548 - RNA, 19 nt, Homo sapiens
  misc_RNA (1)...(19): siRNA sense strand
ggaaagagaaagaguuaua

SEQ ID NO: 683549 - RNA, 19 nt, Homo sapiens
  misc_RNA (1)...(19): siRNA sense strand
gcaagagcauuacaauuau

SEQ ID NO: 683550 - RNA, 19 nt, Homo sapiens
  misc_RNA (1)...(19): siRNA sense strand
gcaguuaacuucagauagu

SEQ ID NO: 683551 - RNA, 19 nt, Homo sapiens
  misc_RNA (1)...(19): siRNA sense strand
caagaacuacugaugauua

SEQ ID NO: 683552 - RNA, 19 nt, Homo sapiens
  misc_RNA (1)...(19): siRNA sense strand
gaacuuucuuguuacgaua

SEQ ID NO: 683553 - RNA, 19 nt, Homo sapiens
  misc_RNA (1)...(19): siRNA sense strand
gaaauuagacagaauguuc

SEQ ID NO: 683554 - RNA, 19 nt, Homo sapiens
  misc_RNA (1)...(19): siRNA sense strand
gaggaaagagaaagaguua

SEQ ID NO: 683555 - RNA, 19 nt, Homo sapiens
  misc_RNA (1)...(19): siRNA sense strand
gaacucaucagcuguaaug

SEQ ID NO: 683556 - RNA, 19 nt, Homo sapiens
  misc_RNA (1)...(19): siRNA sense strand
acaauuauaugcccugauu

SEQ ID NO: 683557 - RNA, 19 nt, Homo sapiens
  misc_RNA (1)...(19): siRNA sense strand
gagaaagaguuauagaagu

SEQ ID NO: 683558 - RNA, 19 nt, Homo sapiens
  misc_RNA (1)...(19): siRNA sense strand
cuaagacgauaaagaauug

SEQ ID NO: 683559 - RNA, 19 nt, Homo sapiens
  misc_RNA (1)...(19): siRNA sense strand
gaauuguucucaggacuuu

SEQ ID NO: 683560 - RNA, 19 nt, Homo sapiens
  misc_RNA (1)...(19): siRNA sense strand
ucagcuaacuacugguuua

SEQ ID NO: 683561 - RNA, 19 nt, Homo sapiens
  misc_RNA (1)...(19): siRNA sense strand
cccaauggcuggauauauu

SEQ ID NO: 683562 - RNA, 19 nt, Homo sapiens
  misc_RNA (1)...(19): siRNA sense strand
agcaagagcauuacaauua

SEQ ID NO: 683563 - RNA, 19 nt, Homo sapiens
  misc_RNA (1)...(19): siRNA sense strand
agaaauugaugaagcauug

SEQ ID NO: 683564 - RNA, 19 nt, Homo sapiens
  misc_RNA (1)...(19): siRNA sense strand
gcccugaugugauaauuga

SEQ ID NO: 683565 - RNA, 19 nt, Homo sapiens
  misc_RNA (1)...(19): siRNA sense strand
gaaugcaccacaauuauau

SEQ ID NO: 683566 - RNA, 19 nt, Homo sapiens
  misc_RNA (1)...(19): siRNA sense strand
gaacacaugcagaagcaaa

SEQ ID NO: 683567 - RNA, 19 nt, Homo sapiens
  misc_RNA (1)...(19): siRNA sense strand
uaaggaagacuccauaaug

SEQ ID NO: 683568 - RNA, 19 nt, Homo sapiens
  misc_RNA (1)...(19): siRNA sense strand
gaaggaggguauccagauc

SEQ ID NO: 683569 - RNA, 19 nt, Homo sapiens
  misc_RNA (1)...(19): siRNA sense strand
gaacauacugugaccugaa

SEQ ID NO: 683570 - RNA, 19 nt, Homo sapiens
  misc_RNA (1)...(19): siRNA sense strand
guuaaugacugaagaaugc

SEQ ID NO: 683571 - RNA, 19 nt, Homo sapiens
  misc_RNA (1)...(19): siRNA sense strand
gaaaagcacuugaacacau

SEQ ID NO: 683572 - RNA, 19 nt, Homo sapiens
  misc_RNA (1)...(19): siRNA sense strand
ucucaggacuuuaagaaga

SEQ ID NO: 683573 - RNA, 19 nt, Homo sapiens
  misc_RNA (1)...(19): siRNA sense strand
ccaauggcuggauauauua

SEQ ID NO: 683574 - RNA, 19 nt, Homo sapiens
  misc_RNA (1)...(19): siRNA sense strand
ggaacuuucuuguuacgau

SEQ ID NO: 683575 - RNA, 19 nt, Homo sapiens
  misc_RNA (1)...(19): siRNA sense strand
ugggaaagauugaauuuag

SEQ ID NO: 683576 - RNA, 19 nt, Homo sapiens
  misc_RNA (1)...(19): siRNA sense strand
gaacuacugaugauuaucu

SEQ ID NO: 683577 - RNA, 19 nt, Homo sapiens
  misc_RNA (1)...(19): siRNA sense strand
ggacuuugcaguuaacuuc

SEQ ID NO: 683578 - RNA, 19 nt, Homo sapiens
  misc_RNA (1)...(19): siRNA sense strand
gaauacagcacaccauagu

SEQ ID NO: 683579 - RNA, 19 nt, Homo sapiens
  misc_RNA (1)...(19): siRNA sense strand
uauccggacuuugcaguua

SEQ ID NO: 683580 - RNA, 19 nt, Homo sapiens
  misc_RNA (1)...(19): siRNA sense strand
aaagcuacauugaagagaa

SEQ ID NO: 683581 - RNA, 19 nt, Homo sapiens
  misc_RNA (1)...(19): siRNA sense strand
caaguuaguucuccacaac

SEQ ID NO: 683582 - RNA, 19 nt, Homo sapiens
  misc_RNA (1)...(19): siRNA sense strand
ggacacuaauacugcagaa

SEQ ID NO: 683583 - RNA, 19 nt, Homo sapiens
  misc_RNA (1)...(19): siRNA sense strand
uauagaaguuguggagaaa

SEQ ID NO: 683584 - RNA, 19 nt, Homo sapiens
  misc_RNA (1)...(19): siRNA sense strand
agaaugcaccacaauuaua

SEQ ID NO: 683585 - RNA, 19 nt, Homo sapiens
  misc_RNA (1)...(19): siRNA sense strand
gaagaauuugcaagaacua

SEQ ID NO: 683586 - RNA, 19 nt, Homo sapiens
  misc_RNA (1)...(19): siRNA sense strand
gaugaagcauugaauacag

SEQ ID NO: 683587 - RNA, 19 nt, Homo sapiens
  misc_RNA (1)...(19): siRNA sense strand
ggaaggaggguauccagau

SEQ ID NO: 683588 - RNA, 19 nt, Homo sapiens
  misc_RNA (1)...(19): siRNA sense strand
gaagcaaacgauagaggaa

SEQ ID NO: 683589 - RNA, 19 nt, Homo sapiens
  misc_RNA (1)...(19): siRNA sense strand
uaaaaccauugcuguguua

SEQ ID NO: 683590 - RNA, 19 nt, Homo sapiens
  misc_RNA (1)...(19): siRNA sense strand
gaauuuagggacucaacaa

SEQ ID NO: 683591 - RNA, 19 nt, Homo sapiens
  misc_RNA (1)...(19): siRNA sense strand
ugaauuagcacaaguuagu

SEQ ID NO: 683592 - RNA, 19 nt, Homo sapiens
  misc_RNA (1)...(19): siRNA sense strand
gaaagagaaagaguuauag

SEQ ID NO: 683593 - RNA, 19 nt, Homo sapiens
  misc_RNA (1)...(19): siRNA sense strand
gcuguaauguuggacacua

SEQ ID NO: 683594 - RNA, 19 nt, Homo sapiens
  misc_RNA (1)...(19): siRNA sense strand
uuauagaaguuguggagaa

SEQ ID NO: 683595 - RNA, 19 nt, Homo sapiens
  misc_RNA (1)...(19): siRNA sense strand
cuggauauauuaaggaaga

SEQ ID NO: 683596 - RNA, 19 nt, Homo sapiens
  misc_RNA (1)...(19): siRNA sense strand
ugagacaaaugauguacau

SEQ ID NO: 683597 - RNA, 19 nt, Homo sapiens
  misc_RNA (1)...(19): siRNA sense strand
gacagaauguucaaaagaa

SEQ ID NO: 683598 - RNA, 19 nt, Homo sapiens
  misc_RNA (1)...(19): siRNA sense strand
ugugaacuaugcuuguuaa

SEQ ID NO: 683599 - RNA, 19 nt, Homo sapiens
  misc_RNA (1)...(19): siRNA sense strand
gcuaaaagcuacauugaag

SEQ ID NO: 683600 - RNA, 19 nt, Homo sapiens
  misc_RNA (1)...(19): siRNA sense strand
cucaucagcuguaauguug

SEQ ID NO: 683601 - RNA, 19 nt, Homo sapiens
  misc_RNA (1)...(19): siRNA sense strand
uaagaagacugcugaucag

SEQ ID NO: 683602 - RNA, 19 nt, Homo sapiens
  misc_RNA (1)...(19): siRNA sense strand
caagagcauuacaauuauc

SEQ ID NO: 683603 - RNA, 19 nt, Homo sapiens
  misc_RNA (1)...(19): siRNA sense strand
gaucauccggucaccauug

SEQ ID NO: 683604 - RNA, 19 nt, Homo sapiens
  misc_RNA (1)...(19): siRNA sense strand
agaagaaauugaugaagca

SEQ ID NO: 683605 - RNA, 19 nt, Homo sapiens
  misc_RNA (1)...(19): siRNA sense strand
ggaucuagcccugauguga

SEQ ID NO: 683606 - RNA, 19 nt, Homo sapiens
  misc_RNA (1)...(19): siRNA sense strand
gauagaggaaagagaaaga

SEQ ID NO: 683607 - RNA, 19 nt, Homo sapiens
  misc_RNA (1)...(19): siRNA sense strand
gaucagcuaacuacugguu

SEQ ID NO: 683608 - RNA, 19 nt, Homo sapiens
  misc_RNA (1)...(19): siRNA sense strand
gaugggaucuagcccugau

SEQ ID NO: 683609 - RNA, 19 nt, Homo sapiens
  misc_RNA (1)...(19): siRNA sense strand
gcaacagcauccccuaaaa

SEQ ID NO: 683610 - RNA, 19 nt, Homo sapiens
  misc_RNA (1)...(19): siRNA sense strand
gaaagaguuauagaaguug

SEQ ID NO: 683611 - RNA, 19 nt, Homo sapiens
  misc_RNA (1)...(19): siRNA sense strand
ccuaagacgauaaagaauu

SEQ ID NO: 683612 - RNA, 19 nt, Homo sapiens
  misc_RNA (1)...(19): siRNA sense strand
gaauugcagugagaucauc

SEQ ID NO: 683613 - RNA, 19 nt, Homo sapiens
  misc_RNA (1)...(19): siRNA sense strand
gauagugaauuagcacaag

SEQ ID NO: 683614 - RNA, 19 nt, Homo sapiens
  misc_RNA (1)...(19): siRNA sense strand
guaauguuggacacuaaua

SEQ ID NO: 683615 - RNA, 19 nt, Homo sapiens
  misc_RNA (1)...(19): siRNA sense strand
uuaagaagacugcugauca

SEQ ID NO: 683616 - RNA, 19 nt, Homo sapiens
  misc_RNA (1)...(19): siRNA sense strand
auacagcacaccauaguuu

SEQ ID NO: 683617 - RNA, 19 nt, Homo sapiens
  misc_RNA (1)...(19): siRNA sense strand
ugauguacauuuagaagca

SEQ ID NO: 683618 - RNA, 19 nt, Homo sapiens
  misc_RNA (1)...(19): siRNA sense strand
ugaagaaugcaccacaauu

SEQ ID NO: 683619 - RNA, 19 nt, Homo sapiens
  misc_RNA (1)...(19): siRNA sense strand
gcaagaacuacugaugauu

SEQ ID NO: 683620 - RNA, 19 nt, Homo sapiens
  misc_RNA (1)...(19): siRNA sense strand
caucagcuguaauguugga

SEQ ID NO: 683621 - RNA, 19 nt, Homo sapiens
  misc_RNA (1)...(19): siRNA sense strand
gggaaagauugaauuuagg

SEQ ID NO: 683622 - RNA, 19 nt, Homo sapiens
  misc_RNA (1)...(19): siRNA sense strand
uaauuugaaugcagcuaug

SEQ ID NO: 683623 - RNA, 19 nt, Homo sapiens
  misc_RNA (1)...(19): siRNA sense strand
acacuaauacugcagaaga

SEQ ID NO: 683624 - RNA, 19 nt, Homo sapiens
  misc_RNA (1)...(19): siRNA sense strand
gugaagaauuugcaagaac

SEQ ID NO: 683625 - RNA, 19 nt, Homo sapiens
  misc_RNA (1)...(19): siRNA sense strand
ucaacaauaugggaaagau

SEQ ID NO: 683626 - RNA, 19 nt, Homo sapiens
  misc_RNA (1)...(19): siRNA sense strand
acaauuaucgccuucucua

SEQ ID NO: 683627 - RNA, 19 nt, Homo sapiens
  misc_RNA (1)...(19): siRNA sense strand
aagcuacauugaagagaaa

SEQ ID NO: 683628 - RNA, 19 nt, Homo sapiens
  misc_RNA (1)...(19): siRNA sense strand
ugaagaauuugcaagaacu

SEQ ID NO: 683629 - RNA, 19 nt, Homo sapiens
  misc_RNA (1)...(19): siRNA sense strand
uagaaguuguggagaaaca

SEQ ID NO: 683630 - RNA, 19 nt, Homo sapiens
  misc_RNA (1)...(19): siRNA sense strand
caacaauaugggaaagauu

SEQ ID NO: 683631 - RNA, 19 nt, Homo sapiens
  misc_RNA (1)...(19): siRNA sense strand
ccucccagguugaguguga

SEQ ID NO: 683632 - RNA, 19 nt, Homo sapiens
  misc_RNA (1)...(19): siRNA sense strand
cacuaauacugcagaagaa

SEQ ID NO: 683633 - RNA, 19 nt, Homo sapiens
  misc_RNA (1)...(19): siRNA sense strand
acagaaagacguugcaaca

SEQ ID NO: 683634 - RNA, 19 nt, Homo sapiens
  misc_RNA (1)...(19): siRNA sense strand
caacgcuacuacccaaugg

SEQ ID NO: 683635 - RNA, 19 nt, Homo sapiens
  misc_RNA (1)...(19): siRNA sense strand
ccauaguuucgaacaguua

SEQ ID NO: 683636 - RNA, 19 nt, Homo sapiens
  misc_RNA (1)...(19): siRNA sense strand
gaucuagcccugaugugau

SEQ ID NO: 683637 - RNA, 19 nt, Homo sapiens
  misc_RNA (1)...(19): siRNA sense strand
gaaauugaugaagcauuga

SEQ ID NO: 683638 - RNA, 19 nt, Homo sapiens
  misc_RNA (1)...(19): siRNA sense strand
caauuaucgccuucucuaa

SEQ ID NO: 683639 - RNA, 19 nt, Homo sapiens
  misc_RNA (1)...(19): siRNA sense strand
ugcaagaacuacugaugau

SEQ ID NO: 683640 - RNA, 19 nt, Homo sapiens
  misc_RNA (1)...(19): siRNA sense strand
aaaagaaccugugugaaga

SEQ ID NO: 683641 - RNA, 19 nt, Homo sapiens
  misc_RNA (1)...(19): siRNA sense strand
agagaaagaguuauagaag

SEQ ID NO: 683642 - RNA, 19 nt, Homo sapiens
  misc_RNA (1)...(19): siRNA sense strand
aaacuuccagccacagaaa

SEQ ID NO: 683643 - RNA, 19 nt, Homo sapiens
  misc_RNA (1)...(19): siRNA sense strand
gaucaucuguauguucaac

SEQ ID NO: 683644 - RNA, 19 nt, Homo sapiens
  misc_RNA (1)...(19): siRNA sense strand
gcacugcgcuccuuugauu

SEQ ID NO: 683645 - RNA, 19 nt, Homo sapiens
  misc_RNA (1)...(19): siRNA sense strand
caacgacaaugcucaugua

SEQ ID NO: 683646 - RNA, 19 nt, Homo sapiens
  misc_RNA (1)...(19): siRNA sense strand
cuacuacgcucaaguggua

SEQ ID NO: 683647 - RNA, 19 nt, Homo sapiens
  misc_RNA (1)...(19): siRNA sense strand
cgacagaggcuccuucgua

SEQ ID NO: 683648 - RNA, 19 nt, Homo sapiens
  misc_RNA (1)...(19): siRNA sense strand
gaugcuacauuccaugaaa

SEQ ID NO: 683649 - RNA, 19 nt, Homo sapiens
  misc_RNA (1)...(19): siRNA sense strand
uagaggaacuggagcuaaa

SEQ ID NO: 683650 - RNA, 19 nt, Homo sapiens
  misc_RNA (1)...(19): siRNA sense strand
ggagaacugacaaucauaa

SEQ ID NO: 683651 - RNA, 19 nt, Homo sapiens
  misc_RNA (1)...(19): siRNA sense strand
gcauaagcauuccggagaa

SEQ ID NO: 683652 - RNA, 19 nt, Homo sapiens
  misc_RNA (1)...(19): siRNA sense strand
cgacaaugcucauguaacu

SEQ ID NO: 683653 - RNA, 19 nt, Homo sapiens
  misc_RNA (1)...(19): siRNA sense strand
gagcugaugggaacaagua

SEQ ID NO: 683654 - RNA, 19 nt, Homo sapiens
  misc_RNA (1)...(19): siRNA sense strand
gaacaaguacccagaacug

SEQ ID NO: 683655 - RNA, 19 nt, Homo sapiens
  misc_RNA (1)...(19): siRNA sense strand
gagcuuaagucaacaucug

SEQ ID NO: 683656 - RNA, 19 nt, Homo sapiens
  misc_RNA (1)...(19): siRNA sense strand
cacccugucuguugaauuu

SEQ ID NO: 683657 - RNA, 19 nt, Homo sapiens
  misc_RNA (1)...(19): siRNA sense strand
acaaugcucauguaacuua

SEQ ID NO: 683658 - RNA, 19 nt, Homo sapiens
  misc_RNA (1)...(19): siRNA sense strand
ucagagguauuugagcuua

SEQ ID NO: 683659 - RNA, 19 nt, Homo sapiens
  misc_RNA (1)...(19): siRNA sense strand
agaaagagaagaaacguuu

SEQ ID NO: 683660 - RNA, 19 nt, Homo sapiens
  misc_RNA (1)...(19): siRNA sense strand
cggaagagccaccugauuu

SEQ ID NO: 683661 - RNA, 19 nt, Homo sapiens
  misc_RNA (1)...(19): siRNA sense strand
gaacgacaaugcgccuguu

SEQ ID NO: 683662 - RNA, 19 nt, Homo sapiens
  misc_RNA (1)...(19): siRNA sense strand
caacccaaaugaccacuuc

SEQ ID NO: 683663 - RNA, 19 nt, Homo sapiens
  misc_RNA (1)...(19): siRNA sense strand
gggcacccuuauccucuua

SEQ ID NO: 683664 - RNA, 19 nt, Homo sapiens
  misc_RNA (1)...(19): siRNA sense strand
gaagaagaaagagaagaaa

SEQ ID NO: 683665 - RNA, 19 nt, Homo sapiens
  misc_RNA (1)...(19): siRNA sense strand
gagcgcacccugucuguug

SEQ ID NO: 683666 - RNA, 19 nt, Homo sapiens
  misc_RNA (1)...(19): siRNA sense strand
acgcucaagugguauauuu

SEQ ID NO: 683667 - RNA, 19 nt, Homo sapiens
  misc_RNA (1)...(19): siRNA sense strand
cgaagaagaaagagaagaa

SEQ ID NO: 683668 - RNA, 19 nt, Homo sapiens
  misc_RNA (1)...(19): siRNA sense strand
gggcuuuccugcagaccua

SEQ ID NO: 683669 - RNA, 19 nt, Homo sapiens
  misc_RNA (1)...(19): siRNA sense strand
augcagagcucgcacuuug

SEQ ID NO: 683670 - RNA, 19 nt, Homo sapiens
  misc_RNA (1)...(19): siRNA sense strand
gagguggaaauaacagaua

SEQ ID NO: 683671 - RNA, 19 nt, Homo sapiens
  misc_RNA (1)...(19): siRNA sense strand
ggauuccggauuccucuua

SEQ ID NO: 683672 - RNA, 19 nt, Homo sapiens
  misc_RNA (1)...(19): siRNA sense strand
ccucuuacaucucuaucaa

SEQ ID NO: 683673 - RNA, 19 nt, Homo sapiens
  misc_RNA (1)...(19): siRNA sense strand
ggacagagacgcgcucaag

SEQ ID NO: 683674 - RNA, 19 nt, Homo sapiens
  misc_RNA (1)...(19): siRNA sense strand
ggaucuuccuuuuaaguua

SEQ ID NO: 683675 - RNA, 19 nt, Homo sapiens
  misc_RNA (1)...(19): siRNA sense strand
gucaacaucuggagaacug

SEQ ID NO: 683676 - RNA, 19 nt, Homo sapiens
  misc_RNA (1)...(19): siRNA sense strand
gagaaaagcccuggagaaa

SEQ ID NO: 683677 - RNA, 19 nt, Homo sapiens
  misc_RNA (1)...(19): siRNA sense strand
gcacauccuacuccaccua

SEQ ID NO: 683678 - RNA, 19 nt, Homo sapiens
  misc_RNA (1)...(19): siRNA sense strand
uggcagacaucaacgacaa

SEQ ID NO: 683679 - RNA, 19 nt, Homo sapiens
  misc_RNA (1)...(19): siRNA sense strand
gauuccggauuccucuuaa

SEQ ID NO: 683680 - RNA, 19 nt, Homo sapiens
  misc_RNA (1)...(19): siRNA sense strand
gcagagcucgcacuuugug

SEQ ID NO: 683681 - RNA, 19 nt, Homo sapiens
  misc_RNA (1)...(19): siRNA sense strand
guccacggaugcucacauu

SEQ ID NO: 683682 - RNA, 19 nt, Homo sapiens
  misc_RNA (1)...(19): siRNA sense strand
gagaacugacaaucauaaa

SEQ ID NO: 683683 - RNA, 19 nt, Homo sapiens
  misc_RNA (1)...(19): siRNA sense strand
ggugagaacgcccuucaga

SEQ ID NO: 683684 - RNA, 19 nt, Homo sapiens
  misc_RNA (1)...(19): siRNA sense strand
uacaugacaucugcuacua

SEQ ID NO: 683685 - RNA, 19 nt, Homo sapiens
  misc_RNA (1)...(19): siRNA sense strand
gagcccugcuggacagaga

SEQ ID NO: 683686 - RNA, 19 nt, Homo sapiens
  misc_RNA (1)...(19): siRNA sense strand
acauucugcuggaggauaa

SEQ ID NO: 683687 - RNA, 19 nt, Homo sapiens
  misc_RNA (1)...(19): siRNA sense strand
gcaacgacaaugcucaugu

SEQ ID NO: 683688 - RNA, 19 nt, Homo sapiens
  misc_RNA (1)...(19): siRNA sense strand
cuacauuccaugaaauuga

SEQ ID NO: 683689 - RNA, 19 nt, Homo sapiens
  misc_RNA (1)...(19): siRNA sense strand
caguagagguggaaauaac

SEQ ID NO: 683690 - RNA, 19 nt, Homo sapiens
  misc_RNA (1)...(19): siRNA sense strand
gaaaagcccuggagaaacc

SEQ ID NO: 683691 - RNA, 19 nt, Homo sapiens
  misc_RNA (1)...(19): siRNA sense strand
caggagagcugugagaaaa

SEQ ID NO: 683692 - RNA, 19 nt, Homo sapiens
  misc_RNA (1)...(19): siRNA sense strand
auucggaccucacucugua

SEQ ID NO: 683693 - RNA, 19 nt, Homo sapiens
  misc_RNA (1)...(19): siRNA sense strand
uaagucaacaucuggagaa

SEQ ID NO: 683694 - RNA, 19 nt, Homo sapiens
  misc_RNA (1)...(19): siRNA sense strand
cagagguauuugagcuuaa

SEQ ID NO: 683695 - RNA, 19 nt, Homo sapiens
  misc_RNA (1)...(19): siRNA sense strand
gagccucugucuucucagu

SEQ ID NO: 683696 - RNA, 19 nt, Homo sapiens
  misc_RNA (1)...(19): siRNA sense strand
ugacaaugccccagaauuu

SEQ ID NO: 683697 - RNA, 19 nt, Homo sapiens
  misc_RNA (1)...(19): siRNA sense strand
gcuauucugugcgggaaga

SEQ ID NO: 683698 - RNA, 19 nt, Homo sapiens
  misc_RNA (1)...(19): siRNA sense strand
gccucaaucucuacucgaa

SEQ ID NO: 683699 - RNA, 19 nt, Homo sapiens
  misc_RNA (1)...(19): siRNA sense strand
guccugcugugcuuccuuu

SEQ ID NO: 683700 - RNA, 19 nt, Homo sapiens
  misc_RNA (1)...(19): siRNA sense strand
gaagaaagagaagaaacgu

SEQ ID NO: 683701 - RNA, 19 nt, Homo sapiens
  misc_RNA (1)...(19): siRNA sense strand
uaucagcgccucaaucucu

SEQ ID NO: 683702 - RNA, 19 nt, Homo sapiens
  misc_RNA (1)...(19): siRNA sense strand
ggaagagccaccugauuuu

SEQ ID NO: 683703 - RNA, 19 nt, Homo sapiens
  misc_RNA (1)...(19): siRNA sense strand
ucuaaccgcuaaagaugga

SEQ ID NO: 683704 - RNA, 19 nt, Homo sapiens
  misc_RNA (1)...(19): siRNA sense strand
gaacaguuuuccuuuuaca

SEQ ID NO: 683705 - RNA, 19 nt, Homo sapiens
  misc_RNA (1)...(19): siRNA sense strand
gaacugacaaucauaaaag

SEQ ID NO: 683706 - RNA, 19 nt, Homo sapiens
  misc_RNA (1)...(19): siRNA sense strand
guagaggaacuggagcuaa

SEQ ID NO: 683707 - RNA, 19 nt, Homo sapiens
  misc_RNA (1)...(19): siRNA sense strand
cagaacgccuggcugucuu

SEQ ID NO: 683708 - RNA, 19 nt, Homo sapiens
  misc_RNA (1)...(19): siRNA sense strand
uuaugaggaugcuacauuc

SEQ ID NO: 683709 - RNA, 19 nt, Homo sapiens
  misc_RNA (1)...(19): siRNA sense strand
cgcaucgucuccagaggua

SEQ ID NO: 683710 - RNA, 19 nt, Homo sapiens
  misc_RNA (1)...(19): siRNA sense strand
gcggaagagccaccugauu

SEQ ID NO: 683711 - RNA, 19 nt, Homo sapiens
  misc_RNA (1)...(19): siRNA sense strand
ccacucaguagcaauguau

SEQ ID NO: 683712 - RNA, 19 nt, Homo sapiens
  misc_RNA (1)...(19): siRNA sense strand
gaguaccgcauaagcauuc

SEQ ID NO: 683713 - RNA, 19 nt, Homo sapiens
  misc_RNA (1)...(19): siRNA sense strand
ccaggagagcugugagaaa

SEQ ID NO: 683714 - RNA, 19 nt, Homo sapiens
  misc_RNA (1)...(19): siRNA sense strand
ccaccuacauucccgaaaa

SEQ ID NO: 683715 - RNA, 19 nt, Homo sapiens
  misc_RNA (1)...(19): siRNA sense strand
agaucuagauuaugaggau

SEQ ID NO: 683716 - RNA, 19 nt, Homo sapiens
  misc_RNA (1)...(19): siRNA sense strand
cuggagaacugacaaucau

SEQ ID NO: 683717 - RNA, 19 nt, Homo sapiens
  misc_RNA (1)...(19): siRNA sense strand
gaccgccacugacgcagau

SEQ ID NO: 683718 - RNA, 19 nt, Homo sapiens
  misc_RNA (1)...(19): siRNA sense strand
gaaugacaaugccccagaa

SEQ ID NO: 683719 - RNA, 19 nt, Homo sapiens
  misc_RNA (1)...(19): siRNA sense strand
gugagaacgcccuucagaa

SEQ ID NO: 683720 - RNA, 19 nt, Homo sapiens
  misc_RNA (1)...(19): siRNA sense strand
gccucugucuucucaguga

SEQ ID NO: 683721 - RNA, 19 nt, Homo sapiens
  misc_RNA (1)...(19): siRNA sense strand
ucccagcucuuugcucuga

SEQ ID NO: 683722 - RNA, 19 nt, Homo sapiens
  misc_RNA (1)...(19): siRNA sense strand
gggaacaaguacccagaac

SEQ ID NO: 683723 - RNA, 19 nt, Homo sapiens
  misc_RNA (1)...(19): siRNA sense strand
ggucacugcgaacaggaua

SEQ ID NO: 683724 - RNA, 19 nt, Homo sapiens
  misc_RNA (1)...(19): siRNA sense strand
cucaaucucuacucgaaga

SEQ ID NO: 683725 - RNA, 19 nt, Homo sapiens
  misc_RNA (1)...(19): siRNA sense strand
cgggaacccuccacucagu

SEQ ID NO: 683726 - RNA, 19 nt, Homo sapiens
  misc_RNA (1)...(19): siRNA sense strand
gcacccuuauccucuuaca

SEQ ID NO: 683727 - RNA, 19 nt, Homo sapiens
  misc_RNA (1)...(19): siRNA sense strand
caauuacuaccgacugguu

SEQ ID NO: 683728 - RNA, 19 nt, Homo sapiens
  misc_RNA (1)...(19): siRNA sense strand
uaggcaacaucgccaagga

SEQ ID NO: 683729 - RNA, 19 nt, Homo sapiens
  misc_RNA (1)...(19): siRNA sense strand
aaucucuacucgaagaaga

SEQ ID NO: 683730 - RNA, 19 nt, Homo sapiens
  misc_RNA (1)...(19): siRNA sense strand
ccacggaugcucacauuuu

SEQ ID NO: 683731 - RNA, 19 nt, Homo sapiens
  misc_RNA (1)...(19): siRNA sense strand
ggaaccauaauugggcuuu

SEQ ID NO: 683732 - RNA, 19 nt, Homo sapiens
  misc_RNA (1)...(19): siRNA sense strand
gacuauuuauucaguagag

SEQ ID NO: 683733 - RNA, 19 nt, Homo sapiens
  misc_RNA (1)...(19): siRNA sense strand
gcuggaggauaaauugacu

SEQ ID NO: 683734 - RNA, 19 nt, Homo sapiens
  misc_RNA (1)...(19): siRNA sense strand
gggaacccuccacucagua

SEQ ID NO: 683735 - RNA, 19 nt, Homo sapiens
  misc_RNA (1)...(19): siRNA sense strand
gauaaugccccucgcuuug

SEQ ID NO: 683736 - RNA, 19 nt, Homo sapiens
  misc_RNA (1)...(19): siRNA sense strand
gguauuugagcuuaaguca

SEQ ID NO: 683737 - RNA, 19 nt, Homo sapiens
  misc_RNA (1)...(19): siRNA sense strand
gggcuacuacgcucaagug

SEQ ID NO: 683738 - RNA, 19 nt, Homo sapiens
  misc_RNA (1)...(19): siRNA sense strand
aguacgcacucaacccaaa

SEQ ID NO: 683739 - RNA, 19 nt, Homo sapiens
  misc_RNA (1)...(19): siRNA sense strand
gaaagagaagaaacguuuu

SEQ ID NO: 683740 - RNA, 19 nt, Homo sapiens
  misc_RNA (1)...(19): siRNA sense strand
acaucacucuaaccgcuaa

SEQ ID NO: 683741 - RNA, 19 nt, Homo sapiens
  misc_RNA (1)...(19): siRNA sense strand
ucaguagagguggaaauaa

SEQ ID NO: 683742 - RNA, 19 nt, Homo sapiens
  misc_RNA (1)...(19): siRNA sense strand
gcacccugucuguugaauu

SEQ ID NO: 683743 - RNA, 19 nt, Homo sapiens
  misc_RNA (1)...(19): siRNA sense strand
cgacacuggaguacucuau

SEQ ID NO: 683744 - RNA, 19 nt, Homo sapiens
  misc_RNA (1)...(19): siRNA sense strand
gcacugcgcuccuuugauu

SEQ ID NO: 683745 - RNA, 19 nt, Homo sapiens
  misc_RNA (1)...(19): siRNA sense strand
caacgacaaugcucaugua

SEQ ID NO: 683746 - RNA, 19 nt, Homo sapiens
  misc_RNA (1)...(19): siRNA sense strand
cuacuacgcucaaguggua

SEQ ID NO: 683747 - RNA, 19 nt, Homo sapiens
  misc_RNA (1)...(19): siRNA sense strand
cgacagaggcuccuucgua

SEQ ID NO: 683748 - RNA, 19 nt, Homo sapiens
  misc_RNA (1)...(19): siRNA sense strand
gaugcuacauuccaugaaa

SEQ ID NO: 683749 - RNA, 19 nt, Homo sapiens
  misc_RNA (1)...(19): siRNA sense strand
uagaggaacuggagcuaaa

SEQ ID NO: 683750 - RNA, 19 nt, Homo sapiens
  misc_RNA (1)...(19): siRNA sense strand
ggagaacugacaaucauaa

SEQ ID NO: 683751 - RNA, 19 nt, Homo sapiens
  misc_RNA (1)...(19): siRNA sense strand
gcauaagcauuccggagaa

SEQ ID NO: 683752 - RNA, 19 nt, Homo sapiens
  misc_RNA (1)...(19): siRNA sense strand
cgacaaugcucauguaacu

SEQ ID NO: 683753 - RNA, 19 nt, Homo sapiens
  misc_RNA (1)...(19): siRNA sense strand
gagcugaugggaacaagua

SEQ ID NO: 683754 - RNA, 19 nt, Homo sapiens
  misc_RNA (1)...(19): siRNA sense strand
gaacaaguacccagaacug

SEQ ID NO: 683755 - RNA, 19 nt, Homo sapiens
  misc_RNA (1)...(19): siRNA sense strand
gagcuuaagucaacaucug

SEQ ID NO: 683756 - RNA, 19 nt, Homo sapiens
  misc_RNA (1)...(19): siRNA sense strand
cacccugucuguugaauuu

SEQ ID NO: 683757 - RNA, 19 nt, Homo sapiens
  misc_RNA (1)...(19): siRNA sense strand
acaaugcucauguaacuua

SEQ ID NO: 683758 - RNA, 19 nt, Homo sapiens
  misc_RNA (1)...(19): siRNA sense strand
ucagagguauuugagcuua

SEQ ID NO: 683759 - RNA, 19 nt, Homo sapiens
  misc_RNA (1)...(19): siRNA sense strand
agaaagagaagaaacguuu

SEQ ID NO: 683760 - RNA, 19 nt, Homo sapiens
  misc_RNA (1)...(19): siRNA sense strand
cggaagagccaccugauuu

SEQ ID NO: 683761 - RNA, 19 nt, Homo sapiens
  misc_RNA (1)...(19): siRNA sense strand
gaacgacaaugcgccuguu

SEQ ID NO: 683762 - RNA, 19 nt, Homo sapiens
  misc_RNA (1)...(19): siRNA sense strand
caacccaaaugaccacuuc

SEQ ID NO: 683763 - RNA, 19 nt, Homo sapiens
  misc_RNA (1)...(19): siRNA sense strand
gggcacccuuauccucuua

SEQ ID NO: 683764 - RNA, 19 nt, Homo sapiens
  misc_RNA (1)...(19): siRNA sense strand
gaagaagaaagagaagaaa

SEQ ID NO: 683765 - RNA, 19 nt, Homo sapiens
  misc_RNA (1)...(19): siRNA sense strand
gagcgcacccugucuguug

SEQ ID NO: 683766 - RNA, 19 nt, Homo sapiens
  misc_RNA (1)...(19): siRNA sense strand
acgcucaagugguauauuu

SEQ ID NO: 683767 - RNA, 19 nt, Homo sapiens
  misc_RNA (1)...(19): siRNA sense strand
cgaagaagaaagagaagaa

SEQ ID NO: 683768 - RNA, 19 nt, Homo sapiens
  misc_RNA (1)...(19): siRNA sense strand
gggcuuuccugcagaccua

SEQ ID NO: 683769 - RNA, 19 nt, Homo sapiens
  misc_RNA (1)...(19): siRNA sense strand
augcagagcucgcacuuug

SEQ ID NO: 683770 - RNA, 19 nt, Homo sapiens
  misc_RNA (1)...(19): siRNA sense strand
gagguggaaauaacagaua

SEQ ID NO: 683771 - RNA, 19 nt, Homo sapiens
  misc_RNA (1)...(19): siRNA sense strand
ggauuccggauuccucuua

SEQ ID NO: 683772 - RNA, 19 nt, Homo sapiens
  misc_RNA (1)...(19): siRNA sense strand
ccucuuacaucucuaucaa

SEQ ID NO: 683773 - RNA, 19 nt, Homo sapiens
  misc_RNA (1)...(19): siRNA sense strand
ggacagagacgcgcucaag

SEQ ID NO: 683774 - RNA, 19 nt, Homo sapiens
  misc_RNA (1)...(19): siRNA sense strand
ggaucuuccuuuuaaguua

SEQ ID NO: 683775 - RNA, 19 nt, Homo sapiens
  misc_RNA (1)...(19): siRNA sense strand
gucaacaucuggagaacug

SEQ ID NO: 683776 - RNA, 19 nt, Homo sapiens
  misc_RNA (1)...(19): siRNA sense strand
gagaaaagcccuggagaaa

SEQ ID NO: 683777 - RNA, 19 nt, Homo sapiens
  misc_RNA (1)...(19): siRNA sense strand
gcacauccuacuccaccua

SEQ ID NO: 683778 - RNA, 19 nt, Homo sapiens
  misc_RNA (1)...(19): siRNA sense strand
uggcagacaucaacgacaa

SEQ ID NO: 683779 - RNA, 19 nt, Homo sapiens
  misc_RNA (1)...(19): siRNA sense strand
gauuccggauuccucuuaa

SEQ ID NO: 683780 - RNA, 19 nt, Homo sapiens
  misc_RNA (1)...(19): siRNA sense strand
gcagagcucgcacuuugug

SEQ ID NO: 683781 - RNA, 19 nt, Homo sapiens
  misc_RNA (1)...(19): siRNA sense strand
guccacggaugcucacauu

SEQ ID NO: 683782 - RNA, 19 nt, Homo sapiens
  misc_RNA (1)...(19): siRNA sense strand
gagaacugacaaucauaaa

SEQ ID NO: 683783 - RNA, 19 nt, Homo sapiens
  misc_RNA (1)...(19): siRNA sense strand
ggugagaacgcccuucaga

SEQ ID NO: 683784 - RNA, 19 nt, Homo sapiens
  misc_RNA (1)...(19): siRNA sense strand
uacaugacaucugcuacua

SEQ ID NO: 683785 - RNA, 19 nt, Homo sapiens
  misc_RNA (1)...(19): siRNA sense strand
gagcccugcuggacagaga

SEQ ID NO: 683786 - RNA, 19 nt, Homo sapiens
  misc_RNA (1)...(19): siRNA sense strand
acauucugcuggaggauaa

SEQ ID NO: 683787 - RNA, 19 nt, Homo sapiens
  misc_RNA (1)...(19): siRNA sense strand
gcaacgacaaugcucaugu

SEQ ID NO: 683788 - RNA, 19 nt, Homo sapiens
  misc_RNA (1)...(19): siRNA sense strand
cuacauuccaugaaauuga

SEQ ID NO: 683789 - RNA, 19 nt, Homo sapiens
  misc_RNA (1)...(19): siRNA sense strand
caguagagguggaaauaac

SEQ ID NO: 683790 - RNA, 19 nt, Homo sapiens
  misc_RNA (1)...(19): siRNA sense strand
gaaaagcccuggagaaacc

SEQ ID NO: 683791 - RNA, 19 nt, Homo sapiens
  misc_RNA (1)...(19): siRNA sense strand
caggagagcugugagaaaa

SEQ ID NO: 683792 - RNA, 19 nt, Homo sapiens
  misc_RNA (1)...(19): siRNA sense strand
auucggaccucacucugua

SEQ ID NO: 683793 - RNA, 19 nt, Homo sapiens
  misc_RNA (1)...(19): siRNA sense strand
uaagucaacaucuggagaa

SEQ ID NO: 683794 - RNA, 19 nt, Homo sapiens
  misc_RNA (1)...(19): siRNA sense strand
cagagguauuugagcuuaa

SEQ ID NO: 683795 - RNA, 19 nt, Homo sapiens
  misc_RNA (1)...(19): siRNA sense strand
gagccucugucuucucagu

SEQ ID NO: 683796 - RNA, 19 nt, Homo sapiens
  misc_RNA (1)...(19): siRNA sense strand
ugacaaugccccagaauuu

SEQ ID NO: 683797 - RNA, 19 nt, Homo sapiens
  misc_RNA (1)...(19): siRNA sense strand
gcuauucugugcgggaaga

SEQ ID NO: 683798 - RNA, 19 nt, Homo sapiens
  misc_RNA (1)...(19): siRNA sense strand
gccucaaucucuacucgaa

SEQ ID NO: 683799 - RNA, 19 nt, Homo sapiens
  misc_RNA (1)...(19): siRNA sense strand
guccugcugugcuuccuuu

SEQ ID NO: 683800 - RNA, 19 nt, Homo sapiens
  misc_RNA (1)...(19): siRNA sense strand
gaagaaagagaagaaacgu

SEQ ID NO: 683801 - RNA, 19 nt, Homo sapiens
  misc_RNA (1)...(19): siRNA sense strand
uaucagcgccucaaucucu

SEQ ID NO: 683802 - RNA, 19 nt, Homo sapiens
  misc_RNA (1)...(19): siRNA sense strand
ggaagagccaccugauuuu

SEQ ID NO: 683803 - RNA, 19 nt, Homo sapiens
  misc_RNA (1)...(19): siRNA sense strand
ucuaaccgcuaaagaugga

SEQ ID NO: 683804 - RNA, 19 nt, Homo sapiens
  misc_RNA (1)...(19): siRNA sense strand
gaacaguuuuccuuuuaca

SEQ ID NO: 683805 - RNA, 19 nt, Homo sapiens
  misc_RNA (1)...(19): siRNA sense strand
gaacugacaaucauaaaag

SEQ ID NO: 683806 - RNA, 19 nt, Homo sapiens
  misc_RNA (1)...(19): siRNA sense strand
guagaggaacuggagcuaa

SEQ ID NO: 683807 - RNA, 19 nt, Homo sapiens
  misc_RNA (1)...(19): siRNA sense strand
cagaacgccuggcugucuu

SEQ ID NO: 683808 - RNA, 19 nt, Homo sapiens
  misc_RNA (1)...(19): siRNA sense strand
uuaugaggaugcuacauuc

SEQ ID NO: 683809 - RNA, 19 nt, Homo sapiens
  misc_RNA (1)...(19): siRNA sense strand
cgcaucgucuccagaggua

SEQ ID NO: 683810 - RNA, 19 nt, Homo sapiens
  misc_RNA (1)...(19): siRNA sense strand
gcggaagagccaccugauu

SEQ ID NO: 683811 - RNA, 19 nt, Homo sapiens
  misc_RNA (1)...(19): siRNA sense strand
ccacucaguagcaauguau

SEQ ID NO: 683812 - RNA, 19 nt, Homo sapiens
  misc_RNA (1)...(19): siRNA sense strand
gaguaccgcauaagcauuc

SEQ ID NO: 683813 - RNA, 19 nt, Homo sapiens
  misc_RNA (1)...(19): siRNA sense strand
ccaggagagcugugagaaa

SEQ ID NO: 683814 - RNA, 19 nt, Homo sapiens
  misc_RNA (1)...(19): siRNA sense strand
ccaccuacauucccgaaaa

SEQ ID NO: 683815 - RNA, 19 nt, Homo sapiens
  misc_RNA (1)...(19): siRNA sense strand
agaucuagauuaugaggau

SEQ ID NO: 683816 - RNA, 19 nt, Homo sapiens
  misc_RNA (1)...(19): siRNA sense strand
cuggagaacugacaaucau

SEQ ID NO: 683817 - RNA, 19 nt, Homo sapiens
  misc_RNA (1)...(19): siRNA sense strand
gaccgccacugacgcagau

SEQ ID NO: 683818 - RNA, 19 nt, Homo sapiens
  misc_RNA (1)...(19): siRNA sense strand
gaaugacaaugccccagaa

SEQ ID NO: 683819 - RNA, 19 nt, Homo sapiens
  misc_RNA (1)...(19): siRNA sense strand
gugagaacgcccuucagaa

SEQ ID NO: 683820 - RNA, 19 nt, Homo sapiens
  misc_RNA (1)...(19): siRNA sense strand
gccucugucuucucaguga

SEQ ID NO: 683821 - RNA, 19 nt, Homo sapiens
  misc_RNA (1)...(19): siRNA sense strand
ucccagcucuuugcucuga

SEQ ID NO: 683822 - RNA, 19 nt, Homo sapiens
  misc_RNA (1)...(19): siRNA sense strand
gggaacaaguacccagaac

SEQ ID NO: 683823 - RNA, 19 nt, Homo sapiens
  misc_RNA (1)...(19): siRNA sense strand
ggucacugcgaacaggaua

SEQ ID NO: 683824 - RNA, 19 nt, Homo sapiens
  misc_RNA (1)...(19): siRNA sense strand
cucaaucucuacucgaaga

SEQ ID NO: 683825 - RNA, 19 nt, Homo sapiens
  misc_RNA (1)...(19): siRNA sense strand
cgggaacccuccacucagu

SEQ ID NO: 683826 - RNA, 19 nt, Homo sapiens
  misc_RNA (1)...(19): siRNA sense strand
gcacccuuauccucuuaca

SEQ ID NO: 683827 - RNA, 19 nt, Homo sapiens
  misc_RNA (1)...(19): siRNA sense strand
caauuacuaccgacugguu

SEQ ID NO: 683828 - RNA, 19 nt, Homo sapiens
  misc_RNA (1)...(19): siRNA sense strand
uaggcaacaucgccaagga

SEQ ID NO: 683829 - RNA, 19 nt, Homo sapiens
  misc_RNA (1)...(19): siRNA sense strand
aaucucuacucgaagaaga

SEQ ID NO: 683830 - RNA, 19 nt, Homo sapiens
  misc_RNA (1)...(19): siRNA sense strand
ccacggaugcucacauuuu

SEQ ID NO: 683831 - RNA, 19 nt, Homo sapiens
  misc_RNA (1)...(19): siRNA sense strand
ggaaccauaauugggcuuu

SEQ ID NO: 683832 - RNA, 19 nt, Homo sapiens
  misc_RNA (1)...(19): siRNA sense strand
gacuauuuauucaguagag

SEQ ID NO: 683833 - RNA, 19 nt, Homo sapiens
  misc_RNA (1)...(19): siRNA sense strand
gcuggaggauaaauugacu

SEQ ID NO: 683834 - RNA, 19 nt, Homo sapiens
  misc_RNA (1)...(19): siRNA sense strand
gggaacccuccacucagua

SEQ ID NO: 683835 - RNA, 19 nt, Homo sapiens
  misc_RNA (1)...(19): siRNA sense strand
gauaaugccccucgcuuug

SEQ ID NO: 683836 - RNA, 19 nt, Homo sapiens
  misc_RNA (1)...(19): siRNA sense strand
gguauuugagcuuaaguca

SEQ ID NO: 683837 - RNA, 19 nt, Homo sapiens
  misc_RNA (1)...(19): siRNA sense strand
gggcuacuacgcucaagug

SEQ ID NO: 683838 - RNA, 19 nt, Homo sapiens
  misc_RNA (1)...(19): siRNA sense strand
aguacgcacucaacccaaa

SEQ ID NO: 683839 - RNA, 19 nt, Homo sapiens
  misc_RNA (1)...(19): siRNA sense strand
gaaagagaagaaacguuuu

SEQ ID NO: 683840 - RNA, 19 nt, Homo sapiens
  misc_RNA (1)...(19): siRNA sense strand
acaucacucuaaccgcuaa

SEQ ID NO: 683841 - RNA, 19 nt, Homo sapiens
  misc_RNA (1)...(19): siRNA sense strand
ucaguagagguggaaauaa

SEQ ID NO: 683842 - RNA, 19 nt, Homo sapiens
  misc_RNA (1)...(19): siRNA sense strand
gcacccugucuguugaauu

SEQ ID NO: 683843 - RNA, 19 nt, Homo sapiens
  misc_RNA (1)...(19): siRNA sense strand
cgacacuggaguacucuau

SEQ ID NO: 683844 - RNA, 19 nt, Homo sapiens
  misc_RNA (1)...(19): siRNA sense strand
gggcaaagcucuaaagaaa

SEQ ID NO: 683845 - RNA, 19 nt, Homo sapiens
  misc_RNA (1)...(19): siRNA sense strand
gcaaagcucuaaagaaaga

SEQ ID NO: 683846 - RNA, 19 nt, Homo sapiens
  misc_RNA (1)...(19): siRNA sense strand
ggaagagucugucaagaaa

SEQ ID NO: 683847 - RNA, 19 nt, Homo sapiens
  misc_RNA (1)...(19): siRNA sense strand
gcucaaacaucuagacuuu

SEQ ID NO: 683848 - RNA, 19 nt, Homo sapiens
  misc_RNA (1)...(19): siRNA sense strand
gaagacacguacucucaua

SEQ ID NO: 683849 - RNA, 19 nt, Homo sapiens
  misc_RNA (1)...(19): siRNA sense strand
ggaaggacuuucugaguuu

SEQ ID NO: 683850 - RNA, 19 nt, Homo sapiens
  misc_RNA (1)...(19): siRNA sense strand
ccagagauauguccuuaua

SEQ ID NO: 683851 - RNA, 19 nt, Homo sapiens
  misc_RNA (1)...(19): siRNA sense strand
agaaagagguuaagaaaga

SEQ ID NO: 683852 - RNA, 19 nt, Homo sapiens
  misc_RNA (1)...(19): siRNA sense strand
gaacaguccucaaugucua

SEQ ID NO: 683853 - RNA, 19 nt, Homo sapiens
  misc_RNA (1)...(19): siRNA sense strand
gaagagccaucuccaguga

SEQ ID NO: 683854 - RNA, 19 nt, Homo sapiens
  misc_RNA (1)...(19): siRNA sense strand
agacaaggcugaauucauu

SEQ ID NO: 683855 - RNA, 19 nt, Homo sapiens
  misc_RNA (1)...(19): siRNA sense strand
agaaagaucugaaagagaa

SEQ ID NO: 683856 - RNA, 19 nt, Homo sapiens
  misc_RNA (1)...(19): siRNA sense strand
uuaagaagcucccuaaaga

SEQ ID NO: 683857 - RNA, 19 nt, Homo sapiens
  misc_RNA (1)...(19): siRNA sense strand
gaaaggaaauuaggagaug

SEQ ID NO: 683858 - RNA, 19 nt, Homo sapiens
  misc_RNA (1)...(19): siRNA sense strand
gcaaagaaaucaucuacuc

SEQ ID NO: 683859 - RNA, 19 nt, Homo sapiens
  misc_RNA (1)...(19): siRNA sense strand
gcaaacaccuaccacauuc

SEQ ID NO: 683860 - RNA, 19 nt, Homo sapiens
  misc_RNA (1)...(19): siRNA sense strand
caauucagcuucuaucuug

SEQ ID NO: 683861 - RNA, 19 nt, Homo sapiens
  misc_RNA (1)...(19): siRNA sense strand
uaacuucagucucaucuuu

SEQ ID NO: 683862 - RNA, 19 nt, Homo sapiens
  misc_RNA (1)...(19): siRNA sense strand
caaaggaagucaagaagga

SEQ ID NO: 683863 - RNA, 19 nt, Homo sapiens
  misc_RNA (1)...(19): siRNA sense strand
gaaccugcaucuucaauuc

SEQ ID NO: 683864 - RNA, 19 nt, Homo sapiens
  misc_RNA (1)...(19): siRNA sense strand
caaggacuuugaagaguua

SEQ ID NO: 683865 - RNA, 19 nt, Homo sapiens
  misc_RNA (1)...(19): siRNA sense strand
gcacagugguuaugcaaga

SEQ ID NO: 683866 - RNA, 19 nt, Homo sapiens
  misc_RNA (1)...(19): siRNA sense strand
gaagaaagaaucuguggaa

SEQ ID NO: 683867 - RNA, 19 nt, Homo sapiens
  misc_RNA (1)...(19): siRNA sense strand
gaagagaaacugaaggaaa

SEQ ID NO: 683868 - RNA, 19 nt, Homo sapiens
  misc_RNA (1)...(19): siRNA sense strand
gaagacaaauucagcagau

SEQ ID NO: 683869 - RNA, 19 nt, Homo sapiens
  misc_RNA (1)...(19): siRNA sense strand
gauagcaucucagcuguuu

SEQ ID NO: 683870 - RNA, 19 nt, Homo sapiens
  misc_RNA (1)...(19): siRNA sense strand
gaacuccaaucuugacaga

SEQ ID NO: 683871 - RNA, 19 nt, Homo sapiens
  misc_RNA (1)...(19): siRNA sense strand
ggacaagacucuggaagug

SEQ ID NO: 683872 - RNA, 19 nt, Homo sapiens
  misc_RNA (1)...(19): siRNA sense strand
gaagagaagcauagaagaa

SEQ ID NO: 683873 - RNA, 19 nt, Homo sapiens
  misc_RNA (1)...(19): siRNA sense strand
gaaccucuguuuagaagug

SEQ ID NO: 683874 - RNA, 19 nt, Homo sapiens
  misc_RNA (1)...(19): siRNA sense strand
gaauguugauguggaauuu

SEQ ID NO: 683875 - RNA, 19 nt, Homo sapiens
  misc_RNA (1)...(19): siRNA sense strand
gaggugcgcuuaaugauca

SEQ ID NO: 683876 - RNA, 19 nt, Homo sapiens
  misc_RNA (1)...(19): siRNA sense strand
gcugagaggucccuuaugu

SEQ ID NO: 683877 - RNA, 19 nt, Homo sapiens
  misc_RNA (1)...(19): siRNA sense strand
caagaaagagguuaagaaa

SEQ ID NO: 683878 - RNA, 19 nt, Homo sapiens
  misc_RNA (1)...(19): siRNA sense strand
gaaggacuuucugaguuua

SEQ ID NO: 683879 - RNA, 19 nt, Homo sapiens
  misc_RNA (1)...(19): siRNA sense strand
ccaagaaucuccugagcaa

SEQ ID NO: 683880 - RNA, 19 nt, Homo sapiens
  misc_RNA (1)...(19): siRNA sense strand
agaaaugucuccaucuaaa

SEQ ID NO: 683881 - RNA, 19 nt, Homo sapiens
  misc_RNA (1)...(19): siRNA sense strand
gaaaggagaggcugaacaa

SEQ ID NO: 683882 - RNA, 19 nt, Homo sapiens
  misc_RNA (1)...(19): siRNA sense strand
gaaagagguuaagaaagaa

SEQ ID NO: 683883 - RNA, 19 nt, Homo sapiens
  misc_RNA (1)...(19): siRNA sense strand
cuacuuaacuucagucuca

SEQ ID NO: 683884 - RNA, 19 nt, Homo sapiens
  misc_RNA (1)...(19): siRNA sense strand
uagguaaacuugagaugua

SEQ ID NO: 683885 - RNA, 19 nt, Homo sapiens
  misc_RNA (1)...(19): siRNA sense strand
gcacagacuuugcaccaau

SEQ ID NO: 683886 - RNA, 19 nt, Homo sapiens
  misc_RNA (1)...(19): siRNA sense strand
ggaguuguauuucucaaug

SEQ ID NO: 683887 - RNA, 19 nt, Homo sapiens
  misc_RNA (1)...(19): siRNA sense strand
ugacuuaggaguuguauuu

SEQ ID NO: 683888 - RNA, 19 nt, Homo sapiens
  misc_RNA (1)...(19): siRNA sense strand
ucacacaccuuacuaucaa

SEQ ID NO: 683889 - RNA, 19 nt, Homo sapiens
  misc_RNA (1)...(19): siRNA sense strand
acacuaagauguccauuuc

SEQ ID NO: 683890 - RNA, 19 nt, Homo sapiens
  misc_RNA (1)...(19): siRNA sense strand
agaaguagaucucccgauu

SEQ ID NO: 683891 - RNA, 19 nt, Homo sapiens
  misc_RNA (1)...(19): siRNA sense strand
uaugagacaucuacaaaga

SEQ ID NO: 683892 - RNA, 19 nt, Homo sapiens
  misc_RNA (1)...(19): siRNA sense strand
ggacacccguucaagauca

SEQ ID NO: 683893 - RNA, 19 nt, Homo sapiens
  misc_RNA (1)...(19): siRNA sense strand
caagaccgaugucaauuuc

SEQ ID NO: 683894 - RNA, 19 nt, Homo sapiens
  misc_RNA (1)...(19): siRNA sense strand
gaaggaaguuaagaaggaa

SEQ ID NO: 683895 - RNA, 19 nt, Homo sapiens
  misc_RNA (1)...(19): siRNA sense strand
guacaaagaccaagucauc

SEQ ID NO: 683896 - RNA, 19 nt, Homo sapiens
  misc_RNA (1)...(19): siRNA sense strand
aauggaagcugaagacuau

SEQ ID NO: 683897 - RNA, 19 nt, Homo sapiens
  misc_RNA (1)...(19): siRNA sense strand
ggagagagaagucaccaaa

SEQ ID NO: 683898 - RNA, 19 nt, Homo sapiens
  misc_RNA (1)...(19): siRNA sense strand
ccacugauggcaaggauua

SEQ ID NO: 683899 - RNA, 19 nt, Homo sapiens
  misc_RNA (1)...(19): siRNA sense strand
gggcgauucugccuuguuu

SEQ ID NO: 683900 - RNA, 19 nt, Homo sapiens
  misc_RNA (1)...(19): siRNA sense strand
acagaaaugucuccaucua

SEQ ID NO: 683901 - RNA, 19 nt, Homo sapiens
  misc_RNA (1)...(19): siRNA sense strand
uuacugcucugaagugaaa

SEQ ID NO: 683902 - RNA, 19 nt, Homo sapiens
  misc_RNA (1)...(19): siRNA sense strand
gguaaagccugaagacaag

SEQ ID NO: 683903 - RNA, 19 nt, Homo sapiens
  misc_RNA (1)...(19): siRNA sense strand
gaccaaaccuucagugacu

SEQ ID NO: 683904 - RNA, 19 nt, Homo sapiens
  misc_RNA (1)...(19): siRNA sense strand
gaucccaacucaugacuca

SEQ ID NO: 683905 - RNA, 19 nt, Homo sapiens
  misc_RNA (1)...(19): siRNA sense strand
ccagagaggaggaauauga

SEQ ID NO: 683906 - RNA, 19 nt, Homo sapiens
  misc_RNA (1)...(19): siRNA sense strand
ucaauaugcucaucaaugg

SEQ ID NO: 683907 - RNA, 19 nt, Homo sapiens
  misc_RNA (1)...(19): siRNA sense strand
cuacgagacuucagaccua

SEQ ID NO: 683908 - RNA, 19 nt, Homo sapiens
  misc_RNA (1)...(19): siRNA sense strand
ugaaaugacuucuacuagu

SEQ ID NO: 683909 - RNA, 19 nt, Homo sapiens
  misc_RNA (1)...(19): siRNA sense strand
ccaaggacuuugaagaguu

SEQ ID NO: 683910 - RNA, 19 nt, Homo sapiens
  misc_RNA (1)...(19): siRNA sense strand
agaaggaaguuaagaagga

SEQ ID NO: 683911 - RNA, 19 nt, Homo sapiens
  misc_RNA (1)...(19): siRNA sense strand
gcaaauccgugcgcaagga

SEQ ID NO: 683912 - RNA, 19 nt, Homo sapiens
  misc_RNA (1)...(19): siRNA sense strand
cuccaagacuucaucaaua

SEQ ID NO: 683913 - RNA, 19 nt, Homo sapiens
  misc_RNA (1)...(19): siRNA sense strand
uuacgagacugcagagaaa

SEQ ID NO: 683914 - RNA, 19 nt, Homo sapiens
  misc_RNA (1)...(19): siRNA sense strand
caagucagcuacuccuguu

SEQ ID NO: 683915 - RNA, 19 nt, Homo sapiens
  misc_RNA (1)...(19): siRNA sense strand
caucucagcuguuucaagu

SEQ ID NO: 683916 - RNA, 19 nt, Homo sapiens
  misc_RNA (1)...(19): siRNA sense strand
gugaugagaccaacaauga

SEQ ID NO: 683917 - RNA, 19 nt, Homo sapiens
  misc_RNA (1)...(19): siRNA sense strand
gaaguagaucucccgauuu

SEQ ID NO: 683918 - RNA, 19 nt, Homo sapiens
  misc_RNA (1)...(19): siRNA sense strand
ggacugguaccaacaaaga

SEQ ID NO: 683919 - RNA, 19 nt, Homo sapiens
  misc_RNA (1)...(19): siRNA sense strand
gacacaaucuccaagacuu

SEQ ID NO: 683920 - RNA, 19 nt, Homo sapiens
  misc_RNA (1)...(19): siRNA sense strand
gaaagaaucuguggaaaag

SEQ ID NO: 683921 - RNA, 19 nt, Homo sapiens
  misc_RNA (1)...(19): siRNA sense strand
gaagucccaucucccuuug

SEQ ID NO: 683922 - RNA, 19 nt, Homo sapiens
  misc_RNA (1)...(19): siRNA sense strand
ggaagucccaucucccuuu

SEQ ID NO: 683923 - RNA, 19 nt, Homo sapiens
  misc_RNA (1)...(19): siRNA sense strand
gcucaucaauggcggauca

SEQ ID NO: 683924 - RNA, 19 nt, Homo sapiens
  misc_RNA (1)...(19): siRNA sense strand
caugcaagauugaacugua

SEQ ID NO: 683925 - RNA, 19 nt, Homo sapiens
  misc_RNA (1)...(19): siRNA sense strand
gaucucaacaucaugguuu

SEQ ID NO: 683926 - RNA, 19 nt, Homo sapiens
  misc_RNA (1)...(19): siRNA sense strand
ccaauccucuugagugguu

SEQ ID NO: 683927 - RNA, 19 nt, Homo sapiens
  misc_RNA (1)...(19): siRNA sense strand
gaagguuauuccuaugaga

SEQ ID NO: 683928 - RNA, 19 nt, Homo sapiens
  misc_RNA (1)...(19): siRNA sense strand
caacugaaguggacuacag

SEQ ID NO: 683929 - RNA, 19 nt, Homo sapiens
  misc_RNA (1)...(19): siRNA sense strand
ccagucaucucccuacaga

SEQ ID NO: 683930 - RNA, 19 nt, Homo sapiens
  misc_RNA (1)...(19): siRNA sense strand
ucucaggaauucguaaaua

SEQ ID NO: 683931 - RNA, 19 nt, Homo sapiens
  misc_RNA (1)...(19): siRNA sense strand
gaucaagaaagaagagaaa

SEQ ID NO: 683932 - RNA, 19 nt, Homo sapiens
  misc_RNA (1)...(19): siRNA sense strand
gaagcucauccgacacuua

SEQ ID NO: 683933 - RNA, 19 nt, Homo sapiens
  misc_RNA (1)...(19): siRNA sense strand
uccaagcccugcuguuaua

SEQ ID NO: 683934 - RNA, 19 nt, Homo sapiens
  misc_RNA (1)...(19): siRNA sense strand
ccacagcaauaguaagaau

SEQ ID NO: 683935 - RNA, 19 nt, Homo sapiens
  misc_RNA (1)...(19): siRNA sense strand
uaaagaagacacuaagaug

SEQ ID NO: 683936 - RNA, 19 nt, Homo sapiens
  misc_RNA (1)...(19): siRNA sense strand
ccaaguaaguccaguuucu

SEQ ID NO: 683937 - RNA, 19 nt, Homo sapiens
  misc_RNA (1)...(19): siRNA sense strand
gauccgagucugcuuauga

SEQ ID NO: 683938 - RNA, 19 nt, Homo sapiens
  misc_RNA (1)...(19): siRNA sense strand
ugaauucagugaugccaaa

SEQ ID NO: 683939 - RNA, 19 nt, Homo sapiens
  misc_RNA (1)...(19): siRNA sense strand
aaacaccuaucaagaagga

SEQ ID NO: 683940 - RNA, 19 nt, Homo sapiens
  misc_RNA (1)...(19): siRNA sense strand
uugcagagcucgaggaaga

SEQ ID NO: 683941 - RNA, 19 nt, Homo sapiens
  misc_RNA (1)...(19): siRNA sense strand
gaugacaauuugccuggaa

SEQ ID NO: 683942 - RNA, 19 nt, Homo sapiens
  misc_RNA (1)...(19): siRNA sense strand
aaagaaagaucugaaagag

SEQ ID NO: 683943 - RNA, 19 nt, Homo sapiens
  misc_RNA (1)...(19): siRNA sense strand
uaagaauguugauguggaa

SEQ ID NO: 683944 - RNA, 19 nt, Homo sapiens
  misc_RNA (1)...(19): siRNA sense strand
gggcaaagcucuaaagaaa

SEQ ID NO: 683945 - RNA, 19 nt, Homo sapiens
  misc_RNA (1)...(19): siRNA sense strand
gcaaagcucuaaagaaaga

SEQ ID NO: 683946 - RNA, 19 nt, Homo sapiens
  misc_RNA (1)...(19): siRNA sense strand
ggaagagucugucaagaaa

SEQ ID NO: 683947 - RNA, 19 nt, Homo sapiens
  misc_RNA (1)...(19): siRNA sense strand
gcucaaacaucuagacuuu

SEQ ID NO: 683948 - RNA, 19 nt, Homo sapiens
  misc_RNA (1)...(19): siRNA sense strand
gaagacacguacucucaua

SEQ ID NO: 683949 - RNA, 19 nt, Homo sapiens
  misc_RNA (1)...(19): siRNA sense strand
ggaaggacuuucugaguuu

SEQ ID NO: 683950 - RNA, 19 nt, Homo sapiens
  misc_RNA (1)...(19): siRNA sense strand
ccagagauauguccuuaua

SEQ ID NO: 683951 - RNA, 19 nt, Homo sapiens
  misc_RNA (1)...(19): siRNA sense strand
agaaagagguuaagaaaga

SEQ ID NO: 683952 - RNA, 19 nt, Homo sapiens
  misc_RNA (1)...(19): siRNA sense strand
gaacaguccucaaugucua

SEQ ID NO: 683953 - RNA, 19 nt, Homo sapiens
  misc_RNA (1)...(19): siRNA sense strand
gaagagccaucuccaguga

SEQ ID NO: 683954 - RNA, 19 nt, Homo sapiens
  misc_RNA (1)...(19): siRNA sense strand
agacaaggcugaauucauu

SEQ ID NO: 683955 - RNA, 19 nt, Homo sapiens
  misc_RNA (1)...(19): siRNA sense strand
agaaagaucugaaagagaa

SEQ ID NO: 683956 - RNA, 19 nt, Homo sapiens
  misc_RNA (1)...(19): siRNA sense strand
uuaagaagcucccuaaaga

SEQ ID NO: 683957 - RNA, 19 nt, Homo sapiens
  misc_RNA (1)...(19): siRNA sense strand
gaaaggaaauuaggagaug

SEQ ID NO: 683958 - RNA, 19 nt, Homo sapiens
  misc_RNA (1)...(19): siRNA sense strand
gcaaagaaaucaucuacuc

SEQ ID NO: 683959 - RNA, 19 nt, Homo sapiens
  misc_RNA (1)...(19): siRNA sense strand
gcaaacaccuaccacauuc

SEQ ID NO: 683960 - RNA, 19 nt, Homo sapiens
  misc_RNA (1)...(19): siRNA sense strand
caauucagcuucuaucuug

SEQ ID NO: 683961 - RNA, 19 nt, Homo sapiens
  misc_RNA (1)...(19): siRNA sense strand
uaacuucagucucaucuuu

SEQ ID NO: 683962 - RNA, 19 nt, Homo sapiens
  misc_RNA (1)...(19): siRNA sense strand
caaaggaagucaagaagga

SEQ ID NO: 683963 - RNA, 19 nt, Homo sapiens
  misc_RNA (1)...(19): siRNA sense strand
gaaccugcaucuucaauuc

SEQ ID NO: 683964 - RNA, 19 nt, Homo sapiens
  misc_RNA (1)...(19): siRNA sense strand
caaggacuuugaagaguua

SEQ ID NO: 683965 - RNA, 19 nt, Homo sapiens
  misc_RNA (1)...(19): siRNA sense strand
gcacagugguuaugcaaga

SEQ ID NO: 683966 - RNA, 19 nt, Homo sapiens
  misc_RNA (1)...(19): siRNA sense strand
gaagaaagaaucuguggaa

SEQ ID NO: 683967 - RNA, 19 nt, Homo sapiens
  misc_RNA (1)...(19): siRNA sense strand
gaagagaaacugaaggaaa

SEQ ID NO: 683968 - RNA, 19 nt, Homo sapiens
  misc_RNA (1)...(19): siRNA sense strand
gaagacaaauucagcagau

SEQ ID NO: 683969 - RNA, 19 nt, Homo sapiens
  misc_RNA (1)...(19): siRNA sense strand
gauagcaucucagcuguuu

SEQ ID NO: 683970 - RNA, 19 nt, Homo sapiens
  misc_RNA (1)...(19): siRNA sense strand
gaacuccaaucuugacaga

SEQ ID NO: 683971 - RNA, 19 nt, Homo sapiens
  misc_RNA (1)...(19): siRNA sense strand
ggacaagacucuggaagug

SEQ ID NO: 683972 - RNA, 19 nt, Homo sapiens
  misc_RNA (1)...(19): siRNA sense strand
gaagagaagcauagaagaa

SEQ ID NO: 683973 - RNA, 19 nt, Homo sapiens
  misc_RNA (1)...(19): siRNA sense strand
gaaccucuguuuagaagug

SEQ ID NO: 683974 - RNA, 19 nt, Homo sapiens
  misc_RNA (1)...(19): siRNA sense strand
gaauguugauguggaauuu

SEQ ID NO: 683975 - RNA, 19 nt, Homo sapiens
  misc_RNA (1)...(19): siRNA sense strand
gcugagaggucccuuaugu

SEQ ID NO: 683976 - RNA, 19 nt, Homo sapiens
  misc_RNA (1)...(19): siRNA sense strand
caagaaagagguuaagaaa

SEQ ID NO: 683977 - RNA, 19 nt, Homo sapiens
  misc_RNA (1)...(19): siRNA sense strand
gaaggacuuucugaguuua

SEQ ID NO: 683978 - RNA, 19 nt, Homo sapiens
  misc_RNA (1)...(19): siRNA sense strand
ccaagaaucuccugagcaa

SEQ ID NO: 683979 - RNA, 19 nt, Homo sapiens
  misc_RNA (1)...(19): siRNA sense strand
agaaaugucuccaucuaaa

SEQ ID NO: 683980 - RNA, 19 nt, Homo sapiens
  misc_RNA (1)...(19): siRNA sense strand
gaaaggagaggcugaacaa

SEQ ID NO: 683981 - RNA, 19 nt, Homo sapiens
  misc_RNA (1)...(19): siRNA sense strand
gaaagagguuaagaaagaa

SEQ ID NO: 683982 - RNA, 19 nt, Homo sapiens
  misc_RNA (1)...(19): siRNA sense strand
cuacuuaacuucagucuca

SEQ ID NO: 683983 - RNA, 19 nt, Homo sapiens
  misc_RNA (1)...(19): siRNA sense strand
uagguaaacuugagaugua

SEQ ID NO: 683984 - RNA, 19 nt, Homo sapiens
  misc_RNA (1)...(19): siRNA sense strand
gcacagacuuugcaccaau

SEQ ID NO: 683985 - RNA, 19 nt, Homo sapiens
  misc_RNA (1)...(19): siRNA sense strand
ggaguuguauuucucaaug

SEQ ID NO: 683986 - RNA, 19 nt, Homo sapiens
  misc_RNA (1)...(19): siRNA sense strand
ugacuuaggaguuguauuu

SEQ ID NO: 683987 - RNA, 19 nt, Homo sapiens
  misc_RNA (1)...(19): siRNA sense strand
ucacacaccuuacuaucaa

SEQ ID NO: 683988 - RNA, 19 nt, Homo sapiens
  misc_RNA (1)...(19): siRNA sense strand
acacuaagauguccauuuc

SEQ ID NO: 683989 - RNA, 19 nt, Homo sapiens
  misc_RNA (1)...(19): siRNA sense strand
agaaguagaucucccgauu

SEQ ID NO: 683990 - RNA, 19 nt, Homo sapiens
  misc_RNA (1)...(19): siRNA sense strand
uaugagacaucuacaaaga

SEQ ID NO: 683991 - RNA, 19 nt, Homo sapiens
  misc_RNA (1)...(19): siRNA sense strand
ggacacccguucaagauca

SEQ ID NO: 683992 - RNA, 19 nt, Homo sapiens
  misc_RNA (1)...(19): siRNA sense strand
caagaccgaugucaauuuc

SEQ ID NO: 683993 - RNA, 19 nt, Homo sapiens
  misc_RNA (1)...(19): siRNA sense strand
gaaggaaguuaagaaggaa

SEQ ID NO: 683994 - RNA, 19 nt, Homo sapiens
  misc_RNA (1)...(19): siRNA sense strand
guacaaagaccaagucauc

SEQ ID NO: 683995 - RNA, 19 nt, Homo sapiens
  misc_RNA (1)...(19): siRNA sense strand
aauggaagcugaagacuau

SEQ ID NO: 683996 - RNA, 19 nt, Homo sapiens
  misc_RNA (1)...(19): siRNA sense strand
ggagagagaagucaccaaa

SEQ ID NO: 683997 - RNA, 19 nt, Homo sapiens
  misc_RNA (1)...(19): siRNA sense strand
ccacugauggcaaggauua

SEQ ID NO: 683998 - RNA, 19 nt, Homo sapiens
  misc_RNA (1)...(19): siRNA sense strand
gggcgauucugccuuguuu

SEQ ID NO: 683999 - RNA, 19 nt, Homo sapiens
  misc_RNA (1)...(19): siRNA sense strand
acagaaaugucuccaucua

SEQ ID NO: 684000 - RNA, 19 nt, Homo sapiens
  misc_RNA (1)...(19): siRNA sense strand
uuacugcucugaagugaaa

SEQ ID NO: 684001 - RNA, 19 nt, Homo sapiens
  misc_RNA (1)...(19): siRNA sense strand
gguaaagccugaagacaag

SEQ ID NO: 684002 - RNA, 19 nt, Homo sapiens
  misc_RNA (1)...(19): siRNA sense strand
gaccaaaccuucagugacu

SEQ ID NO: 684003 - RNA, 19 nt, Homo sapiens
  misc_RNA (1)...(19): siRNA sense strand
gaucccaacucaugacuca

SEQ ID NO: 684004 - RNA, 19 nt, Homo sapiens
  misc_RNA (1)...(19): siRNA sense strand
ccagagaggaggaauauga

SEQ ID NO: 684005 - RNA, 19 nt, Homo sapiens
  misc_RNA (1)...(19): siRNA sense strand
ucaauaugcucaucaaugg

SEQ ID NO: 684006 - RNA, 19 nt, Homo sapiens
  misc_RNA (1)...(19): siRNA sense strand
cuacgagacuucagaccua

SEQ ID NO: 684007 - RNA, 19 nt, Homo sapiens
  misc_RNA (1)...(19): siRNA sense strand
ugaaaugacuucuacuagu

SEQ ID NO: 684008 - RNA, 19 nt, Homo sapiens
  misc_RNA (1)...(19): siRNA sense strand
ccaaggacuuugaagaguu

SEQ ID NO: 684009 - RNA, 19 nt, Homo sapiens
  misc_RNA (1)...(19): siRNA sense strand
agaaggaaguuaagaagga

SEQ ID NO: 684010 - RNA, 19 nt, Homo sapiens
  misc_RNA (1)...(19): siRNA sense strand
gcaaauccgugcgcaagga

SEQ ID NO: 684011 - RNA, 19 nt, Homo sapiens
  misc_RNA (1)...(19): siRNA sense strand
cuccaagacuucaucaaua

SEQ ID NO: 684012 - RNA, 19 nt, Homo sapiens
  misc_RNA (1)...(19): siRNA sense strand
uuacgagacugcagagaaa

SEQ ID NO: 684013 - RNA, 19 nt, Homo sapiens
  misc_RNA (1)...(19): siRNA sense strand
caagucagcuacuccuguu

SEQ ID NO: 684014 - RNA, 19 nt, Homo sapiens
  misc_RNA (1)...(19): siRNA sense strand
caucucagcuguuucaagu

SEQ ID NO: 684015 - RNA, 19 nt, Homo sapiens
  misc_RNA (1)...(19): siRNA sense strand
gugaugagaccaacaauga

SEQ ID NO: 684016 - RNA, 19 nt, Homo sapiens
  misc_RNA (1)...(19): siRNA sense strand
gaaguagaucucccgauuu

SEQ ID NO: 684017 - RNA, 19 nt, Homo sapiens
  misc_RNA (1)...(19): siRNA sense strand
ggacugguaccaacaaaga

SEQ ID NO: 684018 - RNA, 19 nt, Homo sapiens
  misc_RNA (1)...(19): siRNA sense strand
ggaagucccaucucccuuu

SEQ ID NO: 684019 - RNA, 19 nt, Homo sapiens
  misc_RNA (1)...(19): siRNA sense strand
gaaagaaucuguggaaaag

SEQ ID NO: 684020 - RNA, 19 nt, Homo sapiens
  misc_RNA (1)...(19): siRNA sense strand
gaagucccaucucccuuug

SEQ ID NO: 684021 - RNA, 19 nt, Homo sapiens
  misc_RNA (1)...(19): siRNA sense strand
gacacaaucuccaagacuu

SEQ ID NO: 684022 - RNA, 19 nt, Homo sapiens
  misc_RNA (1)...(19): siRNA sense strand
gcucaucaauggcggauca

SEQ ID NO: 684023 - RNA, 19 nt, Homo sapiens
  misc_RNA (1)...(19): siRNA sense strand
caugcaagauugaacugua

SEQ ID NO: 684024 - RNA, 19 nt, Homo sapiens
  misc_RNA (1)...(19): siRNA sense strand
gaucucaacaucaugguuu

SEQ ID NO: 684025 - RNA, 19 nt, Homo sapiens
  misc_RNA (1)...(19): siRNA sense strand
ccaauccucuugagugguu

SEQ ID NO: 684026 - RNA, 19 nt, Homo sapiens
  misc_RNA (1)...(19): siRNA sense strand
gaagguuauuccuaugaga

SEQ ID NO: 684027 - RNA, 19 nt, Homo sapiens
  misc_RNA (1)...(19): siRNA sense strand
caacugaaguggacuacag

SEQ ID NO: 684028 - RNA, 19 nt, Homo sapiens
  misc_RNA (1)...(19): siRNA sense strand
ccagucaucucccuacaga

SEQ ID NO: 684029 - RNA, 19 nt, Homo sapiens
  misc_RNA (1)...(19): siRNA sense strand
ucucaggaauucguaaaua

SEQ ID NO: 684030 - RNA, 19 nt, Homo sapiens
  misc_RNA (1)...(19): siRNA sense strand
gaucaagaaagaagagaaa

SEQ ID NO: 684031 - RNA, 19 nt, Homo sapiens
  misc_RNA (1)...(19): siRNA sense strand
gaagcucauccgacacuua

SEQ ID NO: 684032 - RNA, 19 nt, Homo sapiens
  misc_RNA (1)...(19): siRNA sense strand
uccaagcccugcuguuaua

SEQ ID NO: 684033 - RNA, 19 nt, Homo sapiens
  misc_RNA (1)...(19): siRNA sense strand
ccacagcaauaguaagaau

SEQ ID NO: 684034 - RNA, 19 nt, Homo sapiens
  misc_RNA (1)...(19): siRNA sense strand
uaaagaagacacuaagaug

SEQ ID NO: 684035 - RNA, 19 nt, Homo sapiens
  misc_RNA (1)...(19): siRNA sense strand
ccaaguaaguccaguuucu

SEQ ID NO: 684036 - RNA, 19 nt, Homo sapiens
  misc_RNA (1)...(19): siRNA sense strand
gauccgagucugcuuauga

SEQ ID NO: 684037 - RNA, 19 nt, Homo sapiens
  misc_RNA (1)...(19): siRNA sense strand
ugaauucagugaugccaaa

SEQ ID NO: 684038 - RNA, 19 nt, Homo sapiens
  misc_RNA (1)...(19): siRNA sense strand
aaacaccuaucaagaagga

SEQ ID NO: 684039 - RNA, 19 nt, Homo sapiens
  misc_RNA (1)...(19): siRNA sense strand
uugcagagcucgaggaaga

SEQ ID NO: 684040 - RNA, 19 nt, Homo sapiens
  misc_RNA (1)...(19): siRNA sense strand
gaugacaauuugccuggaa

SEQ ID NO: 684041 - RNA, 19 nt, Homo sapiens
  misc_RNA (1)...(19): siRNA sense strand
uaaagaagaaugcccaaga

SEQ ID NO: 684042 - RNA, 19 nt, Homo sapiens
  misc_RNA (1)...(19): siRNA sense strand
uaagaauguugauguggaa

SEQ ID NO: 684043 - RNA, 19 nt, Homo sapiens
  misc_RNA (1)...(19): siRNA sense strand
aaagaaagaucugaaagag

SEQ ID NO: 684044 - RNA, 19 nt, Homo sapiens
  misc_RNA (1)...(19): siRNA sense strand
gaaaggagauuccaaccua

SEQ ID NO: 684045 - RNA, 19 nt, Homo sapiens
  misc_RNA (1)...(19): siRNA sense strand
ugacaaugcuccagaaauu

SEQ ID NO: 684046 - RNA, 19 nt, Homo sapiens
  misc_RNA (1)...(19): siRNA sense strand
gcgaacaaauaucagaaua

SEQ ID NO: 684047 - RNA, 19 nt, Homo sapiens
  misc_RNA (1)...(19): siRNA sense strand
gcucaagugucuuauauuc

SEQ ID NO: 684048 - RNA, 19 nt, Homo sapiens
  misc_RNA (1)...(19): siRNA sense strand
gaacccgauuuccaauuaa

SEQ ID NO: 684049 - RNA, 19 nt, Homo sapiens
  misc_RNA (1)...(19): siRNA sense strand
cugcagaacuacaagcuua

SEQ ID NO: 684050 - RNA, 19 nt, Homo sapiens
  misc_RNA (1)...(19): siRNA sense strand
gaaugacaaugcuccagaa

SEQ ID NO: 684051 - RNA, 19 nt, Homo sapiens
  misc_RNA (1)...(19): siRNA sense strand
cagaggaauuggaaauaaa

SEQ ID NO: 684052 - RNA, 19 nt, Homo sapiens
  misc_RNA (1)...(19): siRNA sense strand
gaaacaggauccggucaga

SEQ ID NO: 684053 - RNA, 19 nt, Homo sapiens
  misc_RNA (1)...(19): siRNA sense strand
aagcgagccucuucugaua

SEQ ID NO: 684054 - RNA, 19 nt, Homo sapiens
  misc_RNA (1)...(19): siRNA sense strand
cgagcaauuuagagacuua

SEQ ID NO: 684055 - RNA, 19 nt, Homo sapiens
  misc_RNA (1)...(19): siRNA sense strand
acagaggaauuggaaauaa

SEQ ID NO: 684056 - RNA, 19 nt, Homo sapiens
  misc_RNA (1)...(19): siRNA sense strand
gaguggagaaguaucaaua

SEQ ID NO: 684057 - RNA, 19 nt, Homo sapiens
  misc_RNA (1)...(19): siRNA sense strand
cggaagagccaccugauuu

SEQ ID NO: 684058 - RNA, 19 nt, Homo sapiens
  misc_RNA (1)...(19): siRNA sense strand
ccacccaccuucccucauu

SEQ ID NO: 684059 - RNA, 19 nt, Homo sapiens
  misc_RNA (1)...(19): siRNA sense strand
gccauguucuaugaaauua

SEQ ID NO: 684060 - RNA, 19 nt, Homo sapiens
  misc_RNA (1)...(19): siRNA sense strand
ugacaacccaccaauguuu

SEQ ID NO: 684061 - RNA, 19 nt, Homo sapiens
  misc_RNA (1)...(19): siRNA sense strand
gaugccauguucuaugaaa

SEQ ID NO: 684062 - RNA, 19 nt, Homo sapiens
  misc_RNA (1)...(19): siRNA sense strand
guggagaaguaucaauauu

SEQ ID NO: 684063 - RNA, 19 nt, Homo sapiens
  misc_RNA (1)...(19): siRNA sense strand
ugauaaugcuccuaauuuc

SEQ ID NO: 684064 - RNA, 19 nt, Homo sapiens
  misc_RNA (1)...(19): siRNA sense strand
caacagaggaauuggaaau

SEQ ID NO: 684065 - RNA, 19 nt, Homo sapiens
  misc_RNA (1)...(19): siRNA sense strand
gggauucaaugcucaagug

SEQ ID NO: 684066 - RNA, 19 nt, Homo sapiens
  misc_RNA (1)...(19): siRNA sense strand
gacaaugcuccagaaauua

SEQ ID NO: 684067 - RNA, 19 nt, Homo sapiens
  misc_RNA (1)...(19): siRNA sense strand
uuaacucccugcagaacua

SEQ ID NO: 684068 - RNA, 19 nt, Homo sapiens
  misc_RNA (1)...(19): siRNA sense strand
agaucaauauuaccgcuua

SEQ ID NO: 684069 - RNA, 19 nt, Homo sapiens
  misc_RNA (1)...(19): siRNA sense strand
gaagagggcaccguuggaa

SEQ ID NO: 684070 - RNA, 19 nt, Homo sapiens
  misc_RNA (1)...(19): siRNA sense strand
ucaaugcucaagugucuua

SEQ ID NO: 684071 - RNA, 19 nt, Homo sapiens
  misc_RNA (1)...(19): siRNA sense strand
gguugaggauaaauugaaa

SEQ ID NO: 684072 - RNA, 19 nt, Homo sapiens
  misc_RNA (1)...(19): siRNA sense strand
gggcuuuccugcagaccua

SEQ ID NO: 684073 - RNA, 19 nt, Homo sapiens
  misc_RNA (1)...(19): siRNA sense strand
gacaacccaccaauguuua

SEQ ID NO: 684074 - RNA, 19 nt, Homo sapiens
  misc_RNA (1)...(19): siRNA sense strand
ugacccagauguaggcauu

SEQ ID NO: 684075 - RNA, 19 nt, Homo sapiens
  misc_RNA (1)...(19): siRNA sense strand
uaacucaggauuuacuuga

SEQ ID NO: 684076 - RNA, 19 nt, Homo sapiens
  misc_RNA (1)...(19): siRNA sense strand
caauauuaccgcuuaguga

SEQ ID NO: 684077 - RNA, 19 nt, Homo sapiens
  misc_RNA (1)...(19): siRNA sense strand
ggaccgcgaacaaauauca

SEQ ID NO: 684078 - RNA, 19 nt, Homo sapiens
  misc_RNA (1)...(19): siRNA sense strand
ggacgcagcuuuucucucu

SEQ ID NO: 684079 - RNA, 19 nt, Homo sapiens
  misc_RNA (1)...(19): siRNA sense strand
ggacagagacgcgcucaag

SEQ ID NO: 684080 - RNA, 19 nt, Homo sapiens
  misc_RNA (1)...(19): siRNA sense strand
gggcaccguuggaagagaa

SEQ ID NO: 684081 - RNA, 19 nt, Homo sapiens
  misc_RNA (1)...(19): siRNA sense strand
gcaaaugacaacccaccaa

SEQ ID NO: 684082 - RNA, 19 nt, Homo sapiens
  misc_RNA (1)...(19): siRNA sense strand
caagcucagucccagaaga

SEQ ID NO: 684083 - RNA, 19 nt, Homo sapiens
  misc_RNA (1)...(19): siRNA sense strand
ugauaguccuggaugcaaa

SEQ ID NO: 684084 - RNA, 19 nt, Homo sapiens
  misc_RNA (1)...(19): siRNA sense strand
gcugagauccuucgacuac

SEQ ID NO: 684085 - RNA, 19 nt, Homo sapiens
  misc_RNA (1)...(19): siRNA sense strand
aggaugccauguucuauga

SEQ ID NO: 684086 - RNA, 19 nt, Homo sapiens
  misc_RNA (1)...(19): siRNA sense strand
cgacuacgagcaauuuaga

SEQ ID NO: 684087 - RNA, 19 nt, Homo sapiens
  misc_RNA (1)...(19): siRNA sense strand
gagcccugcuggacagaga

SEQ ID NO: 684088 - RNA, 19 nt, Homo sapiens
  misc_RNA (1)...(19): siRNA sense strand
acaaucacgucucucacaa

SEQ ID NO: 684089 - RNA, 19 nt, Homo sapiens
  misc_RNA (1)...(19): siRNA sense strand
acucaggauuuacuugaaa

SEQ ID NO: 684090 - RNA, 19 nt, Homo sapiens
  misc_RNA (1)...(19): siRNA sense strand
ggacccagauagcaacaac

SEQ ID NO: 684091 - RNA, 19 nt, Homo sapiens
  misc_RNA (1)...(19): siRNA sense strand
gaaugggcagguugaaguu

SEQ ID NO: 684092 - RNA, 19 nt, Homo sapiens
  misc_RNA (1)...(19): siRNA sense strand
cgacgugcaugaccgagau

SEQ ID NO: 684093 - RNA, 19 nt, Homo sapiens
  misc_RNA (1)...(19): siRNA sense strand
caaaugacaacccaccaau

SEQ ID NO: 684094 - RNA, 19 nt, Homo sapiens
  misc_RNA (1)...(19): siRNA sense strand
caggagagcugugagaaaa

SEQ ID NO: 684095 - RNA, 19 nt, Homo sapiens
  misc_RNA (1)...(19): siRNA sense strand
auucggaccucacucugua

SEQ ID NO: 684096 - RNA, 19 nt, Homo sapiens
  misc_RNA (1)...(19): siRNA sense strand
ugucugaggagcuagauaa

SEQ ID NO: 684097 - RNA, 19 nt, Homo sapiens
  misc_RNA (1)...(19): siRNA sense strand
gagccuccaucuucucagu

SEQ ID NO: 684098 - RNA, 19 nt, Homo sapiens
  misc_RNA (1)...(19): siRNA sense strand
cugaggagcuagauaaagg

SEQ ID NO: 684099 - RNA, 19 nt, Homo sapiens
  misc_RNA (1)...(19): siRNA sense strand
gaggaugccauguucuaug

SEQ ID NO: 684100 - RNA, 19 nt, Homo sapiens
  misc_RNA (1)...(19): siRNA sense strand
uaaaaugccugggaaaauc

SEQ ID NO: 684101 - RNA, 19 nt, Homo sapiens
  misc_RNA (1)...(19): siRNA sense strand
gcauuaacucccugcagaa

SEQ ID NO: 684102 - RNA, 19 nt, Homo sapiens
  misc_RNA (1)...(19): siRNA sense strand
ggaagagccaccugauuuu

SEQ ID NO: 684103 - RNA, 19 nt, Homo sapiens
  misc_RNA (1)...(19): siRNA sense strand
uguccacucuggcaacuug

SEQ ID NO: 684104 - RNA, 19 nt, Homo sapiens
  misc_RNA (1)...(19): siRNA sense strand
gaucaauauuaccgcuuag

SEQ ID NO: 684105 - RNA, 19 nt, Homo sapiens
  misc_RNA (1)...(19): siRNA sense strand
gcggaagagccaccugauu

SEQ ID NO: 684106 - RNA, 19 nt, Homo sapiens
  misc_RNA (1)...(19): siRNA sense strand
ugagauccuucgacuacga

SEQ ID NO: 684107 - RNA, 19 nt, Homo sapiens
  misc_RNA (1)...(19): siRNA sense strand
cuccaacacuggcguccua

SEQ ID NO: 684108 - RNA, 19 nt, Homo sapiens
  misc_RNA (1)...(19): siRNA sense strand
cgcaucgucuccagaggua

SEQ ID NO: 684109 - RNA, 19 nt, Homo sapiens
  misc_RNA (1)...(19): siRNA sense strand
caacacuggcguccuauac

SEQ ID NO: 684110 - RNA, 19 nt, Homo sapiens
  misc_RNA (1)...(19): siRNA sense strand
gcgagccucuucugauaac

SEQ ID NO: 684111 - RNA, 19 nt, Homo sapiens
  misc_RNA (1)...(19): siRNA sense strand
ccaggagagcugugagaaa

SEQ ID NO: 684112 - RNA, 19 nt, Homo sapiens
  misc_RNA (1)...(19): siRNA sense strand
augcucaagugucuuauau

SEQ ID NO: 684113 - RNA, 19 nt, Homo sapiens
  misc_RNA (1)...(19): siRNA sense strand
ggagauuccaaccuacuuc

SEQ ID NO: 684114 - RNA, 19 nt, Homo sapiens
  misc_RNA (1)...(19): siRNA sense strand
gaaaugaaaggagauucca

SEQ ID NO: 684115 - RNA, 19 nt, Homo sapiens
  misc_RNA (1)...(19): siRNA sense strand
ggucaccgcggagaggaua

SEQ ID NO: 684116 - RNA, 19 nt, Homo sapiens
  misc_RNA (1)...(19): siRNA sense strand
acauucugguugaggauaa

SEQ ID NO: 684117 - RNA, 19 nt, Homo sapiens
  misc_RNA (1)...(19): siRNA sense strand
aaucugccauuuaaguuag

SEQ ID NO: 684118 - RNA, 19 nt, Homo sapiens
  misc_RNA (1)...(19): siRNA sense strand
uuaugaggaugccauguuc

SEQ ID NO: 684119 - RNA, 19 nt, Homo sapiens
  misc_RNA (1)...(19): siRNA sense strand
aaugacaacccaccaaugu

SEQ ID NO: 684120 - RNA, 19 nt, Homo sapiens
  misc_RNA (1)...(19): siRNA sense strand
gccuccaucuucucaguga

SEQ ID NO: 684121 - RNA, 19 nt, Homo sapiens
  misc_RNA (1)...(19): siRNA sense strand
ccuggaccgcgaacaaaua

SEQ ID NO: 684122 - RNA, 19 nt, Homo sapiens
  misc_RNA (1)...(19): siRNA sense strand
gagaaauugcucuuaucga

SEQ ID NO: 684123 - RNA, 19 nt, Homo sapiens
  misc_RNA (1)...(19): siRNA sense strand
caagugucuuauauucuag

SEQ ID NO: 684124 - RNA, 19 nt, Homo sapiens
  misc_RNA (1)...(19): siRNA sense strand
gcacauccaagugauaguc

SEQ ID NO: 684125 - RNA, 19 nt, Homo sapiens
  misc_RNA (1)...(19): siRNA sense strand
agagguaggacgcagcuuu

SEQ ID NO: 684126 - RNA, 19 nt, Homo sapiens
  misc_RNA (1)...(19): siRNA sense strand
aaauuacaaucacgucucu

SEQ ID NO: 684127 - RNA, 19 nt, Homo sapiens
  misc_RNA (1)...(19): siRNA sense strand
ggaugugaaugacaaugcu

SEQ ID NO: 684128 - RNA, 19 nt, Homo sapiens
  misc_RNA (1)...(19): siRNA sense strand
gauaaaaugccugggaaaa

SEQ ID NO: 684129 - RNA, 19 nt, Homo sapiens
  misc_RNA (1)...(19): siRNA sense strand
gagaaaagcgagccucuuc

SEQ ID NO: 684130 - RNA, 19 nt, Homo sapiens
  misc_RNA (1)...(19): siRNA sense strand
aacccgauuuccaauuaaa

SEQ ID NO: 684131 - RNA, 19 nt, Homo sapiens
  misc_RNA (1)...(19): siRNA sense strand
cagccugaguaccguguga

SEQ ID NO: 684132 - RNA, 19 nt, Homo sapiens
  misc_RNA (1)...(19): siRNA sense strand
gagauuccaaccuacuuca

SEQ ID NO: 684133 - RNA, 19 nt, Homo sapiens
  misc_RNA (1)...(19): siRNA sense strand
gauaacucaggauuuacuu

SEQ ID NO: 684134 - RNA, 19 nt, Homo sapiens
  misc_RNA (1)...(19): siRNA sense strand
uauacgcgcugagauccuu

SEQ ID NO: 684135 - RNA, 19 nt, Homo sapiens
  misc_RNA (1)...(19): siRNA sense strand
caccuucccucauuuaucc

SEQ ID NO: 684136 - RNA, 19 nt, Homo sapiens
  misc_RNA (1)...(19): siRNA sense strand
gaguaccgugugaguguuu

SEQ ID NO: 684137 - RNA, 19 nt, Homo sapiens
  misc_RNA (1)...(19): siRNA sense strand
aaagcgagccucuucugau

SEQ ID NO: 684138 - RNA, 19 nt, Homo sapiens
  misc_RNA (1)...(19): siRNA sense strand
cacccaccuucccucauuu

SEQ ID NO: 684139 - RNA, 19 nt, Homo sapiens
  misc_RNA (1)...(19): siRNA sense strand
gaggagcuagauaaagguu

SEQ ID NO: 684140 - RNA, 19 nt, Homo sapiens
  misc_RNA (1)...(19): siRNA sense strand
gcuccuaauuucccaacag

SEQ ID NO: 684141 - RNA, 19 nt, Homo sapiens
  misc_RNA (1)...(19): siRNA sense strand
gcuccagaaauuacaauca

SEQ ID NO: 684142 - RNA, 19 nt, Homo sapiens
  misc_RNA (1)...(19): siRNA sense strand
ccaacacuggcguccuaua

SEQ ID NO: 684143 - RNA, 19 nt, Homo sapiens
  misc_RNA (1)...(19): siRNA sense strand
acccagauguaggcauuaa

SEQ ID NO: 684144 - RNA, 19 nt, Homo sapiens
  misc_RNA (1)...(19): siRNA sense strand
gaaaggagauuccaaccua

SEQ ID NO: 684145 - RNA, 19 nt, Homo sapiens
  misc_RNA (1)...(19): siRNA sense strand
ugacaaugcuccagaaauu

SEQ ID NO: 684146 - RNA, 19 nt, Homo sapiens
  misc_RNA (1)...(19): siRNA sense strand
gcgaacaaauaucagaaua

SEQ ID NO: 684147 - RNA, 19 nt, Homo sapiens
  misc_RNA (1)...(19): siRNA sense strand
gcucaagugucuuauauuc

SEQ ID NO: 684148 - RNA, 19 nt, Homo sapiens
  misc_RNA (1)...(19): siRNA sense strand
gaacccgauuuccaauuaa

SEQ ID NO: 684149 - RNA, 19 nt, Homo sapiens
  misc_RNA (1)...(19): siRNA sense strand
cugcagaacuacaagcuua

SEQ ID NO: 684150 - RNA, 19 nt, Homo sapiens
  misc_RNA (1)...(19): siRNA sense strand
gaaugacaaugcuccagaa

SEQ ID NO: 684151 - RNA, 19 nt, Homo sapiens
  misc_RNA (1)...(19): siRNA sense strand
cagaggaauuggaaauaaa

SEQ ID NO: 684152 - RNA, 19 nt, Homo sapiens
  misc_RNA (1)...(19): siRNA sense strand
gaaacaggauccggucaga

SEQ ID NO: 684153 - RNA, 19 nt, Homo sapiens
  misc_RNA (1)...(19): siRNA sense strand
aagcgagccucuucugaua

SEQ ID NO: 684154 - RNA, 19 nt, Homo sapiens
  misc_RNA (1)...(19): siRNA sense strand
cgagcaauuuagagacuua

SEQ ID NO: 684155 - RNA, 19 nt, Homo sapiens
  misc_RNA (1)...(19): siRNA sense strand
acagaggaauuggaaauaa

SEQ ID NO: 684156 - RNA, 19 nt, Homo sapiens
  misc_RNA (1)...(19): siRNA sense strand
gaguggagaaguaucaaua

SEQ ID NO: 684157 - RNA, 19 nt, Homo sapiens
  misc_RNA (1)...(19): siRNA sense strand
cggaagagccaccugauuu

SEQ ID NO: 684158 - RNA, 19 nt, Homo sapiens
  misc_RNA (1)...(19): siRNA sense strand
ccacccaccuucccucauu

SEQ ID NO: 684159 - RNA, 19 nt, Homo sapiens
  misc_RNA (1)...(19): siRNA sense strand
gccauguucuaugaaauua

SEQ ID NO: 684160 - RNA, 19 nt, Homo sapiens
  misc_RNA (1)...(19): siRNA sense strand
ugacaacccaccaauguuu

SEQ ID NO: 684161 - RNA, 19 nt, Homo sapiens
  misc_RNA (1)...(19): siRNA sense strand
gaugccauguucuaugaaa

SEQ ID NO: 684162 - RNA, 19 nt, Homo sapiens
  misc_RNA (1)...(19): siRNA sense strand
guggagaaguaucaauauu

SEQ ID NO: 684163 - RNA, 19 nt, Homo sapiens
  misc_RNA (1)...(19): siRNA sense strand
ugauaaugcuccuaauuuc

SEQ ID NO: 684164 - RNA, 19 nt, Homo sapiens
  misc_RNA (1)...(19): siRNA sense strand
caacagaggaauuggaaau

SEQ ID NO: 684165 - RNA, 19 nt, Homo sapiens
  misc_RNA (1)...(19): siRNA sense strand
gggauucaaugcucaagug

SEQ ID NO: 684166 - RNA, 19 nt, Homo sapiens
  misc_RNA (1)...(19): siRNA sense strand
gacaaugcuccagaaauua

SEQ ID NO: 684167 - RNA, 19 nt, Homo sapiens
  misc_RNA (1)...(19): siRNA sense strand
uuaacucccugcagaacua

SEQ ID NO: 684168 - RNA, 19 nt, Homo sapiens
  misc_RNA (1)...(19): siRNA sense strand
agaucaauauuaccgcuua

SEQ ID NO: 684169 - RNA, 19 nt, Homo sapiens
  misc_RNA (1)...(19): siRNA sense strand
gaagagggcaccguuggaa

SEQ ID NO: 684170 - RNA, 19 nt, Homo sapiens
  misc_RNA (1)...(19): siRNA sense strand
ucaaugcucaagugucuua

SEQ ID NO: 684171 - RNA, 19 nt, Homo sapiens
  misc_RNA (1)...(19): siRNA sense strand
gguugaggauaaauugaaa

SEQ ID NO: 684172 - RNA, 19 nt, Homo sapiens
  misc_RNA (1)...(19): siRNA sense strand
gggcuuuccugcagaccua

SEQ ID NO: 684173 - RNA, 19 nt, Homo sapiens
  misc_RNA (1)...(19): siRNA sense strand
gacaacccaccaauguuua

SEQ ID NO: 684174 - RNA, 19 nt, Homo sapiens
  misc_RNA (1)...(19): siRNA sense strand
ugacccagauguaggcauu

SEQ ID NO: 684175 - RNA, 19 nt, Homo sapiens
  misc_RNA (1)...(19): siRNA sense strand
uaacucaggauuuacuuga

SEQ ID NO: 684176 - RNA, 19 nt, Homo sapiens
  misc_RNA (1)...(19): siRNA sense strand
caauauuaccgcuuaguga

SEQ ID NO: 684177 - RNA, 19 nt, Homo sapiens
  misc_RNA (1)...(19): siRNA sense strand
ggaccgcgaacaaauauca

SEQ ID NO: 684178 - RNA, 19 nt, Homo sapiens
  misc_RNA (1)...(19): siRNA sense strand
ggacgcagcuuuucucucu

SEQ ID NO: 684179 - RNA, 19 nt, Homo sapiens
  misc_RNA (1)...(19): siRNA sense strand
ggacagagacgcgcucaag

SEQ ID NO: 684180 - RNA, 19 nt, Homo sapiens
  misc_RNA (1)...(19): siRNA sense strand
gggcaccguuggaagagaa

SEQ ID NO: 684181 - RNA, 19 nt, Homo sapiens
  misc_RNA (1)...(19): siRNA sense strand
gcaaaugacaacccaccaa

SEQ ID NO: 684182 - RNA, 19 nt, Homo sapiens
  misc_RNA (1)...(19): siRNA sense strand
caagcucagucccagaaga

SEQ ID NO: 684183 - RNA, 19 nt, Homo sapiens
  misc_RNA (1)...(19): siRNA sense strand
ugauaguccuggaugcaaa

SEQ ID NO: 684184 - RNA, 19 nt, Homo sapiens
  misc_RNA (1)...(19): siRNA sense strand
gcugagauccuucgacuac

SEQ ID NO: 684185 - RNA, 19 nt, Homo sapiens
  misc_RNA (1)...(19): siRNA sense strand
aggaugccauguucuauga

SEQ ID NO: 684186 - RNA, 19 nt, Homo sapiens
  misc_RNA (1)...(19): siRNA sense strand
cgacuacgagcaauuuaga

SEQ ID NO: 684187 - RNA, 19 nt, Homo sapiens
  misc_RNA (1)...(19): siRNA sense strand
gagcccugcuggacagaga

SEQ ID NO: 684188 - RNA, 19 nt, Homo sapiens
  misc_RNA (1)...(19): siRNA sense strand
acaaucacgucucucacaa

SEQ ID NO: 684189 - RNA, 19 nt, Homo sapiens
  misc_RNA (1)...(19): siRNA sense strand
acucaggauuuacuugaaa

SEQ ID NO: 684190 - RNA, 19 nt, Homo sapiens
  misc_RNA (1)...(19): siRNA sense strand
ggacccagauagcaacaac

SEQ ID NO: 684191 - RNA, 19 nt, Homo sapiens
  misc_RNA (1)...(19): siRNA sense strand
gaaugggcagguugaaguu

SEQ ID NO: 684192 - RNA, 19 nt, Homo sapiens
  misc_RNA (1)...(19): siRNA sense strand
cgacgugcaugaccgagau

SEQ ID NO: 684193 - RNA, 19 nt, Homo sapiens
  misc_RNA (1)...(19): siRNA sense strand
caaaugacaacccaccaau

SEQ ID NO: 684194 - RNA, 19 nt, Homo sapiens
  misc_RNA (1)...(19): siRNA sense strand
caggagagcugugagaaaa

SEQ ID NO: 684195 - RNA, 19 nt, Homo sapiens
  misc_RNA (1)...(19): siRNA sense strand
auucggaccucacucugua

SEQ ID NO: 684196 - RNA, 19 nt, Homo sapiens
  misc_RNA (1)...(19): siRNA sense strand
ugucugaggagcuagauaa

SEQ ID NO: 684197 - RNA, 19 nt, Homo sapiens
  misc_RNA (1)...(19): siRNA sense strand
gagccuccaucuucucagu

SEQ ID NO: 684198 - RNA, 19 nt, Homo sapiens
  misc_RNA (1)...(19): siRNA sense strand
cugaggagcuagauaaagg

SEQ ID NO: 684199 - RNA, 19 nt, Homo sapiens
  misc_RNA (1)...(19): siRNA sense strand
gaggaugccauguucuaug

SEQ ID NO: 684200 - RNA, 19 nt, Homo sapiens
  misc_RNA (1)...(19): siRNA sense strand
uaaaaugccugggaaaauc

SEQ ID NO: 684201 - RNA, 19 nt, Homo sapiens
  misc_RNA (1)...(19): siRNA sense strand
gcauuaacucccugcagaa

SEQ ID NO: 684202 - RNA, 19 nt, Homo sapiens
  misc_RNA (1)...(19): siRNA sense strand
ggaagagccaccugauuuu

SEQ ID NO: 684203 - RNA, 19 nt, Homo sapiens
  misc_RNA (1)...(19): siRNA sense strand
uguccacucuggcaacuug

SEQ ID NO: 684204 - RNA, 19 nt, Homo sapiens
  misc_RNA (1)...(19): siRNA sense strand
gaucaauauuaccgcuuag

SEQ ID NO: 684205 - RNA, 19 nt, Homo sapiens
  misc_RNA (1)...(19): siRNA sense strand
gcggaagagccaccugauu

SEQ ID NO: 684206 - RNA, 19 nt, Homo sapiens
  misc_RNA (1)...(19): siRNA sense strand
ugagauccuucgacuacga

SEQ ID NO: 684207 - RNA, 19 nt, Homo sapiens
  misc_RNA (1)...(19): siRNA sense strand
cuccaacacuggcguccua

SEQ ID NO: 684208 - RNA, 19 nt, Homo sapiens
  misc_RNA (1)...(19): siRNA sense strand
cgcaucgucuccagaggua

SEQ ID NO: 684209 - RNA, 19 nt, Homo sapiens
  misc_RNA (1)...(19): siRNA sense strand
caacacuggcguccuauac

SEQ ID NO: 684210 - RNA, 19 nt, Homo sapiens
  misc_RNA (1)...(19): siRNA sense strand
gcgagccucuucugauaac

SEQ ID NO: 684211 - RNA, 19 nt, Homo sapiens
  misc_RNA (1)...(19): siRNA sense strand
ccaggagagcugugagaaa

SEQ ID NO: 684212 - RNA, 19 nt, Homo sapiens
  misc_RNA (1)...(19): siRNA sense strand
augcucaagugucuuauau

SEQ ID NO: 684213 - RNA, 19 nt, Homo sapiens
  misc_RNA (1)...(19): siRNA sense strand
ggagauuccaaccuacuuc

SEQ ID NO: 684214 - RNA, 19 nt, Homo sapiens
  misc_RNA (1)...(19): siRNA sense strand
gaaaugaaaggagauucca

SEQ ID NO: 684215 - RNA, 19 nt, Homo sapiens
  misc_RNA (1)...(19): siRNA sense strand
ggucaccgcggagaggaua

SEQ ID NO: 684216 - RNA, 19 nt, Homo sapiens
  misc_RNA (1)...(19): siRNA sense strand
acauucugguugaggauaa

SEQ ID NO: 684217 - RNA, 19 nt, Homo sapiens
  misc_RNA (1)...(19): siRNA sense strand
aaucugccauuuaaguuag

SEQ ID NO: 684218 - RNA, 19 nt, Homo sapiens
  misc_RNA (1)...(19): siRNA sense strand
uuaugaggaugccauguuc

SEQ ID NO: 684219 - RNA, 19 nt, Homo sapiens
  misc_RNA (1)...(19): siRNA sense strand
aaugacaacccaccaaugu

SEQ ID NO: 684220 - RNA, 19 nt, Homo sapiens
  misc_RNA (1)...(19): siRNA sense strand
gccuccaucuucucaguga

SEQ ID NO: 684221 - RNA, 19 nt, Homo sapiens
  misc_RNA (1)...(19): siRNA sense strand
ccuggaccgcgaacaaaua

SEQ ID NO: 684222 - RNA, 19 nt, Homo sapiens
  misc_RNA (1)...(19): siRNA sense strand
gagaaauugcucuuaucga

SEQ ID NO: 684223 - RNA, 19 nt, Homo sapiens
  misc_RNA (1)...(19): siRNA sense strand
caagugucuuauauucuag

SEQ ID NO: 684224 - RNA, 19 nt, Homo sapiens
  misc_RNA (1)...(19): siRNA sense strand
gcacauccaagugauaguc

SEQ ID NO: 684225 - RNA, 19 nt, Homo sapiens
  misc_RNA (1)...(19): siRNA sense strand
agagguaggacgcagcuuu

SEQ ID NO: 684226 - RNA, 19 nt, Homo sapiens
  misc_RNA (1)...(19): siRNA sense strand
aaauuacaaucacgucucu

SEQ ID NO: 684227 - RNA, 19 nt, Homo sapiens
  misc_RNA (1)...(19): siRNA sense strand
ggaugugaaugacaaugcu

SEQ ID NO: 684228 - RNA, 19 nt, Homo sapiens
  misc_RNA (1)...(19): siRNA sense strand
gauaaaaugccugggaaaa

SEQ ID NO: 684229 - RNA, 19 nt, Homo sapiens
  misc_RNA (1)...(19): siRNA sense strand
gagaaaagcgagccucuuc

SEQ ID NO: 684230 - RNA, 19 nt, Homo sapiens
  misc_RNA (1)...(19): siRNA sense strand
aacccgauuuccaauuaaa

SEQ ID NO: 684231 - RNA, 19 nt, Homo sapiens
  misc_RNA (1)...(19): siRNA sense strand
cagccugaguaccguguga

SEQ ID NO: 684232 - RNA, 19 nt, Homo sapiens
  misc_RNA (1)...(19): siRNA sense strand
gagauuccaaccuacuuca

SEQ ID NO: 684233 - RNA, 19 nt, Homo sapiens
  misc_RNA (1)...(19): siRNA sense strand
gauaacucaggauuuacuu

SEQ ID NO: 684234 - RNA, 19 nt, Homo sapiens
  misc_RNA (1)...(19): siRNA sense strand
uauacgcgcugagauccuu

SEQ ID NO: 684235 - RNA, 19 nt, Homo sapiens
  misc_RNA (1)...(19): siRNA sense strand
caccuucccucauuuaucc

SEQ ID NO: 684236 - RNA, 19 nt, Homo sapiens
  misc_RNA (1)...(19): siRNA sense strand
gaguaccgugugaguguuu

SEQ ID NO: 684237 - RNA, 19 nt, Homo sapiens
  misc_RNA (1)...(19): siRNA sense strand
aaagcgagccucuucugau

SEQ ID NO: 684238 - RNA, 19 nt, Homo sapiens
  misc_RNA (1)...(19): siRNA sense strand
cacccaccuucccucauuu

SEQ ID NO: 684239 - RNA, 19 nt, Homo sapiens
  misc_RNA (1)...(19): siRNA sense strand
gaggagcuagauaaagguu

SEQ ID NO: 684240 - RNA, 19 nt, Homo sapiens
  misc_RNA (1)...(19): siRNA sense strand
gcuccuaauuucccaacag

SEQ ID NO: 684241 - RNA, 19 nt, Homo sapiens
  misc_RNA (1)...(19): siRNA sense strand
gcuccagaaauuacaauca

SEQ ID NO: 684242 - RNA, 19 nt, Homo sapiens
  misc_RNA (1)...(19): siRNA sense strand
ccaacacuggcguccuaua

SEQ ID NO: 684243 - RNA, 19 nt, Homo sapiens
  misc_RNA (1)...(19): siRNA sense strand
acccagauguaggcauuaa

SEQ ID NO: 684244 - RNA, 19 nt, Homo sapiens
  misc_RNA (1)...(19): siRNA sense strand
ucaaaccacuucuaaauga

SEQ ID NO: 684245 - RNA, 19 nt, Homo sapiens
  misc_RNA (1)...(19): siRNA sense strand
gaucaaaccacuucuaaau

SEQ ID NO: 684246 - RNA, 19 nt, Homo sapiens
  misc_RNA (1)...(19): siRNA sense strand
gcagagaccuggagaucga

SEQ ID NO: 684247 - RNA, 19 nt, Homo sapiens
  misc_RNA (1)...(19): siRNA sense strand
aaacagaccaguuauacua

SEQ ID NO: 684248 - RNA, 19 nt, Homo sapiens
  misc_RNA (1)...(19): siRNA sense strand
aaaggaaacagaccaguua

SEQ ID NO: 684249 - RNA, 19 nt, Homo sapiens
  misc_RNA (1)...(19): siRNA sense strand
gaaugcauauugcccaaga

SEQ ID NO: 684250 - RNA, 19 nt, Homo sapiens
  misc_RNA (1)...(19): siRNA sense strand
gacauuggccucaaccaua

SEQ ID NO: 684251 - RNA, 19 nt, Homo sapiens
  misc_RNA (1)...(19): siRNA sense strand
gagaucaaaccacuucuaa

SEQ ID NO: 684252 - RNA, 19 nt, Homo sapiens
  misc_RNA (1)...(19): siRNA sense strand
gcuaaaggcuggauugacu

SEQ ID NO: 684253 - RNA, 19 nt, Homo sapiens
  misc_RNA (1)...(19): siRNA sense strand
cauaaauccuguuucaaug

SEQ ID NO: 684254 - RNA, 19 nt, Homo sapiens
  misc_RNA (1)...(19): siRNA sense strand
uaacauaucaugacauugg

SEQ ID NO: 684255 - RNA, 19 nt, Homo sapiens
  misc_RNA (1)...(19): siRNA sense strand
gaaaugcugccuccuguuc

SEQ ID NO: 684256 - RNA, 19 nt, Homo sapiens
  misc_RNA (1)...(19): siRNA sense strand
uggaugagcuggcugaaau

SEQ ID NO: 684257 - RNA, 19 nt, Homo sapiens
  misc_RNA (1)...(19): siRNA sense strand
gauccaaaccuacagaaug

SEQ ID NO: 684258 - RNA, 19 nt, Homo sapiens
  misc_RNA (1)...(19): siRNA sense strand
cgccugaacccuauaaaua

SEQ ID NO: 684259 - RNA, 19 nt, Homo sapiens
  misc_RNA (1)...(19): siRNA sense strand
ggaacaugauauagaaaca

SEQ ID NO: 684260 - RNA, 19 nt, Homo sapiens
  misc_RNA (1)...(19): siRNA sense strand
ccauggagguguccugcua

SEQ ID NO: 684261 - RNA, 19 nt, Homo sapiens
  misc_RNA (1)...(19): siRNA sense strand
cugcagcucuucuugaauu

SEQ ID NO: 684262 - RNA, 19 nt, Homo sapiens
  misc_RNA (1)...(19): siRNA sense strand
gcacuuugcugucugucau

SEQ ID NO: 684263 - RNA, 19 nt, Homo sapiens
  misc_RNA (1)...(19): siRNA sense strand
ggaaacagaccaguuauac

SEQ ID NO: 684264 - RNA, 19 nt, Homo sapiens
  misc_RNA (1)...(19): siRNA sense strand
caaacucucuggccugaca

SEQ ID NO: 684265 - RNA, 19 nt, Homo sapiens
  misc_RNA (1)...(19): siRNA sense strand
acauuggccucaaccauaa

SEQ ID NO: 684266 - RNA, 19 nt, Homo sapiens
  misc_RNA (1)...(19): siRNA sense strand
ucaccgaggccuucaagua

SEQ ID NO: 684267 - RNA, 19 nt, Homo sapiens
  misc_RNA (1)...(19): siRNA sense strand
ggagaucgaaagacccaua

SEQ ID NO: 684268 - RNA, 19 nt, Homo sapiens
  misc_RNA (1)...(19): siRNA sense strand
ccauaaauccuguuucaau

SEQ ID NO: 684269 - RNA, 19 nt, Homo sapiens
  misc_RNA (1)...(19): siRNA sense strand
gaacucaagaauccuguga

SEQ ID NO: 684270 - RNA, 19 nt, Homo sapiens
  misc_RNA (1)...(19): siRNA sense strand
ggaaggccuugugcucauu

SEQ ID NO: 684271 - RNA, 19 nt, Homo sapiens
  misc_RNA (1)...(19): siRNA sense strand
gcagggaaugggcuacaua

SEQ ID NO: 684272 - RNA, 19 nt, Homo sapiens
  misc_RNA (1)...(19): siRNA sense strand
gaaggccuugugcucauua

SEQ ID NO: 684273 - RNA, 19 nt, Homo sapiens
  misc_RNA (1)...(19): siRNA sense strand
caaaggaaacagaccaguu

SEQ ID NO: 684274 - RNA, 19 nt, Homo sapiens
  misc_RNA (1)...(19): siRNA sense strand
ggacaauucgccugcaguu

SEQ ID NO: 684275 - RNA, 19 nt, Homo sapiens
  misc_RNA (1)...(19): siRNA sense strand
aaccauaaauccuguuuca

SEQ ID NO: 684276 - RNA, 19 nt, Homo sapiens
  misc_RNA (1)...(19): siRNA sense strand
cccaagacaucaaccaaga

SEQ ID NO: 684277 - RNA, 19 nt, Homo sapiens
  misc_RNA (1)...(19): siRNA sense strand
acaauucgccugcaguuga

SEQ ID NO: 684278 - RNA, 19 nt, Homo sapiens
  misc_RNA (1)...(19): siRNA sense strand
caaaccacuucuaaaugau

SEQ ID NO: 684279 - RNA, 19 nt, Homo sapiens
  misc_RNA (1)...(19): siRNA sense strand
gcauauugcccaagacauc

SEQ ID NO: 684280 - RNA, 19 nt, Homo sapiens
  misc_RNA (1)...(19): siRNA sense strand
gauauagaaacaacucaug

SEQ ID NO: 684281 - RNA, 19 nt, Homo sapiens
  misc_RNA (1)...(19): siRNA sense strand
uaaauccuguuucaaugca

SEQ ID NO: 684282 - RNA, 19 nt, Homo sapiens
  misc_RNA (1)...(19): siRNA sense strand
gagaucacccagcacuuug

SEQ ID NO: 684283 - RNA, 19 nt, Homo sapiens
  misc_RNA (1)...(19): siRNA sense strand
ucagucagauggaacucaa

SEQ ID NO: 684284 - RNA, 19 nt, Homo sapiens
  misc_RNA (1)...(19): siRNA sense strand
gccuugugcucauuaaugu

SEQ ID NO: 684285 - RNA, 19 nt, Homo sapiens
  misc_RNA (1)...(19): siRNA sense strand
ccucggcucuggagaaagu

SEQ ID NO: 684286 - RNA, 19 nt, Homo sapiens
  misc_RNA (1)...(19): siRNA sense strand
ugacugggcagcuuccaaa

SEQ ID NO: 684287 - RNA, 19 nt, Homo sapiens
  misc_RNA (1)...(19): siRNA sense strand
ggaaggugcacccucuuuc

SEQ ID NO: 684288 - RNA, 19 nt, Homo sapiens
  misc_RNA (1)...(19): siRNA sense strand
cagcagauuugcacucaac

SEQ ID NO: 684289 - RNA, 19 nt, Homo sapiens
  misc_RNA (1)...(19): siRNA sense strand
gaaacagaccaguuauacu

SEQ ID NO: 684290 - RNA, 19 nt, Homo sapiens
  misc_RNA (1)...(19): siRNA sense strand
gaucgaaagacccauacug

SEQ ID NO: 684291 - RNA, 19 nt, Homo sapiens
  misc_RNA (1)...(19): siRNA sense strand
ccugaacccuauaaauaca

SEQ ID NO: 684292 - RNA, 19 nt, Homo sapiens
  misc_RNA (1)...(19): siRNA sense strand
gggccaaaaugauaacaaa

SEQ ID NO: 684293 - RNA, 19 nt, Homo sapiens
  misc_RNA (1)...(19): siRNA sense strand
gauguucagcucacagaga

SEQ ID NO: 684294 - RNA, 19 nt, Homo sapiens
  misc_RNA (1)...(19): siRNA sense strand
agagaucacccagcacuuu

SEQ ID NO: 684295 - RNA, 19 nt, Homo sapiens
  misc_RNA (1)...(19): siRNA sense strand
gaaaagcaucauuggaauu

SEQ ID NO: 684296 - RNA, 19 nt, Homo sapiens
  misc_RNA (1)...(19): siRNA sense strand
ucucuggccugacaaccaa

SEQ ID NO: 684297 - RNA, 19 nt, Homo sapiens
  misc_RNA (1)...(19): siRNA sense strand
gggaaugggcuacauacca

SEQ ID NO: 684298 - RNA, 19 nt, Homo sapiens
  misc_RNA (1)...(19): siRNA sense strand
uauuuuggcucaucacuuu

SEQ ID NO: 684299 - RNA, 19 nt, Homo sapiens
  misc_RNA (1)...(19): siRNA sense strand
aagcaucauuggaauugga

SEQ ID NO: 684300 - RNA, 19 nt, Homo sapiens
  misc_RNA (1)...(19): siRNA sense strand
ucagauggaacucaagaau

SEQ ID NO: 684301 - RNA, 19 nt, Homo sapiens
  misc_RNA (1)...(19): siRNA sense strand
cuucuugaauuccuacaau

SEQ ID NO: 684302 - RNA, 19 nt, Homo sapiens
  misc_RNA (1)...(19): siRNA sense strand
caagacaucaaccaagaca

SEQ ID NO: 684303 - RNA, 19 nt, Homo sapiens
  misc_RNA (1)...(19): siRNA sense strand
caaaccuacagaaugcaua

SEQ ID NO: 684304 - RNA, 19 nt, Homo sapiens
  misc_RNA (1)...(19): siRNA sense strand
cuguuucaaugcauucuuu

SEQ ID NO: 684305 - RNA, 19 nt, Homo sapiens
  misc_RNA (1)...(19): siRNA sense strand
caaccugcagcucuucuug

SEQ ID NO: 684306 - RNA, 19 nt, Homo sapiens
  misc_RNA (1)...(19): siRNA sense strand
uaacuuugaggauaugcaa

SEQ ID NO: 684307 - RNA, 19 nt, Homo sapiens
  misc_RNA (1)...(19): siRNA sense strand
agauggaacucaagaaucc

SEQ ID NO: 684308 - RNA, 19 nt, Homo sapiens
  misc_RNA (1)...(19): siRNA sense strand
ggccuugugcucauuaaug

SEQ ID NO: 684309 - RNA, 19 nt, Homo sapiens
  misc_RNA (1)...(19): siRNA sense strand
gaggauaugcaagagauca

SEQ ID NO: 684310 - RNA, 19 nt, Homo sapiens
  misc_RNA (1)...(19): siRNA sense strand
acagagaucaaaccacuuc

SEQ ID NO: 684311 - RNA, 19 nt, Homo sapiens
  misc_RNA (1)...(19): siRNA sense strand
gaccugauccaaaccuaca

SEQ ID NO: 684312 - RNA, 19 nt, Homo sapiens
  misc_RNA (1)...(19): siRNA sense strand
uuacauccucagcagauuu

SEQ ID NO: 684313 - RNA, 19 nt, Homo sapiens
  misc_RNA (1)...(19): siRNA sense strand
aggaaacagaccaguuaua

SEQ ID NO: 684314 - RNA, 19 nt, Homo sapiens
  misc_RNA (1)...(19): siRNA sense strand
cccuauaaauacaacuuug

SEQ ID NO: 684315 - RNA, 19 nt, Homo sapiens
  misc_RNA (1)...(19): siRNA sense strand
caauucgccugcaguugag

SEQ ID NO: 684316 - RNA, 19 nt, Homo sapiens
  misc_RNA (1)...(19): siRNA sense strand
uugaggauaugcaagagau

SEQ ID NO: 684317 - RNA, 19 nt, Homo sapiens
  misc_RNA (1)...(19): siRNA sense strand
gccugaacccuauaaauac

SEQ ID NO: 684318 - RNA, 19 nt, Homo sapiens
  misc_RNA (1)...(19): siRNA sense strand
aaaccuacagaaugcauau

SEQ ID NO: 684319 - RNA, 19 nt, Homo sapiens
  misc_RNA (1)...(19): siRNA sense strand
gcgcuaaaggcuggauuga

SEQ ID NO: 684320 - RNA, 19 nt, Homo sapiens
  misc_RNA (1)...(19): siRNA sense strand
acucaaccauccagagcuu

SEQ ID NO: 684321 - RNA, 19 nt, Homo sapiens
  misc_RNA (1)...(19): siRNA sense strand
cauuggaauuggaguugga

SEQ ID NO: 684322 - RNA, 19 nt, Homo sapiens
  misc_RNA (1)...(19): siRNA sense strand
ugaaaagcaucauuggaau

SEQ ID NO: 684323 - RNA, 19 nt, Homo sapiens
  misc_RNA (1)...(19): siRNA sense strand
gcuuacauccucagcagau

SEQ ID NO: 684324 - RNA, 19 nt, Homo sapiens
  misc_RNA (1)...(19): siRNA sense strand
ccgaggccuucaaguacuu

SEQ ID NO: 684325 - RNA, 19 nt, Homo sapiens
  misc_RNA (1)...(19): siRNA sense strand
gcuguggucgaaugcaauu

SEQ ID NO: 684326 - RNA, 19 nt, Homo sapiens
  misc_RNA (1)...(19): siRNA sense strand
uguugacccuugcgcuaaa

SEQ ID NO: 684327 - RNA, 19 nt, Homo sapiens
  misc_RNA (1)...(19): siRNA sense strand
gaggcuuacccaaaggaaa

SEQ ID NO: 684328 - RNA, 19 nt, Homo sapiens
  misc_RNA (1)...(19): siRNA sense strand
agagaucaaaccacuucua

SEQ ID NO: 684329 - RNA, 19 nt, Homo sapiens
  misc_RNA (1)...(19): siRNA sense strand
ucaaccauaaauccuguuu

SEQ ID NO: 684330 - RNA, 19 nt, Homo sapiens
  misc_RNA (1)...(19): siRNA sense strand
cagauggaacucaagaauc

SEQ ID NO: 684331 - RNA, 19 nt, Homo sapiens
  misc_RNA (1)...(19): siRNA sense strand
aauccuguuucaaugcauu

SEQ ID NO: 684332 - RNA, 19 nt, Homo sapiens
  misc_RNA (1)...(19): siRNA sense strand
uggaaggccuugugcucau

SEQ ID NO: 684333 - RNA, 19 nt, Homo sapiens
  misc_RNA (1)...(19): siRNA sense strand
gguccacgucacuauaaga

SEQ ID NO: 684334 - RNA, 19 nt, Homo sapiens
  misc_RNA (1)...(19): siRNA sense strand
caccgaggccuucaaguac

SEQ ID NO: 684335 - RNA, 19 nt, Homo sapiens
  misc_RNA (1)...(19): siRNA sense strand
gaaggugcacccucuuucc

SEQ ID NO: 684336 - RNA, 19 nt, Homo sapiens
  misc_RNA (1)...(19): siRNA sense strand
caccagcaaucagucagau

SEQ ID NO: 684337 - RNA, 19 nt, Homo sapiens
  misc_RNA (1)...(19): siRNA sense strand
gccggucugucaccagcaa

SEQ ID NO: 684338 - RNA, 19 nt, Homo sapiens
  misc_RNA (1)...(19): siRNA sense strand
gaucacgaacccacucaac

SEQ ID NO: 684339 - RNA, 19 nt, Homo sapiens
  misc_RNA (1)...(19): siRNA sense strand
ggaugagcuggcugaaaug

SEQ ID NO: 684340 - RNA, 19 nt, Homo sapiens
  misc_RNA (1)...(19): siRNA sense strand
ucaaaccacuucuaaauga

SEQ ID NO: 684341 - RNA, 19 nt, Homo sapiens
  misc_RNA (1)...(19): siRNA sense strand
gaucaaaccacuucuaaau

SEQ ID NO: 684342 - RNA, 19 nt, Homo sapiens
  misc_RNA (1)...(19): siRNA sense strand
gcagagaccuggagaucga

SEQ ID NO: 684343 - RNA, 19 nt, Homo sapiens
  misc_RNA (1)...(19): siRNA sense strand
aaacagaccaguuauacua

SEQ ID NO: 684344 - RNA, 19 nt, Homo sapiens
  misc_RNA (1)...(19): siRNA sense strand
aaaggaaacagaccaguua

SEQ ID NO: 684345 - RNA, 19 nt, Homo sapiens
  misc_RNA (1)...(19): siRNA sense strand
gaaugcauauugcccaaga

SEQ ID NO: 684346 - RNA, 19 nt, Homo sapiens
  misc_RNA (1)...(19): siRNA sense strand
gacauuggccucaaccaua

SEQ ID NO: 684347 - RNA, 19 nt, Homo sapiens
  misc_RNA (1)...(19): siRNA sense strand
gagaucaaaccacuucuaa

SEQ ID NO: 684348 - RNA, 19 nt, Homo sapiens
  misc_RNA (1)...(19): siRNA sense strand
gcuaaaggcuggauugacu

SEQ ID NO: 684349 - RNA, 19 nt, Homo sapiens
  misc_RNA (1)...(19): siRNA sense strand
cauaaauccuguuucaaug

SEQ ID NO: 684350 - RNA, 19 nt, Homo sapiens
  misc_RNA (1)...(19): siRNA sense strand
uaacauaucaugacauugg

SEQ ID NO: 684351 - RNA, 19 nt, Homo sapiens
  misc_RNA (1)...(19): siRNA sense strand
gaaaugcugccuccuguuc

SEQ ID NO: 684352 - RNA, 19 nt, Homo sapiens
  misc_RNA (1)...(19): siRNA sense strand
uggaugagcuggcugaaau

SEQ ID NO: 684353 - RNA, 19 nt, Homo sapiens
  misc_RNA (1)...(19): siRNA sense strand
gauccaaaccuacagaaug

SEQ ID NO: 684354 - RNA, 19 nt, Homo sapiens
  misc_RNA (1)...(19): siRNA sense strand
cgccugaacccuauaaaua

SEQ ID NO: 684355 - RNA, 19 nt, Homo sapiens
  misc_RNA (1)...(19): siRNA sense strand
ggaacaugauauagaaaca

SEQ ID NO: 684356 - RNA, 19 nt, Homo sapiens
  misc_RNA (1)...(19): siRNA sense strand
ccauggagguguccugcua

SEQ ID NO: 684357 - RNA, 19 nt, Homo sapiens
  misc_RNA (1)...(19): siRNA sense strand
cugcagcucuucuugaauu

SEQ ID NO: 684358 - RNA, 19 nt, Homo sapiens
  misc_RNA (1)...(19): siRNA sense strand
gcacuuugcugucugucau

SEQ ID NO: 684359 - RNA, 19 nt, Homo sapiens
  misc_RNA (1)...(19): siRNA sense strand
ggaaacagaccaguuauac

SEQ ID NO: 684360 - RNA, 19 nt, Homo sapiens
  misc_RNA (1)...(19): siRNA sense strand
caaacucucuggccugaca

SEQ ID NO: 684361 - RNA, 19 nt, Homo sapiens
  misc_RNA (1)...(19): siRNA sense strand
acauuggccucaaccauaa

SEQ ID NO: 684362 - RNA, 19 nt, Homo sapiens
  misc_RNA (1)...(19): siRNA sense strand
ucaccgaggccuucaagua

SEQ ID NO: 684363 - RNA, 19 nt, Homo sapiens
  misc_RNA (1)...(19): siRNA sense strand
ggagaucgaaagacccaua

SEQ ID NO: 684364 - RNA, 19 nt, Homo sapiens
  misc_RNA (1)...(19): siRNA sense strand
ccauaaauccuguuucaau

SEQ ID NO: 684365 - RNA, 19 nt, Homo sapiens
  misc_RNA (1)...(19): siRNA sense strand
gaacucaagaauccuguga

SEQ ID NO: 684366 - RNA, 19 nt, Homo sapiens
  misc_RNA (1)...(19): siRNA sense strand
ggaaggccuugugcucauu

SEQ ID NO: 684367 - RNA, 19 nt, Homo sapiens
  misc_RNA (1)...(19): siRNA sense strand
gcagggaaugggcuacaua

SEQ ID NO: 684368 - RNA, 19 nt, Homo sapiens
  misc_RNA (1)...(19): siRNA sense strand
gaaggccuugugcucauua

SEQ ID NO: 684369 - RNA, 19 nt, Homo sapiens
  misc_RNA (1)...(19): siRNA sense strand
caaaggaaacagaccaguu

SEQ ID NO: 684370 - RNA, 19 nt, Homo sapiens
  misc_RNA (1)...(19): siRNA sense strand
ggacaauucgccugcaguu

SEQ ID NO: 684371 - RNA, 19 nt, Homo sapiens
  misc_RNA (1)...(19): siRNA sense strand
aaccauaaauccuguuuca

SEQ ID NO: 684372 - RNA, 19 nt, Homo sapiens
  misc_RNA (1)...(19): siRNA sense strand
cccaagacaucaaccaaga

SEQ ID NO: 684373 - RNA, 19 nt, Homo sapiens
  misc_RNA (1)...(19): siRNA sense strand
acaauucgccugcaguuga

SEQ ID NO: 684374 - RNA, 19 nt, Homo sapiens
  misc_RNA (1)...(19): siRNA sense strand
caaaccacuucuaaaugau

SEQ ID NO: 684375 - RNA, 19 nt, Homo sapiens
  misc_RNA (1)...(19): siRNA sense strand
gcauauugcccaagacauc

SEQ ID NO: 684376 - RNA, 19 nt, Homo sapiens
  misc_RNA (1)...(19): siRNA sense strand
gauauagaaacaacucaug

SEQ ID NO: 684377 - RNA, 19 nt, Homo sapiens
  misc_RNA (1)...(19): siRNA sense strand
uaaauccuguuucaaugca

SEQ ID NO: 684378 - RNA, 19 nt, Homo sapiens
  misc_RNA (1)...(19): siRNA sense strand
gagaucacccagcacuuug

SEQ ID NO: 684379 - RNA, 19 nt, Homo sapiens
  misc_RNA (1)...(19): siRNA sense strand
ucagucagauggaacucaa

SEQ ID NO: 684380 - RNA, 19 nt, Homo sapiens
  misc_RNA (1)...(19): siRNA sense strand
gccuugugcucauuaaugu

SEQ ID NO: 684381 - RNA, 19 nt, Homo sapiens
  misc_RNA (1)...(19): siRNA sense strand
ccucggcucuggagaaagu

SEQ ID NO: 684382 - RNA, 19 nt, Homo sapiens
  misc_RNA (1)...(19): siRNA sense strand
ugacugggcagcuuccaaa

SEQ ID NO: 684383 - RNA, 19 nt, Homo sapiens
  misc_RNA (1)...(19): siRNA sense strand
ggaaggugcacccucuuuc

SEQ ID NO: 684384 - RNA, 19 nt, Homo sapiens
  misc_RNA (1)...(19): siRNA sense strand
cagcagauuugcacucaac

SEQ ID NO: 684385 - RNA, 19 nt, Homo sapiens
  misc_RNA (1)...(19): siRNA sense strand
gaaacagaccaguuauacu

SEQ ID NO: 684386 - RNA, 19 nt, Homo sapiens
  misc_RNA (1)...(19): siRNA sense strand
gaucgaaagacccauacug

SEQ ID NO: 684387 - RNA, 19 nt, Homo sapiens
  misc_RNA (1)...(19): siRNA sense strand
ccugaacccuauaaauaca

SEQ ID NO: 684388 - RNA, 19 nt, Homo sapiens
  misc_RNA (1)...(19): siRNA sense strand
gggccaaaaugauaacaaa

SEQ ID NO: 684389 - RNA, 19 nt, Homo sapiens
  misc_RNA (1)...(19): siRNA sense strand
gauguucagcucacagaga

SEQ ID NO: 684390 - RNA, 19 nt, Homo sapiens
  misc_RNA (1)...(19): siRNA sense strand
agagaucacccagcacuuu

SEQ ID NO: 684391 - RNA, 19 nt, Homo sapiens
  misc_RNA (1)...(19): siRNA sense strand
gaaaagcaucauuggaauu

SEQ ID NO: 684392 - RNA, 19 nt, Homo sapiens
  misc_RNA (1)...(19): siRNA sense strand
ucucuggccugacaaccaa

SEQ ID NO: 684393 - RNA, 19 nt, Homo sapiens
  misc_RNA (1)...(19): siRNA sense strand
gggaaugggcuacauacca

SEQ ID NO: 684394 - RNA, 19 nt, Homo sapiens
  misc_RNA (1)...(19): siRNA sense strand
uauuuuggcucaucacuuu

SEQ ID NO: 684395 - RNA, 19 nt, Homo sapiens
  misc_RNA (1)...(19): siRNA sense strand
aagcaucauuggaauugga

SEQ ID NO: 684396 - RNA, 19 nt, Homo sapiens
  misc_RNA (1)...(19): siRNA sense strand
ucagauggaacucaagaau

SEQ ID NO: 684397 - RNA, 19 nt, Homo sapiens
  misc_RNA (1)...(19): siRNA sense strand
cuucuugaauuccuacaau

SEQ ID NO: 684398 - RNA, 19 nt, Homo sapiens
  misc_RNA (1)...(19): siRNA sense strand
caagacaucaaccaagaca

SEQ ID NO: 684399 - RNA, 19 nt, Homo sapiens
  misc_RNA (1)...(19): siRNA sense strand
caaaccuacagaaugcaua

SEQ ID NO: 684400 - RNA, 19 nt, Homo sapiens
  misc_RNA (1)...(19): siRNA sense strand
cuguuucaaugcauucuuu

SEQ ID NO: 684401 - RNA, 19 nt, Homo sapiens
  misc_RNA (1)...(19): siRNA sense strand
caaccugcagcucuucuug

SEQ ID NO: 684402 - RNA, 19 nt, Homo sapiens
  misc_RNA (1)...(19): siRNA sense strand
uaacuuugaggauaugcaa

SEQ ID NO: 684403 - RNA, 19 nt, Homo sapiens
  misc_RNA (1)...(19): siRNA sense strand
agauggaacucaagaaucc

SEQ ID NO: 684404 - RNA, 19 nt, Homo sapiens
  misc_RNA (1)...(19): siRNA sense strand
ggccuugugcucauuaaug

SEQ ID NO: 684405 - RNA, 19 nt, Homo sapiens
  misc_RNA (1)...(19): siRNA sense strand
gaggauaugcaagagauca

SEQ ID NO: 684406 - RNA, 19 nt, Homo sapiens
  misc_RNA (1)...(19): siRNA sense strand
acagagaucaaaccacuuc

SEQ ID NO: 684407 - RNA, 19 nt, Homo sapiens
  misc_RNA (1)...(19): siRNA sense strand
gaccugauccaaaccuaca

SEQ ID NO: 684408 - RNA, 19 nt, Homo sapiens
  misc_RNA (1)...(19): siRNA sense strand
uuacauccucagcagauuu

SEQ ID NO: 684409 - RNA, 19 nt, Homo sapiens
  misc_RNA (1)...(19): siRNA sense strand
aggaaacagaccaguuaua

SEQ ID NO: 684410 - RNA, 19 nt, Homo sapiens
  misc_RNA (1)...(19): siRNA sense strand
cccuauaaauacaacuuug

SEQ ID NO: 684411 - RNA, 19 nt, Homo sapiens
  misc_RNA (1)...(19): siRNA sense strand
caauucgccugcaguugag

SEQ ID NO: 684412 - RNA, 19 nt, Homo sapiens
  misc_RNA (1)...(19): siRNA sense strand
uugaggauaugcaagagau

SEQ ID NO: 684413 - RNA, 19 nt, Homo sapiens
  misc_RNA (1)...(19): siRNA sense strand
gccugaacccuauaaauac

SEQ ID NO: 684414 - RNA, 19 nt, Homo sapiens
  misc_RNA (1)...(19): siRNA sense strand
aaaccuacagaaugcauau

SEQ ID NO: 684415 - RNA, 19 nt, Homo sapiens
  misc_RNA (1)...(19): siRNA sense strand
gcgcuaaaggcuggauuga

SEQ ID NO: 684416 - RNA, 19 nt, Homo sapiens
  misc_RNA (1)...(19): siRNA sense strand
acucaaccauccagagcuu

SEQ ID NO: 684417 - RNA, 19 nt, Homo sapiens
  misc_RNA (1)...(19): siRNA sense strand
cauuggaauuggaguugga

SEQ ID NO: 684418 - RNA, 19 nt, Homo sapiens
  misc_RNA (1)...(19): siRNA sense strand
ugaaaagcaucauuggaau

SEQ ID NO: 684419 - RNA, 19 nt, Homo sapiens
  misc_RNA (1)...(19): siRNA sense strand
gcuuacauccucagcagau

SEQ ID NO: 684420 - RNA, 19 nt, Homo sapiens
  misc_RNA (1)...(19): siRNA sense strand
ccgaggccuucaaguacuu

SEQ ID NO: 684421 - RNA, 19 nt, Homo sapiens
  misc_RNA (1)...(19): siRNA sense strand
gcuguggucgaaugcaauu

SEQ ID NO: 684422 - RNA, 19 nt, Homo sapiens
  misc_RNA (1)...(19): siRNA sense strand
uguugacccuugcgcuaaa

SEQ ID NO: 684423 - RNA, 19 nt, Homo sapiens
  misc_RNA (1)...(19): siRNA sense strand
gaggcuuacccaaaggaaa

SEQ ID NO: 684424 - RNA, 19 nt, Homo sapiens
  misc_RNA (1)...(19): siRNA sense strand
agagaucaaaccacuucua

SEQ ID NO: 684425 - RNA, 19 nt, Homo sapiens
  misc_RNA (1)...(19): siRNA sense strand
ucaaccauaaauccuguuu

SEQ ID NO: 684426 - RNA, 19 nt, Homo sapiens
  misc_RNA (1)...(19): siRNA sense strand
cagauggaacucaagaauc

SEQ ID NO: 684427 - RNA, 19 nt, Homo sapiens
  misc_RNA (1)...(19): siRNA sense strand
aauccuguuucaaugcauu

SEQ ID NO: 684428 - RNA, 19 nt, Homo sapiens
  misc_RNA (1)...(19): siRNA sense strand
uggaaggccuugugcucau

SEQ ID NO: 684429 - RNA, 19 nt, Homo sapiens
  misc_RNA (1)...(19): siRNA sense strand
gguccacgucacuauaaga

SEQ ID NO: 684430 - RNA, 19 nt, Homo sapiens
  misc_RNA (1)...(19): siRNA sense strand
caccgaggccuucaaguac

SEQ ID NO: 684431 - RNA, 19 nt, Homo sapiens
  misc_RNA (1)...(19): siRNA sense strand
gaaggugcacccucuuucc

SEQ ID NO: 684432 - RNA, 19 nt, Homo sapiens
  misc_RNA (1)...(19): siRNA sense strand
caccagcaaucagucagau

SEQ ID NO: 684433 - RNA, 19 nt, Homo sapiens
  misc_RNA (1)...(19): siRNA sense strand
gccggucugucaccagcaa

SEQ ID NO: 684434 - RNA, 19 nt, Homo sapiens
  misc_RNA (1)...(19): siRNA sense strand
gaucacgaacccacucaac

SEQ ID NO: 684435 - RNA, 19 nt, Homo sapiens
  misc_RNA (1)...(19): siRNA sense strand
ggaugagcuggcugaaaug

SEQ ID NO: 684436 - RNA, 19 nt, Homo sapiens
  misc_RNA (1)...(19): siRNA sense strand
ccucaaagguuguguauaa

SEQ ID NO: 684437 - RNA, 19 nt, Homo sapiens
  misc_RNA (1)...(19): siRNA sense strand
caaagguuguguauaagua

SEQ ID NO: 684438 - RNA, 19 nt, Homo sapiens
  misc_RNA (1)...(19): siRNA sense strand
aaacuuugcuguccuacuu

SEQ ID NO: 684439 - RNA, 19 nt, Homo sapiens
  misc_RNA (1)...(19): siRNA sense strand
gggcuacagugaaacuuug

SEQ ID NO: 684440 - RNA, 19 nt, Homo sapiens
  misc_RNA (1)...(19): siRNA sense strand
cuacaucgcccaccguaaa

SEQ ID NO: 684441 - RNA, 19 nt, Homo sapiens
  misc_RNA (1)...(19): siRNA sense strand
gggacaagccggugaccua

SEQ ID NO: 684442 - RNA, 19 nt, Homo sapiens
  misc_RNA (1)...(19): siRNA sense strand
gugaaacuuugcuguccua

SEQ ID NO: 684443 - RNA, 19 nt, Homo sapiens
  misc_RNA (1)...(19): siRNA sense strand
guaaccaguuggagaucug

SEQ ID NO: 684444 - RNA, 19 nt, Homo sapiens
  misc_RNA (1)...(19): siRNA sense strand
uccaaacugugcccucaaa

SEQ ID NO: 684445 - RNA, 19 nt, Homo sapiens
  misc_RNA (1)...(19): siRNA sense strand
acaagccggugaccuacga

SEQ ID NO: 684446 - RNA, 19 nt, Homo sapiens
  misc_RNA (1)...(19): siRNA sense strand
aaacugugcccucaaaggu

SEQ ID NO: 684447 - RNA, 19 nt, Homo sapiens
  misc_RNA (1)...(19): siRNA sense strand
gacuccaccuccaaacugu

SEQ ID NO: 684448 - RNA, 19 nt, Homo sapiens
  misc_RNA (1)...(19): siRNA sense strand
ucaaagguuguguauaagu

SEQ ID NO: 684449 - RNA, 19 nt, Homo sapiens
  misc_RNA (1)...(19): siRNA sense strand
gguaaccaguuggagaucu

SEQ ID NO: 684450 - RNA, 19 nt, Homo sapiens
  misc_RNA (1)...(19): siRNA sense strand
cgacuccaccuccaaacug

SEQ ID NO: 684451 - RNA, 19 nt, Homo sapiens
  misc_RNA (1)...(19): siRNA sense strand
gaacgguggaggauguuuu

SEQ ID NO: 684452 - RNA, 19 nt, Homo sapiens
  misc_RNA (1)...(19): siRNA sense strand
cucgugggcuacagugaaa

SEQ ID NO: 684453 - RNA, 19 nt, Homo sapiens
  misc_RNA (1)...(19): siRNA sense strand
caaacugugcccucaaagg

SEQ ID NO: 684454 - RNA, 19 nt, Homo sapiens
  misc_RNA (1)...(19): siRNA sense strand
ggguacacauugcuauuua

SEQ ID NO: 684455 - RNA, 19 nt, Homo sapiens
  misc_RNA (1)...(19): siRNA sense strand
gaacacaggcuugacuauu

SEQ ID NO: 684456 - RNA, 19 nt, Homo sapiens
  misc_RNA (1)...(19): siRNA sense strand
ucaauuuccugaacacauu

SEQ ID NO: 684457 - RNA, 19 nt, Homo sapiens
  misc_RNA (1)...(19): siRNA sense strand
gcagauguaauaucgagua

SEQ ID NO: 684458 - RNA, 19 nt, Homo sapiens
  misc_RNA (1)...(19): siRNA sense strand
gguacacauugcuauuuaa

SEQ ID NO: 684459 - RNA, 19 nt, Homo sapiens
  misc_RNA (1)...(19): siRNA sense strand
caucaacuggucucaauuu

SEQ ID NO: 684460 - RNA, 19 nt, Homo sapiens
  misc_RNA (1)...(19): siRNA sense strand
aaaugcagguuuaugaaug

SEQ ID NO: 684461 - RNA, 19 nt, Homo sapiens
  misc_RNA (1)...(19): siRNA sense strand
aacacaggcuugacuauug

SEQ ID NO: 684462 - RNA, 19 nt, Homo sapiens
  misc_RNA (1)...(19): siRNA sense strand
ggaaaaugcagguuuauga

SEQ ID NO: 684463 - RNA, 19 nt, Homo sapiens
  misc_RNA (1)...(19): siRNA sense strand
ugacuauuguccagaaguu

SEQ ID NO: 684464 - RNA, 19 nt, Homo sapiens
  misc_RNA (1)...(19): siRNA sense strand
caacuggucucaauuuccu

SEQ ID NO: 684465 - RNA, 19 nt, Homo sapiens
  misc_RNA (1)...(19): siRNA sense strand
uugauucgcagauguaaua

SEQ ID NO: 684466 - RNA, 19 nt, Homo sapiens
  misc_RNA (1)...(19): siRNA sense strand
acacaggcuugacuauugu

SEQ ID NO: 684467 - RNA, 19 nt, Homo sapiens
  misc_RNA (1)...(19): siRNA sense strand
caguuccacuugguaauaa

SEQ ID NO: 684468 - RNA, 19 nt, Homo sapiens
  misc_RNA (1)...(19): siRNA sense strand
ccaguuccacuugguaaua

SEQ ID NO: 684469 - RNA, 19 nt, Homo sapiens
  misc_RNA (1)...(19): siRNA sense strand
gcuugacuauuguccagaa

SEQ ID NO: 684470 - RNA, 19 nt, Homo sapiens
  misc_RNA (1)...(19): siRNA sense strand
gaaaaugcagguuuaugaa

SEQ ID NO: 684471 - RNA, 19 nt, Homo sapiens
  misc_RNA (1)...(19): siRNA sense strand
ggucucaauuuccugaaca

SEQ ID NO: 684472 - RNA, 19 nt, Homo sapiens
  misc_RNA (1)...(19): siRNA sense strand
aaugcagguuuaugaauga

SEQ ID NO: 684473 - RNA, 19 nt, Homo sapiens
  misc_RNA (1)...(19): siRNA sense strand
guaauaacguugggaaaau

SEQ ID NO: 684474 - RNA, 19 nt, Homo sapiens
  misc_RNA (1)...(19): siRNA sense strand
cagauguaauaucgaguau

SEQ ID NO: 684475 - RNA, 19 nt, Homo sapiens
  misc_RNA (1)...(19): siRNA sense strand
uauuuaacuuugccuccua

SEQ ID NO: 684476 - RNA, 19 nt, Homo sapiens
  misc_RNA (1)...(19): siRNA sense strand
gaacacauucacuguaucc

SEQ ID NO: 684477 - RNA, 19 nt, Homo sapiens
  misc_RNA (1)...(19): siRNA sense strand
uaucgaguauucaucaacu

SEQ ID NO: 684478 - RNA, 19 nt, Homo sapiens
  misc_RNA (1)...(19): siRNA sense strand
gacuauuguccagaaguua

SEQ ID NO: 684479 - RNA, 19 nt, Homo sapiens
  misc_RNA (1)...(19): siRNA sense strand
guaggacccggaaaucaca

SEQ ID NO: 684480 - RNA, 19 nt, Homo sapiens
  misc_RNA (1)...(19): siRNA sense strand
gguaauaacguugggaaaa

SEQ ID NO: 684481 - RNA, 19 nt, Homo sapiens
  misc_RNA (1)...(19): siRNA sense strand
guacacauugcuauuuaac

SEQ ID NO: 684482 - RNA, 19 nt, Homo sapiens
  misc_RNA (1)...(19): siRNA sense strand
uucaucaacuggucucaau

SEQ ID NO: 684483 - RNA, 19 nt, Homo sapiens
  misc_RNA (1)...(19): siRNA sense strand
aagaacacaggcuugacua

SEQ ID NO: 684484 - RNA, 19 nt, Homo sapiens
  misc_RNA (1)...(19): siRNA sense strand
gcguaggacccggaaauca

SEQ ID NO: 684485 - RNA, 19 nt, Homo sapiens
  misc_RNA (1)...(19): siRNA sense strand
uaaaaugugcggagaagga

SEQ ID NO: 684486 - RNA, 19 nt, Homo sapiens
  misc_RNA (1)...(19): siRNA sense strand
uuucaaaccccucgagaua

SEQ ID NO: 684487 - RNA, 19 nt, Homo sapiens
  misc_RNA (1)...(19): siRNA sense strand
uaaaaugugcggagaagga

SEQ ID NO: 684488 - RNA, 19 nt, Homo sapiens
  misc_RNA (1)...(19): siRNA sense strand
uuucaaaccccucgagaua

SEQ ID NO: 684489 - RNA, 19 nt, Homo sapiens
  misc_RNA (1)...(19): siRNA sense strand
uaaaaugugcggagaagga

SEQ ID NO: 684490 - RNA, 19 nt, Homo sapiens
  misc_RNA (1)...(19): siRNA sense strand
uuucaaaccccucgagaua

SEQ ID NO: 684491 - RNA, 19 nt, Homo sapiens
  misc_RNA (1)...(19): siRNA sense strand
uaaaaugugcggagaagga

SEQ ID NO: 684492 - RNA, 19 nt, Homo sapiens
  misc_RNA (1)...(19): siRNA sense strand
uuucaaaccccucgagaua

SEQ ID NO: 684493 - RNA, 19 nt, Homo sapiens
  misc_RNA (1)...(19): siRNA sense strand
uaaaaugugcggagaagga

SEQ ID NO: 684494 - RNA, 19 nt, Homo sapiens
  misc_RNA (1)...(19): siRNA sense strand
uuucaaaccccucgagaua

SEQ ID NO: 684495 - RNA, 19 nt, Homo sapiens
  misc_RNA (1)...(19): siRNA sense strand
uaaaaugugcggagaagga

SEQ ID NO: 684496 - RNA, 19 nt, Homo sapiens
  misc_RNA (1)...(19): siRNA sense strand
uuucaaaccccucgagaua

SEQ ID NO: 684497 - RNA, 19 nt, Homo sapiens
  misc_RNA (1)...(19): siRNA sense strand
uaaaaugugcggagaagga

SEQ ID NO: 684498 - RNA, 19 nt, Homo sapiens
  misc_RNA (1)...(19): siRNA sense strand
uuucaaaccccucgagaua

SEQ ID NO: 684499 - RNA, 19 nt, Homo sapiens
  misc_RNA (1)...(19): siRNA sense strand
uaaaaugugcggagaagga

SEQ ID NO: 684500 - RNA, 19 nt, Homo sapiens
  misc_RNA (1)...(19): siRNA sense strand
uuucaaaccccucgagaua

SEQ ID NO: 684501 - RNA, 19 nt, Homo sapiens
  misc_RNA (1)...(19): siRNA sense strand
uaaaaugugcggagaagga

SEQ ID NO: 684502 - RNA, 19 nt, Homo sapiens
  misc_RNA (1)...(19): siRNA sense strand
uuucaaaccccucgagaua

SEQ ID NO: 684503 - RNA, 19 nt, Homo sapiens
  misc_RNA (1)...(19): siRNA sense strand
uaaaaugugcggagaagga

SEQ ID NO: 684504 - RNA, 19 nt, Homo sapiens
  misc_RNA (1)...(19): siRNA sense strand
uuucaaaccccucgagaua

SEQ ID NO: 684505 - RNA, 19 nt, Homo sapiens
  misc_RNA (1)...(19): siRNA sense strand
uaaaaugugcggagaagga

SEQ ID NO: 684506 - RNA, 19 nt, Homo sapiens
  misc_RNA (1)...(19): siRNA sense strand
uuucaaaccccucgagaua

SEQ ID NO: 684507 - RNA, 19 nt, Homo sapiens
  misc_RNA (1)...(19): siRNA sense strand
uaaaaugugcggagaagga

SEQ ID NO: 684508 - RNA, 19 nt, Homo sapiens
  misc_RNA (1)...(19): siRNA sense strand
uuucaaaccccucgagaua

SEQ ID NO: 684509 - RNA, 19 nt, Homo sapiens
  misc_RNA (1)...(19): siRNA sense strand
uaaaaugugcggagaagga

SEQ ID NO: 684510 - RNA, 19 nt, Homo sapiens
  misc_RNA (1)...(19): siRNA sense strand
uuucaaaccccucgagaua

SEQ ID NO: 684511 - RNA, 19 nt, Homo sapiens
  misc_RNA (1)...(19): siRNA sense strand
uaaaaugugcggagaagga

SEQ ID NO: 684512 - RNA, 19 nt, Homo sapiens
  misc_RNA (1)...(19): siRNA sense strand
uuucaaaccccucgagaua

SEQ ID NO: 684513 - RNA, 19 nt, Homo sapiens
  misc_RNA (1)...(19): siRNA sense strand
uaaaaugugcggagaagga

SEQ ID NO: 684514 - RNA, 19 nt, Homo sapiens
  misc_RNA (1)...(19): siRNA sense strand
uuucaaaccccucgagaua

SEQ ID NO: 684515 - RNA, 19 nt, Homo sapiens
  misc_RNA (1)...(19): siRNA sense strand
uaaaaugugcggagaagga

SEQ ID NO: 684516 - RNA, 19 nt, Homo sapiens
  misc_RNA (1)...(19): siRNA sense strand
uuucaaaccccucgagaua

SEQ ID NO: 684517 - RNA, 19 nt, Homo sapiens
  misc_RNA (1)...(19): siRNA sense strand
uaaaaugugcggagaagga

SEQ ID NO: 684518 - RNA, 19 nt, Homo sapiens
  misc_RNA (1)...(19): siRNA sense strand
uuucaaaccccucgagaua

SEQ ID NO: 684519 - RNA, 19 nt, Homo sapiens
  misc_RNA (1)...(19): siRNA sense strand
uaaaaugugcggagaagga

SEQ ID NO: 684520 - RNA, 19 nt, Homo sapiens
  misc_RNA (1)...(19): siRNA sense strand
uuucaaaccccucgagaua

SEQ ID NO: 684521 - RNA, 19 nt, Homo sapiens
  misc_RNA (1)...(19): siRNA sense strand
caacauaacuuguaaggau

SEQ ID NO: 684522 - RNA, 19 nt, Homo sapiens
  misc_RNA (1)...(19): siRNA sense strand
ggaaguaguuacauuauag

SEQ ID NO: 684523 - RNA, 19 nt, Homo sapiens
  misc_RNA (1)...(19): siRNA sense strand
guaaauggcuauuccuaca

SEQ ID NO: 684524 - RNA, 19 nt, Homo sapiens
  misc_RNA (1)...(19): siRNA sense strand
gcccauaucuugccgaaau

SEQ ID NO: 684525 - RNA, 19 nt, Homo sapiens
  misc_RNA (1)...(19): siRNA sense strand
gauggaaguaguuacauua

SEQ ID NO: 684526 - RNA, 19 nt, Homo sapiens
  misc_RNA (1)...(19): siRNA sense strand
gagccuaauugauuucauu

SEQ ID NO: 684527 - RNA, 19 nt, Homo sapiens
  misc_RNA (1)...(19): siRNA sense strand
gcagucgcauugucucuuu

SEQ ID NO: 684528 - RNA, 19 nt, Homo sapiens
  misc_RNA (1)...(19): siRNA sense strand
gaaccagacuuacaagacu

SEQ ID NO: 684529 - RNA, 19 nt, Homo sapiens
  misc_RNA (1)...(19): siRNA sense strand
cagcucauguuuccuguuu

SEQ ID NO: 684530 - RNA, 19 nt, Homo sapiens
  misc_RNA (1)...(19): siRNA sense strand
caaaguggcagucgcauug

SEQ ID NO: 684531 - RNA, 19 nt, Homo sapiens
  misc_RNA (1)...(19): siRNA sense strand
gcacccaacauaacuugua

SEQ ID NO: 684532 - RNA, 19 nt, Homo sapiens
  misc_RNA (1)...(19): siRNA sense strand
cuuacaagacugaguauua

SEQ ID NO: 684533 - RNA, 19 nt, Homo sapiens
  misc_RNA (1)...(19): siRNA sense strand
uaaaugacgcuacgcaaga

SEQ ID NO: 684534 - RNA, 19 nt, Homo sapiens
  misc_RNA (1)...(19): siRNA sense strand
gcagauuguuggaccuuca

SEQ ID NO: 684535 - RNA, 19 nt, Homo sapiens
  misc_RNA (1)...(19): siRNA sense strand
aaauggcuauuccuacaaa

SEQ ID NO: 684536 - RNA, 19 nt, Homo sapiens
  misc_RNA (1)...(19): siRNA sense strand
guugggagcagaucgauuu

SEQ ID NO: 684537 - RNA, 19 nt, Homo sapiens
  misc_RNA (1)...(19): siRNA sense strand
cuacacagcucauguuucc

SEQ ID NO: 684538 - RNA, 19 nt, Homo sapiens
  misc_RNA (1)...(19): siRNA sense strand
cacccaacauaacuuguaa

SEQ ID NO: 684539 - RNA, 19 nt, Homo sapiens
  misc_RNA (1)...(19): siRNA sense strand
ggauuccaguggcaaugaa

SEQ ID NO: 684540 - RNA, 19 nt, Homo sapiens
  misc_RNA (1)...(19): siRNA sense strand
agacuuacaagacugagua

SEQ ID NO: 684541 - RNA, 19 nt, Homo sapiens
  misc_RNA (1)...(19): siRNA sense strand
ccucaaagugggacaauau

SEQ ID NO: 684542 - RNA, 19 nt, Homo sapiens
  misc_RNA (1)...(19): siRNA sense strand
uuacaagacugaguauuac

SEQ ID NO: 684543 - RNA, 19 nt, Homo sapiens
  misc_RNA (1)...(19): siRNA sense strand
gaaauguaaauggcuauuc

SEQ ID NO: 684544 - RNA, 19 nt, Homo sapiens
  misc_RNA (1)...(19): siRNA sense strand
agauggaaguaguuacauu

SEQ ID NO: 684545 - RNA, 19 nt, Homo sapiens
  misc_RNA (1)...(19): siRNA sense strand
aaacuacacagcucauguu

SEQ ID NO: 684546 - RNA, 19 nt, Homo sapiens
  misc_RNA (1)...(19): siRNA sense strand
aaaugacgcuacgcaagaa

SEQ ID NO: 684547 - RNA, 19 nt, Homo sapiens
  misc_RNA (1)...(19): siRNA sense strand
caaacuacacagcucaugu

SEQ ID NO: 684548 - RNA, 19 nt, Homo sapiens
  misc_RNA (1)...(19): siRNA sense strand
ggaaccagacuuacaagac

SEQ ID NO: 684549 - RNA, 19 nt, Homo sapiens
  misc_RNA (1)...(19): siRNA sense strand
uugggagccuaauugauuu

SEQ ID NO: 684550 - RNA, 19 nt, Homo sapiens
  misc_RNA (1)...(19): siRNA sense strand
gcuacgcaagaaccaguua

SEQ ID NO: 684551 - RNA, 19 nt, Homo sapiens
  misc_RNA (1)...(19): siRNA sense strand
uauggaaccagacuuacaa

SEQ ID NO: 684552 - RNA, 19 nt, Homo sapiens
  misc_RNA (1)...(19): siRNA sense strand
uacuauggaaccagacuua

SEQ ID NO: 684553 - RNA, 19 nt, Homo sapiens
  misc_RNA (1)...(19): siRNA sense strand
uaaauggcuauuccuacaa

SEQ ID NO: 684554 - RNA, 19 nt, Homo sapiens
  misc_RNA (1)...(19): siRNA sense strand
auugggagccuaauugauu

SEQ ID NO: 684555 - RNA, 19 nt, Homo sapiens
  misc_RNA (1)...(19): siRNA sense strand
uguuggaccuucagaugga

SEQ ID NO: 684556 - RNA, 19 nt, Homo sapiens
  misc_RNA (1)...(19): siRNA sense strand
ucagauggaaguaguuaca

SEQ ID NO: 684557 - RNA, 19 nt, Homo sapiens
  misc_RNA (1)...(19): siRNA sense strand
aaauguaaauggcuauucc

SEQ ID NO: 684558 - RNA, 19 nt, Homo sapiens
  misc_RNA (1)...(19): siRNA sense strand
guuaaaguuuugcacugua

SEQ ID NO: 684559 - RNA, 19 nt, Homo sapiens
  misc_RNA (1)...(19): siRNA sense strand
gcucauguuuccuguuuuc

SEQ ID NO: 684560 - RNA, 19 nt, Homo sapiens
  misc_RNA (1)...(19): siRNA sense strand
cagcacccaacauaacuug

SEQ ID NO: 684561 - RNA, 19 nt, Homo sapiens
  misc_RNA (1)...(19): siRNA sense strand
uaucuugccgaaauguaaa

SEQ ID NO: 684562 - RNA, 19 nt, Homo sapiens
  misc_RNA (1)...(19): siRNA sense strand
cauaucuugccgaaaugua

SEQ ID NO: 684563 - RNA, 19 nt, Homo sapiens
  misc_RNA (1)...(19): siRNA sense strand
uaccuuggauacccugcuu

SEQ ID NO: 684564 - RNA, 19 nt, Homo sapiens
  misc_RNA (1)...(19): siRNA sense strand
gggagcagaucgauuuuac

SEQ ID NO: 684565 - RNA, 19 nt, Homo sapiens
  misc_RNA (1)...(19): siRNA sense strand
cgaaauguaaauggcuauu

SEQ ID NO: 684566 - RNA, 19 nt, Homo sapiens
  misc_RNA (1)...(19): siRNA sense strand
gaacagaaguacacaauuu

SEQ ID NO: 684567 - RNA, 19 nt, Homo sapiens
  misc_RNA (1)...(19): siRNA sense strand
gaugaucgcuuuaggaaua

SEQ ID NO: 684568 - RNA, 19 nt, Homo sapiens
  misc_RNA (1)...(19): siRNA sense strand
gaagugaccucuuuaaagu

SEQ ID NO: 684569 - RNA, 19 nt, Homo sapiens
  misc_RNA (1)...(19): siRNA sense strand
gcucuuaacuuuacacaaa

SEQ ID NO: 684570 - RNA, 19 nt, Homo sapiens
  misc_RNA (1)...(19): siRNA sense strand
gaaaugcucuuaacuuuac

SEQ ID NO: 684571 - RNA, 19 nt, Homo sapiens
  misc_RNA (1)...(19): siRNA sense strand
ggaaauagauuggcuaaca

SEQ ID NO: 684572 - RNA, 19 nt, Homo sapiens
  misc_RNA (1)...(19): siRNA sense strand
cagagaagauggaaaguaa

SEQ ID NO: 684573 - RNA, 19 nt, Homo sapiens
  misc_RNA (1)...(19): siRNA sense strand
gaacuugguguuacauuua

SEQ ID NO: 684574 - RNA, 19 nt, Homo sapiens
  misc_RNA (1)...(19): siRNA sense strand
gaaaagaauucgacccuua

SEQ ID NO: 684575 - RNA, 19 nt, Homo sapiens
  misc_RNA (1)...(19): siRNA sense strand
gaaacuacacagcagauua

SEQ ID NO: 684576 - RNA, 19 nt, Homo sapiens
  misc_RNA (1)...(19): siRNA sense strand
gaaaugaaaugcucuuaac

SEQ ID NO: 684577 - RNA, 19 nt, Homo sapiens
  misc_RNA (1)...(19): siRNA sense strand
gaaguacaauugucauguu

SEQ ID NO: 684578 - RNA, 19 nt, Homo sapiens
  misc_RNA (1)...(19): siRNA sense strand
gaaauagauuggcuaacaa

SEQ ID NO: 684579 - RNA, 19 nt, Homo sapiens
  misc_RNA (1)...(19): siRNA sense strand
ccagaauacugaaacauuu

SEQ ID NO: 684580 - RNA, 19 nt, Homo sapiens
  misc_RNA (1)...(19): siRNA sense strand
gggaaaguauggauuuaaa

SEQ ID NO: 684581 - RNA, 19 nt, Homo sapiens
  misc_RNA (1)...(19): siRNA sense strand
ugaaagaucuacagguuga

SEQ ID NO: 684582 - RNA, 19 nt, Homo sapiens
  misc_RNA (1)...(19): siRNA sense strand
gaaagaacagguugucauu

SEQ ID NO: 684583 - RNA, 19 nt, Homo sapiens
  misc_RNA (1)...(19): siRNA sense strand
ggucaagcuuuaauucuuu

SEQ ID NO: 684584 - RNA, 19 nt, Homo sapiens
  misc_RNA (1)...(19): siRNA sense strand
ccucaaaucugacaguaaa

SEQ ID NO: 684585 - RNA, 19 nt, Homo sapiens
  misc_RNA (1)...(19): siRNA sense strand
cuaaaggccuguccauauu

SEQ ID NO: 684586 - RNA, 19 nt, Homo sapiens
  misc_RNA (1)...(19): siRNA sense strand
gcuguagccucauuaauug

SEQ ID NO: 684587 - RNA, 19 nt, Homo sapiens
  misc_RNA (1)...(19): siRNA sense strand
gcaagagaaguaccuguua

SEQ ID NO: 684588 - RNA, 19 nt, Homo sapiens
  misc_RNA (1)...(19): siRNA sense strand
gauacaaaguugaauggaa

SEQ ID NO: 684589 - RNA, 19 nt, Homo sapiens
  misc_RNA (1)...(19): siRNA sense strand
gcacaaauaagggaaagua

SEQ ID NO: 684590 - RNA, 19 nt, Homo sapiens
  misc_RNA (1)...(19): siRNA sense strand
gauaguauggucaacaaua

SEQ ID NO: 684591 - RNA, 19 nt, Homo sapiens
  misc_RNA (1)...(19): siRNA sense strand
uaacccaagucgcuauaua

SEQ ID NO: 684592 - RNA, 19 nt, Homo sapiens
  misc_RNA (1)...(19): siRNA sense strand
gacaaugagucuacacuug

SEQ ID NO: 684593 - RNA, 19 nt, Homo sapiens
  misc_RNA (1)...(19): siRNA sense strand
gaaccaauauacaggacaa

SEQ ID NO: 684594 - RNA, 19 nt, Homo sapiens
  misc_RNA (1)...(19): siRNA sense strand
aaagauauguguccaggaa

SEQ ID NO: 684595 - RNA, 19 nt, Homo sapiens
  misc_RNA (1)...(19): siRNA sense strand
gauaaacaguccacuucaa

SEQ ID NO: 684596 - RNA, 19 nt, Homo sapiens
  misc_RNA (1)...(19): siRNA sense strand
gaacuacaguguccuaaaa

SEQ ID NO: 684597 - RNA, 19 nt, Homo sapiens
  misc_RNA (1)...(19): siRNA sense strand
ggaaaugaaaugcucuuaa

SEQ ID NO: 684598 - RNA, 19 nt, Homo sapiens
  misc_RNA (1)...(19): siRNA sense strand
caaggaacuucacgucauu

SEQ ID NO: 684599 - RNA, 19 nt, Homo sapiens
  misc_RNA (1)...(19): siRNA sense strand
caagagaaguaccuguuau

SEQ ID NO: 684600 - RNA, 19 nt, Homo sapiens
  misc_RNA (1)...(19): siRNA sense strand
gcaaaguuaucugcuaaga

SEQ ID NO: 684601 - RNA, 19 nt, Homo sapiens
  misc_RNA (1)...(19): siRNA sense strand
uaucuggacuuucuaaaug

SEQ ID NO: 684602 - RNA, 19 nt, Homo sapiens
  misc_RNA (1)...(19): siRNA sense strand
uaaaccaucuccuuccaaa

SEQ ID NO: 684603 - RNA, 19 nt, Homo sapiens
  misc_RNA (1)...(19): siRNA sense strand
ugaauugucucuaguaagu

SEQ ID NO: 684604 - RNA, 19 nt, Homo sapiens
  misc_RNA (1)...(19): siRNA sense strand
ggacugugcucgggaauca

SEQ ID NO: 684605 - RNA, 19 nt, Homo sapiens
  misc_RNA (1)...(19): siRNA sense strand
gcugaggauugcauagaua

SEQ ID NO: 684606 - RNA, 19 nt, Homo sapiens
  misc_RNA (1)...(19): siRNA sense strand
gaagaugaagcaaagauau

SEQ ID NO: 684607 - RNA, 19 nt, Homo sapiens
  misc_RNA (1)...(19): siRNA sense strand
uuugacaucugguacauua

SEQ ID NO: 684608 - RNA, 19 nt, Homo sapiens
  misc_RNA (1)...(19): siRNA sense strand
cgaauaccauuaagaagga

SEQ ID NO: 684609 - RNA, 19 nt, Homo sapiens
  misc_RNA (1)...(19): siRNA sense strand
ggaagaugaagcaaagaua

SEQ ID NO: 684610 - RNA, 19 nt, Homo sapiens
  misc_RNA (1)...(19): siRNA sense strand
gaagacagucauuguagaa

SEQ ID NO: 684611 - RNA, 19 nt, Homo sapiens
  misc_RNA (1)...(19): siRNA sense strand
gugcaaagccugggauaua

SEQ ID NO: 684612 - RNA, 19 nt, Homo sapiens
  misc_RNA (1)...(19): siRNA sense strand
gaacuucacgucauuucaa

SEQ ID NO: 684613 - RNA, 19 nt, Homo sapiens
  misc_RNA (1)...(19): siRNA sense strand
aaacaguccacuucaaaua

SEQ ID NO: 684614 - RNA, 19 nt, Homo sapiens
  misc_RNA (1)...(19): siRNA sense strand
gaucaugcccucaaucaga

SEQ ID NO: 684615 - RNA, 19 nt, Homo sapiens
  misc_RNA (1)...(19): siRNA sense strand
agaaguaccuguuauuagu

SEQ ID NO: 684616 - RNA, 19 nt, Homo sapiens
  misc_RNA (1)...(19): siRNA sense strand
gaugagggcguaagugaaa

SEQ ID NO: 684617 - RNA, 19 nt, Homo sapiens
  misc_RNA (1)...(19): siRNA sense strand
gaaacaggcauccauauac

SEQ ID NO: 684618 - RNA, 19 nt, Homo sapiens
  misc_RNA (1)...(19): siRNA sense strand
gcccuucacugauaaaugu

SEQ ID NO: 684619 - RNA, 19 nt, Homo sapiens
  misc_RNA (1)...(19): siRNA sense strand
gcagauuugcagaugauua

SEQ ID NO: 684620 - RNA, 19 nt, Homo sapiens
  misc_RNA (1)...(19): siRNA sense strand
guaaagaggaggcaagaga

SEQ ID NO: 684621 - RNA, 19 nt, Homo sapiens
  misc_RNA (1)...(19): siRNA sense strand
gaagauaaacaguccacuu

SEQ ID NO: 684622 - RNA, 19 nt, Homo sapiens
  misc_RNA (1)...(19): siRNA sense strand
cuacacagcagauuagaaa

SEQ ID NO: 684623 - RNA, 19 nt, Homo sapiens
  misc_RNA (1)...(19): siRNA sense strand
uaagaaacaggcauccaua

SEQ ID NO: 684624 - RNA, 19 nt, Homo sapiens
  misc_RNA (1)...(19): siRNA sense strand
ggacagaaccaauauacag

SEQ ID NO: 684625 - RNA, 19 nt, Homo sapiens
  misc_RNA (1)...(19): siRNA sense strand
uuacacagcccgagaacua

SEQ ID NO: 684626 - RNA, 19 nt, Homo sapiens
  misc_RNA (1)...(19): siRNA sense strand
uaaaggccuguccauauua

SEQ ID NO: 684627 - RNA, 19 nt, Homo sapiens
  misc_RNA (1)...(19): siRNA sense strand
ucaauguggucugaauaua

SEQ ID NO: 684628 - RNA, 19 nt, Homo sapiens
  misc_RNA (1)...(19): siRNA sense strand
aaacaggcauccauauaca

SEQ ID NO: 684629 - RNA, 19 nt, Homo sapiens
  misc_RNA (1)...(19): siRNA sense strand
ggaagcagcaagucaucua

SEQ ID NO: 684630 - RNA, 19 nt, Homo sapiens
  misc_RNA (1)...(19): siRNA sense strand
ugugaaagaucuacagguu

SEQ ID NO: 684631 - RNA, 19 nt, Homo sapiens
  misc_RNA (1)...(19): siRNA sense strand
gaucagcacacauuacaga

SEQ ID NO: 684632 - RNA, 19 nt, Homo sapiens
  misc_RNA (1)...(19): siRNA sense strand
agucaagagucaucgaaua

SEQ ID NO: 684633 - RNA, 19 nt, Homo sapiens
  misc_RNA (1)...(19): siRNA sense strand
cugaauaucuuguagaaag

SEQ ID NO: 684634 - RNA, 19 nt, Homo sapiens
  misc_RNA (1)...(19): siRNA sense strand
gagcucgggucaucagaga

SEQ ID NO: 684635 - RNA, 19 nt, Homo sapiens
  misc_RNA (1)...(19): siRNA sense strand
ccaagucgcuauauaucug

SEQ ID NO: 684636 - RNA, 19 nt, Homo sapiens
  misc_RNA (1)...(19): siRNA sense strand
cgucacagcuugcuaugau

SEQ ID NO: 684637 - RNA, 19 nt, Homo sapiens
  misc_RNA (1)...(19): siRNA sense strand
ucuucuagaugcacaaaua

SEQ ID NO: 684638 - RNA, 19 nt, Homo sapiens
  misc_RNA (1)...(19): siRNA sense strand
gaagauacagaugaagaaa

SEQ ID NO: 684639 - RNA, 19 nt, Homo sapiens
  misc_RNA (1)...(19): siRNA sense strand
aaacagaagcagaagauga

SEQ ID NO: 684640 - RNA, 19 nt, Homo sapiens
  misc_RNA (1)...(19): siRNA sense strand
caacaaacaaacaaagaga

SEQ ID NO: 684641 - RNA, 19 nt, Homo sapiens
  misc_RNA (1)...(19): siRNA sense strand
ugugcuaccuuccagaaua

SEQ ID NO: 684642 - RNA, 19 nt, Homo sapiens
  misc_RNA (1)...(19): siRNA sense strand
uaagggaaaguauggauuu

SEQ ID NO: 684643 - RNA, 19 nt, Homo sapiens
  misc_RNA (1)...(19): siRNA sense strand
ccaaggaacuucacgucau

SEQ ID NO: 684644 - RNA, 19 nt, Homo sapiens
  misc_RNA (1)...(19): siRNA sense strand
caacuuggauaaaugaacu

SEQ ID NO: 684645 - RNA, 19 nt, Homo sapiens
  misc_RNA (1)...(19): siRNA sense strand
uugcauagauacaaaguug

SEQ ID NO: 684646 - RNA, 19 nt, Homo sapiens
  misc_RNA (1)...(19): siRNA sense strand
gaaagcugaggauugcaua

SEQ ID NO: 684647 - RNA, 19 nt, Homo sapiens
  misc_RNA (1)...(19): siRNA sense strand
caaugagucuacacuugaa

SEQ ID NO: 684648 - RNA, 19 nt, Homo sapiens
  misc_RNA (1)...(19): siRNA sense strand
ggaggcuaaucauaucauu

SEQ ID NO: 684649 - RNA, 19 nt, Homo sapiens
  misc_RNA (1)...(19): siRNA sense strand
gaaaugagaagugcaugga

SEQ ID NO: 684650 - RNA, 19 nt, Homo sapiens
  misc_RNA (1)...(19): siRNA sense strand
gcagggaucauacuugugu

SEQ ID NO: 684651 - RNA, 19 nt, Homo sapiens
  misc_RNA (1)...(19): siRNA sense strand
cagcagggaucauacuugu

SEQ ID NO: 684652 - RNA, 19 nt, Homo sapiens
  misc_RNA (1)...(19): siRNA sense strand
gaaggaucauacagggaaa

SEQ ID NO: 684653 - RNA, 19 nt, Homo sapiens
  misc_RNA (1)...(19): siRNA sense strand
caucgaauaccauuaagaa

SEQ ID NO: 684654 - RNA, 19 nt, Homo sapiens
  misc_RNA (1)...(19): siRNA sense strand
agaaacaggcauccauaua

SEQ ID NO: 684655 - RNA, 19 nt, Homo sapiens
  misc_RNA (1)...(19): siRNA sense strand
aaaccacucuggcugcaaa

SEQ ID NO: 684656 - RNA, 19 nt, Homo sapiens
  misc_RNA (1)...(19): siRNA sense strand
cacucuggcugcaaaguua

SEQ ID NO: 684657 - RNA, 19 nt, Homo sapiens
  misc_RNA (1)...(19): siRNA sense strand
cuauauaucuggacuuucu

SEQ ID NO: 684658 - RNA, 19 nt, Homo sapiens
  misc_RNA (1)...(19): siRNA sense strand
caaauacaaaggagagaaa

SEQ ID NO: 684659 - RNA, 19 nt, Homo sapiens
  misc_RNA (1)...(19): siRNA sense strand
cauuugaguuccaagauga

SEQ ID NO: 684660 - RNA, 19 nt, Homo sapiens
  misc_RNA (1)...(19): siRNA sense strand
agaacuugguguuacauuu

SEQ ID NO: 684661 - RNA, 19 nt, Homo sapiens
  misc_RNA (1)...(19): siRNA sense strand
gcugcaaaguuaucugcua

SEQ ID NO: 684662 - RNA, 19 nt, Homo sapiens
  misc_RNA (1)...(19): siRNA sense strand
gagaaguaccuguuauuag

SEQ ID NO: 684663 - RNA, 19 nt, Homo sapiens
  misc_RNA (1)...(19): siRNA sense strand
gcauagauacaaaguugaa

SEQ ID NO: 684664 - RNA, 19 nt, Homo sapiens
  misc_RNA (1)...(19): siRNA sense strand
guacuaugacgcaaucaaa

SEQ ID NO: 684665 - RNA, 19 nt, Homo sapiens
  misc_RNA (1)...(19): siRNA sense strand
aaagaacguuggcucucua

SEQ ID NO: 684666 - RNA, 19 nt, Homo sapiens
  misc_RNA (1)...(19): siRNA sense strand
gagaugagcuccaauaaca

SEQ ID NO: 684667 - RNA, 19 nt, Homo sapiens
  misc_RNA (1)...(19): siRNA sense strand
gcaucuauccugaguuuaa

SEQ ID NO: 684668 - RNA, 19 nt, Homo sapiens
  misc_RNA (1)...(19): siRNA sense strand
gagcuccaauaacaacuuu

SEQ ID NO: 684669 - RNA, 19 nt, Homo sapiens
  misc_RNA (1)...(19): siRNA sense strand
gagcccaccuggcaucuau

SEQ ID NO: 684670 - RNA, 19 nt, Homo sapiens
  misc_RNA (1)...(19): siRNA sense strand
guacauaaguggcuaucag

SEQ ID NO: 684671 - RNA, 19 nt, Homo sapiens
  misc_RNA (1)...(19): siRNA sense strand
gcaugcggcugcuccuauu

SEQ ID NO: 684672 - RNA, 19 nt, Homo sapiens
  misc_RNA (1)...(19): siRNA sense strand
uggcaucuauccugaguuu

SEQ ID NO: 684673 - RNA, 19 nt, Homo sapiens
  misc_RNA (1)...(19): siRNA sense strand
aaaggaagccagcaccaua

SEQ ID NO: 684674 - RNA, 19 nt, Homo sapiens
  misc_RNA (1)...(19): siRNA sense strand
gcaacaagcgccaacacuu

SEQ ID NO: 684675 - RNA, 19 nt, Homo sapiens
  misc_RNA (1)...(19): siRNA sense strand
caauugcuaugguuacuuc

SEQ ID NO: 684676 - RNA, 19 nt, Homo sapiens
  misc_RNA (1)...(19): siRNA sense strand
gcugagaugagcuccaaua

SEQ ID NO: 684677 - RNA, 19 nt, Homo sapiens
  misc_RNA (1)...(19): siRNA sense strand
caccauagcagaguacaua

SEQ ID NO: 684678 - RNA, 19 nt, Homo sapiens
  misc_RNA (1)...(19): siRNA sense strand
caacaagcgccaacacuuc

SEQ ID NO: 684679 - RNA, 19 nt, Homo sapiens
  misc_RNA (1)...(19): siRNA sense strand
auaaguggcuaucagagaa

SEQ ID NO: 684680 - RNA, 19 nt, Homo sapiens
  misc_RNA (1)...(19): siRNA sense strand
gaagccagccgauauggau

SEQ ID NO: 684681 - RNA, 19 nt, Homo sapiens
  misc_RNA (1)...(19): siRNA sense strand
cagagaagccagccgauau

SEQ ID NO: 684682 - RNA, 19 nt, Homo sapiens
  misc_RNA (1)...(19): siRNA sense strand
ccacaaguccaauugcuau

SEQ ID NO: 684683 - RNA, 19 nt, Homo sapiens
  misc_RNA (1)...(19): siRNA sense strand
caucuauccugaguuuaaa

SEQ ID NO: 684684 - RNA, 19 nt, Homo sapiens
  misc_RNA (1)...(19): siRNA sense strand
cugaggaacuggucugaug

SEQ ID NO: 684685 - RNA, 19 nt, Homo sapiens
  misc_RNA (1)...(19): siRNA sense strand
gugcugagaugagcuccaa

SEQ ID NO: 684686 - RNA, 19 nt, Homo sapiens
  misc_RNA (1)...(19): siRNA sense strand
ccagcaccauagcagagua

SEQ ID NO: 684687 - RNA, 19 nt, Homo sapiens
  misc_RNA (1)...(19): siRNA sense strand
cauaaguggcuaucagaga

SEQ ID NO: 684688 - RNA, 19 nt, Homo sapiens
  misc_RNA (1)...(19): siRNA sense strand
gagcucgagugucagucuu

SEQ ID NO: 684689 - RNA, 19 nt, Homo sapiens
  misc_RNA (1)...(19): siRNA sense strand
ucagagaagccagccgaua

SEQ ID NO: 684690 - RNA, 19 nt, Homo sapiens
  misc_RNA (1)...(19): siRNA sense strand
gccaacacuuccugugcaa

SEQ ID NO: 684691 - RNA, 19 nt, Homo sapiens
  misc_RNA (1)...(19): siRNA sense strand
caaguccaauugcuauggu

SEQ ID NO: 684692 - RNA, 19 nt, Homo sapiens
  misc_RNA (1)...(19): siRNA sense strand
cauagcagaguacauaagu

SEQ ID NO: 684693 - RNA, 19 nt, Homo sapiens
  misc_RNA (1)...(19): siRNA sense strand
gaugagcuccaauaacaac

SEQ ID NO: 684694 - RNA, 19 nt, Homo sapiens
  misc_RNA (1)...(19): siRNA sense strand
augccgagcucgaguguca

SEQ ID NO: 684695 - RNA, 19 nt, Homo sapiens
  misc_RNA (1)...(19): siRNA sense strand
caguggcaguggauugaug

SEQ ID NO: 684696 - RNA, 19 nt, Homo sapiens
  misc_RNA (1)...(19): siRNA sense strand
gugcaaguaccgaccauag

SEQ ID NO: 684697 - RNA, 19 nt, Homo sapiens
  misc_RNA (1)...(19): siRNA sense strand
cagcaacgaaugcaacaag

SEQ ID NO: 684698 - RNA, 19 nt, Homo sapiens
  misc_RNA (1)...(19): siRNA sense strand
cagcaguggcaguggauug

SEQ ID NO: 684699 - RNA, 19 nt, Homo sapiens
  misc_RNA (1)...(19): siRNA sense strand
agagaagccagccgauaug

SEQ ID NO: 684700 - RNA, 19 nt, Homo sapiens
  misc_RNA (1)...(19): siRNA sense strand
gcuaugguuacuucaggaa

SEQ ID NO: 684701 - RNA, 19 nt, Homo sapiens
  misc_RNA (1)...(19): siRNA sense strand
cugagaugagcuccaauaa

SEQ ID NO: 684702 - RNA, 19 nt, Homo sapiens
  misc_RNA (1)...(19): siRNA sense strand
gagaagaacuacaaagaaa

SEQ ID NO: 684703 - RNA, 19 nt, Homo sapiens
  misc_RNA (1)...(19): siRNA sense strand
gaagauaauucuccuuugu

SEQ ID NO: 684704 - RNA, 19 nt, Homo sapiens
  misc_RNA (1)...(19): siRNA sense strand
gaagucauauucuuacaga

SEQ ID NO: 684705 - RNA, 19 nt, Homo sapiens
  misc_RNA (1)...(19): siRNA sense strand
gaucgacguuccggaauua

SEQ ID NO: 684706 - RNA, 19 nt, Homo sapiens
  misc_RNA (1)...(19): siRNA sense strand
acagauaccucauaaauag

SEQ ID NO: 684707 - RNA, 19 nt, Homo sapiens
  misc_RNA (1)...(19): siRNA sense strand
gcuaugacuuugugaauga

SEQ ID NO: 684708 - RNA, 19 nt, Homo sapiens
  misc_RNA (1)...(19): siRNA sense strand
ccacaugccaaauuucuua

SEQ ID NO: 684709 - RNA, 19 nt, Homo sapiens
  misc_RNA (1)...(19): siRNA sense strand
aaugauacccugucucuua

SEQ ID NO: 684710 - RNA, 19 nt, Homo sapiens
  misc_RNA (1)...(19): siRNA sense strand
gaaauuacuuaugcaguuc

SEQ ID NO: 684711 - RNA, 19 nt, Homo sapiens
  misc_RNA (1)...(19): siRNA sense strand
ggagaagaacuacaaagaa

SEQ ID NO: 684712 - RNA, 19 nt, Homo sapiens
  misc_RNA (1)...(19): siRNA sense strand
cuacagauccuaaaguaaa

SEQ ID NO: 684713 - RNA, 19 nt, Homo sapiens
  misc_RNA (1)...(19): siRNA sense strand
cagcaagacuuuguugauu

SEQ ID NO: 684714 - RNA, 19 nt, Homo sapiens
  misc_RNA (1)...(19): siRNA sense strand
gggaaccaaucgauaauca

SEQ ID NO: 684715 - RNA, 19 nt, Homo sapiens
  misc_RNA (1)...(19): siRNA sense strand
gcaaauacuacguguccua

SEQ ID NO: 684716 - RNA, 19 nt, Homo sapiens
  misc_RNA (1)...(19): siRNA sense strand
ugaguaccuucaaaguuua

SEQ ID NO: 684717 - RNA, 19 nt, Homo sapiens
  misc_RNA (1)...(19): siRNA sense strand
gaagaucaaagguacaaug

SEQ ID NO: 684718 - RNA, 19 nt, Homo sapiens
  misc_RNA (1)...(19): siRNA sense strand
ggucaaauauacugcagau

SEQ ID NO: 684719 - RNA, 19 nt, Homo sapiens
  misc_RNA (1)...(19): siRNA sense strand
gacaucucauggacacuua

SEQ ID NO: 684720 - RNA, 19 nt, Homo sapiens
  misc_RNA (1)...(19): siRNA sense strand
gcaagacuuuguugauucu

SEQ ID NO: 684721 - RNA, 19 nt, Homo sapiens
  misc_RNA (1)...(19): siRNA sense strand
ggagggagaagaacuacaa

SEQ ID NO: 684722 - RNA, 19 nt, Homo sapiens
  misc_RNA (1)...(19): siRNA sense strand
gaagaucuccaggaccuuu

SEQ ID NO: 684723 - RNA, 19 nt, Homo sapiens
  misc_RNA (1)...(19): siRNA sense strand
uaucaucccugcaucuaug

SEQ ID NO: 684724 - RNA, 19 nt, Homo sapiens
  misc_RNA (1)...(19): siRNA sense strand
ugauguagcugccaaaguc

SEQ ID NO: 684725 - RNA, 19 nt, Homo sapiens
  misc_RNA (1)...(19): siRNA sense strand
gggagaagaacuacaaaga

SEQ ID NO: 684726 - RNA, 19 nt, Homo sapiens
  misc_RNA (1)...(19): siRNA sense strand
aauacuacguguccuauga

SEQ ID NO: 684727 - RNA, 19 nt, Homo sapiens
  misc_RNA (1)...(19): siRNA sense strand
caaagucuaugaggcauca

SEQ ID NO: 684728 - RNA, 19 nt, Homo sapiens
  misc_RNA (1)...(19): siRNA sense strand
caugccaaauuucuuauga

SEQ ID NO: 684729 - RNA, 19 nt, Homo sapiens
  misc_RNA (1)...(19): siRNA sense strand
gaaccaaucgauaaucaca

SEQ ID NO: 684730 - RNA, 19 nt, Homo sapiens
  misc_RNA (1)...(19): siRNA sense strand
ucacagacacuaaauucaa

SEQ ID NO: 684731 - RNA, 19 nt, Homo sapiens
  misc_RNA (1)...(19): siRNA sense strand
gcucaagacguccuccuuu

SEQ ID NO: 684732 - RNA, 19 nt, Homo sapiens
  misc_RNA (1)...(19): siRNA sense strand
agccggagcugccuaugua

SEQ ID NO: 684733 - RNA, 19 nt, Homo sapiens
  misc_RNA (1)...(19): siRNA sense strand
gaagaaugcuacagauccu

SEQ ID NO: 684734 - RNA, 19 nt, Homo sapiens
  misc_RNA (1)...(19): siRNA sense strand
cuacguguccuaugaaaug

SEQ ID NO: 684735 - RNA, 19 nt, Homo sapiens
  misc_RNA (1)...(19): siRNA sense strand
ugaagauaauucuccuuug

SEQ ID NO: 684736 - RNA, 19 nt, Homo sapiens
  misc_RNA (1)...(19): siRNA sense strand
gggccucugugccaauaaa

SEQ ID NO: 684737 - RNA, 19 nt, Homo sapiens
  misc_RNA (1)...(19): siRNA sense strand
gacacuaaauucaagucuu

SEQ ID NO: 684738 - RNA, 19 nt, Homo sapiens
  misc_RNA (1)...(19): siRNA sense strand
caucacagacacuaaauuc

SEQ ID NO: 684739 - RNA, 19 nt, Homo sapiens
  misc_RNA (1)...(19): siRNA sense strand
ucuacaaucuuacucugaa

SEQ ID NO: 684740 - RNA, 19 nt, Homo sapiens
  misc_RNA (1)...(19): siRNA sense strand
gcaguucaguugggcaaau

SEQ ID NO: 684741 - RNA, 19 nt, Homo sapiens
  misc_RNA (1)...(19): siRNA sense strand
guucaagacuuuuggauug

SEQ ID NO: 684742 - RNA, 19 nt, Homo sapiens
  misc_RNA (1)...(19): siRNA sense strand
cauagacgauguguucaug

SEQ ID NO: 684743 - RNA, 19 nt, Homo sapiens
  misc_RNA (1)...(19): siRNA sense strand
uguaaucuccggugaugua

SEQ ID NO: 684744 - RNA, 19 nt, Homo sapiens
  misc_RNA (1)...(19): siRNA sense strand
ucuuacagauaccucauaa

SEQ ID NO: 684745 - RNA, 19 nt, Homo sapiens
  misc_RNA (1)...(19): siRNA sense strand
ugcuacagauccuaaagua

SEQ ID NO: 684746 - RNA, 19 nt, Homo sapiens
  misc_RNA (1)...(19): siRNA sense strand
aaauagcuaugacuuugug

SEQ ID NO: 684747 - RNA, 19 nt, Homo sapiens
  misc_RNA (1)...(19): siRNA sense strand
gcugaaugccaacaucaaa

SEQ ID NO: 684748 - RNA, 19 nt, Homo sapiens
  misc_RNA (1)...(19): siRNA sense strand
guggacacauacccuugua

SEQ ID NO: 684749 - RNA, 19 nt, Homo sapiens
  misc_RNA (1)...(19): siRNA sense strand
uauguaaucuccggugaug

SEQ ID NO: 684750 - RNA, 19 nt, Homo sapiens
  misc_RNA (1)...(19): siRNA sense strand
ucaguuauuugcuacuugu

SEQ ID NO: 684751 - RNA, 19 nt, Homo sapiens
  misc_RNA (1)...(19): siRNA sense strand
ggcaguuaauuauucaguu

SEQ ID NO: 684752 - RNA, 19 nt, Homo sapiens
  misc_RNA (1)...(19): siRNA sense strand
gacugcugaugaugacaua

SEQ ID NO: 684753 - RNA, 19 nt, Homo sapiens
  misc_RNA (1)...(19): siRNA sense strand
caguucaguugggcaaaua

SEQ ID NO: 684754 - RNA, 19 nt, Homo sapiens
  misc_RNA (1)...(19): siRNA sense strand
ggaaaagugucaagcucaa

SEQ ID NO: 684755 - RNA, 19 nt, Homo sapiens
  misc_RNA (1)...(19): siRNA sense strand
gcugaugaugacauauuua

SEQ ID NO: 684756 - RNA, 19 nt, Homo sapiens
  misc_RNA (1)...(19): siRNA sense strand
augauacccugucucuuaa

SEQ ID NO: 684757 - RNA, 19 nt, Homo sapiens
  misc_RNA (1)...(19): siRNA sense strand
cuacaaucuuacucugaaa

SEQ ID NO: 684758 - RNA, 19 nt, Homo sapiens
  misc_RNA (1)...(19): siRNA sense strand
ugaucgacguuccggaauu

SEQ ID NO: 684759 - RNA, 19 nt, Homo sapiens
  misc_RNA (1)...(19): siRNA sense strand
acaaauugguguucaagac

SEQ ID NO: 684760 - RNA, 19 nt, Homo sapiens
  misc_RNA (1)...(19): siRNA sense strand
accaaucgauaaucacauu

SEQ ID NO: 684761 - RNA, 19 nt, Homo sapiens
  misc_RNA (1)...(19): siRNA sense strand
guagggcugcguuuaucua

SEQ ID NO: 684762 - RNA, 19 nt, Homo sapiens
  misc_RNA (1)...(19): siRNA sense strand
cgacguuccggaauuagaa

SEQ ID NO: 684763 - RNA, 19 nt, Homo sapiens
  misc_RNA (1)...(19): siRNA sense strand
gcuacagauccuaaaguaa

SEQ ID NO: 684764 - RNA, 19 nt, Homo sapiens
  misc_RNA (1)...(19): siRNA sense strand
aaauugguguucaagacuu

SEQ ID NO: 684765 - RNA, 19 nt, Homo sapiens
  misc_RNA (1)...(19): siRNA sense strand
acucugaaauuacuuaugc

SEQ ID NO: 684766 - RNA, 19 nt, Homo sapiens
  misc_RNA (1)...(19): siRNA sense strand
ggagcugccuauguaaucu

SEQ ID NO: 684767 - RNA, 19 nt, Homo sapiens
  misc_RNA (1)...(19): siRNA sense strand
caaauacuacguguccuau

SEQ ID NO: 684768 - RNA, 19 nt, Homo sapiens
  misc_RNA (1)...(19): siRNA sense strand
gggaagaucaaagguacaa

SEQ ID NO: 684769 - RNA, 19 nt, Homo sapiens
  misc_RNA (1)...(19): siRNA sense strand
guuaguggcagaagaguca

SEQ ID NO: 684770 - RNA, 19 nt, Homo sapiens
  misc_RNA (1)...(19): siRNA sense strand
cacagacacuaaauucaag

SEQ ID NO: 684771 - RNA, 19 nt, Homo sapiens
  misc_RNA (1)...(19): siRNA sense strand
gcaucacagacacuaaauu

SEQ ID NO: 684772 - RNA, 19 nt, Homo sapiens
  misc_RNA (1)...(19): siRNA sense strand
agacuuuguugauucuuuc

SEQ ID NO: 684773 - RNA, 19 nt, Homo sapiens
  misc_RNA (1)...(19): siRNA sense strand
gauaccucauaaauagcua

SEQ ID NO: 684774 - RNA, 19 nt, Homo sapiens
  misc_RNA (1)...(19): siRNA sense strand
gagauaaaagcagcaaaua

SEQ ID NO: 684775 - RNA, 19 nt, Homo sapiens
  misc_RNA (1)...(19): siRNA sense strand
ugaaugauacccugucucu

SEQ ID NO: 684776 - RNA, 19 nt, Homo sapiens
  misc_RNA (1)...(19): siRNA sense strand
cauggacacuuagaagauc

SEQ ID NO: 684777 - RNA, 19 nt, Homo sapiens
  misc_RNA (1)...(19): siRNA sense strand
agcaagacuuuguugauuc

SEQ ID NO: 684778 - RNA, 19 nt, Homo sapiens
  misc_RNA (1)...(19): siRNA sense strand
uacugcagauuaaugaaga

SEQ ID NO: 684779 - RNA, 19 nt, Homo sapiens
  misc_RNA (1)...(19): siRNA sense strand
gucauauucuuacagauac

SEQ ID NO: 684780 - RNA, 19 nt, Homo sapiens
  misc_RNA (1)...(19): siRNA sense strand
gauaaaagcagcaaauacu

SEQ ID NO: 684781 - RNA, 19 nt, Homo sapiens
  misc_RNA (1)...(19): siRNA sense strand
aaacugcuccugaaaacua

SEQ ID NO: 684782 - RNA, 19 nt, Homo sapiens
  misc_RNA (1)...(19): siRNA sense strand
ccuucaaaguuuagaacaa

SEQ ID NO: 684783 - RNA, 19 nt, Homo sapiens
  misc_RNA (1)...(19): siRNA sense strand
aagaucaaagguacaauga

SEQ ID NO: 684784 - RNA, 19 nt, Homo sapiens
  misc_RNA (1)...(19): siRNA sense strand
uuacuuaugcaguucaguu

SEQ ID NO: 684785 - RNA, 19 nt, Homo sapiens
  misc_RNA (1)...(19): siRNA sense strand
gaaugcuacagauccuaaa

SEQ ID NO: 684786 - RNA, 19 nt, Homo sapiens
  misc_RNA (1)...(19): siRNA sense strand
agaaugcuacagauccuaa

SEQ ID NO: 684787 - RNA, 19 nt, Homo sapiens
  misc_RNA (1)...(19): siRNA sense strand
cgcuaccaauacuugauua

SEQ ID NO: 684788 - RNA, 19 nt, Homo sapiens
  misc_RNA (1)...(19): siRNA sense strand
gcuaccaauacuugauuaa

SEQ ID NO: 684789 - RNA, 19 nt, Homo sapiens
  misc_RNA (1)...(19): siRNA sense strand
ugcugaugaugacauauuu

SEQ ID NO: 684790 - RNA, 19 nt, Homo sapiens
  misc_RNA (1)...(19): siRNA sense strand
ucaguugggcaaauaccua

SEQ ID NO: 684791 - RNA, 19 nt, Homo sapiens
  misc_RNA (1)...(19): siRNA sense strand
ggacguggggcaaugaaaa

SEQ ID NO: 684792 - RNA, 19 nt, Homo sapiens
  misc_RNA (1)...(19): siRNA sense strand
gggccucgcuaccaauacu

SEQ ID NO: 684793 - RNA, 19 nt, Homo sapiens
  misc_RNA (1)...(19): siRNA sense strand
caggaccuuuggaagaaug

SEQ ID NO: 684794 - RNA, 19 nt, Homo sapiens
  misc_RNA (1)...(19): siRNA sense strand
ucuuaugacugcugaugau

SEQ ID NO: 684795 - RNA, 19 nt, Homo sapiens
  misc_RNA (1)...(19): siRNA sense strand
gagggagaagaacuacaaa

SEQ ID NO: 684796 - RNA, 19 nt, Homo sapiens
  misc_RNA (1)...(19): siRNA sense strand
ucaagacguccuccuuuua

SEQ ID NO: 684797 - RNA, 19 nt, Homo sapiens
  misc_RNA (1)...(19): siRNA sense strand
ucagcaagacuuuguugau

SEQ ID NO: 684798 - RNA, 19 nt, Homo sapiens
  misc_RNA (1)...(19): siRNA sense strand
uaauucagcaagacuuugu

SEQ ID NO: 684799 - RNA, 19 nt, Homo sapiens
  misc_RNA (1)...(19): siRNA sense strand
aaaauuauguucggucuca

SEQ ID NO: 684800 - RNA, 19 nt, Homo sapiens
  misc_RNA (1)...(19): siRNA sense strand
aauugguguucaagacuuu

SEQ ID NO: 684801 - RNA, 19 nt, Homo sapiens
  misc_RNA (1)...(19): siRNA sense strand
ucauggacacuuagaagau

SEQ ID NO: 684802 - RNA, 19 nt, Homo sapiens
  misc_RNA (1)...(19): siRNA sense strand
gcacggagaugcugcacaa

SEQ ID NO: 684803 - RNA, 19 nt, Homo sapiens
  misc_RNA (1)...(19): siRNA sense strand
gcagguggcuugugagauc

SEQ ID NO: 684804 - RNA, 19 nt, Homo sapiens
  misc_RNA (1)...(19): siRNA sense strand
ggcaagaucuuccgugaug

SEQ ID NO: 684805 - RNA, 19 nt, Homo sapiens
  misc_RNA (1)...(19): siRNA sense strand
gaucuuccgugauguguau

SEQ ID NO: 684806 - RNA, 19 nt, Homo sapiens
  misc_RNA (1)...(19): siRNA sense strand
gugguaagguguucacuga

SEQ ID NO: 684807 - RNA, 19 nt, Homo sapiens
  misc_RNA (1)...(19): siRNA sense strand
gguaagguguucacugaug

SEQ ID NO: 684808 - RNA, 19 nt, Homo sapiens
  misc_RNA (1)...(19): siRNA sense strand
ggacuugggcuucccuuug

SEQ ID NO: 684809 - RNA, 19 nt, Homo sapiens
  misc_RNA (1)...(19): siRNA sense strand
ucaagcaggugcacacuuc

SEQ ID NO: 684810 - RNA, 19 nt, Homo sapiens
  misc_RNA (1)...(19): siRNA sense strand
gaaaagaccgcauguccua

SEQ ID NO: 684811 - RNA, 19 nt, Homo sapiens
  misc_RNA (1)...(19): siRNA sense strand
gccaggaagucaucaaaca

SEQ ID NO: 684812 - RNA, 19 nt, Homo sapiens
  misc_RNA (1)...(19): siRNA sense strand
caucaaacaguccaacgua

SEQ ID NO: 684813 - RNA, 19 nt, Homo sapiens
  misc_RNA (1)...(19): siRNA sense strand
caacguacagauccuggua

SEQ ID NO: 684814 - RNA, 19 nt, Homo sapiens
  misc_RNA (1)...(19): siRNA sense strand
acuaucagcuccaagguau

SEQ ID NO: 684815 - RNA, 19 nt, Homo sapiens
  misc_RNA (1)...(19): siRNA sense strand
gggcuucccuuuggacaug

SEQ ID NO: 684816 - RNA, 19 nt, Homo sapiens
  misc_RNA (1)...(19): siRNA sense strand
ggagagcuuucccgaacuc

SEQ ID NO: 684817 - RNA, 19 nt, Homo sapiens
  misc_RNA (1)...(19): siRNA sense strand
ggguugcgguucaagagaa

SEQ ID NO: 684818 - RNA, 19 nt, Homo sapiens
  misc_RNA (1)...(19): siRNA sense strand
uaucagcuccaagguauuu

SEQ ID NO: 684819 - RNA, 19 nt, Homo sapiens
  misc_RNA (1)...(19): siRNA sense strand
ugaggucgguuaucgagau

SEQ ID NO: 684820 - RNA, 19 nt, Homo sapiens
  misc_RNA (1)...(19): siRNA sense strand
gagcuuucccgaacucaug

SEQ ID NO: 684821 - RNA, 19 nt, Homo sapiens
  misc_RNA (1)...(19): siRNA sense strand
cugcuggacucaauguuug

SEQ ID NO: 684822 - RNA, 19 nt, Homo sapiens
  misc_RNA (1)...(19): siRNA sense strand
gacuugggcuucccuuugg

SEQ ID NO: 684823 - RNA, 19 nt, Homo sapiens
  misc_RNA (1)...(19): siRNA sense strand
cuccaggccugaucacuug

SEQ ID NO: 684824 - RNA, 19 nt, Homo sapiens
  misc_RNA (1)...(19): siRNA sense strand
ccaaccugcuggacucaau

SEQ ID NO: 684825 - RNA, 19 nt, Homo sapiens
  misc_RNA (1)...(19): siRNA sense strand
gccaaguuccugcugauga

SEQ ID NO: 684826 - RNA, 19 nt, Homo sapiens
  misc_RNA (1)...(19): siRNA sense strand
ugugagaucugcggcaaga

SEQ ID NO: 684827 - RNA, 19 nt, Homo sapiens
  misc_RNA (1)...(19): siRNA sense strand
ccaaguuccugcugaugag

SEQ ID NO: 684828 - RNA, 19 nt, Homo sapiens
  misc_RNA (1)...(19): siRNA sense strand
gagcuggagaugcacacua

SEQ ID NO: 684829 - RNA, 19 nt, Homo sapiens
  misc_RNA (1)...(19): siRNA sense strand
gcaagaucuuccgugaugu

SEQ ID NO: 684830 - RNA, 19 nt, Homo sapiens
  misc_RNA (1)...(19): siRNA sense strand
gguugcgguucaagagaaa

SEQ ID NO: 684831 - RNA, 19 nt, Homo sapiens
  misc_RNA (1)...(19): siRNA sense strand
gcgccgauauaaugcucuu

SEQ ID NO: 684832 - RNA, 19 nt, Homo sapiens
  misc_RNA (1)...(19): siRNA sense strand
ugccagagcugugggaaag

SEQ ID NO: 684833 - RNA, 19 nt, Homo sapiens
  misc_RNA (1)...(19): siRNA sense strand
caagaucuuccgugaugug

SEQ ID NO: 684834 - RNA, 19 nt, Homo sapiens
  misc_RNA (1)...(19): siRNA sense strand
gagggaggcaggcauccuu

SEQ ID NO: 684835 - RNA, 19 nt, Homo sapiens
  misc_RNA (1)...(19): siRNA sense strand
gcagacacagcacggagau

SEQ ID NO: 684836 - RNA, 19 nt, Homo sapiens
  misc_RNA (1)...(19): siRNA sense strand
ucaaacaguccaacguaca

SEQ ID NO: 684837 - RNA, 19 nt, Homo sapiens
  misc_RNA (1)...(19): siRNA sense strand
gcacaagcugucccacucu

SEQ ID NO: 684838 - RNA, 19 nt, Homo sapiens
  misc_RNA (1)...(19): siRNA sense strand
ucacuugaacggacauauc

SEQ ID NO: 684839 - RNA, 19 nt, Homo sapiens
  misc_RNA (1)...(19): siRNA sense strand
cugcugaugaggucgguua

SEQ ID NO: 684840 - RNA, 19 nt, Homo sapiens
  misc_RNA (1)...(19): siRNA sense strand
gguguucagcgcccaguug

SEQ ID NO: 684841 - RNA, 19 nt, Homo sapiens
  misc_RNA (1)...(19): siRNA sense strand
gaucugccaggaagucauc

SEQ ID NO: 684842 - RNA, 19 nt, Homo sapiens
  misc_RNA (1)...(19): siRNA sense strand
ggucgguuaucgagaucug

SEQ ID NO: 684843 - RNA, 19 nt, Homo sapiens
  misc_RNA (1)...(19): siRNA sense strand
gaggucgguuaucgagauc

SEQ ID NO: 684844 - RNA, 19 nt, Homo sapiens
  misc_RNA (1)...(19): siRNA sense strand
caugcggucuaugugguaa

SEQ ID NO: 684845 - RNA, 19 nt, Homo sapiens
  misc_RNA (1)...(19): siRNA sense strand
ccugcuggacucaauguuu

SEQ ID NO: 684846 - RNA, 19 nt, Homo sapiens
  misc_RNA (1)...(19): siRNA sense strand
caagguauuuggggacauu

SEQ ID NO: 684847 - RNA, 19 nt, Homo sapiens
  misc_RNA (1)...(19): siRNA sense strand
gguccgugggcaagccuua

SEQ ID NO: 684848 - RNA, 19 nt, Homo sapiens
  misc_RNA (1)...(19): siRNA sense strand
caggaagucaucaaacagu

SEQ ID NO: 684849 - RNA, 19 nt, Homo sapiens
  misc_RNA (1)...(19): siRNA sense strand
gccgauauaaugcucuuuc

SEQ ID NO: 684850 - RNA, 19 nt, Homo sapiens
  misc_RNA (1)...(19): siRNA sense strand
ggcuacccaucucugaaga

SEQ ID NO: 684851 - RNA, 19 nt, Homo sapiens
  misc_RNA (1)...(19): siRNA sense strand
gggcuacccaucucugaag

SEQ ID NO: 684852 - RNA, 19 nt, Homo sapiens
  misc_RNA (1)...(19): siRNA sense strand
cauaccaggugagcagaca

SEQ ID NO: 684853 - RNA, 19 nt, Homo sapiens
  misc_RNA (1)...(19): siRNA sense strand
cacuugaacggacauauca

SEQ ID NO: 684854 - RNA, 19 nt, Homo sapiens
  misc_RNA (1)...(19): siRNA sense strand
gcacggagaugcugcacaa

SEQ ID NO: 684855 - RNA, 19 nt, Homo sapiens
  misc_RNA (1)...(19): siRNA sense strand
gcagguggcuugugagauc

SEQ ID NO: 684856 - RNA, 19 nt, Homo sapiens
  misc_RNA (1)...(19): siRNA sense strand
ggcaagaucuuccgugaug

SEQ ID NO: 684857 - RNA, 19 nt, Homo sapiens
  misc_RNA (1)...(19): siRNA sense strand
gaucuuccgugauguguau

SEQ ID NO: 684858 - RNA, 19 nt, Homo sapiens
  misc_RNA (1)...(19): siRNA sense strand
gugguaagguguucacuga

SEQ ID NO: 684859 - RNA, 19 nt, Homo sapiens
  misc_RNA (1)...(19): siRNA sense strand
gguaagguguucacugaug

SEQ ID NO: 684860 - RNA, 19 nt, Homo sapiens
  misc_RNA (1)...(19): siRNA sense strand
ggacuugggcuucccuuug

SEQ ID NO: 684861 - RNA, 19 nt, Homo sapiens
  misc_RNA (1)...(19): siRNA sense strand
ucaagcaggugcacacuuc

SEQ ID NO: 684862 - RNA, 19 nt, Homo sapiens
  misc_RNA (1)...(19): siRNA sense strand
gaaaagaccgcauguccua

SEQ ID NO: 684863 - RNA, 19 nt, Homo sapiens
  misc_RNA (1)...(19): siRNA sense strand
gccaggaagucaucaaaca

SEQ ID NO: 684864 - RNA, 19 nt, Homo sapiens
  misc_RNA (1)...(19): siRNA sense strand
caucaaacaguccaacgua

SEQ ID NO: 684865 - RNA, 19 nt, Homo sapiens
  misc_RNA (1)...(19): siRNA sense strand
caacguacagauccuggua

SEQ ID NO: 684866 - RNA, 19 nt, Homo sapiens
  misc_RNA (1)...(19): siRNA sense strand
acuaucagcuccaagguau

SEQ ID NO: 684867 - RNA, 19 nt, Homo sapiens
  misc_RNA (1)...(19): siRNA sense strand
gggcuucccuuuggacaug

SEQ ID NO: 684868 - RNA, 19 nt, Homo sapiens
  misc_RNA (1)...(19): siRNA sense strand
ggagagcuuucccgaacuc

SEQ ID NO: 684869 - RNA, 19 nt, Homo sapiens
  misc_RNA (1)...(19): siRNA sense strand
ggguugcgguucaagagaa

SEQ ID NO: 684870 - RNA, 19 nt, Homo sapiens
  misc_RNA (1)...(19): siRNA sense strand
uaucagcuccaagguauuu

SEQ ID NO: 684871 - RNA, 19 nt, Homo sapiens
  misc_RNA (1)...(19): siRNA sense strand
ugaggucgguuaucgagau

SEQ ID NO: 684872 - RNA, 19 nt, Homo sapiens
  misc_RNA (1)...(19): siRNA sense strand
gagcuuucccgaacucaug

SEQ ID NO: 684873 - RNA, 19 nt, Homo sapiens
  misc_RNA (1)...(19): siRNA sense strand
cugcuggacucaauguuug

SEQ ID NO: 684874 - RNA, 19 nt, Homo sapiens
  misc_RNA (1)...(19): siRNA sense strand
gacuugggcuucccuuugg

SEQ ID NO: 684875 - RNA, 19 nt, Homo sapiens
  misc_RNA (1)...(19): siRNA sense strand
cuccaggccugaucacuug

SEQ ID NO: 684876 - RNA, 19 nt, Homo sapiens
  misc_RNA (1)...(19): siRNA sense strand
ccaaccugcuggacucaau

SEQ ID NO: 684877 - RNA, 19 nt, Homo sapiens
  misc_RNA (1)...(19): siRNA sense strand
gccaaguuccugcugauga

SEQ ID NO: 684878 - RNA, 19 nt, Homo sapiens
  misc_RNA (1)...(19): siRNA sense strand
ugugagaucugcggcaaga

SEQ ID NO: 684879 - RNA, 19 nt, Homo sapiens
  misc_RNA (1)...(19): siRNA sense strand
ccaaguuccugcugaugag

SEQ ID NO: 684880 - RNA, 19 nt, Homo sapiens
  misc_RNA (1)...(19): siRNA sense strand
gagcuggagaugcacacua

SEQ ID NO: 684881 - RNA, 19 nt, Homo sapiens
  misc_RNA (1)...(19): siRNA sense strand
gcaagaucuuccgugaugu

SEQ ID NO: 684882 - RNA, 19 nt, Homo sapiens
  misc_RNA (1)...(19): siRNA sense strand
gguugcgguucaagagaaa

SEQ ID NO: 684883 - RNA, 19 nt, Homo sapiens
  misc_RNA (1)...(19): siRNA sense strand
gcgccgauauaaugcucuu

SEQ ID NO: 684884 - RNA, 19 nt, Homo sapiens
  misc_RNA (1)...(19): siRNA sense strand
ugccagagcugugggaaag

SEQ ID NO: 684885 - RNA, 19 nt, Homo sapiens
  misc_RNA (1)...(19): siRNA sense strand
caagaucuuccgugaugug

SEQ ID NO: 684886 - RNA, 19 nt, Homo sapiens
  misc_RNA (1)...(19): siRNA sense strand
gagggaggcaggcauccuu

SEQ ID NO: 684887 - RNA, 19 nt, Homo sapiens
  misc_RNA (1)...(19): siRNA sense strand
gcagacacagcacggagau

SEQ ID NO: 684888 - RNA, 19 nt, Homo sapiens
  misc_RNA (1)...(19): siRNA sense strand
ucaaacaguccaacguaca

SEQ ID NO: 684889 - RNA, 19 nt, Homo sapiens
  misc_RNA (1)...(19): siRNA sense strand
gcacaagcugucccacucu

SEQ ID NO: 684890 - RNA, 19 nt, Homo sapiens
  misc_RNA (1)...(19): siRNA sense strand
ucacuugaacggacauauc

SEQ ID NO: 684891 - RNA, 19 nt, Homo sapiens
  misc_RNA (1)...(19): siRNA sense strand
cugcugaugaggucgguua

SEQ ID NO: 684892 - RNA, 19 nt, Homo sapiens
  misc_RNA (1)...(19): siRNA sense strand
gguguucagcgcccaguug

SEQ ID NO: 684893 - RNA, 19 nt, Homo sapiens
  misc_RNA (1)...(19): siRNA sense strand
gaucugccaggaagucauc

SEQ ID NO: 684894 - RNA, 19 nt, Homo sapiens
  misc_RNA (1)...(19): siRNA sense strand
ggucgguuaucgagaucug

SEQ ID NO: 684895 - RNA, 19 nt, Homo sapiens
  misc_RNA (1)...(19): siRNA sense strand
gaggucgguuaucgagauc

SEQ ID NO: 684896 - RNA, 19 nt, Homo sapiens
  misc_RNA (1)...(19): siRNA sense strand
caugcggucuaugugguaa

SEQ ID NO: 684897 - RNA, 19 nt, Homo sapiens
  misc_RNA (1)...(19): siRNA sense strand
ccugcuggacucaauguuu

SEQ ID NO: 684898 - RNA, 19 nt, Homo sapiens
  misc_RNA (1)...(19): siRNA sense strand
caagguauuuggggacauu

SEQ ID NO: 684899 - RNA, 19 nt, Homo sapiens
  misc_RNA (1)...(19): siRNA sense strand
gguccgugggcaagccuua

SEQ ID NO: 684900 - RNA, 19 nt, Homo sapiens
  misc_RNA (1)...(19): siRNA sense strand
caggaagucaucaaacagu

SEQ ID NO: 684901 - RNA, 19 nt, Homo sapiens
  misc_RNA (1)...(19): siRNA sense strand
gccgauauaaugcucuuuc

SEQ ID NO: 684902 - RNA, 19 nt, Homo sapiens
  misc_RNA (1)...(19): siRNA sense strand
ggcuacccaucucugaaga

SEQ ID NO: 684903 - RNA, 19 nt, Homo sapiens
  misc_RNA (1)...(19): siRNA sense strand
gggcuacccaucucugaag

SEQ ID NO: 684904 - RNA, 19 nt, Homo sapiens
  misc_RNA (1)...(19): siRNA sense strand
cauaccaggugagcagaca

SEQ ID NO: 684905 - RNA, 19 nt, Homo sapiens
  misc_RNA (1)...(19): siRNA sense strand
cacuugaacggacauauca

SEQ ID NO: 684906 - RNA, 19 nt, Homo sapiens
  misc_RNA (1)...(19): siRNA sense strand
gcacggagaugcugcacaa

SEQ ID NO: 684907 - RNA, 19 nt, Homo sapiens
  misc_RNA (1)...(19): siRNA sense strand
gcagguggcuugugagauc

SEQ ID NO: 684908 - RNA, 19 nt, Homo sapiens
  misc_RNA (1)...(19): siRNA sense strand
ggcaagaucuuccgugaug

SEQ ID NO: 684909 - RNA, 19 nt, Homo sapiens
  misc_RNA (1)...(19): siRNA sense strand
gaucuuccgugauguguau

SEQ ID NO: 684910 - RNA, 19 nt, Homo sapiens
  misc_RNA (1)...(19): siRNA sense strand
gugguaagguguucacuga

SEQ ID NO: 684911 - RNA, 19 nt, Homo sapiens
  misc_RNA (1)...(19): siRNA sense strand
gguaagguguucacugaug

SEQ ID NO: 684912 - RNA, 19 nt, Homo sapiens
  misc_RNA (1)...(19): siRNA sense strand
ggacuugggcuucccuuug

SEQ ID NO: 684913 - RNA, 19 nt, Homo sapiens
  misc_RNA (1)...(19): siRNA sense strand
ucaagcaggugcacacuuc

SEQ ID NO: 684914 - RNA, 19 nt, Homo sapiens
  misc_RNA (1)...(19): siRNA sense strand
gaaaagaccgcauguccua

SEQ ID NO: 684915 - RNA, 19 nt, Homo sapiens
  misc_RNA (1)...(19): siRNA sense strand
gccaggaagucaucaaaca

SEQ ID NO: 684916 - RNA, 19 nt, Homo sapiens
  misc_RNA (1)...(19): siRNA sense strand
caucaaacaguccaacgua

SEQ ID NO: 684917 - RNA, 19 nt, Homo sapiens
  misc_RNA (1)...(19): siRNA sense strand
caacguacagauccuggua

SEQ ID NO: 684918 - RNA, 19 nt, Homo sapiens
  misc_RNA (1)...(19): siRNA sense strand
acuaucagcuccaagguau

SEQ ID NO: 684919 - RNA, 19 nt, Homo sapiens
  misc_RNA (1)...(19): siRNA sense strand
gggcuucccuuuggacaug

SEQ ID NO: 684920 - RNA, 19 nt, Homo sapiens
  misc_RNA (1)...(19): siRNA sense strand
ggagagcuuucccgaacuc

SEQ ID NO: 684921 - RNA, 19 nt, Homo sapiens
  misc_RNA (1)...(19): siRNA sense strand
ggguugcgguucaagagaa

SEQ ID NO: 684922 - RNA, 19 nt, Homo sapiens
  misc_RNA (1)...(19): siRNA sense strand
uaucagcuccaagguauuu

SEQ ID NO: 684923 - RNA, 19 nt, Homo sapiens
  misc_RNA (1)...(19): siRNA sense strand
ugaggucgguuaucgagau

SEQ ID NO: 684924 - RNA, 19 nt, Homo sapiens
  misc_RNA (1)...(19): siRNA sense strand
gagcuuucccgaacucaug

SEQ ID NO: 684925 - RNA, 19 nt, Homo sapiens
  misc_RNA (1)...(19): siRNA sense strand
cugcuggacucaauguuug

SEQ ID NO: 684926 - RNA, 19 nt, Homo sapiens
  misc_RNA (1)...(19): siRNA sense strand
gacuugggcuucccuuugg

SEQ ID NO: 684927 - RNA, 19 nt, Homo sapiens
  misc_RNA (1)...(19): siRNA sense strand
cuccaggccugaucacuug

SEQ ID NO: 684928 - RNA, 19 nt, Homo sapiens
  misc_RNA (1)...(19): siRNA sense strand
ccaaccugcuggacucaau

SEQ ID NO: 684929 - RNA, 19 nt, Homo sapiens
  misc_RNA (1)...(19): siRNA sense strand
gccaaguuccugcugauga

SEQ ID NO: 684930 - RNA, 19 nt, Homo sapiens
  misc_RNA (1)...(19): siRNA sense strand
ugugagaucugcggcaaga

SEQ ID NO: 684931 - RNA, 19 nt, Homo sapiens
  misc_RNA (1)...(19): siRNA sense strand
ccaaguuccugcugaugag

SEQ ID NO: 684932 - RNA, 19 nt, Homo sapiens
  misc_RNA (1)...(19): siRNA sense strand
gagcuggagaugcacacua

SEQ ID NO: 684933 - RNA, 19 nt, Homo sapiens
  misc_RNA (1)...(19): siRNA sense strand
gcaagaucuuccgugaugu

SEQ ID NO: 684934 - RNA, 19 nt, Homo sapiens
  misc_RNA (1)...(19): siRNA sense strand
gguugcgguucaagagaaa

SEQ ID NO: 684935 - RNA, 19 nt, Homo sapiens
  misc_RNA (1)...(19): siRNA sense strand
gcgccgauauaaugcucuu

SEQ ID NO: 684936 - RNA, 19 nt, Homo sapiens
  misc_RNA (1)...(19): siRNA sense strand
ugccagagcugugggaaag

SEQ ID NO: 684937 - RNA, 19 nt, Homo sapiens
  misc_RNA (1)...(19): siRNA sense strand
caagaucuuccgugaugug

SEQ ID NO: 684938 - RNA, 19 nt, Homo sapiens
  misc_RNA (1)...(19): siRNA sense strand
gagggaggcaggcauccuu

SEQ ID NO: 684939 - RNA, 19 nt, Homo sapiens
  misc_RNA (1)...(19): siRNA sense strand
gcagacacagcacggagau

SEQ ID NO: 684940 - RNA, 19 nt, Homo sapiens
  misc_RNA (1)...(19): siRNA sense strand
ucaaacaguccaacguaca

SEQ ID NO: 684941 - RNA, 19 nt, Homo sapiens
  misc_RNA (1)...(19): siRNA sense strand
gcacaagcugucccacucu

SEQ ID NO: 684942 - RNA, 19 nt, Homo sapiens
  misc_RNA (1)...(19): siRNA sense strand
ucacuugaacggacauauc

SEQ ID NO: 684943 - RNA, 19 nt, Homo sapiens
  misc_RNA (1)...(19): siRNA sense strand
cugcugaugaggucgguua

SEQ ID NO: 684944 - RNA, 19 nt, Homo sapiens
  misc_RNA (1)...(19): siRNA sense strand
gguguucagcgcccaguug

SEQ ID NO: 684945 - RNA, 19 nt, Homo sapiens
  misc_RNA (1)...(19): siRNA sense strand
gaucugccaggaagucauc

SEQ ID NO: 684946 - RNA, 19 nt, Homo sapiens
  misc_RNA (1)...(19): siRNA sense strand
ggucgguuaucgagaucug

SEQ ID NO: 684947 - RNA, 19 nt, Homo sapiens
  misc_RNA (1)...(19): siRNA sense strand
gaggucgguuaucgagauc

SEQ ID NO: 684948 - RNA, 19 nt, Homo sapiens
  misc_RNA (1)...(19): siRNA sense strand
caugcggucuaugugguaa

SEQ ID NO: 684949 - RNA, 19 nt, Homo sapiens
  misc_RNA (1)...(19): siRNA sense strand
ccugcuggacucaauguuu

SEQ ID NO: 684950 - RNA, 19 nt, Homo sapiens
  misc_RNA (1)...(19): siRNA sense strand
caagguauuuggggacauu

SEQ ID NO: 684951 - RNA, 19 nt, Homo sapiens
  misc_RNA (1)...(19): siRNA sense strand
gguccgugggcaagccuua

SEQ ID NO: 684952 - RNA, 19 nt, Homo sapiens
  misc_RNA (1)...(19): siRNA sense strand
caggaagucaucaaacagu

SEQ ID NO: 684953 - RNA, 19 nt, Homo sapiens
  misc_RNA (1)...(19): siRNA sense strand
gccgauauaaugcucuuuc

SEQ ID NO: 684954 - RNA, 19 nt, Homo sapiens
  misc_RNA (1)...(19): siRNA sense strand
ggcuacccaucucugaaga

SEQ ID NO: 684955 - RNA, 19 nt, Homo sapiens
  misc_RNA (1)...(19): siRNA sense strand
gggcuacccaucucugaag

SEQ ID NO: 684956 - RNA, 19 nt, Homo sapiens
  misc_RNA (1)...(19): siRNA sense strand
cauaccaggugagcagaca

SEQ ID NO: 684957 - RNA, 19 nt, Homo sapiens
  misc_RNA (1)...(19): siRNA sense strand
cacuugaacggacauauca

SEQ ID NO: 684958 - RNA, 19 nt, Homo sapiens
  misc_RNA (1)...(19): siRNA sense strand
gcacggagaugcugcacaa

SEQ ID NO: 684959 - RNA, 19 nt, Homo sapiens
  misc_RNA (1)...(19): siRNA sense strand
gcagguggcuugugagauc

SEQ ID NO: 684960 - RNA, 19 nt, Homo sapiens
  misc_RNA (1)...(19): siRNA sense strand
ggcaagaucuuccgugaug

SEQ ID NO: 684961 - RNA, 19 nt, Homo sapiens
  misc_RNA (1)...(19): siRNA sense strand
gaucuuccgugauguguau

SEQ ID NO: 684962 - RNA, 19 nt, Homo sapiens
  misc_RNA (1)...(19): siRNA sense strand
gugguaagguguucacuga

SEQ ID NO: 684963 - RNA, 19 nt, Homo sapiens
  misc_RNA (1)...(19): siRNA sense strand
gguaagguguucacugaug

SEQ ID NO: 684964 - RNA, 19 nt, Homo sapiens
  misc_RNA (1)...(19): siRNA sense strand
ggacuugggcuucccuuug

SEQ ID NO: 684965 - RNA, 19 nt, Homo sapiens
  misc_RNA (1)...(19): siRNA sense strand
ucaagcaggugcacacuuc

SEQ ID NO: 684966 - RNA, 19 nt, Homo sapiens
  misc_RNA (1)...(19): siRNA sense strand
gaaaagaccgcauguccua

SEQ ID NO: 684967 - RNA, 19 nt, Homo sapiens
  misc_RNA (1)...(19): siRNA sense strand
gccaggaagucaucaaaca

SEQ ID NO: 684968 - RNA, 19 nt, Homo sapiens
  misc_RNA (1)...(19): siRNA sense strand
caucaaacaguccaacgua

SEQ ID NO: 684969 - RNA, 19 nt, Homo sapiens
  misc_RNA (1)...(19): siRNA sense strand
caacguacagauccuggua

SEQ ID NO: 684970 - RNA, 19 nt, Homo sapiens
  misc_RNA (1)...(19): siRNA sense strand
acuaucagcuccaagguau

SEQ ID NO: 684971 - RNA, 19 nt, Homo sapiens
  misc_RNA (1)...(19): siRNA sense strand
gggcuucccuuuggacaug

SEQ ID NO: 684972 - RNA, 19 nt, Homo sapiens
  misc_RNA (1)...(19): siRNA sense strand
ggagagcuuucccgaacuc

SEQ ID NO: 684973 - RNA, 19 nt, Homo sapiens
  misc_RNA (1)...(19): siRNA sense strand
ggguugcgguucaagagaa

SEQ ID NO: 684974 - RNA, 19 nt, Homo sapiens
  misc_RNA (1)...(19): siRNA sense strand
uaucagcuccaagguauuu

SEQ ID NO: 684975 - RNA, 19 nt, Homo sapiens
  misc_RNA (1)...(19): siRNA sense strand
ugaggucgguuaucgagau

SEQ ID NO: 684976 - RNA, 19 nt, Homo sapiens
  misc_RNA (1)...(19): siRNA sense strand
gagcuuucccgaacucaug

SEQ ID NO: 684977 - RNA, 19 nt, Homo sapiens
  misc_RNA (1)...(19): siRNA sense strand
cugcuggacucaauguuug

SEQ ID NO: 684978 - RNA, 19 nt, Homo sapiens
  misc_RNA (1)...(19): siRNA sense strand
gacuugggcuucccuuugg

SEQ ID NO: 684979 - RNA, 19 nt, Homo sapiens
  misc_RNA (1)...(19): siRNA sense strand
cuccaggccugaucacuug

SEQ ID NO: 684980 - RNA, 19 nt, Homo sapiens
  misc_RNA (1)...(19): siRNA sense strand
ccaaccugcuggacucaau

SEQ ID NO: 684981 - RNA, 19 nt, Homo sapiens
  misc_RNA (1)...(19): siRNA sense strand
gccaaguuccugcugauga

SEQ ID NO: 684982 - RNA, 19 nt, Homo sapiens
  misc_RNA (1)...(19): siRNA sense strand
ugugagaucugcggcaaga

SEQ ID NO: 684983 - RNA, 19 nt, Homo sapiens
  misc_RNA (1)...(19): siRNA sense strand
ccaaguuccugcugaugag

SEQ ID NO: 684984 - RNA, 19 nt, Homo sapiens
  misc_RNA (1)...(19): siRNA sense strand
gagcuggagaugcacacua

SEQ ID NO: 684985 - RNA, 19 nt, Homo sapiens
  misc_RNA (1)...(19): siRNA sense strand
gcaagaucuuccgugaugu

SEQ ID NO: 684986 - RNA, 19 nt, Homo sapiens
  misc_RNA (1)...(19): siRNA sense strand
gguugcgguucaagagaaa

SEQ ID NO: 684987 - RNA, 19 nt, Homo sapiens
  misc_RNA (1)...(19): siRNA sense strand
gcgccgauauaaugcucuu

SEQ ID NO: 684988 - RNA, 19 nt, Homo sapiens
  misc_RNA (1)...(19): siRNA sense strand
ugccagagcugugggaaag

SEQ ID NO: 684989 - RNA, 19 nt, Homo sapiens
  misc_RNA (1)...(19): siRNA sense strand
caagaucuuccgugaugug

SEQ ID NO: 684990 - RNA, 19 nt, Homo sapiens
  misc_RNA (1)...(19): siRNA sense strand
gagggaggcaggcauccuu

SEQ ID NO: 684991 - RNA, 19 nt, Homo sapiens
  misc_RNA (1)...(19): siRNA sense strand
gcagacacagcacggagau

SEQ ID NO: 684992 - RNA, 19 nt, Homo sapiens
  misc_RNA (1)...(19): siRNA sense strand
ucaaacaguccaacguaca

SEQ ID NO: 684993 - RNA, 19 nt, Homo sapiens
  misc_RNA (1)...(19): siRNA sense strand
gcacaagcugucccacucu

SEQ ID NO: 684994 - RNA, 19 nt, Homo sapiens
  misc_RNA (1)...(19): siRNA sense strand
ucacuugaacggacauauc

SEQ ID NO: 684995 - RNA, 19 nt, Homo sapiens
  misc_RNA (1)...(19): siRNA sense strand
cugcugaugaggucgguua

SEQ ID NO: 684996 - RNA, 19 nt, Homo sapiens
  misc_RNA (1)...(19): siRNA sense strand
gguguucagcgcccaguug

SEQ ID NO: 684997 - RNA, 19 nt, Homo sapiens
  misc_RNA (1)...(19): siRNA sense strand
gaucugccaggaagucauc

SEQ ID NO: 684998 - RNA, 19 nt, Homo sapiens
  misc_RNA (1)...(19): siRNA sense strand
ggucgguuaucgagaucug

SEQ ID NO: 684999 - RNA, 19 nt, Homo sapiens
  misc_RNA (1)...(19): siRNA sense strand
gaggucgguuaucgagauc

SEQ ID NO: 685000 - RNA, 19 nt, Homo sapiens
  misc_RNA (1)...(19): siRNA sense strand
caugcggucuaugugguaa

SEQ ID NO: 685001 - RNA, 19 nt, Homo sapiens
  misc_RNA (1)...(19): siRNA sense strand
ccugcuggacucaauguuu

SEQ ID NO: 685002 - RNA, 19 nt, Homo sapiens
  misc_RNA (1)...(19): siRNA sense strand
caagguauuuggggacauu

SEQ ID NO: 685003 - RNA, 19 nt, Homo sapiens
  misc_RNA (1)...(19): siRNA sense strand
gguccgugggcaagccuua

SEQ ID NO: 685004 - RNA, 19 nt, Homo sapiens
  misc_RNA (1)...(19): siRNA sense strand
caggaagucaucaaacagu

SEQ ID NO: 685005 - RNA, 19 nt, Homo sapiens
  misc_RNA (1)...(19): siRNA sense strand
gccgauauaaugcucuuuc

SEQ ID NO: 685006 - RNA, 19 nt, Homo sapiens
  misc_RNA (1)...(19): siRNA sense strand
ggcuacccaucucugaaga

SEQ ID NO: 685007 - RNA, 19 nt, Homo sapiens
  misc_RNA (1)...(19): siRNA sense strand
gggcuacccaucucugaag

SEQ ID NO: 685008 - RNA, 19 nt, Homo sapiens
  misc_RNA (1)...(19): siRNA sense strand
cauaccaggugagcagaca

SEQ ID NO: 685009 - RNA, 19 nt, Homo sapiens
  misc_RNA (1)...(19): siRNA sense strand
cacuugaacggacauauca

SEQ ID NO: 685010 - RNA, 19 nt, Homo sapiens
  misc_RNA (1)...(19): siRNA sense strand
gaacaccaauauuacaguu

SEQ ID NO: 685011 - RNA, 19 nt, Homo sapiens
  misc_RNA (1)...(19): siRNA sense strand
gaauaccgcuggcccuuug

SEQ ID NO: 685012 - RNA, 19 nt, Homo sapiens
  misc_RNA (1)...(19): siRNA sense strand
acucaaaccuuucaacaaa

SEQ ID NO: 685013 - RNA, 19 nt, Homo sapiens
  misc_RNA (1)...(19): siRNA sense strand
gaacaaaccaagaaaugau

SEQ ID NO: 685014 - RNA, 19 nt, Homo sapiens
  misc_RNA (1)...(19): siRNA sense strand
auacgugacuguagaauug

SEQ ID NO: 685015 - RNA, 19 nt, Homo sapiens
  misc_RNA (1)...(19): siRNA sense strand
caucauacgugacuguaga

SEQ ID NO: 685016 - RNA, 19 nt, Homo sapiens
  misc_RNA (1)...(19): siRNA sense strand
ccaagaugauugucccaaa

SEQ ID NO: 685017 - RNA, 19 nt, Homo sapiens
  misc_RNA (1)...(19): siRNA sense strand
uauacuggguuuccuguuu

SEQ ID NO: 685018 - RNA, 19 nt, Homo sapiens
  misc_RNA (1)...(19): siRNA sense strand
gcuauaauccaucgaaaug

SEQ ID NO: 685019 - RNA, 19 nt, Homo sapiens
  misc_RNA (1)...(19): siRNA sense strand
ugucaugauuccuacuuua

SEQ ID NO: 685020 - RNA, 19 nt, Homo sapiens
  misc_RNA (1)...(19): siRNA sense strand
gaagaacaaaccaagaaau

SEQ ID NO: 685021 - RNA, 19 nt, Homo sapiens
  misc_RNA (1)...(19): siRNA sense strand
aaagucaccugcaucauca

SEQ ID NO: 685022 - RNA, 19 nt, Homo sapiens
  misc_RNA (1)...(19): siRNA sense strand
ggugauagucauuuacuuu

SEQ ID NO: 685023 - RNA, 19 nt, Homo sapiens
  misc_RNA (1)...(19): siRNA sense strand
uggaaggcauaauuacaua

SEQ ID NO: 685024 - RNA, 19 nt, Homo sapiens
  misc_RNA (1)...(19): siRNA sense strand
gcuaguguguuucuacuca

SEQ ID NO: 685025 - RNA, 19 nt, Homo sapiens
  misc_RNA (1)...(19): siRNA sense strand
ccuguacgcuaguguguuu

SEQ ID NO: 685026 - RNA, 19 nt, Homo sapiens
  misc_RNA (1)...(19): siRNA sense strand
ucacgugucucagcauuga

SEQ ID NO: 685027 - RNA, 19 nt, Homo sapiens
  misc_RNA (1)...(19): siRNA sense strand
acaccaauauuacaguuug

SEQ ID NO: 685028 - RNA, 19 nt, Homo sapiens
  misc_RNA (1)...(19): siRNA sense strand
cuaaagaaggcuuaugaaa

SEQ ID NO: 685029 - RNA, 19 nt, Homo sapiens
  misc_RNA (1)...(19): siRNA sense strand
cagaagaacaaaccaagaa

SEQ ID NO: 685030 - RNA, 19 nt, Homo sapiens
  misc_RNA (1)...(19): siRNA sense strand
ucucaacucuucuacugaa

SEQ ID NO: 685031 - RNA, 19 nt, Homo sapiens
  misc_RNA (1)...(19): siRNA sense strand
caaagucaccugcaucauc

SEQ ID NO: 685032 - RNA, 19 nt, Homo sapiens
  misc_RNA (1)...(19): siRNA sense strand
uuacugacuuugccacuau

SEQ ID NO: 685033 - RNA, 19 nt, Homo sapiens
  misc_RNA (1)...(19): siRNA sense strand
ucaccugcaucaucauuug

SEQ ID NO: 685034 - RNA, 19 nt, Homo sapiens
  misc_RNA (1)...(19): siRNA sense strand
caagaugauugucccaaag

SEQ ID NO: 685035 - RNA, 19 nt, Homo sapiens
  misc_RNA (1)...(19): siRNA sense strand
cuacacagcuauggaauac

SEQ ID NO: 685036 - RNA, 19 nt, Homo sapiens
  misc_RNA (1)...(19): siRNA sense strand
auaugaagcugaagacugu

SEQ ID NO: 685037 - RNA, 19 nt, Homo sapiens
  misc_RNA (1)...(19): siRNA sense strand
gaaacagcuugguggugau

SEQ ID NO: 685038 - RNA, 19 nt, Homo sapiens
  misc_RNA (1)...(19): siRNA sense strand
aagcuggaaggcauaauua

SEQ ID NO: 685039 - RNA, 19 nt, Homo sapiens
  misc_RNA (1)...(19): siRNA sense strand
cagcuauaauccaucgaaa

SEQ ID NO: 685040 - RNA, 19 nt, Homo sapiens
  misc_RNA (1)...(19): siRNA sense strand
caugauuccuacuuuauac

SEQ ID NO: 685041 - RNA, 19 nt, Homo sapiens
  misc_RNA (1)...(19): siRNA sense strand
gaucgauaccuggcuauug

SEQ ID NO: 685042 - RNA, 19 nt, Homo sapiens
  misc_RNA (1)...(19): siRNA sense strand
ggaauaccgcuggcccuuu

SEQ ID NO: 685043 - RNA, 19 nt, Homo sapiens
  misc_RNA (1)...(19): siRNA sense strand
guaagcucauccaccaaga

SEQ ID NO: 685044 - RNA, 19 nt, Homo sapiens
  misc_RNA (1)...(19): siRNA sense strand
caguuugugcuuuccauua

SEQ ID NO: 685045 - RNA, 19 nt, Homo sapiens
  misc_RNA (1)...(19): siRNA sense strand
gcuggcccuuuggcaauua

SEQ ID NO: 685046 - RNA, 19 nt, Homo sapiens
  misc_RNA (1)...(19): siRNA sense strand
acuaugggcugucuacaca

SEQ ID NO: 685047 - RNA, 19 nt, Homo sapiens
  misc_RNA (1)...(19): siRNA sense strand
aaaucccacucaaaccuuu

SEQ ID NO: 685048 - RNA, 19 nt, Homo sapiens
  misc_RNA (1)...(19): siRNA sense strand
gcaauugugcuuuucuuuu

SEQ ID NO: 685049 - RNA, 19 nt, Homo sapiens
  misc_RNA (1)...(19): siRNA sense strand
aagaacaaaccaagaaaug

SEQ ID NO: 685050 - RNA, 19 nt, Homo sapiens
  misc_RNA (1)...(19): siRNA sense strand
ggaaggcauaauuacauau

SEQ ID NO: 685051 - RNA, 19 nt, Homo sapiens
  misc_RNA (1)...(19): siRNA sense strand
cuacugaagaugguauuaa

SEQ ID NO: 685052 - RNA, 19 nt, Homo sapiens
  misc_RNA (1)...(19): siRNA sense strand
gugggaauauuuggaaaca

SEQ ID NO: 685053 - RNA, 19 nt, Homo sapiens
  misc_RNA (1)...(19): siRNA sense strand
agaacaaaccaagaaauga

SEQ ID NO: 685054 - RNA, 19 nt, Homo sapiens
  misc_RNA (1)...(19): siRNA sense strand
gaaauucagaagaacaaac

SEQ ID NO: 685055 - RNA, 19 nt, Homo sapiens
  misc_RNA (1)...(19): siRNA sense strand
gacuguagaauugcagaua

SEQ ID NO: 685056 - RNA, 19 nt, Homo sapiens
  misc_RNA (1)...(19): siRNA sense strand
uggguuuccuguuuccuuu

SEQ ID NO: 685057 - RNA, 19 nt, Homo sapiens
  misc_RNA (1)...(19): siRNA sense strand
ccacucaaaccuuucaaca

SEQ ID NO: 685058 - RNA, 19 nt, Homo sapiens
  misc_RNA (1)...(19): siRNA sense strand
cuguagaauugcagauauu

SEQ ID NO: 685059 - RNA, 19 nt, Homo sapiens
  misc_RNA (1)...(19): siRNA sense strand
caccaaauauucacuuuuc

SEQ ID NO: 685060 - RNA, 19 nt, Homo sapiens
  misc_RNA (1)...(19): siRNA sense strand
aaagcuggaaggcauaauu

SEQ ID NO: 685061 - RNA, 19 nt, Homo sapiens
  misc_RNA (1)...(19): siRNA sense strand
ugagaacaccaauauuaca

SEQ ID NO: 685062 - RNA, 19 nt, Homo sapiens
  misc_RNA (1)...(19): siRNA sense strand
cagauaauguaagcucauc

SEQ ID NO: 685063 - RNA, 19 nt, Homo sapiens
  misc_RNA (1)...(19): siRNA sense strand
caaaucccacucaaaccuu

SEQ ID NO: 685064 - RNA, 19 nt, Homo sapiens
  misc_RNA (1)...(19): siRNA sense strand
agaagaacaaaccaagaaa

SEQ ID NO: 685065 - RNA, 19 nt, Homo sapiens
  misc_RNA (1)...(19): siRNA sense strand
uauuacaguuugugcuuuc

SEQ ID NO: 685066 - RNA, 19 nt, Homo sapiens
  misc_RNA (1)...(19): siRNA sense strand
gagaacaccaauauuacag

SEQ ID NO: 685067 - RNA, 19 nt, Homo sapiens
  misc_RNA (1)...(19): siRNA sense strand
guacgcuaguguguuucua

SEQ ID NO: 685068 - RNA, 19 nt, Homo sapiens
  misc_RNA (1)...(19): siRNA sense strand
gccaaagucaccugcauca

SEQ ID NO: 685069 - RNA, 19 nt, Homo sapiens
  misc_RNA (1)...(19): siRNA sense strand
ugguggugauagucauuua

SEQ ID NO: 685070 - RNA, 19 nt, Homo sapiens
  misc_RNA (1)...(19): siRNA sense strand
uagaauugcagauauugug

SEQ ID NO: 685071 - RNA, 19 nt, Homo sapiens
  misc_RNA (1)...(19): siRNA sense strand
acuguagaauugcagauau

SEQ ID NO: 685072 - RNA, 19 nt, Homo sapiens
  misc_RNA (1)...(19): siRNA sense strand
gauucaacuaggcaucaua

SEQ ID NO: 685073 - RNA, 19 nt, Homo sapiens
  misc_RNA (1)...(19): siRNA sense strand
gcuggaaggcauaauuaca

SEQ ID NO: 685074 - RNA, 19 nt, Homo sapiens
  misc_RNA (1)...(19): siRNA sense strand
aaacagcuugguggugaua

SEQ ID NO: 685075 - RNA, 19 nt, Homo sapiens
  misc_RNA (1)...(19): siRNA sense strand
auacuggguuuccuguuuc

SEQ ID NO: 685076 - RNA, 19 nt, Homo sapiens
  misc_RNA (1)...(19): siRNA sense strand
ccaaagcuggaaggcauaa

SEQ ID NO: 685077 - RNA, 19 nt, Homo sapiens
  misc_RNA (1)...(19): siRNA sense strand
cccaccaaauauucacuuu

SEQ ID NO: 685078 - RNA, 19 nt, Homo sapiens
  misc_RNA (1)...(19): siRNA sense strand
ucagaagaacaaaccaaga

SEQ ID NO: 685079 - RNA, 19 nt, Homo sapiens
  misc_RNA (1)...(19): siRNA sense strand
cauuaugagucccaaaauu

SEQ ID NO: 685080 - RNA, 19 nt, Homo sapiens
  misc_RNA (1)...(19): siRNA sense strand
aguuugugcuuuccauuau

SEQ ID NO: 685081 - RNA, 19 nt, Homo sapiens
  misc_RNA (1)...(19): siRNA sense strand
cauacgugacuguagaauu

SEQ ID NO: 685082 - RNA, 19 nt, Homo sapiens
  misc_RNA (1)...(19): siRNA sense strand
ucacuuuucuggauguauu

SEQ ID NO: 685083 - RNA, 19 nt, Homo sapiens
  misc_RNA (1)...(19): siRNA sense strand
cccuaaagaaggcuuauga

SEQ ID NO: 685084 - RNA, 19 nt, Homo sapiens
  misc_RNA (1)...(19): siRNA sense strand
uuugugcuuuccauuauga

SEQ ID NO: 685085 - RNA, 19 nt, Homo sapiens
  misc_RNA (1)...(19): siRNA sense strand
ucuacacagcuauggaaua

SEQ ID NO: 685086 - RNA, 19 nt, Homo sapiens
  misc_RNA (1)...(19): siRNA sense strand
gauaauguaagcucaucca

SEQ ID NO: 685087 - RNA, 19 nt, Homo sapiens
  misc_RNA (1)...(19): siRNA sense strand
ccuaaagaaggcuuaugaa

SEQ ID NO: 685088 - RNA, 19 nt, Homo sapiens
  misc_RNA (1)...(19): siRNA sense strand
ccaguuugccagcuauaau

SEQ ID NO: 685089 - RNA, 19 nt, Homo sapiens
  misc_RNA (1)...(19): siRNA sense strand
gucaugauuccuacuuuau

SEQ ID NO: 685090 - RNA, 19 nt, Homo sapiens
  misc_RNA (1)...(19): siRNA sense strand
auucucaacucuucuacug

SEQ ID NO: 685091 - RNA, 19 nt, Homo sapiens
  misc_RNA (1)...(19): siRNA sense strand
guagaauugcagauauugu

SEQ ID NO: 685092 - RNA, 19 nt, Homo sapiens
  misc_RNA (1)...(19): siRNA sense strand
ccagcuauaauccaucgaa

SEQ ID NO: 685093 - RNA, 19 nt, Homo sapiens
  misc_RNA (1)...(19): siRNA sense strand
aucgauaccuggcuauugu

SEQ ID NO: 685094 - RNA, 19 nt, Homo sapiens
  misc_RNA (1)...(19): siRNA sense strand
acucacgugucucagcauu

SEQ ID NO: 685095 - RNA, 19 nt, Homo sapiens
  misc_RNA (1)...(19): siRNA sense strand
aagaaggcuuaugaaauuc

SEQ ID NO: 685096 - RNA, 19 nt, Homo sapiens
  misc_RNA (1)...(19): siRNA sense strand
ucucagcauugaucgauac

SEQ ID NO: 685097 - RNA, 19 nt, Homo sapiens
  misc_RNA (1)...(19): siRNA sense strand
uagccaaagucaccugcau

SEQ ID NO: 685098 - RNA, 19 nt, Homo sapiens
  misc_RNA (1)...(19): siRNA sense strand
gaauauuuggaaacagcuu

SEQ ID NO: 685099 - RNA, 19 nt, Homo sapiens
  misc_RNA (1)...(19): siRNA sense strand
uuuggaaggcccuaaagaa

SEQ ID NO: 685100 - RNA, 19 nt, Homo sapiens
  misc_RNA (1)...(19): siRNA sense strand
gggcugggccugaccaaaa

SEQ ID NO: 685101 - RNA, 19 nt, Homo sapiens
  misc_RNA (1)...(19): siRNA sense strand
gauuccuacuuuauacagu

SEQ ID NO: 685102 - RNA, 19 nt, Homo sapiens
  misc_RNA (1)...(19): siRNA sense strand
uaagcucauccaccaagaa

SEQ ID NO: 685103 - RNA, 19 nt, Homo sapiens
  misc_RNA (1)...(19): siRNA sense strand
ccaaaucccacucaaaccu

SEQ ID NO: 685104 - RNA, 19 nt, Homo sapiens
  misc_RNA (1)...(19): siRNA sense strand
uuuaacaauugccugaauc

SEQ ID NO: 685105 - RNA, 19 nt, Homo sapiens
  misc_RNA (1)...(19): siRNA sense strand
acaaaccaagaaaugauga

SEQ ID NO: 685106 - RNA, 19 nt, Homo sapiens
  misc_RNA (1)...(19): siRNA sense strand
ucugaucauucuuacaagu

SEQ ID NO: 685107 - RNA, 19 nt, Homo sapiens
  misc_RNA (1)...(19): siRNA sense strand
gcgucaguuucaaccugua

SEQ ID NO: 685108 - RNA, 19 nt, Homo sapiens
  misc_RNA (1)...(19): siRNA sense strand
guuugugcuuuccauuaug

SEQ ID NO: 685109 - RNA, 19 nt, Homo sapiens
  misc_RNA (1)...(19): siRNA sense strand
gaacaccaauauuacaguu

SEQ ID NO: 685110 - RNA, 19 nt, Homo sapiens
  misc_RNA (1)...(19): siRNA sense strand
gaauaccgcuggcccuuug

SEQ ID NO: 685111 - RNA, 19 nt, Homo sapiens
  misc_RNA (1)...(19): siRNA sense strand
acucaaaccuuucaacaaa

SEQ ID NO: 685112 - RNA, 19 nt, Homo sapiens
  misc_RNA (1)...(19): siRNA sense strand
gaacaaaccaagaaaugau

SEQ ID NO: 685113 - RNA, 19 nt, Homo sapiens
  misc_RNA (1)...(19): siRNA sense strand
auacgugacuguagaauug

SEQ ID NO: 685114 - RNA, 19 nt, Homo sapiens
  misc_RNA (1)...(19): siRNA sense strand
caucauacgugacuguaga

SEQ ID NO: 685115 - RNA, 19 nt, Homo sapiens
  misc_RNA (1)...(19): siRNA sense strand
ccaagaugauugucccaaa

SEQ ID NO: 685116 - RNA, 19 nt, Homo sapiens
  misc_RNA (1)...(19): siRNA sense strand
uauacuggguuuccuguuu

SEQ ID NO: 685117 - RNA, 19 nt, Homo sapiens
  misc_RNA (1)...(19): siRNA sense strand
gcuauaauccaucgaaaug

SEQ ID NO: 685118 - RNA, 19 nt, Homo sapiens
  misc_RNA (1)...(19): siRNA sense strand
ugucaugauuccuacuuua

SEQ ID NO: 685119 - RNA, 19 nt, Homo sapiens
  misc_RNA (1)...(19): siRNA sense strand
gaagaacaaaccaagaaau

SEQ ID NO: 685120 - RNA, 19 nt, Homo sapiens
  misc_RNA (1)...(19): siRNA sense strand
aaagucaccugcaucauca

SEQ ID NO: 685121 - RNA, 19 nt, Homo sapiens
  misc_RNA (1)...(19): siRNA sense strand
ggugauagucauuuacuuu

SEQ ID NO: 685122 - RNA, 19 nt, Homo sapiens
  misc_RNA (1)...(19): siRNA sense strand
uggaaggcauaauuacaua

SEQ ID NO: 685123 - RNA, 19 nt, Homo sapiens
  misc_RNA (1)...(19): siRNA sense strand
gcuaguguguuucuacuca

SEQ ID NO: 685124 - RNA, 19 nt, Homo sapiens
  misc_RNA (1)...(19): siRNA sense strand
ccuguacgcuaguguguuu

SEQ ID NO: 685125 - RNA, 19 nt, Homo sapiens
  misc_RNA (1)...(19): siRNA sense strand
ucacgugucucagcauuga

SEQ ID NO: 685126 - RNA, 19 nt, Homo sapiens
  misc_RNA (1)...(19): siRNA sense strand
acaccaauauuacaguuug

SEQ ID NO: 685127 - RNA, 19 nt, Homo sapiens
  misc_RNA (1)...(19): siRNA sense strand
cuaaagaaggcuuaugaaa

SEQ ID NO: 685128 - RNA, 19 nt, Homo sapiens
  misc_RNA (1)...(19): siRNA sense strand
cagaagaacaaaccaagaa

SEQ ID NO: 685129 - RNA, 19 nt, Homo sapiens
  misc_RNA (1)...(19): siRNA sense strand
ucucaacucuucuacugaa

SEQ ID NO: 685130 - RNA, 19 nt, Homo sapiens
  misc_RNA (1)...(19): siRNA sense strand
caaagucaccugcaucauc

SEQ ID NO: 685131 - RNA, 19 nt, Homo sapiens
  misc_RNA (1)...(19): siRNA sense strand
uuacugacuuugccacuau

SEQ ID NO: 685132 - RNA, 19 nt, Homo sapiens
  misc_RNA (1)...(19): siRNA sense strand
ucaccugcaucaucauuug

SEQ ID NO: 685133 - RNA, 19 nt, Homo sapiens
  misc_RNA (1)...(19): siRNA sense strand
caagaugauugucccaaag

SEQ ID NO: 685134 - RNA, 19 nt, Homo sapiens
  misc_RNA (1)...(19): siRNA sense strand
cuacacagcuauggaauac

SEQ ID NO: 685135 - RNA, 19 nt, Homo sapiens
  misc_RNA (1)...(19): siRNA sense strand
auaugaagcugaagacugu

SEQ ID NO: 685136 - RNA, 19 nt, Homo sapiens
  misc_RNA (1)...(19): siRNA sense strand
gaaacagcuugguggugau

SEQ ID NO: 685137 - RNA, 19 nt, Homo sapiens
  misc_RNA (1)...(19): siRNA sense strand
aagcuggaaggcauaauua

SEQ ID NO: 685138 - RNA, 19 nt, Homo sapiens
  misc_RNA (1)...(19): siRNA sense strand
cagcuauaauccaucgaaa

SEQ ID NO: 685139 - RNA, 19 nt, Homo sapiens
  misc_RNA (1)...(19): siRNA sense strand
caugauuccuacuuuauac

SEQ ID NO: 685140 - RNA, 19 nt, Homo sapiens
  misc_RNA (1)...(19): siRNA sense strand
gaucgauaccuggcuauug

SEQ ID NO: 685141 - RNA, 19 nt, Homo sapiens
  misc_RNA (1)...(19): siRNA sense strand
ggaauaccgcuggcccuuu

SEQ ID NO: 685142 - RNA, 19 nt, Homo sapiens
  misc_RNA (1)...(19): siRNA sense strand
guaagcucauccaccaaga

SEQ ID NO: 685143 - RNA, 19 nt, Homo sapiens
  misc_RNA (1)...(19): siRNA sense strand
caguuugugcuuuccauua

SEQ ID NO: 685144 - RNA, 19 nt, Homo sapiens
  misc_RNA (1)...(19): siRNA sense strand
gcuggcccuuuggcaauua

SEQ ID NO: 685145 - RNA, 19 nt, Homo sapiens
  misc_RNA (1)...(19): siRNA sense strand
acuaugggcugucuacaca

SEQ ID NO: 685146 - RNA, 19 nt, Homo sapiens
  misc_RNA (1)...(19): siRNA sense strand
aaaucccacucaaaccuuu

SEQ ID NO: 685147 - RNA, 19 nt, Homo sapiens
  misc_RNA (1)...(19): siRNA sense strand
gcaauugugcuuuucuuuu

SEQ ID NO: 685148 - RNA, 19 nt, Homo sapiens
  misc_RNA (1)...(19): siRNA sense strand
aagaacaaaccaagaaaug

SEQ ID NO: 685149 - RNA, 19 nt, Homo sapiens
  misc_RNA (1)...(19): siRNA sense strand
ggaaggcauaauuacauau

SEQ ID NO: 685150 - RNA, 19 nt, Homo sapiens
  misc_RNA (1)...(19): siRNA sense strand
cuacugaagaugguauuaa

SEQ ID NO: 685151 - RNA, 19 nt, Homo sapiens
  misc_RNA (1)...(19): siRNA sense strand
gugggaauauuuggaaaca

SEQ ID NO: 685152 - RNA, 19 nt, Homo sapiens
  misc_RNA (1)...(19): siRNA sense strand
agaacaaaccaagaaauga

SEQ ID NO: 685153 - RNA, 19 nt, Homo sapiens
  misc_RNA (1)...(19): siRNA sense strand
gaaauucagaagaacaaac

SEQ ID NO: 685154 - RNA, 19 nt, Homo sapiens
  misc_RNA (1)...(19): siRNA sense strand
gacuguagaauugcagaua

SEQ ID NO: 685155 - RNA, 19 nt, Homo sapiens
  misc_RNA (1)...(19): siRNA sense strand
uggguuuccuguuuccuuu

SEQ ID NO: 685156 - RNA, 19 nt, Homo sapiens
  misc_RNA (1)...(19): siRNA sense strand
ccacucaaaccuuucaaca

SEQ ID NO: 685157 - RNA, 19 nt, Homo sapiens
  misc_RNA (1)...(19): siRNA sense strand
cuguagaauugcagauauu

SEQ ID NO: 685158 - RNA, 19 nt, Homo sapiens
  misc_RNA (1)...(19): siRNA sense strand
caccaaauauucacuuuuc

SEQ ID NO: 685159 - RNA, 19 nt, Homo sapiens
  misc_RNA (1)...(19): siRNA sense strand
aaagcuggaaggcauaauu

SEQ ID NO: 685160 - RNA, 19 nt, Homo sapiens
  misc_RNA (1)...(19): siRNA sense strand
ugagaacaccaauauuaca

SEQ ID NO: 685161 - RNA, 19 nt, Homo sapiens
  misc_RNA (1)...(19): siRNA sense strand
cagauaauguaagcucauc

SEQ ID NO: 685162 - RNA, 19 nt, Homo sapiens
  misc_RNA (1)...(19): siRNA sense strand
caaaucccacucaaaccuu

SEQ ID NO: 685163 - RNA, 19 nt, Homo sapiens
  misc_RNA (1)...(19): siRNA sense strand
agaagaacaaaccaagaaa

SEQ ID NO: 685164 - RNA, 19 nt, Homo sapiens
  misc_RNA (1)...(19): siRNA sense strand
uauuacaguuugugcuuuc

SEQ ID NO: 685165 - RNA, 19 nt, Homo sapiens
  misc_RNA (1)...(19): siRNA sense strand
gagaacaccaauauuacag

SEQ ID NO: 685166 - RNA, 19 nt, Homo sapiens
  misc_RNA (1)...(19): siRNA sense strand
guacgcuaguguguuucua

SEQ ID NO: 685167 - RNA, 19 nt, Homo sapiens
  misc_RNA (1)...(19): siRNA sense strand
gccaaagucaccugcauca

SEQ ID NO: 685168 - RNA, 19 nt, Homo sapiens
  misc_RNA (1)...(19): siRNA sense strand
ugguggugauagucauuua

SEQ ID NO: 685169 - RNA, 19 nt, Homo sapiens
  misc_RNA (1)...(19): siRNA sense strand
uagaauugcagauauugug

SEQ ID NO: 685170 - RNA, 19 nt, Homo sapiens
  misc_RNA (1)...(19): siRNA sense strand
acuguagaauugcagauau

SEQ ID NO: 685171 - RNA, 19 nt, Homo sapiens
  misc_RNA (1)...(19): siRNA sense strand
gauucaacuaggcaucaua

SEQ ID NO: 685172 - RNA, 19 nt, Homo sapiens
  misc_RNA (1)...(19): siRNA sense strand
gcuggaaggcauaauuaca

SEQ ID NO: 685173 - RNA, 19 nt, Homo sapiens
  misc_RNA (1)...(19): siRNA sense strand
aaacagcuugguggugaua

SEQ ID NO: 685174 - RNA, 19 nt, Homo sapiens
  misc_RNA (1)...(19): siRNA sense strand
auacuggguuuccuguuuc

SEQ ID NO: 685175 - RNA, 19 nt, Homo sapiens
  misc_RNA (1)...(19): siRNA sense strand
ccaaagcuggaaggcauaa

SEQ ID NO: 685176 - RNA, 19 nt, Homo sapiens
  misc_RNA (1)...(19): siRNA sense strand
cccaccaaauauucacuuu

SEQ ID NO: 685177 - RNA, 19 nt, Homo sapiens
  misc_RNA (1)...(19): siRNA sense strand
ucagaagaacaaaccaaga

SEQ ID NO: 685178 - RNA, 19 nt, Homo sapiens
  misc_RNA (1)...(19): siRNA sense strand
cauuaugagucccaaaauu

SEQ ID NO: 685179 - RNA, 19 nt, Homo sapiens
  misc_RNA (1)...(19): siRNA sense strand
aguuugugcuuuccauuau

SEQ ID NO: 685180 - RNA, 19 nt, Homo sapiens
  misc_RNA (1)...(19): siRNA sense strand
cauacgugacuguagaauu

SEQ ID NO: 685181 - RNA, 19 nt, Homo sapiens
  misc_RNA (1)...(19): siRNA sense strand
ucacuuuucuggauguauu

SEQ ID NO: 685182 - RNA, 19 nt, Homo sapiens
  misc_RNA (1)...(19): siRNA sense strand
cccuaaagaaggcuuauga

SEQ ID NO: 685183 - RNA, 19 nt, Homo sapiens
  misc_RNA (1)...(19): siRNA sense strand
uuugugcuuuccauuauga

SEQ ID NO: 685184 - RNA, 19 nt, Homo sapiens
  misc_RNA (1)...(19): siRNA sense strand
ucuacacagcuauggaaua

SEQ ID NO: 685185 - RNA, 19 nt, Homo sapiens
  misc_RNA (1)...(19): siRNA sense strand
gauaauguaagcucaucca

SEQ ID NO: 685186 - RNA, 19 nt, Homo sapiens
  misc_RNA (1)...(19): siRNA sense strand
ccuaaagaaggcuuaugaa

SEQ ID NO: 685187 - RNA, 19 nt, Homo sapiens
  misc_RNA (1)...(19): siRNA sense strand
ccaguuugccagcuauaau

SEQ ID NO: 685188 - RNA, 19 nt, Homo sapiens
  misc_RNA (1)...(19): siRNA sense strand
gucaugauuccuacuuuau

SEQ ID NO: 685189 - RNA, 19 nt, Homo sapiens
  misc_RNA (1)...(19): siRNA sense strand
auucucaacucuucuacug

SEQ ID NO: 685190 - RNA, 19 nt, Homo sapiens
  misc_RNA (1)...(19): siRNA sense strand
guagaauugcagauauugu

SEQ ID NO: 685191 - RNA, 19 nt, Homo sapiens
  misc_RNA (1)...(19): siRNA sense strand
ccagcuauaauccaucgaa

SEQ ID NO: 685192 - RNA, 19 nt, Homo sapiens
  misc_RNA (1)...(19): siRNA sense strand
aucgauaccuggcuauugu

SEQ ID NO: 685193 - RNA, 19 nt, Homo sapiens
  misc_RNA (1)...(19): siRNA sense strand
acucacgugucucagcauu

SEQ ID NO: 685194 - RNA, 19 nt, Homo sapiens
  misc_RNA (1)...(19): siRNA sense strand
aagaaggcuuaugaaauuc

SEQ ID NO: 685195 - RNA, 19 nt, Homo sapiens
  misc_RNA (1)...(19): siRNA sense strand
ucucagcauugaucgauac

SEQ ID NO: 685196 - RNA, 19 nt, Homo sapiens
  misc_RNA (1)...(19): siRNA sense strand
uagccaaagucaccugcau

SEQ ID NO: 685197 - RNA, 19 nt, Homo sapiens
  misc_RNA (1)...(19): siRNA sense strand
gaauauuuggaaacagcuu

SEQ ID NO: 685198 - RNA, 19 nt, Homo sapiens
  misc_RNA (1)...(19): siRNA sense strand
uuuggaaggcccuaaagaa

SEQ ID NO: 685199 - RNA, 19 nt, Homo sapiens
  misc_RNA (1)...(19): siRNA sense strand
gggcugggccugaccaaaa

SEQ ID NO: 685200 - RNA, 19 nt, Homo sapiens
  misc_RNA (1)...(19): siRNA sense strand
gauuccuacuuuauacagu

SEQ ID NO: 685201 - RNA, 19 nt, Homo sapiens
  misc_RNA (1)...(19): siRNA sense strand
uaagcucauccaccaagaa

SEQ ID NO: 685202 - RNA, 19 nt, Homo sapiens
  misc_RNA (1)...(19): siRNA sense strand
ccaaaucccacucaaaccu

SEQ ID NO: 685203 - RNA, 19 nt, Homo sapiens
  misc_RNA (1)...(19): siRNA sense strand
uuuaacaauugccugaauc

SEQ ID NO: 685204 - RNA, 19 nt, Homo sapiens
  misc_RNA (1)...(19): siRNA sense strand
acaaaccaagaaaugauga

SEQ ID NO: 685205 - RNA, 19 nt, Homo sapiens
  misc_RNA (1)...(19): siRNA sense strand
ucugaucauucuuacaagu

SEQ ID NO: 685206 - RNA, 19 nt, Homo sapiens
  misc_RNA (1)...(19): siRNA sense strand
gcgucaguuucaaccugua

SEQ ID NO: 685207 - RNA, 19 nt, Homo sapiens
  misc_RNA (1)...(19): siRNA sense strand
guuugugcuuuccauuaug

SEQ ID NO: 685208 - RNA, 19 nt, Homo sapiens
  misc_RNA (1)...(19): siRNA sense strand
gaacaccaauauuacaguu

SEQ ID NO: 685209 - RNA, 19 nt, Homo sapiens
  misc_RNA (1)...(19): siRNA sense strand
gaauaccgcuggcccuuug

SEQ ID NO: 685210 - RNA, 19 nt, Homo sapiens
  misc_RNA (1)...(19): siRNA sense strand
acucaaaccuuucaacaaa

SEQ ID NO: 685211 - RNA, 19 nt, Homo sapiens
  misc_RNA (1)...(19): siRNA sense strand
gaacaaaccaagaaaugau

SEQ ID NO: 685212 - RNA, 19 nt, Homo sapiens
  misc_RNA (1)...(19): siRNA sense strand
auacgugacuguagaauug

SEQ ID NO: 685213 - RNA, 19 nt, Homo sapiens
  misc_RNA (1)...(19): siRNA sense strand
caucauacgugacuguaga

SEQ ID NO: 685214 - RNA, 19 nt, Homo sapiens
  misc_RNA (1)...(19): siRNA sense strand
ccaagaugauugucccaaa

SEQ ID NO: 685215 - RNA, 19 nt, Homo sapiens
  misc_RNA (1)...(19): siRNA sense strand
uauacuggguuuccuguuu

SEQ ID NO: 685216 - RNA, 19 nt, Homo sapiens
  misc_RNA (1)...(19): siRNA sense strand
gcuauaauccaucgaaaug

SEQ ID NO: 685217 - RNA, 19 nt, Homo sapiens
  misc_RNA (1)...(19): siRNA sense strand
ugucaugauuccuacuuua

SEQ ID NO: 685218 - RNA, 19 nt, Homo sapiens
  misc_RNA (1)...(19): siRNA sense strand
gaagaacaaaccaagaaau

SEQ ID NO: 685219 - RNA, 19 nt, Homo sapiens
  misc_RNA (1)...(19): siRNA sense strand
aaagucaccugcaucauca

SEQ ID NO: 685220 - RNA, 19 nt, Homo sapiens
  misc_RNA (1)...(19): siRNA sense strand
ggugauagucauuuacuuu

SEQ ID NO: 685221 - RNA, 19 nt, Homo sapiens
  misc_RNA (1)...(19): siRNA sense strand
uggaaggcauaauuacaua

SEQ ID NO: 685222 - RNA, 19 nt, Homo sapiens
  misc_RNA (1)...(19): siRNA sense strand
gcuaguguguuucuacuca

SEQ ID NO: 685223 - RNA, 19 nt, Homo sapiens
  misc_RNA (1)...(19): siRNA sense strand
ccuguacgcuaguguguuu

SEQ ID NO: 685224 - RNA, 19 nt, Homo sapiens
  misc_RNA (1)...(19): siRNA sense strand
ucacgugucucagcauuga

SEQ ID NO: 685225 - RNA, 19 nt, Homo sapiens
  misc_RNA (1)...(19): siRNA sense strand
acaccaauauuacaguuug

SEQ ID NO: 685226 - RNA, 19 nt, Homo sapiens
  misc_RNA (1)...(19): siRNA sense strand
cuaaagaaggcuuaugaaa

SEQ ID NO: 685227 - RNA, 19 nt, Homo sapiens
  misc_RNA (1)...(19): siRNA sense strand
cagaagaacaaaccaagaa

SEQ ID NO: 685228 - RNA, 19 nt, Homo sapiens
  misc_RNA (1)...(19): siRNA sense strand
ucucaacucuucuacugaa

SEQ ID NO: 685229 - RNA, 19 nt, Homo sapiens
  misc_RNA (1)...(19): siRNA sense strand
caaagucaccugcaucauc

SEQ ID NO: 685230 - RNA, 19 nt, Homo sapiens
  misc_RNA (1)...(19): siRNA sense strand
uuacugacuuugccacuau

SEQ ID NO: 685231 - RNA, 19 nt, Homo sapiens
  misc_RNA (1)...(19): siRNA sense strand
ucaccugcaucaucauuug

SEQ ID NO: 685232 - RNA, 19 nt, Homo sapiens
  misc_RNA (1)...(19): siRNA sense strand
caagaugauugucccaaag

SEQ ID NO: 685233 - RNA, 19 nt, Homo sapiens
  misc_RNA (1)...(19): siRNA sense strand
cuacacagcuauggaauac

SEQ ID NO: 685234 - RNA, 19 nt, Homo sapiens
  misc_RNA (1)...(19): siRNA sense strand
auaugaagcugaagacugu

SEQ ID NO: 685235 - RNA, 19 nt, Homo sapiens
  misc_RNA (1)...(19): siRNA sense strand
gaaacagcuugguggugau

SEQ ID NO: 685236 - RNA, 19 nt, Homo sapiens
  misc_RNA (1)...(19): siRNA sense strand
aagcuggaaggcauaauua

SEQ ID NO: 685237 - RNA, 19 nt, Homo sapiens
  misc_RNA (1)...(19): siRNA sense strand
cagcuauaauccaucgaaa

SEQ ID NO: 685238 - RNA, 19 nt, Homo sapiens
  misc_RNA (1)...(19): siRNA sense strand
caugauuccuacuuuauac

SEQ ID NO: 685239 - RNA, 19 nt, Homo sapiens
  misc_RNA (1)...(19): siRNA sense strand
gaucgauaccuggcuauug

SEQ ID NO: 685240 - RNA, 19 nt, Homo sapiens
  misc_RNA (1)...(19): siRNA sense strand
ggaauaccgcuggcccuuu

SEQ ID NO: 685241 - RNA, 19 nt, Homo sapiens
  misc_RNA (1)...(19): siRNA sense strand
guaagcucauccaccaaga

SEQ ID NO: 685242 - RNA, 19 nt, Homo sapiens
  misc_RNA (1)...(19): siRNA sense strand
caguuugugcuuuccauua

SEQ ID NO: 685243 - RNA, 19 nt, Homo sapiens
  misc_RNA (1)...(19): siRNA sense strand
gcuggcccuuuggcaauua

SEQ ID NO: 685244 - RNA, 19 nt, Homo sapiens
  misc_RNA (1)...(19): siRNA sense strand
acuaugggcugucuacaca

SEQ ID NO: 685245 - RNA, 19 nt, Homo sapiens
  misc_RNA (1)...(19): siRNA sense strand
aaaucccacucaaaccuuu

SEQ ID NO: 685246 - RNA, 19 nt, Homo sapiens
  misc_RNA (1)...(19): siRNA sense strand
gcaauugugcuuuucuuuu

SEQ ID NO: 685247 - RNA, 19 nt, Homo sapiens
  misc_RNA (1)...(19): siRNA sense strand
aagaacaaaccaagaaaug

SEQ ID NO: 685248 - RNA, 19 nt, Homo sapiens
  misc_RNA (1)...(19): siRNA sense strand
ggaaggcauaauuacauau

SEQ ID NO: 685249 - RNA, 19 nt, Homo sapiens
  misc_RNA (1)...(19): siRNA sense strand
cuacugaagaugguauuaa

SEQ ID NO: 685250 - RNA, 19 nt, Homo sapiens
  misc_RNA (1)...(19): siRNA sense strand
gugggaauauuuggaaaca

SEQ ID NO: 685251 - RNA, 19 nt, Homo sapiens
  misc_RNA (1)...(19): siRNA sense strand
agaacaaaccaagaaauga

SEQ ID NO: 685252 - RNA, 19 nt, Homo sapiens
  misc_RNA (1)...(19): siRNA sense strand
gaaauucagaagaacaaac

SEQ ID NO: 685253 - RNA, 19 nt, Homo sapiens
  misc_RNA (1)...(19): siRNA sense strand
gacuguagaauugcagaua

SEQ ID NO: 685254 - RNA, 19 nt, Homo sapiens
  misc_RNA (1)...(19): siRNA sense strand
uggguuuccuguuuccuuu

SEQ ID NO: 685255 - RNA, 19 nt, Homo sapiens
  misc_RNA (1)...(19): siRNA sense strand
ccacucaaaccuuucaaca

SEQ ID NO: 685256 - RNA, 19 nt, Homo sapiens
  misc_RNA (1)...(19): siRNA sense strand
cuguagaauugcagauauu

SEQ ID NO: 685257 - RNA, 19 nt, Homo sapiens
  misc_RNA (1)...(19): siRNA sense strand
caccaaauauucacuuuuc

SEQ ID NO: 685258 - RNA, 19 nt, Homo sapiens
  misc_RNA (1)...(19): siRNA sense strand
aaagcuggaaggcauaauu

SEQ ID NO: 685259 - RNA, 19 nt, Homo sapiens
  misc_RNA (1)...(19): siRNA sense strand
ugagaacaccaauauuaca

SEQ ID NO: 685260 - RNA, 19 nt, Homo sapiens
  misc_RNA (1)...(19): siRNA sense strand
cagauaauguaagcucauc

SEQ ID NO: 685261 - RNA, 19 nt, Homo sapiens
  misc_RNA (1)...(19): siRNA sense strand
caaaucccacucaaaccuu

SEQ ID NO: 685262 - RNA, 19 nt, Homo sapiens
  misc_RNA (1)...(19): siRNA sense strand
agaagaacaaaccaagaaa

SEQ ID NO: 685263 - RNA, 19 nt, Homo sapiens
  misc_RNA (1)...(19): siRNA sense strand
uauuacaguuugugcuuuc

SEQ ID NO: 685264 - RNA, 19 nt, Homo sapiens
  misc_RNA (1)...(19): siRNA sense strand
gagaacaccaauauuacag

SEQ ID NO: 685265 - RNA, 19 nt, Homo sapiens
  misc_RNA (1)...(19): siRNA sense strand
guacgcuaguguguuucua

SEQ ID NO: 685266 - RNA, 19 nt, Homo sapiens
  misc_RNA (1)...(19): siRNA sense strand
gccaaagucaccugcauca

SEQ ID NO: 685267 - RNA, 19 nt, Homo sapiens
  misc_RNA (1)...(19): siRNA sense strand
ugguggugauagucauuua

SEQ ID NO: 685268 - RNA, 19 nt, Homo sapiens
  misc_RNA (1)...(19): siRNA sense strand
uagaauugcagauauugug

SEQ ID NO: 685269 - RNA, 19 nt, Homo sapiens
  misc_RNA (1)...(19): siRNA sense strand
acuguagaauugcagauau

SEQ ID NO: 685270 - RNA, 19 nt, Homo sapiens
  misc_RNA (1)...(19): siRNA sense strand
gauucaacuaggcaucaua

SEQ ID NO: 685271 - RNA, 19 nt, Homo sapiens
  misc_RNA (1)...(19): siRNA sense strand
gcuggaaggcauaauuaca

SEQ ID NO: 685272 - RNA, 19 nt, Homo sapiens
  misc_RNA (1)...(19): siRNA sense strand
aaacagcuugguggugaua

SEQ ID NO: 685273 - RNA, 19 nt, Homo sapiens
  misc_RNA (1)...(19): siRNA sense strand
auacuggguuuccuguuuc

SEQ ID NO: 685274 - RNA, 19 nt, Homo sapiens
  misc_RNA (1)...(19): siRNA sense strand
ccaaagcuggaaggcauaa

SEQ ID NO: 685275 - RNA, 19 nt, Homo sapiens
  misc_RNA (1)...(19): siRNA sense strand
cccaccaaauauucacuuu

SEQ ID NO: 685276 - RNA, 19 nt, Homo sapiens
  misc_RNA (1)...(19): siRNA sense strand
ucagaagaacaaaccaaga

SEQ ID NO: 685277 - RNA, 19 nt, Homo sapiens
  misc_RNA (1)...(19): siRNA sense strand
cauuaugagucccaaaauu

SEQ ID NO: 685278 - RNA, 19 nt, Homo sapiens
  misc_RNA (1)...(19): siRNA sense strand
aguuugugcuuuccauuau

SEQ ID NO: 685279 - RNA, 19 nt, Homo sapiens
  misc_RNA (1)...(19): siRNA sense strand
cauacgugacuguagaauu

SEQ ID NO: 685280 - RNA, 19 nt, Homo sapiens
  misc_RNA (1)...(19): siRNA sense strand
ucacuuuucuggauguauu

SEQ ID NO: 685281 - RNA, 19 nt, Homo sapiens
  misc_RNA (1)...(19): siRNA sense strand
cccuaaagaaggcuuauga

SEQ ID NO: 685282 - RNA, 19 nt, Homo sapiens
  misc_RNA (1)...(19): siRNA sense strand
uuugugcuuuccauuauga

SEQ ID NO: 685283 - RNA, 19 nt, Homo sapiens
  misc_RNA (1)...(19): siRNA sense strand
ucuacacagcuauggaaua

SEQ ID NO: 685284 - RNA, 19 nt, Homo sapiens
  misc_RNA (1)...(19): siRNA sense strand
gauaauguaagcucaucca

SEQ ID NO: 685285 - RNA, 19 nt, Homo sapiens
  misc_RNA (1)...(19): siRNA sense strand
ccuaaagaaggcuuaugaa

SEQ ID NO: 685286 - RNA, 19 nt, Homo sapiens
  misc_RNA (1)...(19): siRNA sense strand
ccaguuugccagcuauaau

SEQ ID NO: 685287 - RNA, 19 nt, Homo sapiens
  misc_RNA (1)...(19): siRNA sense strand
gucaugauuccuacuuuau

SEQ ID NO: 685288 - RNA, 19 nt, Homo sapiens
  misc_RNA (1)...(19): siRNA sense strand
auucucaacucuucuacug

SEQ ID NO: 685289 - RNA, 19 nt, Homo sapiens
  misc_RNA (1)...(19): siRNA sense strand
guagaauugcagauauugu

SEQ ID NO: 685290 - RNA, 19 nt, Homo sapiens
  misc_RNA (1)...(19): siRNA sense strand
ccagcuauaauccaucgaa

SEQ ID NO: 685291 - RNA, 19 nt, Homo sapiens
  misc_RNA (1)...(19): siRNA sense strand
aucgauaccuggcuauugu

SEQ ID NO: 685292 - RNA, 19 nt, Homo sapiens
  misc_RNA (1)...(19): siRNA sense strand
acucacgugucucagcauu

SEQ ID NO: 685293 - RNA, 19 nt, Homo sapiens
  misc_RNA (1)...(19): siRNA sense strand
aagaaggcuuaugaaauuc

SEQ ID NO: 685294 - RNA, 19 nt, Homo sapiens
  misc_RNA (1)...(19): siRNA sense strand
ucucagcauugaucgauac

SEQ ID NO: 685295 - RNA, 19 nt, Homo sapiens
  misc_RNA (1)...(19): siRNA sense strand
uagccaaagucaccugcau

SEQ ID NO: 685296 - RNA, 19 nt, Homo sapiens
  misc_RNA (1)...(19): siRNA sense strand
gaauauuuggaaacagcuu

SEQ ID NO: 685297 - RNA, 19 nt, Homo sapiens
  misc_RNA (1)...(19): siRNA sense strand
uuuggaaggcccuaaagaa

SEQ ID NO: 685298 - RNA, 19 nt, Homo sapiens
  misc_RNA (1)...(19): siRNA sense strand
gggcugggccugaccaaaa

SEQ ID NO: 685299 - RNA, 19 nt, Homo sapiens
  misc_RNA (1)...(19): siRNA sense strand
gauuccuacuuuauacagu

SEQ ID NO: 685300 - RNA, 19 nt, Homo sapiens
  misc_RNA (1)...(19): siRNA sense strand
uaagcucauccaccaagaa

SEQ ID NO: 685301 - RNA, 19 nt, Homo sapiens
  misc_RNA (1)...(19): siRNA sense strand
ccaaaucccacucaaaccu

SEQ ID NO: 685302 - RNA, 19 nt, Homo sapiens
  misc_RNA (1)...(19): siRNA sense strand
uuuaacaauugccugaauc

SEQ ID NO: 685303 - RNA, 19 nt, Homo sapiens
  misc_RNA (1)...(19): siRNA sense strand
acaaaccaagaaaugauga

SEQ ID NO: 685304 - RNA, 19 nt, Homo sapiens
  misc_RNA (1)...(19): siRNA sense strand
ucugaucauucuuacaagu

SEQ ID NO: 685305 - RNA, 19 nt, Homo sapiens
  misc_RNA (1)...(19): siRNA sense strand
gcgucaguuucaaccugua

SEQ ID NO: 685306 - RNA, 19 nt, Homo sapiens
  misc_RNA (1)...(19): siRNA sense strand
guuugugcuuuccauuaug

SEQ ID NO: 685307 - RNA, 19 nt, Homo sapiens
  misc_RNA (1)...(19): siRNA sense strand
gaacaccaauauuacaguu

SEQ ID NO: 685308 - RNA, 19 nt, Homo sapiens
  misc_RNA (1)...(19): siRNA sense strand
gaauaccgcuggcccuuug

SEQ ID NO: 685309 - RNA, 19 nt, Homo sapiens
  misc_RNA (1)...(19): siRNA sense strand
acucaaaccuuucaacaaa

SEQ ID NO: 685310 - RNA, 19 nt, Homo sapiens
  misc_RNA (1)...(19): siRNA sense strand
gaacaaaccaagaaaugau

SEQ ID NO: 685311 - RNA, 19 nt, Homo sapiens
  misc_RNA (1)...(19): siRNA sense strand
auacgugacuguagaauug

SEQ ID NO: 685312 - RNA, 19 nt, Homo sapiens
  misc_RNA (1)...(19): siRNA sense strand
caucauacgugacuguaga

SEQ ID NO: 685313 - RNA, 19 nt, Homo sapiens
  misc_RNA (1)...(19): siRNA sense strand
ccaagaugauugucccaaa

SEQ ID NO: 685314 - RNA, 19 nt, Homo sapiens
  misc_RNA (1)...(19): siRNA sense strand
uauacuggguuuccuguuu

SEQ ID NO: 685315 - RNA, 19 nt, Homo sapiens
  misc_RNA (1)...(19): siRNA sense strand
gcuauaauccaucgaaaug

SEQ ID NO: 685316 - RNA, 19 nt, Homo sapiens
  misc_RNA (1)...(19): siRNA sense strand
ugucaugauuccuacuuua

SEQ ID NO: 685317 - RNA, 19 nt, Homo sapiens
  misc_RNA (1)...(19): siRNA sense strand
gaagaacaaaccaagaaau

SEQ ID NO: 685318 - RNA, 19 nt, Homo sapiens
  misc_RNA (1)...(19): siRNA sense strand
aaagucaccugcaucauca

SEQ ID NO: 685319 - RNA, 19 nt, Homo sapiens
  misc_RNA (1)...(19): siRNA sense strand
ggugauagucauuuacuuu

SEQ ID NO: 685320 - RNA, 19 nt, Homo sapiens
  misc_RNA (1)...(19): siRNA sense strand
uggaaggcauaauuacaua

SEQ ID NO: 685321 - RNA, 19 nt, Homo sapiens
  misc_RNA (1)...(19): siRNA sense strand
gcuaguguguuucuacuca

SEQ ID NO: 685322 - RNA, 19 nt, Homo sapiens
  misc_RNA (1)...(19): siRNA sense strand
ccuguacgcuaguguguuu

SEQ ID NO: 685323 - RNA, 19 nt, Homo sapiens
  misc_RNA (1)...(19): siRNA sense strand
ucacgugucucagcauuga

SEQ ID NO: 685324 - RNA, 19 nt, Homo sapiens
  misc_RNA (1)...(19): siRNA sense strand
acaccaauauuacaguuug

SEQ ID NO: 685325 - RNA, 19 nt, Homo sapiens
  misc_RNA (1)...(19): siRNA sense strand
cuaaagaaggcuuaugaaa

SEQ ID NO: 685326 - RNA, 19 nt, Homo sapiens
  misc_RNA (1)...(19): siRNA sense strand
cagaagaacaaaccaagaa

SEQ ID NO: 685327 - RNA, 19 nt, Homo sapiens
  misc_RNA (1)...(19): siRNA sense strand
ucucaacucuucuacugaa

SEQ ID NO: 685328 - RNA, 19 nt, Homo sapiens
  misc_RNA (1)...(19): siRNA sense strand
caaagucaccugcaucauc

SEQ ID NO: 685329 - RNA, 19 nt, Homo sapiens
  misc_RNA (1)...(19): siRNA sense strand
uuacugacuuugccacuau

SEQ ID NO: 685330 - RNA, 19 nt, Homo sapiens
  misc_RNA (1)...(19): siRNA sense strand
ucaccugcaucaucauuug

SEQ ID NO: 685331 - RNA, 19 nt, Homo sapiens
  misc_RNA (1)...(19): siRNA sense strand
caagaugauugucccaaag

SEQ ID NO: 685332 - RNA, 19 nt, Homo sapiens
  misc_RNA (1)...(19): siRNA sense strand
cuacacagcuauggaauac

SEQ ID NO: 685333 - RNA, 19 nt, Homo sapiens
  misc_RNA (1)...(19): siRNA sense strand
auaugaagcugaagacugu

SEQ ID NO: 685334 - RNA, 19 nt, Homo sapiens
  misc_RNA (1)...(19): siRNA sense strand
gaaacagcuugguggugau

SEQ ID NO: 685335 - RNA, 19 nt, Homo sapiens
  misc_RNA (1)...(19): siRNA sense strand
aagcuggaaggcauaauua

SEQ ID NO: 685336 - RNA, 19 nt, Homo sapiens
  misc_RNA (1)...(19): siRNA sense strand
cagcuauaauccaucgaaa

SEQ ID NO: 685337 - RNA, 19 nt, Homo sapiens
  misc_RNA (1)...(19): siRNA sense strand
caugauuccuacuuuauac

SEQ ID NO: 685338 - RNA, 19 nt, Homo sapiens
  misc_RNA (1)...(19): siRNA sense strand
gaucgauaccuggcuauug

SEQ ID NO: 685339 - RNA, 19 nt, Homo sapiens
  misc_RNA (1)...(19): siRNA sense strand
ggaauaccgcuggcccuuu

SEQ ID NO: 685340 - RNA, 19 nt, Homo sapiens
  misc_RNA (1)...(19): siRNA sense strand
guaagcucauccaccaaga

SEQ ID NO: 685341 - RNA, 19 nt, Homo sapiens
  misc_RNA (1)...(19): siRNA sense strand
caguuugugcuuuccauua

SEQ ID NO: 685342 - RNA, 19 nt, Homo sapiens
  misc_RNA (1)...(19): siRNA sense strand
gcuggcccuuuggcaauua

SEQ ID NO: 685343 - RNA, 19 nt, Homo sapiens
  misc_RNA (1)...(19): siRNA sense strand
acuaugggcugucuacaca

SEQ ID NO: 685344 - RNA, 19 nt, Homo sapiens
  misc_RNA (1)...(19): siRNA sense strand
aaaucccacucaaaccuuu

SEQ ID NO: 685345 - RNA, 19 nt, Homo sapiens
  misc_RNA (1)...(19): siRNA sense strand
gcaauugugcuuuucuuuu

SEQ ID NO: 685346 - RNA, 19 nt, Homo sapiens
  misc_RNA (1)...(19): siRNA sense strand
aagaacaaaccaagaaaug

SEQ ID NO: 685347 - RNA, 19 nt, Homo sapiens
  misc_RNA (1)...(19): siRNA sense strand
ggaaggcauaauuacauau

SEQ ID NO: 685348 - RNA, 19 nt, Homo sapiens
  misc_RNA (1)...(19): siRNA sense strand
cuacugaagaugguauuaa

SEQ ID NO: 685349 - RNA, 19 nt, Homo sapiens
  misc_RNA (1)...(19): siRNA sense strand
gugggaauauuuggaaaca

SEQ ID NO: 685350 - RNA, 19 nt, Homo sapiens
  misc_RNA (1)...(19): siRNA sense strand
agaacaaaccaagaaauga

SEQ ID NO: 685351 - RNA, 19 nt, Homo sapiens
  misc_RNA (1)...(19): siRNA sense strand
gaaauucagaagaacaaac

SEQ ID NO: 685352 - RNA, 19 nt, Homo sapiens
  misc_RNA (1)...(19): siRNA sense strand
gacuguagaauugcagaua

SEQ ID NO: 685353 - RNA, 19 nt, Homo sapiens
  misc_RNA (1)...(19): siRNA sense strand
uggguuuccuguuuccuuu

SEQ ID NO: 685354 - RNA, 19 nt, Homo sapiens
  misc_RNA (1)...(19): siRNA sense strand
ccacucaaaccuuucaaca

SEQ ID NO: 685355 - RNA, 19 nt, Homo sapiens
  misc_RNA (1)...(19): siRNA sense strand
cuguagaauugcagauauu

SEQ ID NO: 685356 - RNA, 19 nt, Homo sapiens
  misc_RNA (1)...(19): siRNA sense strand
caccaaauauucacuuuuc

SEQ ID NO: 685357 - RNA, 19 nt, Homo sapiens
  misc_RNA (1)...(19): siRNA sense strand
aaagcuggaaggcauaauu

SEQ ID NO: 685358 - RNA, 19 nt, Homo sapiens
  misc_RNA (1)...(19): siRNA sense strand
ugagaacaccaauauuaca

SEQ ID NO: 685359 - RNA, 19 nt, Homo sapiens
  misc_RNA (1)...(19): siRNA sense strand
cagauaauguaagcucauc

SEQ ID NO: 685360 - RNA, 19 nt, Homo sapiens
  misc_RNA (1)...(19): siRNA sense strand
caaaucccacucaaaccuu

SEQ ID NO: 685361 - RNA, 19 nt, Homo sapiens
  misc_RNA (1)...(19): siRNA sense strand
agaagaacaaaccaagaaa

SEQ ID NO: 685362 - RNA, 19 nt, Homo sapiens
  misc_RNA (1)...(19): siRNA sense strand
uauuacaguuugugcuuuc

SEQ ID NO: 685363 - RNA, 19 nt, Homo sapiens
  misc_RNA (1)...(19): siRNA sense strand
gagaacaccaauauuacag

SEQ ID NO: 685364 - RNA, 19 nt, Homo sapiens
  misc_RNA (1)...(19): siRNA sense strand
guacgcuaguguguuucua

SEQ ID NO: 685365 - RNA, 19 nt, Homo sapiens
  misc_RNA (1)...(19): siRNA sense strand
gccaaagucaccugcauca

SEQ ID NO: 685366 - RNA, 19 nt, Homo sapiens
  misc_RNA (1)...(19): siRNA sense strand
ugguggugauagucauuua

SEQ ID NO: 685367 - RNA, 19 nt, Homo sapiens
  misc_RNA (1)...(19): siRNA sense strand
uagaauugcagauauugug

SEQ ID NO: 685368 - RNA, 19 nt, Homo sapiens
  misc_RNA (1)...(19): siRNA sense strand
acuguagaauugcagauau

SEQ ID NO: 685369 - RNA, 19 nt, Homo sapiens
  misc_RNA (1)...(19): siRNA sense strand
gauucaacuaggcaucaua

SEQ ID NO: 685370 - RNA, 19 nt, Homo sapiens
  misc_RNA (1)...(19): siRNA sense strand
gcuggaaggcauaauuaca

SEQ ID NO: 685371 - RNA, 19 nt, Homo sapiens
  misc_RNA (1)...(19): siRNA sense strand
aaacagcuugguggugaua

SEQ ID NO: 685372 - RNA, 19 nt, Homo sapiens
  misc_RNA (1)...(19): siRNA sense strand
auacuggguuuccuguuuc

SEQ ID NO: 685373 - RNA, 19 nt, Homo sapiens
  misc_RNA (1)...(19): siRNA sense strand
ccaaagcuggaaggcauaa

SEQ ID NO: 685374 - RNA, 19 nt, Homo sapiens
  misc_RNA (1)...(19): siRNA sense strand
cccaccaaauauucacuuu

SEQ ID NO: 685375 - RNA, 19 nt, Homo sapiens
  misc_RNA (1)...(19): siRNA sense strand
ucagaagaacaaaccaaga

SEQ ID NO: 685376 - RNA, 19 nt, Homo sapiens
  misc_RNA (1)...(19): siRNA sense strand
cauuaugagucccaaaauu

SEQ ID NO: 685377 - RNA, 19 nt, Homo sapiens
  misc_RNA (1)...(19): siRNA sense strand
aguuugugcuuuccauuau

SEQ ID NO: 685378 - RNA, 19 nt, Homo sapiens
  misc_RNA (1)...(19): siRNA sense strand
cauacgugacuguagaauu

SEQ ID NO: 685379 - RNA, 19 nt, Homo sapiens
  misc_RNA (1)...(19): siRNA sense strand
ucacuuuucuggauguauu

SEQ ID NO: 685380 - RNA, 19 nt, Homo sapiens
  misc_RNA (1)...(19): siRNA sense strand
cccuaaagaaggcuuauga

SEQ ID NO: 685381 - RNA, 19 nt, Homo sapiens
  misc_RNA (1)...(19): siRNA sense strand
uuugugcuuuccauuauga

SEQ ID NO: 685382 - RNA, 19 nt, Homo sapiens
  misc_RNA (1)...(19): siRNA sense strand
ucuacacagcuauggaaua

SEQ ID NO: 685383 - RNA, 19 nt, Homo sapiens
  misc_RNA (1)...(19): siRNA sense strand
gauaauguaagcucaucca

SEQ ID NO: 685384 - RNA, 19 nt, Homo sapiens
  misc_RNA (1)...(19): siRNA sense strand
ccuaaagaaggcuuaugaa

SEQ ID NO: 685385 - RNA, 19 nt, Homo sapiens
  misc_RNA (1)...(19): siRNA sense strand
ccaguuugccagcuauaau

SEQ ID NO: 685386 - RNA, 19 nt, Homo sapiens
  misc_RNA (1)...(19): siRNA sense strand
gucaugauuccuacuuuau

SEQ ID NO: 685387 - RNA, 19 nt, Homo sapiens
  misc_RNA (1)...(19): siRNA sense strand
auucucaacucuucuacug

SEQ ID NO: 685388 - RNA, 19 nt, Homo sapiens
  misc_RNA (1)...(19): siRNA sense strand
guagaauugcagauauugu

SEQ ID NO: 685389 - RNA, 19 nt, Homo sapiens
  misc_RNA (1)...(19): siRNA sense strand
ccagcuauaauccaucgaa

SEQ ID NO: 685390 - RNA, 19 nt, Homo sapiens
  misc_RNA (1)...(19): siRNA sense strand
aucgauaccuggcuauugu

SEQ ID NO: 685391 - RNA, 19 nt, Homo sapiens
  misc_RNA (1)...(19): siRNA sense strand
acucacgugucucagcauu

SEQ ID NO: 685392 - RNA, 19 nt, Homo sapiens
  misc_RNA (1)...(19): siRNA sense strand
aagaaggcuuaugaaauuc

SEQ ID NO: 685393 - RNA, 19 nt, Homo sapiens
  misc_RNA (1)...(19): siRNA sense strand
ucucagcauugaucgauac

SEQ ID NO: 685394 - RNA, 19 nt, Homo sapiens
  misc_RNA (1)...(19): siRNA sense strand
uagccaaagucaccugcau

SEQ ID NO: 685395 - RNA, 19 nt, Homo sapiens
  misc_RNA (1)...(19): siRNA sense strand
gaauauuuggaaacagcuu

SEQ ID NO: 685396 - RNA, 19 nt, Homo sapiens
  misc_RNA (1)...(19): siRNA sense strand
uuuggaaggcccuaaagaa

SEQ ID NO: 685397 - RNA, 19 nt, Homo sapiens
  misc_RNA (1)...(19): siRNA sense strand
gggcugggccugaccaaaa

SEQ ID NO: 685398 - RNA, 19 nt, Homo sapiens
  misc_RNA (1)...(19): siRNA sense strand
gauuccuacuuuauacagu

SEQ ID NO: 685399 - RNA, 19 nt, Homo sapiens
  misc_RNA (1)...(19): siRNA sense strand
uaagcucauccaccaagaa

SEQ ID NO: 685400 - RNA, 19 nt, Homo sapiens
  misc_RNA (1)...(19): siRNA sense strand
ccaaaucccacucaaaccu

SEQ ID NO: 685401 - RNA, 19 nt, Homo sapiens
  misc_RNA (1)...(19): siRNA sense strand
uuuaacaauugccugaauc

SEQ ID NO: 685402 - RNA, 19 nt, Homo sapiens
  misc_RNA (1)...(19): siRNA sense strand
acaaaccaagaaaugauga

SEQ ID NO: 685403 - RNA, 19 nt, Homo sapiens
  misc_RNA (1)...(19): siRNA sense strand
ucugaucauucuuacaagu

SEQ ID NO: 685404 - RNA, 19 nt, Homo sapiens
  misc_RNA (1)...(19): siRNA sense strand
gcgucaguuucaaccugua

SEQ ID NO: 685405 - RNA, 19 nt, Homo sapiens
  misc_RNA (1)...(19): siRNA sense strand
guuugugcuuuccauuaug

SEQ ID NO: 685406 - RNA, 19 nt, Homo sapiens
  misc_RNA (1)...(19): siRNA sense strand
gaacaccaauauuacaguu

SEQ ID NO: 685407 - RNA, 19 nt, Homo sapiens
  misc_RNA (1)...(19): siRNA sense strand
gaauaccgcuggcccuuug

SEQ ID NO: 685408 - RNA, 19 nt, Homo sapiens
  misc_RNA (1)...(19): siRNA sense strand
acucaaaccuuucaacaaa

SEQ ID NO: 685409 - RNA, 19 nt, Homo sapiens
  misc_RNA (1)...(19): siRNA sense strand
gaacaaaccaagaaaugau

SEQ ID NO: 685410 - RNA, 19 nt, Homo sapiens
  misc_RNA (1)...(19): siRNA sense strand
auacgugacuguagaauug

SEQ ID NO: 685411 - RNA, 19 nt, Homo sapiens
  misc_RNA (1)...(19): siRNA sense strand
caucauacgugacuguaga

SEQ ID NO: 685412 - RNA, 19 nt, Homo sapiens
  misc_RNA (1)...(19): siRNA sense strand
ccaagaugauugucccaaa

SEQ ID NO: 685413 - RNA, 19 nt, Homo sapiens
  misc_RNA (1)...(19): siRNA sense strand
uauacuggguuuccuguuu

SEQ ID NO: 685414 - RNA, 19 nt, Homo sapiens
  misc_RNA (1)...(19): siRNA sense strand
gcuauaauccaucgaaaug

SEQ ID NO: 685415 - RNA, 19 nt, Homo sapiens
  misc_RNA (1)...(19): siRNA sense strand
ugucaugauuccuacuuua

SEQ ID NO: 685416 - RNA, 19 nt, Homo sapiens
  misc_RNA (1)...(19): siRNA sense strand
gaagaacaaaccaagaaau

SEQ ID NO: 685417 - RNA, 19 nt, Homo sapiens
  misc_RNA (1)...(19): siRNA sense strand
aaagucaccugcaucauca

SEQ ID NO: 685418 - RNA, 19 nt, Homo sapiens
  misc_RNA (1)...(19): siRNA sense strand
ggugauagucauuuacuuu

SEQ ID NO: 685419 - RNA, 19 nt, Homo sapiens
  misc_RNA (1)...(19): siRNA sense strand
uggaaggcauaauuacaua

SEQ ID NO: 685420 - RNA, 19 nt, Homo sapiens
  misc_RNA (1)...(19): siRNA sense strand
gcuaguguguuucuacuca

SEQ ID NO: 685421 - RNA, 19 nt, Homo sapiens
  misc_RNA (1)...(19): siRNA sense strand
ccuguacgcuaguguguuu

SEQ ID NO: 685422 - RNA, 19 nt, Homo sapiens
  misc_RNA (1)...(19): siRNA sense strand
ucacgugucucagcauuga

SEQ ID NO: 685423 - RNA, 19 nt, Homo sapiens
  misc_RNA (1)...(19): siRNA sense strand
acaccaauauuacaguuug

SEQ ID NO: 685424 - RNA, 19 nt, Homo sapiens
  misc_RNA (1)...(19): siRNA sense strand
cuaaagaaggcuuaugaaa

SEQ ID NO: 685425 - RNA, 19 nt, Homo sapiens
  misc_RNA (1)...(19): siRNA sense strand
cagaagaacaaaccaagaa

SEQ ID NO: 685426 - RNA, 19 nt, Homo sapiens
  misc_RNA (1)...(19): siRNA sense strand
ucucaacucuucuacugaa

SEQ ID NO: 685427 - RNA, 19 nt, Homo sapiens
  misc_RNA (1)...(19): siRNA sense strand
caaagucaccugcaucauc

SEQ ID NO: 685428 - RNA, 19 nt, Homo sapiens
  misc_RNA (1)...(19): siRNA sense strand
uuacugacuuugccacuau

SEQ ID NO: 685429 - RNA, 19 nt, Homo sapiens
  misc_RNA (1)...(19): siRNA sense strand
ucaccugcaucaucauuug

SEQ ID NO: 685430 - RNA, 19 nt, Homo sapiens
  misc_RNA (1)...(19): siRNA sense strand
caagaugauugucccaaag

SEQ ID NO: 685431 - RNA, 19 nt, Homo sapiens
  misc_RNA (1)...(19): siRNA sense strand
cuacacagcuauggaauac

SEQ ID NO: 685432 - RNA, 19 nt, Homo sapiens
  misc_RNA (1)...(19): siRNA sense strand
auaugaagcugaagacugu

SEQ ID NO: 685433 - RNA, 19 nt, Homo sapiens
  misc_RNA (1)...(19): siRNA sense strand
gaaacagcuugguggugau

SEQ ID NO: 685434 - RNA, 19 nt, Homo sapiens
  misc_RNA (1)...(19): siRNA sense strand
aagcuggaaggcauaauua

SEQ ID NO: 685435 - RNA, 19 nt, Homo sapiens
  misc_RNA (1)...(19): siRNA sense strand
cagcuauaauccaucgaaa

SEQ ID NO: 685436 - RNA, 19 nt, Homo sapiens
  misc_RNA (1)...(19): siRNA sense strand
caugauuccuacuuuauac

SEQ ID NO: 685437 - RNA, 19 nt, Homo sapiens
  misc_RNA (1)...(19): siRNA sense strand
gaucgauaccuggcuauug

SEQ ID NO: 685438 - RNA, 19 nt, Homo sapiens
  misc_RNA (1)...(19): siRNA sense strand
ggaauaccgcuggcccuuu

SEQ ID NO: 685439 - RNA, 19 nt, Homo sapiens
  misc_RNA (1)...(19): siRNA sense strand
guaagcucauccaccaaga

SEQ ID NO: 685440 - RNA, 19 nt, Homo sapiens
  misc_RNA (1)...(19): siRNA sense strand
caguuugugcuuuccauua

SEQ ID NO: 685441 - RNA, 19 nt, Homo sapiens
  misc_RNA (1)...(19): siRNA sense strand
gcuggcccuuuggcaauua

SEQ ID NO: 685442 - RNA, 19 nt, Homo sapiens
  misc_RNA (1)...(19): siRNA sense strand
acuaugggcugucuacaca

SEQ ID NO: 685443 - RNA, 19 nt, Homo sapiens
  misc_RNA (1)...(19): siRNA sense strand
aaaucccacucaaaccuuu

SEQ ID NO: 685444 - RNA, 19 nt, Homo sapiens
  misc_RNA (1)...(19): siRNA sense strand
gcaauugugcuuuucuuuu

SEQ ID NO: 685445 - RNA, 19 nt, Homo sapiens
  misc_RNA (1)...(19): siRNA sense strand
aagaacaaaccaagaaaug

SEQ ID NO: 685446 - RNA, 19 nt, Homo sapiens
  misc_RNA (1)...(19): siRNA sense strand
ggaaggcauaauuacauau

SEQ ID NO: 685447 - RNA, 19 nt, Homo sapiens
  misc_RNA (1)...(19): siRNA sense strand
cuacugaagaugguauuaa

SEQ ID NO: 685448 - RNA, 19 nt, Homo sapiens
  misc_RNA (1)...(19): siRNA sense strand
gugggaauauuuggaaaca

SEQ ID NO: 685449 - RNA, 19 nt, Homo sapiens
  misc_RNA (1)...(19): siRNA sense strand
agaacaaaccaagaaauga

SEQ ID NO: 685450 - RNA, 19 nt, Homo sapiens
  misc_RNA (1)...(19): siRNA sense strand
gaaauucagaagaacaaac

SEQ ID NO: 685451 - RNA, 19 nt, Homo sapiens
  misc_RNA (1)...(19): siRNA sense strand
gacuguagaauugcagaua

SEQ ID NO: 685452 - RNA, 19 nt, Homo sapiens
  misc_RNA (1)...(19): siRNA sense strand
uggguuuccuguuuccuuu

SEQ ID NO: 685453 - RNA, 19 nt, Homo sapiens
  misc_RNA (1)...(19): siRNA sense strand
ccacucaaaccuuucaaca

SEQ ID NO: 685454 - RNA, 19 nt, Homo sapiens
  misc_RNA (1)...(19): siRNA sense strand
cuguagaauugcagauauu

SEQ ID NO: 685455 - RNA, 19 nt, Homo sapiens
  misc_RNA (1)...(19): siRNA sense strand
caccaaauauucacuuuuc

SEQ ID NO: 685456 - RNA, 19 nt, Homo sapiens
  misc_RNA (1)...(19): siRNA sense strand
aaagcuggaaggcauaauu

SEQ ID NO: 685457 - RNA, 19 nt, Homo sapiens
  misc_RNA (1)...(19): siRNA sense strand
ugagaacaccaauauuaca

SEQ ID NO: 685458 - RNA, 19 nt, Homo sapiens
  misc_RNA (1)...(19): siRNA sense strand
cagauaauguaagcucauc

SEQ ID NO: 685459 - RNA, 19 nt, Homo sapiens
  misc_RNA (1)...(19): siRNA sense strand
caaaucccacucaaaccuu

SEQ ID NO: 685460 - RNA, 19 nt, Homo sapiens
  misc_RNA (1)...(19): siRNA sense strand
agaagaacaaaccaagaaa

SEQ ID NO: 685461 - RNA, 19 nt, Homo sapiens
  misc_RNA (1)...(19): siRNA sense strand
uauuacaguuugugcuuuc

SEQ ID NO: 685462 - RNA, 19 nt, Homo sapiens
  misc_RNA (1)...(19): siRNA sense strand
gagaacaccaauauuacag

SEQ ID NO: 685463 - RNA, 19 nt, Homo sapiens
  misc_RNA (1)...(19): siRNA sense strand
guacgcuaguguguuucua

SEQ ID NO: 685464 - RNA, 19 nt, Homo sapiens
  misc_RNA (1)...(19): siRNA sense strand
gccaaagucaccugcauca

SEQ ID NO: 685465 - RNA, 19 nt, Homo sapiens
  misc_RNA (1)...(19): siRNA sense strand
ugguggugauagucauuua

SEQ ID NO: 685466 - RNA, 19 nt, Homo sapiens
  misc_RNA (1)...(19): siRNA sense strand
uagaauugcagauauugug

SEQ ID NO: 685467 - RNA, 19 nt, Homo sapiens
  misc_RNA (1)...(19): siRNA sense strand
acuguagaauugcagauau

SEQ ID NO: 685468 - RNA, 19 nt, Homo sapiens
  misc_RNA (1)...(19): siRNA sense strand
gauucaacuaggcaucaua

SEQ ID NO: 685469 - RNA, 19 nt, Homo sapiens
  misc_RNA (1)...(19): siRNA sense strand
gcuggaaggcauaauuaca

SEQ ID NO: 685470 - RNA, 19 nt, Homo sapiens
  misc_RNA (1)...(19): siRNA sense strand
aaacagcuugguggugaua

SEQ ID NO: 685471 - RNA, 19 nt, Homo sapiens
  misc_RNA (1)...(19): siRNA sense strand
auacuggguuuccuguuuc

SEQ ID NO: 685472 - RNA, 19 nt, Homo sapiens
  misc_RNA (1)...(19): siRNA sense strand
ccaaagcuggaaggcauaa

SEQ ID NO: 685473 - RNA, 19 nt, Homo sapiens
  misc_RNA (1)...(19): siRNA sense strand
cccaccaaauauucacuuu

SEQ ID NO: 685474 - RNA, 19 nt, Homo sapiens
  misc_RNA (1)...(19): siRNA sense strand
ucagaagaacaaaccaaga

SEQ ID NO: 685475 - RNA, 19 nt, Homo sapiens
  misc_RNA (1)...(19): siRNA sense strand
cauuaugagucccaaaauu

SEQ ID NO: 685476 - RNA, 19 nt, Homo sapiens
  misc_RNA (1)...(19): siRNA sense strand
aguuugugcuuuccauuau

SEQ ID NO: 685477 - RNA, 19 nt, Homo sapiens
  misc_RNA (1)...(19): siRNA sense strand
cauacgugacuguagaauu

SEQ ID NO: 685478 - RNA, 19 nt, Homo sapiens
  misc_RNA (1)...(19): siRNA sense strand
ucacuuuucuggauguauu

SEQ ID NO: 685479 - RNA, 19 nt, Homo sapiens
  misc_RNA (1)...(19): siRNA sense strand
cccuaaagaaggcuuauga

SEQ ID NO: 685480 - RNA, 19 nt, Homo sapiens
  misc_RNA (1)...(19): siRNA sense strand
uuugugcuuuccauuauga

SEQ ID NO: 685481 - RNA, 19 nt, Homo sapiens
  misc_RNA (1)...(19): siRNA sense strand
ucuacacagcuauggaaua

SEQ ID NO: 685482 - RNA, 19 nt, Homo sapiens
  misc_RNA (1)...(19): siRNA sense strand
gauaauguaagcucaucca

SEQ ID NO: 685483 - RNA, 19 nt, Homo sapiens
  misc_RNA (1)...(19): siRNA sense strand
ccuaaagaaggcuuaugaa

SEQ ID NO: 685484 - RNA, 19 nt, Homo sapiens
  misc_RNA (1)...(19): siRNA sense strand
ccaguuugccagcuauaau

SEQ ID NO: 685485 - RNA, 19 nt, Homo sapiens
  misc_RNA (1)...(19): siRNA sense strand
gucaugauuccuacuuuau

SEQ ID NO: 685486 - RNA, 19 nt, Homo sapiens
  misc_RNA (1)...(19): siRNA sense strand
auucucaacucuucuacug

SEQ ID NO: 685487 - RNA, 19 nt, Homo sapiens
  misc_RNA (1)...(19): siRNA sense strand
guagaauugcagauauugu

SEQ ID NO: 685488 - RNA, 19 nt, Homo sapiens
  misc_RNA (1)...(19): siRNA sense strand
ccagcuauaauccaucgaa

SEQ ID NO: 685489 - RNA, 19 nt, Homo sapiens
  misc_RNA (1)...(19): siRNA sense strand
aucgauaccuggcuauugu

SEQ ID NO: 685490 - RNA, 19 nt, Homo sapiens
  misc_RNA (1)...(19): siRNA sense strand
acucacgugucucagcauu

SEQ ID NO: 685491 - RNA, 19 nt, Homo sapiens
  misc_RNA (1)...(19): siRNA sense strand
aagaaggcuuaugaaauuc

SEQ ID NO: 685492 - RNA, 19 nt, Homo sapiens
  misc_RNA (1)...(19): siRNA sense strand
ucucagcauugaucgauac

SEQ ID NO: 685493 - RNA, 19 nt, Homo sapiens
  misc_RNA (1)...(19): siRNA sense strand
uagccaaagucaccugcau

SEQ ID NO: 685494 - RNA, 19 nt, Homo sapiens
  misc_RNA (1)...(19): siRNA sense strand
gaauauuuggaaacagcuu

SEQ ID NO: 685495 - RNA, 19 nt, Homo sapiens
  misc_RNA (1)...(19): siRNA sense strand
uuuggaaggcccuaaagaa

SEQ ID NO: 685496 - RNA, 19 nt, Homo sapiens
  misc_RNA (1)...(19): siRNA sense strand
gggcugggccugaccaaaa

SEQ ID NO: 685497 - RNA, 19 nt, Homo sapiens
  misc_RNA (1)...(19): siRNA sense strand
gauuccuacuuuauacagu

SEQ ID NO: 685498 - RNA, 19 nt, Homo sapiens
  misc_RNA (1)...(19): siRNA sense strand
uaagcucauccaccaagaa

SEQ ID NO: 685499 - RNA, 19 nt, Homo sapiens
  misc_RNA (1)...(19): siRNA sense strand
ccaaaucccacucaaaccu

SEQ ID NO: 685500 - RNA, 19 nt, Homo sapiens
  misc_RNA (1)...(19): siRNA sense strand
uuuaacaauugccugaauc

SEQ ID NO: 685501 - RNA, 19 nt, Homo sapiens
  misc_RNA (1)...(19): siRNA sense strand
acaaaccaagaaaugauga

SEQ ID NO: 685502 - RNA, 19 nt, Homo sapiens
  misc_RNA (1)...(19): siRNA sense strand
ucugaucauucuuacaagu

SEQ ID NO: 685503 - RNA, 19 nt, Homo sapiens
  misc_RNA (1)...(19): siRNA sense strand
gcgucaguuucaaccugua

SEQ ID NO: 685504 - RNA, 19 nt, Homo sapiens
  misc_RNA (1)...(19): siRNA sense strand
guuugugcuuuccauuaug

SEQ ID NO: 685505 - RNA, 19 nt, Homo sapiens
  misc_RNA (1)...(19): siRNA sense strand
gcacggagaugcugcacaa

SEQ ID NO: 685506 - RNA, 19 nt, Homo sapiens
  misc_RNA (1)...(19): siRNA sense strand
gcagguggcuugugagauc

SEQ ID NO: 685507 - RNA, 19 nt, Homo sapiens
  misc_RNA (1)...(19): siRNA sense strand
ggcaagaucuuccgugaug

SEQ ID NO: 685508 - RNA, 19 nt, Homo sapiens
  misc_RNA (1)...(19): siRNA sense strand
gaucuuccgugauguguau

SEQ ID NO: 685509 - RNA, 19 nt, Homo sapiens
  misc_RNA (1)...(19): siRNA sense strand
gugguaagguguucacuga

SEQ ID NO: 685510 - RNA, 19 nt, Homo sapiens
  misc_RNA (1)...(19): siRNA sense strand
gguaagguguucacugaug

SEQ ID NO: 685511 - RNA, 19 nt, Homo sapiens
  misc_RNA (1)...(19): siRNA sense strand
ggacuugggcuucccuuug

SEQ ID NO: 685512 - RNA, 19 nt, Homo sapiens
  misc_RNA (1)...(19): siRNA sense strand
ucaagcaggugcacacuuc

SEQ ID NO: 685513 - RNA, 19 nt, Homo sapiens
  misc_RNA (1)...(19): siRNA sense strand
gaaaagaccgcauguccua

SEQ ID NO: 685514 - RNA, 19 nt, Homo sapiens
  misc_RNA (1)...(19): siRNA sense strand
gccaggaagucaucaaaca

SEQ ID NO: 685515 - RNA, 19 nt, Homo sapiens
  misc_RNA (1)...(19): siRNA sense strand
caucaaacaguccaacgua

SEQ ID NO: 685516 - RNA, 19 nt, Homo sapiens
  misc_RNA (1)...(19): siRNA sense strand
caacguacagauccuggua

SEQ ID NO: 685517 - RNA, 19 nt, Homo sapiens
  misc_RNA (1)...(19): siRNA sense strand
acuaucagcuccaagguau

SEQ ID NO: 685518 - RNA, 19 nt, Homo sapiens
  misc_RNA (1)...(19): siRNA sense strand
gggcuucccuuuggacaug

SEQ ID NO: 685519 - RNA, 19 nt, Homo sapiens
  misc_RNA (1)...(19): siRNA sense strand
ggagagcuuucccgaacuc

SEQ ID NO: 685520 - RNA, 19 nt, Homo sapiens
  misc_RNA (1)...(19): siRNA sense strand
ggguugcgguucaagagaa

SEQ ID NO: 685521 - RNA, 19 nt, Homo sapiens
  misc_RNA (1)...(19): siRNA sense strand
uaucagcuccaagguauuu

SEQ ID NO: 685522 - RNA, 19 nt, Homo sapiens
  misc_RNA (1)...(19): siRNA sense strand
ugaggucgguuaucgagau

SEQ ID NO: 685523 - RNA, 19 nt, Homo sapiens
  misc_RNA (1)...(19): siRNA sense strand
gagcuuucccgaacucaug

SEQ ID NO: 685524 - RNA, 19 nt, Homo sapiens
  misc_RNA (1)...(19): siRNA sense strand
cugcuggacucaauguuug

SEQ ID NO: 685525 - RNA, 19 nt, Homo sapiens
  misc_RNA (1)...(19): siRNA sense strand
gacuugggcuucccuuugg

SEQ ID NO: 685526 - RNA, 19 nt, Homo sapiens
  misc_RNA (1)...(19): siRNA sense strand
cuccaggccugaucacuug

SEQ ID NO: 685527 - RNA, 19 nt, Homo sapiens
  misc_RNA (1)...(19): siRNA sense strand
ccaaccugcuggacucaau

SEQ ID NO: 685528 - RNA, 19 nt, Homo sapiens
  misc_RNA (1)...(19): siRNA sense strand
gccaaguuccugcugauga

SEQ ID NO: 685529 - RNA, 19 nt, Homo sapiens
  misc_RNA (1)...(19): siRNA sense strand
ugugagaucugcggcaaga

SEQ ID NO: 685530 - RNA, 19 nt, Homo sapiens
  misc_RNA (1)...(19): siRNA sense strand
ccaaguuccugcugaugag

SEQ ID NO: 685531 - RNA, 19 nt, Homo sapiens
  misc_RNA (1)...(19): siRNA sense strand
gagcuggagaugcacacua

SEQ ID NO: 685532 - RNA, 19 nt, Homo sapiens
  misc_RNA (1)...(19): siRNA sense strand
gcaagaucuuccgugaugu

SEQ ID NO: 685533 - RNA, 19 nt, Homo sapiens
  misc_RNA (1)...(19): siRNA sense strand
gguugcgguucaagagaaa

SEQ ID NO: 685534 - RNA, 19 nt, Homo sapiens
  misc_RNA (1)...(19): siRNA sense strand
gcgccgauauaaugcucuu

SEQ ID NO: 685535 - RNA, 19 nt, Homo sapiens
  misc_RNA (1)...(19): siRNA sense strand
ugccagagcugugggaaag

SEQ ID NO: 685536 - RNA, 19 nt, Homo sapiens
  misc_RNA (1)...(19): siRNA sense strand
caagaucuuccgugaugug

SEQ ID NO: 685537 - RNA, 19 nt, Homo sapiens
  misc_RNA (1)...(19): siRNA sense strand
gagggaggcaggcauccuu

SEQ ID NO: 685538 - RNA, 19 nt, Homo sapiens
  misc_RNA (1)...(19): siRNA sense strand
gcagacacagcacggagau

SEQ ID NO: 685539 - RNA, 19 nt, Homo sapiens
  misc_RNA (1)...(19): siRNA sense strand
ucaaacaguccaacguaca

SEQ ID NO: 685540 - RNA, 19 nt, Homo sapiens
  misc_RNA (1)...(19): siRNA sense strand
gcacaagcugucccacucu

SEQ ID NO: 685541 - RNA, 19 nt, Homo sapiens
  misc_RNA (1)...(19): siRNA sense strand
ucacuugaacggacauauc

SEQ ID NO: 685542 - RNA, 19 nt, Homo sapiens
  misc_RNA (1)...(19): siRNA sense strand
cugcugaugaggucgguua

SEQ ID NO: 685543 - RNA, 19 nt, Homo sapiens
  misc_RNA (1)...(19): siRNA sense strand
gguguucagcgcccaguug

SEQ ID NO: 685544 - RNA, 19 nt, Homo sapiens
  misc_RNA (1)...(19): siRNA sense strand
gaucugccaggaagucauc

SEQ ID NO: 685545 - RNA, 19 nt, Homo sapiens
  misc_RNA (1)...(19): siRNA sense strand
ggucgguuaucgagaucug

SEQ ID NO: 685546 - RNA, 19 nt, Homo sapiens
  misc_RNA (1)...(19): siRNA sense strand
gaggucgguuaucgagauc

SEQ ID NO: 685547 - RNA, 19 nt, Homo sapiens
  misc_RNA (1)...(19): siRNA sense strand
caugcggucuaugugguaa

SEQ ID NO: 685548 - RNA, 19 nt, Homo sapiens
  misc_RNA (1)...(19): siRNA sense strand
ccugcuggacucaauguuu

SEQ ID NO: 685549 - RNA, 19 nt, Homo sapiens
  misc_RNA (1)...(19): siRNA sense strand
caagguauuuggggacauu

SEQ ID NO: 685550 - RNA, 19 nt, Homo sapiens
  misc_RNA (1)...(19): siRNA sense strand
gguccgugggcaagccuua

SEQ ID NO: 685551 - RNA, 19 nt, Homo sapiens
  misc_RNA (1)...(19): siRNA sense strand
caggaagucaucaaacagu

SEQ ID NO: 685552 - RNA, 19 nt, Homo sapiens
  misc_RNA (1)...(19): siRNA sense strand
gccgauauaaugcucuuuc

SEQ ID NO: 685553 - RNA, 19 nt, Homo sapiens
  misc_RNA (1)...(19): siRNA sense strand
ggcuacccaucucugaaga

SEQ ID NO: 685554 - RNA, 19 nt, Homo sapiens
  misc_RNA (1)...(19): siRNA sense strand
gggcuacccaucucugaag

SEQ ID NO: 685555 - RNA, 19 nt, Homo sapiens
  misc_RNA (1)...(19): siRNA sense strand
cauaccaggugagcagaca

SEQ ID NO: 685556 - RNA, 19 nt, Homo sapiens
  misc_RNA (1)...(19): siRNA sense strand
cacuugaacggacauauca

SEQ ID NO: 685557 - RNA, 19 nt, Homo sapiens
  misc_RNA (1)...(19): siRNA sense strand
gcacggagaugcugcacaa

SEQ ID NO: 685558 - RNA, 19 nt, Homo sapiens
  misc_RNA (1)...(19): siRNA sense strand
gcagguggcuugugagauc

SEQ ID NO: 685559 - RNA, 19 nt, Homo sapiens
  misc_RNA (1)...(19): siRNA sense strand
ggcaagaucuuccgugaug

SEQ ID NO: 685560 - RNA, 19 nt, Homo sapiens
  misc_RNA (1)...(19): siRNA sense strand
gaucuuccgugauguguau

SEQ ID NO: 685561 - RNA, 19 nt, Homo sapiens
  misc_RNA (1)...(19): siRNA sense strand
gugguaagguguucacuga

SEQ ID NO: 685562 - RNA, 19 nt, Homo sapiens
  misc_RNA (1)...(19): siRNA sense strand
gguaagguguucacugaug

SEQ ID NO: 685563 - RNA, 19 nt, Homo sapiens
  misc_RNA (1)...(19): siRNA sense strand
ggacuugggcuucccuuug

SEQ ID NO: 685564 - RNA, 19 nt, Homo sapiens
  misc_RNA (1)...(19): siRNA sense strand
ucaagcaggugcacacuuc

SEQ ID NO: 685565 - RNA, 19 nt, Homo sapiens
  misc_RNA (1)...(19): siRNA sense strand
gaaaagaccgcauguccua

SEQ ID NO: 685566 - RNA, 19 nt, Homo sapiens
  misc_RNA (1)...(19): siRNA sense strand
gccaggaagucaucaaaca

SEQ ID NO: 685567 - RNA, 19 nt, Homo sapiens
  misc_RNA (1)...(19): siRNA sense strand
caucaaacaguccaacgua

SEQ ID NO: 685568 - RNA, 19 nt, Homo sapiens
  misc_RNA (1)...(19): siRNA sense strand
caacguacagauccuggua

SEQ ID NO: 685569 - RNA, 19 nt, Homo sapiens
  misc_RNA (1)...(19): siRNA sense strand
acuaucagcuccaagguau

SEQ ID NO: 685570 - RNA, 19 nt, Homo sapiens
  misc_RNA (1)...(19): siRNA sense strand
gggcuucccuuuggacaug

SEQ ID NO: 685571 - RNA, 19 nt, Homo sapiens
  misc_RNA (1)...(19): siRNA sense strand
ggagagcuuucccgaacuc

SEQ ID NO: 685572 - RNA, 19 nt, Homo sapiens
  misc_RNA (1)...(19): siRNA sense strand
ggguugcgguucaagagaa

SEQ ID NO: 685573 - RNA, 19 nt, Homo sapiens
  misc_RNA (1)...(19): siRNA sense strand
uaucagcuccaagguauuu

SEQ ID NO: 685574 - RNA, 19 nt, Homo sapiens
  misc_RNA (1)...(19): siRNA sense strand
ugaggucgguuaucgagau

SEQ ID NO: 685575 - RNA, 19 nt, Homo sapiens
  misc_RNA (1)...(19): siRNA sense strand
gagcuuucccgaacucaug

SEQ ID NO: 685576 - RNA, 19 nt, Homo sapiens
  misc_RNA (1)...(19): siRNA sense strand
cugcuggacucaauguuug

SEQ ID NO: 685577 - RNA, 19 nt, Homo sapiens
  misc_RNA (1)...(19): siRNA sense strand
gacuugggcuucccuuugg

SEQ ID NO: 685578 - RNA, 19 nt, Homo sapiens
  misc_RNA (1)...(19): siRNA sense strand
cuccaggccugaucacuug

SEQ ID NO: 685579 - RNA, 19 nt, Homo sapiens
  misc_RNA (1)...(19): siRNA sense strand
ccaaccugcuggacucaau

SEQ ID NO: 685580 - RNA, 19 nt, Homo sapiens
  misc_RNA (1)...(19): siRNA sense strand
gccaaguuccugcugauga

SEQ ID NO: 685581 - RNA, 19 nt, Homo sapiens
  misc_RNA (1)...(19): siRNA sense strand
ugugagaucugcggcaaga

SEQ ID NO: 685582 - RNA, 19 nt, Homo sapiens
  misc_RNA (1)...(19): siRNA sense strand
ccaaguuccugcugaugag

SEQ ID NO: 685583 - RNA, 19 nt, Homo sapiens
  misc_RNA (1)...(19): siRNA sense strand
gagcuggagaugcacacua

SEQ ID NO: 685584 - RNA, 19 nt, Homo sapiens
  misc_RNA (1)...(19): siRNA sense strand
gcaagaucuuccgugaugu

SEQ ID NO: 685585 - RNA, 19 nt, Homo sapiens
  misc_RNA (1)...(19): siRNA sense strand
gguugcgguucaagagaaa

SEQ ID NO: 685586 - RNA, 19 nt, Homo sapiens
  misc_RNA (1)...(19): siRNA sense strand
gcgccgauauaaugcucuu

SEQ ID NO: 685587 - RNA, 19 nt, Homo sapiens
  misc_RNA (1)...(19): siRNA sense strand
ugccagagcugugggaaag

SEQ ID NO: 685588 - RNA, 19 nt, Homo sapiens
  misc_RNA (1)...(19): siRNA sense strand
caagaucuuccgugaugug

SEQ ID NO: 685589 - RNA, 19 nt, Homo sapiens
  misc_RNA (1)...(19): siRNA sense strand
gagggaggcaggcauccuu

SEQ ID NO: 685590 - RNA, 19 nt, Homo sapiens
  misc_RNA (1)...(19): siRNA sense strand
gcagacacagcacggagau

SEQ ID NO: 685591 - RNA, 19 nt, Homo sapiens
  misc_RNA (1)...(19): siRNA sense strand
ucaaacaguccaacguaca

SEQ ID NO: 685592 - RNA, 19 nt, Homo sapiens
  misc_RNA (1)...(19): siRNA sense strand
gcacaagcugucccacucu

SEQ ID NO: 685593 - RNA, 19 nt, Homo sapiens
  misc_RNA (1)...(19): siRNA sense strand
ucacuugaacggacauauc

SEQ ID NO: 685594 - RNA, 19 nt, Homo sapiens
  misc_RNA (1)...(19): siRNA sense strand
cugcugaugaggucgguua

SEQ ID NO: 685595 - RNA, 19 nt, Homo sapiens
  misc_RNA (1)...(19): siRNA sense strand
gguguucagcgcccaguug

SEQ ID NO: 685596 - RNA, 19 nt, Homo sapiens
  misc_RNA (1)...(19): siRNA sense strand
gaucugccaggaagucauc

SEQ ID NO: 685597 - RNA, 19 nt, Homo sapiens
  misc_RNA (1)...(19): siRNA sense strand
ggucgguuaucgagaucug

SEQ ID NO: 685598 - RNA, 19 nt, Homo sapiens
  misc_RNA (1)...(19): siRNA sense strand
gaggucgguuaucgagauc

SEQ ID NO: 685599 - RNA, 19 nt, Homo sapiens
  misc_RNA (1)...(19): siRNA sense strand
caugcggucuaugugguaa

SEQ ID NO: 685600 - RNA, 19 nt, Homo sapiens
  misc_RNA (1)...(19): siRNA sense strand
ccugcuggacucaauguuu

SEQ ID NO: 685601 - RNA, 19 nt, Homo sapiens
  misc_RNA (1)...(19): siRNA sense strand
caagguauuuggggacauu

SEQ ID NO: 685602 - RNA, 19 nt, Homo sapiens
  misc_RNA (1)...(19): siRNA sense strand
gguccgugggcaagccuua

SEQ ID NO: 685603 - RNA, 19 nt, Homo sapiens
  misc_RNA (1)...(19): siRNA sense strand
caggaagucaucaaacagu

SEQ ID NO: 685604 - RNA, 19 nt, Homo sapiens
  misc_RNA (1)...(19): siRNA sense strand
gccgauauaaugcucuuuc

SEQ ID NO: 685605 - RNA, 19 nt, Homo sapiens
  misc_RNA (1)...(19): siRNA sense strand
ggcuacccaucucugaaga

SEQ ID NO: 685606 - RNA, 19 nt, Homo sapiens
  misc_RNA (1)...(19): siRNA sense strand
gggcuacccaucucugaag

SEQ ID NO: 685607 - RNA, 19 nt, Homo sapiens
  misc_RNA (1)...(19): siRNA sense strand
cauaccaggugagcagaca

SEQ ID NO: 685608 - RNA, 19 nt, Homo sapiens
  misc_RNA (1)...(19): siRNA sense strand
cacuugaacggacauauca

SEQ ID NO: 685609 - RNA, 19 nt, Homo sapiens
  misc_RNA (1)...(19): siRNA sense strand
gcacggagaugcugcacaa

SEQ ID NO: 685610 - RNA, 19 nt, Homo sapiens
  misc_RNA (1)...(19): siRNA sense strand
gcagguggcuugugagauc

SEQ ID NO: 685611 - RNA, 19 nt, Homo sapiens
  misc_RNA (1)...(19): siRNA sense strand
ggcaagaucuuccgugaug

SEQ ID NO: 685612 - RNA, 19 nt, Homo sapiens
  misc_RNA (1)...(19): siRNA sense strand
gaucuuccgugauguguau

SEQ ID NO: 685613 - RNA, 19 nt, Homo sapiens
  misc_RNA (1)...(19): siRNA sense strand
gugguaagguguucacuga

SEQ ID NO: 685614 - RNA, 19 nt, Homo sapiens
  misc_RNA (1)...(19): siRNA sense strand
gguaagguguucacugaug

SEQ ID NO: 685615 - RNA, 19 nt, Homo sapiens
  misc_RNA (1)...(19): siRNA sense strand
ggacuugggcuucccuuug

SEQ ID NO: 685616 - RNA, 19 nt, Homo sapiens
  misc_RNA (1)...(19): siRNA sense strand
ucaagcaggugcacacuuc

SEQ ID NO: 685617 - RNA, 19 nt, Homo sapiens
  misc_RNA (1)...(19): siRNA sense strand
gaaaagaccgcauguccua

SEQ ID NO: 685618 - RNA, 19 nt, Homo sapiens
  misc_RNA (1)...(19): siRNA sense strand
gccaggaagucaucaaaca

SEQ ID NO: 685619 - RNA, 19 nt, Homo sapiens
  misc_RNA (1)...(19): siRNA sense strand
caucaaacaguccaacgua

SEQ ID NO: 685620 - RNA, 19 nt, Homo sapiens
  misc_RNA (1)...(19): siRNA sense strand
caacguacagauccuggua

SEQ ID NO: 685621 - RNA, 19 nt, Homo sapiens
  misc_RNA (1)...(19): siRNA sense strand
acuaucagcuccaagguau

SEQ ID NO: 685622 - RNA, 19 nt, Homo sapiens
  misc_RNA (1)...(19): siRNA sense strand
gggcuucccuuuggacaug

SEQ ID NO: 685623 - RNA, 19 nt, Homo sapiens
  misc_RNA (1)...(19): siRNA sense strand
ggagagcuuucccgaacuc

SEQ ID NO: 685624 - RNA, 19 nt, Homo sapiens
  misc_RNA (1)...(19): siRNA sense strand
ggguugcgguucaagagaa

SEQ ID NO: 685625 - RNA, 19 nt, Homo sapiens
  misc_RNA (1)...(19): siRNA sense strand
uaucagcuccaagguauuu

SEQ ID NO: 685626 - RNA, 19 nt, Homo sapiens
  misc_RNA (1)...(19): siRNA sense strand
ugaggucgguuaucgagau

SEQ ID NO: 685627 - RNA, 19 nt, Homo sapiens
  misc_RNA (1)...(19): siRNA sense strand
gagcuuucccgaacucaug

SEQ ID NO: 685628 - RNA, 19 nt, Homo sapiens
  misc_RNA (1)...(19): siRNA sense strand
cugcuggacucaauguuug

SEQ ID NO: 685629 - RNA, 19 nt, Homo sapiens
  misc_RNA (1)...(19): siRNA sense strand
gacuugggcuucccuuugg

SEQ ID NO: 685630 - RNA, 19 nt, Homo sapiens
  misc_RNA (1)...(19): siRNA sense strand
cuccaggccugaucacuug

SEQ ID NO: 685631 - RNA, 19 nt, Homo sapiens
  misc_RNA (1)...(19): siRNA sense strand
ccaaccugcuggacucaau

SEQ ID NO: 685632 - RNA, 19 nt, Homo sapiens
  misc_RNA (1)...(19): siRNA sense strand
gccaaguuccugcugauga

SEQ ID NO: 685633 - RNA, 19 nt, Homo sapiens
  misc_RNA (1)...(19): siRNA sense strand
ugugagaucugcggcaaga

SEQ ID NO: 685634 - RNA, 19 nt, Homo sapiens
  misc_RNA (1)...(19): siRNA sense strand
ccaaguuccugcugaugag

SEQ ID NO: 685635 - RNA, 19 nt, Homo sapiens
  misc_RNA (1)...(19): siRNA sense strand
gagcuggagaugcacacua

SEQ ID NO: 685636 - RNA, 19 nt, Homo sapiens
  misc_RNA (1)...(19): siRNA sense strand
gcaagaucuuccgugaugu

SEQ ID NO: 685637 - RNA, 19 nt, Homo sapiens
  misc_RNA (1)...(19): siRNA sense strand
gguugcgguucaagagaaa

SEQ ID NO: 685638 - RNA, 19 nt, Homo sapiens
  misc_RNA (1)...(19): siRNA sense strand
gcgccgauauaaugcucuu

SEQ ID NO: 685639 - RNA, 19 nt, Homo sapiens
  misc_RNA (1)...(19): siRNA sense strand
ugccagagcugugggaaag

SEQ ID NO: 685640 - RNA, 19 nt, Homo sapiens
  misc_RNA (1)...(19): siRNA sense strand
caagaucuuccgugaugug

SEQ ID NO: 685641 - RNA, 19 nt, Homo sapiens
  misc_RNA (1)...(19): siRNA sense strand
gagggaggcaggcauccuu

SEQ ID NO: 685642 - RNA, 19 nt, Homo sapiens
  misc_RNA (1)...(19): siRNA sense strand
gcagacacagcacggagau

SEQ ID NO: 685643 - RNA, 19 nt, Homo sapiens
  misc_RNA (1)...(19): siRNA sense strand
ucaaacaguccaacguaca

SEQ ID NO: 685644 - RNA, 19 nt, Homo sapiens
  misc_RNA (1)...(19): siRNA sense strand
gcacaagcugucccacucu

SEQ ID NO: 685645 - RNA, 19 nt, Homo sapiens
  misc_RNA (1)...(19): siRNA sense strand
ucacuugaacggacauauc

SEQ ID NO: 685646 - RNA, 19 nt, Homo sapiens
  misc_RNA (1)...(19): siRNA sense strand
cugcugaugaggucgguua

SEQ ID NO: 685647 - RNA, 19 nt, Homo sapiens
  misc_RNA (1)...(19): siRNA sense strand
gguguucagcgcccaguug

SEQ ID NO: 685648 - RNA, 19 nt, Homo sapiens
  misc_RNA (1)...(19): siRNA sense strand
gaucugccaggaagucauc

SEQ ID NO: 685649 - RNA, 19 nt, Homo sapiens
  misc_RNA (1)...(19): siRNA sense strand
ggucgguuaucgagaucug

SEQ ID NO: 685650 - RNA, 19 nt, Homo sapiens
  misc_RNA (1)...(19): siRNA sense strand
gaggucgguuaucgagauc

SEQ ID NO: 685651 - RNA, 19 nt, Homo sapiens
  misc_RNA (1)...(19): siRNA sense strand
caugcggucuaugugguaa

SEQ ID NO: 685652 - RNA, 19 nt, Homo sapiens
  misc_RNA (1)...(19): siRNA sense strand
ccugcuggacucaauguuu

SEQ ID NO: 685653 - RNA, 19 nt, Homo sapiens
  misc_RNA (1)...(19): siRNA sense strand
caagguauuuggggacauu

SEQ ID NO: 685654 - RNA, 19 nt, Homo sapiens
  misc_RNA (1)...(19): siRNA sense strand
gguccgugggcaagccuua

SEQ ID NO: 685655 - RNA, 19 nt, Homo sapiens
  misc_RNA (1)...(19): siRNA sense strand
caggaagucaucaaacagu

SEQ ID NO: 685656 - RNA, 19 nt, Homo sapiens
  misc_RNA (1)...(19): siRNA sense strand
gccgauauaaugcucuuuc

SEQ ID NO: 685657 - RNA, 19 nt, Homo sapiens
  misc_RNA (1)...(19): siRNA sense strand
ggcuacccaucucugaaga

SEQ ID NO: 685658 - RNA, 19 nt, Homo sapiens
  misc_RNA (1)...(19): siRNA sense strand
gggcuacccaucucugaag

SEQ ID NO: 685659 - RNA, 19 nt, Homo sapiens
  misc_RNA (1)...(19): siRNA sense strand
cauaccaggugagcagaca

SEQ ID NO: 685660 - RNA, 19 nt, Homo sapiens
  misc_RNA (1)...(19): siRNA sense strand
cacuugaacggacauauca

SEQ ID NO: 685661 - RNA, 19 nt, Homo sapiens
  misc_RNA (1)...(19): siRNA sense strand
gcacggagaugcugcacaa

SEQ ID NO: 685662 - RNA, 19 nt, Homo sapiens
  misc_RNA (1)...(19): siRNA sense strand
gcagguggcuugugagauc

SEQ ID NO: 685663 - RNA, 19 nt, Homo sapiens
  misc_RNA (1)...(19): siRNA sense strand
ggcaagaucuuccgugaug

SEQ ID NO: 685664 - RNA, 19 nt, Homo sapiens
  misc_RNA (1)...(19): siRNA sense strand
gaucuuccgugauguguau

SEQ ID NO: 685665 - RNA, 19 nt, Homo sapiens
  misc_RNA (1)...(19): siRNA sense strand
gugguaagguguucacuga

SEQ ID NO: 685666 - RNA, 19 nt, Homo sapiens
  misc_RNA (1)...(19): siRNA sense strand
gguaagguguucacugaug

SEQ ID NO: 685667 - RNA, 19 nt, Homo sapiens
  misc_RNA (1)...(19): siRNA sense strand
ggacuugggcuucccuuug

SEQ ID NO: 685668 - RNA, 19 nt, Homo sapiens
  misc_RNA (1)...(19): siRNA sense strand
ucaagcaggugcacacuuc

SEQ ID NO: 685669 - RNA, 19 nt, Homo sapiens
  misc_RNA (1)...(19): siRNA sense strand
gaaaagaccgcauguccua

SEQ ID NO: 685670 - RNA, 19 nt, Homo sapiens
  misc_RNA (1)...(19): siRNA sense strand
gccaggaagucaucaaaca

SEQ ID NO: 685671 - RNA, 19 nt, Homo sapiens
  misc_RNA (1)...(19): siRNA sense strand
caucaaacaguccaacgua

SEQ ID NO: 685672 - RNA, 19 nt, Homo sapiens
  misc_RNA (1)...(19): siRNA sense strand
caacguacagauccuggua

SEQ ID NO: 685673 - RNA, 19 nt, Homo sapiens
  misc_RNA (1)...(19): siRNA sense strand
acuaucagcuccaagguau

SEQ ID NO: 685674 - RNA, 19 nt, Homo sapiens
  misc_RNA (1)...(19): siRNA sense strand
gggcuucccuuuggacaug

SEQ ID NO: 685675 - RNA, 19 nt, Homo sapiens
  misc_RNA (1)...(19): siRNA sense strand
ggagagcuuucccgaacuc

SEQ ID NO: 685676 - RNA, 19 nt, Homo sapiens
  misc_RNA (1)...(19): siRNA sense strand
ggguugcgguucaagagaa

SEQ ID NO: 685677 - RNA, 19 nt, Homo sapiens
  misc_RNA (1)...(19): siRNA sense strand
uaucagcuccaagguauuu

SEQ ID NO: 685678 - RNA, 19 nt, Homo sapiens
  misc_RNA (1)...(19): siRNA sense strand
ugaggucgguuaucgagau

SEQ ID NO: 685679 - RNA, 19 nt, Homo sapiens
  misc_RNA (1)...(19): siRNA sense strand
gagcuuucccgaacucaug

SEQ ID NO: 685680 - RNA, 19 nt, Homo sapiens
  misc_RNA (1)...(19): siRNA sense strand
cugcuggacucaauguuug

SEQ ID NO: 685681 - RNA, 19 nt, Homo sapiens
  misc_RNA (1)...(19): siRNA sense strand
gacuugggcuucccuuugg

SEQ ID NO: 685682 - RNA, 19 nt, Homo sapiens
  misc_RNA (1)...(19): siRNA sense strand
cuccaggccugaucacuug

SEQ ID NO: 685683 - RNA, 19 nt, Homo sapiens
  misc_RNA (1)...(19): siRNA sense strand
ccaaccugcuggacucaau

SEQ ID NO: 685684 - RNA, 19 nt, Homo sapiens
  misc_RNA (1)...(19): siRNA sense strand
gccaaguuccugcugauga

SEQ ID NO: 685685 - RNA, 19 nt, Homo sapiens
  misc_RNA (1)...(19): siRNA sense strand
ugugagaucugcggcaaga

SEQ ID NO: 685686 - RNA, 19 nt, Homo sapiens
  misc_RNA (1)...(19): siRNA sense strand
ccaaguuccugcugaugag

SEQ ID NO: 685687 - RNA, 19 nt, Homo sapiens
  misc_RNA (1)...(19): siRNA sense strand
gagcuggagaugcacacua

SEQ ID NO: 685688 - RNA, 19 nt, Homo sapiens
  misc_RNA (1)...(19): siRNA sense strand
gcaagaucuuccgugaugu

SEQ ID NO: 685689 - RNA, 19 nt, Homo sapiens
  misc_RNA (1)...(19): siRNA sense strand
gguugcgguucaagagaaa

SEQ ID NO: 685690 - RNA, 19 nt, Homo sapiens
  misc_RNA (1)...(19): siRNA sense strand
gcgccgauauaaugcucuu

SEQ ID NO: 685691 - RNA, 19 nt, Homo sapiens
  misc_RNA (1)...(19): siRNA sense strand
ugccagagcugugggaaag

SEQ ID NO: 685692 - RNA, 19 nt, Homo sapiens
  misc_RNA (1)...(19): siRNA sense strand
caagaucuuccgugaugug

SEQ ID NO: 685693 - RNA, 19 nt, Homo sapiens
  misc_RNA (1)...(19): siRNA sense strand
gagggaggcaggcauccuu

SEQ ID NO: 685694 - RNA, 19 nt, Homo sapiens
  misc_RNA (1)...(19): siRNA sense strand
gcagacacagcacggagau

SEQ ID NO: 685695 - RNA, 19 nt, Homo sapiens
  misc_RNA (1)...(19): siRNA sense strand
ucaaacaguccaacguaca

SEQ ID NO: 685696 - RNA, 19 nt, Homo sapiens
  misc_RNA (1)...(19): siRNA sense strand
gcacaagcugucccacucu

SEQ ID NO: 685697 - RNA, 19 nt, Homo sapiens
  misc_RNA (1)...(19): siRNA sense strand
ucacuugaacggacauauc

SEQ ID NO: 685698 - RNA, 19 nt, Homo sapiens
  misc_RNA (1)...(19): siRNA sense strand
cugcugaugaggucgguua

SEQ ID NO: 685699 - RNA, 19 nt, Homo sapiens
  misc_RNA (1)...(19): siRNA sense strand
gguguucagcgcccaguug

SEQ ID NO: 685700 - RNA, 19 nt, Homo sapiens
  misc_RNA (1)...(19): siRNA sense strand
gaucugccaggaagucauc

SEQ ID NO: 685701 - RNA, 19 nt, Homo sapiens
  misc_RNA (1)...(19): siRNA sense strand
ggucgguuaucgagaucug

SEQ ID NO: 685702 - RNA, 19 nt, Homo sapiens
  misc_RNA (1)...(19): siRNA sense strand
gaggucgguuaucgagauc

SEQ ID NO: 685703 - RNA, 19 nt, Homo sapiens
  misc_RNA (1)...(19): siRNA sense strand
caugcggucuaugugguaa

SEQ ID NO: 685704 - RNA, 19 nt, Homo sapiens
  misc_RNA (1)...(19): siRNA sense strand
ccugcuggacucaauguuu

SEQ ID NO: 685705 - RNA, 19 nt, Homo sapiens
  misc_RNA (1)...(19): siRNA sense strand
caagguauuuggggacauu

SEQ ID NO: 685706 - RNA, 19 nt, Homo sapiens
  misc_RNA (1)...(19): siRNA sense strand
gguccgugggcaagccuua

SEQ ID NO: 685707 - RNA, 19 nt, Homo sapiens
  misc_RNA (1)...(19): siRNA sense strand
caggaagucaucaaacagu

SEQ ID NO: 685708 - RNA, 19 nt, Homo sapiens
  misc_RNA (1)...(19): siRNA sense strand
gccgauauaaugcucuuuc

SEQ ID NO: 685709 - RNA, 19 nt, Homo sapiens
  misc_RNA (1)...(19): siRNA sense strand
ggcuacccaucucugaaga

SEQ ID NO: 685710 - RNA, 19 nt, Homo sapiens
  misc_RNA (1)...(19): siRNA sense strand
gggcuacccaucucugaag

SEQ ID NO: 685711 - RNA, 19 nt, Homo sapiens
  misc_RNA (1)...(19): siRNA sense strand
cauaccaggugagcagaca

SEQ ID NO: 685712 - RNA, 19 nt, Homo sapiens
  misc_RNA (1)...(19): siRNA sense strand
cacuugaacggacauauca

SEQ ID NO: 685713 - RNA, 19 nt, Homo sapiens
  misc_RNA (1)...(19): siRNA sense strand
gcacggagaugcugcacaa

SEQ ID NO: 685714 - RNA, 19 nt, Homo sapiens
  misc_RNA (1)...(19): siRNA sense strand
gcagguggcuugugagauc

SEQ ID NO: 685715 - RNA, 19 nt, Homo sapiens
  misc_RNA (1)...(19): siRNA sense strand
ggcaagaucuuccgugaug

SEQ ID NO: 685716 - RNA, 19 nt, Homo sapiens
  misc_RNA (1)...(19): siRNA sense strand
gaucuuccgugauguguau

SEQ ID NO: 685717 - RNA, 19 nt, Homo sapiens
  misc_RNA (1)...(19): siRNA sense strand
gugguaagguguucacuga

SEQ ID NO: 685718 - RNA, 19 nt, Homo sapiens
  misc_RNA (1)...(19): siRNA sense strand
gguaagguguucacugaug

SEQ ID NO: 685719 - RNA, 19 nt, Homo sapiens
  misc_RNA (1)...(19): siRNA sense strand
ggacuugggcuucccuuug

SEQ ID NO: 685720 - RNA, 19 nt, Homo sapiens
  misc_RNA (1)...(19): siRNA sense strand
ucaagcaggugcacacuuc

SEQ ID NO: 685721 - RNA, 19 nt, Homo sapiens
  misc_RNA (1)...(19): siRNA sense strand
gaaaagaccgcauguccua

SEQ ID NO: 685722 - RNA, 19 nt, Homo sapiens
  misc_RNA (1)...(19): siRNA sense strand
gccaggaagucaucaaaca

SEQ ID NO: 685723 - RNA, 19 nt, Homo sapiens
  misc_RNA (1)...(19): siRNA sense strand
caucaaacaguccaacgua

SEQ ID NO: 685724 - RNA, 19 nt, Homo sapiens
  misc_RNA (1)...(19): siRNA sense strand
caacguacagauccuggua

SEQ ID NO: 685725 - RNA, 19 nt, Homo sapiens
  misc_RNA (1)...(19): siRNA sense strand
acuaucagcuccaagguau

SEQ ID NO: 685726 - RNA, 19 nt, Homo sapiens
  misc_RNA (1)...(19): siRNA sense strand
gggcuucccuuuggacaug

SEQ ID NO: 685727 - RNA, 19 nt, Homo sapiens
  misc_RNA (1)...(19): siRNA sense strand
ggagagcuuucccgaacuc

SEQ ID NO: 685728 - RNA, 19 nt, Homo sapiens
  misc_RNA (1)...(19): siRNA sense strand
ggguugcgguucaagagaa

SEQ ID NO: 685729 - RNA, 19 nt, Homo sapiens
  misc_RNA (1)...(19): siRNA sense strand
uaucagcuccaagguauuu

SEQ ID NO: 685730 - RNA, 19 nt, Homo sapiens
  misc_RNA (1)...(19): siRNA sense strand
ugaggucgguuaucgagau

SEQ ID NO: 685731 - RNA, 19 nt, Homo sapiens
  misc_RNA (1)...(19): siRNA sense strand
gagcuuucccgaacucaug

SEQ ID NO: 685732 - RNA, 19 nt, Homo sapiens
  misc_RNA (1)...(19): siRNA sense strand
cugcuggacucaauguuug

SEQ ID NO: 685733 - RNA, 19 nt, Homo sapiens
  misc_RNA (1)...(19): siRNA sense strand
gacuugggcuucccuuugg

SEQ ID NO: 685734 - RNA, 19 nt, Homo sapiens
  misc_RNA (1)...(19): siRNA sense strand
cuccaggccugaucacuug

SEQ ID NO: 685735 - RNA, 19 nt, Homo sapiens
  misc_RNA (1)...(19): siRNA sense strand
ccaaccugcuggacucaau

SEQ ID NO: 685736 - RNA, 19 nt, Homo sapiens
  misc_RNA (1)...(19): siRNA sense strand
gccaaguuccugcugauga

SEQ ID NO: 685737 - RNA, 19 nt, Homo sapiens
  misc_RNA (1)...(19): siRNA sense strand
ugugagaucugcggcaaga

SEQ ID NO: 685738 - RNA, 19 nt, Homo sapiens
  misc_RNA (1)...(19): siRNA sense strand
ccaaguuccugcugaugag

SEQ ID NO: 685739 - RNA, 19 nt, Homo sapiens
  misc_RNA (1)...(19): siRNA sense strand
gagcuggagaugcacacua

SEQ ID NO: 685740 - RNA, 19 nt, Homo sapiens
  misc_RNA (1)...(19): siRNA sense strand
gcaagaucuuccgugaugu

SEQ ID NO: 685741 - RNA, 19 nt, Homo sapiens
  misc_RNA (1)...(19): siRNA sense strand
gguugcgguucaagagaaa

SEQ ID NO: 685742 - RNA, 19 nt, Homo sapiens
  misc_RNA (1)...(19): siRNA sense strand
gcgccgauauaaugcucuu

SEQ ID NO: 685743 - RNA, 19 nt, Homo sapiens
  misc_RNA (1)...(19): siRNA sense strand
ugccagagcugugggaaag

SEQ ID NO: 685744 - RNA, 19 nt, Homo sapiens
  misc_RNA (1)...(19): siRNA sense strand
caagaucuuccgugaugug

SEQ ID NO: 685745 - RNA, 19 nt, Homo sapiens
  misc_RNA (1)...(19): siRNA sense strand
gagggaggcaggcauccuu

SEQ ID NO: 685746 - RNA, 19 nt, Homo sapiens
  misc_RNA (1)...(19): siRNA sense strand
gcagacacagcacggagau

SEQ ID NO: 685747 - RNA, 19 nt, Homo sapiens
  misc_RNA (1)...(19): siRNA sense strand
ucaaacaguccaacguaca

SEQ ID NO: 685748 - RNA, 19 nt, Homo sapiens
  misc_RNA (1)...(19): siRNA sense strand
gcacaagcugucccacucu

SEQ ID NO: 685749 - RNA, 19 nt, Homo sapiens
  misc_RNA (1)...(19): siRNA sense strand
ucacuugaacggacauauc

SEQ ID NO: 685750 - RNA, 19 nt, Homo sapiens
  misc_RNA (1)...(19): siRNA sense strand
cugcugaugaggucgguua

SEQ ID NO: 685751 - RNA, 19 nt, Homo sapiens
  misc_RNA (1)...(19): siRNA sense strand
gguguucagcgcccaguug

SEQ ID NO: 685752 - RNA, 19 nt, Homo sapiens
  misc_RNA (1)...(19): siRNA sense strand
gaucugccaggaagucauc

SEQ ID NO: 685753 - RNA, 19 nt, Homo sapiens
  misc_RNA (1)...(19): siRNA sense strand
ggucgguuaucgagaucug

SEQ ID NO: 685754 - RNA, 19 nt, Homo sapiens
  misc_RNA (1)...(19): siRNA sense strand
gaggucgguuaucgagauc

SEQ ID NO: 685755 - RNA, 19 nt, Homo sapiens
  misc_RNA (1)...(19): siRNA sense strand
caugcggucuaugugguaa

SEQ ID NO: 685756 - RNA, 19 nt, Homo sapiens
  misc_RNA (1)...(19): siRNA sense strand
ccugcuggacucaauguuu

SEQ ID NO: 685757 - RNA, 19 nt, Homo sapiens
  misc_RNA (1)...(19): siRNA sense strand
caagguauuuggggacauu

SEQ ID NO: 685758 - RNA, 19 nt, Homo sapiens
  misc_RNA (1)...(19): siRNA sense strand
gguccgugggcaagccuua

SEQ ID NO: 685759 - RNA, 19 nt, Homo sapiens
  misc_RNA (1)...(19): siRNA sense strand
caggaagucaucaaacagu

SEQ ID NO: 685760 - RNA, 19 nt, Homo sapiens
  misc_RNA (1)...(19): siRNA sense strand
gccgauauaaugcucuuuc

SEQ ID NO: 685761 - RNA, 19 nt, Homo sapiens
  misc_RNA (1)...(19): siRNA sense strand
ggcuacccaucucugaaga

SEQ ID NO: 685762 - RNA, 19 nt, Homo sapiens
  misc_RNA (1)...(19): siRNA sense strand
gggcuacccaucucugaag

SEQ ID NO: 685763 - RNA, 19 nt, Homo sapiens
  misc_RNA (1)...(19): siRNA sense strand
cauaccaggugagcagaca

SEQ ID NO: 685764 - RNA, 19 nt, Homo sapiens
  misc_RNA (1)...(19): siRNA sense strand
cacuugaacggacauauca

SEQ ID NO: 685765 - RNA, 19 nt, Homo sapiens
  misc_RNA (1)...(19): siRNA sense strand
gcacggagaugcugcacaa

SEQ ID NO: 685766 - RNA, 19 nt, Homo sapiens
  misc_RNA (1)...(19): siRNA sense strand
gcagguggcuugugagauc

SEQ ID NO: 685767 - RNA, 19 nt, Homo sapiens
  misc_RNA (1)...(19): siRNA sense strand
ggcaagaucuuccgugaug

SEQ ID NO: 685768 - RNA, 19 nt, Homo sapiens
  misc_RNA (1)...(19): siRNA sense strand
gaucuuccgugauguguau

SEQ ID NO: 685769 - RNA, 19 nt, Homo sapiens
  misc_RNA (1)...(19): siRNA sense strand
gugguaagguguucacuga

SEQ ID NO: 685770 - RNA, 19 nt, Homo sapiens
  misc_RNA (1)...(19): siRNA sense strand
gguaagguguucacugaug

SEQ ID NO: 685771 - RNA, 19 nt, Homo sapiens
  misc_RNA (1)...(19): siRNA sense strand
ggacuugggcuucccuuug

SEQ ID NO: 685772 - RNA, 19 nt, Homo sapiens
  misc_RNA (1)...(19): siRNA sense strand
ucaagcaggugcacacuuc

SEQ ID NO: 685773 - RNA, 19 nt, Homo sapiens
  misc_RNA (1)...(19): siRNA sense strand
gaaaagaccgcauguccua

SEQ ID NO: 685774 - RNA, 19 nt, Homo sapiens
  misc_RNA (1)...(19): siRNA sense strand
gccaggaagucaucaaaca

SEQ ID NO: 685775 - RNA, 19 nt, Homo sapiens
  misc_RNA (1)...(19): siRNA sense strand
caucaaacaguccaacgua

SEQ ID NO: 685776 - RNA, 19 nt, Homo sapiens
  misc_RNA (1)...(19): siRNA sense strand
caacguacagauccuggua

SEQ ID NO: 685777 - RNA, 19 nt, Homo sapiens
  misc_RNA (1)...(19): siRNA sense strand
acuaucagcuccaagguau

SEQ ID NO: 685778 - RNA, 19 nt, Homo sapiens
  misc_RNA (1)...(19): siRNA sense strand
gggcuucccuuuggacaug

SEQ ID NO: 685779 - RNA, 19 nt, Homo sapiens
  misc_RNA (1)...(19): siRNA sense strand
ggagagcuuucccgaacuc

SEQ ID NO: 685780 - RNA, 19 nt, Homo sapiens
  misc_RNA (1)...(19): siRNA sense strand
ggguugcgguucaagagaa

SEQ ID NO: 685781 - RNA, 19 nt, Homo sapiens
  misc_RNA (1)...(19): siRNA sense strand
uaucagcuccaagguauuu

SEQ ID NO: 685782 - RNA, 19 nt, Homo sapiens
  misc_RNA (1)...(19): siRNA sense strand
ugaggucgguuaucgagau

SEQ ID NO: 685783 - RNA, 19 nt, Homo sapiens
  misc_RNA (1)...(19): siRNA sense strand
gagcuuucccgaacucaug

SEQ ID NO: 685784 - RNA, 19 nt, Homo sapiens
  misc_RNA (1)...(19): siRNA sense strand
cugcuggacucaauguuug

SEQ ID NO: 685785 - RNA, 19 nt, Homo sapiens
  misc_RNA (1)...(19): siRNA sense strand
gacuugggcuucccuuugg

SEQ ID NO: 685786 - RNA, 19 nt, Homo sapiens
  misc_RNA (1)...(19): siRNA sense strand
cuccaggccugaucacuug

SEQ ID NO: 685787 - RNA, 19 nt, Homo sapiens
  misc_RNA (1)...(19): siRNA sense strand
ccaaccugcuggacucaau

SEQ ID NO: 685788 - RNA, 19 nt, Homo sapiens
  misc_RNA (1)...(19): siRNA sense strand
gccaaguuccugcugauga

SEQ ID NO: 685789 - RNA, 19 nt, Homo sapiens
  misc_RNA (1)...(19): siRNA sense strand
ugugagaucugcggcaaga

SEQ ID NO: 685790 - RNA, 19 nt, Homo sapiens
  misc_RNA (1)...(19): siRNA sense strand
ccaaguuccugcugaugag

SEQ ID NO: 685791 - RNA, 19 nt, Homo sapiens
  misc_RNA (1)...(19): siRNA sense strand
gagcuggagaugcacacua

SEQ ID NO: 685792 - RNA, 19 nt, Homo sapiens
  misc_RNA (1)...(19): siRNA sense strand
gcaagaucuuccgugaugu

SEQ ID NO: 685793 - RNA, 19 nt, Homo sapiens
  misc_RNA (1)...(19): siRNA sense strand
gguugcgguucaagagaaa

SEQ ID NO: 685794 - RNA, 19 nt, Homo sapiens
  misc_RNA (1)...(19): siRNA sense strand
gcgccgauauaaugcucuu

SEQ ID NO: 685795 - RNA, 19 nt, Homo sapiens
  misc_RNA (1)...(19): siRNA sense strand
ugccagagcugugggaaag

SEQ ID NO: 685796 - RNA, 19 nt, Homo sapiens
  misc_RNA (1)...(19): siRNA sense strand
caagaucuuccgugaugug

SEQ ID NO: 685797 - RNA, 19 nt, Homo sapiens
  misc_RNA (1)...(19): siRNA sense strand
gagggaggcaggcauccuu

SEQ ID NO: 685798 - RNA, 19 nt, Homo sapiens
  misc_RNA (1)...(19): siRNA sense strand
gcagacacagcacggagau

SEQ ID NO: 685799 - RNA, 19 nt, Homo sapiens
  misc_RNA (1)...(19): siRNA sense strand
ucaaacaguccaacguaca

SEQ ID NO: 685800 - RNA, 19 nt, Homo sapiens
  misc_RNA (1)...(19): siRNA sense strand
gcacaagcugucccacucu

SEQ ID NO: 685801 - RNA, 19 nt, Homo sapiens
  misc_RNA (1)...(19): siRNA sense strand
ucacuugaacggacauauc

SEQ ID NO: 685802 - RNA, 19 nt, Homo sapiens
  misc_RNA (1)...(19): siRNA sense strand
cugcugaugaggucgguua

SEQ ID NO: 685803 - RNA, 19 nt, Homo sapiens
  misc_RNA (1)...(19): siRNA sense strand
gguguucagcgcccaguug

SEQ ID NO: 685804 - RNA, 19 nt, Homo sapiens
  misc_RNA (1)...(19): siRNA sense strand
gaucugccaggaagucauc

SEQ ID NO: 685805 - RNA, 19 nt, Homo sapiens
  misc_RNA (1)...(19): siRNA sense strand
ggucgguuaucgagaucug

SEQ ID NO: 685806 - RNA, 19 nt, Homo sapiens
  misc_RNA (1)...(19): siRNA sense strand
gaggucgguuaucgagauc

SEQ ID NO: 685807 - RNA, 19 nt, Homo sapiens
  misc_RNA (1)...(19): siRNA sense strand
caugcggucuaugugguaa

SEQ ID NO: 685808 - RNA, 19 nt, Homo sapiens
  misc_RNA (1)...(19): siRNA sense strand
ccugcuggacucaauguuu

SEQ ID NO: 685809 - RNA, 19 nt, Homo sapiens
  misc_RNA (1)...(19): siRNA sense strand
caagguauuuggggacauu

SEQ ID NO: 685810 - RNA, 19 nt, Homo sapiens
  misc_RNA (1)...(19): siRNA sense strand
gguccgugggcaagccuua

SEQ ID NO: 685811 - RNA, 19 nt, Homo sapiens
  misc_RNA (1)...(19): siRNA sense strand
caggaagucaucaaacagu

SEQ ID NO: 685812 - RNA, 19 nt, Homo sapiens
  misc_RNA (1)...(19): siRNA sense strand
gccgauauaaugcucuuuc

SEQ ID NO: 685813 - RNA, 19 nt, Homo sapiens
  misc_RNA (1)...(19): siRNA sense strand
ggcuacccaucucugaaga

SEQ ID NO: 685814 - RNA, 19 nt, Homo sapiens
  misc_RNA (1)...(19): siRNA sense strand
gggcuacccaucucugaag

SEQ ID NO: 685815 - RNA, 19 nt, Homo sapiens
  misc_RNA (1)...(19): siRNA sense strand
cauaccaggugagcagaca

SEQ ID NO: 685816 - RNA, 19 nt, Homo sapiens
  misc_RNA (1)...(19): siRNA sense strand
cacuugaacggacauauca

SEQ ID NO: 685817 - RNA, 19 nt, Homo sapiens
  misc_RNA (1)...(19): siRNA sense strand
gcacggagaugcugcacaa

SEQ ID NO: 685818 - RNA, 19 nt, Homo sapiens
  misc_RNA (1)...(19): siRNA sense strand
gcagguggcuugugagauc

SEQ ID NO: 685819 - RNA, 19 nt, Homo sapiens
  misc_RNA (1)...(19): siRNA sense strand
ggcaagaucuuccgugaug

SEQ ID NO: 685820 - RNA, 19 nt, Homo sapiens
  misc_RNA (1)...(19): siRNA sense strand
gaucuuccgugauguguau

SEQ ID NO: 685821 - RNA, 19 nt, Homo sapiens
  misc_RNA (1)...(19): siRNA sense strand
gugguaagguguucacuga

SEQ ID NO: 685822 - RNA, 19 nt, Homo sapiens
  misc_RNA (1)...(19): siRNA sense strand
gguaagguguucacugaug

SEQ ID NO: 685823 - RNA, 19 nt, Homo sapiens
  misc_RNA (1)...(19): siRNA sense strand
ggacuugggcuucccuuug

SEQ ID NO: 685824 - RNA, 19 nt, Homo sapiens
  misc_RNA (1)...(19): siRNA sense strand
ucaagcaggugcacacuuc

SEQ ID NO: 685825 - RNA, 19 nt, Homo sapiens
  misc_RNA (1)...(19): siRNA sense strand
gaaaagaccgcauguccua

SEQ ID NO: 685826 - RNA, 19 nt, Homo sapiens
  misc_RNA (1)...(19): siRNA sense strand
gccaggaagucaucaaaca

SEQ ID NO: 685827 - RNA, 19 nt, Homo sapiens
  misc_RNA (1)...(19): siRNA sense strand
caucaaacaguccaacgua

SEQ ID NO: 685828 - RNA, 19 nt, Homo sapiens
  misc_RNA (1)...(19): siRNA sense strand
caacguacagauccuggua

SEQ ID NO: 685829 - RNA, 19 nt, Homo sapiens
  misc_RNA (1)...(19): siRNA sense strand
acuaucagcuccaagguau

SEQ ID NO: 685830 - RNA, 19 nt, Homo sapiens
  misc_RNA (1)...(19): siRNA sense strand
gggcuucccuuuggacaug

SEQ ID NO: 685831 - RNA, 19 nt, Homo sapiens
  misc_RNA (1)...(19): siRNA sense strand
ggagagcuuucccgaacuc

SEQ ID NO: 685832 - RNA, 19 nt, Homo sapiens
  misc_RNA (1)...(19): siRNA sense strand
ggguugcgguucaagagaa

SEQ ID NO: 685833 - RNA, 19 nt, Homo sapiens
  misc_RNA (1)...(19): siRNA sense strand
uaucagcuccaagguauuu

SEQ ID NO: 685834 - RNA, 19 nt, Homo sapiens
  misc_RNA (1)...(19): siRNA sense strand
ugaggucgguuaucgagau

SEQ ID NO: 685835 - RNA, 19 nt, Homo sapiens
  misc_RNA (1)...(19): siRNA sense strand
gagcuuucccgaacucaug

SEQ ID NO: 685836 - RNA, 19 nt, Homo sapiens
  misc_RNA (1)...(19): siRNA sense strand
cugcuggacucaauguuug

SEQ ID NO: 685837 - RNA, 19 nt, Homo sapiens
  misc_RNA (1)...(19): siRNA sense strand
gacuugggcuucccuuugg

SEQ ID NO: 685838 - RNA, 19 nt, Homo sapiens
  misc_RNA (1)...(19): siRNA sense strand
cuccaggccugaucacuug

SEQ ID NO: 685839 - RNA, 19 nt, Homo sapiens
  misc_RNA (1)...(19): siRNA sense strand
ccaaccugcuggacucaau

SEQ ID NO: 685840 - RNA, 19 nt, Homo sapiens
  misc_RNA (1)...(19): siRNA sense strand
gccaaguuccugcugauga

SEQ ID NO: 685841 - RNA, 19 nt, Homo sapiens
  misc_RNA (1)...(19): siRNA sense strand
ugugagaucugcggcaaga

SEQ ID NO: 685842 - RNA, 19 nt, Homo sapiens
  misc_RNA (1)...(19): siRNA sense strand
ccaaguuccugcugaugag

SEQ ID NO: 685843 - RNA, 19 nt, Homo sapiens
  misc_RNA (1)...(19): siRNA sense strand
gagcuggagaugcacacua

SEQ ID NO: 685844 - RNA, 19 nt, Homo sapiens
  misc_RNA (1)...(19): siRNA sense strand
gcaagaucuuccgugaugu

SEQ ID NO: 685845 - RNA, 19 nt, Homo sapiens
  misc_RNA (1)...(19): siRNA sense strand
gguugcgguucaagagaaa

SEQ ID NO: 685846 - RNA, 19 nt, Homo sapiens
  misc_RNA (1)...(19): siRNA sense strand
gcgccgauauaaugcucuu

SEQ ID NO: 685847 - RNA, 19 nt, Homo sapiens
  misc_RNA (1)...(19): siRNA sense strand
ugccagagcugugggaaag

SEQ ID NO: 685848 - RNA, 19 nt, Homo sapiens
  misc_RNA (1)...(19): siRNA sense strand
caagaucuuccgugaugug

SEQ ID NO: 685849 - RNA, 19 nt, Homo sapiens
  misc_RNA (1)...(19): siRNA sense strand
gagggaggcaggcauccuu

SEQ ID NO: 685850 - RNA, 19 nt, Homo sapiens
  misc_RNA (1)...(19): siRNA sense strand
gcagacacagcacggagau

SEQ ID NO: 685851 - RNA, 19 nt, Homo sapiens
  misc_RNA (1)...(19): siRNA sense strand
ucaaacaguccaacguaca

SEQ ID NO: 685852 - RNA, 19 nt, Homo sapiens
  misc_RNA (1)...(19): siRNA sense strand
gcacaagcugucccacucu

SEQ ID NO: 685853 - RNA, 19 nt, Homo sapiens
  misc_RNA (1)...(19): siRNA sense strand
ucacuugaacggacauauc

SEQ ID NO: 685854 - RNA, 19 nt, Homo sapiens
  misc_RNA (1)...(19): siRNA sense strand
cugcugaugaggucgguua

SEQ ID NO: 685855 - RNA, 19 nt, Homo sapiens
  misc_RNA (1)...(19): siRNA sense strand
gguguucagcgcccaguug

SEQ ID NO: 685856 - RNA, 19 nt, Homo sapiens
  misc_RNA (1)...(19): siRNA sense strand
gaucugccaggaagucauc

SEQ ID NO: 685857 - RNA, 19 nt, Homo sapiens
  misc_RNA (1)...(19): siRNA sense strand
ggucgguuaucgagaucug

SEQ ID NO: 685858 - RNA, 19 nt, Homo sapiens
  misc_RNA (1)...(19): siRNA sense strand
gaggucgguuaucgagauc

SEQ ID NO: 685859 - RNA, 19 nt, Homo sapiens
  misc_RNA (1)...(19): siRNA sense strand
caugcggucuaugugguaa

SEQ ID NO: 685860 - RNA, 19 nt, Homo sapiens
  misc_RNA (1)...(19): siRNA sense strand
ccugcuggacucaauguuu

SEQ ID NO: 685861 - RNA, 19 nt, Homo sapiens
  misc_RNA (1)...(19): siRNA sense strand
caagguauuuggggacauu

SEQ ID NO: 685862 - RNA, 19 nt, Homo sapiens
  misc_RNA (1)...(19): siRNA sense strand
gguccgugggcaagccuua

SEQ ID NO: 685863 - RNA, 19 nt, Homo sapiens
  misc_RNA (1)...(19): siRNA sense strand
caggaagucaucaaacagu

SEQ ID NO: 685864 - RNA, 19 nt, Homo sapiens
  misc_RNA (1)...(19): siRNA sense strand
gccgauauaaugcucuuuc

SEQ ID NO: 685865 - RNA, 19 nt, Homo sapiens
  misc_RNA (1)...(19): siRNA sense strand
ggcuacccaucucugaaga

SEQ ID NO: 685866 - RNA, 19 nt, Homo sapiens
  misc_RNA (1)...(19): siRNA sense strand
gggcuacccaucucugaag

SEQ ID NO: 685867 - RNA, 19 nt, Homo sapiens
  misc_RNA (1)...(19): siRNA sense strand
cauaccaggugagcagaca

SEQ ID NO: 685868 - RNA, 19 nt, Homo sapiens
  misc_RNA (1)...(19): siRNA sense strand
cacuugaacggacauauca

SEQ ID NO: 685869 - RNA, 19 nt, Homo sapiens
  misc_RNA (1)...(19): siRNA sense strand
gcacggagaugcugcacaa

SEQ ID NO: 685870 - RNA, 19 nt, Homo sapiens
  misc_RNA (1)...(19): siRNA sense strand
gcagguggcuugugagauc

SEQ ID NO: 685871 - RNA, 19 nt, Homo sapiens
  misc_RNA (1)...(19): siRNA sense strand
ggcaagaucuuccgugaug

SEQ ID NO: 685872 - RNA, 19 nt, Homo sapiens
  misc_RNA (1)...(19): siRNA sense strand
gaucuuccgugauguguau

SEQ ID NO: 685873 - RNA, 19 nt, Homo sapiens
  misc_RNA (1)...(19): siRNA sense strand
gugguaagguguucacuga

SEQ ID NO: 685874 - RNA, 19 nt, Homo sapiens
  misc_RNA (1)...(19): siRNA sense strand
gguaagguguucacugaug

SEQ ID NO: 685875 - RNA, 19 nt, Homo sapiens
  misc_RNA (1)...(19): siRNA sense strand
ggacuugggcuucccuuug

SEQ ID NO: 685876 - RNA, 19 nt, Homo sapiens
  misc_RNA (1)...(19): siRNA sense strand
ucaagcaggugcacacuuc

SEQ ID NO: 685877 - RNA, 19 nt, Homo sapiens
  misc_RNA (1)...(19): siRNA sense strand
gaaaagaccgcauguccua

SEQ ID NO: 685878 - RNA, 19 nt, Homo sapiens
  misc_RNA (1)...(19): siRNA sense strand
gccaggaagucaucaaaca

SEQ ID NO: 685879 - RNA, 19 nt, Homo sapiens
  misc_RNA (1)...(19): siRNA sense strand
caucaaacaguccaacgua

SEQ ID NO: 685880 - RNA, 19 nt, Homo sapiens
  misc_RNA (1)...(19): siRNA sense strand
caacguacagauccuggua

SEQ ID NO: 685881 - RNA, 19 nt, Homo sapiens
  misc_RNA (1)...(19): siRNA sense strand
acuaucagcuccaagguau

SEQ ID NO: 685882 - RNA, 19 nt, Homo sapiens
  misc_RNA (1)...(19): siRNA sense strand
gggcuucccuuuggacaug

SEQ ID NO: 685883 - RNA, 19 nt, Homo sapiens
  misc_RNA (1)...(19): siRNA sense strand
ggagagcuuucccgaacuc

SEQ ID NO: 685884 - RNA, 19 nt, Homo sapiens
  misc_RNA (1)...(19): siRNA sense strand
ggguugcgguucaagagaa

SEQ ID NO: 685885 - RNA, 19 nt, Homo sapiens
  misc_RNA (1)...(19): siRNA sense strand
uaucagcuccaagguauuu

SEQ ID NO: 685886 - RNA, 19 nt, Homo sapiens
  misc_RNA (1)...(19): siRNA sense strand
ugaggucgguuaucgagau

SEQ ID NO: 685887 - RNA, 19 nt, Homo sapiens
  misc_RNA (1)...(19): siRNA sense strand
gagcuuucccgaacucaug

SEQ ID NO: 685888 - RNA, 19 nt, Homo sapiens
  misc_RNA (1)...(19): siRNA sense strand
cugcuggacucaauguuug

SEQ ID NO: 685889 - RNA, 19 nt, Homo sapiens
  misc_RNA (1)...(19): siRNA sense strand
gacuugggcuucccuuugg

SEQ ID NO: 685890 - RNA, 19 nt, Homo sapiens
  misc_RNA (1)...(19): siRNA sense strand
cuccaggccugaucacuug

SEQ ID NO: 685891 - RNA, 19 nt, Homo sapiens
  misc_RNA (1)...(19): siRNA sense strand
ccaaccugcuggacucaau

SEQ ID NO: 685892 - RNA, 19 nt, Homo sapiens
  misc_RNA (1)...(19): siRNA sense strand
gccaaguuccugcugauga

SEQ ID NO: 685893 - RNA, 19 nt, Homo sapiens
  misc_RNA (1)...(19): siRNA sense strand
ugugagaucugcggcaaga

SEQ ID NO: 685894 - RNA, 19 nt, Homo sapiens
  misc_RNA (1)...(19): siRNA sense strand
ccaaguuccugcugaugag

SEQ ID NO: 685895 - RNA, 19 nt, Homo sapiens
  misc_RNA (1)...(19): siRNA sense strand
gagcuggagaugcacacua

SEQ ID NO: 685896 - RNA, 19 nt, Homo sapiens
  misc_RNA (1)...(19): siRNA sense strand
gcaagaucuuccgugaugu

SEQ ID NO: 685897 - RNA, 19 nt, Homo sapiens
  misc_RNA (1)...(19): siRNA sense strand
gguugcgguucaagagaaa

SEQ ID NO: 685898 - RNA, 19 nt, Homo sapiens
  misc_RNA (1)...(19): siRNA sense strand
gcgccgauauaaugcucuu

SEQ ID NO: 685899 - RNA, 19 nt, Homo sapiens
  misc_RNA (1)...(19): siRNA sense strand
ugccagagcugugggaaag

SEQ ID NO: 685900 - RNA, 19 nt, Homo sapiens
  misc_RNA (1)...(19): siRNA sense strand
caagaucuuccgugaugug

SEQ ID NO: 685901 - RNA, 19 nt, Homo sapiens
  misc_RNA (1)...(19): siRNA sense strand
gagggaggcaggcauccuu

SEQ ID NO: 685902 - RNA, 19 nt, Homo sapiens
  misc_RNA (1)...(19): siRNA sense strand
gcagacacagcacggagau

SEQ ID NO: 685903 - RNA, 19 nt, Homo sapiens
  misc_RNA (1)...(19): siRNA sense strand
ucaaacaguccaacguaca

SEQ ID NO: 685904 - RNA, 19 nt, Homo sapiens
  misc_RNA (1)...(19): siRNA sense strand
gcacaagcugucccacucu

SEQ ID NO: 685905 - RNA, 19 nt, Homo sapiens
  misc_RNA (1)...(19): siRNA sense strand
ucacuugaacggacauauc

SEQ ID NO: 685906 - RNA, 19 nt, Homo sapiens
  misc_RNA (1)...(19): siRNA sense strand
cugcugaugaggucgguua

SEQ ID NO: 685907 - RNA, 19 nt, Homo sapiens
  misc_RNA (1)...(19): siRNA sense strand
gguguucagcgcccaguug

SEQ ID NO: 685908 - RNA, 19 nt, Homo sapiens
  misc_RNA (1)...(19): siRNA sense strand
gaucugccaggaagucauc

SEQ ID NO: 685909 - RNA, 19 nt, Homo sapiens
  misc_RNA (1)...(19): siRNA sense strand
ggucgguuaucgagaucug

SEQ ID NO: 685910 - RNA, 19 nt, Homo sapiens
  misc_RNA (1)...(19): siRNA sense strand
gaggucgguuaucgagauc

SEQ ID NO: 685911 - RNA, 19 nt, Homo sapiens
  misc_RNA (1)...(19): siRNA sense strand
caugcggucuaugugguaa

SEQ ID NO: 685912 - RNA, 19 nt, Homo sapiens
  misc_RNA (1)...(19): siRNA sense strand
ccugcuggacucaauguuu

SEQ ID NO: 685913 - RNA, 19 nt, Homo sapiens
  misc_RNA (1)...(19): siRNA sense strand
caagguauuuggggacauu

SEQ ID NO: 685914 - RNA, 19 nt, Homo sapiens
  misc_RNA (1)...(19): siRNA sense strand
gguccgugggcaagccuua

SEQ ID NO: 685915 - RNA, 19 nt, Homo sapiens
  misc_RNA (1)...(19): siRNA sense strand
caggaagucaucaaacagu

SEQ ID NO: 685916 - RNA, 19 nt, Homo sapiens
  misc_RNA (1)...(19): siRNA sense strand
gccgauauaaugcucuuuc

SEQ ID NO: 685917 - RNA, 19 nt, Homo sapiens
  misc_RNA (1)...(19): siRNA sense strand
ggcuacccaucucugaaga

SEQ ID NO: 685918 - RNA, 19 nt, Homo sapiens
  misc_RNA (1)...(19): siRNA sense strand
gggcuacccaucucugaag

SEQ ID NO: 685919 - RNA, 19 nt, Homo sapiens
  misc_RNA (1)...(19): siRNA sense strand
cauaccaggugagcagaca

SEQ ID NO: 685920 - RNA, 19 nt, Homo sapiens
  misc_RNA (1)...(19): siRNA sense strand
cacuugaacggacauauca

SEQ ID NO: 685921 - RNA, 19 nt, Homo sapiens
  misc_RNA (1)...(19): siRNA sense strand
gcacggagaugcugcacaa

SEQ ID NO: 685922 - RNA, 19 nt, Homo sapiens
  misc_RNA (1)...(19): siRNA sense strand
gcagguggcuugugagauc

SEQ ID NO: 685923 - RNA, 19 nt, Homo sapiens
  misc_RNA (1)...(19): siRNA sense strand
ggcaagaucuuccgugaug

SEQ ID NO: 685924 - RNA, 19 nt, Homo sapiens
  misc_RNA (1)...(19): siRNA sense strand
gaucuuccgugauguguau

SEQ ID NO: 685925 - RNA, 19 nt, Homo sapiens
  misc_RNA (1)...(19): siRNA sense strand
gugguaagguguucacuga

SEQ ID NO: 685926 - RNA, 19 nt, Homo sapiens
  misc_RNA (1)...(19): siRNA sense strand
gguaagguguucacugaug

SEQ ID NO: 685927 - RNA, 19 nt, Homo sapiens
  misc_RNA (1)...(19): siRNA sense strand
ggacuugggcuucccuuug

SEQ ID NO: 685928 - RNA, 19 nt, Homo sapiens
  misc_RNA (1)...(19): siRNA sense strand
ucaagcaggugcacacuuc

SEQ ID NO: 685929 - RNA, 19 nt, Homo sapiens
  misc_RNA (1)...(19): siRNA sense strand
gaaaagaccgcauguccua

SEQ ID NO: 685930 - RNA, 19 nt, Homo sapiens
  misc_RNA (1)...(19): siRNA sense strand
gccaggaagucaucaaaca

SEQ ID NO: 685931 - RNA, 19 nt, Homo sapiens
  misc_RNA (1)...(19): siRNA sense strand
caucaaacaguccaacgua

SEQ ID NO: 685932 - RNA, 19 nt, Homo sapiens
  misc_RNA (1)...(19): siRNA sense strand
caacguacagauccuggua

SEQ ID NO: 685933 - RNA, 19 nt, Homo sapiens
  misc_RNA (1)...(19): siRNA sense strand
acuaucagcuccaagguau

SEQ ID NO: 685934 - RNA, 19 nt, Homo sapiens
  misc_RNA (1)...(19): siRNA sense strand
gggcuucccuuuggacaug

SEQ ID NO: 685935 - RNA, 19 nt, Homo sapiens
  misc_RNA (1)...(19): siRNA sense strand
ggagagcuuucccgaacuc

SEQ ID NO: 685936 - RNA, 19 nt, Homo sapiens
  misc_RNA (1)...(19): siRNA sense strand
ggguugcgguucaagagaa

SEQ ID NO: 685937 - RNA, 19 nt, Homo sapiens
  misc_RNA (1)...(19): siRNA sense strand
uaucagcuccaagguauuu

SEQ ID NO: 685938 - RNA, 19 nt, Homo sapiens
  misc_RNA (1)...(19): siRNA sense strand
ugaggucgguuaucgagau

SEQ ID NO: 685939 - RNA, 19 nt, Homo sapiens
  misc_RNA (1)...(19): siRNA sense strand
gagcuuucccgaacucaug

SEQ ID NO: 685940 - RNA, 19 nt, Homo sapiens
  misc_RNA (1)...(19): siRNA sense strand
cugcuggacucaauguuug

SEQ ID NO: 685941 - RNA, 19 nt, Homo sapiens
  misc_RNA (1)...(19): siRNA sense strand
gacuugggcuucccuuugg

SEQ ID NO: 685942 - RNA, 19 nt, Homo sapiens
  misc_RNA (1)...(19): siRNA sense strand
cuccaggccugaucacuug

SEQ ID NO: 685943 - RNA, 19 nt, Homo sapiens
  misc_RNA (1)...(19): siRNA sense strand
ccaaccugcuggacucaau

SEQ ID NO: 685944 - RNA, 19 nt, Homo sapiens
  misc_RNA (1)...(19): siRNA sense strand
gccaaguuccugcugauga

SEQ ID NO: 685945 - RNA, 19 nt, Homo sapiens
  misc_RNA (1)...(19): siRNA sense strand
ugugagaucugcggcaaga

SEQ ID NO: 685946 - RNA, 19 nt, Homo sapiens
  misc_RNA (1)...(19): siRNA sense strand
ccaaguuccugcugaugag

SEQ ID NO: 685947 - RNA, 19 nt, Homo sapiens
  misc_RNA (1)...(19): siRNA sense strand
gagcuggagaugcacacua

SEQ ID NO: 685948 - RNA, 19 nt, Homo sapiens
  misc_RNA (1)...(19): siRNA sense strand
gcaagaucuuccgugaugu

SEQ ID NO: 685949 - RNA, 19 nt, Homo sapiens
  misc_RNA (1)...(19): siRNA sense strand
gguugcgguucaagagaaa

SEQ ID NO: 685950 - RNA, 19 nt, Homo sapiens
  misc_RNA (1)...(19): siRNA sense strand
gcgccgauauaaugcucuu

SEQ ID NO: 685951 - RNA, 19 nt, Homo sapiens
  misc_RNA (1)...(19): siRNA sense strand
ugccagagcugugggaaag

SEQ ID NO: 685952 - RNA, 19 nt, Homo sapiens
  misc_RNA (1)...(19): siRNA sense strand
caagaucuuccgugaugug

SEQ ID NO: 685953 - RNA, 19 nt, Homo sapiens
  misc_RNA (1)...(19): siRNA sense strand
gagggaggcaggcauccuu

SEQ ID NO: 685954 - RNA, 19 nt, Homo sapiens
  misc_RNA (1)...(19): siRNA sense strand
gcagacacagcacggagau

SEQ ID NO: 685955 - RNA, 19 nt, Homo sapiens
  misc_RNA (1)...(19): siRNA sense strand
ucaaacaguccaacguaca

SEQ ID NO: 685956 - RNA, 19 nt, Homo sapiens
  misc_RNA (1)...(19): siRNA sense strand
gcacaagcugucccacucu

SEQ ID NO: 685957 - RNA, 19 nt, Homo sapiens
  misc_RNA (1)...(19): siRNA sense strand
ucacuugaacggacauauc

SEQ ID NO: 685958 - RNA, 19 nt, Homo sapiens
  misc_RNA (1)...(19): siRNA sense strand
cugcugaugaggucgguua

SEQ ID NO: 685959 - RNA, 19 nt, Homo sapiens
  misc_RNA (1)...(19): siRNA sense strand
gguguucagcgcccaguug

SEQ ID NO: 685960 - RNA, 19 nt, Homo sapiens
  misc_RNA (1)...(19): siRNA sense strand
gaucugccaggaagucauc

SEQ ID NO: 685961 - RNA, 19 nt, Homo sapiens
  misc_RNA (1)...(19): siRNA sense strand
ggucgguuaucgagaucug

SEQ ID NO: 685962 - RNA, 19 nt, Homo sapiens
  misc_RNA (1)...(19): siRNA sense strand
gaggucgguuaucgagauc

SEQ ID NO: 685963 - RNA, 19 nt, Homo sapiens
  misc_RNA (1)...(19): siRNA sense strand
caugcggucuaugugguaa

SEQ ID NO: 685964 - RNA, 19 nt, Homo sapiens
  misc_RNA (1)...(19): siRNA sense strand
ccugcuggacucaauguuu

SEQ ID NO: 685965 - RNA, 19 nt, Homo sapiens
  misc_RNA (1)...(19): siRNA sense strand
caagguauuuggggacauu

SEQ ID NO: 685966 - RNA, 19 nt, Homo sapiens
  misc_RNA (1)...(19): siRNA sense strand
gguccgugggcaagccuua

SEQ ID NO: 685967 - RNA, 19 nt, Homo sapiens
  misc_RNA (1)...(19): siRNA sense strand
caggaagucaucaaacagu

SEQ ID NO: 685968 - RNA, 19 nt, Homo sapiens
  misc_RNA (1)...(19): siRNA sense strand
gccgauauaaugcucuuuc

SEQ ID NO: 685969 - RNA, 19 nt, Homo sapiens
  misc_RNA (1)...(19): siRNA sense strand
ggcuacccaucucugaaga

SEQ ID NO: 685970 - RNA, 19 nt, Homo sapiens
  misc_RNA (1)...(19): siRNA sense strand
gggcuacccaucucugaag

SEQ ID NO: 685971 - RNA, 19 nt, Homo sapiens
  misc_RNA (1)...(19): siRNA sense strand
cauaccaggugagcagaca

SEQ ID NO: 685972 - RNA, 19 nt, Homo sapiens
  misc_RNA (1)...(19): siRNA sense strand
cacuugaacggacauauca

SEQ ID NO: 685973 - RNA, 19 nt, Homo sapiens
  misc_RNA (1)...(19): siRNA sense strand
gcacggagaugcugcacaa

SEQ ID NO: 685974 - RNA, 19 nt, Homo sapiens
  misc_RNA (1)...(19): siRNA sense strand
gcagguggcuugugagauc

SEQ ID NO: 685975 - RNA, 19 nt, Homo sapiens
  misc_RNA (1)...(19): siRNA sense strand
ggcaagaucuuccgugaug

SEQ ID NO: 685976 - RNA, 19 nt, Homo sapiens
  misc_RNA (1)...(19): siRNA sense strand
gaucuuccgugauguguau

SEQ ID NO: 685977 - RNA, 19 nt, Homo sapiens
  misc_RNA (1)...(19): siRNA sense strand
gugguaagguguucacuga

SEQ ID NO: 685978 - RNA, 19 nt, Homo sapiens
  misc_RNA (1)...(19): siRNA sense strand
gguaagguguucacugaug

SEQ ID NO: 685979 - RNA, 19 nt, Homo sapiens
  misc_RNA (1)...(19): siRNA sense strand
ggacuugggcuucccuuug

SEQ ID NO: 685980 - RNA, 19 nt, Homo sapiens
  misc_RNA (1)...(19): siRNA sense strand
ucaagcaggugcacacuuc

SEQ ID NO: 685981 - RNA, 19 nt, Homo sapiens
  misc_RNA (1)...(19): siRNA sense strand
gaaaagaccgcauguccua

SEQ ID NO: 685982 - RNA, 19 nt, Homo sapiens
  misc_RNA (1)...(19): siRNA sense strand
gccaggaagucaucaaaca

SEQ ID NO: 685983 - RNA, 19 nt, Homo sapiens
  misc_RNA (1)...(19): siRNA sense strand
caucaaacaguccaacgua

SEQ ID NO: 685984 - RNA, 19 nt, Homo sapiens
  misc_RNA (1)...(19): siRNA sense strand
caacguacagauccuggua

SEQ ID NO: 685985 - RNA, 19 nt, Homo sapiens
  misc_RNA (1)...(19): siRNA sense strand
acuaucagcuccaagguau

SEQ ID NO: 685986 - RNA, 19 nt, Homo sapiens
  misc_RNA (1)...(19): siRNA sense strand
gggcuucccuuuggacaug

SEQ ID NO: 685987 - RNA, 19 nt, Homo sapiens
  misc_RNA (1)...(19): siRNA sense strand
ggagagcuuucccgaacuc

SEQ ID NO: 685988 - RNA, 19 nt, Homo sapiens
  misc_RNA (1)...(19): siRNA sense strand
ggguugcgguucaagagaa

SEQ ID NO: 685989 - RNA, 19 nt, Homo sapiens
  misc_RNA (1)...(19): siRNA sense strand
uaucagcuccaagguauuu

SEQ ID NO: 685990 - RNA, 19 nt, Homo sapiens
  misc_RNA (1)...(19): siRNA sense strand
ugaggucgguuaucgagau

SEQ ID NO: 685991 - RNA, 19 nt, Homo sapiens
  misc_RNA (1)...(19): siRNA sense strand
gagcuuucccgaacucaug

SEQ ID NO: 685992 - RNA, 19 nt, Homo sapiens
  misc_RNA (1)...(19): siRNA sense strand
cugcuggacucaauguuug

SEQ ID NO: 685993 - RNA, 19 nt, Homo sapiens
  misc_RNA (1)...(19): siRNA sense strand
gacuugggcuucccuuugg

SEQ ID NO: 685994 - RNA, 19 nt, Homo sapiens
  misc_RNA (1)...(19): siRNA sense strand
cuccaggccugaucacuug

SEQ ID NO: 685995 - RNA, 19 nt, Homo sapiens
  misc_RNA (1)...(19): siRNA sense strand
ccaaccugcuggacucaau

SEQ ID NO: 685996 - RNA, 19 nt, Homo sapiens
  misc_RNA (1)...(19): siRNA sense strand
gccaaguuccugcugauga

SEQ ID NO: 685997 - RNA, 19 nt, Homo sapiens
  misc_RNA (1)...(19): siRNA sense strand
ugugagaucugcggcaaga

SEQ ID NO: 685998 - RNA, 19 nt, Homo sapiens
  misc_RNA (1)...(19): siRNA sense strand
ccaaguuccugcugaugag

SEQ ID NO: 685999 - RNA, 19 nt, Homo sapiens
  misc_RNA (1)...(19): siRNA sense strand
gagcuggagaugcacacua

SEQ ID NO: 686000 - RNA, 19 nt, Homo sapiens
  misc_RNA (1)...(19): siRNA sense strand
gcaagaucuuccgugaugu

SEQ ID NO: 686001 - RNA, 19 nt, Homo sapiens
  misc_RNA (1)...(19): siRNA sense strand
gguugcgguucaagagaaa

SEQ ID NO: 686002 - RNA, 19 nt, Homo sapiens
  misc_RNA (1)...(19): siRNA sense strand
gcgccgauauaaugcucuu

SEQ ID NO: 686003 - RNA, 19 nt, Homo sapiens
  misc_RNA (1)...(19): siRNA sense strand
ugccagagcugugggaaag

SEQ ID NO: 686004 - RNA, 19 nt, Homo sapiens
  misc_RNA (1)...(19): siRNA sense strand
caagaucuuccgugaugug

SEQ ID NO: 686005 - RNA, 19 nt, Homo sapiens
  misc_RNA (1)...(19): siRNA sense strand
gagggaggcaggcauccuu

SEQ ID NO: 686006 - RNA, 19 nt, Homo sapiens
  misc_RNA (1)...(19): siRNA sense strand
gcagacacagcacggagau

SEQ ID NO: 686007 - RNA, 19 nt, Homo sapiens
  misc_RNA (1)...(19): siRNA sense strand
ucaaacaguccaacguaca

SEQ ID NO: 686008 - RNA, 19 nt, Homo sapiens
  misc_RNA (1)...(19): siRNA sense strand
gcacaagcugucccacucu

SEQ ID NO: 686009 - RNA, 19 nt, Homo sapiens
  misc_RNA (1)...(19): siRNA sense strand
ucacuugaacggacauauc

SEQ ID NO: 686010 - RNA, 19 nt, Homo sapiens
  misc_RNA (1)...(19): siRNA sense strand
cugcugaugaggucgguua

SEQ ID NO: 686011 - RNA, 19 nt, Homo sapiens
  misc_RNA (1)...(19): siRNA sense strand
gguguucagcgcccaguug

SEQ ID NO: 686012 - RNA, 19 nt, Homo sapiens
  misc_RNA (1)...(19): siRNA sense strand
gaucugccaggaagucauc

SEQ ID NO: 686013 - RNA, 19 nt, Homo sapiens
  misc_RNA (1)...(19): siRNA sense strand
ggucgguuaucgagaucug

SEQ ID NO: 686014 - RNA, 19 nt, Homo sapiens
  misc_RNA (1)...(19): siRNA sense strand
gaggucgguuaucgagauc

SEQ ID NO: 686015 - RNA, 19 nt, Homo sapiens
  misc_RNA (1)...(19): siRNA sense strand
caugcggucuaugugguaa

SEQ ID NO: 686016 - RNA, 19 nt, Homo sapiens
  misc_RNA (1)...(19): siRNA sense strand
ccugcuggacucaauguuu

SEQ ID NO: 686017 - RNA, 19 nt, Homo sapiens
  misc_RNA (1)...(19): siRNA sense strand
caagguauuuggggacauu

SEQ ID NO: 686018 - RNA, 19 nt, Homo sapiens
  misc_RNA (1)...(19): siRNA sense strand
gguccgugggcaagccuua

SEQ ID NO: 686019 - RNA, 19 nt, Homo sapiens
  misc_RNA (1)...(19): siRNA sense strand
caggaagucaucaaacagu

SEQ ID NO: 686020 - RNA, 19 nt, Homo sapiens
  misc_RNA (1)...(19): siRNA sense strand
gccgauauaaugcucuuuc

SEQ ID NO: 686021 - RNA, 19 nt, Homo sapiens
  misc_RNA (1)...(19): siRNA sense strand
ggcuacccaucucugaaga

SEQ ID NO: 686022 - RNA, 19 nt, Homo sapiens
  misc_RNA (1)...(19): siRNA sense strand
gggcuacccaucucugaag

SEQ ID NO: 686023 - RNA, 19 nt, Homo sapiens
  misc_RNA (1)...(19): siRNA sense strand
cauaccaggugagcagaca

SEQ ID NO: 686024 - RNA, 19 nt, Homo sapiens
  misc_RNA (1)...(19): siRNA sense strand
cacuugaacggacauauca

SEQ ID NO: 686025 - RNA, 19 nt, Homo sapiens
  misc_RNA (1)...(19): siRNA sense strand
gcacggagaugcugcacaa

SEQ ID NO: 686026 - RNA, 19 nt, Homo sapiens
  misc_RNA (1)...(19): siRNA sense strand
gcagguggcuugugagauc

SEQ ID NO: 686027 - RNA, 19 nt, Homo sapiens
  misc_RNA (1)...(19): siRNA sense strand
ggcaagaucuuccgugaug

SEQ ID NO: 686028 - RNA, 19 nt, Homo sapiens
  misc_RNA (1)...(19): siRNA sense strand
gaucuuccgugauguguau

SEQ ID NO: 686029 - RNA, 19 nt, Homo sapiens
  misc_RNA (1)...(19): siRNA sense strand
gugguaagguguucacuga

SEQ ID NO: 686030 - RNA, 19 nt, Homo sapiens
  misc_RNA (1)...(19): siRNA sense strand
gguaagguguucacugaug

SEQ ID NO: 686031 - RNA, 19 nt, Homo sapiens
  misc_RNA (1)...(19): siRNA sense strand
ggacuugggcuucccuuug

SEQ ID NO: 686032 - RNA, 19 nt, Homo sapiens
  misc_RNA (1)...(19): siRNA sense strand
ucaagcaggugcacacuuc

SEQ ID NO: 686033 - RNA, 19 nt, Homo sapiens
  misc_RNA (1)...(19): siRNA sense strand
gaaaagaccgcauguccua

SEQ ID NO: 686034 - RNA, 19 nt, Homo sapiens
  misc_RNA (1)...(19): siRNA sense strand
gccaggaagucaucaaaca

SEQ ID NO: 686035 - RNA, 19 nt, Homo sapiens
  misc_RNA (1)...(19): siRNA sense strand
caucaaacaguccaacgua

SEQ ID NO: 686036 - RNA, 19 nt, Homo sapiens
  misc_RNA (1)...(19): siRNA sense strand
caacguacagauccuggua

SEQ ID NO: 686037 - RNA, 19 nt, Homo sapiens
  misc_RNA (1)...(19): siRNA sense strand
acuaucagcuccaagguau

SEQ ID NO: 686038 - RNA, 19 nt, Homo sapiens
  misc_RNA (1)...(19): siRNA sense strand
gggcuucccuuuggacaug

SEQ ID NO: 686039 - RNA, 19 nt, Homo sapiens
  misc_RNA (1)...(19): siRNA sense strand
ggagagcuuucccgaacuc

SEQ ID NO: 686040 - RNA, 19 nt, Homo sapiens
  misc_RNA (1)...(19): siRNA sense strand
ggguugcgguucaagagaa

SEQ ID NO: 686041 - RNA, 19 nt, Homo sapiens
  misc_RNA (1)...(19): siRNA sense strand
uaucagcuccaagguauuu

SEQ ID NO: 686042 - RNA, 19 nt, Homo sapiens
  misc_RNA (1)...(19): siRNA sense strand
ugaggucgguuaucgagau

SEQ ID NO: 686043 - RNA, 19 nt, Homo sapiens
  misc_RNA (1)...(19): siRNA sense strand
gagcuuucccgaacucaug

SEQ ID NO: 686044 - RNA, 19 nt, Homo sapiens
  misc_RNA (1)...(19): siRNA sense strand
cugcuggacucaauguuug

SEQ ID NO: 686045 - RNA, 19 nt, Homo sapiens
  misc_RNA (1)...(19): siRNA sense strand
gacuugggcuucccuuugg

SEQ ID NO: 686046 - RNA, 19 nt, Homo sapiens
  misc_RNA (1)...(19): siRNA sense strand
cuccaggccugaucacuug

SEQ ID NO: 686047 - RNA, 19 nt, Homo sapiens
  misc_RNA (1)...(19): siRNA sense strand
ccaaccugcuggacucaau

SEQ ID NO: 686048 - RNA, 19 nt, Homo sapiens
  misc_RNA (1)...(19): siRNA sense strand
gccaaguuccugcugauga

SEQ ID NO: 686049 - RNA, 19 nt, Homo sapiens
  misc_RNA (1)...(19): siRNA sense strand
ugugagaucugcggcaaga

SEQ ID NO: 686050 - RNA, 19 nt, Homo sapiens
  misc_RNA (1)...(19): siRNA sense strand
ccaaguuccugcugaugag

SEQ ID NO: 686051 - RNA, 19 nt, Homo sapiens
  misc_RNA (1)...(19): siRNA sense strand
gagcuggagaugcacacua

SEQ ID NO: 686052 - RNA, 19 nt, Homo sapiens
  misc_RNA (1)...(19): siRNA sense strand
gcaagaucuuccgugaugu

SEQ ID NO: 686053 - RNA, 19 nt, Homo sapiens
  misc_RNA (1)...(19): siRNA sense strand
gguugcgguucaagagaaa

SEQ ID NO: 686054 - RNA, 19 nt, Homo sapiens
  misc_RNA (1)...(19): siRNA sense strand
gcgccgauauaaugcucuu

SEQ ID NO: 686055 - RNA, 19 nt, Homo sapiens
  misc_RNA (1)...(19): siRNA sense strand
ugccagagcugugggaaag

SEQ ID NO: 686056 - RNA, 19 nt, Homo sapiens
  misc_RNA (1)...(19): siRNA sense strand
caagaucuuccgugaugug

SEQ ID NO: 686057 - RNA, 19 nt, Homo sapiens
  misc_RNA (1)...(19): siRNA sense strand
gagggaggcaggcauccuu

SEQ ID NO: 686058 - RNA, 19 nt, Homo sapiens
  misc_RNA (1)...(19): siRNA sense strand
gcagacacagcacggagau

SEQ ID NO: 686059 - RNA, 19 nt, Homo sapiens
  misc_RNA (1)...(19): siRNA sense strand
ucaaacaguccaacguaca

SEQ ID NO: 686060 - RNA, 19 nt, Homo sapiens
  misc_RNA (1)...(19): siRNA sense strand
gcacaagcugucccacucu

SEQ ID NO: 686061 - RNA, 19 nt, Homo sapiens
  misc_RNA (1)...(19): siRNA sense strand
ucacuugaacggacauauc

SEQ ID NO: 686062 - RNA, 19 nt, Homo sapiens
  misc_RNA (1)...(19): siRNA sense strand
cugcugaugaggucgguua

SEQ ID NO: 686063 - RNA, 19 nt, Homo sapiens
  misc_RNA (1)...(19): siRNA sense strand
gguguucagcgcccaguug

SEQ ID NO: 686064 - RNA, 19 nt, Homo sapiens
  misc_RNA (1)...(19): siRNA sense strand
gaucugccaggaagucauc

SEQ ID NO: 686065 - RNA, 19 nt, Homo sapiens
  misc_RNA (1)...(19): siRNA sense strand
ggucgguuaucgagaucug

SEQ ID NO: 686066 - RNA, 19 nt, Homo sapiens
  misc_RNA (1)...(19): siRNA sense strand
gaggucgguuaucgagauc

SEQ ID NO: 686067 - RNA, 19 nt, Homo sapiens
  misc_RNA (1)...(19): siRNA sense strand
caugcggucuaugugguaa

SEQ ID NO: 686068 - RNA, 19 nt, Homo sapiens
  misc_RNA (1)...(19): siRNA sense strand
ccugcuggacucaauguuu

SEQ ID NO: 686069 - RNA, 19 nt, Homo sapiens
  misc_RNA (1)...(19): siRNA sense strand
caagguauuuggggacauu

SEQ ID NO: 686070 - RNA, 19 nt, Homo sapiens
  misc_RNA (1)...(19): siRNA sense strand
gguccgugggcaagccuua

SEQ ID NO: 686071 - RNA, 19 nt, Homo sapiens
  misc_RNA (1)...(19): siRNA sense strand
caggaagucaucaaacagu

SEQ ID NO: 686072 - RNA, 19 nt, Homo sapiens
  misc_RNA (1)...(19): siRNA sense strand
gccgauauaaugcucuuuc

SEQ ID NO: 686073 - RNA, 19 nt, Homo sapiens
  misc_RNA (1)...(19): siRNA sense strand
ggcuacccaucucugaaga

SEQ ID NO: 686074 - RNA, 19 nt, Homo sapiens
  misc_RNA (1)...(19): siRNA sense strand
gggcuacccaucucugaag

SEQ ID NO: 686075 - RNA, 19 nt, Homo sapiens
  misc_RNA (1)...(19): siRNA sense strand
cauaccaggugagcagaca

SEQ ID NO: 686076 - RNA, 19 nt, Homo sapiens
  misc_RNA (1)...(19): siRNA sense strand
cacuugaacggacauauca

SEQ ID NO: 686077 - RNA, 19 nt, Homo sapiens
  misc_RNA (1)...(19): siRNA sense strand
gcacggagaugcugcacaa

SEQ ID NO: 686078 - RNA, 19 nt, Homo sapiens
  misc_RNA (1)...(19): siRNA sense strand
gcagguggcuugugagauc

SEQ ID NO: 686079 - RNA, 19 nt, Homo sapiens
  misc_RNA (1)...(19): siRNA sense strand
ggcaagaucuuccgugaug

SEQ ID NO: 686080 - RNA, 19 nt, Homo sapiens
  misc_RNA (1)...(19): siRNA sense strand
gaucuuccgugauguguau

SEQ ID NO: 686081 - RNA, 19 nt, Homo sapiens
  misc_RNA (1)...(19): siRNA sense strand
gugguaagguguucacuga

SEQ ID NO: 686082 - RNA, 19 nt, Homo sapiens
  misc_RNA (1)...(19): siRNA sense strand
gguaagguguucacugaug

SEQ ID NO: 686083 - RNA, 19 nt, Homo sapiens
  misc_RNA (1)...(19): siRNA sense strand
ggacuugggcuucccuuug

SEQ ID NO: 686084 - RNA, 19 nt, Homo sapiens
  misc_RNA (1)...(19): siRNA sense strand
ucaagcaggugcacacuuc

SEQ ID NO: 686085 - RNA, 19 nt, Homo sapiens
  misc_RNA (1)...(19): siRNA sense strand
gaaaagaccgcauguccua

SEQ ID NO: 686086 - RNA, 19 nt, Homo sapiens
  misc_RNA (1)...(19): siRNA sense strand
gccaggaagucaucaaaca

SEQ ID NO: 686087 - RNA, 19 nt, Homo sapiens
  misc_RNA (1)...(19): siRNA sense strand
caucaaacaguccaacgua

SEQ ID NO: 686088 - RNA, 19 nt, Homo sapiens
  misc_RNA (1)...(19): siRNA sense strand
caacguacagauccuggua

SEQ ID NO: 686089 - RNA, 19 nt, Homo sapiens
  misc_RNA (1)...(19): siRNA sense strand
acuaucagcuccaagguau

SEQ ID NO: 686090 - RNA, 19 nt, Homo sapiens
  misc_RNA (1)...(19): siRNA sense strand
gggcuucccuuuggacaug

SEQ ID NO: 686091 - RNA, 19 nt, Homo sapiens
  misc_RNA (1)...(19): siRNA sense strand
ggagagcuuucccgaacuc

SEQ ID NO: 686092 - RNA, 19 nt, Homo sapiens
  misc_RNA (1)...(19): siRNA sense strand
ggguugcgguucaagagaa

SEQ ID NO: 686093 - RNA, 19 nt, Homo sapiens
  misc_RNA (1)...(19): siRNA sense strand
uaucagcuccaagguauuu

SEQ ID NO: 686094 - RNA, 19 nt, Homo sapiens
  misc_RNA (1)...(19): siRNA sense strand
ugaggucgguuaucgagau

SEQ ID NO: 686095 - RNA, 19 nt, Homo sapiens
  misc_RNA (1)...(19): siRNA sense strand
gagcuuucccgaacucaug

SEQ ID NO: 686096 - RNA, 19 nt, Homo sapiens
  misc_RNA (1)...(19): siRNA sense strand
cugcuggacucaauguuug

SEQ ID NO: 686097 - RNA, 19 nt, Homo sapiens
  misc_RNA (1)...(19): siRNA sense strand
gacuugggcuucccuuugg

SEQ ID NO: 686098 - RNA, 19 nt, Homo sapiens
  misc_RNA (1)...(19): siRNA sense strand
cuccaggccugaucacuug

SEQ ID NO: 686099 - RNA, 19 nt, Homo sapiens
  misc_RNA (1)...(19): siRNA sense strand
ccaaccugcuggacucaau

SEQ ID NO: 686100 - RNA, 19 nt, Homo sapiens
  misc_RNA (1)...(19): siRNA sense strand
gccaaguuccugcugauga

SEQ ID NO: 686101 - RNA, 19 nt, Homo sapiens
  misc_RNA (1)...(19): siRNA sense strand
ugugagaucugcggcaaga

SEQ ID NO: 686102 - RNA, 19 nt, Homo sapiens
  misc_RNA (1)...(19): siRNA sense strand
ccaaguuccugcugaugag

SEQ ID NO: 686103 - RNA, 19 nt, Homo sapiens
  misc_RNA (1)...(19): siRNA sense strand
gagcuggagaugcacacua

SEQ ID NO: 686104 - RNA, 19 nt, Homo sapiens
  misc_RNA (1)...(19): siRNA sense strand
gcaagaucuuccgugaugu

SEQ ID NO: 686105 - RNA, 19 nt, Homo sapiens
  misc_RNA (1)...(19): siRNA sense strand
gguugcgguucaagagaaa

SEQ ID NO: 686106 - RNA, 19 nt, Homo sapiens
  misc_RNA (1)...(19): siRNA sense strand
gcgccgauauaaugcucuu

SEQ ID NO: 686107 - RNA, 19 nt, Homo sapiens
  misc_RNA (1)...(19): siRNA sense strand
ugccagagcugugggaaag

SEQ ID NO: 686108 - RNA, 19 nt, Homo sapiens
  misc_RNA (1)...(19): siRNA sense strand
caagaucuuccgugaugug

SEQ ID NO: 686109 - RNA, 19 nt, Homo sapiens
  misc_RNA (1)...(19): siRNA sense strand
gagggaggcaggcauccuu

SEQ ID NO: 686110 - RNA, 19 nt, Homo sapiens
  misc_RNA (1)...(19): siRNA sense strand
gcagacacagcacggagau

SEQ ID NO: 686111 - RNA, 19 nt, Homo sapiens
  misc_RNA (1)...(19): siRNA sense strand
ucaaacaguccaacguaca

SEQ ID NO: 686112 - RNA, 19 nt, Homo sapiens
  misc_RNA (1)...(19): siRNA sense strand
gcacaagcugucccacucu

SEQ ID NO: 686113 - RNA, 19 nt, Homo sapiens
  misc_RNA (1)...(19): siRNA sense strand
ucacuugaacggacauauc

SEQ ID NO: 686114 - RNA, 19 nt, Homo sapiens
  misc_RNA (1)...(19): siRNA sense strand
cugcugaugaggucgguua

SEQ ID NO: 686115 - RNA, 19 nt, Homo sapiens
  misc_RNA (1)...(19): siRNA sense strand
gguguucagcgcccaguug

SEQ ID NO: 686116 - RNA, 19 nt, Homo sapiens
  misc_RNA (1)...(19): siRNA sense strand
gaucugccaggaagucauc

SEQ ID NO: 686117 - RNA, 19 nt, Homo sapiens
  misc_RNA (1)...(19): siRNA sense strand
ggucgguuaucgagaucug

SEQ ID NO: 686118 - RNA, 19 nt, Homo sapiens
  misc_RNA (1)...(19): siRNA sense strand
gaggucgguuaucgagauc

SEQ ID NO: 686119 - RNA, 19 nt, Homo sapiens
  misc_RNA (1)...(19): siRNA sense strand
caugcggucuaugugguaa

SEQ ID NO: 686120 - RNA, 19 nt, Homo sapiens
  misc_RNA (1)...(19): siRNA sense strand
ccugcuggacucaauguuu

SEQ ID NO: 686121 - RNA, 19 nt, Homo sapiens
  misc_RNA (1)...(19): siRNA sense strand
caagguauuuggggacauu

SEQ ID NO: 686122 - RNA, 19 nt, Homo sapiens
  misc_RNA (1)...(19): siRNA sense strand
gguccgugggcaagccuua

SEQ ID NO: 686123 - RNA, 19 nt, Homo sapiens
  misc_RNA (1)...(19): siRNA sense strand
caggaagucaucaaacagu

SEQ ID NO: 686124 - RNA, 19 nt, Homo sapiens
  misc_RNA (1)...(19): siRNA sense strand
gccgauauaaugcucuuuc

SEQ ID NO: 686125 - RNA, 19 nt, Homo sapiens
  misc_RNA (1)...(19): siRNA sense strand
ggcuacccaucucugaaga

SEQ ID NO: 686126 - RNA, 19 nt, Homo sapiens
  misc_RNA (1)...(19): siRNA sense strand
gggcuacccaucucugaag

SEQ ID NO: 686127 - RNA, 19 nt, Homo sapiens
  misc_RNA (1)...(19): siRNA sense strand
cauaccaggugagcagaca

SEQ ID NO: 686128 - RNA, 19 nt, Homo sapiens
  misc_RNA (1)...(19): siRNA sense strand
cacuugaacggacauauca

SEQ ID NO: 686129 - RNA, 19 nt, Homo sapiens
  misc_RNA (1)...(19): siRNA sense strand
gaagaagucucagaauaua

SEQ ID NO: 686130 - RNA, 19 nt, Homo sapiens
  misc_RNA (1)...(19): siRNA sense strand
gggaagaagucucagaaua

SEQ ID NO: 686131 - RNA, 19 nt, Homo sapiens
  misc_RNA (1)...(19): siRNA sense strand
gaagauacagugaagauuu

SEQ ID NO: 686132 - RNA, 19 nt, Homo sapiens
  misc_RNA (1)...(19): siRNA sense strand
gaaauggccuagucacaug

SEQ ID NO: 686133 - RNA, 19 nt, Homo sapiens
  misc_RNA (1)...(19): siRNA sense strand
ggaagaagucucagaauau

SEQ ID NO: 686134 - RNA, 19 nt, Homo sapiens
  misc_RNA (1)...(19): siRNA sense strand
gaaaagaccuauggaaauu

SEQ ID NO: 686135 - RNA, 19 nt, Homo sapiens
  misc_RNA (1)...(19): siRNA sense strand
ugacaaaccuggagauucu

SEQ ID NO: 686136 - RNA, 19 nt, Homo sapiens
  misc_RNA (1)...(19): siRNA sense strand
uaucacagcuauuucaguu

SEQ ID NO: 686137 - RNA, 19 nt, Homo sapiens
  misc_RNA (1)...(19): siRNA sense strand
caacucaaacgguuacuuu

SEQ ID NO: 686138 - RNA, 19 nt, Homo sapiens
  misc_RNA (1)...(19): siRNA sense strand
ucacagcuauuucaguuga

SEQ ID NO: 686139 - RNA, 19 nt, Homo sapiens
  misc_RNA (1)...(19): siRNA sense strand
guuaccagcucaacucaaa

SEQ ID NO: 686140 - RNA, 19 nt, Homo sapiens
  misc_RNA (1)...(19): siRNA sense strand
cauguucuauuccagauaa

SEQ ID NO: 686141 - RNA, 19 nt, Homo sapiens
  misc_RNA (1)...(19): siRNA sense strand
aagcgagccucuucugaua

SEQ ID NO: 686142 - RNA, 19 nt, Homo sapiens
  misc_RNA (1)...(19): siRNA sense strand
ggguagagguggaaauaau

SEQ ID NO: 686143 - RNA, 19 nt, Homo sapiens
  misc_RNA (1)...(19): siRNA sense strand
ugaggacucuggauucuau

SEQ ID NO: 686144 - RNA, 19 nt, Homo sapiens
  misc_RNA (1)...(19): siRNA sense strand
gcaccagaagucacaguua

SEQ ID NO: 686145 - RNA, 19 nt, Homo sapiens
  misc_RNA (1)...(19): siRNA sense strand
gagccuccaucuuaucuau

SEQ ID NO: 686146 - RNA, 19 nt, Homo sapiens
  misc_RNA (1)...(19): siRNA sense strand
ggacagggaagaagucuca

SEQ ID NO: 686147 - RNA, 19 nt, Homo sapiens
  misc_RNA (1)...(19): siRNA sense strand
ggacagaacagagggaaau

SEQ ID NO: 686148 - RNA, 19 nt, Homo sapiens
  misc_RNA (1)...(19): siRNA sense strand
cgauaaugcucccguguuc

SEQ ID NO: 686149 - RNA, 19 nt, Homo sapiens
  misc_RNA (1)...(19): siRNA sense strand
gggcuuuccugcagaccua

SEQ ID NO: 686150 - RNA, 19 nt, Homo sapiens
  misc_RNA (1)...(19): siRNA sense strand
ugccaggauucucauaaua

SEQ ID NO: 686151 - RNA, 19 nt, Homo sapiens
  misc_RNA (1)...(19): siRNA sense strand
gcacaagucacgccugcuu

SEQ ID NO: 686152 - RNA, 19 nt, Homo sapiens
  misc_RNA (1)...(19): siRNA sense strand
gugcaccucuguccuccua

SEQ ID NO: 686153 - RNA, 19 nt, Homo sapiens
  misc_RNA (1)...(19): siRNA sense strand
cuagucacauguucuauuc

SEQ ID NO: 686154 - RNA, 19 nt, Homo sapiens
  misc_RNA (1)...(19): siRNA sense strand
ggaaauggccuagucacau

SEQ ID NO: 686155 - RNA, 19 nt, Homo sapiens
  misc_RNA (1)...(19): siRNA sense strand
cagaacagagggaaauaaa

SEQ ID NO: 686156 - RNA, 19 nt, Homo sapiens
  misc_RNA (1)...(19): siRNA sense strand
uaacucaggauuuacuuga

SEQ ID NO: 686157 - RNA, 19 nt, Homo sapiens
  misc_RNA (1)...(19): siRNA sense strand
gcaccucuguccuccuaug

SEQ ID NO: 686158 - RNA, 19 nt, Homo sapiens
  misc_RNA (1)...(19): siRNA sense strand
ggaaauuauuaucgguugu

SEQ ID NO: 686159 - RNA, 19 nt, Homo sapiens
  misc_RNA (1)...(19): siRNA sense strand
gauccuauaugcucuuugc

SEQ ID NO: 686160 - RNA, 19 nt, Homo sapiens
  misc_RNA (1)...(19): siRNA sense strand
gacagugacucaggaggaa

SEQ ID NO: 686161 - RNA, 19 nt, Homo sapiens
  misc_RNA (1)...(19): siRNA sense strand
ggacagagacgcgcucaag

SEQ ID NO: 686162 - RNA, 19 nt, Homo sapiens
  misc_RNA (1)...(19): siRNA sense strand
gacagagacucaggucaga

SEQ ID NO: 686163 - RNA, 19 nt, Homo sapiens
  misc_RNA (1)...(19): siRNA sense strand
gacaaaauaucacagcuau

SEQ ID NO: 686164 - RNA, 19 nt, Homo sapiens
  misc_RNA (1)...(19): siRNA sense strand
gaaaucagggccgaacaga

SEQ ID NO: 686165 - RNA, 19 nt, Homo sapiens
  misc_RNA (1)...(19): siRNA sense strand
gacaaugcccgaaucacuu

SEQ ID NO: 686166 - RNA, 19 nt, Homo sapiens
  misc_RNA (1)...(19): siRNA sense strand
acaaugcccgaaucacuua

SEQ ID NO: 686167 - RNA, 19 nt, Homo sapiens
  misc_RNA (1)...(19): siRNA sense strand
gcggguagagguggaaaua

SEQ ID NO: 686168 - RNA, 19 nt, Homo sapiens
  misc_RNA (1)...(19): siRNA sense strand
cagcgagccgggacuauuu

SEQ ID NO: 686169 - RNA, 19 nt, Homo sapiens
  misc_RNA (1)...(19): siRNA sense strand
gccuccaucuuaucuauga

SEQ ID NO: 686170 - RNA, 19 nt, Homo sapiens
  misc_RNA (1)...(19): siRNA sense strand
aaucugccauucacacuug

SEQ ID NO: 686171 - RNA, 19 nt, Homo sapiens
  misc_RNA (1)...(19): siRNA sense strand
guggaaauaaucgauguua

SEQ ID NO: 686172 - RNA, 19 nt, Homo sapiens
  misc_RNA (1)...(19): siRNA sense strand
cagaauauaacaucacugu

SEQ ID NO: 686173 - RNA, 19 nt, Homo sapiens
  misc_RNA (1)...(19): siRNA sense strand
ccacucagcagcaaugugu

SEQ ID NO: 686174 - RNA, 19 nt, Homo sapiens
  misc_RNA (1)...(19): siRNA sense strand
auacagggauccuauaugc

SEQ ID NO: 686175 - RNA, 19 nt, Homo sapiens
  misc_RNA (1)...(19): siRNA sense strand
ccaauacagggauccuaua

SEQ ID NO: 686176 - RNA, 19 nt, Homo sapiens
  misc_RNA (1)...(19): siRNA sense strand
gaacagagggaaauaaaag

SEQ ID NO: 686177 - RNA, 19 nt, Homo sapiens
  misc_RNA (1)...(19): siRNA sense strand
caauacagggauccuauau

SEQ ID NO: 686178 - RNA, 19 nt, Homo sapiens
  misc_RNA (1)...(19): siRNA sense strand
ccgaacagauucucuacuc

SEQ ID NO: 686179 - RNA, 19 nt, Homo sapiens
  misc_RNA (1)...(19): siRNA sense strand
guacaguaauugcacuuuu

SEQ ID NO: 686180 - RNA, 19 nt, Homo sapiens
  misc_RNA (1)...(19): siRNA sense strand
gggccgaugggauuaagua

SEQ ID NO: 686181 - RNA, 19 nt, Homo sapiens
  misc_RNA (1)...(19): siRNA sense strand
acucaggauuuacuugaaa

SEQ ID NO: 686182 - RNA, 19 nt, Homo sapiens
  misc_RNA (1)...(19): siRNA sense strand
gcggaagagucaccugauc

SEQ ID NO: 686183 - RNA, 19 nt, Homo sapiens
  misc_RNA (1)...(19): siRNA sense strand
ggugacaguucuggaugaa

SEQ ID NO: 686184 - RNA, 19 nt, Homo sapiens
  misc_RNA (1)...(19): siRNA sense strand
caacccagcuaugcagaca

SEQ ID NO: 686185 - RNA, 19 nt, Homo sapiens
  misc_RNA (1)...(19): siRNA sense strand
gaugacagccagugacagu

SEQ ID NO: 686186 - RNA, 19 nt, Homo sapiens
  misc_RNA (1)...(19): siRNA sense strand
ugacaacgcaccagaaguc

SEQ ID NO: 686187 - RNA, 19 nt, Homo sapiens
  misc_RNA (1)...(19): siRNA sense strand
ugacaguucuggaugaaaa

SEQ ID NO: 686188 - RNA, 19 nt, Homo sapiens
  misc_RNA (1)...(19): siRNA sense strand
aaugauaacccacccaguu

SEQ ID NO: 686189 - RNA, 19 nt, Homo sapiens
  misc_RNA (1)...(19): siRNA sense strand
aaaggagacccuaaucuuc

SEQ ID NO: 686190 - RNA, 19 nt, Homo sapiens
  misc_RNA (1)...(19): siRNA sense strand
gaacuccuccacugucuac

SEQ ID NO: 686191 - RNA, 19 nt, Homo sapiens
  misc_RNA (1)...(19): siRNA sense strand
ucauaauacuuguggauac

SEQ ID NO: 686192 - RNA, 19 nt, Homo sapiens
  misc_RNA (1)...(19): siRNA sense strand
caccagaagucacaguuac

SEQ ID NO: 686193 - RNA, 19 nt, Homo sapiens
  misc_RNA (1)...(19): siRNA sense strand
gacagaacagagggaaaua

SEQ ID NO: 686194 - RNA, 19 nt, Homo sapiens
  misc_RNA (1)...(19): siRNA sense strand
ucuagaagauacagugaag

SEQ ID NO: 686195 - RNA, 19 nt, Homo sapiens
  misc_RNA (1)...(19): siRNA sense strand
caacgcaccagaagucaca

SEQ ID NO: 686196 - RNA, 19 nt, Homo sapiens
  misc_RNA (1)...(19): siRNA sense strand
gaguggggauauaacaaua

SEQ ID NO: 686197 - RNA, 19 nt, Homo sapiens
  misc_RNA (1)...(19): siRNA sense strand
cagauguccuggcugacuu

SEQ ID NO: 686198 - RNA, 19 nt, Homo sapiens
  misc_RNA (1)...(19): siRNA sense strand
uauaugcucuuugcuccuu

SEQ ID NO: 686199 - RNA, 19 nt, Homo sapiens
  misc_RNA (1)...(19): siRNA sense strand
gggauccuauaugcucuuu

SEQ ID NO: 686200 - RNA, 19 nt, Homo sapiens
  misc_RNA (1)...(19): siRNA sense strand
ggaaauaaaaguugcugaa

SEQ ID NO: 686201 - RNA, 19 nt, Homo sapiens
  misc_RNA (1)...(19): siRNA sense strand
ccgggagaguugugagaaa

SEQ ID NO: 686202 - RNA, 19 nt, Homo sapiens
  misc_RNA (1)...(19): siRNA sense strand
cgcaucgucuccagaggua

SEQ ID NO: 686203 - RNA, 19 nt, Homo sapiens
  misc_RNA (1)...(19): siRNA sense strand
acuaugagcaguuuagaga

SEQ ID NO: 686204 - RNA, 19 nt, Homo sapiens
  misc_RNA (1)...(19): siRNA sense strand
ccaggauucucauaauacu

SEQ ID NO: 686205 - RNA, 19 nt, Homo sapiens
  misc_RNA (1)...(19): siRNA sense strand
gcgagccucuucugauaac

SEQ ID NO: 686206 - RNA, 19 nt, Homo sapiens
  misc_RNA (1)...(19): siRNA sense strand
uuccuacucugcuuacauu

SEQ ID NO: 686207 - RNA, 19 nt, Homo sapiens
  misc_RNA (1)...(19): siRNA sense strand
ggaggaaauggccuaguca

SEQ ID NO: 686208 - RNA, 19 nt, Homo sapiens
  misc_RNA (1)...(19): siRNA sense strand
uagaagauacagugaagau

SEQ ID NO: 686209 - RNA, 19 nt, Homo sapiens
  misc_RNA (1)...(19): siRNA sense strand
gggaacuccuccacugucu

SEQ ID NO: 686210 - RNA, 19 nt, Homo sapiens
  misc_RNA (1)...(19): siRNA sense strand
caaacugugugacaaaccu

SEQ ID NO: 686211 - RNA, 19 nt, Homo sapiens
  misc_RNA (1)...(19): siRNA sense strand
cugagacgcuggcacaagu

SEQ ID NO: 686212 - RNA, 19 nt, Homo sapiens
  misc_RNA (1)...(19): siRNA sense strand
ccuccuaugucuccaucaa

SEQ ID NO: 686213 - RNA, 19 nt, Homo sapiens
  misc_RNA (1)...(19): siRNA sense strand
ccacccacuuucccucaug

SEQ ID NO: 686214 - RNA, 19 nt, Homo sapiens
  misc_RNA (1)...(19): siRNA sense strand
agagguaggacgcagcuuu

SEQ ID NO: 686215 - RNA, 19 nt, Homo sapiens
  misc_RNA (1)...(19): siRNA sense strand
aaggagacccuaaucuuca

SEQ ID NO: 686216 - RNA, 19 nt, Homo sapiens
  misc_RNA (1)...(19): siRNA sense strand
ugacaacccacccacuuuc

SEQ ID NO: 686217 - RNA, 19 nt, Homo sapiens
  misc_RNA (1)...(19): siRNA sense strand
cagggaagaagucucagaa

SEQ ID NO: 686218 - RNA, 19 nt, Homo sapiens
  misc_RNA (1)...(19): siRNA sense strand
gaacacuggacagggaaga

SEQ ID NO: 686219 - RNA, 19 nt, Homo sapiens
  misc_RNA (1)...(19): siRNA sense strand
gggccgaacagauucucua

SEQ ID NO: 686220 - RNA, 19 nt, Homo sapiens
  misc_RNA (1)...(19): siRNA sense strand
ggaaaucagggccgaacag

SEQ ID NO: 686221 - RNA, 19 nt, Homo sapiens
  misc_RNA (1)...(19): siRNA sense strand
gagaaaagcgagccucuuc

SEQ ID NO: 686222 - RNA, 19 nt, Homo sapiens
  misc_RNA (1)...(19): siRNA sense strand
cuucgacuaugagcaguuu

SEQ ID NO: 686223 - RNA, 19 nt, Homo sapiens
  misc_RNA (1)...(19): siRNA sense strand
ggccuagucacauguucua

SEQ ID NO: 686224 - RNA, 19 nt, Homo sapiens
  misc_RNA (1)...(19): siRNA sense strand
gcucaguccaggaaucuuc

SEQ ID NO: 686225 - RNA, 19 nt, Homo sapiens
  misc_RNA (1)...(19): siRNA sense strand
uaauacuuguggauaccaa

SEQ ID NO: 686226 - RNA, 19 nt, Homo sapiens
  misc_RNA (1)...(19): siRNA sense strand
gauaacucaggauuuacuu

SEQ ID NO: 686227 - RNA, 19 nt, Homo sapiens
  misc_RNA (1)...(19): siRNA sense strand
gguagagguggaaauaauc

SEQ ID NO: 686228 - RNA, 19 nt, Homo sapiens
  misc_RNA (1)...(19): siRNA sense strand
aaagcgagccucuucugau

SEQ ID NO: 686229 - RNA, 19 nt, Homo sapiens
  misc_RNA (1)...(19): siRNA sense strand
gaagaagucucagaauaua

SEQ ID NO: 686230 - RNA, 19 nt, Homo sapiens
  misc_RNA (1)...(19): siRNA sense strand
gggaagaagucucagaaua

SEQ ID NO: 686231 - RNA, 19 nt, Homo sapiens
  misc_RNA (1)...(19): siRNA sense strand
gaagauacagugaagauuu

SEQ ID NO: 686232 - RNA, 19 nt, Homo sapiens
  misc_RNA (1)...(19): siRNA sense strand
gaaauggccuagucacaug

SEQ ID NO: 686233 - RNA, 19 nt, Homo sapiens
  misc_RNA (1)...(19): siRNA sense strand
ggaagaagucucagaauau

SEQ ID NO: 686234 - RNA, 19 nt, Homo sapiens
  misc_RNA (1)...(19): siRNA sense strand
gaaaagaccuauggaaauu

SEQ ID NO: 686235 - RNA, 19 nt, Homo sapiens
  misc_RNA (1)...(19): siRNA sense strand
ugacaaaccuggagauucu

SEQ ID NO: 686236 - RNA, 19 nt, Homo sapiens
  misc_RNA (1)...(19): siRNA sense strand
uaucacagcuauuucaguu

SEQ ID NO: 686237 - RNA, 19 nt, Homo sapiens
  misc_RNA (1)...(19): siRNA sense strand
caacucaaacgguuacuuu

SEQ ID NO: 686238 - RNA, 19 nt, Homo sapiens
  misc_RNA (1)...(19): siRNA sense strand
ucacagcuauuucaguuga

SEQ ID NO: 686239 - RNA, 19 nt, Homo sapiens
  misc_RNA (1)...(19): siRNA sense strand
guuaccagcucaacucaaa

SEQ ID NO: 686240 - RNA, 19 nt, Homo sapiens
  misc_RNA (1)...(19): siRNA sense strand
cauguucuauuccagauaa

SEQ ID NO: 686241 - RNA, 19 nt, Homo sapiens
  misc_RNA (1)...(19): siRNA sense strand
aagcgagccucuucugaua

SEQ ID NO: 686242 - RNA, 19 nt, Homo sapiens
  misc_RNA (1)...(19): siRNA sense strand
ggguagagguggaaauaau

SEQ ID NO: 686243 - RNA, 19 nt, Homo sapiens
  misc_RNA (1)...(19): siRNA sense strand
ugaggacucuggauucuau

SEQ ID NO: 686244 - RNA, 19 nt, Homo sapiens
  misc_RNA (1)...(19): siRNA sense strand
gcaccagaagucacaguua

SEQ ID NO: 686245 - RNA, 19 nt, Homo sapiens
  misc_RNA (1)...(19): siRNA sense strand
gagccuccaucuuaucuau

SEQ ID NO: 686246 - RNA, 19 nt, Homo sapiens
  misc_RNA (1)...(19): siRNA sense strand
ggacagggaagaagucuca

SEQ ID NO: 686247 - RNA, 19 nt, Homo sapiens
  misc_RNA (1)...(19): siRNA sense strand
ggacagaacagagggaaau

SEQ ID NO: 686248 - RNA, 19 nt, Homo sapiens
  misc_RNA (1)...(19): siRNA sense strand
cgauaaugcucccguguuc

SEQ ID NO: 686249 - RNA, 19 nt, Homo sapiens
  misc_RNA (1)...(19): siRNA sense strand
gggcuuuccugcagaccua

SEQ ID NO: 686250 - RNA, 19 nt, Homo sapiens
  misc_RNA (1)...(19): siRNA sense strand
ugccaggauucucauaaua

SEQ ID NO: 686251 - RNA, 19 nt, Homo sapiens
  misc_RNA (1)...(19): siRNA sense strand
gcacaagucacgccugcuu

SEQ ID NO: 686252 - RNA, 19 nt, Homo sapiens
  misc_RNA (1)...(19): siRNA sense strand
gugcaccucuguccuccua

SEQ ID NO: 686253 - RNA, 19 nt, Homo sapiens
  misc_RNA (1)...(19): siRNA sense strand
cuagucacauguucuauuc

SEQ ID NO: 686254 - RNA, 19 nt, Homo sapiens
  misc_RNA (1)...(19): siRNA sense strand
ggaaauggccuagucacau

SEQ ID NO: 686255 - RNA, 19 nt, Homo sapiens
  misc_RNA (1)...(19): siRNA sense strand
cagaacagagggaaauaaa

SEQ ID NO: 686256 - RNA, 19 nt, Homo sapiens
  misc_RNA (1)...(19): siRNA sense strand
uaacucaggauuuacuuga

SEQ ID NO: 686257 - RNA, 19 nt, Homo sapiens
  misc_RNA (1)...(19): siRNA sense strand
gcaccucuguccuccuaug

SEQ ID NO: 686258 - RNA, 19 nt, Homo sapiens
  misc_RNA (1)...(19): siRNA sense strand
ggaaauuauuaucgguugu

SEQ ID NO: 686259 - RNA, 19 nt, Homo sapiens
  misc_RNA (1)...(19): siRNA sense strand
gauccuauaugcucuuugc

SEQ ID NO: 686260 - RNA, 19 nt, Homo sapiens
  misc_RNA (1)...(19): siRNA sense strand
gacagugacucaggaggaa

SEQ ID NO: 686261 - RNA, 19 nt, Homo sapiens
  misc_RNA (1)...(19): siRNA sense strand
ggacagagacgcgcucaag

SEQ ID NO: 686262 - RNA, 19 nt, Homo sapiens
  misc_RNA (1)...(19): siRNA sense strand
gacagagacucaggucaga

SEQ ID NO: 686263 - RNA, 19 nt, Homo sapiens
  misc_RNA (1)...(19): siRNA sense strand
gacaaaauaucacagcuau

SEQ ID NO: 686264 - RNA, 19 nt, Homo sapiens
  misc_RNA (1)...(19): siRNA sense strand
gaaaucagggccgaacaga

SEQ ID NO: 686265 - RNA, 19 nt, Homo sapiens
  misc_RNA (1)...(19): siRNA sense strand
gacaaugcccgaaucacuu

SEQ ID NO: 686266 - RNA, 19 nt, Homo sapiens
  misc_RNA (1)...(19): siRNA sense strand
acaaugcccgaaucacuua

SEQ ID NO: 686267 - RNA, 19 nt, Homo sapiens
  misc_RNA (1)...(19): siRNA sense strand
gcggguagagguggaaaua

SEQ ID NO: 686268 - RNA, 19 nt, Homo sapiens
  misc_RNA (1)...(19): siRNA sense strand
cagcgagccgggacuauuu

SEQ ID NO: 686269 - RNA, 19 nt, Homo sapiens
  misc_RNA (1)...(19): siRNA sense strand
gccuccaucuuaucuauga

SEQ ID NO: 686270 - RNA, 19 nt, Homo sapiens
  misc_RNA (1)...(19): siRNA sense strand
aaucugccauucacacuug

SEQ ID NO: 686271 - RNA, 19 nt, Homo sapiens
  misc_RNA (1)...(19): siRNA sense strand
guggaaauaaucgauguua

SEQ ID NO: 686272 - RNA, 19 nt, Homo sapiens
  misc_RNA (1)...(19): siRNA sense strand
cagaauauaacaucacugu

SEQ ID NO: 686273 - RNA, 19 nt, Homo sapiens
  misc_RNA (1)...(19): siRNA sense strand
ccacucagcagcaaugugu

SEQ ID NO: 686274 - RNA, 19 nt, Homo sapiens
  misc_RNA (1)...(19): siRNA sense strand
auacagggauccuauaugc

SEQ ID NO: 686275 - RNA, 19 nt, Homo sapiens
  misc_RNA (1)...(19): siRNA sense strand
ccaauacagggauccuaua

SEQ ID NO: 686276 - RNA, 19 nt, Homo sapiens
  misc_RNA (1)...(19): siRNA sense strand
gaacagagggaaauaaaag

SEQ ID NO: 686277 - RNA, 19 nt, Homo sapiens
  misc_RNA (1)...(19): siRNA sense strand
caauacagggauccuauau

SEQ ID NO: 686278 - RNA, 19 nt, Homo sapiens
  misc_RNA (1)...(19): siRNA sense strand
ccgaacagauucucuacuc

SEQ ID NO: 686279 - RNA, 19 nt, Homo sapiens
  misc_RNA (1)...(19): siRNA sense strand
guacaguaauugcacuuuu

SEQ ID NO: 686280 - RNA, 19 nt, Homo sapiens
  misc_RNA (1)...(19): siRNA sense strand
gggccgaugggauuaagua

SEQ ID NO: 686281 - RNA, 19 nt, Homo sapiens
  misc_RNA (1)...(19): siRNA sense strand
acucaggauuuacuugaaa

SEQ ID NO: 686282 - RNA, 19 nt, Homo sapiens
  misc_RNA (1)...(19): siRNA sense strand
gcggaagagucaccugauc

SEQ ID NO: 686283 - RNA, 19 nt, Homo sapiens
  misc_RNA (1)...(19): siRNA sense strand
ggugacaguucuggaugaa

SEQ ID NO: 686284 - RNA, 19 nt, Homo sapiens
  misc_RNA (1)...(19): siRNA sense strand
caacccagcuaugcagaca

SEQ ID NO: 686285 - RNA, 19 nt, Homo sapiens
  misc_RNA (1)...(19): siRNA sense strand
gaugacagccagugacagu

SEQ ID NO: 686286 - RNA, 19 nt, Homo sapiens
  misc_RNA (1)...(19): siRNA sense strand
ugacaacgcaccagaaguc

SEQ ID NO: 686287 - RNA, 19 nt, Homo sapiens
  misc_RNA (1)...(19): siRNA sense strand
ugacaguucuggaugaaaa

SEQ ID NO: 686288 - RNA, 19 nt, Homo sapiens
  misc_RNA (1)...(19): siRNA sense strand
aaugauaacccacccaguu

SEQ ID NO: 686289 - RNA, 19 nt, Homo sapiens
  misc_RNA (1)...(19): siRNA sense strand
aaaggagacccuaaucuuc

SEQ ID NO: 686290 - RNA, 19 nt, Homo sapiens
  misc_RNA (1)...(19): siRNA sense strand
gaacuccuccacugucuac

SEQ ID NO: 686291 - RNA, 19 nt, Homo sapiens
  misc_RNA (1)...(19): siRNA sense strand
ucauaauacuuguggauac

SEQ ID NO: 686292 - RNA, 19 nt, Homo sapiens
  misc_RNA (1)...(19): siRNA sense strand
caccagaagucacaguuac

SEQ ID NO: 686293 - RNA, 19 nt, Homo sapiens
  misc_RNA (1)...(19): siRNA sense strand
gacagaacagagggaaaua

SEQ ID NO: 686294 - RNA, 19 nt, Homo sapiens
  misc_RNA (1)...(19): siRNA sense strand
ucuagaagauacagugaag

SEQ ID NO: 686295 - RNA, 19 nt, Homo sapiens
  misc_RNA (1)...(19): siRNA sense strand
caacgcaccagaagucaca

SEQ ID NO: 686296 - RNA, 19 nt, Homo sapiens
  misc_RNA (1)...(19): siRNA sense strand
gaguggggauauaacaaua

SEQ ID NO: 686297 - RNA, 19 nt, Homo sapiens
  misc_RNA (1)...(19): siRNA sense strand
cagauguccuggcugacuu

SEQ ID NO: 686298 - RNA, 19 nt, Homo sapiens
  misc_RNA (1)...(19): siRNA sense strand
uauaugcucuuugcuccuu

SEQ ID NO: 686299 - RNA, 19 nt, Homo sapiens
  misc_RNA (1)...(19): siRNA sense strand
gggauccuauaugcucuuu

SEQ ID NO: 686300 - RNA, 19 nt, Homo sapiens
  misc_RNA (1)...(19): siRNA sense strand
ggaaauaaaaguugcugaa

SEQ ID NO: 686301 - RNA, 19 nt, Homo sapiens
  misc_RNA (1)...(19): siRNA sense strand
ccgggagaguugugagaaa

SEQ ID NO: 686302 - RNA, 19 nt, Homo sapiens
  misc_RNA (1)...(19): siRNA sense strand
cgcaucgucuccagaggua

SEQ ID NO: 686303 - RNA, 19 nt, Homo sapiens
  misc_RNA (1)...(19): siRNA sense strand
acuaugagcaguuuagaga

SEQ ID NO: 686304 - RNA, 19 nt, Homo sapiens
  misc_RNA (1)...(19): siRNA sense strand
ccaggauucucauaauacu

SEQ ID NO: 686305 - RNA, 19 nt, Homo sapiens
  misc_RNA (1)...(19): siRNA sense strand
gcgagccucuucugauaac

SEQ ID NO: 686306 - RNA, 19 nt, Homo sapiens
  misc_RNA (1)...(19): siRNA sense strand
uuccuacucugcuuacauu

SEQ ID NO: 686307 - RNA, 19 nt, Homo sapiens
  misc_RNA (1)...(19): siRNA sense strand
ggaggaaauggccuaguca

SEQ ID NO: 686308 - RNA, 19 nt, Homo sapiens
  misc_RNA (1)...(19): siRNA sense strand
uagaagauacagugaagau

SEQ ID NO: 686309 - RNA, 19 nt, Homo sapiens
  misc_RNA (1)...(19): siRNA sense strand
gggaacuccuccacugucu

SEQ ID NO: 686310 - RNA, 19 nt, Homo sapiens
  misc_RNA (1)...(19): siRNA sense strand
caaacugugugacaaaccu

SEQ ID NO: 686311 - RNA, 19 nt, Homo sapiens
  misc_RNA (1)...(19): siRNA sense strand
cugagacgcuggcacaagu

SEQ ID NO: 686312 - RNA, 19 nt, Homo sapiens
  misc_RNA (1)...(19): siRNA sense strand
ccuccuaugucuccaucaa

SEQ ID NO: 686313 - RNA, 19 nt, Homo sapiens
  misc_RNA (1)...(19): siRNA sense strand
ccacccacuuucccucaug

SEQ ID NO: 686314 - RNA, 19 nt, Homo sapiens
  misc_RNA (1)...(19): siRNA sense strand
agagguaggacgcagcuuu

SEQ ID NO: 686315 - RNA, 19 nt, Homo sapiens
  misc_RNA (1)...(19): siRNA sense strand
aaggagacccuaaucuuca

SEQ ID NO: 686316 - RNA, 19 nt, Homo sapiens
  misc_RNA (1)...(19): siRNA sense strand
ugacaacccacccacuuuc

SEQ ID NO: 686317 - RNA, 19 nt, Homo sapiens
  misc_RNA (1)...(19): siRNA sense strand
cagggaagaagucucagaa

SEQ ID NO: 686318 - RNA, 19 nt, Homo sapiens
  misc_RNA (1)...(19): siRNA sense strand
gaacacuggacagggaaga

SEQ ID NO: 686319 - RNA, 19 nt, Homo sapiens
  misc_RNA (1)...(19): siRNA sense strand
gggccgaacagauucucua

SEQ ID NO: 686320 - RNA, 19 nt, Homo sapiens
  misc_RNA (1)...(19): siRNA sense strand
ggaaaucagggccgaacag

SEQ ID NO: 686321 - RNA, 19 nt, Homo sapiens
  misc_RNA (1)...(19): siRNA sense strand
gagaaaagcgagccucuuc

SEQ ID NO: 686322 - RNA, 19 nt, Homo sapiens
  misc_RNA (1)...(19): siRNA sense strand
cuucgacuaugagcaguuu

SEQ ID NO: 686323 - RNA, 19 nt, Homo sapiens
  misc_RNA (1)...(19): siRNA sense strand
ggccuagucacauguucua

SEQ ID NO: 686324 - RNA, 19 nt, Homo sapiens
  misc_RNA (1)...(19): siRNA sense strand
gcucaguccaggaaucuuc

SEQ ID NO: 686325 - RNA, 19 nt, Homo sapiens
  misc_RNA (1)...(19): siRNA sense strand
uaauacuuguggauaccaa

SEQ ID NO: 686326 - RNA, 19 nt, Homo sapiens
  misc_RNA (1)...(19): siRNA sense strand
gauaacucaggauuuacuu

SEQ ID NO: 686327 - RNA, 19 nt, Homo sapiens
  misc_RNA (1)...(19): siRNA sense strand
gguagagguggaaauaauc

SEQ ID NO: 686328 - RNA, 19 nt, Homo sapiens
  misc_RNA (1)...(19): siRNA sense strand
aaagcgagccucuucugau

SEQ ID NO: 686329 - RNA, 19 nt, Homo sapiens
  misc_RNA (1)...(19): siRNA sense strand
uaagguagaugcaaacaaa

SEQ ID NO: 686330 - RNA, 19 nt, Homo sapiens
  misc_RNA (1)...(19): siRNA sense strand
gaaaguagcagacguuaau

SEQ ID NO: 686331 - RNA, 19 nt, Homo sapiens
  misc_RNA (1)...(19): siRNA sense strand
ggaauaaacgggaaauuga

SEQ ID NO: 686332 - RNA, 19 nt, Homo sapiens
  misc_RNA (1)...(19): siRNA sense strand
ggaaauugaccuacucuuu

SEQ ID NO: 686333 - RNA, 19 nt, Homo sapiens
  misc_RNA (1)...(19): siRNA sense strand
gaagagagcugugagaaaa

SEQ ID NO: 686334 - RNA, 19 nt, Homo sapiens
  misc_RNA (1)...(19): siRNA sense strand
gagauugcaugcucuauuc

SEQ ID NO: 686335 - RNA, 19 nt, Homo sapiens
  misc_RNA (1)...(19): siRNA sense strand
gaagucaguugauaauuac

SEQ ID NO: 686336 - RNA, 19 nt, Homo sapiens
  misc_RNA (1)...(19): siRNA sense strand
uacaaucacuggacuauga

SEQ ID NO: 686337 - RNA, 19 nt, Homo sapiens
  misc_RNA (1)...(19): siRNA sense strand
cagacacgcuccuuaguga

SEQ ID NO: 686338 - RNA, 19 nt, Homo sapiens
  misc_RNA (1)...(19): siRNA sense strand
gaacuguaaucgcgcuguu

SEQ ID NO: 686339 - RNA, 19 nt, Homo sapiens
  misc_RNA (1)...(19): siRNA sense strand
ucugaugucugauaaggua

SEQ ID NO: 686340 - RNA, 19 nt, Homo sapiens
  misc_RNA (1)...(19): siRNA sense strand
gcacuucucucuggaugug

SEQ ID NO: 686341 - RNA, 19 nt, Homo sapiens
  misc_RNA (1)...(19): siRNA sense strand
ccaguucgaucucugaaga

SEQ ID NO: 686342 - RNA, 19 nt, Homo sapiens
  misc_RNA (1)...(19): siRNA sense strand
aaucucaacucuacaauca

SEQ ID NO: 686343 - RNA, 19 nt, Homo sapiens
  misc_RNA (1)...(19): siRNA sense strand
ggaaaucucaacucuacaa

SEQ ID NO: 686344 - RNA, 19 nt, Homo sapiens
  misc_RNA (1)...(19): siRNA sense strand
uagcagacguuaaugacaa

SEQ ID NO: 686345 - RNA, 19 nt, Homo sapiens
  misc_RNA (1)...(19): siRNA sense strand
ugagauccuucgacuauga

SEQ ID NO: 686346 - RNA, 19 nt, Homo sapiens
  misc_RNA (1)...(19): siRNA sense strand
gaaauugaccuacucuuuu

SEQ ID NO: 686347 - RNA, 19 nt, Homo sapiens
  misc_RNA (1)...(19): siRNA sense strand
ggauccagaugagggaaua

SEQ ID NO: 686348 - RNA, 19 nt, Homo sapiens
  misc_RNA (1)...(19): siRNA sense strand
ggagaagucaguugauaau

SEQ ID NO: 686349 - RNA, 19 nt, Homo sapiens
  misc_RNA (1)...(19): siRNA sense strand
uggaguagaaguagaaaua

SEQ ID NO: 686350 - RNA, 19 nt, Homo sapiens
  misc_RNA (1)...(19): siRNA sense strand
gggaauaaacgggaaauug

SEQ ID NO: 686351 - RNA, 19 nt, Homo sapiens
  misc_RNA (1)...(19): siRNA sense strand
cuagggaccuggacagaga

SEQ ID NO: 686352 - RNA, 19 nt, Homo sapiens
  misc_RNA (1)...(19): siRNA sense strand
ugagagaccuacaguugug

SEQ ID NO: 686353 - RNA, 19 nt, Homo sapiens
  misc_RNA (1)...(19): siRNA sense strand
ggaguagaaguagaaauaa

SEQ ID NO: 686354 - RNA, 19 nt, Homo sapiens
  misc_RNA (1)...(19): siRNA sense strand
gaggaagagucaccugauc

SEQ ID NO: 686355 - RNA, 19 nt, Homo sapiens
  misc_RNA (1)...(19): siRNA sense strand
gggcuuuccugcagaccua

SEQ ID NO: 686356 - RNA, 19 nt, Homo sapiens
  misc_RNA (1)...(19): siRNA sense strand
guggugaacuuuaacaucu

SEQ ID NO: 686357 - RNA, 19 nt, Homo sapiens
  misc_RNA (1)...(19): siRNA sense strand
gcacaagucacgccugcuu

SEQ ID NO: 686358 - RNA, 19 nt, Homo sapiens
  misc_RNA (1)...(19): siRNA sense strand
guugagagaccuacaguug

SEQ ID NO: 686359 - RNA, 19 nt, Homo sapiens
  misc_RNA (1)...(19): siRNA sense strand
cggaggagcuggacaaagg

SEQ ID NO: 686360 - RNA, 19 nt, Homo sapiens
  misc_RNA (1)...(19): siRNA sense strand
aagcggaacugauggacaa

SEQ ID NO: 686361 - RNA, 19 nt, Homo sapiens
  misc_RNA (1)...(19): siRNA sense strand
gaacuuuaacaucuugguu

SEQ ID NO: 686362 - RNA, 19 nt, Homo sapiens
  misc_RNA (1)...(19): siRNA sense strand
ccuccuauguauccauuaa

SEQ ID NO: 686363 - RNA, 19 nt, Homo sapiens
  misc_RNA (1)...(19): siRNA sense strand
ucaccucucugaccaguuc

SEQ ID NO: 686364 - RNA, 19 nt, Homo sapiens
  misc_RNA (1)...(19): siRNA sense strand
gauggaggcgcucuuguug

SEQ ID NO: 686365 - RNA, 19 nt, Homo sapiens
  misc_RNA (1)...(19): siRNA sense strand
ggugaacuuuaacaucuug

SEQ ID NO: 686366 - RNA, 19 nt, Homo sapiens
  misc_RNA (1)...(19): siRNA sense strand
gauucuaccucauggaagu

SEQ ID NO: 686367 - RNA, 19 nt, Homo sapiens
  misc_RNA (1)...(19): siRNA sense strand
uuuccgggaugaagaguua

SEQ ID NO: 686368 - RNA, 19 nt, Homo sapiens
  misc_RNA (1)...(19): siRNA sense strand
gcagacacgcuccuuagug

SEQ ID NO: 686369 - RNA, 19 nt, Homo sapiens
  misc_RNA (1)...(19): siRNA sense strand
ggacagagacgcgcucaag

SEQ ID NO: 686370 - RNA, 19 nt, Homo sapiens
  misc_RNA (1)...(19): siRNA sense strand
ggauggaggcgcucuuguu

SEQ ID NO: 686371 - RNA, 19 nt, Homo sapiens
  misc_RNA (1)...(19): siRNA sense strand
gcacucggcugcucaugcu

SEQ ID NO: 686372 - RNA, 19 nt, Homo sapiens
  misc_RNA (1)...(19): siRNA sense strand
caucuugguugagaacaaa

SEQ ID NO: 686373 - RNA, 19 nt, Homo sapiens
  misc_RNA (1)...(19): siRNA sense strand
gaacugauggacaaaagua

SEQ ID NO: 686374 - RNA, 19 nt, Homo sapiens
  misc_RNA (1)...(19): siRNA sense strand
guacaggacgugaaugaca

SEQ ID NO: 686375 - RNA, 19 nt, Homo sapiens
  misc_RNA (1)...(19): siRNA sense strand
gaccuaggcaguaucaaga

SEQ ID NO: 686376 - RNA, 19 nt, Homo sapiens
  misc_RNA (1)...(19): siRNA sense strand
cugauaagguagaugcaaa

SEQ ID NO: 686377 - RNA, 19 nt, Homo sapiens
  misc_RNA (1)...(19): siRNA sense strand
gcccuuguccuccuaugua

SEQ ID NO: 686378 - RNA, 19 nt, Homo sapiens
  misc_RNA (1)...(19): siRNA sense strand
ggaugaagaguuaaaagua

SEQ ID NO: 686379 - RNA, 19 nt, Homo sapiens
  misc_RNA (1)...(19): siRNA sense strand
caaagaagaacggcgaguu

SEQ ID NO: 686380 - RNA, 19 nt, Homo sapiens
  misc_RNA (1)...(19): siRNA sense strand
aagcgagccucuucugaug

SEQ ID NO: 686381 - RNA, 19 nt, Homo sapiens
  misc_RNA (1)...(19): siRNA sense strand
gagcccugcuggacagaga

SEQ ID NO: 686382 - RNA, 19 nt, Homo sapiens
  misc_RNA (1)...(19): siRNA sense strand
gaguacagcgugaguguuc

SEQ ID NO: 686383 - RNA, 19 nt, Homo sapiens
  misc_RNA (1)...(19): siRNA sense strand
gcuccaaucugcacuucuc

SEQ ID NO: 686384 - RNA, 19 nt, Homo sapiens
  misc_RNA (1)...(19): siRNA sense strand
ugaagagagcugugagaaa

SEQ ID NO: 686385 - RNA, 19 nt, Homo sapiens
  misc_RNA (1)...(19): siRNA sense strand
ucggagacuuuccaacuug

SEQ ID NO: 686386 - RNA, 19 nt, Homo sapiens
  misc_RNA (1)...(19): siRNA sense strand
uguguguggugaacuuuaa

SEQ ID NO: 686387 - RNA, 19 nt, Homo sapiens
  misc_RNA (1)...(19): siRNA sense strand
gaccucacacucuaucuug

SEQ ID NO: 686388 - RNA, 19 nt, Homo sapiens
  misc_RNA (1)...(19): siRNA sense strand
ucugagauccuucgacuau

SEQ ID NO: 686389 - RNA, 19 nt, Homo sapiens
  misc_RNA (1)...(19): siRNA sense strand
ugacaacccacccaauuuc

SEQ ID NO: 686390 - RNA, 19 nt, Homo sapiens
  misc_RNA (1)...(19): siRNA sense strand
uuggagaagucaguugaua

SEQ ID NO: 686391 - RNA, 19 nt, Homo sapiens
  misc_RNA (1)...(19): siRNA sense strand
ucacuggacuaugaagaau

SEQ ID NO: 686392 - RNA, 19 nt, Homo sapiens
  misc_RNA (1)...(19): siRNA sense strand
gaucuggaccucacacucu

SEQ ID NO: 686393 - RNA, 19 nt, Homo sapiens
  misc_RNA (1)...(19): siRNA sense strand
ccuaggaauuugccuuuua

SEQ ID NO: 686394 - RNA, 19 nt, Homo sapiens
  misc_RNA (1)...(19): siRNA sense strand
gagaagucaguugauaauu

SEQ ID NO: 686395 - RNA, 19 nt, Homo sapiens
  misc_RNA (1)...(19): siRNA sense strand
uacaggacgugaaugacaa

SEQ ID NO: 686396 - RNA, 19 nt, Homo sapiens
  misc_RNA (1)...(19): siRNA sense strand
gguagaugcaaacaaagaa

SEQ ID NO: 686397 - RNA, 19 nt, Homo sapiens
  misc_RNA (1)...(19): siRNA sense strand
ggaccucacacucuaucuu

SEQ ID NO: 686398 - RNA, 19 nt, Homo sapiens
  misc_RNA (1)...(19): siRNA sense strand
cagcgagccaggacucuuu

SEQ ID NO: 686399 - RNA, 19 nt, Homo sapiens
  misc_RNA (1)...(19): siRNA sense strand
gucucuaucuucucuguga

SEQ ID NO: 686400 - RNA, 19 nt, Homo sapiens
  misc_RNA (1)...(19): siRNA sense strand
uuacgguccucgacgcaaa

SEQ ID NO: 686401 - RNA, 19 nt, Homo sapiens
  misc_RNA (1)...(19): siRNA sense strand
uuuaacaucuugguugaga

SEQ ID NO: 686402 - RNA, 19 nt, Homo sapiens
  misc_RNA (1)...(19): siRNA sense strand
ggugguagcgguggacaaa

SEQ ID NO: 686403 - RNA, 19 nt, Homo sapiens
  misc_RNA (1)...(19): siRNA sense strand
uagcguacaugauggugau

SEQ ID NO: 686404 - RNA, 19 nt, Homo sapiens
  misc_RNA (1)...(19): siRNA sense strand
gugguaagcggaacugaug

SEQ ID NO: 686405 - RNA, 19 nt, Homo sapiens
  misc_RNA (1)...(19): siRNA sense strand
gcgagccucuucugauguc

SEQ ID NO: 686406 - RNA, 19 nt, Homo sapiens
  misc_RNA (1)...(19): siRNA sense strand
ugguagcgguggacaaaga

SEQ ID NO: 686407 - RNA, 19 nt, Homo sapiens
  misc_RNA (1)...(19): siRNA sense strand
ccuacucccuggcugaaga

SEQ ID NO: 686408 - RNA, 19 nt, Homo sapiens
  misc_RNA (1)...(19): siRNA sense strand
aaugacaacccacccaauu

SEQ ID NO: 686409 - RNA, 19 nt, Homo sapiens
  misc_RNA (1)...(19): siRNA sense strand
cgcaucgucuccagaggua

SEQ ID NO: 686410 - RNA, 19 nt, Homo sapiens
  misc_RNA (1)...(19): siRNA sense strand
ugagauugcaugcucuauu

SEQ ID NO: 686411 - RNA, 19 nt, Homo sapiens
  misc_RNA (1)...(19): siRNA sense strand
gaaaucucaacucuacaau

SEQ ID NO: 686412 - RNA, 19 nt, Homo sapiens
  misc_RNA (1)...(19): siRNA sense strand
ggggaaaucucaacucuac

SEQ ID NO: 686413 - RNA, 19 nt, Homo sapiens
  misc_RNA (1)...(19): siRNA sense strand
gaauaaacgggaaauugac

SEQ ID NO: 686414 - RNA, 19 nt, Homo sapiens
  misc_RNA (1)...(19): siRNA sense strand
ggaugugggugugaacucu

SEQ ID NO: 686415 - RNA, 19 nt, Homo sapiens
  misc_RNA (1)...(19): siRNA sense strand
uaaggugguggucacagua

SEQ ID NO: 686416 - RNA, 19 nt, Homo sapiens
  misc_RNA (1)...(19): siRNA sense strand
gagacuuuccaacuugauu

SEQ ID NO: 686417 - RNA, 19 nt, Homo sapiens
  misc_RNA (1)...(19): siRNA sense strand
gcgugaguguuccagagaa

SEQ ID NO: 686418 - RNA, 19 nt, Homo sapiens
  misc_RNA (1)...(19): siRNA sense strand
uggagaagucaguugauaa

SEQ ID NO: 686419 - RNA, 19 nt, Homo sapiens
  misc_RNA (1)...(19): siRNA sense strand
cagauucuaccucauggaa

SEQ ID NO: 686420 - RNA, 19 nt, Homo sapiens
  misc_RNA (1)...(19): siRNA sense strand
acuaugagcaguugagaga

SEQ ID NO: 686421 - RNA, 19 nt, Homo sapiens
  misc_RNA (1)...(19): siRNA sense strand
acuguaaucgcgcuguuua

SEQ ID NO: 686422 - RNA, 19 nt, Homo sapiens
  misc_RNA (1)...(19): siRNA sense strand
caguacaggacgugaauga

SEQ ID NO: 686423 - RNA, 19 nt, Homo sapiens
  misc_RNA (1)...(19): siRNA sense strand
cggagacuuuccaacuuga

SEQ ID NO: 686424 - RNA, 19 nt, Homo sapiens
  misc_RNA (1)...(19): siRNA sense strand
ccucuucugaugucugaua

SEQ ID NO: 686425 - RNA, 19 nt, Homo sapiens
  misc_RNA (1)...(19): siRNA sense strand
agagguaggacgcagcuuu

SEQ ID NO: 686426 - RNA, 19 nt, Homo sapiens
  misc_RNA (1)...(19): siRNA sense strand
cuaggaauuugccuuuuaa

SEQ ID NO: 686427 - RNA, 19 nt, Homo sapiens
  misc_RNA (1)...(19): siRNA sense strand
ggaagugguagcucaggau

SEQ ID NO: 686428 - RNA, 19 nt, Homo sapiens
  misc_RNA (1)...(19): siRNA sense strand
gagaaaagcgagccucuuc

SEQ ID NO: 686429 - RNA, 19 nt, Homo sapiens
  misc_RNA (1)...(19): siRNA sense strand
uaagguagaugcaaacaaa

SEQ ID NO: 686430 - RNA, 19 nt, Homo sapiens
  misc_RNA (1)...(19): siRNA sense strand
gaaaguagcagacguuaau

SEQ ID NO: 686431 - RNA, 19 nt, Homo sapiens
  misc_RNA (1)...(19): siRNA sense strand
ggaauaaacgggaaauuga

SEQ ID NO: 686432 - RNA, 19 nt, Homo sapiens
  misc_RNA (1)...(19): siRNA sense strand
ggaaauugaccuacucuuu

SEQ ID NO: 686433 - RNA, 19 nt, Homo sapiens
  misc_RNA (1)...(19): siRNA sense strand
gaagagagcugugagaaaa

SEQ ID NO: 686434 - RNA, 19 nt, Homo sapiens
  misc_RNA (1)...(19): siRNA sense strand
gagauugcaugcucuauuc

SEQ ID NO: 686435 - RNA, 19 nt, Homo sapiens
  misc_RNA (1)...(19): siRNA sense strand
gaagucaguugauaauuac

SEQ ID NO: 686436 - RNA, 19 nt, Homo sapiens
  misc_RNA (1)...(19): siRNA sense strand
uacaaucacuggacuauga

SEQ ID NO: 686437 - RNA, 19 nt, Homo sapiens
  misc_RNA (1)...(19): siRNA sense strand
cagacacgcuccuuaguga

SEQ ID NO: 686438 - RNA, 19 nt, Homo sapiens
  misc_RNA (1)...(19): siRNA sense strand
gaacuguaaucgcgcuguu

SEQ ID NO: 686439 - RNA, 19 nt, Homo sapiens
  misc_RNA (1)...(19): siRNA sense strand
ucugaugucugauaaggua

SEQ ID NO: 686440 - RNA, 19 nt, Homo sapiens
  misc_RNA (1)...(19): siRNA sense strand
gcacuucucucuggaugug

SEQ ID NO: 686441 - RNA, 19 nt, Homo sapiens
  misc_RNA (1)...(19): siRNA sense strand
ccaguucgaucucugaaga

SEQ ID NO: 686442 - RNA, 19 nt, Homo sapiens
  misc_RNA (1)...(19): siRNA sense strand
aaucucaacucuacaauca

SEQ ID NO: 686443 - RNA, 19 nt, Homo sapiens
  misc_RNA (1)...(19): siRNA sense strand
ggaaaucucaacucuacaa

SEQ ID NO: 686444 - RNA, 19 nt, Homo sapiens
  misc_RNA (1)...(19): siRNA sense strand
uagcagacguuaaugacaa

SEQ ID NO: 686445 - RNA, 19 nt, Homo sapiens
  misc_RNA (1)...(19): siRNA sense strand
ugagauccuucgacuauga

SEQ ID NO: 686446 - RNA, 19 nt, Homo sapiens
  misc_RNA (1)...(19): siRNA sense strand
gaaauugaccuacucuuuu

SEQ ID NO: 686447 - RNA, 19 nt, Homo sapiens
  misc_RNA (1)...(19): siRNA sense strand
ggauccagaugagggaaua

SEQ ID NO: 686448 - RNA, 19 nt, Homo sapiens
  misc_RNA (1)...(19): siRNA sense strand
ggagaagucaguugauaau

SEQ ID NO: 686449 - RNA, 19 nt, Homo sapiens
  misc_RNA (1)...(19): siRNA sense strand
uggaguagaaguagaaaua

SEQ ID NO: 686450 - RNA, 19 nt, Homo sapiens
  misc_RNA (1)...(19): siRNA sense strand
gggaauaaacgggaaauug

SEQ ID NO: 686451 - RNA, 19 nt, Homo sapiens
  misc_RNA (1)...(19): siRNA sense strand
cuagggaccuggacagaga

SEQ ID NO: 686452 - RNA, 19 nt, Homo sapiens
  misc_RNA (1)...(19): siRNA sense strand
ugagagaccuacaguugug

SEQ ID NO: 686453 - RNA, 19 nt, Homo sapiens
  misc_RNA (1)...(19): siRNA sense strand
ggaguagaaguagaaauaa

SEQ ID NO: 686454 - RNA, 19 nt, Homo sapiens
  misc_RNA (1)...(19): siRNA sense strand
gaggaagagucaccugauc

SEQ ID NO: 686455 - RNA, 19 nt, Homo sapiens
  misc_RNA (1)...(19): siRNA sense strand
gggcuuuccugcagaccua

SEQ ID NO: 686456 - RNA, 19 nt, Homo sapiens
  misc_RNA (1)...(19): siRNA sense strand
guggugaacuuuaacaucu

SEQ ID NO: 686457 - RNA, 19 nt, Homo sapiens
  misc_RNA (1)...(19): siRNA sense strand
gcacaagucacgccugcuu

SEQ ID NO: 686458 - RNA, 19 nt, Homo sapiens
  misc_RNA (1)...(19): siRNA sense strand
guugagagaccuacaguug

SEQ ID NO: 686459 - RNA, 19 nt, Homo sapiens
  misc_RNA (1)...(19): siRNA sense strand
cggaggagcuggacaaagg

SEQ ID NO: 686460 - RNA, 19 nt, Homo sapiens
  misc_RNA (1)...(19): siRNA sense strand
aagcggaacugauggacaa

SEQ ID NO: 686461 - RNA, 19 nt, Homo sapiens
  misc_RNA (1)...(19): siRNA sense strand
gaacuuuaacaucuugguu

SEQ ID NO: 686462 - RNA, 19 nt, Homo sapiens
  misc_RNA (1)...(19): siRNA sense strand
ccuccuauguauccauuaa

SEQ ID NO: 686463 - RNA, 19 nt, Homo sapiens
  misc_RNA (1)...(19): siRNA sense strand
ucaccucucugaccaguuc

SEQ ID NO: 686464 - RNA, 19 nt, Homo sapiens
  misc_RNA (1)...(19): siRNA sense strand
gauggaggcgcucuuguug

SEQ ID NO: 686465 - RNA, 19 nt, Homo sapiens
  misc_RNA (1)...(19): siRNA sense strand
ggugaacuuuaacaucuug

SEQ ID NO: 686466 - RNA, 19 nt, Homo sapiens
  misc_RNA (1)...(19): siRNA sense strand
gauucuaccucauggaagu

SEQ ID NO: 686467 - RNA, 19 nt, Homo sapiens
  misc_RNA (1)...(19): siRNA sense strand
uuuccgggaugaagaguua

SEQ ID NO: 686468 - RNA, 19 nt, Homo sapiens
  misc_RNA (1)...(19): siRNA sense strand
gcagacacgcuccuuagug

SEQ ID NO: 686469 - RNA, 19 nt, Homo sapiens
  misc_RNA (1)...(19): siRNA sense strand
ggacagagacgcgcucaag

SEQ ID NO: 686470 - RNA, 19 nt, Homo sapiens
  misc_RNA (1)...(19): siRNA sense strand
ggauggaggcgcucuuguu

SEQ ID NO: 686471 - RNA, 19 nt, Homo sapiens
  misc_RNA (1)...(19): siRNA sense strand
gcacucggcugcucaugcu

SEQ ID NO: 686472 - RNA, 19 nt, Homo sapiens
  misc_RNA (1)...(19): siRNA sense strand
caucuugguugagaacaaa

SEQ ID NO: 686473 - RNA, 19 nt, Homo sapiens
  misc_RNA (1)...(19): siRNA sense strand
gaacugauggacaaaagua

SEQ ID NO: 686474 - RNA, 19 nt, Homo sapiens
  misc_RNA (1)...(19): siRNA sense strand
guacaggacgugaaugaca

SEQ ID NO: 686475 - RNA, 19 nt, Homo sapiens
  misc_RNA (1)...(19): siRNA sense strand
gaccuaggcaguaucaaga

SEQ ID NO: 686476 - RNA, 19 nt, Homo sapiens
  misc_RNA (1)...(19): siRNA sense strand
cugauaagguagaugcaaa

SEQ ID NO: 686477 - RNA, 19 nt, Homo sapiens
  misc_RNA (1)...(19): siRNA sense strand
gcccuuguccuccuaugua

SEQ ID NO: 686478 - RNA, 19 nt, Homo sapiens
  misc_RNA (1)...(19): siRNA sense strand
ggaugaagaguuaaaagua

SEQ ID NO: 686479 - RNA, 19 nt, Homo sapiens
  misc_RNA (1)...(19): siRNA sense strand
caaagaagaacggcgaguu

SEQ ID NO: 686480 - RNA, 19 nt, Homo sapiens
  misc_RNA (1)...(19): siRNA sense strand
aagcgagccucuucugaug

SEQ ID NO: 686481 - RNA, 19 nt, Homo sapiens
  misc_RNA (1)...(19): siRNA sense strand
gagcccugcuggacagaga

SEQ ID NO: 686482 - RNA, 19 nt, Homo sapiens
  misc_RNA (1)...(19): siRNA sense strand
gaguacagcgugaguguuc

SEQ ID NO: 686483 - RNA, 19 nt, Homo sapiens
  misc_RNA (1)...(19): siRNA sense strand
gcuccaaucugcacuucuc

SEQ ID NO: 686484 - RNA, 19 nt, Homo sapiens
  misc_RNA (1)...(19): siRNA sense strand
ugaagagagcugugagaaa

SEQ ID NO: 686485 - RNA, 19 nt, Homo sapiens
  misc_RNA (1)...(19): siRNA sense strand
ucggagacuuuccaacuug

SEQ ID NO: 686486 - RNA, 19 nt, Homo sapiens
  misc_RNA (1)...(19): siRNA sense strand
uguguguggugaacuuuaa

SEQ ID NO: 686487 - RNA, 19 nt, Homo sapiens
  misc_RNA (1)...(19): siRNA sense strand
gaccucacacucuaucuug

SEQ ID NO: 686488 - RNA, 19 nt, Homo sapiens
  misc_RNA (1)...(19): siRNA sense strand
ucugagauccuucgacuau

SEQ ID NO: 686489 - RNA, 19 nt, Homo sapiens
  misc_RNA (1)...(19): siRNA sense strand
ugacaacccacccaauuuc

SEQ ID NO: 686490 - RNA, 19 nt, Homo sapiens
  misc_RNA (1)...(19): siRNA sense strand
uuggagaagucaguugaua

SEQ ID NO: 686491 - RNA, 19 nt, Homo sapiens
  misc_RNA (1)...(19): siRNA sense strand
ucacuggacuaugaagaau

SEQ ID NO: 686492 - RNA, 19 nt, Homo sapiens
  misc_RNA (1)...(19): siRNA sense strand
gaucuggaccucacacucu

SEQ ID NO: 686493 - RNA, 19 nt, Homo sapiens
  misc_RNA (1)...(19): siRNA sense strand
ccuaggaauuugccuuuua

SEQ ID NO: 686494 - RNA, 19 nt, Homo sapiens
  misc_RNA (1)...(19): siRNA sense strand
gagaagucaguugauaauu

SEQ ID NO: 686495 - RNA, 19 nt, Homo sapiens
  misc_RNA (1)...(19): siRNA sense strand
uacaggacgugaaugacaa

SEQ ID NO: 686496 - RNA, 19 nt, Homo sapiens
  misc_RNA (1)...(19): siRNA sense strand
gguagaugcaaacaaagaa

SEQ ID NO: 686497 - RNA, 19 nt, Homo sapiens
  misc_RNA (1)...(19): siRNA sense strand
ggaccucacacucuaucuu

SEQ ID NO: 686498 - RNA, 19 nt, Homo sapiens
  misc_RNA (1)...(19): siRNA sense strand
cagcgagccaggacucuuu

SEQ ID NO: 686499 - RNA, 19 nt, Homo sapiens
  misc_RNA (1)...(19): siRNA sense strand
gucucuaucuucucuguga

SEQ ID NO: 686500 - RNA, 19 nt, Homo sapiens
  misc_RNA (1)...(19): siRNA sense strand
uuacgguccucgacgcaaa

SEQ ID NO: 686501 - RNA, 19 nt, Homo sapiens
  misc_RNA (1)...(19): siRNA sense strand
uuuaacaucuugguugaga

SEQ ID NO: 686502 - RNA, 19 nt, Homo sapiens
  misc_RNA (1)...(19): siRNA sense strand
ggugguagcgguggacaaa

SEQ ID NO: 686503 - RNA, 19 nt, Homo sapiens
  misc_RNA (1)...(19): siRNA sense strand
uagcguacaugauggugau

SEQ ID NO: 686504 - RNA, 19 nt, Homo sapiens
  misc_RNA (1)...(19): siRNA sense strand
gugguaagcggaacugaug

SEQ ID NO: 686505 - RNA, 19 nt, Homo sapiens
  misc_RNA (1)...(19): siRNA sense strand
gcgagccucuucugauguc

SEQ ID NO: 686506 - RNA, 19 nt, Homo sapiens
  misc_RNA (1)...(19): siRNA sense strand
ugguagcgguggacaaaga

SEQ ID NO: 686507 - RNA, 19 nt, Homo sapiens
  misc_RNA (1)...(19): siRNA sense strand
ccuacucccuggcugaaga

SEQ ID NO: 686508 - RNA, 19 nt, Homo sapiens
  misc_RNA (1)...(19): siRNA sense strand
aaugacaacccacccaauu

SEQ ID NO: 686509 - RNA, 19 nt, Homo sapiens
  misc_RNA (1)...(19): siRNA sense strand
cgcaucgucuccagaggua

SEQ ID NO: 686510 - RNA, 19 nt, Homo sapiens
  misc_RNA (1)...(19): siRNA sense strand
ugagauugcaugcucuauu

SEQ ID NO: 686511 - RNA, 19 nt, Homo sapiens
  misc_RNA (1)...(19): siRNA sense strand
gaaaucucaacucuacaau

SEQ ID NO: 686512 - RNA, 19 nt, Homo sapiens
  misc_RNA (1)...(19): siRNA sense strand
ggggaaaucucaacucuac

SEQ ID NO: 686513 - RNA, 19 nt, Homo sapiens
  misc_RNA (1)...(19): siRNA sense strand
gaauaaacgggaaauugac

SEQ ID NO: 686514 - RNA, 19 nt, Homo sapiens
  misc_RNA (1)...(19): siRNA sense strand
ggaugugggugugaacucu

SEQ ID NO: 686515 - RNA, 19 nt, Homo sapiens
  misc_RNA (1)...(19): siRNA sense strand
uaaggugguggucacagua

SEQ ID NO: 686516 - RNA, 19 nt, Homo sapiens
  misc_RNA (1)...(19): siRNA sense strand
gagacuuuccaacuugauu

SEQ ID NO: 686517 - RNA, 19 nt, Homo sapiens
  misc_RNA (1)...(19): siRNA sense strand
gcgugaguguuccagagaa

SEQ ID NO: 686518 - RNA, 19 nt, Homo sapiens
  misc_RNA (1)...(19): siRNA sense strand
uggagaagucaguugauaa

SEQ ID NO: 686519 - RNA, 19 nt, Homo sapiens
  misc_RNA (1)...(19): siRNA sense strand
cagauucuaccucauggaa

SEQ ID NO: 686520 - RNA, 19 nt, Homo sapiens
  misc_RNA (1)...(19): siRNA sense strand
acuaugagcaguugagaga

SEQ ID NO: 686521 - RNA, 19 nt, Homo sapiens
  misc_RNA (1)...(19): siRNA sense strand
acuguaaucgcgcuguuua

SEQ ID NO: 686522 - RNA, 19 nt, Homo sapiens
  misc_RNA (1)...(19): siRNA sense strand
caguacaggacgugaauga

SEQ ID NO: 686523 - RNA, 19 nt, Homo sapiens
  misc_RNA (1)...(19): siRNA sense strand
cggagacuuuccaacuuga

SEQ ID NO: 686524 - RNA, 19 nt, Homo sapiens
  misc_RNA (1)...(19): siRNA sense strand
ccucuucugaugucugaua

SEQ ID NO: 686525 - RNA, 19 nt, Homo sapiens
  misc_RNA (1)...(19): siRNA sense strand
agagguaggacgcagcuuu

SEQ ID NO: 686526 - RNA, 19 nt, Homo sapiens
  misc_RNA (1)...(19): siRNA sense strand
cuaggaauuugccuuuuaa

SEQ ID NO: 686527 - RNA, 19 nt, Homo sapiens
  misc_RNA (1)...(19): siRNA sense strand
ggaagugguagcucaggau

SEQ ID NO: 686528 - RNA, 19 nt, Homo sapiens
  misc_RNA (1)...(19): siRNA sense strand
gagaaaagcgagccucuuc

SEQ ID NO: 686529 - RNA, 19 nt, Homo sapiens
  misc_RNA (1)...(19): siRNA sense strand
gcgaaagucuuaauaacua

SEQ ID NO: 686530 - RNA, 19 nt, Homo sapiens
  misc_RNA (1)...(19): siRNA sense strand
gaaacaaucaucucucuaa

SEQ ID NO: 686531 - RNA, 19 nt, Homo sapiens
  misc_RNA (1)...(19): siRNA sense strand
gaggauaaacugaaucuuu

SEQ ID NO: 686532 - RNA, 19 nt, Homo sapiens
  misc_RNA (1)...(19): siRNA sense strand
gauuuaagcucagugguaa

SEQ ID NO: 686533 - RNA, 19 nt, Homo sapiens
  misc_RNA (1)...(19): siRNA sense strand
ggaugucaaugauaaugua

SEQ ID NO: 686534 - RNA, 19 nt, Homo sapiens
  misc_RNA (1)...(19): siRNA sense strand
acaaucaucucucuaaaug

SEQ ID NO: 686535 - RNA, 19 nt, Homo sapiens
  misc_RNA (1)...(19): siRNA sense strand
ggacauuaaugacaauaca

SEQ ID NO: 686536 - RNA, 19 nt, Homo sapiens
  misc_RNA (1)...(19): siRNA sense strand
ggaaauaguggacauuaau

SEQ ID NO: 686537 - RNA, 19 nt, Homo sapiens
  misc_RNA (1)...(19): siRNA sense strand
cugcaaaucuagacuauga

SEQ ID NO: 686538 - RNA, 19 nt, Homo sapiens
  misc_RNA (1)...(19): siRNA sense strand
gcagaacaauugcugaaag

SEQ ID NO: 686539 - RNA, 19 nt, Homo sapiens
  misc_RNA (1)...(19): siRNA sense strand
ggauuuacuugaaacgaaa

SEQ ID NO: 686540 - RNA, 19 nt, Homo sapiens
  misc_RNA (1)...(19): siRNA sense strand
aagcgagccucuucugaua

SEQ ID NO: 686541 - RNA, 19 nt, Homo sapiens
  misc_RNA (1)...(19): siRNA sense strand
gagcgaaagucuuaauaac

SEQ ID NO: 686542 - RNA, 19 nt, Homo sapiens
  misc_RNA (1)...(19): siRNA sense strand
ggaagaauuggaagugaaa

SEQ ID NO: 686543 - RNA, 19 nt, Homo sapiens
  misc_RNA (1)...(19): siRNA sense strand
gaaagugcaccuccaggaa

SEQ ID NO: 686544 - RNA, 19 nt, Homo sapiens
  misc_RNA (1)...(19): siRNA sense strand
ggauuuaagcucaguggua

SEQ ID NO: 686545 - RNA, 19 nt, Homo sapiens
  misc_RNA (1)...(19): siRNA sense strand
gaaauaguggacauuaaug

SEQ ID NO: 686546 - RNA, 19 nt, Homo sapiens
  misc_RNA (1)...(19): siRNA sense strand
uaacaguucuagaugugaa

SEQ ID NO: 686547 - RNA, 19 nt, Homo sapiens
  misc_RNA (1)...(19): siRNA sense strand
gguaacaguucuagaugug

SEQ ID NO: 686548 - RNA, 19 nt, Homo sapiens
  misc_RNA (1)...(19): siRNA sense strand
gaacaccaccucugucuac

SEQ ID NO: 686549 - RNA, 19 nt, Homo sapiens
  misc_RNA (1)...(19): siRNA sense strand
gcgcagauccgcuacucua

SEQ ID NO: 686550 - RNA, 19 nt, Homo sapiens
  misc_RNA (1)...(19): siRNA sense strand
aaucaucucucuaaaugug

SEQ ID NO: 686551 - RNA, 19 nt, Homo sapiens
  misc_RNA (1)...(19): siRNA sense strand
gaacaguaaucgcccuuuu

SEQ ID NO: 686552 - RNA, 19 nt, Homo sapiens
  misc_RNA (1)...(19): siRNA sense strand
cagauccgcuacucuauuc

SEQ ID NO: 686553 - RNA, 19 nt, Homo sapiens
  misc_RNA (1)...(19): siRNA sense strand
gcguaagagucaucugauu

SEQ ID NO: 686554 - RNA, 19 nt, Homo sapiens
  misc_RNA (1)...(19): siRNA sense strand
gcagauccgcuacucuauu

SEQ ID NO: 686555 - RNA, 19 nt, Homo sapiens
  misc_RNA (1)...(19): siRNA sense strand
gcucaagcgucgcccaaau

SEQ ID NO: 686556 - RNA, 19 nt, Homo sapiens
  misc_RNA (1)...(19): siRNA sense strand
gagguauucuuguacaaca

SEQ ID NO: 686557 - RNA, 19 nt, Homo sapiens
  misc_RNA (1)...(19): siRNA sense strand
gggcuuuccugcagaccua

SEQ ID NO: 686558 - RNA, 19 nt, Homo sapiens
  misc_RNA (1)...(19): siRNA sense strand
uggaaauaguggacauuaa

SEQ ID NO: 686559 - RNA, 19 nt, Homo sapiens
  misc_RNA (1)...(19): siRNA sense strand
ccgaggagcuggagaaagg

SEQ ID NO: 686560 - RNA, 19 nt, Homo sapiens
  misc_RNA (1)...(19): siRNA sense strand
ggaaggagaagccguuuac

SEQ ID NO: 686561 - RNA, 19 nt, Homo sapiens
  misc_RNA (1)...(19): siRNA sense strand
ggagaacccaggcaacuuc

SEQ ID NO: 686562 - RNA, 19 nt, Homo sapiens
  misc_RNA (1)...(19): siRNA sense strand
uaacucaggauuuacuuga

SEQ ID NO: 686563 - RNA, 19 nt, Homo sapiens
  misc_RNA (1)...(19): siRNA sense strand
cagaaacaaucaucucucu

SEQ ID NO: 686564 - RNA, 19 nt, Homo sapiens
  misc_RNA (1)...(19): siRNA sense strand
cagaaaagaucucacaaau

SEQ ID NO: 686565 - RNA, 19 nt, Homo sapiens
  misc_RNA (1)...(19): siRNA sense strand
cagccugucuaccguguaa

SEQ ID NO: 686566 - RNA, 19 nt, Homo sapiens
  misc_RNA (1)...(19): siRNA sense strand
gcagcuccauccucucguu

SEQ ID NO: 686567 - RNA, 19 nt, Homo sapiens
  misc_RNA (1)...(19): siRNA sense strand
cagaacaauugcugaaagu

SEQ ID NO: 686568 - RNA, 19 nt, Homo sapiens
  misc_RNA (1)...(19): siRNA sense strand
cagaagugguuguuacauc

SEQ ID NO: 686569 - RNA, 19 nt, Homo sapiens
  misc_RNA (1)...(19): siRNA sense strand
guaacuuauuccuuuguga

SEQ ID NO: 686570 - RNA, 19 nt, Homo sapiens
  misc_RNA (1)...(19): siRNA sense strand
cguaagagucaucugauuu

SEQ ID NO: 686571 - RNA, 19 nt, Homo sapiens
  misc_RNA (1)...(19): siRNA sense strand
ggacagagacgcgcucaag

SEQ ID NO: 686572 - RNA, 19 nt, Homo sapiens
  misc_RNA (1)...(19): siRNA sense strand
ucuuggaugucaaugauaa

SEQ ID NO: 686573 - RNA, 19 nt, Homo sapiens
  misc_RNA (1)...(19): siRNA sense strand
uaucuuggaugucaaugau

SEQ ID NO: 686574 - RNA, 19 nt, Homo sapiens
  misc_RNA (1)...(19): siRNA sense strand
gcaccuccaggaacaguaa

SEQ ID NO: 686575 - RNA, 19 nt, Homo sapiens
  misc_RNA (1)...(19): siRNA sense strand
caaugauaauguaccagaa

SEQ ID NO: 686576 - RNA, 19 nt, Homo sapiens
  misc_RNA (1)...(19): siRNA sense strand
gaaucuuuaucccguggaa

SEQ ID NO: 686577 - RNA, 19 nt, Homo sapiens
  misc_RNA (1)...(19): siRNA sense strand
gaagucucccauuugaauu

SEQ ID NO: 686578 - RNA, 19 nt, Homo sapiens
  misc_RNA (1)...(19): siRNA sense strand
cuggagaaauuucaacuuc

SEQ ID NO: 686579 - RNA, 19 nt, Homo sapiens
  misc_RNA (1)...(19): siRNA sense strand
caaauucugguaacaguuc

SEQ ID NO: 686580 - RNA, 19 nt, Homo sapiens
  misc_RNA (1)...(19): siRNA sense strand
caauacaccccgauucuua

SEQ ID NO: 686581 - RNA, 19 nt, Homo sapiens
  misc_RNA (1)...(19): siRNA sense strand
gaaauuucaacuucugcaa

SEQ ID NO: 686582 - RNA, 19 nt, Homo sapiens
  misc_RNA (1)...(19): siRNA sense strand
guggaaauaguggacauua

SEQ ID NO: 686583 - RNA, 19 nt, Homo sapiens
  misc_RNA (1)...(19): siRNA sense strand
uuuaugagcuggguguuga

SEQ ID NO: 686584 - RNA, 19 nt, Homo sapiens
  misc_RNA (1)...(19): siRNA sense strand
acucaggauuuacuugaaa

SEQ ID NO: 686585 - RNA, 19 nt, Homo sapiens
  misc_RNA (1)...(19): siRNA sense strand
guaauagucacuucucagu

SEQ ID NO: 686586 - RNA, 19 nt, Homo sapiens
  misc_RNA (1)...(19): siRNA sense strand
auucggaccucacucugua

SEQ ID NO: 686587 - RNA, 19 nt, Homo sapiens
  misc_RNA (1)...(19): siRNA sense strand
gagguaggaugcagcuuuu

SEQ ID NO: 686588 - RNA, 19 nt, Homo sapiens
  misc_RNA (1)...(19): siRNA sense strand
cgcggugucuggugaguuu

SEQ ID NO: 686589 - RNA, 19 nt, Homo sapiens
  misc_RNA (1)...(19): siRNA sense strand
acacuccaauguuuacuca

SEQ ID NO: 686590 - RNA, 19 nt, Homo sapiens
  misc_RNA (1)...(19): siRNA sense strand
gggaaggagaagccguuua

SEQ ID NO: 686591 - RNA, 19 nt, Homo sapiens
  misc_RNA (1)...(19): siRNA sense strand
ccuacucacuggcagaaga

SEQ ID NO: 686592 - RNA, 19 nt, Homo sapiens
  misc_RNA (1)...(19): siRNA sense strand
agaagucucccauuugaau

SEQ ID NO: 686593 - RNA, 19 nt, Homo sapiens
  misc_RNA (1)...(19): siRNA sense strand
agaagugguuguuacaucu

SEQ ID NO: 686594 - RNA, 19 nt, Homo sapiens
  misc_RNA (1)...(19): siRNA sense strand
auaacuaucuuggauguca

SEQ ID NO: 686595 - RNA, 19 nt, Homo sapiens
  misc_RNA (1)...(19): siRNA sense strand
agagcgaaagucuuaauaa

SEQ ID NO: 686596 - RNA, 19 nt, Homo sapiens
  misc_RNA (1)...(19): siRNA sense strand
cagagcgaaagucuuaaua

SEQ ID NO: 686597 - RNA, 19 nt, Homo sapiens
  misc_RNA (1)...(19): siRNA sense strand
gcaacaucgucaaggaucu

SEQ ID NO: 686598 - RNA, 19 nt, Homo sapiens
  misc_RNA (1)...(19): siRNA sense strand
ggaacaccaccucugucua

SEQ ID NO: 686599 - RNA, 19 nt, Homo sapiens
  misc_RNA (1)...(19): siRNA sense strand
ccaggagagcuaugagaaa

SEQ ID NO: 686600 - RNA, 19 nt, Homo sapiens
  misc_RNA (1)...(19): siRNA sense strand
cugcagcgcuggcacaagu

SEQ ID NO: 686601 - RNA, 19 nt, Homo sapiens
  misc_RNA (1)...(19): siRNA sense strand
gaaugacaacacuccaaug

SEQ ID NO: 686602 - RNA, 19 nt, Homo sapiens
  misc_RNA (1)...(19): siRNA sense strand
gaccagaacgcccaagucu

SEQ ID NO: 686603 - RNA, 19 nt, Homo sapiens
  misc_RNA (1)...(19): siRNA sense strand
ugacaaaugcagcucuaga

SEQ ID NO: 686604 - RNA, 19 nt, Homo sapiens
  misc_RNA (1)...(19): siRNA sense strand
ucgagacucuggccugaau

SEQ ID NO: 686605 - RNA, 19 nt, Homo sapiens
  misc_RNA (1)...(19): siRNA sense strand
caacuucugcaaaucuaga

SEQ ID NO: 686606 - RNA, 19 nt, Homo sapiens
  misc_RNA (1)...(19): siRNA sense strand
uaguggacauuaaugacaa

SEQ ID NO: 686607 - RNA, 19 nt, Homo sapiens
  misc_RNA (1)...(19): siRNA sense strand
aggauuuacuugaaacgaa

SEQ ID NO: 686608 - RNA, 19 nt, Homo sapiens
  misc_RNA (1)...(19): siRNA sense strand
guaagagucaucugauuuu

SEQ ID NO: 686609 - RNA, 19 nt, Homo sapiens
  misc_RNA (1)...(19): siRNA sense strand
cgcaucgucuccagaggua

SEQ ID NO: 686610 - RNA, 19 nt, Homo sapiens
  misc_RNA (1)...(19): siRNA sense strand
uaagcucagugguaauagu

SEQ ID NO: 686611 - RNA, 19 nt, Homo sapiens
  misc_RNA (1)...(19): siRNA sense strand
aggaagaauuggaagugaa

SEQ ID NO: 686612 - RNA, 19 nt, Homo sapiens
  misc_RNA (1)...(19): siRNA sense strand
aaggaagaauuggaaguga

SEQ ID NO: 686613 - RNA, 19 nt, Homo sapiens
  misc_RNA (1)...(19): siRNA sense strand
gcgagccucuucugauaac

SEQ ID NO: 686614 - RNA, 19 nt, Homo sapiens
  misc_RNA (1)...(19): siRNA sense strand
agagguaggaugcagcuuu

SEQ ID NO: 686615 - RNA, 19 nt, Homo sapiens
  misc_RNA (1)...(19): siRNA sense strand
gaagugaaaauucucgaaa

SEQ ID NO: 686616 - RNA, 19 nt, Homo sapiens
  misc_RNA (1)...(19): siRNA sense strand
uaggcaacaucgucaagga

SEQ ID NO: 686617 - RNA, 19 nt, Homo sapiens
  misc_RNA (1)...(19): siRNA sense strand
caggagagcuaugagaaaa

SEQ ID NO: 686618 - RNA, 19 nt, Homo sapiens
  misc_RNA (1)...(19): siRNA sense strand
ugucgaggauaaacugaau

SEQ ID NO: 686619 - RNA, 19 nt, Homo sapiens
  misc_RNA (1)...(19): siRNA sense strand
uaacuaucuuggaugucaa

SEQ ID NO: 686620 - RNA, 19 nt, Homo sapiens
  misc_RNA (1)...(19): siRNA sense strand
acuaugaggacucgaguuu

SEQ ID NO: 686621 - RNA, 19 nt, Homo sapiens
  misc_RNA (1)...(19): siRNA sense strand
ggaugcagcuuuucucucu

SEQ ID NO: 686622 - RNA, 19 nt, Homo sapiens
  misc_RNA (1)...(19): siRNA sense strand
acuaugagcaguugagaga

SEQ ID NO: 686623 - RNA, 19 nt, Homo sapiens
  misc_RNA (1)...(19): siRNA sense strand
caacuccgacacugggauu

SEQ ID NO: 686624 - RNA, 19 nt, Homo sapiens
  misc_RNA (1)...(19): siRNA sense strand
caucuucucugugaaugca

SEQ ID NO: 686625 - RNA, 19 nt, Homo sapiens
  misc_RNA (1)...(19): siRNA sense strand
gccuccaucuucucuguga

SEQ ID NO: 686626 - RNA, 19 nt, Homo sapiens
  misc_RNA (1)...(19): siRNA sense strand
aaaggaacaccaccucugu

SEQ ID NO: 686627 - RNA, 19 nt, Homo sapiens
  misc_RNA (1)...(19): siRNA sense strand
ccgacacgcuuaucaacca

SEQ ID NO: 686628 - RNA, 19 nt, Homo sapiens
  misc_RNA (1)...(19): siRNA sense strand
gagaaaagcgagccucuuc

SEQ ID NO: 686629 - RNA, 19 nt, Homo sapiens
  misc_RNA (1)...(19): siRNA sense strand
gcgaaagucuuaauaacua

SEQ ID NO: 686630 - RNA, 19 nt, Homo sapiens
  misc_RNA (1)...(19): siRNA sense strand
gaaacaaucaucucucuaa

SEQ ID NO: 686631 - RNA, 19 nt, Homo sapiens
  misc_RNA (1)...(19): siRNA sense strand
gaggauaaacugaaucuuu

SEQ ID NO: 686632 - RNA, 19 nt, Homo sapiens
  misc_RNA (1)...(19): siRNA sense strand
gauuuaagcucagugguaa

SEQ ID NO: 686633 - RNA, 19 nt, Homo sapiens
  misc_RNA (1)...(19): siRNA sense strand
ggaugucaaugauaaugua

SEQ ID NO: 686634 - RNA, 19 nt, Homo sapiens
  misc_RNA (1)...(19): siRNA sense strand
acaaucaucucucuaaaug

SEQ ID NO: 686635 - RNA, 19 nt, Homo sapiens
  misc_RNA (1)...(19): siRNA sense strand
ggacauuaaugacaauaca

SEQ ID NO: 686636 - RNA, 19 nt, Homo sapiens
  misc_RNA (1)...(19): siRNA sense strand
ggaaauaguggacauuaau

SEQ ID NO: 686637 - RNA, 19 nt, Homo sapiens
  misc_RNA (1)...(19): siRNA sense strand
cugcaaaucuagacuauga

SEQ ID NO: 686638 - RNA, 19 nt, Homo sapiens
  misc_RNA (1)...(19): siRNA sense strand
gcagaacaauugcugaaag

SEQ ID NO: 686639 - RNA, 19 nt, Homo sapiens
  misc_RNA (1)...(19): siRNA sense strand
ggauuuacuugaaacgaaa

SEQ ID NO: 686640 - RNA, 19 nt, Homo sapiens
  misc_RNA (1)...(19): siRNA sense strand
aagcgagccucuucugaua

SEQ ID NO: 686641 - RNA, 19 nt, Homo sapiens
  misc_RNA (1)...(19): siRNA sense strand
gagcgaaagucuuaauaac

SEQ ID NO: 686642 - RNA, 19 nt, Homo sapiens
  misc_RNA (1)...(19): siRNA sense strand
ggaagaauuggaagugaaa

SEQ ID NO: 686643 - RNA, 19 nt, Homo sapiens
  misc_RNA (1)...(19): siRNA sense strand
gaaagugcaccuccaggaa

SEQ ID NO: 686644 - RNA, 19 nt, Homo sapiens
  misc_RNA (1)...(19): siRNA sense strand
ggauuuaagcucaguggua

SEQ ID NO: 686645 - RNA, 19 nt, Homo sapiens
  misc_RNA (1)...(19): siRNA sense strand
gaaauaguggacauuaaug

SEQ ID NO: 686646 - RNA, 19 nt, Homo sapiens
  misc_RNA (1)...(19): siRNA sense strand
uaacaguucuagaugugaa

SEQ ID NO: 686647 - RNA, 19 nt, Homo sapiens
  misc_RNA (1)...(19): siRNA sense strand
gguaacaguucuagaugug

SEQ ID NO: 686648 - RNA, 19 nt, Homo sapiens
  misc_RNA (1)...(19): siRNA sense strand
gaacaccaccucugucuac

SEQ ID NO: 686649 - RNA, 19 nt, Homo sapiens
  misc_RNA (1)...(19): siRNA sense strand
gcgcagauccgcuacucua

SEQ ID NO: 686650 - RNA, 19 nt, Homo sapiens
  misc_RNA (1)...(19): siRNA sense strand
aaucaucucucuaaaugug

SEQ ID NO: 686651 - RNA, 19 nt, Homo sapiens
  misc_RNA (1)...(19): siRNA sense strand
gaacaguaaucgcccuuuu

SEQ ID NO: 686652 - RNA, 19 nt, Homo sapiens
  misc_RNA (1)...(19): siRNA sense strand
cagauccgcuacucuauuc

SEQ ID NO: 686653 - RNA, 19 nt, Homo sapiens
  misc_RNA (1)...(19): siRNA sense strand
gcguaagagucaucugauu

SEQ ID NO: 686654 - RNA, 19 nt, Homo sapiens
  misc_RNA (1)...(19): siRNA sense strand
gcagauccgcuacucuauu

SEQ ID NO: 686655 - RNA, 19 nt, Homo sapiens
  misc_RNA (1)...(19): siRNA sense strand
gcucaagcgucgcccaaau

SEQ ID NO: 686656 - RNA, 19 nt, Homo sapiens
  misc_RNA (1)...(19): siRNA sense strand
gagguauucuuguacaaca

SEQ ID NO: 686657 - RNA, 19 nt, Homo sapiens
  misc_RNA (1)...(19): siRNA sense strand
gggcuuuccugcagaccua

SEQ ID NO: 686658 - RNA, 19 nt, Homo sapiens
  misc_RNA (1)...(19): siRNA sense strand
uggaaauaguggacauuaa

SEQ ID NO: 686659 - RNA, 19 nt, Homo sapiens
  misc_RNA (1)...(19): siRNA sense strand
ccgaggagcuggagaaagg

SEQ ID NO: 686660 - RNA, 19 nt, Homo sapiens
  misc_RNA (1)...(19): siRNA sense strand
ggaaggagaagccguuuac

SEQ ID NO: 686661 - RNA, 19 nt, Homo sapiens
  misc_RNA (1)...(19): siRNA sense strand
ggagaacccaggcaacuuc

SEQ ID NO: 686662 - RNA, 19 nt, Homo sapiens
  misc_RNA (1)...(19): siRNA sense strand
uaacucaggauuuacuuga

SEQ ID NO: 686663 - RNA, 19 nt, Homo sapiens
  misc_RNA (1)...(19): siRNA sense strand
cagaaacaaucaucucucu

SEQ ID NO: 686664 - RNA, 19 nt, Homo sapiens
  misc_RNA (1)...(19): siRNA sense strand
cagaaaagaucucacaaau

SEQ ID NO: 686665 - RNA, 19 nt, Homo sapiens
  misc_RNA (1)...(19): siRNA sense strand
cagccugucuaccguguaa

SEQ ID NO: 686666 - RNA, 19 nt, Homo sapiens
  misc_RNA (1)...(19): siRNA sense strand
gcagcuccauccucucguu

SEQ ID NO: 686667 - RNA, 19 nt, Homo sapiens
  misc_RNA (1)...(19): siRNA sense strand
cagaacaauugcugaaagu

SEQ ID NO: 686668 - RNA, 19 nt, Homo sapiens
  misc_RNA (1)...(19): siRNA sense strand
cagaagugguuguuacauc

SEQ ID NO: 686669 - RNA, 19 nt, Homo sapiens
  misc_RNA (1)...(19): siRNA sense strand
guaacuuauuccuuuguga

SEQ ID NO: 686670 - RNA, 19 nt, Homo sapiens
  misc_RNA (1)...(19): siRNA sense strand
cguaagagucaucugauuu

SEQ ID NO: 686671 - RNA, 19 nt, Homo sapiens
  misc_RNA (1)...(19): siRNA sense strand
ggacagagacgcgcucaag

SEQ ID NO: 686672 - RNA, 19 nt, Homo sapiens
  misc_RNA (1)...(19): siRNA sense strand
ucuuggaugucaaugauaa

SEQ ID NO: 686673 - RNA, 19 nt, Homo sapiens
  misc_RNA (1)...(19): siRNA sense strand
uaucuuggaugucaaugau

SEQ ID NO: 686674 - RNA, 19 nt, Homo sapiens
  misc_RNA (1)...(19): siRNA sense strand
gcaccuccaggaacaguaa

SEQ ID NO: 686675 - RNA, 19 nt, Homo sapiens
  misc_RNA (1)...(19): siRNA sense strand
caaugauaauguaccagaa

SEQ ID NO: 686676 - RNA, 19 nt, Homo sapiens
  misc_RNA (1)...(19): siRNA sense strand
gaaucuuuaucccguggaa

SEQ ID NO: 686677 - RNA, 19 nt, Homo sapiens
  misc_RNA (1)...(19): siRNA sense strand
gaagucucccauuugaauu

SEQ ID NO: 686678 - RNA, 19 nt, Homo sapiens
  misc_RNA (1)...(19): siRNA sense strand
cuggagaaauuucaacuuc

SEQ ID NO: 686679 - RNA, 19 nt, Homo sapiens
  misc_RNA (1)...(19): siRNA sense strand
caaauucugguaacaguuc

SEQ ID NO: 686680 - RNA, 19 nt, Homo sapiens
  misc_RNA (1)...(19): siRNA sense strand
caauacaccccgauucuua

SEQ ID NO: 686681 - RNA, 19 nt, Homo sapiens
  misc_RNA (1)...(19): siRNA sense strand
gaaauuucaacuucugcaa

SEQ ID NO: 686682 - RNA, 19 nt, Homo sapiens
  misc_RNA (1)...(19): siRNA sense strand
guggaaauaguggacauua

SEQ ID NO: 686683 - RNA, 19 nt, Homo sapiens
  misc_RNA (1)...(19): siRNA sense strand
uuuaugagcuggguguuga

SEQ ID NO: 686684 - RNA, 19 nt, Homo sapiens
  misc_RNA (1)...(19): siRNA sense strand
acucaggauuuacuugaaa

SEQ ID NO: 686685 - RNA, 19 nt, Homo sapiens
  misc_RNA (1)...(19): siRNA sense strand
guaauagucacuucucagu

SEQ ID NO: 686686 - RNA, 19 nt, Homo sapiens
  misc_RNA (1)...(19): siRNA sense strand
auucggaccucacucugua

SEQ ID NO: 686687 - RNA, 19 nt, Homo sapiens
  misc_RNA (1)...(19): siRNA sense strand
gagguaggaugcagcuuuu

SEQ ID NO: 686688 - RNA, 19 nt, Homo sapiens
  misc_RNA (1)...(19): siRNA sense strand
cgcggugucuggugaguuu

SEQ ID NO: 686689 - RNA, 19 nt, Homo sapiens
  misc_RNA (1)...(19): siRNA sense strand
acacuccaauguuuacuca

SEQ ID NO: 686690 - RNA, 19 nt, Homo sapiens
  misc_RNA (1)...(19): siRNA sense strand
gggaaggagaagccguuua

SEQ ID NO: 686691 - RNA, 19 nt, Homo sapiens
  misc_RNA (1)...(19): siRNA sense strand
ccuacucacuggcagaaga

SEQ ID NO: 686692 - RNA, 19 nt, Homo sapiens
  misc_RNA (1)...(19): siRNA sense strand
agaagucucccauuugaau

SEQ ID NO: 686693 - RNA, 19 nt, Homo sapiens
  misc_RNA (1)...(19): siRNA sense strand
agaagugguuguuacaucu

SEQ ID NO: 686694 - RNA, 19 nt, Homo sapiens
  misc_RNA (1)...(19): siRNA sense strand
auaacuaucuuggauguca

SEQ ID NO: 686695 - RNA, 19 nt, Homo sapiens
  misc_RNA (1)...(19): siRNA sense strand
agagcgaaagucuuaauaa

SEQ ID NO: 686696 - RNA, 19 nt, Homo sapiens
  misc_RNA (1)...(19): siRNA sense strand
cagagcgaaagucuuaaua

SEQ ID NO: 686697 - RNA, 19 nt, Homo sapiens
  misc_RNA (1)...(19): siRNA sense strand
gcaacaucgucaaggaucu

SEQ ID NO: 686698 - RNA, 19 nt, Homo sapiens
  misc_RNA (1)...(19): siRNA sense strand
ggaacaccaccucugucua

SEQ ID NO: 686699 - RNA, 19 nt, Homo sapiens
  misc_RNA (1)...(19): siRNA sense strand
ccaggagagcuaugagaaa

SEQ ID NO: 686700 - RNA, 19 nt, Homo sapiens
  misc_RNA (1)...(19): siRNA sense strand
cugcagcgcuggcacaagu

SEQ ID NO: 686701 - RNA, 19 nt, Homo sapiens
  misc_RNA (1)...(19): siRNA sense strand
gaaugacaacacuccaaug

SEQ ID NO: 686702 - RNA, 19 nt, Homo sapiens
  misc_RNA (1)...(19): siRNA sense strand
gaccagaacgcccaagucu

SEQ ID NO: 686703 - RNA, 19 nt, Homo sapiens
  misc_RNA (1)...(19): siRNA sense strand
ugacaaaugcagcucuaga

SEQ ID NO: 686704 - RNA, 19 nt, Homo sapiens
  misc_RNA (1)...(19): siRNA sense strand
ucgagacucuggccugaau

SEQ ID NO: 686705 - RNA, 19 nt, Homo sapiens
  misc_RNA (1)...(19): siRNA sense strand
caacuucugcaaaucuaga

SEQ ID NO: 686706 - RNA, 19 nt, Homo sapiens
  misc_RNA (1)...(19): siRNA sense strand
uaguggacauuaaugacaa

SEQ ID NO: 686707 - RNA, 19 nt, Homo sapiens
  misc_RNA (1)...(19): siRNA sense strand
aggauuuacuugaaacgaa

SEQ ID NO: 686708 - RNA, 19 nt, Homo sapiens
  misc_RNA (1)...(19): siRNA sense strand
guaagagucaucugauuuu

SEQ ID NO: 686709 - RNA, 19 nt, Homo sapiens
  misc_RNA (1)...(19): siRNA sense strand
cgcaucgucuccagaggua

SEQ ID NO: 686710 - RNA, 19 nt, Homo sapiens
  misc_RNA (1)...(19): siRNA sense strand
uaagcucagugguaauagu

SEQ ID NO: 686711 - RNA, 19 nt, Homo sapiens
  misc_RNA (1)...(19): siRNA sense strand
aggaagaauuggaagugaa

SEQ ID NO: 686712 - RNA, 19 nt, Homo sapiens
  misc_RNA (1)...(19): siRNA sense strand
aaggaagaauuggaaguga

SEQ ID NO: 686713 - RNA, 19 nt, Homo sapiens
  misc_RNA (1)...(19): siRNA sense strand
gcgagccucuucugauaac

SEQ ID NO: 686714 - RNA, 19 nt, Homo sapiens
  misc_RNA (1)...(19): siRNA sense strand
agagguaggaugcagcuuu

SEQ ID NO: 686715 - RNA, 19 nt, Homo sapiens
  misc_RNA (1)...(19): siRNA sense strand
gaagugaaaauucucgaaa

SEQ ID NO: 686716 - RNA, 19 nt, Homo sapiens
  misc_RNA (1)...(19): siRNA sense strand
uaggcaacaucgucaagga

SEQ ID NO: 686717 - RNA, 19 nt, Homo sapiens
  misc_RNA (1)...(19): siRNA sense strand
caggagagcuaugagaaaa

SEQ ID NO: 686718 - RNA, 19 nt, Homo sapiens
  misc_RNA (1)...(19): siRNA sense strand
ugucgaggauaaacugaau

SEQ ID NO: 686719 - RNA, 19 nt, Homo sapiens
  misc_RNA (1)...(19): siRNA sense strand
uaacuaucuuggaugucaa

SEQ ID NO: 686720 - RNA, 19 nt, Homo sapiens
  misc_RNA (1)...(19): siRNA sense strand
acuaugaggacucgaguuu

SEQ ID NO: 686721 - RNA, 19 nt, Homo sapiens
  misc_RNA (1)...(19): siRNA sense strand
ggaugcagcuuuucucucu

SEQ ID NO: 686722 - RNA, 19 nt, Homo sapiens
  misc_RNA (1)...(19): siRNA sense strand
acuaugagcaguugagaga

SEQ ID NO: 686723 - RNA, 19 nt, Homo sapiens
  misc_RNA (1)...(19): siRNA sense strand
caacuccgacacugggauu

SEQ ID NO: 686724 - RNA, 19 nt, Homo sapiens
  misc_RNA (1)...(19): siRNA sense strand
caucuucucugugaaugca

SEQ ID NO: 686725 - RNA, 19 nt, Homo sapiens
  misc_RNA (1)...(19): siRNA sense strand
gccuccaucuucucuguga

SEQ ID NO: 686726 - RNA, 19 nt, Homo sapiens
  misc_RNA (1)...(19): siRNA sense strand
aaaggaacaccaccucugu

SEQ ID NO: 686727 - RNA, 19 nt, Homo sapiens
  misc_RNA (1)...(19): siRNA sense strand
ccgacacgcuuaucaacca

SEQ ID NO: 686728 - RNA, 19 nt, Homo sapiens
  misc_RNA (1)...(19): siRNA sense strand
gagaaaagcgagccucuuc

SEQ ID NO: 686729 - RNA, 19 nt, Homo sapiens
  misc_RNA (1)...(19): siRNA sense strand
gaaacacucucuuuguaua

SEQ ID NO: 686730 - RNA, 19 nt, Homo sapiens
  misc_RNA (1)...(19): siRNA sense strand
gaaacugccuucuaugaaa

SEQ ID NO: 686731 - RNA, 19 nt, Homo sapiens
  misc_RNA (1)...(19): siRNA sense strand
ggagaaauaucaacuuuag

SEQ ID NO: 686732 - RNA, 19 nt, Homo sapiens
  misc_RNA (1)...(19): siRNA sense strand
gggaaacacucucuuugua

SEQ ID NO: 686733 - RNA, 19 nt, Homo sapiens
  misc_RNA (1)...(19): siRNA sense strand
ggacagagaugcccucaag

SEQ ID NO: 686734 - RNA, 19 nt, Homo sapiens
  misc_RNA (1)...(19): siRNA sense strand
gaacuacaacuaagaguga

SEQ ID NO: 686735 - RNA, 19 nt, Homo sapiens
  misc_RNA (1)...(19): siRNA sense strand
ugucauaccuccugcuuaa

SEQ ID NO: 686736 - RNA, 19 nt, Homo sapiens
  misc_RNA (1)...(19): siRNA sense strand
caggagaaauaucaacuuu

SEQ ID NO: 686737 - RNA, 19 nt, Homo sapiens
  misc_RNA (1)...(19): siRNA sense strand
cagggaaacucacauauuc

SEQ ID NO: 686738 - RNA, 19 nt, Homo sapiens
  misc_RNA (1)...(19): siRNA sense strand
acuaugacgucuuuaagua

SEQ ID NO: 686739 - RNA, 19 nt, Homo sapiens
  misc_RNA (1)...(19): siRNA sense strand
ugacaacguuccaagauuc

SEQ ID NO: 686740 - RNA, 19 nt, Homo sapiens
  misc_RNA (1)...(19): siRNA sense strand
ggaaacacucucuuuguau

SEQ ID NO: 686741 - RNA, 19 nt, Homo sapiens
  misc_RNA (1)...(19): siRNA sense strand
acuaugaccucacguugua

SEQ ID NO: 686742 - RNA, 19 nt, Homo sapiens
  misc_RNA (1)...(19): siRNA sense strand
gaucacaguuuuagaugua

SEQ ID NO: 686743 - RNA, 19 nt, Homo sapiens
  misc_RNA (1)...(19): siRNA sense strand
cgacgguccuuacaacuau

SEQ ID NO: 686744 - RNA, 19 nt, Homo sapiens
  misc_RNA (1)...(19): siRNA sense strand
gaacucgcuuacaggagaa

SEQ ID NO: 686745 - RNA, 19 nt, Homo sapiens
  misc_RNA (1)...(19): siRNA sense strand
caucugaacucgcuuacag

SEQ ID NO: 686746 - RNA, 19 nt, Homo sapiens
  misc_RNA (1)...(19): siRNA sense strand
ugauaaugcuccagaagug

SEQ ID NO: 686747 - RNA, 19 nt, Homo sapiens
  misc_RNA (1)...(19): siRNA sense strand
cuauagacguggaaauaau

SEQ ID NO: 686748 - RNA, 19 nt, Homo sapiens
  misc_RNA (1)...(19): siRNA sense strand
ugagagaacuacaacuaag

SEQ ID NO: 686749 - RNA, 19 nt, Homo sapiens
  misc_RNA (1)...(19): siRNA sense strand
gaagugacauauucuuuuc

SEQ ID NO: 686750 - RNA, 19 nt, Homo sapiens
  misc_RNA (1)...(19): siRNA sense strand
ugacagugguggaugugaa

SEQ ID NO: 686751 - RNA, 19 nt, Homo sapiens
  misc_RNA (1)...(19): siRNA sense strand
gggaagugacauauucuuu

SEQ ID NO: 686752 - RNA, 19 nt, Homo sapiens
  misc_RNA (1)...(19): siRNA sense strand
cgcaucaucuccagaggua

SEQ ID NO: 686753 - RNA, 19 nt, Homo sapiens
  misc_RNA (1)...(19): siRNA sense strand
gagagaacuacaacuaaga

SEQ ID NO: 686754 - RNA, 19 nt, Homo sapiens
  misc_RNA (1)...(19): siRNA sense strand
gauaaugcccagaucacuu

SEQ ID NO: 686755 - RNA, 19 nt, Homo sapiens
  misc_RNA (1)...(19): siRNA sense strand
ccagggaaacucacauauu

SEQ ID NO: 686756 - RNA, 19 nt, Homo sapiens
  misc_RNA (1)...(19): siRNA sense strand
aaacugccuucuaugaaau

SEQ ID NO: 686757 - RNA, 19 nt, Homo sapiens
  misc_RNA (1)...(19): siRNA sense strand
ccacacgccugucuucucu

SEQ ID NO: 686758 - RNA, 19 nt, Homo sapiens
  misc_RNA (1)...(19): siRNA sense strand
ggacagucauugcucuuuu

SEQ ID NO: 686759 - RNA, 19 nt, Homo sapiens
  misc_RNA (1)...(19): siRNA sense strand
aaagaaaaccugccaagua

SEQ ID NO: 686760 - RNA, 19 nt, Homo sapiens
  misc_RNA (1)...(19): siRNA sense strand
uaagagugacugcacauga

SEQ ID NO: 686761 - RNA, 19 nt, Homo sapiens
  misc_RNA (1)...(19): siRNA sense strand
auaaugcccagaucacuua

SEQ ID NO: 686762 - RNA, 19 nt, Homo sapiens
  misc_RNA (1)...(19): siRNA sense strand
caagacugcucacgguaca

SEQ ID NO: 686763 - RNA, 19 nt, Homo sapiens
  misc_RNA (1)...(19): siRNA sense strand
uggcagacaccaacgauaa

SEQ ID NO: 686764 - RNA, 19 nt, Homo sapiens
  misc_RNA (1)...(19): siRNA sense strand
uguauaacaucacacugaa

SEQ ID NO: 686765 - RNA, 19 nt, Homo sapiens
  misc_RNA (1)...(19): siRNA sense strand
gacggaagaaauaaaugua

SEQ ID NO: 686766 - RNA, 19 nt, Homo sapiens
  misc_RNA (1)...(19): siRNA sense strand
ggacuacagaggauucuuc

SEQ ID NO: 686767 - RNA, 19 nt, Homo sapiens
  misc_RNA (1)...(19): siRNA sense strand
guagcucaaucccugaaga

SEQ ID NO: 686768 - RNA, 19 nt, Homo sapiens
  misc_RNA (1)...(19): siRNA sense strand
ggauagaccgggaagagau

SEQ ID NO: 686769 - RNA, 19 nt, Homo sapiens
  misc_RNA (1)...(19): siRNA sense strand
cuacaucgcugagaacaac

SEQ ID NO: 686770 - RNA, 19 nt, Homo sapiens
  misc_RNA (1)...(19): siRNA sense strand
gacguggaaauaauagaua

SEQ ID NO: 686771 - RNA, 19 nt, Homo sapiens
  misc_RNA (1)...(19): siRNA sense strand
aagaaaaccugccaaguau

SEQ ID NO: 686772 - RNA, 19 nt, Homo sapiens
  misc_RNA (1)...(19): siRNA sense strand
gcuaacauccguagauuuu

SEQ ID NO: 686773 - RNA, 19 nt, Homo sapiens
  misc_RNA (1)...(19): siRNA sense strand
gcagaccuauucccaugag

SEQ ID NO: 686774 - RNA, 19 nt, Homo sapiens
  misc_RNA (1)...(19): siRNA sense strand
cuccuaaacuuccaaagau

SEQ ID NO: 686775 - RNA, 19 nt, Homo sapiens
  misc_RNA (1)...(19): siRNA sense strand
ggaagugacauauucuuuu

SEQ ID NO: 686776 - RNA, 19 nt, Homo sapiens
  misc_RNA (1)...(19): siRNA sense strand
caggagagcugugagaaaa

SEQ ID NO: 686777 - RNA, 19 nt, Homo sapiens
  misc_RNA (1)...(19): siRNA sense strand
gggcaggacguauucucua

SEQ ID NO: 686778 - RNA, 19 nt, Homo sapiens
  misc_RNA (1)...(19): siRNA sense strand
gauaaugcuccagaaguga

SEQ ID NO: 686779 - RNA, 19 nt, Homo sapiens
  misc_RNA (1)...(19): siRNA sense strand
gggcuccaguguccuccua

SEQ ID NO: 686780 - RNA, 19 nt, Homo sapiens
  misc_RNA (1)...(19): siRNA sense strand
ccacgacagugaggauaau

SEQ ID NO: 686781 - RNA, 19 nt, Homo sapiens
  misc_RNA (1)...(19): siRNA sense strand
gaaaaccugccaaguauuc

SEQ ID NO: 686782 - RNA, 19 nt, Homo sapiens
  misc_RNA (1)...(19): siRNA sense strand
ugggagacaucgccaagga

SEQ ID NO: 686783 - RNA, 19 nt, Homo sapiens
  misc_RNA (1)...(19): siRNA sense strand
cagcgagccaggacucuuu

SEQ ID NO: 686784 - RNA, 19 nt, Homo sapiens
  misc_RNA (1)...(19): siRNA sense strand
gcuuacaggagaaauauca

SEQ ID NO: 686785 - RNA, 19 nt, Homo sapiens
  misc_RNA (1)...(19): siRNA sense strand
aaacucacauauucaugca

SEQ ID NO: 686786 - RNA, 19 nt, Homo sapiens
  misc_RNA (1)...(19): siRNA sense strand
aagugacuaugacgucuuu

SEQ ID NO: 686787 - RNA, 19 nt, Homo sapiens
  misc_RNA (1)...(19): siRNA sense strand
gaggauaaugcccagauca

SEQ ID NO: 686788 - RNA, 19 nt, Homo sapiens
  misc_RNA (1)...(19): siRNA sense strand
ccuauagacguggaaauaa

SEQ ID NO: 686789 - RNA, 19 nt, Homo sapiens
  misc_RNA (1)...(19): siRNA sense strand
ggaaacucacauauucaug

SEQ ID NO: 686790 - RNA, 19 nt, Homo sapiens
  misc_RNA (1)...(19): siRNA sense strand
ugacggaagaaauaaaugu

SEQ ID NO: 686791 - RNA, 19 nt, Homo sapiens
  misc_RNA (1)...(19): siRNA sense strand
ccaggagagcugugagaaa

SEQ ID NO: 686792 - RNA, 19 nt, Homo sapiens
  misc_RNA (1)...(19): siRNA sense strand
gugacuaugacgucuuuaa

SEQ ID NO: 686793 - RNA, 19 nt, Homo sapiens
  misc_RNA (1)...(19): siRNA sense strand
gaagugacuaugacgucuu

SEQ ID NO: 686794 - RNA, 19 nt, Homo sapiens
  misc_RNA (1)...(19): siRNA sense strand
gcucaagaugguccuggua

SEQ ID NO: 686795 - RNA, 19 nt, Homo sapiens
  misc_RNA (1)...(19): siRNA sense strand
gggaaacucacauauucau

SEQ ID NO: 686796 - RNA, 19 nt, Homo sapiens
  misc_RNA (1)...(19): siRNA sense strand
uaacauccguagauuuuca

SEQ ID NO: 686797 - RNA, 19 nt, Homo sapiens
  misc_RNA (1)...(19): siRNA sense strand
ccaguguccuccuaugucu

SEQ ID NO: 686798 - RNA, 19 nt, Homo sapiens
  misc_RNA (1)...(19): siRNA sense strand
aaaugauaaugcuccagaa

SEQ ID NO: 686799 - RNA, 19 nt, Homo sapiens
  misc_RNA (1)...(19): siRNA sense strand
uguacgcgcugcaauccuu

SEQ ID NO: 686800 - RNA, 19 nt, Homo sapiens
  misc_RNA (1)...(19): siRNA sense strand
cacaggaccacgacaguga

SEQ ID NO: 686801 - RNA, 19 nt, Homo sapiens
  misc_RNA (1)...(19): siRNA sense strand
gaccugcaccauuccagaa

SEQ ID NO: 686802 - RNA, 19 nt, Homo sapiens
  misc_RNA (1)...(19): siRNA sense strand
gcuccagaagugacuauga

SEQ ID NO: 686803 - RNA, 19 nt, Homo sapiens
  misc_RNA (1)...(19): siRNA sense strand
cccuauagacguggaaaua

SEQ ID NO: 686804 - RNA, 19 nt, Homo sapiens
  misc_RNA (1)...(19): siRNA sense strand
agagguaggacgcagcuuu

SEQ ID NO: 686805 - RNA, 19 nt, Homo sapiens
  misc_RNA (1)...(19): siRNA sense strand
gcuccaguguccuccuaug

SEQ ID NO: 686806 - RNA, 19 nt, Homo sapiens
  misc_RNA (1)...(19): siRNA sense strand
ggcaggacguauucucuac

SEQ ID NO: 686807 - RNA, 19 nt, Homo sapiens
  misc_RNA (1)...(19): siRNA sense strand
ucaagaugguccugguagu

SEQ ID NO: 686808 - RNA, 19 nt, Homo sapiens
  misc_RNA (1)...(19): siRNA sense strand
cagucuacaucgcugagaa

SEQ ID NO: 686809 - RNA, 19 nt, Homo sapiens
  misc_RNA (1)...(19): siRNA sense strand
uauaacaucacacugaaag

SEQ ID NO: 686810 - RNA, 19 nt, Homo sapiens
  misc_RNA (1)...(19): siRNA sense strand
cucaaucccugaagacaca

SEQ ID NO: 686811 - RNA, 19 nt, Homo sapiens
  misc_RNA (1)...(19): siRNA sense strand
gggguucgguuuccguuaa

SEQ ID NO: 686812 - RNA, 19 nt, Homo sapiens
  misc_RNA (1)...(19): siRNA sense strand
uugcuaacauccguagauu

SEQ ID NO: 686813 - RNA, 19 nt, Homo sapiens
  misc_RNA (1)...(19): siRNA sense strand
guccagggaaacucacaua

SEQ ID NO: 686814 - RNA, 19 nt, Homo sapiens
  misc_RNA (1)...(19): siRNA sense strand
guauaacaucacacugaaa

SEQ ID NO: 686815 - RNA, 19 nt, Homo sapiens
  misc_RNA (1)...(19): siRNA sense strand
uaaugacaacguuccaaga

SEQ ID NO: 686816 - RNA, 19 nt, Homo sapiens
  misc_RNA (1)...(19): siRNA sense strand
ccgacgguccuuacaacua

SEQ ID NO: 686817 - RNA, 19 nt, Homo sapiens
  misc_RNA (1)...(19): siRNA sense strand
cgcggugucugguaaacuu

SEQ ID NO: 686818 - RNA, 19 nt, Homo sapiens
  misc_RNA (1)...(19): siRNA sense strand
gacuaugacgucuuuaagu

SEQ ID NO: 686819 - RNA, 19 nt, Homo sapiens
  misc_RNA (1)...(19): siRNA sense strand
augacaacguuccaagauu

SEQ ID NO: 686820 - RNA, 19 nt, Homo sapiens
  misc_RNA (1)...(19): siRNA sense strand
gaccacgacagugaggaua

SEQ ID NO: 686821 - RNA, 19 nt, Homo sapiens
  misc_RNA (1)...(19): siRNA sense strand
acacugaaagccacagaug

SEQ ID NO: 686822 - RNA, 19 nt, Homo sapiens
  misc_RNA (1)...(19): siRNA sense strand
gggacagucauugcucuuu

SEQ ID NO: 686823 - RNA, 19 nt, Homo sapiens
  misc_RNA (1)...(19): siRNA sense strand
aggcuuuccugcagaccua

SEQ ID NO: 686824 - RNA, 19 nt, Homo sapiens
  misc_RNA (1)...(19): siRNA sense strand
cagaacgccuggcugucau

SEQ ID NO: 686825 - RNA, 19 nt, Homo sapiens
  misc_RNA (1)...(19): siRNA sense strand
uaugagcaguugagagaac

SEQ ID NO: 686826 - RNA, 19 nt, Homo sapiens
  misc_RNA (1)...(19): siRNA sense strand
ggaccacgacagugaggau

SEQ ID NO: 686827 - RNA, 19 nt, Homo sapiens
  misc_RNA (1)...(19): siRNA sense strand
cgggaaacacucucuuugu

SEQ ID NO: 686828 - RNA, 19 nt, Homo sapiens
  misc_RNA (1)...(19): siRNA sense strand
aaacuuggaccgggaaaca

SEQ ID NO: 686829 - RNA, 19 nt, Homo sapiens
  misc_RNA (1)...(19): siRNA sense strand
gaaacacucucuuuguaua

SEQ ID NO: 686830 - RNA, 19 nt, Homo sapiens
  misc_RNA (1)...(19): siRNA sense strand
gaaacugccuucuaugaaa

SEQ ID NO: 686831 - RNA, 19 nt, Homo sapiens
  misc_RNA (1)...(19): siRNA sense strand
ggagaaauaucaacuuuag

SEQ ID NO: 686832 - RNA, 19 nt, Homo sapiens
  misc_RNA (1)...(19): siRNA sense strand
gggaaacacucucuuugua

SEQ ID NO: 686833 - RNA, 19 nt, Homo sapiens
  misc_RNA (1)...(19): siRNA sense strand
ggacagagaugcccucaag

SEQ ID NO: 686834 - RNA, 19 nt, Homo sapiens
  misc_RNA (1)...(19): siRNA sense strand
gaacuacaacuaagaguga

SEQ ID NO: 686835 - RNA, 19 nt, Homo sapiens
  misc_RNA (1)...(19): siRNA sense strand
ugucauaccuccugcuuaa

SEQ ID NO: 686836 - RNA, 19 nt, Homo sapiens
  misc_RNA (1)...(19): siRNA sense strand
caggagaaauaucaacuuu

SEQ ID NO: 686837 - RNA, 19 nt, Homo sapiens
  misc_RNA (1)...(19): siRNA sense strand
cagggaaacucacauauuc

SEQ ID NO: 686838 - RNA, 19 nt, Homo sapiens
  misc_RNA (1)...(19): siRNA sense strand
acuaugacgucuuuaagua

SEQ ID NO: 686839 - RNA, 19 nt, Homo sapiens
  misc_RNA (1)...(19): siRNA sense strand
ugacaacguuccaagauuc

SEQ ID NO: 686840 - RNA, 19 nt, Homo sapiens
  misc_RNA (1)...(19): siRNA sense strand
ggaaacacucucuuuguau

SEQ ID NO: 686841 - RNA, 19 nt, Homo sapiens
  misc_RNA (1)...(19): siRNA sense strand
acuaugaccucacguugua

SEQ ID NO: 686842 - RNA, 19 nt, Homo sapiens
  misc_RNA (1)...(19): siRNA sense strand
gaucacaguuuuagaugua

SEQ ID NO: 686843 - RNA, 19 nt, Homo sapiens
  misc_RNA (1)...(19): siRNA sense strand
cgacgguccuuacaacuau

SEQ ID NO: 686844 - RNA, 19 nt, Homo sapiens
  misc_RNA (1)...(19): siRNA sense strand
gaacucgcuuacaggagaa

SEQ ID NO: 686845 - RNA, 19 nt, Homo sapiens
  misc_RNA (1)...(19): siRNA sense strand
caucugaacucgcuuacag

SEQ ID NO: 686846 - RNA, 19 nt, Homo sapiens
  misc_RNA (1)...(19): siRNA sense strand
ugauaaugcuccagaagug

SEQ ID NO: 686847 - RNA, 19 nt, Homo sapiens
  misc_RNA (1)...(19): siRNA sense strand
cuauagacguggaaauaau

SEQ ID NO: 686848 - RNA, 19 nt, Homo sapiens
  misc_RNA (1)...(19): siRNA sense strand
ugagagaacuacaacuaag

SEQ ID NO: 686849 - RNA, 19 nt, Homo sapiens
  misc_RNA (1)...(19): siRNA sense strand
gaagugacauauucuuuuc

SEQ ID NO: 686850 - RNA, 19 nt, Homo sapiens
  misc_RNA (1)...(19): siRNA sense strand
ugacagugguggaugugaa

SEQ ID NO: 686851 - RNA, 19 nt, Homo sapiens
  misc_RNA (1)...(19): siRNA sense strand
gggaagugacauauucuuu

SEQ ID NO: 686852 - RNA, 19 nt, Homo sapiens
  misc_RNA (1)...(19): siRNA sense strand
cgcaucaucuccagaggua

SEQ ID NO: 686853 - RNA, 19 nt, Homo sapiens
  misc_RNA (1)...(19): siRNA sense strand
gagagaacuacaacuaaga

SEQ ID NO: 686854 - RNA, 19 nt, Homo sapiens
  misc_RNA (1)...(19): siRNA sense strand
gauaaugcccagaucacuu

SEQ ID NO: 686855 - RNA, 19 nt, Homo sapiens
  misc_RNA (1)...(19): siRNA sense strand
ccagggaaacucacauauu

SEQ ID NO: 686856 - RNA, 19 nt, Homo sapiens
  misc_RNA (1)...(19): siRNA sense strand
aaacugccuucuaugaaau

SEQ ID NO: 686857 - RNA, 19 nt, Homo sapiens
  misc_RNA (1)...(19): siRNA sense strand
ccacacgccugucuucucu

SEQ ID NO: 686858 - RNA, 19 nt, Homo sapiens
  misc_RNA (1)...(19): siRNA sense strand
ggacagucauugcucuuuu

SEQ ID NO: 686859 - RNA, 19 nt, Homo sapiens
  misc_RNA (1)...(19): siRNA sense strand
aaagaaaaccugccaagua

SEQ ID NO: 686860 - RNA, 19 nt, Homo sapiens
  misc_RNA (1)...(19): siRNA sense strand
uaagagugacugcacauga

SEQ ID NO: 686861 - RNA, 19 nt, Homo sapiens
  misc_RNA (1)...(19): siRNA sense strand
auaaugcccagaucacuua

SEQ ID NO: 686862 - RNA, 19 nt, Homo sapiens
  misc_RNA (1)...(19): siRNA sense strand
caagacugcucacgguaca

SEQ ID NO: 686863 - RNA, 19 nt, Homo sapiens
  misc_RNA (1)...(19): siRNA sense strand
uggcagacaccaacgauaa

SEQ ID NO: 686864 - RNA, 19 nt, Homo sapiens
  misc_RNA (1)...(19): siRNA sense strand
uguauaacaucacacugaa

SEQ ID NO: 686865 - RNA, 19 nt, Homo sapiens
  misc_RNA (1)...(19): siRNA sense strand
gacggaagaaauaaaugua

SEQ ID NO: 686866 - RNA, 19 nt, Homo sapiens
  misc_RNA (1)...(19): siRNA sense strand
ggacuacagaggauucuuc

SEQ ID NO: 686867 - RNA, 19 nt, Homo sapiens
  misc_RNA (1)...(19): siRNA sense strand
guagcucaaucccugaaga

SEQ ID NO: 686868 - RNA, 19 nt, Homo sapiens
  misc_RNA (1)...(19): siRNA sense strand
ggauagaccgggaagagau

SEQ ID NO: 686869 - RNA, 19 nt, Homo sapiens
  misc_RNA (1)...(19): siRNA sense strand
cuacaucgcugagaacaac

SEQ ID NO: 686870 - RNA, 19 nt, Homo sapiens
  misc_RNA (1)...(19): siRNA sense strand
gacguggaaauaauagaua

SEQ ID NO: 686871 - RNA, 19 nt, Homo sapiens
  misc_RNA (1)...(19): siRNA sense strand
aagaaaaccugccaaguau

SEQ ID NO: 686872 - RNA, 19 nt, Homo sapiens
  misc_RNA (1)...(19): siRNA sense strand
gcuaacauccguagauuuu

SEQ ID NO: 686873 - RNA, 19 nt, Homo sapiens
  misc_RNA (1)...(19): siRNA sense strand
gcagaccuauucccaugag

SEQ ID NO: 686874 - RNA, 19 nt, Homo sapiens
  misc_RNA (1)...(19): siRNA sense strand
cuccuaaacuuccaaagau

SEQ ID NO: 686875 - RNA, 19 nt, Homo sapiens
  misc_RNA (1)...(19): siRNA sense strand
ggaagugacauauucuuuu

SEQ ID NO: 686876 - RNA, 19 nt, Homo sapiens
  misc_RNA (1)...(19): siRNA sense strand
caggagagcugugagaaaa

SEQ ID NO: 686877 - RNA, 19 nt, Homo sapiens
  misc_RNA (1)...(19): siRNA sense strand
gggcaggacguauucucua

SEQ ID NO: 686878 - RNA, 19 nt, Homo sapiens
  misc_RNA (1)...(19): siRNA sense strand
gauaaugcuccagaaguga

SEQ ID NO: 686879 - RNA, 19 nt, Homo sapiens
  misc_RNA (1)...(19): siRNA sense strand
gggcuccaguguccuccua

SEQ ID NO: 686880 - RNA, 19 nt, Homo sapiens
  misc_RNA (1)...(19): siRNA sense strand
ccacgacagugaggauaau

SEQ ID NO: 686881 - RNA, 19 nt, Homo sapiens
  misc_RNA (1)...(19): siRNA sense strand
gaaaaccugccaaguauuc

SEQ ID NO: 686882 - RNA, 19 nt, Homo sapiens
  misc_RNA (1)...(19): siRNA sense strand
ugggagacaucgccaagga

SEQ ID NO: 686883 - RNA, 19 nt, Homo sapiens
  misc_RNA (1)...(19): siRNA sense strand
cagcgagccaggacucuuu

SEQ ID NO: 686884 - RNA, 19 nt, Homo sapiens
  misc_RNA (1)...(19): siRNA sense strand
gcuuacaggagaaauauca

SEQ ID NO: 686885 - RNA, 19 nt, Homo sapiens
  misc_RNA (1)...(19): siRNA sense strand
aaacucacauauucaugca

SEQ ID NO: 686886 - RNA, 19 nt, Homo sapiens
  misc_RNA (1)...(19): siRNA sense strand
aagugacuaugacgucuuu

SEQ ID NO: 686887 - RNA, 19 nt, Homo sapiens
  misc_RNA (1)...(19): siRNA sense strand
gaggauaaugcccagauca

SEQ ID NO: 686888 - RNA, 19 nt, Homo sapiens
  misc_RNA (1)...(19): siRNA sense strand
ccuauagacguggaaauaa

SEQ ID NO: 686889 - RNA, 19 nt, Homo sapiens
  misc_RNA (1)...(19): siRNA sense strand
ggaaacucacauauucaug

SEQ ID NO: 686890 - RNA, 19 nt, Homo sapiens
  misc_RNA (1)...(19): siRNA sense strand
ugacggaagaaauaaaugu

SEQ ID NO: 686891 - RNA, 19 nt, Homo sapiens
  misc_RNA (1)...(19): siRNA sense strand
ccaggagagcugugagaaa

SEQ ID NO: 686892 - RNA, 19 nt, Homo sapiens
  misc_RNA (1)...(19): siRNA sense strand
gugacuaugacgucuuuaa

SEQ ID NO: 686893 - RNA, 19 nt, Homo sapiens
  misc_RNA (1)...(19): siRNA sense strand
gaagugacuaugacgucuu

SEQ ID NO: 686894 - RNA, 19 nt, Homo sapiens
  misc_RNA (1)...(19): siRNA sense strand
gcucaagaugguccuggua

SEQ ID NO: 686895 - RNA, 19 nt, Homo sapiens
  misc_RNA (1)...(19): siRNA sense strand
gggaaacucacauauucau

SEQ ID NO: 686896 - RNA, 19 nt, Homo sapiens
  misc_RNA (1)...(19): siRNA sense strand
uaacauccguagauuuuca

SEQ ID NO: 686897 - RNA, 19 nt, Homo sapiens
  misc_RNA (1)...(19): siRNA sense strand
ccaguguccuccuaugucu

SEQ ID NO: 686898 - RNA, 19 nt, Homo sapiens
  misc_RNA (1)...(19): siRNA sense strand
aaaugauaaugcuccagaa

SEQ ID NO: 686899 - RNA, 19 nt, Homo sapiens
  misc_RNA (1)...(19): siRNA sense strand
uguacgcgcugcaauccuu

SEQ ID NO: 686900 - RNA, 19 nt, Homo sapiens
  misc_RNA (1)...(19): siRNA sense strand
cacaggaccacgacaguga

SEQ ID NO: 686901 - RNA, 19 nt, Homo sapiens
  misc_RNA (1)...(19): siRNA sense strand
gaccugcaccauuccagaa

SEQ ID NO: 686902 - RNA, 19 nt, Homo sapiens
  misc_RNA (1)...(19): siRNA sense strand
gcuccagaagugacuauga

SEQ ID NO: 686903 - RNA, 19 nt, Homo sapiens
  misc_RNA (1)...(19): siRNA sense strand
cccuauagacguggaaaua

SEQ ID NO: 686904 - RNA, 19 nt, Homo sapiens
  misc_RNA (1)...(19): siRNA sense strand
agagguaggacgcagcuuu

SEQ ID NO: 686905 - RNA, 19 nt, Homo sapiens
  misc_RNA (1)...(19): siRNA sense strand
gcuccaguguccuccuaug

SEQ ID NO: 686906 - RNA, 19 nt, Homo sapiens
  misc_RNA (1)...(19): siRNA sense strand
ggcaggacguauucucuac

SEQ ID NO: 686907 - RNA, 19 nt, Homo sapiens
  misc_RNA (1)...(19): siRNA sense strand
ucaagaugguccugguagu

SEQ ID NO: 686908 - RNA, 19 nt, Homo sapiens
  misc_RNA (1)...(19): siRNA sense strand
cagucuacaucgcugagaa

SEQ ID NO: 686909 - RNA, 19 nt, Homo sapiens
  misc_RNA (1)...(19): siRNA sense strand
uauaacaucacacugaaag

SEQ ID NO: 686910 - RNA, 19 nt, Homo sapiens
  misc_RNA (1)...(19): siRNA sense strand
cucaaucccugaagacaca

SEQ ID NO: 686911 - RNA, 19 nt, Homo sapiens
  misc_RNA (1)...(19): siRNA sense strand
gggguucgguuuccguuaa

SEQ ID NO: 686912 - RNA, 19 nt, Homo sapiens
  misc_RNA (1)...(19): siRNA sense strand
uugcuaacauccguagauu

SEQ ID NO: 686913 - RNA, 19 nt, Homo sapiens
  misc_RNA (1)...(19): siRNA sense strand
guccagggaaacucacaua

SEQ ID NO: 686914 - RNA, 19 nt, Homo sapiens
  misc_RNA (1)...(19): siRNA sense strand
guauaacaucacacugaaa

SEQ ID NO: 686915 - RNA, 19 nt, Homo sapiens
  misc_RNA (1)...(19): siRNA sense strand
uaaugacaacguuccaaga

SEQ ID NO: 686916 - RNA, 19 nt, Homo sapiens
  misc_RNA (1)...(19): siRNA sense strand
ccgacgguccuuacaacua

SEQ ID NO: 686917 - RNA, 19 nt, Homo sapiens
  misc_RNA (1)...(19): siRNA sense strand
cgcggugucugguaaacuu

SEQ ID NO: 686918 - RNA, 19 nt, Homo sapiens
  misc_RNA (1)...(19): siRNA sense strand
gacuaugacgucuuuaagu

SEQ ID NO: 686919 - RNA, 19 nt, Homo sapiens
  misc_RNA (1)...(19): siRNA sense strand
augacaacguuccaagauu

SEQ ID NO: 686920 - RNA, 19 nt, Homo sapiens
  misc_RNA (1)...(19): siRNA sense strand
gaccacgacagugaggaua

SEQ ID NO: 686921 - RNA, 19 nt, Homo sapiens
  misc_RNA (1)...(19): siRNA sense strand
acacugaaagccacagaug

SEQ ID NO: 686922 - RNA, 19 nt, Homo sapiens
  misc_RNA (1)...(19): siRNA sense strand
gggacagucauugcucuuu

SEQ ID NO: 686923 - RNA, 19 nt, Homo sapiens
  misc_RNA (1)...(19): siRNA sense strand
aggcuuuccugcagaccua

SEQ ID NO: 686924 - RNA, 19 nt, Homo sapiens
  misc_RNA (1)...(19): siRNA sense strand
cagaacgccuggcugucau

SEQ ID NO: 686925 - RNA, 19 nt, Homo sapiens
  misc_RNA (1)...(19): siRNA sense strand
uaugagcaguugagagaac

SEQ ID NO: 686926 - RNA, 19 nt, Homo sapiens
  misc_RNA (1)...(19): siRNA sense strand
ggaccacgacagugaggau

SEQ ID NO: 686927 - RNA, 19 nt, Homo sapiens
  misc_RNA (1)...(19): siRNA sense strand
cgggaaacacucucuuugu

SEQ ID NO: 686928 - RNA, 19 nt, Homo sapiens
  misc_RNA (1)...(19): siRNA sense strand
aaacuuggaccgggaaaca

SEQ ID NO: 686929 - RNA, 19 nt, Homo sapiens
  misc_RNA (1)...(19): siRNA sense strand
ggucgaagaucuagaagua

SEQ ID NO: 686930 - RNA, 19 nt, Homo sapiens
  misc_RNA (1)...(19): siRNA sense strand
gcacgcggcugcuuacugu

SEQ ID NO: 686931 - RNA, 19 nt, Homo sapiens
  misc_RNA (1)...(19): siRNA sense strand
uguaugcgcugcaaucuuu

SEQ ID NO: 686932 - RNA, 19 nt, Homo sapiens
  misc_RNA (1)...(19): siRNA sense strand
ccaagacucuggaaagaau

SEQ ID NO: 686933 - RNA, 19 nt, Homo sapiens
  misc_RNA (1)...(19): siRNA sense strand
cgacaacccuccuacuuuc

SEQ ID NO: 686934 - RNA, 19 nt, Homo sapiens
  misc_RNA (1)...(19): siRNA sense strand
gaucauuacgucuuuguuu

SEQ ID NO: 686935 - RNA, 19 nt, Homo sapiens
  misc_RNA (1)...(19): siRNA sense strand
ggaaagaauggucaaguug

SEQ ID NO: 686936 - RNA, 19 nt, Homo sapiens
  misc_RNA (1)...(19): siRNA sense strand
gaccaagacucuggaaaga

SEQ ID NO: 686937 - RNA, 19 nt, Homo sapiens
  misc_RNA (1)...(19): siRNA sense strand
ggacaguaauugccuucuu

SEQ ID NO: 686938 - RNA, 19 nt, Homo sapiens
  misc_RNA (1)...(19): siRNA sense strand
gcugcaaucuuucgacuau

SEQ ID NO: 686939 - RNA, 19 nt, Homo sapiens
  misc_RNA (1)...(19): siRNA sense strand
gaaaaugucucuaucuaca

SEQ ID NO: 686940 - RNA, 19 nt, Homo sapiens
  misc_RNA (1)...(19): siRNA sense strand
gacaguaauugccuucuug

SEQ ID NO: 686941 - RNA, 19 nt, Homo sapiens
  misc_RNA (1)...(19): siRNA sense strand
gaccagaagugaucauuac

SEQ ID NO: 686942 - RNA, 19 nt, Homo sapiens
  misc_RNA (1)...(19): siRNA sense strand
ggaaauacaagccgaagau

SEQ ID NO: 686943 - RNA, 19 nt, Homo sapiens
  misc_RNA (1)...(19): siRNA sense strand
cagcguauauccuagagaa

SEQ ID NO: 686944 - RNA, 19 nt, Homo sapiens
  misc_RNA (1)...(19): siRNA sense strand
ucgaagaucuagaaguaaa

SEQ ID NO: 686945 - RNA, 19 nt, Homo sapiens
  misc_RNA (1)...(19): siRNA sense strand
gaaaguccuugagaacaug

SEQ ID NO: 686946 - RNA, 19 nt, Homo sapiens
  misc_RNA (1)...(19): siRNA sense strand
ugacaguguuggauacaaa

SEQ ID NO: 686947 - RNA, 19 nt, Homo sapiens
  misc_RNA (1)...(19): siRNA sense strand
gaaagaauggucaaguugu

SEQ ID NO: 686948 - RNA, 19 nt, Homo sapiens
  misc_RNA (1)...(19): siRNA sense strand
gagugaaaguccuugagaa

SEQ ID NO: 686949 - RNA, 19 nt, Homo sapiens
  misc_RNA (1)...(19): siRNA sense strand
gacaauagaccagaaguga

SEQ ID NO: 686950 - RNA, 19 nt, Homo sapiens
  misc_RNA (1)...(19): siRNA sense strand
gaagugaucauuacgucuu

SEQ ID NO: 686951 - RNA, 19 nt, Homo sapiens
  misc_RNA (1)...(19): siRNA sense strand
ggauuccgguggcagauug

SEQ ID NO: 686952 - RNA, 19 nt, Homo sapiens
  misc_RNA (1)...(19): siRNA sense strand
ugaacucccuccagagcua

SEQ ID NO: 686953 - RNA, 19 nt, Homo sapiens
  misc_RNA (1)...(19): siRNA sense strand
uggaaagaauggucaaguu

SEQ ID NO: 686954 - RNA, 19 nt, Homo sapiens
  misc_RNA (1)...(19): siRNA sense strand
ugaaaguccuugagaacau

SEQ ID NO: 686955 - RNA, 19 nt, Homo sapiens
  misc_RNA (1)...(19): siRNA sense strand
ccaccucuguccacugaaa

SEQ ID NO: 686956 - RNA, 19 nt, Homo sapiens
  misc_RNA (1)...(19): siRNA sense strand
agaaugcccaggucacuua

SEQ ID NO: 686957 - RNA, 19 nt, Homo sapiens
  misc_RNA (1)...(19): siRNA sense strand
cguaucgucuccagaggua

SEQ ID NO: 686958 - RNA, 19 nt, Homo sapiens
  misc_RNA (1)...(19): siRNA sense strand
caccaccucuguccacuga

SEQ ID NO: 686959 - RNA, 19 nt, Homo sapiens
  misc_RNA (1)...(19): siRNA sense strand
gaaaaguggcauacaaauu

SEQ ID NO: 686960 - RNA, 19 nt, Homo sapiens
  misc_RNA (1)...(19): siRNA sense strand
uggcagacauuaacgacaa

SEQ ID NO: 686961 - RNA, 19 nt, Homo sapiens
  misc_RNA (1)...(19): siRNA sense strand
cuacucagcguauauccua

SEQ ID NO: 686962 - RNA, 19 nt, Homo sapiens
  misc_RNA (1)...(19): siRNA sense strand
gcauacaaauuccggaaaa

SEQ ID NO: 686963 - RNA, 19 nt, Homo sapiens
  misc_RNA (1)...(19): siRNA sense strand
ccucguauaucuccaucaa

SEQ ID NO: 686964 - RNA, 19 nt, Homo sapiens
  misc_RNA (1)...(19): siRNA sense strand
guuacacacgugauaauuu

SEQ ID NO: 686965 - RNA, 19 nt, Homo sapiens
  misc_RNA (1)...(19): siRNA sense strand
ugaaaauacuggggaaaua

SEQ ID NO: 686966 - RNA, 19 nt, Homo sapiens
  misc_RNA (1)...(19): siRNA sense strand
cgcggugucugauaaauau

SEQ ID NO: 686967 - RNA, 19 nt, Homo sapiens
  misc_RNA (1)...(19): siRNA sense strand
cagacaugcucaucaguca

SEQ ID NO: 686968 - RNA, 19 nt, Homo sapiens
  misc_RNA (1)...(19): siRNA sense strand
caauagaccagaagugauc

SEQ ID NO: 686969 - RNA, 19 nt, Homo sapiens
  misc_RNA (1)...(19): siRNA sense strand
uggaagauguaaaugacaa

SEQ ID NO: 686970 - RNA, 19 nt, Homo sapiens
  misc_RNA (1)...(19): siRNA sense strand
gcacguggcagacauuaac

SEQ ID NO: 686971 - RNA, 19 nt, Homo sapiens
  misc_RNA (1)...(19): siRNA sense strand
cagaagagacggacaaagg

SEQ ID NO: 686972 - RNA, 19 nt, Homo sapiens
  misc_RNA (1)...(19): siRNA sense strand
gagcccugcuggacagaga

SEQ ID NO: 686973 - RNA, 19 nt, Homo sapiens
  misc_RNA (1)...(19): siRNA sense strand
ggccucagaucuaggaaca

SEQ ID NO: 686974 - RNA, 19 nt, Homo sapiens
  misc_RNA (1)...(19): siRNA sense strand
gaaauacaagccgaagaug

SEQ ID NO: 686975 - RNA, 19 nt, Homo sapiens
  misc_RNA (1)...(19): siRNA sense strand
aaagaauggucaaguuguc

SEQ ID NO: 686976 - RNA, 19 nt, Homo sapiens
  misc_RNA (1)...(19): siRNA sense strand
gcggaagagucaccugauc

SEQ ID NO: 686977 - RNA, 19 nt, Homo sapiens
  misc_RNA (1)...(19): siRNA sense strand
ugcaaucuuucgacuauga

SEQ ID NO: 686978 - RNA, 19 nt, Homo sapiens
  misc_RNA (1)...(19): siRNA sense strand
ccgaaguccugaccgaguu

SEQ ID NO: 686979 - RNA, 19 nt, Homo sapiens
  misc_RNA (1)...(19): siRNA sense strand
gaaauauuuggaccgagaa

SEQ ID NO: 686980 - RNA, 19 nt, Homo sapiens
  misc_RNA (1)...(19): siRNA sense strand
gauuagugacaaggaaaua

SEQ ID NO: 686981 - RNA, 19 nt, Homo sapiens
  misc_RNA (1)...(19): siRNA sense strand
uggguaauaucuccaagga

SEQ ID NO: 686982 - RNA, 19 nt, Homo sapiens
  misc_RNA (1)...(19): siRNA sense strand
gaccugcagcuacugguaa

SEQ ID NO: 686983 - RNA, 19 nt, Homo sapiens
  misc_RNA (1)...(19): siRNA sense strand
ccaggucgaagaucuagaa

SEQ ID NO: 686984 - RNA, 19 nt, Homo sapiens
  misc_RNA (1)...(19): siRNA sense strand
uugaggagguacaggcuuu

SEQ ID NO: 686985 - RNA, 19 nt, Homo sapiens
  misc_RNA (1)...(19): siRNA sense strand
auggucaaguugucuguua

SEQ ID NO: 686986 - RNA, 19 nt, Homo sapiens
  misc_RNA (1)...(19): siRNA sense strand
agaccagaagugaucauua

SEQ ID NO: 686987 - RNA, 19 nt, Homo sapiens
  misc_RNA (1)...(19): siRNA sense strand
gaaaauacuggggaaauau

SEQ ID NO: 686988 - RNA, 19 nt, Homo sapiens
  misc_RNA (1)...(19): siRNA sense strand
ucaggagggcugugagaaa

SEQ ID NO: 686989 - RNA, 19 nt, Homo sapiens
  misc_RNA (1)...(19): siRNA sense strand
gauccgagaccugcagcua

SEQ ID NO: 686990 - RNA, 19 nt, Homo sapiens
  misc_RNA (1)...(19): siRNA sense strand
acgcagcucuuugcucuga

SEQ ID NO: 686991 - RNA, 19 nt, Homo sapiens
  misc_RNA (1)...(19): siRNA sense strand
acacccugguugaggauaa

SEQ ID NO: 686992 - RNA, 19 nt, Homo sapiens
  misc_RNA (1)...(19): siRNA sense strand
gcauccacgugacaguguu

SEQ ID NO: 686993 - RNA, 19 nt, Homo sapiens
  misc_RNA (1)...(19): siRNA sense strand
guuaacauccguagauuuu

SEQ ID NO: 686994 - RNA, 19 nt, Homo sapiens
  misc_RNA (1)...(19): siRNA sense strand
cguauauccuagagaacaa

SEQ ID NO: 686995 - RNA, 19 nt, Homo sapiens
  misc_RNA (1)...(19): siRNA sense strand
gugauggccucagaucuag

SEQ ID NO: 686996 - RNA, 19 nt, Homo sapiens
  misc_RNA (1)...(19): siRNA sense strand
uaauugccuucuugagugu

SEQ ID NO: 686997 - RNA, 19 nt, Homo sapiens
  misc_RNA (1)...(19): siRNA sense strand
aaaugacaauagaccagaa

SEQ ID NO: 686998 - RNA, 19 nt, Homo sapiens
  misc_RNA (1)...(19): siRNA sense strand
ggggaaauaucaauagcaa

SEQ ID NO: 686999 - RNA, 19 nt, Homo sapiens
  misc_RNA (1)...(19): siRNA sense strand
aaaacaaacuccguuauuc

SEQ ID NO: 687000 - RNA, 19 nt, Homo sapiens
  misc_RNA (1)...(19): siRNA sense strand
cgagugaaaguccuugaga

SEQ ID NO: 687001 - RNA, 19 nt, Homo sapiens
  misc_RNA (1)...(19): siRNA sense strand
uaacauccguagauuuuca

SEQ ID NO: 687002 - RNA, 19 nt, Homo sapiens
  misc_RNA (1)...(19): siRNA sense strand
gauucgagccuuacacucu

SEQ ID NO: 687003 - RNA, 19 nt, Homo sapiens
  misc_RNA (1)...(19): siRNA sense strand
gaacgauucgagccuuaca

SEQ ID NO: 687004 - RNA, 19 nt, Homo sapiens
  misc_RNA (1)...(19): siRNA sense strand
cggugucugauaaauauua

SEQ ID NO: 687005 - RNA, 19 nt, Homo sapiens
  misc_RNA (1)...(19): siRNA sense strand
ugacaaggaaauauuugga

SEQ ID NO: 687006 - RNA, 19 nt, Homo sapiens
  misc_RNA (1)...(19): siRNA sense strand
ugggaacgcugugggaaau

SEQ ID NO: 687007 - RNA, 19 nt, Homo sapiens
  misc_RNA (1)...(19): siRNA sense strand
acgacaacccuccuacuuu

SEQ ID NO: 687008 - RNA, 19 nt, Homo sapiens
  misc_RNA (1)...(19): siRNA sense strand
auagauuagugacaaggaa

SEQ ID NO: 687009 - RNA, 19 nt, Homo sapiens
  misc_RNA (1)...(19): siRNA sense strand
aauacaagccgaagaugug

SEQ ID NO: 687010 - RNA, 19 nt, Homo sapiens
  misc_RNA (1)...(19): siRNA sense strand
ccgcggugucugauaaaua

SEQ ID NO: 687011 - RNA, 19 nt, Homo sapiens
  misc_RNA (1)...(19): siRNA sense strand
ugaccaagacucuggaaag

SEQ ID NO: 687012 - RNA, 19 nt, Homo sapiens
  misc_RNA (1)...(19): siRNA sense strand
ucguauaucuccaucaacu

SEQ ID NO: 687013 - RNA, 19 nt, Homo sapiens
  misc_RNA (1)...(19): siRNA sense strand
agugauggccucagaucua

SEQ ID NO: 687014 - RNA, 19 nt, Homo sapiens
  misc_RNA (1)...(19): siRNA sense strand
gucucuaucuacaauauca

SEQ ID NO: 687015 - RNA, 19 nt, Homo sapiens
  misc_RNA (1)...(19): siRNA sense strand
ggaacgcugugggaaaucg

SEQ ID NO: 687016 - RNA, 19 nt, Homo sapiens
  misc_RNA (1)...(19): siRNA sense strand
aaaaguggcauacaaauuc

SEQ ID NO: 687017 - RNA, 19 nt, Homo sapiens
  misc_RNA (1)...(19): siRNA sense strand
cugaggcgcuggcacaagu

SEQ ID NO: 687018 - RNA, 19 nt, Homo sapiens
  misc_RNA (1)...(19): siRNA sense strand
gcugccaucuccugugucu

SEQ ID NO: 687019 - RNA, 19 nt, Homo sapiens
  misc_RNA (1)...(19): siRNA sense strand
gguaggacgcagcucuuug

SEQ ID NO: 687020 - RNA, 19 nt, Homo sapiens
  misc_RNA (1)...(19): siRNA sense strand
gagaaugcccaggucacuu

SEQ ID NO: 687021 - RNA, 19 nt, Homo sapiens
  misc_RNA (1)...(19): siRNA sense strand
ucucuucccgggacaguaa

SEQ ID NO: 687022 - RNA, 19 nt, Homo sapiens
  misc_RNA (1)...(19): siRNA sense strand
caggagggcugugagaaaa

SEQ ID NO: 687023 - RNA, 19 nt, Homo sapiens
  misc_RNA (1)...(19): siRNA sense strand
gcccaacuacgcagacaug

SEQ ID NO: 687024 - RNA, 19 nt, Homo sapiens
  misc_RNA (1)...(19): siRNA sense strand
guauaucuccaucaacucu

SEQ ID NO: 687025 - RNA, 19 nt, Homo sapiens
  misc_RNA (1)...(19): siRNA sense strand
gcguauauccuagagaaca

SEQ ID NO: 687026 - RNA, 19 nt, Homo sapiens
  misc_RNA (1)...(19): siRNA sense strand
ccuccuacuuucccucaug

SEQ ID NO: 687027 - RNA, 19 nt, Homo sapiens
  misc_RNA (1)...(19): siRNA sense strand
cacgugauaauuuaccuuu

SEQ ID NO: 687028 - RNA, 19 nt, Homo sapiens
  misc_RNA (1)...(19): siRNA sense strand
gcuccuucguggguaauau

SEQ ID NO: 687029 - RNA, 19 nt, Homo sapiens
  misc_RNA (1)...(19): siRNA sense strand
ggucgaagaucuagaagua

SEQ ID NO: 687030 - RNA, 19 nt, Homo sapiens
  misc_RNA (1)...(19): siRNA sense strand
gcacgcggcugcuuacugu

SEQ ID NO: 687031 - RNA, 19 nt, Homo sapiens
  misc_RNA (1)...(19): siRNA sense strand
uguaugcgcugcaaucuuu

SEQ ID NO: 687032 - RNA, 19 nt, Homo sapiens
  misc_RNA (1)...(19): siRNA sense strand
ccaagacucuggaaagaau

SEQ ID NO: 687033 - RNA, 19 nt, Homo sapiens
  misc_RNA (1)...(19): siRNA sense strand
cgacaacccuccuacuuuc

SEQ ID NO: 687034 - RNA, 19 nt, Homo sapiens
  misc_RNA (1)...(19): siRNA sense strand
gaucauuacgucuuuguuu

SEQ ID NO: 687035 - RNA, 19 nt, Homo sapiens
  misc_RNA (1)...(19): siRNA sense strand
ggaaagaauggucaaguug

SEQ ID NO: 687036 - RNA, 19 nt, Homo sapiens
  misc_RNA (1)...(19): siRNA sense strand
gaccaagacucuggaaaga

SEQ ID NO: 687037 - RNA, 19 nt, Homo sapiens
  misc_RNA (1)...(19): siRNA sense strand
ggacaguaauugccuucuu

SEQ ID NO: 687038 - RNA, 19 nt, Homo sapiens
  misc_RNA (1)...(19): siRNA sense strand
gcugcaaucuuucgacuau

SEQ ID NO: 687039 - RNA, 19 nt, Homo sapiens
  misc_RNA (1)...(19): siRNA sense strand
gaaaaugucucuaucuaca

SEQ ID NO: 687040 - RNA, 19 nt, Homo sapiens
  misc_RNA (1)...(19): siRNA sense strand
gacaguaauugccuucuug

SEQ ID NO: 687041 - RNA, 19 nt, Homo sapiens
  misc_RNA (1)...(19): siRNA sense strand
gaccagaagugaucauuac

SEQ ID NO: 687042 - RNA, 19 nt, Homo sapiens
  misc_RNA (1)...(19): siRNA sense strand
ggaaauacaagccgaagau

SEQ ID NO: 687043 - RNA, 19 nt, Homo sapiens
  misc_RNA (1)...(19): siRNA sense strand
cagcguauauccuagagaa

SEQ ID NO: 687044 - RNA, 19 nt, Homo sapiens
  misc_RNA (1)...(19): siRNA sense strand
ucgaagaucuagaaguaaa

SEQ ID NO: 687045 - RNA, 19 nt, Homo sapiens
  misc_RNA (1)...(19): siRNA sense strand
gaaaguccuugagaacaug

SEQ ID NO: 687046 - RNA, 19 nt, Homo sapiens
  misc_RNA (1)...(19): siRNA sense strand
ugacaguguuggauacaaa

SEQ ID NO: 687047 - RNA, 19 nt, Homo sapiens
  misc_RNA (1)...(19): siRNA sense strand
gaaagaauggucaaguugu

SEQ ID NO: 687048 - RNA, 19 nt, Homo sapiens
  misc_RNA (1)...(19): siRNA sense strand
gagugaaaguccuugagaa

SEQ ID NO: 687049 - RNA, 19 nt, Homo sapiens
  misc_RNA (1)...(19): siRNA sense strand
gacaauagaccagaaguga

SEQ ID NO: 687050 - RNA, 19 nt, Homo sapiens
  misc_RNA (1)...(19): siRNA sense strand
gaagugaucauuacgucuu

SEQ ID NO: 687051 - RNA, 19 nt, Homo sapiens
  misc_RNA (1)...(19): siRNA sense strand
ggauuccgguggcagauug

SEQ ID NO: 687052 - RNA, 19 nt, Homo sapiens
  misc_RNA (1)...(19): siRNA sense strand
ugaacucccuccagagcua

SEQ ID NO: 687053 - RNA, 19 nt, Homo sapiens
  misc_RNA (1)...(19): siRNA sense strand
uggaaagaauggucaaguu

SEQ ID NO: 687054 - RNA, 19 nt, Homo sapiens
  misc_RNA (1)...(19): siRNA sense strand
ugaaaguccuugagaacau

SEQ ID NO: 687055 - RNA, 19 nt, Homo sapiens
  misc_RNA (1)...(19): siRNA sense strand
ccaccucuguccacugaaa

SEQ ID NO: 687056 - RNA, 19 nt, Homo sapiens
  misc_RNA (1)...(19): siRNA sense strand
agaaugcccaggucacuua

SEQ ID NO: 687057 - RNA, 19 nt, Homo sapiens
  misc_RNA (1)...(19): siRNA sense strand
cguaucgucuccagaggua

SEQ ID NO: 687058 - RNA, 19 nt, Homo sapiens
  misc_RNA (1)...(19): siRNA sense strand
caccaccucuguccacuga

SEQ ID NO: 687059 - RNA, 19 nt, Homo sapiens
  misc_RNA (1)...(19): siRNA sense strand
gaaaaguggcauacaaauu

SEQ ID NO: 687060 - RNA, 19 nt, Homo sapiens
  misc_RNA (1)...(19): siRNA sense strand
uggcagacauuaacgacaa

SEQ ID NO: 687061 - RNA, 19 nt, Homo sapiens
  misc_RNA (1)...(19): siRNA sense strand
cuacucagcguauauccua

SEQ ID NO: 687062 - RNA, 19 nt, Homo sapiens
  misc_RNA (1)...(19): siRNA sense strand
gcauacaaauuccggaaaa

SEQ ID NO: 687063 - RNA, 19 nt, Homo sapiens
  misc_RNA (1)...(19): siRNA sense strand
ccucguauaucuccaucaa

SEQ ID NO: 687064 - RNA, 19 nt, Homo sapiens
  misc_RNA (1)...(19): siRNA sense strand
guuacacacgugauaauuu

SEQ ID NO: 687065 - RNA, 19 nt, Homo sapiens
  misc_RNA (1)...(19): siRNA sense strand
ugaaaauacuggggaaaua

SEQ ID NO: 687066 - RNA, 19 nt, Homo sapiens
  misc_RNA (1)...(19): siRNA sense strand
cgcggugucugauaaauau

SEQ ID NO: 687067 - RNA, 19 nt, Homo sapiens
  misc_RNA (1)...(19): siRNA sense strand
cagacaugcucaucaguca

SEQ ID NO: 687068 - RNA, 19 nt, Homo sapiens
  misc_RNA (1)...(19): siRNA sense strand
caauagaccagaagugauc

SEQ ID NO: 687069 - RNA, 19 nt, Homo sapiens
  misc_RNA (1)...(19): siRNA sense strand
uggaagauguaaaugacaa

SEQ ID NO: 687070 - RNA, 19 nt, Homo sapiens
  misc_RNA (1)...(19): siRNA sense strand
gcacguggcagacauuaac

SEQ ID NO: 687071 - RNA, 19 nt, Homo sapiens
  misc_RNA (1)...(19): siRNA sense strand
cagaagagacggacaaagg

SEQ ID NO: 687072 - RNA, 19 nt, Homo sapiens
  misc_RNA (1)...(19): siRNA sense strand
gagcccugcuggacagaga

SEQ ID NO: 687073 - RNA, 19 nt, Homo sapiens
  misc_RNA (1)...(19): siRNA sense strand
ggccucagaucuaggaaca

SEQ ID NO: 687074 - RNA, 19 nt, Homo sapiens
  misc_RNA (1)...(19): siRNA sense strand
gaaauacaagccgaagaug

SEQ ID NO: 687075 - RNA, 19 nt, Homo sapiens
  misc_RNA (1)...(19): siRNA sense strand
aaagaauggucaaguuguc

SEQ ID NO: 687076 - RNA, 19 nt, Homo sapiens
  misc_RNA (1)...(19): siRNA sense strand
gcggaagagucaccugauc

SEQ ID NO: 687077 - RNA, 19 nt, Homo sapiens
  misc_RNA (1)...(19): siRNA sense strand
ugcaaucuuucgacuauga

SEQ ID NO: 687078 - RNA, 19 nt, Homo sapiens
  misc_RNA (1)...(19): siRNA sense strand
ccgaaguccugaccgaguu

SEQ ID NO: 687079 - RNA, 19 nt, Homo sapiens
  misc_RNA (1)...(19): siRNA sense strand
gaaauauuuggaccgagaa

SEQ ID NO: 687080 - RNA, 19 nt, Homo sapiens
  misc_RNA (1)...(19): siRNA sense strand
gauuagugacaaggaaaua

SEQ ID NO: 687081 - RNA, 19 nt, Homo sapiens
  misc_RNA (1)...(19): siRNA sense strand
uggguaauaucuccaagga

SEQ ID NO: 687082 - RNA, 19 nt, Homo sapiens
  misc_RNA (1)...(19): siRNA sense strand
gaccugcagcuacugguaa

SEQ ID NO: 687083 - RNA, 19 nt, Homo sapiens
  misc_RNA (1)...(19): siRNA sense strand
ccaggucgaagaucuagaa

SEQ ID NO: 687084 - RNA, 19 nt, Homo sapiens
  misc_RNA (1)...(19): siRNA sense strand
uugaggagguacaggcuuu

SEQ ID NO: 687085 - RNA, 19 nt, Homo sapiens
  misc_RNA (1)...(19): siRNA sense strand
auggucaaguugucuguua

SEQ ID NO: 687086 - RNA, 19 nt, Homo sapiens
  misc_RNA (1)...(19): siRNA sense strand
agaccagaagugaucauua

SEQ ID NO: 687087 - RNA, 19 nt, Homo sapiens
  misc_RNA (1)...(19): siRNA sense strand
gaaaauacuggggaaauau

SEQ ID NO: 687088 - RNA, 19 nt, Homo sapiens
  misc_RNA (1)...(19): siRNA sense strand
ucaggagggcugugagaaa

SEQ ID NO: 687089 - RNA, 19 nt, Homo sapiens
  misc_RNA (1)...(19): siRNA sense strand
gauccgagaccugcagcua

SEQ ID NO: 687090 - RNA, 19 nt, Homo sapiens
  misc_RNA (1)...(19): siRNA sense strand
acgcagcucuuugcucuga

SEQ ID NO: 687091 - RNA, 19 nt, Homo sapiens
  misc_RNA (1)...(19): siRNA sense strand
acacccugguugaggauaa

SEQ ID NO: 687092 - RNA, 19 nt, Homo sapiens
  misc_RNA (1)...(19): siRNA sense strand
gcauccacgugacaguguu

SEQ ID NO: 687093 - RNA, 19 nt, Homo sapiens
  misc_RNA (1)...(19): siRNA sense strand
guuaacauccguagauuuu

SEQ ID NO: 687094 - RNA, 19 nt, Homo sapiens
  misc_RNA (1)...(19): siRNA sense strand
cguauauccuagagaacaa

SEQ ID NO: 687095 - RNA, 19 nt, Homo sapiens
  misc_RNA (1)...(19): siRNA sense strand
gugauggccucagaucuag

SEQ ID NO: 687096 - RNA, 19 nt, Homo sapiens
  misc_RNA (1)...(19): siRNA sense strand
uaauugccuucuugagugu

SEQ ID NO: 687097 - RNA, 19 nt, Homo sapiens
  misc_RNA (1)...(19): siRNA sense strand
aaaugacaauagaccagaa

SEQ ID NO: 687098 - RNA, 19 nt, Homo sapiens
  misc_RNA (1)...(19): siRNA sense strand
ggggaaauaucaauagcaa

SEQ ID NO: 687099 - RNA, 19 nt, Homo sapiens
  misc_RNA (1)...(19): siRNA sense strand
aaaacaaacuccguuauuc

SEQ ID NO: 687100 - RNA, 19 nt, Homo sapiens
  misc_RNA (1)...(19): siRNA sense strand
cgagugaaaguccuugaga

SEQ ID NO: 687101 - RNA, 19 nt, Homo sapiens
  misc_RNA (1)...(19): siRNA sense strand
uaacauccguagauuuuca

SEQ ID NO: 687102 - RNA, 19 nt, Homo sapiens
  misc_RNA (1)...(19): siRNA sense strand
gauucgagccuuacacucu

SEQ ID NO: 687103 - RNA, 19 nt, Homo sapiens
  misc_RNA (1)...(19): siRNA sense strand
gaacgauucgagccuuaca

SEQ ID NO: 687104 - RNA, 19 nt, Homo sapiens
  misc_RNA (1)...(19): siRNA sense strand
cggugucugauaaauauua

SEQ ID NO: 687105 - RNA, 19 nt, Homo sapiens
  misc_RNA (1)...(19): siRNA sense strand
ugacaaggaaauauuugga

SEQ ID NO: 687106 - RNA, 19 nt, Homo sapiens
  misc_RNA (1)...(19): siRNA sense strand
ugggaacgcugugggaaau

SEQ ID NO: 687107 - RNA, 19 nt, Homo sapiens
  misc_RNA (1)...(19): siRNA sense strand
acgacaacccuccuacuuu

SEQ ID NO: 687108 - RNA, 19 nt, Homo sapiens
  misc_RNA (1)...(19): siRNA sense strand
auagauuagugacaaggaa

SEQ ID NO: 687109 - RNA, 19 nt, Homo sapiens
  misc_RNA (1)...(19): siRNA sense strand
aauacaagccgaagaugug

SEQ ID NO: 687110 - RNA, 19 nt, Homo sapiens
  misc_RNA (1)...(19): siRNA sense strand
ccgcggugucugauaaaua

SEQ ID NO: 687111 - RNA, 19 nt, Homo sapiens
  misc_RNA (1)...(19): siRNA sense strand
ugaccaagacucuggaaag

SEQ ID NO: 687112 - RNA, 19 nt, Homo sapiens
  misc_RNA (1)...(19): siRNA sense strand
ucguauaucuccaucaacu

SEQ ID NO: 687113 - RNA, 19 nt, Homo sapiens
  misc_RNA (1)...(19): siRNA sense strand
agugauggccucagaucua

SEQ ID NO: 687114 - RNA, 19 nt, Homo sapiens
  misc_RNA (1)...(19): siRNA sense strand
gucucuaucuacaauauca

SEQ ID NO: 687115 - RNA, 19 nt, Homo sapiens
  misc_RNA (1)...(19): siRNA sense strand
ggaacgcugugggaaaucg

SEQ ID NO: 687116 - RNA, 19 nt, Homo sapiens
  misc_RNA (1)...(19): siRNA sense strand
aaaaguggcauacaaauuc

SEQ ID NO: 687117 - RNA, 19 nt, Homo sapiens
  misc_RNA (1)...(19): siRNA sense strand
cugaggcgcuggcacaagu

SEQ ID NO: 687118 - RNA, 19 nt, Homo sapiens
  misc_RNA (1)...(19): siRNA sense strand
gcugccaucuccugugucu

SEQ ID NO: 687119 - RNA, 19 nt, Homo sapiens
  misc_RNA (1)...(19): siRNA sense strand
gguaggacgcagcucuuug

SEQ ID NO: 687120 - RNA, 19 nt, Homo sapiens
  misc_RNA (1)...(19): siRNA sense strand
gagaaugcccaggucacuu

SEQ ID NO: 687121 - RNA, 19 nt, Homo sapiens
  misc_RNA (1)...(19): siRNA sense strand
ucucuucccgggacaguaa

SEQ ID NO: 687122 - RNA, 19 nt, Homo sapiens
  misc_RNA (1)...(19): siRNA sense strand
caggagggcugugagaaaa

SEQ ID NO: 687123 - RNA, 19 nt, Homo sapiens
  misc_RNA (1)...(19): siRNA sense strand
gcccaacuacgcagacaug

SEQ ID NO: 687124 - RNA, 19 nt, Homo sapiens
  misc_RNA (1)...(19): siRNA sense strand
guauaucuccaucaacucu

SEQ ID NO: 687125 - RNA, 19 nt, Homo sapiens
  misc_RNA (1)...(19): siRNA sense strand
gcguauauccuagagaaca

SEQ ID NO: 687126 - RNA, 19 nt, Homo sapiens
  misc_RNA (1)...(19): siRNA sense strand
ccuccuacuuucccucaug

SEQ ID NO: 687127 - RNA, 19 nt, Homo sapiens
  misc_RNA (1)...(19): siRNA sense strand
cacgugauaauuuaccuuu

SEQ ID NO: 687128 - RNA, 19 nt, Homo sapiens
  misc_RNA (1)...(19): siRNA sense strand
gcuccuucguggguaauau

SEQ ID NO: 687129 - RNA, 19 nt, Homo sapiens
  misc_RNA (1)...(19): siRNA sense strand
uaaaaugugcggagaagga

SEQ ID NO: 687130 - RNA, 19 nt, Homo sapiens
  misc_RNA (1)...(19): siRNA sense strand
uuucaaaccccucgagaua

SEQ ID NO: 687131 - RNA, 19 nt, Homo sapiens
  misc_RNA (1)...(19): siRNA sense strand
uaaaaugugcggagaagga

SEQ ID NO: 687132 - RNA, 19 nt, Homo sapiens
  misc_RNA (1)...(19): siRNA sense strand
uuucaaaccccucgagaua

SEQ ID NO: 687133 - RNA, 19 nt, Homo sapiens
  misc_RNA (1)...(19): siRNA sense strand
uaaaaugugcggagaagga

SEQ ID NO: 687134 - RNA, 19 nt, Homo sapiens
  misc_RNA (1)...(19): siRNA sense strand
uuucaaaccccucgagaua

SEQ ID NO: 687135 - RNA, 19 nt, Homo sapiens
  misc_RNA (1)...(19): siRNA sense strand
uaaaaugugcggagaagga

SEQ ID NO: 687136 - RNA, 19 nt, Homo sapiens
  misc_RNA (1)...(19): siRNA sense strand
uuucaaaccccucgagaua

SEQ ID NO: 687137 - RNA, 19 nt, Homo sapiens
  misc_RNA (1)...(19): siRNA sense strand
uaaaaugugcggagaagga

SEQ ID NO: 687138 - RNA, 19 nt, Homo sapiens
  misc_RNA (1)...(19): siRNA sense strand
uuucaaaccccucgagaua

SEQ ID NO: 687139 - RNA, 19 nt, Homo sapiens
  misc_RNA (1)...(19): siRNA sense strand
uaaaaugugcggagaagga

SEQ ID NO: 687140 - RNA, 19 nt, Homo sapiens
  misc_RNA (1)...(19): siRNA sense strand
uuucaaaccccucgagaua

SEQ ID NO: 687141 - RNA, 19 nt, Homo sapiens
  misc_RNA (1)...(19): siRNA sense strand
uaaaaugugcggagaagga

SEQ ID NO: 687142 - RNA, 19 nt, Homo sapiens
  misc_RNA (1)...(19): siRNA sense strand
uuucaaaccccucgagaua

SEQ ID NO: 687143 - RNA, 19 nt, Homo sapiens
  misc_RNA (1)...(19): siRNA sense strand
uaaaaugugcggagaagga

SEQ ID NO: 687144 - RNA, 19 nt, Homo sapiens
  misc_RNA (1)...(19): siRNA sense strand
uuucaaaccccucgagaua

SEQ ID NO: 687145 - RNA, 19 nt, Homo sapiens
  misc_RNA (1)...(19): siRNA sense strand
uaaaaugugcggagaagga

SEQ ID NO: 687146 - RNA, 19 nt, Homo sapiens
  misc_RNA (1)...(19): siRNA sense strand
uuucaaaccccucgagaua

SEQ ID NO: 687147 - RNA, 19 nt, Homo sapiens
  misc_RNA (1)...(19): siRNA sense strand
uaaaaugugcggagaagga

SEQ ID NO: 687148 - RNA, 19 nt, Homo sapiens
  misc_RNA (1)...(19): siRNA sense strand
uuucaaaccccucgagaua

SEQ ID NO: 687149 - RNA, 19 nt, Homo sapiens
  misc_RNA (1)...(19): siRNA sense strand
uaaaaugugcggagaagga

SEQ ID NO: 687150 - RNA, 19 nt, Homo sapiens
  misc_RNA (1)...(19): siRNA sense strand
uuucaaaccccucgagaua

SEQ ID NO: 687151 - RNA, 19 nt, Homo sapiens
  misc_RNA (1)...(19): siRNA sense strand
uaaaaugugcggagaagga

SEQ ID NO: 687152 - RNA, 19 nt, Homo sapiens
  misc_RNA (1)...(19): siRNA sense strand
uuucaaaccccucgagaua

SEQ ID NO: 687153 - RNA, 19 nt, Homo sapiens
  misc_RNA (1)...(19): siRNA sense strand
uaaaaugugcggagaagga

SEQ ID NO: 687154 - RNA, 19 nt, Homo sapiens
  misc_RNA (1)...(19): siRNA sense strand
uuucaaaccccucgagaua

SEQ ID NO: 687155 - RNA, 19 nt, Homo sapiens
  misc_RNA (1)...(19): siRNA sense strand
uaaaaugugcggagaagga

SEQ ID NO: 687156 - RNA, 19 nt, Homo sapiens
  misc_RNA (1)...(19): siRNA sense strand
uuucaaaccccucgagaua

SEQ ID NO: 687157 - RNA, 19 nt, Homo sapiens
  misc_RNA (1)...(19): siRNA sense strand
uaaaaugugcggagaagga

SEQ ID NO: 687158 - RNA, 19 nt, Homo sapiens
  misc_RNA (1)...(19): siRNA sense strand
uuucaaaccccucgagaua

SEQ ID NO: 687159 - RNA, 19 nt, Homo sapiens
  misc_RNA (1)...(19): siRNA sense strand
uaaaaugugcggagaagga

SEQ ID NO: 687160 - RNA, 19 nt, Homo sapiens
  misc_RNA (1)...(19): siRNA sense strand
uuucaaaccccucgagaua

SEQ ID NO: 687161 - RNA, 19 nt, Homo sapiens
  misc_RNA (1)...(19): siRNA sense strand
uaaaaugugcggagaagga

SEQ ID NO: 687162 - RNA, 19 nt, Homo sapiens
  misc_RNA (1)...(19): siRNA sense strand
uuucaaaccccucgagaua

SEQ ID NO: 687163 - RNA, 19 nt, Homo sapiens
  misc_RNA (1)...(19): siRNA sense strand
uaaaaugugcggagaagga

SEQ ID NO: 687164 - RNA, 19 nt, Homo sapiens
  misc_RNA (1)...(19): siRNA sense strand
uuucaaaccccucgagaua

SEQ ID NO: 687165 - RNA, 19 nt, Homo sapiens
  misc_RNA (1)...(19): siRNA sense strand
ggucgaagaucuagaagua

SEQ ID NO: 687166 - RNA, 19 nt, Homo sapiens
  misc_RNA (1)...(19): siRNA sense strand
gcacgcggcugcuuacugu

SEQ ID NO: 687167 - RNA, 19 nt, Homo sapiens
  misc_RNA (1)...(19): siRNA sense strand
uguaugcgcugcaaucuuu

SEQ ID NO: 687168 - RNA, 19 nt, Homo sapiens
  misc_RNA (1)...(19): siRNA sense strand
ccaagacucuggaaagaau

SEQ ID NO: 687169 - RNA, 19 nt, Homo sapiens
  misc_RNA (1)...(19): siRNA sense strand
cgacaacccuccuacuuuc

SEQ ID NO: 687170 - RNA, 19 nt, Homo sapiens
  misc_RNA (1)...(19): siRNA sense strand
gaucauuacgucuuuguuu

SEQ ID NO: 687171 - RNA, 19 nt, Homo sapiens
  misc_RNA (1)...(19): siRNA sense strand
ggaaagaauggucaaguug

SEQ ID NO: 687172 - RNA, 19 nt, Homo sapiens
  misc_RNA (1)...(19): siRNA sense strand
gaccaagacucuggaaaga

SEQ ID NO: 687173 - RNA, 19 nt, Homo sapiens
  misc_RNA (1)...(19): siRNA sense strand
ggacaguaauugccuucuu

SEQ ID NO: 687174 - RNA, 19 nt, Homo sapiens
  misc_RNA (1)...(19): siRNA sense strand
gcugcaaucuuucgacuau

SEQ ID NO: 687175 - RNA, 19 nt, Homo sapiens
  misc_RNA (1)...(19): siRNA sense strand
gaaaaugucucuaucuaca

SEQ ID NO: 687176 - RNA, 19 nt, Homo sapiens
  misc_RNA (1)...(19): siRNA sense strand
gacaguaauugccuucuug

SEQ ID NO: 687177 - RNA, 19 nt, Homo sapiens
  misc_RNA (1)...(19): siRNA sense strand
gaccagaagugaucauuac

SEQ ID NO: 687178 - RNA, 19 nt, Homo sapiens
  misc_RNA (1)...(19): siRNA sense strand
ggaaauacaagccgaagau

SEQ ID NO: 687179 - RNA, 19 nt, Homo sapiens
  misc_RNA (1)...(19): siRNA sense strand
cagcguauauccuagagaa

SEQ ID NO: 687180 - RNA, 19 nt, Homo sapiens
  misc_RNA (1)...(19): siRNA sense strand
ucgaagaucuagaaguaaa

SEQ ID NO: 687181 - RNA, 19 nt, Homo sapiens
  misc_RNA (1)...(19): siRNA sense strand
gaaaguccuugagaacaug

SEQ ID NO: 687182 - RNA, 19 nt, Homo sapiens
  misc_RNA (1)...(19): siRNA sense strand
ugacaguguuggauacaaa

SEQ ID NO: 687183 - RNA, 19 nt, Homo sapiens
  misc_RNA (1)...(19): siRNA sense strand
gaaagaauggucaaguugu

SEQ ID NO: 687184 - RNA, 19 nt, Homo sapiens
  misc_RNA (1)...(19): siRNA sense strand
gagugaaaguccuugagaa

SEQ ID NO: 687185 - RNA, 19 nt, Homo sapiens
  misc_RNA (1)...(19): siRNA sense strand
gacaauagaccagaaguga

SEQ ID NO: 687186 - RNA, 19 nt, Homo sapiens
  misc_RNA (1)...(19): siRNA sense strand
gaagugaucauuacgucuu

SEQ ID NO: 687187 - RNA, 19 nt, Homo sapiens
  misc_RNA (1)...(19): siRNA sense strand
ggauuccgguggcagauug

SEQ ID NO: 687188 - RNA, 19 nt, Homo sapiens
  misc_RNA (1)...(19): siRNA sense strand
ugaacucccuccagagcua

SEQ ID NO: 687189 - RNA, 19 nt, Homo sapiens
  misc_RNA (1)...(19): siRNA sense strand
uggaaagaauggucaaguu

SEQ ID NO: 687190 - RNA, 19 nt, Homo sapiens
  misc_RNA (1)...(19): siRNA sense strand
ugaaaguccuugagaacau

SEQ ID NO: 687191 - RNA, 19 nt, Homo sapiens
  misc_RNA (1)...(19): siRNA sense strand
ccaccucuguccacugaaa

SEQ ID NO: 687192 - RNA, 19 nt, Homo sapiens
  misc_RNA (1)...(19): siRNA sense strand
agaaugcccaggucacuua

SEQ ID NO: 687193 - RNA, 19 nt, Homo sapiens
  misc_RNA (1)...(19): siRNA sense strand
cguaucgucuccagaggua

SEQ ID NO: 687194 - RNA, 19 nt, Homo sapiens
  misc_RNA (1)...(19): siRNA sense strand
caccaccucuguccacuga

SEQ ID NO: 687195 - RNA, 19 nt, Homo sapiens
  misc_RNA (1)...(19): siRNA sense strand
gaaaaguggcauacaaauu

SEQ ID NO: 687196 - RNA, 19 nt, Homo sapiens
  misc_RNA (1)...(19): siRNA sense strand
uggcagacauuaacgacaa

SEQ ID NO: 687197 - RNA, 19 nt, Homo sapiens
  misc_RNA (1)...(19): siRNA sense strand
cuacucagcguauauccua

SEQ ID NO: 687198 - RNA, 19 nt, Homo sapiens
  misc_RNA (1)...(19): siRNA sense strand
gcauacaaauuccggaaaa

SEQ ID NO: 687199 - RNA, 19 nt, Homo sapiens
  misc_RNA (1)...(19): siRNA sense strand
ccucguauaucuccaucaa

SEQ ID NO: 687200 - RNA, 19 nt, Homo sapiens
  misc_RNA (1)...(19): siRNA sense strand
guuacacacgugauaauuu

SEQ ID NO: 687201 - RNA, 19 nt, Homo sapiens
  misc_RNA (1)...(19): siRNA sense strand
ugaaaauacuggggaaaua

SEQ ID NO: 687202 - RNA, 19 nt, Homo sapiens
  misc_RNA (1)...(19): siRNA sense strand
cgcggugucugauaaauau

SEQ ID NO: 687203 - RNA, 19 nt, Homo sapiens
  misc_RNA (1)...(19): siRNA sense strand
cagacaugcucaucaguca

SEQ ID NO: 687204 - RNA, 19 nt, Homo sapiens
  misc_RNA (1)...(19): siRNA sense strand
caauagaccagaagugauc

SEQ ID NO: 687205 - RNA, 19 nt, Homo sapiens
  misc_RNA (1)...(19): siRNA sense strand
uggaagauguaaaugacaa

SEQ ID NO: 687206 - RNA, 19 nt, Homo sapiens
  misc_RNA (1)...(19): siRNA sense strand
gcacguggcagacauuaac

SEQ ID NO: 687207 - RNA, 19 nt, Homo sapiens
  misc_RNA (1)...(19): siRNA sense strand
cagaagagacggacaaagg

SEQ ID NO: 687208 - RNA, 19 nt, Homo sapiens
  misc_RNA (1)...(19): siRNA sense strand
gagcccugcuggacagaga

SEQ ID NO: 687209 - RNA, 19 nt, Homo sapiens
  misc_RNA (1)...(19): siRNA sense strand
ggccucagaucuaggaaca

SEQ ID NO: 687210 - RNA, 19 nt, Homo sapiens
  misc_RNA (1)...(19): siRNA sense strand
gaaauacaagccgaagaug

SEQ ID NO: 687211 - RNA, 19 nt, Homo sapiens
  misc_RNA (1)...(19): siRNA sense strand
aaagaauggucaaguuguc

SEQ ID NO: 687212 - RNA, 19 nt, Homo sapiens
  misc_RNA (1)...(19): siRNA sense strand
gcggaagagucaccugauc

SEQ ID NO: 687213 - RNA, 19 nt, Homo sapiens
  misc_RNA (1)...(19): siRNA sense strand
ugcaaucuuucgacuauga

SEQ ID NO: 687214 - RNA, 19 nt, Homo sapiens
  misc_RNA (1)...(19): siRNA sense strand
ccgaaguccugaccgaguu

SEQ ID NO: 687215 - RNA, 19 nt, Homo sapiens
  misc_RNA (1)...(19): siRNA sense strand
gaaauauuuggaccgagaa

SEQ ID NO: 687216 - RNA, 19 nt, Homo sapiens
  misc_RNA (1)...(19): siRNA sense strand
gauuagugacaaggaaaua

SEQ ID NO: 687217 - RNA, 19 nt, Homo sapiens
  misc_RNA (1)...(19): siRNA sense strand
uggguaauaucuccaagga

SEQ ID NO: 687218 - RNA, 19 nt, Homo sapiens
  misc_RNA (1)...(19): siRNA sense strand
gaccugcagcuacugguaa

SEQ ID NO: 687219 - RNA, 19 nt, Homo sapiens
  misc_RNA (1)...(19): siRNA sense strand
ccaggucgaagaucuagaa

SEQ ID NO: 687220 - RNA, 19 nt, Homo sapiens
  misc_RNA (1)...(19): siRNA sense strand
uugaggagguacaggcuuu

SEQ ID NO: 687221 - RNA, 19 nt, Homo sapiens
  misc_RNA (1)...(19): siRNA sense strand
auggucaaguugucuguua

SEQ ID NO: 687222 - RNA, 19 nt, Homo sapiens
  misc_RNA (1)...(19): siRNA sense strand
agaccagaagugaucauua

SEQ ID NO: 687223 - RNA, 19 nt, Homo sapiens
  misc_RNA (1)...(19): siRNA sense strand
gaaaauacuggggaaauau

SEQ ID NO: 687224 - RNA, 19 nt, Homo sapiens
  misc_RNA (1)...(19): siRNA sense strand
ucaggagggcugugagaaa

SEQ ID NO: 687225 - RNA, 19 nt, Homo sapiens
  misc_RNA (1)...(19): siRNA sense strand
gauccgagaccugcagcua

SEQ ID NO: 687226 - RNA, 19 nt, Homo sapiens
  misc_RNA (1)...(19): siRNA sense strand
acgcagcucuuugcucuga

SEQ ID NO: 687227 - RNA, 19 nt, Homo sapiens
  misc_RNA (1)...(19): siRNA sense strand
acacccugguugaggauaa

SEQ ID NO: 687228 - RNA, 19 nt, Homo sapiens
  misc_RNA (1)...(19): siRNA sense strand
gcauccacgugacaguguu

SEQ ID NO: 687229 - RNA, 19 nt, Homo sapiens
  misc_RNA (1)...(19): siRNA sense strand
guuaacauccguagauuuu

SEQ ID NO: 687230 - RNA, 19 nt, Homo sapiens
  misc_RNA (1)...(19): siRNA sense strand
cguauauccuagagaacaa

SEQ ID NO: 687231 - RNA, 19 nt, Homo sapiens
  misc_RNA (1)...(19): siRNA sense strand
gugauggccucagaucuag

SEQ ID NO: 687232 - RNA, 19 nt, Homo sapiens
  misc_RNA (1)...(19): siRNA sense strand
uaauugccuucuugagugu

SEQ ID NO: 687233 - RNA, 19 nt, Homo sapiens
  misc_RNA (1)...(19): siRNA sense strand
aaaugacaauagaccagaa

SEQ ID NO: 687234 - RNA, 19 nt, Homo sapiens
  misc_RNA (1)...(19): siRNA sense strand
ggggaaauaucaauagcaa

SEQ ID NO: 687235 - RNA, 19 nt, Homo sapiens
  misc_RNA (1)...(19): siRNA sense strand
aaaacaaacuccguuauuc

SEQ ID NO: 687236 - RNA, 19 nt, Homo sapiens
  misc_RNA (1)...(19): siRNA sense strand
cgagugaaaguccuugaga

SEQ ID NO: 687237 - RNA, 19 nt, Homo sapiens
  misc_RNA (1)...(19): siRNA sense strand
uaacauccguagauuuuca

SEQ ID NO: 687238 - RNA, 19 nt, Homo sapiens
  misc_RNA (1)...(19): siRNA sense strand
gauucgagccuuacacucu

SEQ ID NO: 687239 - RNA, 19 nt, Homo sapiens
  misc_RNA (1)...(19): siRNA sense strand
gaacgauucgagccuuaca

SEQ ID NO: 687240 - RNA, 19 nt, Homo sapiens
  misc_RNA (1)...(19): siRNA sense strand
cggugucugauaaauauua

SEQ ID NO: 687241 - RNA, 19 nt, Homo sapiens
  misc_RNA (1)...(19): siRNA sense strand
ugacaaggaaauauuugga

SEQ ID NO: 687242 - RNA, 19 nt, Homo sapiens
  misc_RNA (1)...(19): siRNA sense strand
ugggaacgcugugggaaau

SEQ ID NO: 687243 - RNA, 19 nt, Homo sapiens
  misc_RNA (1)...(19): siRNA sense strand
acgacaacccuccuacuuu

SEQ ID NO: 687244 - RNA, 19 nt, Homo sapiens
  misc_RNA (1)...(19): siRNA sense strand
auagauuagugacaaggaa

SEQ ID NO: 687245 - RNA, 19 nt, Homo sapiens
  misc_RNA (1)...(19): siRNA sense strand
aauacaagccgaagaugug

SEQ ID NO: 687246 - RNA, 19 nt, Homo sapiens
  misc_RNA (1)...(19): siRNA sense strand
ccgcggugucugauaaaua

SEQ ID NO: 687247 - RNA, 19 nt, Homo sapiens
  misc_RNA (1)...(19): siRNA sense strand
ugaccaagacucuggaaag

SEQ ID NO: 687248 - RNA, 19 nt, Homo sapiens
  misc_RNA (1)...(19): siRNA sense strand
ucguauaucuccaucaacu

SEQ ID NO: 687249 - RNA, 19 nt, Homo sapiens
  misc_RNA (1)...(19): siRNA sense strand
agugauggccucagaucua

SEQ ID NO: 687250 - RNA, 19 nt, Homo sapiens
  misc_RNA (1)...(19): siRNA sense strand
gucucuaucuacaauauca

SEQ ID NO: 687251 - RNA, 19 nt, Homo sapiens
  misc_RNA (1)...(19): siRNA sense strand
ggaacgcugugggaaaucg

SEQ ID NO: 687252 - RNA, 19 nt, Homo sapiens
  misc_RNA (1)...(19): siRNA sense strand
aaaaguggcauacaaauuc

SEQ ID NO: 687253 - RNA, 19 nt, Homo sapiens
  misc_RNA (1)...(19): siRNA sense strand
cugaggcgcuggcacaagu

SEQ ID NO: 687254 - RNA, 19 nt, Homo sapiens
  misc_RNA (1)...(19): siRNA sense strand
gcugccaucuccugugucu

SEQ ID NO: 687255 - RNA, 19 nt, Homo sapiens
  misc_RNA (1)...(19): siRNA sense strand
gguaggacgcagcucuuug

SEQ ID NO: 687256 - RNA, 19 nt, Homo sapiens
  misc_RNA (1)...(19): siRNA sense strand
gagaaugcccaggucacuu

SEQ ID NO: 687257 - RNA, 19 nt, Homo sapiens
  misc_RNA (1)...(19): siRNA sense strand
ucucuucccgggacaguaa

SEQ ID NO: 687258 - RNA, 19 nt, Homo sapiens
  misc_RNA (1)...(19): siRNA sense strand
caggagggcugugagaaaa

SEQ ID NO: 687259 - RNA, 19 nt, Homo sapiens
  misc_RNA (1)...(19): siRNA sense strand
gcccaacuacgcagacaug

SEQ ID NO: 687260 - RNA, 19 nt, Homo sapiens
  misc_RNA (1)...(19): siRNA sense strand
guauaucuccaucaacucu

SEQ ID NO: 687261 - RNA, 19 nt, Homo sapiens
  misc_RNA (1)...(19): siRNA sense strand
gcguauauccuagagaaca

SEQ ID NO: 687262 - RNA, 19 nt, Homo sapiens
  misc_RNA (1)...(19): siRNA sense strand
ccuccuacuuucccucaug

SEQ ID NO: 687263 - RNA, 19 nt, Homo sapiens
  misc_RNA (1)...(19): siRNA sense strand
cacgugauaauuuaccuuu

SEQ ID NO: 687264 - RNA, 19 nt, Homo sapiens
  misc_RNA (1)...(19): siRNA sense strand
gcuccuucguggguaauau

SEQ ID NO: 687265 - RNA, 19 nt, Homo sapiens
  misc_RNA (1)...(19): siRNA sense strand
ggucgaagaucuagaagua

SEQ ID NO: 687266 - RNA, 19 nt, Homo sapiens
  misc_RNA (1)...(19): siRNA sense strand
gcacgcggcugcuuacugu

SEQ ID NO: 687267 - RNA, 19 nt, Homo sapiens
  misc_RNA (1)...(19): siRNA sense strand
uguaugcgcugcaaucuuu

SEQ ID NO: 687268 - RNA, 19 nt, Homo sapiens
  misc_RNA (1)...(19): siRNA sense strand
ccaagacucuggaaagaau

SEQ ID NO: 687269 - RNA, 19 nt, Homo sapiens
  misc_RNA (1)...(19): siRNA sense strand
cgacaacccuccuacuuuc

SEQ ID NO: 687270 - RNA, 19 nt, Homo sapiens
  misc_RNA (1)...(19): siRNA sense strand
gaucauuacgucuuuguuu

SEQ ID NO: 687271 - RNA, 19 nt, Homo sapiens
  misc_RNA (1)...(19): siRNA sense strand
ggaaagaauggucaaguug

SEQ ID NO: 687272 - RNA, 19 nt, Homo sapiens
  misc_RNA (1)...(19): siRNA sense strand
gaccaagacucuggaaaga

SEQ ID NO: 687273 - RNA, 19 nt, Homo sapiens
  misc_RNA (1)...(19): siRNA sense strand
ggacaguaauugccuucuu

SEQ ID NO: 687274 - RNA, 19 nt, Homo sapiens
  misc_RNA (1)...(19): siRNA sense strand
gcugcaaucuuucgacuau

SEQ ID NO: 687275 - RNA, 19 nt, Homo sapiens
  misc_RNA (1)...(19): siRNA sense strand
gaaaaugucucuaucuaca

SEQ ID NO: 687276 - RNA, 19 nt, Homo sapiens
  misc_RNA (1)...(19): siRNA sense strand
gacaguaauugccuucuug

SEQ ID NO: 687277 - RNA, 19 nt, Homo sapiens
  misc_RNA (1)...(19): siRNA sense strand
gaccagaagugaucauuac

SEQ ID NO: 687278 - RNA, 19 nt, Homo sapiens
  misc_RNA (1)...(19): siRNA sense strand
ggaaauacaagccgaagau

SEQ ID NO: 687279 - RNA, 19 nt, Homo sapiens
  misc_RNA (1)...(19): siRNA sense strand
cagcguauauccuagagaa

SEQ ID NO: 687280 - RNA, 19 nt, Homo sapiens
  misc_RNA (1)...(19): siRNA sense strand
ucgaagaucuagaaguaaa

SEQ ID NO: 687281 - RNA, 19 nt, Homo sapiens
  misc_RNA (1)...(19): siRNA sense strand
gaaaguccuugagaacaug

SEQ ID NO: 687282 - RNA, 19 nt, Homo sapiens
  misc_RNA (1)...(19): siRNA sense strand
ugacaguguuggauacaaa

SEQ ID NO: 687283 - RNA, 19 nt, Homo sapiens
  misc_RNA (1)...(19): siRNA sense strand
gaaagaauggucaaguugu

SEQ ID NO: 687284 - RNA, 19 nt, Homo sapiens
  misc_RNA (1)...(19): siRNA sense strand
gagugaaaguccuugagaa

SEQ ID NO: 687285 - RNA, 19 nt, Homo sapiens
  misc_RNA (1)...(19): siRNA sense strand
gacaauagaccagaaguga

SEQ ID NO: 687286 - RNA, 19 nt, Homo sapiens
  misc_RNA (1)...(19): siRNA sense strand
gaagugaucauuacgucuu

SEQ ID NO: 687287 - RNA, 19 nt, Homo sapiens
  misc_RNA (1)...(19): siRNA sense strand
ggauuccgguggcagauug

SEQ ID NO: 687288 - RNA, 19 nt, Homo sapiens
  misc_RNA (1)...(19): siRNA sense strand
ugaacucccuccagagcua

SEQ ID NO: 687289 - RNA, 19 nt, Homo sapiens
  misc_RNA (1)...(19): siRNA sense strand
uggaaagaauggucaaguu

SEQ ID NO: 687290 - RNA, 19 nt, Homo sapiens
  misc_RNA (1)...(19): siRNA sense strand
ugaaaguccuugagaacau

SEQ ID NO: 687291 - RNA, 19 nt, Homo sapiens
  misc_RNA (1)...(19): siRNA sense strand
ccaccucuguccacugaaa

SEQ ID NO: 687292 - RNA, 19 nt, Homo sapiens
  misc_RNA (1)...(19): siRNA sense strand
agaaugcccaggucacuua

SEQ ID NO: 687293 - RNA, 19 nt, Homo sapiens
  misc_RNA (1)...(19): siRNA sense strand
cguaucgucuccagaggua

SEQ ID NO: 687294 - RNA, 19 nt, Homo sapiens
  misc_RNA (1)...(19): siRNA sense strand
caccaccucuguccacuga

SEQ ID NO: 687295 - RNA, 19 nt, Homo sapiens
  misc_RNA (1)...(19): siRNA sense strand
gaaaaguggcauacaaauu

SEQ ID NO: 687296 - RNA, 19 nt, Homo sapiens
  misc_RNA (1)...(19): siRNA sense strand
uggcagacauuaacgacaa

SEQ ID NO: 687297 - RNA, 19 nt, Homo sapiens
  misc_RNA (1)...(19): siRNA sense strand
cuacucagcguauauccua

SEQ ID NO: 687298 - RNA, 19 nt, Homo sapiens
  misc_RNA (1)...(19): siRNA sense strand
gcauacaaauuccggaaaa

SEQ ID NO: 687299 - RNA, 19 nt, Homo sapiens
  misc_RNA (1)...(19): siRNA sense strand
ccucguauaucuccaucaa

SEQ ID NO: 687300 - RNA, 19 nt, Homo sapiens
  misc_RNA (1)...(19): siRNA sense strand
guuacacacgugauaauuu

SEQ ID NO: 687301 - RNA, 19 nt, Homo sapiens
  misc_RNA (1)...(19): siRNA sense strand
ugaaaauacuggggaaaua

SEQ ID NO: 687302 - RNA, 19 nt, Homo sapiens
  misc_RNA (1)...(19): siRNA sense strand
cgcggugucugauaaauau

SEQ ID NO: 687303 - RNA, 19 nt, Homo sapiens
  misc_RNA (1)...(19): siRNA sense strand
cagacaugcucaucaguca

SEQ ID NO: 687304 - RNA, 19 nt, Homo sapiens
  misc_RNA (1)...(19): siRNA sense strand
caauagaccagaagugauc

SEQ ID NO: 687305 - RNA, 19 nt, Homo sapiens
  misc_RNA (1)...(19): siRNA sense strand
uggaagauguaaaugacaa

SEQ ID NO: 687306 - RNA, 19 nt, Homo sapiens
  misc_RNA (1)...(19): siRNA sense strand
gcacguggcagacauuaac

SEQ ID NO: 687307 - RNA, 19 nt, Homo sapiens
  misc_RNA (1)...(19): siRNA sense strand
cagaagagacggacaaagg

SEQ ID NO: 687308 - RNA, 19 nt, Homo sapiens
  misc_RNA (1)...(19): siRNA sense strand
gagcccugcuggacagaga

SEQ ID NO: 687309 - RNA, 19 nt, Homo sapiens
  misc_RNA (1)...(19): siRNA sense strand
ggccucagaucuaggaaca

SEQ ID NO: 687310 - RNA, 19 nt, Homo sapiens
  misc_RNA (1)...(19): siRNA sense strand
gaaauacaagccgaagaug

SEQ ID NO: 687311 - RNA, 19 nt, Homo sapiens
  misc_RNA (1)...(19): siRNA sense strand
aaagaauggucaaguuguc

SEQ ID NO: 687312 - RNA, 19 nt, Homo sapiens
  misc_RNA (1)...(19): siRNA sense strand
gcggaagagucaccugauc

SEQ ID NO: 687313 - RNA, 19 nt, Homo sapiens
  misc_RNA (1)...(19): siRNA sense strand
ugcaaucuuucgacuauga

SEQ ID NO: 687314 - RNA, 19 nt, Homo sapiens
  misc_RNA (1)...(19): siRNA sense strand
ccgaaguccugaccgaguu

SEQ ID NO: 687315 - RNA, 19 nt, Homo sapiens
  misc_RNA (1)...(19): siRNA sense strand
gaaauauuuggaccgagaa

SEQ ID NO: 687316 - RNA, 19 nt, Homo sapiens
  misc_RNA (1)...(19): siRNA sense strand
gauuagugacaaggaaaua

SEQ ID NO: 687317 - RNA, 19 nt, Homo sapiens
  misc_RNA (1)...(19): siRNA sense strand
uggguaauaucuccaagga

SEQ ID NO: 687318 - RNA, 19 nt, Homo sapiens
  misc_RNA (1)...(19): siRNA sense strand
gaccugcagcuacugguaa

SEQ ID NO: 687319 - RNA, 19 nt, Homo sapiens
  misc_RNA (1)...(19): siRNA sense strand
ccaggucgaagaucuagaa

SEQ ID NO: 687320 - RNA, 19 nt, Homo sapiens
  misc_RNA (1)...(19): siRNA sense strand
uugaggagguacaggcuuu

SEQ ID NO: 687321 - RNA, 19 nt, Homo sapiens
  misc_RNA (1)...(19): siRNA sense strand
auggucaaguugucuguua

SEQ ID NO: 687322 - RNA, 19 nt, Homo sapiens
  misc_RNA (1)...(19): siRNA sense strand
agaccagaagugaucauua

SEQ ID NO: 687323 - RNA, 19 nt, Homo sapiens
  misc_RNA (1)...(19): siRNA sense strand
gaaaauacuggggaaauau

SEQ ID NO: 687324 - RNA, 19 nt, Homo sapiens
  misc_RNA (1)...(19): siRNA sense strand
ucaggagggcugugagaaa

SEQ ID NO: 687325 - RNA, 19 nt, Homo sapiens
  misc_RNA (1)...(19): siRNA sense strand
gauccgagaccugcagcua

SEQ ID NO: 687326 - RNA, 19 nt, Homo sapiens
  misc_RNA (1)...(19): siRNA sense strand
acgcagcucuuugcucuga

SEQ ID NO: 687327 - RNA, 19 nt, Homo sapiens
  misc_RNA (1)...(19): siRNA sense strand
acacccugguugaggauaa

SEQ ID NO: 687328 - RNA, 19 nt, Homo sapiens
  misc_RNA (1)...(19): siRNA sense strand
gcauccacgugacaguguu

SEQ ID NO: 687329 - RNA, 19 nt, Homo sapiens
  misc_RNA (1)...(19): siRNA sense strand
guuaacauccguagauuuu

SEQ ID NO: 687330 - RNA, 19 nt, Homo sapiens
  misc_RNA (1)...(19): siRNA sense strand
cguauauccuagagaacaa

SEQ ID NO: 687331 - RNA, 19 nt, Homo sapiens
  misc_RNA (1)...(19): siRNA sense strand
gugauggccucagaucuag

SEQ ID NO: 687332 - RNA, 19 nt, Homo sapiens
  misc_RNA (1)...(19): siRNA sense strand
uaauugccuucuugagugu

SEQ ID NO: 687333 - RNA, 19 nt, Homo sapiens
  misc_RNA (1)...(19): siRNA sense strand
aaaugacaauagaccagaa

SEQ ID NO: 687334 - RNA, 19 nt, Homo sapiens
  misc_RNA (1)...(19): siRNA sense strand
ggggaaauaucaauagcaa

SEQ ID NO: 687335 - RNA, 19 nt, Homo sapiens
  misc_RNA (1)...(19): siRNA sense strand
aaaacaaacuccguuauuc

SEQ ID NO: 687336 - RNA, 19 nt, Homo sapiens
  misc_RNA (1)...(19): siRNA sense strand
cgagugaaaguccuugaga

SEQ ID NO: 687337 - RNA, 19 nt, Homo sapiens
  misc_RNA (1)...(19): siRNA sense strand
uaacauccguagauuuuca

SEQ ID NO: 687338 - RNA, 19 nt, Homo sapiens
  misc_RNA (1)...(19): siRNA sense strand
gauucgagccuuacacucu

SEQ ID NO: 687339 - RNA, 19 nt, Homo sapiens
  misc_RNA (1)...(19): siRNA sense strand
gaacgauucgagccuuaca

SEQ ID NO: 687340 - RNA, 19 nt, Homo sapiens
  misc_RNA (1)...(19): siRNA sense strand
cggugucugauaaauauua

SEQ ID NO: 687341 - RNA, 19 nt, Homo sapiens
  misc_RNA (1)...(19): siRNA sense strand
ugacaaggaaauauuugga

SEQ ID NO: 687342 - RNA, 19 nt, Homo sapiens
  misc_RNA (1)...(19): siRNA sense strand
ugggaacgcugugggaaau

SEQ ID NO: 687343 - RNA, 19 nt, Homo sapiens
  misc_RNA (1)...(19): siRNA sense strand
acgacaacccuccuacuuu

SEQ ID NO: 687344 - RNA, 19 nt, Homo sapiens
  misc_RNA (1)...(19): siRNA sense strand
auagauuagugacaaggaa

SEQ ID NO: 687345 - RNA, 19 nt, Homo sapiens
  misc_RNA (1)...(19): siRNA sense strand
aauacaagccgaagaugug

SEQ ID NO: 687346 - RNA, 19 nt, Homo sapiens
  misc_RNA (1)...(19): siRNA sense strand
ccgcggugucugauaaaua

SEQ ID NO: 687347 - RNA, 19 nt, Homo sapiens
  misc_RNA (1)...(19): siRNA sense strand
ugaccaagacucuggaaag

SEQ ID NO: 687348 - RNA, 19 nt, Homo sapiens
  misc_RNA (1)...(19): siRNA sense strand
ucguauaucuccaucaacu

SEQ ID NO: 687349 - RNA, 19 nt, Homo sapiens
  misc_RNA (1)...(19): siRNA sense strand
agugauggccucagaucua

SEQ ID NO: 687350 - RNA, 19 nt, Homo sapiens
  misc_RNA (1)...(19): siRNA sense strand
gucucuaucuacaauauca

SEQ ID NO: 687351 - RNA, 19 nt, Homo sapiens
  misc_RNA (1)...(19): siRNA sense strand
ggaacgcugugggaaaucg

SEQ ID NO: 687352 - RNA, 19 nt, Homo sapiens
  misc_RNA (1)...(19): siRNA sense strand
aaaaguggcauacaaauuc

SEQ ID NO: 687353 - RNA, 19 nt, Homo sapiens
  misc_RNA (1)...(19): siRNA sense strand
cugaggcgcuggcacaagu

SEQ ID NO: 687354 - RNA, 19 nt, Homo sapiens
  misc_RNA (1)...(19): siRNA sense strand
gcugccaucuccugugucu

SEQ ID NO: 687355 - RNA, 19 nt, Homo sapiens
  misc_RNA (1)...(19): siRNA sense strand
gguaggacgcagcucuuug

SEQ ID NO: 687356 - RNA, 19 nt, Homo sapiens
  misc_RNA (1)...(19): siRNA sense strand
gagaaugcccaggucacuu

SEQ ID NO: 687357 - RNA, 19 nt, Homo sapiens
  misc_RNA (1)...(19): siRNA sense strand
ucucuucccgggacaguaa

SEQ ID NO: 687358 - RNA, 19 nt, Homo sapiens
  misc_RNA (1)...(19): siRNA sense strand
caggagggcugugagaaaa

SEQ ID NO: 687359 - RNA, 19 nt, Homo sapiens
  misc_RNA (1)...(19): siRNA sense strand
gcccaacuacgcagacaug

SEQ ID NO: 687360 - RNA, 19 nt, Homo sapiens
  misc_RNA (1)...(19): siRNA sense strand
guauaucuccaucaacucu

SEQ ID NO: 687361 - RNA, 19 nt, Homo sapiens
  misc_RNA (1)...(19): siRNA sense strand
gcguauauccuagagaaca

SEQ ID NO: 687362 - RNA, 19 nt, Homo sapiens
  misc_RNA (1)...(19): siRNA sense strand
ccuccuacuuucccucaug

SEQ ID NO: 687363 - RNA, 19 nt, Homo sapiens
  misc_RNA (1)...(19): siRNA sense strand
cacgugauaauuuaccuuu

SEQ ID NO: 687364 - RNA, 19 nt, Homo sapiens
  misc_RNA (1)...(19): siRNA sense strand
gcuccuucguggguaauau

SEQ ID NO: 687365 - RNA, 19 nt, Homo sapiens
  misc_RNA (1)...(19): siRNA sense strand
caacggauuuaccgaguua

SEQ ID NO: 687366 - RNA, 19 nt, Homo sapiens
  misc_RNA (1)...(19): siRNA sense strand
gcaagugacugacaucaau

SEQ ID NO: 687367 - RNA, 19 nt, Homo sapiens
  misc_RNA (1)...(19): siRNA sense strand
ccaccuaugucucuauuaa

SEQ ID NO: 687368 - RNA, 19 nt, Homo sapiens
  misc_RNA (1)...(19): siRNA sense strand
gaagaauggucaaguuguc

SEQ ID NO: 687369 - RNA, 19 nt, Homo sapiens
  misc_RNA (1)...(19): siRNA sense strand
gaagauuaguccugcuaug

SEQ ID NO: 687370 - RNA, 19 nt, Homo sapiens
  misc_RNA (1)...(19): siRNA sense strand
ggaaauacaagcugaagau

SEQ ID NO: 687371 - RNA, 19 nt, Homo sapiens
  misc_RNA (1)...(19): siRNA sense strand
gaaacuguacggaauagaa

SEQ ID NO: 687372 - RNA, 19 nt, Homo sapiens
  misc_RNA (1)...(19): siRNA sense strand
ggacaaaagugcucauuuc

SEQ ID NO: 687373 - RNA, 19 nt, Homo sapiens
  misc_RNA (1)...(19): siRNA sense strand
ccucagaccuuacccucua

SEQ ID NO: 687374 - RNA, 19 nt, Homo sapiens
  misc_RNA (1)...(19): siRNA sense strand
ccgaaagucuggaaguaaa

SEQ ID NO: 687375 - RNA, 19 nt, Homo sapiens
  misc_RNA (1)...(19): siRNA sense strand
gaguuaaaguccuugagaa

SEQ ID NO: 687376 - RNA, 19 nt, Homo sapiens
  misc_RNA (1)...(19): siRNA sense strand
ugacaguguuggauacaaa

SEQ ID NO: 687377 - RNA, 19 nt, Homo sapiens
  misc_RNA (1)...(19): siRNA sense strand
gcaaugagaauucuagagu

SEQ ID NO: 687378 - RNA, 19 nt, Homo sapiens
  misc_RNA (1)...(19): siRNA sense strand
gagugaaacuguacggaau

SEQ ID NO: 687379 - RNA, 19 nt, Homo sapiens
  misc_RNA (1)...(19): siRNA sense strand
gacaauagaccugaaguga

SEQ ID NO: 687380 - RNA, 19 nt, Homo sapiens
  misc_RNA (1)...(19): siRNA sense strand
ggaacaguaauucuucuuu

SEQ ID NO: 687381 - RNA, 19 nt, Homo sapiens
  misc_RNA (1)...(19): siRNA sense strand
ccacuuagcagcaaugugu

SEQ ID NO: 687382 - RNA, 19 nt, Homo sapiens
  misc_RNA (1)...(19): siRNA sense strand
caaugagaauucuagaguu

SEQ ID NO: 687383 - RNA, 19 nt, Homo sapiens
  misc_RNA (1)...(19): siRNA sense strand
uaugagcaguuuagagauu

SEQ ID NO: 687384 - RNA, 19 nt, Homo sapiens
  misc_RNA (1)...(19): siRNA sense strand
gagcuuuccuacagaccua

SEQ ID NO: 687385 - RNA, 19 nt, Homo sapiens
  misc_RNA (1)...(19): siRNA sense strand
cggaauagaaauagaagua

SEQ ID NO: 687386 - RNA, 19 nt, Homo sapiens
  misc_RNA (1)...(19): siRNA sense strand
ucauugagacuguuuguuu

SEQ ID NO: 687387 - RNA, 19 nt, Homo sapiens
  misc_RNA (1)...(19): siRNA sense strand
ggccgaaagucuggaagua

SEQ ID NO: 687388 - RNA, 19 nt, Homo sapiens
  misc_RNA (1)...(19): siRNA sense strand
uuaaaguccugguugaaga

SEQ ID NO: 687389 - RNA, 19 nt, Homo sapiens
  misc_RNA (1)...(19): siRNA sense strand
ggucuccucucuccaccua

SEQ ID NO: 687390 - RNA, 19 nt, Homo sapiens
  misc_RNA (1)...(19): siRNA sense strand
gaaaacaacgccagaggua

SEQ ID NO: 687391 - RNA, 19 nt, Homo sapiens
  misc_RNA (1)...(19): siRNA sense strand
ucucugcuauuccagcuua

SEQ ID NO: 687392 - RNA, 19 nt, Homo sapiens
  misc_RNA (1)...(19): siRNA sense strand
ugaacucccuccagagcua

SEQ ID NO: 687393 - RNA, 19 nt, Homo sapiens
  misc_RNA (1)...(19): siRNA sense strand
caaguugucuguucuaucc

SEQ ID NO: 687394 - RNA, 19 nt, Homo sapiens
  misc_RNA (1)...(19): siRNA sense strand
accauuacaucucuguuua

SEQ ID NO: 687395 - RNA, 19 nt, Homo sapiens
  misc_RNA (1)...(19): siRNA sense strand
gaccugaagugaccauuac

SEQ ID NO: 687396 - RNA, 19 nt, Homo sapiens
  misc_RNA (1)...(19): siRNA sense strand
guacggaauagaaauagaa

SEQ ID NO: 687397 - RNA, 19 nt, Homo sapiens
  misc_RNA (1)...(19): siRNA sense strand
gaccauuacaucucuguuu

SEQ ID NO: 687398 - RNA, 19 nt, Homo sapiens
  misc_RNA (1)...(19): siRNA sense strand
ggugucuggugaacuuuaa

SEQ ID NO: 687399 - RNA, 19 nt, Homo sapiens
  misc_RNA (1)...(19): siRNA sense strand
agauagagaugcgcucaaa

SEQ ID NO: 687400 - RNA, 19 nt, Homo sapiens
  misc_RNA (1)...(19): siRNA sense strand
ggaaauaucaacagcaaaa

SEQ ID NO: 687401 - RNA, 19 nt, Homo sapiens
  misc_RNA (1)...(19): siRNA sense strand
gcauacaaauucuggaaaa

SEQ ID NO: 687402 - RNA, 19 nt, Homo sapiens
  misc_RNA (1)...(19): siRNA sense strand
ggaagaauggucaaguugu

SEQ ID NO: 687403 - RNA, 19 nt, Homo sapiens
  misc_RNA (1)...(19): siRNA sense strand
ggacgcagcuuuucucucu

SEQ ID NO: 687404 - RNA, 19 nt, Homo sapiens
  misc_RNA (1)...(19): siRNA sense strand
gcagucgucuccugugucu

SEQ ID NO: 687405 - RNA, 19 nt, Homo sapiens
  misc_RNA (1)...(19): siRNA sense strand
ccacagaaauucacaucac

SEQ ID NO: 687406 - RNA, 19 nt, Homo sapiens
  misc_RNA (1)...(19): siRNA sense strand
gaagugaccauuacaucuc

SEQ ID NO: 687407 - RNA, 19 nt, Homo sapiens
  misc_RNA (1)...(19): siRNA sense strand
gaaaaguggcauacaaauu

SEQ ID NO: 687408 - RNA, 19 nt, Homo sapiens
  misc_RNA (1)...(19): siRNA sense strand
gcaccucagggaacaguaa

SEQ ID NO: 687409 - RNA, 19 nt, Homo sapiens
  misc_RNA (1)...(19): siRNA sense strand
cagagguacuuccaucuuc

SEQ ID NO: 687410 - RNA, 19 nt, Homo sapiens
  misc_RNA (1)...(19): siRNA sense strand
ugaaaauacuggggaaaua

SEQ ID NO: 687411 - RNA, 19 nt, Homo sapiens
  misc_RNA (1)...(19): siRNA sense strand
cgggaagaauggucaaguu

SEQ ID NO: 687412 - RNA, 19 nt, Homo sapiens
  misc_RNA (1)...(19): siRNA sense strand
gaaauacaagcugaagaug

SEQ ID NO: 687413 - RNA, 19 nt, Homo sapiens
  misc_RNA (1)...(19): siRNA sense strand
gguggaagauguaaaugac

SEQ ID NO: 687414 - RNA, 19 nt, Homo sapiens
  misc_RNA (1)...(19): siRNA sense strand
ccaaguuuccuauagaaga

SEQ ID NO: 687415 - RNA, 19 nt, Homo sapiens
  misc_RNA (1)...(19): siRNA sense strand
aauacaagcugaagauggu

SEQ ID NO: 687416 - RNA, 19 nt, Homo sapiens
  misc_RNA (1)...(19): siRNA sense strand
gauuccaaguuuccuauag

SEQ ID NO: 687417 - RNA, 19 nt, Homo sapiens
  misc_RNA (1)...(19): siRNA sense strand
gggaagaauggucaaguug

SEQ ID NO: 687418 - RNA, 19 nt, Homo sapiens
  misc_RNA (1)...(19): siRNA sense strand
uggaagauguaaaugacaa

SEQ ID NO: 687419 - RNA, 19 nt, Homo sapiens
  misc_RNA (1)...(19): siRNA sense strand
ggagcacguuauccacuuc

SEQ ID NO: 687420 - RNA, 19 nt, Homo sapiens
  misc_RNA (1)...(19): siRNA sense strand
gcccaacuaugcagacaca

SEQ ID NO: 687421 - RNA, 19 nt, Homo sapiens
  misc_RNA (1)...(19): siRNA sense strand
gaccgagacuccgggaaga

SEQ ID NO: 687422 - RNA, 19 nt, Homo sapiens
  misc_RNA (1)...(19): siRNA sense strand
ucauuucgguggaagaugu

SEQ ID NO: 687423 - RNA, 19 nt, Homo sapiens
  misc_RNA (1)...(19): siRNA sense strand
aaacuguacggaauagaaa

SEQ ID NO: 687424 - RNA, 19 nt, Homo sapiens
  misc_RNA (1)...(19): siRNA sense strand
gcucugugcuccuuugacu

SEQ ID NO: 687425 - RNA, 19 nt, Homo sapiens
  misc_RNA (1)...(19): siRNA sense strand
gaccugggcagucuucaga

SEQ ID NO: 687426 - RNA, 19 nt, Homo sapiens
  misc_RNA (1)...(19): siRNA sense strand
ccagcuccgcggaagauua

SEQ ID NO: 687427 - RNA, 19 nt, Homo sapiens
  misc_RNA (1)...(19): siRNA sense strand
cgcaucgucucuagaggua

SEQ ID NO: 687428 - RNA, 19 nt, Homo sapiens
  misc_RNA (1)...(19): siRNA sense strand
gugcccaccucacacuuug

SEQ ID NO: 687429 - RNA, 19 nt, Homo sapiens
  misc_RNA (1)...(19): siRNA sense strand
gcauccaugugacaguguu

SEQ ID NO: 687430 - RNA, 19 nt, Homo sapiens
  misc_RNA (1)...(19): siRNA sense strand
gaccuauucucaggaguuc

SEQ ID NO: 687431 - RNA, 19 nt, Homo sapiens
  misc_RNA (1)...(19): siRNA sense strand
cuggaggccucagaccuua

SEQ ID NO: 687432 - RNA, 19 nt, Homo sapiens
  misc_RNA (1)...(19): siRNA sense strand
cuaugucucuauuaacuca

SEQ ID NO: 687433 - RNA, 19 nt, Homo sapiens
  misc_RNA (1)...(19): siRNA sense strand
gguugaagacagagugaaa

SEQ ID NO: 687434 - RNA, 19 nt, Homo sapiens
  misc_RNA (1)...(19): siRNA sense strand
gguucgagcuuuccuacag

SEQ ID NO: 687435 - RNA, 19 nt, Homo sapiens
  misc_RNA (1)...(19): siRNA sense strand
gaaaauacuggggaaauau

SEQ ID NO: 687436 - RNA, 19 nt, Homo sapiens
  misc_RNA (1)...(19): siRNA sense strand
cgaguuaaaguccuugaga

SEQ ID NO: 687437 - RNA, 19 nt, Homo sapiens
  misc_RNA (1)...(19): siRNA sense strand
caugugacaguguuggaua

SEQ ID NO: 687438 - RNA, 19 nt, Homo sapiens
  misc_RNA (1)...(19): siRNA sense strand
gccgaaagucuggaaguaa

SEQ ID NO: 687439 - RNA, 19 nt, Homo sapiens
  misc_RNA (1)...(19): siRNA sense strand
caaguuuccuauagaagac

SEQ ID NO: 687440 - RNA, 19 nt, Homo sapiens
  misc_RNA (1)...(19): siRNA sense strand
guucgagcuuuccuacaga

SEQ ID NO: 687441 - RNA, 19 nt, Homo sapiens
  misc_RNA (1)...(19): siRNA sense strand
acuaugagcaguuuagaga

SEQ ID NO: 687442 - RNA, 19 nt, Homo sapiens
  misc_RNA (1)...(19): siRNA sense strand
uuaaaguccuugagaacgu

SEQ ID NO: 687443 - RNA, 19 nt, Homo sapiens
  misc_RNA (1)...(19): siRNA sense strand
ucaacggauuuaccgaguu

SEQ ID NO: 687444 - RNA, 19 nt, Homo sapiens
  misc_RNA (1)...(19): siRNA sense strand
agaccugaagugaccauua

SEQ ID NO: 687445 - RNA, 19 nt, Homo sapiens
  misc_RNA (1)...(19): siRNA sense strand
aaaacaaucucugcuauuc

SEQ ID NO: 687446 - RNA, 19 nt, Homo sapiens
  misc_RNA (1)...(19): siRNA sense strand
acagugcgcauccauguga

SEQ ID NO: 687447 - RNA, 19 nt, Homo sapiens
  misc_RNA (1)...(19): siRNA sense strand
gaaugacaaugccccagaa

SEQ ID NO: 687448 - RNA, 19 nt, Homo sapiens
  misc_RNA (1)...(19): siRNA sense strand
ucuccgugauugccuauga

SEQ ID NO: 687449 - RNA, 19 nt, Homo sapiens
  misc_RNA (1)...(19): siRNA sense strand
ucacaucacccugcaagug

SEQ ID NO: 687450 - RNA, 19 nt, Homo sapiens
  misc_RNA (1)...(19): siRNA sense strand
ucagggaacaguaauucuu

SEQ ID NO: 687451 - RNA, 19 nt, Homo sapiens
  misc_RNA (1)...(19): siRNA sense strand
gugaaacuguacggaauag

SEQ ID NO: 687452 - RNA, 19 nt, Homo sapiens
  misc_RNA (1)...(19): siRNA sense strand
gcuauuccagcuuaaugaa

SEQ ID NO: 687453 - RNA, 19 nt, Homo sapiens
  misc_RNA (1)...(19): siRNA sense strand
ggaagauuaguccugcuau

SEQ ID NO: 687454 - RNA, 19 nt, Homo sapiens
  misc_RNA (1)...(19): siRNA sense strand
ggucaaguugucuguucua

SEQ ID NO: 687455 - RNA, 19 nt, Homo sapiens
  misc_RNA (1)...(19): siRNA sense strand
caaggaagagucaccugau

SEQ ID NO: 687456 - RNA, 19 nt, Homo sapiens
  misc_RNA (1)...(19): siRNA sense strand
uaauccaccugcuuucucu

SEQ ID NO: 687457 - RNA, 19 nt, Homo sapiens
  misc_RNA (1)...(19): siRNA sense strand
uccaggagaaucuaucuuu

SEQ ID NO: 687458 - RNA, 19 nt, Homo sapiens
  misc_RNA (1)...(19): siRNA sense strand
ggggaaauaucaacagcaa

SEQ ID NO: 687459 - RNA, 19 nt, Homo sapiens
  misc_RNA (1)...(19): siRNA sense strand
caggagaaucuaucuuuua

SEQ ID NO: 687460 - RNA, 19 nt, Homo sapiens
  misc_RNA (1)...(19): siRNA sense strand
ccaggagaaucuaucuuuu

SEQ ID NO: 687461 - RNA, 19 nt, Homo sapiens
  misc_RNA (1)...(19): siRNA sense strand
agagguaggacgcagcuuu

SEQ ID NO: 687462 - RNA, 19 nt, Homo sapiens
  misc_RNA (1)...(19): siRNA sense strand
ggauugaaaggguggacaa

SEQ ID NO: 687463 - RNA, 19 nt, Homo sapiens
  misc_RNA (1)...(19): siRNA sense strand
aaaguggcauacaaauucu

SEQ ID NO: 687464 - RNA, 19 nt, Homo sapiens
  misc_RNA (1)...(19): siRNA sense strand
ccagagguacuuccaucuu

SEQ ID NO: 687465 - RNA, 19 nt, Homo sapiens
  misc_RNA (1)...(19): siRNA sense strand
caacggauuuaccgaguua

SEQ ID NO: 687466 - RNA, 19 nt, Homo sapiens
  misc_RNA (1)...(19): siRNA sense strand
gcaagugacugacaucaau

SEQ ID NO: 687467 - RNA, 19 nt, Homo sapiens
  misc_RNA (1)...(19): siRNA sense strand
ccaccuaugucucuauuaa

SEQ ID NO: 687468 - RNA, 19 nt, Homo sapiens
  misc_RNA (1)...(19): siRNA sense strand
gaagaauggucaaguuguc

SEQ ID NO: 687469 - RNA, 19 nt, Homo sapiens
  misc_RNA (1)...(19): siRNA sense strand
gaagauuaguccugcuaug

SEQ ID NO: 687470 - RNA, 19 nt, Homo sapiens
  misc_RNA (1)...(19): siRNA sense strand
ggaaauacaagcugaagau

SEQ ID NO: 687471 - RNA, 19 nt, Homo sapiens
  misc_RNA (1)...(19): siRNA sense strand
gaaacuguacggaauagaa

SEQ ID NO: 687472 - RNA, 19 nt, Homo sapiens
  misc_RNA (1)...(19): siRNA sense strand
ggacaaaagugcucauuuc

SEQ ID NO: 687473 - RNA, 19 nt, Homo sapiens
  misc_RNA (1)...(19): siRNA sense strand
ccucagaccuuacccucua

SEQ ID NO: 687474 - RNA, 19 nt, Homo sapiens
  misc_RNA (1)...(19): siRNA sense strand
ccgaaagucuggaaguaaa

SEQ ID NO: 687475 - RNA, 19 nt, Homo sapiens
  misc_RNA (1)...(19): siRNA sense strand
gaguuaaaguccuugagaa

SEQ ID NO: 687476 - RNA, 19 nt, Homo sapiens
  misc_RNA (1)...(19): siRNA sense strand
ugacaguguuggauacaaa

SEQ ID NO: 687477 - RNA, 19 nt, Homo sapiens
  misc_RNA (1)...(19): siRNA sense strand
gcaaugagaauucuagagu

SEQ ID NO: 687478 - RNA, 19 nt, Homo sapiens
  misc_RNA (1)...(19): siRNA sense strand
gagugaaacuguacggaau

SEQ ID NO: 687479 - RNA, 19 nt, Homo sapiens
  misc_RNA (1)...(19): siRNA sense strand
gacaauagaccugaaguga

SEQ ID NO: 687480 - RNA, 19 nt, Homo sapiens
  misc_RNA (1)...(19): siRNA sense strand
ggaacaguaauucuucuuu

SEQ ID NO: 687481 - RNA, 19 nt, Homo sapiens
  misc_RNA (1)...(19): siRNA sense strand
ccacuuagcagcaaugugu

SEQ ID NO: 687482 - RNA, 19 nt, Homo sapiens
  misc_RNA (1)...(19): siRNA sense strand
caaugagaauucuagaguu

SEQ ID NO: 687483 - RNA, 19 nt, Homo sapiens
  misc_RNA (1)...(19): siRNA sense strand
uaugagcaguuuagagauu

SEQ ID NO: 687484 - RNA, 19 nt, Homo sapiens
  misc_RNA (1)...(19): siRNA sense strand
gagcuuuccuacagaccua

SEQ ID NO: 687485 - RNA, 19 nt, Homo sapiens
  misc_RNA (1)...(19): siRNA sense strand
cggaauagaaauagaagua

SEQ ID NO: 687486 - RNA, 19 nt, Homo sapiens
  misc_RNA (1)...(19): siRNA sense strand
ucauugagacuguuuguuu

SEQ ID NO: 687487 - RNA, 19 nt, Homo sapiens
  misc_RNA (1)...(19): siRNA sense strand
ggccgaaagucuggaagua

SEQ ID NO: 687488 - RNA, 19 nt, Homo sapiens
  misc_RNA (1)...(19): siRNA sense strand
uuaaaguccugguugaaga

SEQ ID NO: 687489 - RNA, 19 nt, Homo sapiens
  misc_RNA (1)...(19): siRNA sense strand
ggucuccucucuccaccua

SEQ ID NO: 687490 - RNA, 19 nt, Homo sapiens
  misc_RNA (1)...(19): siRNA sense strand
gaaaacaacgccagaggua

SEQ ID NO: 687491 - RNA, 19 nt, Homo sapiens
  misc_RNA (1)...(19): siRNA sense strand
ucucugcuauuccagcuua

SEQ ID NO: 687492 - RNA, 19 nt, Homo sapiens
  misc_RNA (1)...(19): siRNA sense strand
ugaacucccuccagagcua

SEQ ID NO: 687493 - RNA, 19 nt, Homo sapiens
  misc_RNA (1)...(19): siRNA sense strand
caaguugucuguucuaucc

SEQ ID NO: 687494 - RNA, 19 nt, Homo sapiens
  misc_RNA (1)...(19): siRNA sense strand
accauuacaucucuguuua

SEQ ID NO: 687495 - RNA, 19 nt, Homo sapiens
  misc_RNA (1)...(19): siRNA sense strand
gaccugaagugaccauuac

SEQ ID NO: 687496 - RNA, 19 nt, Homo sapiens
  misc_RNA (1)...(19): siRNA sense strand
guacggaauagaaauagaa

SEQ ID NO: 687497 - RNA, 19 nt, Homo sapiens
  misc_RNA (1)...(19): siRNA sense strand
gaccauuacaucucuguuu

SEQ ID NO: 687498 - RNA, 19 nt, Homo sapiens
  misc_RNA (1)...(19): siRNA sense strand
ggugucuggugaacuuuaa

SEQ ID NO: 687499 - RNA, 19 nt, Homo sapiens
  misc_RNA (1)...(19): siRNA sense strand
agauagagaugcgcucaaa

SEQ ID NO: 687500 - RNA, 19 nt, Homo sapiens
  misc_RNA (1)...(19): siRNA sense strand
ggaaauaucaacagcaaaa

SEQ ID NO: 687501 - RNA, 19 nt, Homo sapiens
  misc_RNA (1)...(19): siRNA sense strand
gcauacaaauucuggaaaa

SEQ ID NO: 687502 - RNA, 19 nt, Homo sapiens
  misc_RNA (1)...(19): siRNA sense strand
ggaagaauggucaaguugu

SEQ ID NO: 687503 - RNA, 19 nt, Homo sapiens
  misc_RNA (1)...(19): siRNA sense strand
ggacgcagcuuuucucucu

SEQ ID NO: 687504 - RNA, 19 nt, Homo sapiens
  misc_RNA (1)...(19): siRNA sense strand
gcagucgucuccugugucu

SEQ ID NO: 687505 - RNA, 19 nt, Homo sapiens
  misc_RNA (1)...(19): siRNA sense strand
ccacagaaauucacaucac

SEQ ID NO: 687506 - RNA, 19 nt, Homo sapiens
  misc_RNA (1)...(19): siRNA sense strand
gaagugaccauuacaucuc

SEQ ID NO: 687507 - RNA, 19 nt, Homo sapiens
  misc_RNA (1)...(19): siRNA sense strand
gaaaaguggcauacaaauu

SEQ ID NO: 687508 - RNA, 19 nt, Homo sapiens
  misc_RNA (1)...(19): siRNA sense strand
gcaccucagggaacaguaa

SEQ ID NO: 687509 - RNA, 19 nt, Homo sapiens
  misc_RNA (1)...(19): siRNA sense strand
cagagguacuuccaucuuc

SEQ ID NO: 687510 - RNA, 19 nt, Homo sapiens
  misc_RNA (1)...(19): siRNA sense strand
ugaaaauacuggggaaaua

SEQ ID NO: 687511 - RNA, 19 nt, Homo sapiens
  misc_RNA (1)...(19): siRNA sense strand
cgggaagaauggucaaguu

SEQ ID NO: 687512 - RNA, 19 nt, Homo sapiens
  misc_RNA (1)...(19): siRNA sense strand
gaaauacaagcugaagaug

SEQ ID NO: 687513 - RNA, 19 nt, Homo sapiens
  misc_RNA (1)...(19): siRNA sense strand
gguggaagauguaaaugac

SEQ ID NO: 687514 - RNA, 19 nt, Homo sapiens
  misc_RNA (1)...(19): siRNA sense strand
ccaaguuuccuauagaaga

SEQ ID NO: 687515 - RNA, 19 nt, Homo sapiens
  misc_RNA (1)...(19): siRNA sense strand
aauacaagcugaagauggu

SEQ ID NO: 687516 - RNA, 19 nt, Homo sapiens
  misc_RNA (1)...(19): siRNA sense strand
gauuccaaguuuccuauag

SEQ ID NO: 687517 - RNA, 19 nt, Homo sapiens
  misc_RNA (1)...(19): siRNA sense strand
gggaagaauggucaaguug

SEQ ID NO: 687518 - RNA, 19 nt, Homo sapiens
  misc_RNA (1)...(19): siRNA sense strand
uggaagauguaaaugacaa

SEQ ID NO: 687519 - RNA, 19 nt, Homo sapiens
  misc_RNA (1)...(19): siRNA sense strand
ggagcacguuauccacuuc

SEQ ID NO: 687520 - RNA, 19 nt, Homo sapiens
  misc_RNA (1)...(19): siRNA sense strand
gcccaacuaugcagacaca

SEQ ID NO: 687521 - RNA, 19 nt, Homo sapiens
  misc_RNA (1)...(19): siRNA sense strand
gaccgagacuccgggaaga

SEQ ID NO: 687522 - RNA, 19 nt, Homo sapiens
  misc_RNA (1)...(19): siRNA sense strand
ucauuucgguggaagaugu

SEQ ID NO: 687523 - RNA, 19 nt, Homo sapiens
  misc_RNA (1)...(19): siRNA sense strand
aaacuguacggaauagaaa

SEQ ID NO: 687524 - RNA, 19 nt, Homo sapiens
  misc_RNA (1)...(19): siRNA sense strand
gcucugugcuccuuugacu

SEQ ID NO: 687525 - RNA, 19 nt, Homo sapiens
  misc_RNA (1)...(19): siRNA sense strand
gaccugggcagucuucaga

SEQ ID NO: 687526 - RNA, 19 nt, Homo sapiens
  misc_RNA (1)...(19): siRNA sense strand
ccagcuccgcggaagauua

SEQ ID NO: 687527 - RNA, 19 nt, Homo sapiens
  misc_RNA (1)...(19): siRNA sense strand
cgcaucgucucuagaggua

SEQ ID NO: 687528 - RNA, 19 nt, Homo sapiens
  misc_RNA (1)...(19): siRNA sense strand
gugcccaccucacacuuug

SEQ ID NO: 687529 - RNA, 19 nt, Homo sapiens
  misc_RNA (1)...(19): siRNA sense strand
gcauccaugugacaguguu

SEQ ID NO: 687530 - RNA, 19 nt, Homo sapiens
  misc_RNA (1)...(19): siRNA sense strand
gaccuauucucaggaguuc

SEQ ID NO: 687531 - RNA, 19 nt, Homo sapiens
  misc_RNA (1)...(19): siRNA sense strand
cuggaggccucagaccuua

SEQ ID NO: 687532 - RNA, 19 nt, Homo sapiens
  misc_RNA (1)...(19): siRNA sense strand
cuaugucucuauuaacuca

SEQ ID NO: 687533 - RNA, 19 nt, Homo sapiens
  misc_RNA (1)...(19): siRNA sense strand
gguugaagacagagugaaa

SEQ ID NO: 687534 - RNA, 19 nt, Homo sapiens
  misc_RNA (1)...(19): siRNA sense strand
gguucgagcuuuccuacag

SEQ ID NO: 687535 - RNA, 19 nt, Homo sapiens
  misc_RNA (1)...(19): siRNA sense strand
gaaaauacuggggaaauau

SEQ ID NO: 687536 - RNA, 19 nt, Homo sapiens
  misc_RNA (1)...(19): siRNA sense strand
cgaguuaaaguccuugaga

SEQ ID NO: 687537 - RNA, 19 nt, Homo sapiens
  misc_RNA (1)...(19): siRNA sense strand
caugugacaguguuggaua

SEQ ID NO: 687538 - RNA, 19 nt, Homo sapiens
  misc_RNA (1)...(19): siRNA sense strand
gccgaaagucuggaaguaa

SEQ ID NO: 687539 - RNA, 19 nt, Homo sapiens
  misc_RNA (1)...(19): siRNA sense strand
caaguuuccuauagaagac

SEQ ID NO: 687540 - RNA, 19 nt, Homo sapiens
  misc_RNA (1)...(19): siRNA sense strand
guucgagcuuuccuacaga

SEQ ID NO: 687541 - RNA, 19 nt, Homo sapiens
  misc_RNA (1)...(19): siRNA sense strand
acuaugagcaguuuagaga

SEQ ID NO: 687542 - RNA, 19 nt, Homo sapiens
  misc_RNA (1)...(19): siRNA sense strand
uuaaaguccuugagaacgu

SEQ ID NO: 687543 - RNA, 19 nt, Homo sapiens
  misc_RNA (1)...(19): siRNA sense strand
ucaacggauuuaccgaguu

SEQ ID NO: 687544 - RNA, 19 nt, Homo sapiens
  misc_RNA (1)...(19): siRNA sense strand
agaccugaagugaccauua

SEQ ID NO: 687545 - RNA, 19 nt, Homo sapiens
  misc_RNA (1)...(19): siRNA sense strand
aaaacaaucucugcuauuc

SEQ ID NO: 687546 - RNA, 19 nt, Homo sapiens
  misc_RNA (1)...(19): siRNA sense strand
acagugcgcauccauguga

SEQ ID NO: 687547 - RNA, 19 nt, Homo sapiens
  misc_RNA (1)...(19): siRNA sense strand
gaaugacaaugccccagaa

SEQ ID NO: 687548 - RNA, 19 nt, Homo sapiens
  misc_RNA (1)...(19): siRNA sense strand
ucuccgugauugccuauga

SEQ ID NO: 687549 - RNA, 19 nt, Homo sapiens
  misc_RNA (1)...(19): siRNA sense strand
ucacaucacccugcaagug

SEQ ID NO: 687550 - RNA, 19 nt, Homo sapiens
  misc_RNA (1)...(19): siRNA sense strand
ucagggaacaguaauucuu

SEQ ID NO: 687551 - RNA, 19 nt, Homo sapiens
  misc_RNA (1)...(19): siRNA sense strand
gugaaacuguacggaauag

SEQ ID NO: 687552 - RNA, 19 nt, Homo sapiens
  misc_RNA (1)...(19): siRNA sense strand
gcuauuccagcuuaaugaa

SEQ ID NO: 687553 - RNA, 19 nt, Homo sapiens
  misc_RNA (1)...(19): siRNA sense strand
ggaagauuaguccugcuau

SEQ ID NO: 687554 - RNA, 19 nt, Homo sapiens
  misc_RNA (1)...(19): siRNA sense strand
ggucaaguugucuguucua

SEQ ID NO: 687555 - RNA, 19 nt, Homo sapiens
  misc_RNA (1)...(19): siRNA sense strand
caaggaagagucaccugau

SEQ ID NO: 687556 - RNA, 19 nt, Homo sapiens
  misc_RNA (1)...(19): siRNA sense strand
uaauccaccugcuuucucu

SEQ ID NO: 687557 - RNA, 19 nt, Homo sapiens
  misc_RNA (1)...(19): siRNA sense strand
uccaggagaaucuaucuuu

SEQ ID NO: 687558 - RNA, 19 nt, Homo sapiens
  misc_RNA (1)...(19): siRNA sense strand
ggggaaauaucaacagcaa

SEQ ID NO: 687559 - RNA, 19 nt, Homo sapiens
  misc_RNA (1)...(19): siRNA sense strand
caggagaaucuaucuuuua

SEQ ID NO: 687560 - RNA, 19 nt, Homo sapiens
  misc_RNA (1)...(19): siRNA sense strand
ccaggagaaucuaucuuuu

SEQ ID NO: 687561 - RNA, 19 nt, Homo sapiens
  misc_RNA (1)...(19): siRNA sense strand
agagguaggacgcagcuuu

SEQ ID NO: 687562 - RNA, 19 nt, Homo sapiens
  misc_RNA (1)...(19): siRNA sense strand
ggauugaaaggguggacaa

SEQ ID NO: 687563 - RNA, 19 nt, Homo sapiens
  misc_RNA (1)...(19): siRNA sense strand
aaaguggcauacaaauucu

SEQ ID NO: 687564 - RNA, 19 nt, Homo sapiens
  misc_RNA (1)...(19): siRNA sense strand
ccagagguacuuccaucuu

SEQ ID NO: 687565 - RNA, 19 nt, Homo sapiens
  misc_RNA (1)...(19): siRNA sense strand
gggaacagguauccucuua

SEQ ID NO: 687566 - RNA, 19 nt, Homo sapiens
  misc_RNA (1)...(19): siRNA sense strand
gaacagguauccucuuaca

SEQ ID NO: 687567 - RNA, 19 nt, Homo sapiens
  misc_RNA (1)...(19): siRNA sense strand
ggacgaaggugccaaugga

SEQ ID NO: 687568 - RNA, 19 nt, Homo sapiens
  misc_RNA (1)...(19): siRNA sense strand
gaagacagggugaaacuuu

SEQ ID NO: 687569 - RNA, 19 nt, Homo sapiens
  misc_RNA (1)...(19): siRNA sense strand
gagaaugcccagauuauuu

SEQ ID NO: 687570 - RNA, 19 nt, Homo sapiens
  misc_RNA (1)...(19): siRNA sense strand
caaagagaaugcccagauu

SEQ ID NO: 687571 - RNA, 19 nt, Homo sapiens
  misc_RNA (1)...(19): siRNA sense strand
gcagaucuccuacucaauu

SEQ ID NO: 687572 - RNA, 19 nt, Homo sapiens
  misc_RNA (1)...(19): siRNA sense strand
aauaagcacuucucccuaa

SEQ ID NO: 687573 - RNA, 19 nt, Homo sapiens
  misc_RNA (1)...(19): siRNA sense strand
gaccaucacgucucuauuu

SEQ ID NO: 687574 - RNA, 19 nt, Homo sapiens
  misc_RNA (1)...(19): siRNA sense strand
gcacuucucccuaagaguu

SEQ ID NO: 687575 - RNA, 19 nt, Homo sapiens
  misc_RNA (1)...(19): siRNA sense strand
gggaaguccuccucuauca

SEQ ID NO: 687576 - RNA, 19 nt, Homo sapiens
  misc_RNA (1)...(19): siRNA sense strand
uggcguaucuaccauuuaa

SEQ ID NO: 687577 - RNA, 19 nt, Homo sapiens
  misc_RNA (1)...(19): siRNA sense strand
ugacaguuauuacagauug

SEQ ID NO: 687578 - RNA, 19 nt, Homo sapiens
  misc_RNA (1)...(19): siRNA sense strand
cagguauccucuuacaaua

SEQ ID NO: 687579 - RNA, 19 nt, Homo sapiens
  misc_RNA (1)...(19): siRNA sense strand
gcaaagagaaugcccagau

SEQ ID NO: 687580 - RNA, 19 nt, Homo sapiens
  misc_RNA (1)...(19): siRNA sense strand
caacggaagcucacuuuau

SEQ ID NO: 687581 - RNA, 19 nt, Homo sapiens
  misc_RNA (1)...(19): siRNA sense strand
agaaugcccagauuauuua

SEQ ID NO: 687582 - RNA, 19 nt, Homo sapiens
  misc_RNA (1)...(19): siRNA sense strand
ggguaccucuguccucaua

SEQ ID NO: 687583 - RNA, 19 nt, Homo sapiens
  misc_RNA (1)...(19): siRNA sense strand
ucagauccuucgacuauga

SEQ ID NO: 687584 - RNA, 19 nt, Homo sapiens
  misc_RNA (1)...(19): siRNA sense strand
aaagagaaugcccagauua

SEQ ID NO: 687585 - RNA, 19 nt, Homo sapiens
  misc_RNA (1)...(19): siRNA sense strand
gagacgcgcucaagcaaag

SEQ ID NO: 687586 - RNA, 19 nt, Homo sapiens
  misc_RNA (1)...(19): siRNA sense strand
aaaaguccauugacaguua

SEQ ID NO: 687587 - RNA, 19 nt, Homo sapiens
  misc_RNA (1)...(19): siRNA sense strand
ccaccuaccuucucucaag

SEQ ID NO: 687588 - RNA, 19 nt, Homo sapiens
  misc_RNA (1)...(19): siRNA sense strand
gagaagugacauauucauu

SEQ ID NO: 687589 - RNA, 19 nt, Homo sapiens
  misc_RNA (1)...(19): siRNA sense strand
gauucgaaguuuccuauag

SEQ ID NO: 687590 - RNA, 19 nt, Homo sapiens
  misc_RNA (1)...(19): siRNA sense strand
gguauccucuuacaauauc

SEQ ID NO: 687591 - RNA, 19 nt, Homo sapiens
  misc_RNA (1)...(19): siRNA sense strand
ugaacucccugcagagcua

SEQ ID NO: 687592 - RNA, 19 nt, Homo sapiens
  misc_RNA (1)...(19): siRNA sense strand
gcgaaagagucaccugauc

SEQ ID NO: 687593 - RNA, 19 nt, Homo sapiens
  misc_RNA (1)...(19): siRNA sense strand
gagcagaauggacagguaa

SEQ ID NO: 687594 - RNA, 19 nt, Homo sapiens
  misc_RNA (1)...(19): siRNA sense strand
gaagugacauauucauucc

SEQ ID NO: 687595 - RNA, 19 nt, Homo sapiens
  misc_RNA (1)...(19): siRNA sense strand
cggcagaucuccuacucaa

SEQ ID NO: 687596 - RNA, 19 nt, Homo sapiens
  misc_RNA (1)...(19): siRNA sense strand
ucaaaggaaucgcucaaag

SEQ ID NO: 687597 - RNA, 19 nt, Homo sapiens
  misc_RNA (1)...(19): siRNA sense strand
gggcuuuccugcagaccua

SEQ ID NO: 687598 - RNA, 19 nt, Homo sapiens
  misc_RNA (1)...(19): siRNA sense strand
caucacgucucuauuuagu

SEQ ID NO: 687599 - RNA, 19 nt, Homo sapiens
  misc_RNA (1)...(19): siRNA sense strand
uggcagauaucaaugacaa

SEQ ID NO: 687600 - RNA, 19 nt, Homo sapiens
  misc_RNA (1)...(19): siRNA sense strand
cgcauagucuccagaggua

SEQ ID NO: 687601 - RNA, 19 nt, Homo sapiens
  misc_RNA (1)...(19): siRNA sense strand
guuagaugauucgaaguuu

SEQ ID NO: 687602 - RNA, 19 nt, Homo sapiens
  misc_RNA (1)...(19): siRNA sense strand
aacggaagcucacuuuaug

SEQ ID NO: 687603 - RNA, 19 nt, Homo sapiens
  misc_RNA (1)...(19): siRNA sense strand
ggaggagcauaucuugcaa

SEQ ID NO: 687604 - RNA, 19 nt, Homo sapiens
  misc_RNA (1)...(19): siRNA sense strand
ugacaaugcuccaaaauuc

SEQ ID NO: 687605 - RNA, 19 nt, Homo sapiens
  misc_RNA (1)...(19): siRNA sense strand
uuaauauccuuguggaaga

SEQ ID NO: 687606 - RNA, 19 nt, Homo sapiens
  misc_RNA (1)...(19): siRNA sense strand
ggacgcagcuuuucucucu

SEQ ID NO: 687607 - RNA, 19 nt, Homo sapiens
  misc_RNA (1)...(19): siRNA sense strand
ggacagagacgcgcucaag

SEQ ID NO: 687608 - RNA, 19 nt, Homo sapiens
  misc_RNA (1)...(19): siRNA sense strand
gcucaaaggaaucaaagga

SEQ ID NO: 687609 - RNA, 19 nt, Homo sapiens
  misc_RNA (1)...(19): siRNA sense strand
acacgcaauuguugaaguu

SEQ ID NO: 687610 - RNA, 19 nt, Homo sapiens
  misc_RNA (1)...(19): siRNA sense strand
ugaguguuccugagaauuu

SEQ ID NO: 687611 - RNA, 19 nt, Homo sapiens
  misc_RNA (1)...(19): siRNA sense strand
aggaaucgcucaaaggaau

SEQ ID NO: 687612 - RNA, 19 nt, Homo sapiens
  misc_RNA (1)...(19): siRNA sense strand
ggauagaaauagaaguaac

SEQ ID NO: 687613 - RNA, 19 nt, Homo sapiens
  misc_RNA (1)...(19): siRNA sense strand
uuaccuauaucccagagaa

SEQ ID NO: 687614 - RNA, 19 nt, Homo sapiens
  misc_RNA (1)...(19): siRNA sense strand
ccucauacauauccaucaa

SEQ ID NO: 687615 - RNA, 19 nt, Homo sapiens
  misc_RNA (1)...(19): siRNA sense strand
gaaguaacugauaucaaug

SEQ ID NO: 687616 - RNA, 19 nt, Homo sapiens
  misc_RNA (1)...(19): siRNA sense strand
accaucacgucucuauuua

SEQ ID NO: 687617 - RNA, 19 nt, Homo sapiens
  misc_RNA (1)...(19): siRNA sense strand
gaaauacaagcagaagaug

SEQ ID NO: 687618 - RNA, 19 nt, Homo sapiens
  misc_RNA (1)...(19): siRNA sense strand
gagugaguguuccugagaa

SEQ ID NO: 687619 - RNA, 19 nt, Homo sapiens
  misc_RNA (1)...(19): siRNA sense strand
cagaaaaucuagacguaaa

SEQ ID NO: 687620 - RNA, 19 nt, Homo sapiens
  misc_RNA (1)...(19): siRNA sense strand
ccucuguccucauacauau

SEQ ID NO: 687621 - RNA, 19 nt, Homo sapiens
  misc_RNA (1)...(19): siRNA sense strand
gauggaggagcauaucuug

SEQ ID NO: 687622 - RNA, 19 nt, Homo sapiens
  misc_RNA (1)...(19): siRNA sense strand
aaacgauccuuugucuuug

SEQ ID NO: 687623 - RNA, 19 nt, Homo sapiens
  misc_RNA (1)...(19): siRNA sense strand
ugagcagaauggacaggua

SEQ ID NO: 687624 - RNA, 19 nt, Homo sapiens
  misc_RNA (1)...(19): siRNA sense strand
guucagagccgugccaaug

SEQ ID NO: 687625 - RNA, 19 nt, Homo sapiens
  misc_RNA (1)...(19): siRNA sense strand
gagcccugcuggacagaga

SEQ ID NO: 687626 - RNA, 19 nt, Homo sapiens
  misc_RNA (1)...(19): siRNA sense strand
acucagauccuucgacuau

SEQ ID NO: 687627 - RNA, 19 nt, Homo sapiens
  misc_RNA (1)...(19): siRNA sense strand
guaccucuguccucauaca

SEQ ID NO: 687628 - RNA, 19 nt, Homo sapiens
  misc_RNA (1)...(19): siRNA sense strand
aaaggaaucgcucaaagga

SEQ ID NO: 687629 - RNA, 19 nt, Homo sapiens
  misc_RNA (1)...(19): siRNA sense strand
gaacagucguagcccuuuu

SEQ ID NO: 687630 - RNA, 19 nt, Homo sapiens
  misc_RNA (1)...(19): siRNA sense strand
caguagaagauguaaauga

SEQ ID NO: 687631 - RNA, 19 nt, Homo sapiens
  misc_RNA (1)...(19): siRNA sense strand
gaauaccgagugaguguuc

SEQ ID NO: 687632 - RNA, 19 nt, Homo sapiens
  misc_RNA (1)...(19): siRNA sense strand
caacccaccuaccuucucu

SEQ ID NO: 687633 - RNA, 19 nt, Homo sapiens
  misc_RNA (1)...(19): siRNA sense strand
acauauccaucaacucaga

SEQ ID NO: 687634 - RNA, 19 nt, Homo sapiens
  misc_RNA (1)...(19): siRNA sense strand
auacauauccaucaacuca

SEQ ID NO: 687635 - RNA, 19 nt, Homo sapiens
  misc_RNA (1)...(19): siRNA sense strand
ucuccuacuuuaccuauau

SEQ ID NO: 687636 - RNA, 19 nt, Homo sapiens
  misc_RNA (1)...(19): siRNA sense strand
ugacauauucauuccgaaa

SEQ ID NO: 687637 - RNA, 19 nt, Homo sapiens
  misc_RNA (1)...(19): siRNA sense strand
caggagagcugugagaaaa

SEQ ID NO: 687638 - RNA, 19 nt, Homo sapiens
  misc_RNA (1)...(19): siRNA sense strand
acagguauccucuuacaau

SEQ ID NO: 687639 - RNA, 19 nt, Homo sapiens
  misc_RNA (1)...(19): siRNA sense strand
gaagauggaggagcauauc

SEQ ID NO: 687640 - RNA, 19 nt, Homo sapiens
  misc_RNA (1)...(19): siRNA sense strand
ugggauagaaauagaagua

SEQ ID NO: 687641 - RNA, 19 nt, Homo sapiens
  misc_RNA (1)...(19): siRNA sense strand
cauugacaguuauuacaga

SEQ ID NO: 687642 - RNA, 19 nt, Homo sapiens
  misc_RNA (1)...(19): siRNA sense strand
gcaaaaguguugauuacag

SEQ ID NO: 687643 - RNA, 19 nt, Homo sapiens
  misc_RNA (1)...(19): siRNA sense strand
agaaauacaagcagaagau

SEQ ID NO: 687644 - RNA, 19 nt, Homo sapiens
  misc_RNA (1)...(19): siRNA sense strand
ccaauggagaagugacaua

SEQ ID NO: 687645 - RNA, 19 nt, Homo sapiens
  misc_RNA (1)...(19): siRNA sense strand
ucaaugacaaugcuccaaa

SEQ ID NO: 687646 - RNA, 19 nt, Homo sapiens
  misc_RNA (1)...(19): siRNA sense strand
gaguguuccugagaauuug

SEQ ID NO: 687647 - RNA, 19 nt, Homo sapiens
  misc_RNA (1)...(19): siRNA sense strand
acaaguggcagauaucaau

SEQ ID NO: 687648 - RNA, 19 nt, Homo sapiens
  misc_RNA (1)...(19): siRNA sense strand
ggaagcucacuuuaugcua

SEQ ID NO: 687649 - RNA, 19 nt, Homo sapiens
  misc_RNA (1)...(19): siRNA sense strand
aaaugucgcugcgggaaug

SEQ ID NO: 687650 - RNA, 19 nt, Homo sapiens
  misc_RNA (1)...(19): siRNA sense strand
gaaguccuccucuaucaac

SEQ ID NO: 687651 - RNA, 19 nt, Homo sapiens
  misc_RNA (1)...(19): siRNA sense strand
ggaaguccuccucuaucaa

SEQ ID NO: 687652 - RNA, 19 nt, Homo sapiens
  misc_RNA (1)...(19): siRNA sense strand
caaaggaaucgcucaaagg

SEQ ID NO: 687653 - RNA, 19 nt, Homo sapiens
  misc_RNA (1)...(19): siRNA sense strand
auggagaagugacauauuc

SEQ ID NO: 687654 - RNA, 19 nt, Homo sapiens
  misc_RNA (1)...(19): siRNA sense strand
cagaauaccgagugagugu

SEQ ID NO: 687655 - RNA, 19 nt, Homo sapiens
  misc_RNA (1)...(19): siRNA sense strand
gauccuuugucuuuguuag

SEQ ID NO: 687656 - RNA, 19 nt, Homo sapiens
  misc_RNA (1)...(19): siRNA sense strand
aaaacgauccuuugucuuu

SEQ ID NO: 687657 - RNA, 19 nt, Homo sapiens
  misc_RNA (1)...(19): siRNA sense strand
gcguaucuaccauuuaaau

SEQ ID NO: 687658 - RNA, 19 nt, Homo sapiens
  misc_RNA (1)...(19): siRNA sense strand
ggaacagucguagcccuuu

SEQ ID NO: 687659 - RNA, 19 nt, Homo sapiens
  misc_RNA (1)...(19): siRNA sense strand
agaagugacauauucauuc

SEQ ID NO: 687660 - RNA, 19 nt, Homo sapiens
  misc_RNA (1)...(19): siRNA sense strand
gacacgcaauuguugaagu

SEQ ID NO: 687661 - RNA, 19 nt, Homo sapiens
  misc_RNA (1)...(19): siRNA sense strand
cagaucuccuacucaauuc

SEQ ID NO: 687662 - RNA, 19 nt, Homo sapiens
  misc_RNA (1)...(19): siRNA sense strand
caagcaaagccucguagug

SEQ ID NO: 687663 - RNA, 19 nt, Homo sapiens
  misc_RNA (1)...(19): siRNA sense strand
gggauagaaauagaaguaa

SEQ ID NO: 687664 - RNA, 19 nt, Homo sapiens
  misc_RNA (1)...(19): siRNA sense strand
agauguaaaugacaacagu

SEQ ID NO: 687665 - RNA, 19 nt, Homo sapiens
  misc_RNA (1)...(19): siRNA sense strand
gggaacagguauccucuua

SEQ ID NO: 687666 - RNA, 19 nt, Homo sapiens
  misc_RNA (1)...(19): siRNA sense strand
gaacagguauccucuuaca

SEQ ID NO: 687667 - RNA, 19 nt, Homo sapiens
  misc_RNA (1)...(19): siRNA sense strand
ggacgaaggugccaaugga

SEQ ID NO: 687668 - RNA, 19 nt, Homo sapiens
  misc_RNA (1)...(19): siRNA sense strand
gaagacagggugaaacuuu

SEQ ID NO: 687669 - RNA, 19 nt, Homo sapiens
  misc_RNA (1)...(19): siRNA sense strand
gagaaugcccagauuauuu

SEQ ID NO: 687670 - RNA, 19 nt, Homo sapiens
  misc_RNA (1)...(19): siRNA sense strand
caaagagaaugcccagauu

SEQ ID NO: 687671 - RNA, 19 nt, Homo sapiens
  misc_RNA (1)...(19): siRNA sense strand
gcagaucuccuacucaauu

SEQ ID NO: 687672 - RNA, 19 nt, Homo sapiens
  misc_RNA (1)...(19): siRNA sense strand
aauaagcacuucucccuaa

SEQ ID NO: 687673 - RNA, 19 nt, Homo sapiens
  misc_RNA (1)...(19): siRNA sense strand
gaccaucacgucucuauuu

SEQ ID NO: 687674 - RNA, 19 nt, Homo sapiens
  misc_RNA (1)...(19): siRNA sense strand
gcacuucucccuaagaguu

SEQ ID NO: 687675 - RNA, 19 nt, Homo sapiens
  misc_RNA (1)...(19): siRNA sense strand
gggaaguccuccucuauca

SEQ ID NO: 687676 - RNA, 19 nt, Homo sapiens
  misc_RNA (1)...(19): siRNA sense strand
uggcguaucuaccauuuaa

SEQ ID NO: 687677 - RNA, 19 nt, Homo sapiens
  misc_RNA (1)...(19): siRNA sense strand
ugacaguuauuacagauug

SEQ ID NO: 687678 - RNA, 19 nt, Homo sapiens
  misc_RNA (1)...(19): siRNA sense strand
cagguauccucuuacaaua

SEQ ID NO: 687679 - RNA, 19 nt, Homo sapiens
  misc_RNA (1)...(19): siRNA sense strand
gcaaagagaaugcccagau

SEQ ID NO: 687680 - RNA, 19 nt, Homo sapiens
  misc_RNA (1)...(19): siRNA sense strand
caacggaagcucacuuuau

SEQ ID NO: 687681 - RNA, 19 nt, Homo sapiens
  misc_RNA (1)...(19): siRNA sense strand
agaaugcccagauuauuua

SEQ ID NO: 687682 - RNA, 19 nt, Homo sapiens
  misc_RNA (1)...(19): siRNA sense strand
ggguaccucuguccucaua

SEQ ID NO: 687683 - RNA, 19 nt, Homo sapiens
  misc_RNA (1)...(19): siRNA sense strand
ucagauccuucgacuauga

SEQ ID NO: 687684 - RNA, 19 nt, Homo sapiens
  misc_RNA (1)...(19): siRNA sense strand
aaagagaaugcccagauua

SEQ ID NO: 687685 - RNA, 19 nt, Homo sapiens
  misc_RNA (1)...(19): siRNA sense strand
gagacgcgcucaagcaaag

SEQ ID NO: 687686 - RNA, 19 nt, Homo sapiens
  misc_RNA (1)...(19): siRNA sense strand
aaaaguccauugacaguua

SEQ ID NO: 687687 - RNA, 19 nt, Homo sapiens
  misc_RNA (1)...(19): siRNA sense strand
ccaccuaccuucucucaag

SEQ ID NO: 687688 - RNA, 19 nt, Homo sapiens
  misc_RNA (1)...(19): siRNA sense strand
gagaagugacauauucauu

SEQ ID NO: 687689 - RNA, 19 nt, Homo sapiens
  misc_RNA (1)...(19): siRNA sense strand
gauucgaaguuuccuauag

SEQ ID NO: 687690 - RNA, 19 nt, Homo sapiens
  misc_RNA (1)...(19): siRNA sense strand
gguauccucuuacaauauc

SEQ ID NO: 687691 - RNA, 19 nt, Homo sapiens
  misc_RNA (1)...(19): siRNA sense strand
ugaacucccugcagagcua

SEQ ID NO: 687692 - RNA, 19 nt, Homo sapiens
  misc_RNA (1)...(19): siRNA sense strand
gcgaaagagucaccugauc

SEQ ID NO: 687693 - RNA, 19 nt, Homo sapiens
  misc_RNA (1)...(19): siRNA sense strand
gagcagaauggacagguaa

SEQ ID NO: 687694 - RNA, 19 nt, Homo sapiens
  misc_RNA (1)...(19): siRNA sense strand
gaagugacauauucauucc

SEQ ID NO: 687695 - RNA, 19 nt, Homo sapiens
  misc_RNA (1)...(19): siRNA sense strand
cggcagaucuccuacucaa

SEQ ID NO: 687696 - RNA, 19 nt, Homo sapiens
  misc_RNA (1)...(19): siRNA sense strand
ucaaaggaaucgcucaaag

SEQ ID NO: 687697 - RNA, 19 nt, Homo sapiens
  misc_RNA (1)...(19): siRNA sense strand
gggcuuuccugcagaccua

SEQ ID NO: 687698 - RNA, 19 nt, Homo sapiens
  misc_RNA (1)...(19): siRNA sense strand
caucacgucucuauuuagu

SEQ ID NO: 687699 - RNA, 19 nt, Homo sapiens
  misc_RNA (1)...(19): siRNA sense strand
uggcagauaucaaugacaa

SEQ ID NO: 687700 - RNA, 19 nt, Homo sapiens
  misc_RNA (1)...(19): siRNA sense strand
cgcauagucuccagaggua

SEQ ID NO: 687701 - RNA, 19 nt, Homo sapiens
  misc_RNA (1)...(19): siRNA sense strand
guuagaugauucgaaguuu

SEQ ID NO: 687702 - RNA, 19 nt, Homo sapiens
  misc_RNA (1)...(19): siRNA sense strand
aacggaagcucacuuuaug

SEQ ID NO: 687703 - RNA, 19 nt, Homo sapiens
  misc_RNA (1)...(19): siRNA sense strand
ggaggagcauaucuugcaa

SEQ ID NO: 687704 - RNA, 19 nt, Homo sapiens
  misc_RNA (1)...(19): siRNA sense strand
ugacaaugcuccaaaauuc

SEQ ID NO: 687705 - RNA, 19 nt, Homo sapiens
  misc_RNA (1)...(19): siRNA sense strand
uuaauauccuuguggaaga

SEQ ID NO: 687706 - RNA, 19 nt, Homo sapiens
  misc_RNA (1)...(19): siRNA sense strand
ggacgcagcuuuucucucu

SEQ ID NO: 687707 - RNA, 19 nt, Homo sapiens
  misc_RNA (1)...(19): siRNA sense strand
ggacagagacgcgcucaag

SEQ ID NO: 687708 - RNA, 19 nt, Homo sapiens
  misc_RNA (1)...(19): siRNA sense strand
gcucaaaggaaucaaagga

SEQ ID NO: 687709 - RNA, 19 nt, Homo sapiens
  misc_RNA (1)...(19): siRNA sense strand
acacgcaauuguugaaguu

SEQ ID NO: 687710 - RNA, 19 nt, Homo sapiens
  misc_RNA (1)...(19): siRNA sense strand
ugaguguuccugagaauuu

SEQ ID NO: 687711 - RNA, 19 nt, Homo sapiens
  misc_RNA (1)...(19): siRNA sense strand
aggaaucgcucaaaggaau

SEQ ID NO: 687712 - RNA, 19 nt, Homo sapiens
  misc_RNA (1)...(19): siRNA sense strand
ggauagaaauagaaguaac

SEQ ID NO: 687713 - RNA, 19 nt, Homo sapiens
  misc_RNA (1)...(19): siRNA sense strand
uuaccuauaucccagagaa

SEQ ID NO: 687714 - RNA, 19 nt, Homo sapiens
  misc_RNA (1)...(19): siRNA sense strand
ccucauacauauccaucaa

SEQ ID NO: 687715 - RNA, 19 nt, Homo sapiens
  misc_RNA (1)...(19): siRNA sense strand
gaaguaacugauaucaaug

SEQ ID NO: 687716 - RNA, 19 nt, Homo sapiens
  misc_RNA (1)...(19): siRNA sense strand
accaucacgucucuauuua

SEQ ID NO: 687717 - RNA, 19 nt, Homo sapiens
  misc_RNA (1)...(19): siRNA sense strand
gaaauacaagcagaagaug

SEQ ID NO: 687718 - RNA, 19 nt, Homo sapiens
  misc_RNA (1)...(19): siRNA sense strand
gagugaguguuccugagaa

SEQ ID NO: 687719 - RNA, 19 nt, Homo sapiens
  misc_RNA (1)...(19): siRNA sense strand
cagaaaaucuagacguaaa

SEQ ID NO: 687720 - RNA, 19 nt, Homo sapiens
  misc_RNA (1)...(19): siRNA sense strand
ccucuguccucauacauau

SEQ ID NO: 687721 - RNA, 19 nt, Homo sapiens
  misc_RNA (1)...(19): siRNA sense strand
gauggaggagcauaucuug

SEQ ID NO: 687722 - RNA, 19 nt, Homo sapiens
  misc_RNA (1)...(19): siRNA sense strand
ugagcagaauggacaggua

SEQ ID NO: 687723 - RNA, 19 nt, Homo sapiens
  misc_RNA (1)...(19): siRNA sense strand
guucagagccgugccaaug

SEQ ID NO: 687724 - RNA, 19 nt, Homo sapiens
  misc_RNA (1)...(19): siRNA sense strand
gagcccugcuggacagaga

SEQ ID NO: 687725 - RNA, 19 nt, Homo sapiens
  misc_RNA (1)...(19): siRNA sense strand
acucagauccuucgacuau

SEQ ID NO: 687726 - RNA, 19 nt, Homo sapiens
  misc_RNA (1)...(19): siRNA sense strand
guaccucuguccucauaca

SEQ ID NO: 687727 - RNA, 19 nt, Homo sapiens
  misc_RNA (1)...(19): siRNA sense strand
aaaggaaucgcucaaagga

SEQ ID NO: 687728 - RNA, 19 nt, Homo sapiens
  misc_RNA (1)...(19): siRNA sense strand
gaacagucguagcccuuuu

SEQ ID NO: 687729 - RNA, 19 nt, Homo sapiens
  misc_RNA (1)...(19): siRNA sense strand
caguagaagauguaaauga

SEQ ID NO: 687730 - RNA, 19 nt, Homo sapiens
  misc_RNA (1)...(19): siRNA sense strand
gaauaccgagugaguguuc

SEQ ID NO: 687731 - RNA, 19 nt, Homo sapiens
  misc_RNA (1)...(19): siRNA sense strand
caacccaccuaccuucucu

SEQ ID NO: 687732 - RNA, 19 nt, Homo sapiens
  misc_RNA (1)...(19): siRNA sense strand
acauauccaucaacucaga

SEQ ID NO: 687733 - RNA, 19 nt, Homo sapiens
  misc_RNA (1)...(19): siRNA sense strand
auacauauccaucaacuca

SEQ ID NO: 687734 - RNA, 19 nt, Homo sapiens
  misc_RNA (1)...(19): siRNA sense strand
ucuccuacuuuaccuauau

SEQ ID NO: 687735 - RNA, 19 nt, Homo sapiens
  misc_RNA (1)...(19): siRNA sense strand
ugacauauucauuccgaaa

SEQ ID NO: 687736 - RNA, 19 nt, Homo sapiens
  misc_RNA (1)...(19): siRNA sense strand
caggagagcugugagaaaa

SEQ ID NO: 687737 - RNA, 19 nt, Homo sapiens
  misc_RNA (1)...(19): siRNA sense strand
acagguauccucuuacaau

SEQ ID NO: 687738 - RNA, 19 nt, Homo sapiens
  misc_RNA (1)...(19): siRNA sense strand
gaagauggaggagcauauc

SEQ ID NO: 687739 - RNA, 19 nt, Homo sapiens
  misc_RNA (1)...(19): siRNA sense strand
ugggauagaaauagaagua

SEQ ID NO: 687740 - RNA, 19 nt, Homo sapiens
  misc_RNA (1)...(19): siRNA sense strand
cauugacaguuauuacaga

SEQ ID NO: 687741 - RNA, 19 nt, Homo sapiens
  misc_RNA (1)...(19): siRNA sense strand
gcaaaaguguugauuacag

SEQ ID NO: 687742 - RNA, 19 nt, Homo sapiens
  misc_RNA (1)...(19): siRNA sense strand
agaaauacaagcagaagau

SEQ ID NO: 687743 - RNA, 19 nt, Homo sapiens
  misc_RNA (1)...(19): siRNA sense strand
ccaauggagaagugacaua

SEQ ID NO: 687744 - RNA, 19 nt, Homo sapiens
  misc_RNA (1)...(19): siRNA sense strand
ucaaugacaaugcuccaaa

SEQ ID NO: 687745 - RNA, 19 nt, Homo sapiens
  misc_RNA (1)...(19): siRNA sense strand
gaguguuccugagaauuug

SEQ ID NO: 687746 - RNA, 19 nt, Homo sapiens
  misc_RNA (1)...(19): siRNA sense strand
acaaguggcagauaucaau

SEQ ID NO: 687747 - RNA, 19 nt, Homo sapiens
  misc_RNA (1)...(19): siRNA sense strand
ggaagcucacuuuaugcua

SEQ ID NO: 687748 - RNA, 19 nt, Homo sapiens
  misc_RNA (1)...(19): siRNA sense strand
aaaugucgcugcgggaaug

SEQ ID NO: 687749 - RNA, 19 nt, Homo sapiens
  misc_RNA (1)...(19): siRNA sense strand
gaaguccuccucuaucaac

SEQ ID NO: 687750 - RNA, 19 nt, Homo sapiens
  misc_RNA (1)...(19): siRNA sense strand
ggaaguccuccucuaucaa

SEQ ID NO: 687751 - RNA, 19 nt, Homo sapiens
  misc_RNA (1)...(19): siRNA sense strand
auggagaagugacauauuc

SEQ ID NO: 687752 - RNA, 19 nt, Homo sapiens
  misc_RNA (1)...(19): siRNA sense strand
caaaggaaucgcucaaagg

SEQ ID NO: 687753 - RNA, 19 nt, Homo sapiens
  misc_RNA (1)...(19): siRNA sense strand
cagaauaccgagugagugu

SEQ ID NO: 687754 - RNA, 19 nt, Homo sapiens
  misc_RNA (1)...(19): siRNA sense strand
gcguaucuaccauuuaaau

SEQ ID NO: 687755 - RNA, 19 nt, Homo sapiens
  misc_RNA (1)...(19): siRNA sense strand
ggaacagucguagcccuuu

SEQ ID NO: 687756 - RNA, 19 nt, Homo sapiens
  misc_RNA (1)...(19): siRNA sense strand
agaagugacauauucauuc

SEQ ID NO: 687757 - RNA, 19 nt, Homo sapiens
  misc_RNA (1)...(19): siRNA sense strand
gggauagaaauagaaguaa

SEQ ID NO: 687758 - RNA, 19 nt, Homo sapiens
  misc_RNA (1)...(19): siRNA sense strand
cagaucuccuacucaauuc

SEQ ID NO: 687759 - RNA, 19 nt, Homo sapiens
  misc_RNA (1)...(19): siRNA sense strand
caagcaaagccucguagug

SEQ ID NO: 687760 - RNA, 19 nt, Homo sapiens
  misc_RNA (1)...(19): siRNA sense strand
agauguaaaugacaacagu

SEQ ID NO: 687761 - RNA, 19 nt, Homo sapiens
  misc_RNA (1)...(19): siRNA sense strand
gacacgcaauuguugaagu

SEQ ID NO: 687762 - RNA, 19 nt, Homo sapiens
  misc_RNA (1)...(19): siRNA sense strand
cgaaagagucaccugaucu

SEQ ID NO: 687763 - RNA, 19 nt, Homo sapiens
  misc_RNA (1)...(19): siRNA sense strand
auucgaaguuuccuauaga

SEQ ID NO: 687764 - RNA, 19 nt, Homo sapiens
  misc_RNA (1)...(19): siRNA sense strand
ccaggagagcugugagaaa

SEQ ID NO: 687765 - RNA, 19 nt, Homo sapiens
  misc_RNA (1)...(19): siRNA sense strand
gaagacaccuugaagauuu

SEQ ID NO: 687766 - RNA, 19 nt, Homo sapiens
  misc_RNA (1)...(19): siRNA sense strand
ugauaacgcuccagaaaua

SEQ ID NO: 687767 - RNA, 19 nt, Homo sapiens
  misc_RNA (1)...(19): siRNA sense strand
guccagagcuacaauauaa

SEQ ID NO: 687768 - RNA, 19 nt, Homo sapiens
  misc_RNA (1)...(19): siRNA sense strand
agaaugcccuggucacuua

SEQ ID NO: 687769 - RNA, 19 nt, Homo sapiens
  misc_RNA (1)...(19): siRNA sense strand
acuaucaccucuucuauua

SEQ ID NO: 687770 - RNA, 19 nt, Homo sapiens
  misc_RNA (1)...(19): siRNA sense strand
gauauucggugccagaaga

SEQ ID NO: 687771 - RNA, 19 nt, Homo sapiens
  misc_RNA (1)...(19): siRNA sense strand
ggucaagucuccuguuuua

SEQ ID NO: 687772 - RNA, 19 nt, Homo sapiens
  misc_RNA (1)...(19): siRNA sense strand
ccaccugccuuuuaaauua

SEQ ID NO: 687773 - RNA, 19 nt, Homo sapiens
  misc_RNA (1)...(19): siRNA sense strand
cagcucagcccuaauaauu

SEQ ID NO: 687774 - RNA, 19 nt, Homo sapiens
  misc_RNA (1)...(19): siRNA sense strand
gaguggagguggaaauaau

SEQ ID NO: 687775 - RNA, 19 nt, Homo sapiens
  misc_RNA (1)...(19): siRNA sense strand
ccucacagcuuuagaugga

SEQ ID NO: 687776 - RNA, 19 nt, Homo sapiens
  misc_RNA (1)...(19): siRNA sense strand
ggaagacaccuugaagauu

SEQ ID NO: 687777 - RNA, 19 nt, Homo sapiens
  misc_RNA (1)...(19): siRNA sense strand
ccaauuggauucacaaacu

SEQ ID NO: 687778 - RNA, 19 nt, Homo sapiens
  misc_RNA (1)...(19): siRNA sense strand
caaggcuucugaaauauuc

SEQ ID NO: 687779 - RNA, 19 nt, Homo sapiens
  misc_RNA (1)...(19): siRNA sense strand
ccuccuaugucucuauuaa

SEQ ID NO: 687780 - RNA, 19 nt, Homo sapiens
  misc_RNA (1)...(19): siRNA sense strand
ucuaugagauggaaauuca

SEQ ID NO: 687781 - RNA, 19 nt, Homo sapiens
  misc_RNA (1)...(19): siRNA sense strand
gaucacggcaggcaggaua

SEQ ID NO: 687782 - RNA, 19 nt, Homo sapiens
  misc_RNA (1)...(19): siRNA sense strand
gaacucgggugcugauggu

SEQ ID NO: 687783 - RNA, 19 nt, Homo sapiens
  misc_RNA (1)...(19): siRNA sense strand
gaaauucaaggccaagaug

SEQ ID NO: 687784 - RNA, 19 nt, Homo sapiens
  misc_RNA (1)...(19): siRNA sense strand
gcaaggcuucugaaauauu

SEQ ID NO: 687785 - RNA, 19 nt, Homo sapiens
  misc_RNA (1)...(19): siRNA sense strand
ugauugcucuucuaaaugu

SEQ ID NO: 687786 - RNA, 19 nt, Homo sapiens
  misc_RNA (1)...(19): siRNA sense strand
gcgauuugcucuuccuaau

SEQ ID NO: 687787 - RNA, 19 nt, Homo sapiens
  misc_RNA (1)...(19): siRNA sense strand
ggccaagaauccagagcua

SEQ ID NO: 687788 - RNA, 19 nt, Homo sapiens
  misc_RNA (1)...(19): siRNA sense strand
gaugguggaggucucuuua

SEQ ID NO: 687789 - RNA, 19 nt, Homo sapiens
  misc_RNA (1)...(19): siRNA sense strand
gagguggaaauaauagaua

SEQ ID NO: 687790 - RNA, 19 nt, Homo sapiens
  misc_RNA (1)...(19): siRNA sense strand
gcuaccagcucagcccuaa

SEQ ID NO: 687791 - RNA, 19 nt, Homo sapiens
  misc_RNA (1)...(19): siRNA sense strand
ugaacucccuccagagcua

SEQ ID NO: 687792 - RNA, 19 nt, Homo sapiens
  misc_RNA (1)...(19): siRNA sense strand
aaauaacuaucaccucuuc

SEQ ID NO: 687793 - RNA, 19 nt, Homo sapiens
  misc_RNA (1)...(19): siRNA sense strand
uaaaugaucacaucccaau

SEQ ID NO: 687794 - RNA, 19 nt, Homo sapiens
  misc_RNA (1)...(19): siRNA sense strand
ugagcaguuucgagacuua

SEQ ID NO: 687795 - RNA, 19 nt, Homo sapiens
  misc_RNA (1)...(19): siRNA sense strand
guacagugauugcucuucu

SEQ ID NO: 687796 - RNA, 19 nt, Homo sapiens
  misc_RNA (1)...(19): siRNA sense strand
gggaguugguccagagcua

SEQ ID NO: 687797 - RNA, 19 nt, Homo sapiens
  misc_RNA (1)...(19): siRNA sense strand
uacaauccuucgacuauga

SEQ ID NO: 687798 - RNA, 19 nt, Homo sapiens
  misc_RNA (1)...(19): siRNA sense strand
gauuugcucuuccuaaugc

SEQ ID NO: 687799 - RNA, 19 nt, Homo sapiens
  misc_RNA (1)...(19): siRNA sense strand
gaaauaacuaucaccucuu

SEQ ID NO: 687800 - RNA, 19 nt, Homo sapiens
  misc_RNA (1)...(19): siRNA sense strand
aagacaccuugaagauuua

SEQ ID NO: 687801 - RNA, 19 nt, Homo sapiens
  misc_RNA (1)...(19): siRNA sense strand
guugaucacuguuguggau

SEQ ID NO: 687802 - RNA, 19 nt, Homo sapiens
  misc_RNA (1)...(19): siRNA sense strand
ccaggcagauccgauauuc

SEQ ID NO: 687803 - RNA, 19 nt, Homo sapiens
  misc_RNA (1)...(19): siRNA sense strand
ggaggacgaaguggagaua

SEQ ID NO: 687804 - RNA, 19 nt, Homo sapiens
  misc_RNA (1)...(19): siRNA sense strand
acucaugucuggcugaaug

SEQ ID NO: 687805 - RNA, 19 nt, Homo sapiens
  misc_RNA (1)...(19): siRNA sense strand
agugauugcucuucuaaau

SEQ ID NO: 687806 - RNA, 19 nt, Homo sapiens
  misc_RNA (1)...(19): siRNA sense strand
gguccucgauguaaaugau

SEQ ID NO: 687807 - RNA, 19 nt, Homo sapiens
  misc_RNA (1)...(19): siRNA sense strand
uaccagcucagcccuaaua

SEQ ID NO: 687808 - RNA, 19 nt, Homo sapiens
  misc_RNA (1)...(19): siRNA sense strand
gguccagagcuacaauaua

SEQ ID NO: 687809 - RNA, 19 nt, Homo sapiens
  misc_RNA (1)...(19): siRNA sense strand
gauaacgcuccagaaauaa

SEQ ID NO: 687810 - RNA, 19 nt, Homo sapiens
  misc_RNA (1)...(19): siRNA sense strand
guauaucgcgugaguguuc

SEQ ID NO: 687811 - RNA, 19 nt, Homo sapiens
  misc_RNA (1)...(19): siRNA sense strand
ggaguggagguggaaauaa

SEQ ID NO: 687812 - RNA, 19 nt, Homo sapiens
  misc_RNA (1)...(19): siRNA sense strand
caagaauccagagcuagua

SEQ ID NO: 687813 - RNA, 19 nt, Homo sapiens
  misc_RNA (1)...(19): siRNA sense strand
cgacgauguugaucacugu

SEQ ID NO: 687814 - RNA, 19 nt, Homo sapiens
  misc_RNA (1)...(19): siRNA sense strand
gaggcgaucccauccgaaa

SEQ ID NO: 687815 - RNA, 19 nt, Homo sapiens
  misc_RNA (1)...(19): siRNA sense strand
ggcugaauguggcagauga

SEQ ID NO: 687816 - RNA, 19 nt, Homo sapiens
  misc_RNA (1)...(19): siRNA sense strand
aaugauaacgcuccagaaa

SEQ ID NO: 687817 - RNA, 19 nt, Homo sapiens
  misc_RNA (1)...(19): siRNA sense strand
ucugaaauauuccaauugg

SEQ ID NO: 687818 - RNA, 19 nt, Homo sapiens
  misc_RNA (1)...(19): siRNA sense strand
gagacgguguccuccuguu

SEQ ID NO: 687819 - RNA, 19 nt, Homo sapiens
  misc_RNA (1)...(19): siRNA sense strand
uggcagaugacaacgauaa

SEQ ID NO: 687820 - RNA, 19 nt, Homo sapiens
  misc_RNA (1)...(19): siRNA sense strand
uaacuaucaccucuucuau

SEQ ID NO: 687821 - RNA, 19 nt, Homo sapiens
  misc_RNA (1)...(19): siRNA sense strand
ggaaauucaaggccaagau

SEQ ID NO: 687822 - RNA, 19 nt, Homo sapiens
  misc_RNA (1)...(19): siRNA sense strand
uaaaugugcaagaucaaga

SEQ ID NO: 687823 - RNA, 19 nt, Homo sapiens
  misc_RNA (1)...(19): siRNA sense strand
gggccaggcagauccgaua

SEQ ID NO: 687824 - RNA, 19 nt, Homo sapiens
  misc_RNA (1)...(19): siRNA sense strand
ggagguggaaauaauagau

SEQ ID NO: 687825 - RNA, 19 nt, Homo sapiens
  misc_RNA (1)...(19): siRNA sense strand
ccuacaauccuucgacuau

SEQ ID NO: 687826 - RNA, 19 nt, Homo sapiens
  misc_RNA (1)...(19): siRNA sense strand
cuuacucucugacggauga

SEQ ID NO: 687827 - RNA, 19 nt, Homo sapiens
  misc_RNA (1)...(19): siRNA sense strand
gaauguggcagaugacaac

SEQ ID NO: 687828 - RNA, 19 nt, Homo sapiens
  misc_RNA (1)...(19): siRNA sense strand
uauggaacuucucguggaa

SEQ ID NO: 687829 - RNA, 19 nt, Homo sapiens
  misc_RNA (1)...(19): siRNA sense strand
caauuggauucacaaacug

SEQ ID NO: 687830 - RNA, 19 nt, Homo sapiens
  misc_RNA (1)...(19): siRNA sense strand
uuguggaugugaaugauaa

SEQ ID NO: 687831 - RNA, 19 nt, Homo sapiens
  misc_RNA (1)...(19): siRNA sense strand
aggacgaaguggagauaaa

SEQ ID NO: 687832 - RNA, 19 nt, Homo sapiens
  misc_RNA (1)...(19): siRNA sense strand
cuacaauccuucgacuaug

SEQ ID NO: 687833 - RNA, 19 nt, Homo sapiens
  misc_RNA (1)...(19): siRNA sense strand
aaacucaugucuggcugaa

SEQ ID NO: 687834 - RNA, 19 nt, Homo sapiens
  misc_RNA (1)...(19): siRNA sense strand
gaaugauaacgcuccagaa

SEQ ID NO: 687835 - RNA, 19 nt, Homo sapiens
  misc_RNA (1)...(19): siRNA sense strand
gaacggauggggccaagaa

SEQ ID NO: 687836 - RNA, 19 nt, Homo sapiens
  misc_RNA (1)...(19): siRNA sense strand
gcaguuucgagacuuagaa

SEQ ID NO: 687837 - RNA, 19 nt, Homo sapiens
  misc_RNA (1)...(19): siRNA sense strand
aaagggcgcaguucccauu

SEQ ID NO: 687838 - RNA, 19 nt, Homo sapiens
  misc_RNA (1)...(19): siRNA sense strand
cuaaccaccugccuuuuaa

SEQ ID NO: 687839 - RNA, 19 nt, Homo sapiens
  misc_RNA (1)...(19): siRNA sense strand
ccaagaauccagagcuagu

SEQ ID NO: 687840 - RNA, 19 nt, Homo sapiens
  misc_RNA (1)...(19): siRNA sense strand
uuucgagacuuagaacuga

SEQ ID NO: 687841 - RNA, 19 nt, Homo sapiens
  misc_RNA (1)...(19): siRNA sense strand
gggugccucuguccuccua

SEQ ID NO: 687842 - RNA, 19 nt, Homo sapiens
  misc_RNA (1)...(19): siRNA sense strand
gccuccaucuucucaguga

SEQ ID NO: 687843 - RNA, 19 nt, Homo sapiens
  misc_RNA (1)...(19): siRNA sense strand
ccacgacgauguugaucac

SEQ ID NO: 687844 - RNA, 19 nt, Homo sapiens
  misc_RNA (1)...(19): siRNA sense strand
guccguauaucgcgugagu

SEQ ID NO: 687845 - RNA, 19 nt, Homo sapiens
  misc_RNA (1)...(19): siRNA sense strand
cuucgacuaugagcaguuu

SEQ ID NO: 687846 - RNA, 19 nt, Homo sapiens
  misc_RNA (1)...(19): siRNA sense strand
uggaagacaccuugaagau

SEQ ID NO: 687847 - RNA, 19 nt, Homo sapiens
  misc_RNA (1)...(19): siRNA sense strand
acagugauugcucuucuaa

SEQ ID NO: 687848 - RNA, 19 nt, Homo sapiens
  misc_RNA (1)...(19): siRNA sense strand
uacagugauugcucuucua

SEQ ID NO: 687849 - RNA, 19 nt, Homo sapiens
  misc_RNA (1)...(19): siRNA sense strand
ucgcgugaguguuccagaa

SEQ ID NO: 687850 - RNA, 19 nt, Homo sapiens
  misc_RNA (1)...(19): siRNA sense strand
cgauguugaucacuguugu

SEQ ID NO: 687851 - RNA, 19 nt, Homo sapiens
  misc_RNA (1)...(19): siRNA sense strand
ucuaugcccuacaauccuu

SEQ ID NO: 687852 - RNA, 19 nt, Homo sapiens
  misc_RNA (1)...(19): siRNA sense strand
auaacuaucaccucuucua

SEQ ID NO: 687853 - RNA, 19 nt, Homo sapiens
  misc_RNA (1)...(19): siRNA sense strand
caagucuccuguuuuauuc

SEQ ID NO: 687854 - RNA, 19 nt, Homo sapiens
  misc_RNA (1)...(19): siRNA sense strand
gaauccagagcuaguacug

SEQ ID NO: 687855 - RNA, 19 nt, Homo sapiens
  misc_RNA (1)...(19): siRNA sense strand
ugguugcgguggacaaaga

SEQ ID NO: 687856 - RNA, 19 nt, Homo sapiens
  misc_RNA (1)...(19): siRNA sense strand
ggacgaaguggagauaaaa

SEQ ID NO: 687857 - RNA, 19 nt, Homo sapiens
  misc_RNA (1)...(19): siRNA sense strand
uaacguugacagccacaga

SEQ ID NO: 687858 - RNA, 19 nt, Homo sapiens
  misc_RNA (1)...(19): siRNA sense strand
gugauugcucuucuaaaug

SEQ ID NO: 687859 - RNA, 19 nt, Homo sapiens
  misc_RNA (1)...(19): siRNA sense strand
ucaccucuucuauuaauuc

SEQ ID NO: 687860 - RNA, 19 nt, Homo sapiens
  misc_RNA (1)...(19): siRNA sense strand
gcuccagaaauaacuauca

SEQ ID NO: 687861 - RNA, 19 nt, Homo sapiens
  misc_RNA (1)...(19): siRNA sense strand
gaucacuguuguggaugug

SEQ ID NO: 687862 - RNA, 19 nt, Homo sapiens
  misc_RNA (1)...(19): siRNA sense strand
cggaguggagguggaaaua

SEQ ID NO: 687863 - RNA, 19 nt, Homo sapiens
  misc_RNA (1)...(19): siRNA sense strand
guggaagacaccuugaaga

SEQ ID NO: 687864 - RNA, 19 nt, Homo sapiens
  misc_RNA (1)...(19): siRNA sense strand
gacuuagaacugagaguga

SEQ ID NO: 687865 - RNA, 19 nt, Homo sapiens
  misc_RNA (1)...(19): siRNA sense strand
gaagacaccuugaagauuu

SEQ ID NO: 687866 - RNA, 19 nt, Homo sapiens
  misc_RNA (1)...(19): siRNA sense strand
ugauaacgcuccagaaaua

SEQ ID NO: 687867 - RNA, 19 nt, Homo sapiens
  misc_RNA (1)...(19): siRNA sense strand
guccagagcuacaauauaa

SEQ ID NO: 687868 - RNA, 19 nt, Homo sapiens
  misc_RNA (1)...(19): siRNA sense strand
agaaugcccuggucacuua

SEQ ID NO: 687869 - RNA, 19 nt, Homo sapiens
  misc_RNA (1)...(19): siRNA sense strand
acuaucaccucuucuauua

SEQ ID NO: 687870 - RNA, 19 nt, Homo sapiens
  misc_RNA (1)...(19): siRNA sense strand
gauauucggugccagaaga

SEQ ID NO: 687871 - RNA, 19 nt, Homo sapiens
  misc_RNA (1)...(19): siRNA sense strand
ggucaagucuccuguuuua

SEQ ID NO: 687872 - RNA, 19 nt, Homo sapiens
  misc_RNA (1)...(19): siRNA sense strand
ccaccugccuuuuaaauua

SEQ ID NO: 687873 - RNA, 19 nt, Homo sapiens
  misc_RNA (1)...(19): siRNA sense strand
cagcucagcccuaauaauu

SEQ ID NO: 687874 - RNA, 19 nt, Homo sapiens
  misc_RNA (1)...(19): siRNA sense strand
gaguggagguggaaauaau

SEQ ID NO: 687875 - RNA, 19 nt, Homo sapiens
  misc_RNA (1)...(19): siRNA sense strand
ccucacagcuuuagaugga

SEQ ID NO: 687876 - RNA, 19 nt, Homo sapiens
  misc_RNA (1)...(19): siRNA sense strand
ggaagacaccuugaagauu

SEQ ID NO: 687877 - RNA, 19 nt, Homo sapiens
  misc_RNA (1)...(19): siRNA sense strand
ccaauuggauucacaaacu

SEQ ID NO: 687878 - RNA, 19 nt, Homo sapiens
  misc_RNA (1)...(19): siRNA sense strand
caaggcuucugaaauauuc

SEQ ID NO: 687879 - RNA, 19 nt, Homo sapiens
  misc_RNA (1)...(19): siRNA sense strand
ccuccuaugucucuauuaa

SEQ ID NO: 687880 - RNA, 19 nt, Homo sapiens
  misc_RNA (1)...(19): siRNA sense strand
ucuaugagauggaaauuca

SEQ ID NO: 687881 - RNA, 19 nt, Homo sapiens
  misc_RNA (1)...(19): siRNA sense strand
gaucacggcaggcaggaua

SEQ ID NO: 687882 - RNA, 19 nt, Homo sapiens
  misc_RNA (1)...(19): siRNA sense strand
gaacucgggugcugauggu

SEQ ID NO: 687883 - RNA, 19 nt, Homo sapiens
  misc_RNA (1)...(19): siRNA sense strand
gaaauucaaggccaagaug

SEQ ID NO: 687884 - RNA, 19 nt, Homo sapiens
  misc_RNA (1)...(19): siRNA sense strand
gcaaggcuucugaaauauu

SEQ ID NO: 687885 - RNA, 19 nt, Homo sapiens
  misc_RNA (1)...(19): siRNA sense strand
ugauugcucuucuaaaugu

SEQ ID NO: 687886 - RNA, 19 nt, Homo sapiens
  misc_RNA (1)...(19): siRNA sense strand
gcgauuugcucuuccuaau

SEQ ID NO: 687887 - RNA, 19 nt, Homo sapiens
  misc_RNA (1)...(19): siRNA sense strand
ggccaagaauccagagcua

SEQ ID NO: 687888 - RNA, 19 nt, Homo sapiens
  misc_RNA (1)...(19): siRNA sense strand
gaugguggaggucucuuua

SEQ ID NO: 687889 - RNA, 19 nt, Homo sapiens
  misc_RNA (1)...(19): siRNA sense strand
gagguggaaauaauagaua

SEQ ID NO: 687890 - RNA, 19 nt, Homo sapiens
  misc_RNA (1)...(19): siRNA sense strand
gcuaccagcucagcccuaa

SEQ ID NO: 687891 - RNA, 19 nt, Homo sapiens
  misc_RNA (1)...(19): siRNA sense strand
ugaacucccuccagagcua

SEQ ID NO: 687892 - RNA, 19 nt, Homo sapiens
  misc_RNA (1)...(19): siRNA sense strand
aaauaacuaucaccucuuc

SEQ ID NO: 687893 - RNA, 19 nt, Homo sapiens
  misc_RNA (1)...(19): siRNA sense strand
uaaaugaucacaucccaau

SEQ ID NO: 687894 - RNA, 19 nt, Homo sapiens
  misc_RNA (1)...(19): siRNA sense strand
ugagcaguuucgagacuua

SEQ ID NO: 687895 - RNA, 19 nt, Homo sapiens
  misc_RNA (1)...(19): siRNA sense strand
guacagugauugcucuucu

SEQ ID NO: 687896 - RNA, 19 nt, Homo sapiens
  misc_RNA (1)...(19): siRNA sense strand
gggaguugguccagagcua

SEQ ID NO: 687897 - RNA, 19 nt, Homo sapiens
  misc_RNA (1)...(19): siRNA sense strand
uacaauccuucgacuauga

SEQ ID NO: 687898 - RNA, 19 nt, Homo sapiens
  misc_RNA (1)...(19): siRNA sense strand
gauuugcucuuccuaaugc

SEQ ID NO: 687899 - RNA, 19 nt, Homo sapiens
  misc_RNA (1)...(19): siRNA sense strand
gaaauaacuaucaccucuu

SEQ ID NO: 687900 - RNA, 19 nt, Homo sapiens
  misc_RNA (1)...(19): siRNA sense strand
aagacaccuugaagauuua

SEQ ID NO: 687901 - RNA, 19 nt, Homo sapiens
  misc_RNA (1)...(19): siRNA sense strand
guugaucacuguuguggau

SEQ ID NO: 687902 - RNA, 19 nt, Homo sapiens
  misc_RNA (1)...(19): siRNA sense strand
ccaggcagauccgauauuc

SEQ ID NO: 687903 - RNA, 19 nt, Homo sapiens
  misc_RNA (1)...(19): siRNA sense strand
ggaggacgaaguggagaua

SEQ ID NO: 687904 - RNA, 19 nt, Homo sapiens
  misc_RNA (1)...(19): siRNA sense strand
acucaugucuggcugaaug

SEQ ID NO: 687905 - RNA, 19 nt, Homo sapiens
  misc_RNA (1)...(19): siRNA sense strand
agugauugcucuucuaaau

SEQ ID NO: 687906 - RNA, 19 nt, Homo sapiens
  misc_RNA (1)...(19): siRNA sense strand
gguccucgauguaaaugau

SEQ ID NO: 687907 - RNA, 19 nt, Homo sapiens
  misc_RNA (1)...(19): siRNA sense strand
uaccagcucagcccuaaua

SEQ ID NO: 687908 - RNA, 19 nt, Homo sapiens
  misc_RNA (1)...(19): siRNA sense strand
gguccagagcuacaauaua

SEQ ID NO: 687909 - RNA, 19 nt, Homo sapiens
  misc_RNA (1)...(19): siRNA sense strand
gauaacgcuccagaaauaa

SEQ ID NO: 687910 - RNA, 19 nt, Homo sapiens
  misc_RNA (1)...(19): siRNA sense strand
guauaucgcgugaguguuc

SEQ ID NO: 687911 - RNA, 19 nt, Homo sapiens
  misc_RNA (1)...(19): siRNA sense strand
ggaguggagguggaaauaa

SEQ ID NO: 687912 - RNA, 19 nt, Homo sapiens
  misc_RNA (1)...(19): siRNA sense strand
caagaauccagagcuagua

SEQ ID NO: 687913 - RNA, 19 nt, Homo sapiens
  misc_RNA (1)...(19): siRNA sense strand
cgacgauguugaucacugu

SEQ ID NO: 687914 - RNA, 19 nt, Homo sapiens
  misc_RNA (1)...(19): siRNA sense strand
gaggcgaucccauccgaaa

SEQ ID NO: 687915 - RNA, 19 nt, Homo sapiens
  misc_RNA (1)...(19): siRNA sense strand
ggcugaauguggcagauga

SEQ ID NO: 687916 - RNA, 19 nt, Homo sapiens
  misc_RNA (1)...(19): siRNA sense strand
aaugauaacgcuccagaaa

SEQ ID NO: 687917 - RNA, 19 nt, Homo sapiens
  misc_RNA (1)...(19): siRNA sense strand
ucugaaauauuccaauugg

SEQ ID NO: 687918 - RNA, 19 nt, Homo sapiens
  misc_RNA (1)...(19): siRNA sense strand
gagacgguguccuccuguu

SEQ ID NO: 687919 - RNA, 19 nt, Homo sapiens
  misc_RNA (1)...(19): siRNA sense strand
uggcagaugacaacgauaa

SEQ ID NO: 687920 - RNA, 19 nt, Homo sapiens
  misc_RNA (1)...(19): siRNA sense strand
uaacuaucaccucuucuau

SEQ ID NO: 687921 - RNA, 19 nt, Homo sapiens
  misc_RNA (1)...(19): siRNA sense strand
ggaaauucaaggccaagau

SEQ ID NO: 687922 - RNA, 19 nt, Homo sapiens
  misc_RNA (1)...(19): siRNA sense strand
uaaaugugcaagaucaaga

SEQ ID NO: 687923 - RNA, 19 nt, Homo sapiens
  misc_RNA (1)...(19): siRNA sense strand
gggccaggcagauccgaua

SEQ ID NO: 687924 - RNA, 19 nt, Homo sapiens
  misc_RNA (1)...(19): siRNA sense strand
ggagguggaaauaauagau

SEQ ID NO: 687925 - RNA, 19 nt, Homo sapiens
  misc_RNA (1)...(19): siRNA sense strand
ccuacaauccuucgacuau

SEQ ID NO: 687926 - RNA, 19 nt, Homo sapiens
  misc_RNA (1)...(19): siRNA sense strand
cuuacucucugacggauga

SEQ ID NO: 687927 - RNA, 19 nt, Homo sapiens
  misc_RNA (1)...(19): siRNA sense strand
gaauguggcagaugacaac

SEQ ID NO: 687928 - RNA, 19 nt, Homo sapiens
  misc_RNA (1)...(19): siRNA sense strand
uauggaacuucucguggaa

SEQ ID NO: 687929 - RNA, 19 nt, Homo sapiens
  misc_RNA (1)...(19): siRNA sense strand
caauuggauucacaaacug

SEQ ID NO: 687930 - RNA, 19 nt, Homo sapiens
  misc_RNA (1)...(19): siRNA sense strand
uuguggaugugaaugauaa

SEQ ID NO: 687931 - RNA, 19 nt, Homo sapiens
  misc_RNA (1)...(19): siRNA sense strand
aggacgaaguggagauaaa

SEQ ID NO: 687932 - RNA, 19 nt, Homo sapiens
  misc_RNA (1)...(19): siRNA sense strand
cuacaauccuucgacuaug

SEQ ID NO: 687933 - RNA, 19 nt, Homo sapiens
  misc_RNA (1)...(19): siRNA sense strand
aaacucaugucuggcugaa

SEQ ID NO: 687934 - RNA, 19 nt, Homo sapiens
  misc_RNA (1)...(19): siRNA sense strand
gaaugauaacgcuccagaa

SEQ ID NO: 687935 - RNA, 19 nt, Homo sapiens
  misc_RNA (1)...(19): siRNA sense strand
gaacggauggggccaagaa

SEQ ID NO: 687936 - RNA, 19 nt, Homo sapiens
  misc_RNA (1)...(19): siRNA sense strand
gcaguuucgagacuuagaa

SEQ ID NO: 687937 - RNA, 19 nt, Homo sapiens
  misc_RNA (1)...(19): siRNA sense strand
aaagggcgcaguucccauu

SEQ ID NO: 687938 - RNA, 19 nt, Homo sapiens
  misc_RNA (1)...(19): siRNA sense strand
cuaaccaccugccuuuuaa

SEQ ID NO: 687939 - RNA, 19 nt, Homo sapiens
  misc_RNA (1)...(19): siRNA sense strand
ccaagaauccagagcuagu

SEQ ID NO: 687940 - RNA, 19 nt, Homo sapiens
  misc_RNA (1)...(19): siRNA sense strand
uuucgagacuuagaacuga

SEQ ID NO: 687941 - RNA, 19 nt, Homo sapiens
  misc_RNA (1)...(19): siRNA sense strand
gggugccucuguccuccua

SEQ ID NO: 687942 - RNA, 19 nt, Homo sapiens
  misc_RNA (1)...(19): siRNA sense strand
gccuccaucuucucaguga

SEQ ID NO: 687943 - RNA, 19 nt, Homo sapiens
  misc_RNA (1)...(19): siRNA sense strand
ccacgacgauguugaucac

SEQ ID NO: 687944 - RNA, 19 nt, Homo sapiens
  misc_RNA (1)...(19): siRNA sense strand
guccguauaucgcgugagu

SEQ ID NO: 687945 - RNA, 19 nt, Homo sapiens
  misc_RNA (1)...(19): siRNA sense strand
cuucgacuaugagcaguuu

SEQ ID NO: 687946 - RNA, 19 nt, Homo sapiens
  misc_RNA (1)...(19): siRNA sense strand
uggaagacaccuugaagau

SEQ ID NO: 687947 - RNA, 19 nt, Homo sapiens
  misc_RNA (1)...(19): siRNA sense strand
acagugauugcucuucuaa

SEQ ID NO: 687948 - RNA, 19 nt, Homo sapiens
  misc_RNA (1)...(19): siRNA sense strand
uacagugauugcucuucua

SEQ ID NO: 687949 - RNA, 19 nt, Homo sapiens
  misc_RNA (1)...(19): siRNA sense strand
ucgcgugaguguuccagaa

SEQ ID NO: 687950 - RNA, 19 nt, Homo sapiens
  misc_RNA (1)...(19): siRNA sense strand
cgauguugaucacuguugu

SEQ ID NO: 687951 - RNA, 19 nt, Homo sapiens
  misc_RNA (1)...(19): siRNA sense strand
ucuaugcccuacaauccuu

SEQ ID NO: 687952 - RNA, 19 nt, Homo sapiens
  misc_RNA (1)...(19): siRNA sense strand
auaacuaucaccucuucua

SEQ ID NO: 687953 - RNA, 19 nt, Homo sapiens
  misc_RNA (1)...(19): siRNA sense strand
caagucuccuguuuuauuc

SEQ ID NO: 687954 - RNA, 19 nt, Homo sapiens
  misc_RNA (1)...(19): siRNA sense strand
gaauccagagcuaguacug

SEQ ID NO: 687955 - RNA, 19 nt, Homo sapiens
  misc_RNA (1)...(19): siRNA sense strand
ugguugcgguggacaaaga

SEQ ID NO: 687956 - RNA, 19 nt, Homo sapiens
  misc_RNA (1)...(19): siRNA sense strand
ggacgaaguggagauaaaa

SEQ ID NO: 687957 - RNA, 19 nt, Homo sapiens
  misc_RNA (1)...(19): siRNA sense strand
uaacguugacagccacaga

SEQ ID NO: 687958 - RNA, 19 nt, Homo sapiens
  misc_RNA (1)...(19): siRNA sense strand
gugauugcucuucuaaaug

SEQ ID NO: 687959 - RNA, 19 nt, Homo sapiens
  misc_RNA (1)...(19): siRNA sense strand
ucaccucuucuauuaauuc

SEQ ID NO: 687960 - RNA, 19 nt, Homo sapiens
  misc_RNA (1)...(19): siRNA sense strand
gcuccagaaauaacuauca

SEQ ID NO: 687961 - RNA, 19 nt, Homo sapiens
  misc_RNA (1)...(19): siRNA sense strand
gaucacuguuguggaugug

SEQ ID NO: 687962 - RNA, 19 nt, Homo sapiens
  misc_RNA (1)...(19): siRNA sense strand
cggaguggagguggaaaua

SEQ ID NO: 687963 - RNA, 19 nt, Homo sapiens
  misc_RNA (1)...(19): siRNA sense strand
guggaagacaccuugaaga

SEQ ID NO: 687964 - RNA, 19 nt, Homo sapiens
  misc_RNA (1)...(19): siRNA sense strand
gacuuagaacugagaguga

SEQ ID NO: 687965 - RNA, 19 nt, Homo sapiens
  misc_RNA (1)...(19): siRNA sense strand
gaagacaccuugaagauuu

SEQ ID NO: 687966 - RNA, 19 nt, Homo sapiens
  misc_RNA (1)...(19): siRNA sense strand
ugauaacgcuccagaaaua

SEQ ID NO: 687967 - RNA, 19 nt, Homo sapiens
  misc_RNA (1)...(19): siRNA sense strand
guccagagcuacaauauaa

SEQ ID NO: 687968 - RNA, 19 nt, Homo sapiens
  misc_RNA (1)...(19): siRNA sense strand
agaaugcccuggucacuua

SEQ ID NO: 687969 - RNA, 19 nt, Homo sapiens
  misc_RNA (1)...(19): siRNA sense strand
acuaucaccucuucuauua

SEQ ID NO: 687970 - RNA, 19 nt, Homo sapiens
  misc_RNA (1)...(19): siRNA sense strand
gauauucggugccagaaga

SEQ ID NO: 687971 - RNA, 19 nt, Homo sapiens
  misc_RNA (1)...(19): siRNA sense strand
ggucaagucuccuguuuua

SEQ ID NO: 687972 - RNA, 19 nt, Homo sapiens
  misc_RNA (1)...(19): siRNA sense strand
ccaccugccuuuuaaauua

SEQ ID NO: 687973 - RNA, 19 nt, Homo sapiens
  misc_RNA (1)...(19): siRNA sense strand
cagcucagcccuaauaauu

SEQ ID NO: 687974 - RNA, 19 nt, Homo sapiens
  misc_RNA (1)...(19): siRNA sense strand
gaguggagguggaaauaau

SEQ ID NO: 687975 - RNA, 19 nt, Homo sapiens
  misc_RNA (1)...(19): siRNA sense strand
ccucacagcuuuagaugga

SEQ ID NO: 687976 - RNA, 19 nt, Homo sapiens
  misc_RNA (1)...(19): siRNA sense strand
ggaagacaccuugaagauu

SEQ ID NO: 687977 - RNA, 19 nt, Homo sapiens
  misc_RNA (1)...(19): siRNA sense strand
ccaauuggauucacaaacu

SEQ ID NO: 687978 - RNA, 19 nt, Homo sapiens
  misc_RNA (1)...(19): siRNA sense strand
caaggcuucugaaauauuc

SEQ ID NO: 687979 - RNA, 19 nt, Homo sapiens
  misc_RNA (1)...(19): siRNA sense strand
ccuccuaugucucuauuaa

SEQ ID NO: 687980 - RNA, 19 nt, Homo sapiens
  misc_RNA (1)...(19): siRNA sense strand
ucuaugagauggaaauuca

SEQ ID NO: 687981 - RNA, 19 nt, Homo sapiens
  misc_RNA (1)...(19): siRNA sense strand
gaucacggcaggcaggaua

SEQ ID NO: 687982 - RNA, 19 nt, Homo sapiens
  misc_RNA (1)...(19): siRNA sense strand
gaacucgggugcugauggu

SEQ ID NO: 687983 - RNA, 19 nt, Homo sapiens
  misc_RNA (1)...(19): siRNA sense strand
gaaauucaaggccaagaug

SEQ ID NO: 687984 - RNA, 19 nt, Homo sapiens
  misc_RNA (1)...(19): siRNA sense strand
gcaaggcuucugaaauauu

SEQ ID NO: 687985 - RNA, 19 nt, Homo sapiens
  misc_RNA (1)...(19): siRNA sense strand
ugauugcucuucuaaaugu

SEQ ID NO: 687986 - RNA, 19 nt, Homo sapiens
  misc_RNA (1)...(19): siRNA sense strand
gcgauuugcucuuccuaau

SEQ ID NO: 687987 - RNA, 19 nt, Homo sapiens
  misc_RNA (1)...(19): siRNA sense strand
ggccaagaauccagagcua

SEQ ID NO: 687988 - RNA, 19 nt, Homo sapiens
  misc_RNA (1)...(19): siRNA sense strand
gaugguggaggucucuuua

SEQ ID NO: 687989 - RNA, 19 nt, Homo sapiens
  misc_RNA (1)...(19): siRNA sense strand
gagguggaaauaauagaua

SEQ ID NO: 687990 - RNA, 19 nt, Homo sapiens
  misc_RNA (1)...(19): siRNA sense strand
gcuaccagcucagcccuaa

SEQ ID NO: 687991 - RNA, 19 nt, Homo sapiens
  misc_RNA (1)...(19): siRNA sense strand
ugaacucccuccagagcua

SEQ ID NO: 687992 - RNA, 19 nt, Homo sapiens
  misc_RNA (1)...(19): siRNA sense strand
aaauaacuaucaccucuuc

SEQ ID NO: 687993 - RNA, 19 nt, Homo sapiens
  misc_RNA (1)...(19): siRNA sense strand
uaaaugaucacaucccaau

SEQ ID NO: 687994 - RNA, 19 nt, Homo sapiens
  misc_RNA (1)...(19): siRNA sense strand
ugagcaguuucgagacuua

SEQ ID NO: 687995 - RNA, 19 nt, Homo sapiens
  misc_RNA (1)...(19): siRNA sense strand
guacagugauugcucuucu

SEQ ID NO: 687996 - RNA, 19 nt, Homo sapiens
  misc_RNA (1)...(19): siRNA sense strand
gggaguugguccagagcua

SEQ ID NO: 687997 - RNA, 19 nt, Homo sapiens
  misc_RNA (1)...(19): siRNA sense strand
uacaauccuucgacuauga

SEQ ID NO: 687998 - RNA, 19 nt, Homo sapiens
  misc_RNA (1)...(19): siRNA sense strand
gauuugcucuuccuaaugc

SEQ ID NO: 687999 - RNA, 19 nt, Homo sapiens
  misc_RNA (1)...(19): siRNA sense strand
gaaauaacuaucaccucuu

SEQ ID NO: 688000 - RNA, 19 nt, Homo sapiens
  misc_RNA (1)...(19): siRNA sense strand
aagacaccuugaagauuua

SEQ ID NO: 688001 - RNA, 19 nt, Homo sapiens
  misc_RNA (1)...(19): siRNA sense strand
guugaucacuguuguggau

SEQ ID NO: 688002 - RNA, 19 nt, Homo sapiens
  misc_RNA (1)...(19): siRNA sense strand
ccaggcagauccgauauuc

SEQ ID NO: 688003 - RNA, 19 nt, Homo sapiens
  misc_RNA (1)...(19): siRNA sense strand
ggaggacgaaguggagaua

SEQ ID NO: 688004 - RNA, 19 nt, Homo sapiens
  misc_RNA (1)...(19): siRNA sense strand
acucaugucuggcugaaug

SEQ ID NO: 688005 - RNA, 19 nt, Homo sapiens
  misc_RNA (1)...(19): siRNA sense strand
agugauugcucuucuaaau

SEQ ID NO: 688006 - RNA, 19 nt, Homo sapiens
  misc_RNA (1)...(19): siRNA sense strand
gguccucgauguaaaugau

SEQ ID NO: 688007 - RNA, 19 nt, Homo sapiens
  misc_RNA (1)...(19): siRNA sense strand
uaccagcucagcccuaaua

SEQ ID NO: 688008 - RNA, 19 nt, Homo sapiens
  misc_RNA (1)...(19): siRNA sense strand
gguccagagcuacaauaua

SEQ ID NO: 688009 - RNA, 19 nt, Homo sapiens
  misc_RNA (1)...(19): siRNA sense strand
gauaacgcuccagaaauaa

SEQ ID NO: 688010 - RNA, 19 nt, Homo sapiens
  misc_RNA (1)...(19): siRNA sense strand
guauaucgcgugaguguuc

SEQ ID NO: 688011 - RNA, 19 nt, Homo sapiens
  misc_RNA (1)...(19): siRNA sense strand
ggaguggagguggaaauaa

SEQ ID NO: 688012 - RNA, 19 nt, Homo sapiens
  misc_RNA (1)...(19): siRNA sense strand
caagaauccagagcuagua

SEQ ID NO: 688013 - RNA, 19 nt, Homo sapiens
  misc_RNA (1)...(19): siRNA sense strand
cgacgauguugaucacugu

SEQ ID NO: 688014 - RNA, 19 nt, Homo sapiens
  misc_RNA (1)...(19): siRNA sense strand
gaggcgaucccauccgaaa

SEQ ID NO: 688015 - RNA, 19 nt, Homo sapiens
  misc_RNA (1)...(19): siRNA sense strand
ggcugaauguggcagauga

SEQ ID NO: 688016 - RNA, 19 nt, Homo sapiens
  misc_RNA (1)...(19): siRNA sense strand
aaugauaacgcuccagaaa

SEQ ID NO: 688017 - RNA, 19 nt, Homo sapiens
  misc_RNA (1)...(19): siRNA sense strand
ucugaaauauuccaauugg

SEQ ID NO: 688018 - RNA, 19 nt, Homo sapiens
  misc_RNA (1)...(19): siRNA sense strand
gagacgguguccuccuguu

SEQ ID NO: 688019 - RNA, 19 nt, Homo sapiens
  misc_RNA (1)...(19): siRNA sense strand
uggcagaugacaacgauaa

SEQ ID NO: 688020 - RNA, 19 nt, Homo sapiens
  misc_RNA (1)...(19): siRNA sense strand
uaacuaucaccucuucuau

SEQ ID NO: 688021 - RNA, 19 nt, Homo sapiens
  misc_RNA (1)...(19): siRNA sense strand
ggaaauucaaggccaagau

SEQ ID NO: 688022 - RNA, 19 nt, Homo sapiens
  misc_RNA (1)...(19): siRNA sense strand
uaaaugugcaagaucaaga

SEQ ID NO: 688023 - RNA, 19 nt, Homo sapiens
  misc_RNA (1)...(19): siRNA sense strand
gggccaggcagauccgaua

SEQ ID NO: 688024 - RNA, 19 nt, Homo sapiens
  misc_RNA (1)...(19): siRNA sense strand
ggagguggaaauaauagau

SEQ ID NO: 688025 - RNA, 19 nt, Homo sapiens
  misc_RNA (1)...(19): siRNA sense strand
ccuacaauccuucgacuau

SEQ ID NO: 688026 - RNA, 19 nt, Homo sapiens
  misc_RNA (1)...(19): siRNA sense strand
cuuacucucugacggauga

SEQ ID NO: 688027 - RNA, 19 nt, Homo sapiens
  misc_RNA (1)...(19): siRNA sense strand
gaauguggcagaugacaac

SEQ ID NO: 688028 - RNA, 19 nt, Homo sapiens
  misc_RNA (1)...(19): siRNA sense strand
uauggaacuucucguggaa

SEQ ID NO: 688029 - RNA, 19 nt, Homo sapiens
  misc_RNA (1)...(19): siRNA sense strand
caauuggauucacaaacug

SEQ ID NO: 688030 - RNA, 19 nt, Homo sapiens
  misc_RNA (1)...(19): siRNA sense strand
uuguggaugugaaugauaa

SEQ ID NO: 688031 - RNA, 19 nt, Homo sapiens
  misc_RNA (1)...(19): siRNA sense strand
aggacgaaguggagauaaa

SEQ ID NO: 688032 - RNA, 19 nt, Homo sapiens
  misc_RNA (1)...(19): siRNA sense strand
cuacaauccuucgacuaug

SEQ ID NO: 688033 - RNA, 19 nt, Homo sapiens
  misc_RNA (1)...(19): siRNA sense strand
aaacucaugucuggcugaa

SEQ ID NO: 688034 - RNA, 19 nt, Homo sapiens
  misc_RNA (1)...(19): siRNA sense strand
gaaugauaacgcuccagaa

SEQ ID NO: 688035 - RNA, 19 nt, Homo sapiens
  misc_RNA (1)...(19): siRNA sense strand
gaacggauggggccaagaa

SEQ ID NO: 688036 - RNA, 19 nt, Homo sapiens
  misc_RNA (1)...(19): siRNA sense strand
gcaguuucgagacuuagaa

SEQ ID NO: 688037 - RNA, 19 nt, Homo sapiens
  misc_RNA (1)...(19): siRNA sense strand
aaagggcgcaguucccauu

SEQ ID NO: 688038 - RNA, 19 nt, Homo sapiens
  misc_RNA (1)...(19): siRNA sense strand
cuaaccaccugccuuuuaa

SEQ ID NO: 688039 - RNA, 19 nt, Homo sapiens
  misc_RNA (1)...(19): siRNA sense strand
ccaagaauccagagcuagu

SEQ ID NO: 688040 - RNA, 19 nt, Homo sapiens
  misc_RNA (1)...(19): siRNA sense strand
uuucgagacuuagaacuga

SEQ ID NO: 688041 - RNA, 19 nt, Homo sapiens
  misc_RNA (1)...(19): siRNA sense strand
gggugccucuguccuccua

SEQ ID NO: 688042 - RNA, 19 nt, Homo sapiens
  misc_RNA (1)...(19): siRNA sense strand
gccuccaucuucucaguga

SEQ ID NO: 688043 - RNA, 19 nt, Homo sapiens
  misc_RNA (1)...(19): siRNA sense strand
ccacgacgauguugaucac

SEQ ID NO: 688044 - RNA, 19 nt, Homo sapiens
  misc_RNA (1)...(19): siRNA sense strand
guccguauaucgcgugagu

SEQ ID NO: 688045 - RNA, 19 nt, Homo sapiens
  misc_RNA (1)...(19): siRNA sense strand
cuucgacuaugagcaguuu

SEQ ID NO: 688046 - RNA, 19 nt, Homo sapiens
  misc_RNA (1)...(19): siRNA sense strand
uggaagacaccuugaagau

SEQ ID NO: 688047 - RNA, 19 nt, Homo sapiens
  misc_RNA (1)...(19): siRNA sense strand
acagugauugcucuucuaa

SEQ ID NO: 688048 - RNA, 19 nt, Homo sapiens
  misc_RNA (1)...(19): siRNA sense strand
uacagugauugcucuucua

SEQ ID NO: 688049 - RNA, 19 nt, Homo sapiens
  misc_RNA (1)...(19): siRNA sense strand
ucgcgugaguguuccagaa

SEQ ID NO: 688050 - RNA, 19 nt, Homo sapiens
  misc_RNA (1)...(19): siRNA sense strand
cgauguugaucacuguugu

SEQ ID NO: 688051 - RNA, 19 nt, Homo sapiens
  misc_RNA (1)...(19): siRNA sense strand
ucuaugcccuacaauccuu

SEQ ID NO: 688052 - RNA, 19 nt, Homo sapiens
  misc_RNA (1)...(19): siRNA sense strand
auaacuaucaccucuucua

SEQ ID NO: 688053 - RNA, 19 nt, Homo sapiens
  misc_RNA (1)...(19): siRNA sense strand
caagucuccuguuuuauuc

SEQ ID NO: 688054 - RNA, 19 nt, Homo sapiens
  misc_RNA (1)...(19): siRNA sense strand
gaauccagagcuaguacug

SEQ ID NO: 688055 - RNA, 19 nt, Homo sapiens
  misc_RNA (1)...(19): siRNA sense strand
ugguugcgguggacaaaga

SEQ ID NO: 688056 - RNA, 19 nt, Homo sapiens
  misc_RNA (1)...(19): siRNA sense strand
ggacgaaguggagauaaaa

SEQ ID NO: 688057 - RNA, 19 nt, Homo sapiens
  misc_RNA (1)...(19): siRNA sense strand
uaacguugacagccacaga

SEQ ID NO: 688058 - RNA, 19 nt, Homo sapiens
  misc_RNA (1)...(19): siRNA sense strand
gugauugcucuucuaaaug

SEQ ID NO: 688059 - RNA, 19 nt, Homo sapiens
  misc_RNA (1)...(19): siRNA sense strand
ucaccucuucuauuaauuc

SEQ ID NO: 688060 - RNA, 19 nt, Homo sapiens
  misc_RNA (1)...(19): siRNA sense strand
gcuccagaaauaacuauca

SEQ ID NO: 688061 - RNA, 19 nt, Homo sapiens
  misc_RNA (1)...(19): siRNA sense strand
gaucacuguuguggaugug

SEQ ID NO: 688062 - RNA, 19 nt, Homo sapiens
  misc_RNA (1)...(19): siRNA sense strand
cggaguggagguggaaaua

SEQ ID NO: 688063 - RNA, 19 nt, Homo sapiens
  misc_RNA (1)...(19): siRNA sense strand
guggaagacaccuugaaga

SEQ ID NO: 688064 - RNA, 19 nt, Homo sapiens
  misc_RNA (1)...(19): siRNA sense strand
gacuuagaacugagaguga

SEQ ID NO: 688065 - RNA, 19 nt, Homo sapiens
  misc_RNA (1)...(19): siRNA sense strand
gauagaagcugcaaauaaa

SEQ ID NO: 688066 - RNA, 19 nt, Homo sapiens
  misc_RNA (1)...(19): siRNA sense strand
uaacugaugucaacgauaa

SEQ ID NO: 688067 - RNA, 19 nt, Homo sapiens
  misc_RNA (1)...(19): siRNA sense strand
gaaauggaguacaagauug

SEQ ID NO: 688068 - RNA, 19 nt, Homo sapiens
  misc_RNA (1)...(19): siRNA sense strand
gagagauacuucaauauug

SEQ ID NO: 688069 - RNA, 19 nt, Homo sapiens
  misc_RNA (1)...(19): siRNA sense strand
ucacucagcucuuuagauu

SEQ ID NO: 688070 - RNA, 19 nt, Homo sapiens
  misc_RNA (1)...(19): siRNA sense strand
uaggaaagcuucacucuga

SEQ ID NO: 688071 - RNA, 19 nt, Homo sapiens
  misc_RNA (1)...(19): siRNA sense strand
ggaugugacuccagaaauu

SEQ ID NO: 688072 - RNA, 19 nt, Homo sapiens
  misc_RNA (1)...(19): siRNA sense strand
ggauagaagcugcaaauaa

SEQ ID NO: 688073 - RNA, 19 nt, Homo sapiens
  misc_RNA (1)...(19): siRNA sense strand
ggagagauacuucaauauu

SEQ ID NO: 688074 - RNA, 19 nt, Homo sapiens
  misc_RNA (1)...(19): siRNA sense strand
gaaagagacaucagagaaa

SEQ ID NO: 688075 - RNA, 19 nt, Homo sapiens
  misc_RNA (1)...(19): siRNA sense strand
ugacauggcugcacugaga

SEQ ID NO: 688076 - RNA, 19 nt, Homo sapiens
  misc_RNA (1)...(19): siRNA sense strand
acacagacuuggagagaua

SEQ ID NO: 688077 - RNA, 19 nt, Homo sapiens
  misc_RNA (1)...(19): siRNA sense strand
gaagauaauuguggaagau

SEQ ID NO: 688078 - RNA, 19 nt, Homo sapiens
  misc_RNA (1)...(19): siRNA sense strand
caacggaugcaacaaauaa

SEQ ID NO: 688079 - RNA, 19 nt, Homo sapiens
  misc_RNA (1)...(19): siRNA sense strand
gaauaucauuggcacugua

SEQ ID NO: 688080 - RNA, 19 nt, Homo sapiens
  misc_RNA (1)...(19): siRNA sense strand
gaaggaaucauuacuauac

SEQ ID NO: 688081 - RNA, 19 nt, Homo sapiens
  misc_RNA (1)...(19): siRNA sense strand
caacgacaaugaacccaaa

SEQ ID NO: 688082 - RNA, 19 nt, Homo sapiens
  misc_RNA (1)...(19): siRNA sense strand
ucgaaggucuuaucaauau

SEQ ID NO: 688083 - RNA, 19 nt, Homo sapiens
  misc_RNA (1)...(19): siRNA sense strand
gaauccaucucaaguagga

SEQ ID NO: 688084 - RNA, 19 nt, Homo sapiens
  misc_RNA (1)...(19): siRNA sense strand
ggaacaaucaguuuacuau

SEQ ID NO: 688085 - RNA, 19 nt, Homo sapiens
  misc_RNA (1)...(19): siRNA sense strand
caacacagccucaauacug

SEQ ID NO: 688086 - RNA, 19 nt, Homo sapiens
  misc_RNA (1)...(19): siRNA sense strand
cgacaacugugaagauaau

SEQ ID NO: 688087 - RNA, 19 nt, Homo sapiens
  misc_RNA (1)...(19): siRNA sense strand
ggaaggaaucauuacuaua

SEQ ID NO: 688088 - RNA, 19 nt, Homo sapiens
  misc_RNA (1)...(19): siRNA sense strand
ugaaggaaauggcucaguu

SEQ ID NO: 688089 - RNA, 19 nt, Homo sapiens
  misc_RNA (1)...(19): siRNA sense strand
caacaaauaaccacaacuu

SEQ ID NO: 688090 - RNA, 19 nt, Homo sapiens
  misc_RNA (1)...(19): siRNA sense strand
gacaaaugcuauucacaau

SEQ ID NO: 688091 - RNA, 19 nt, Homo sapiens
  misc_RNA (1)...(19): siRNA sense strand
gaucaaagcccuauuucca

SEQ ID NO: 688092 - RNA, 19 nt, Homo sapiens
  misc_RNA (1)...(19): siRNA sense strand
ccaccucgcuuuccucgaa

SEQ ID NO: 688093 - RNA, 19 nt, Homo sapiens
  misc_RNA (1)...(19): siRNA sense strand
uaacaacggaugcaacaaa

SEQ ID NO: 688094 - RNA, 19 nt, Homo sapiens
  misc_RNA (1)...(19): siRNA sense strand
gaacuaugacuaccuaagu

SEQ ID NO: 688095 - RNA, 19 nt, Homo sapiens
  misc_RNA (1)...(19): siRNA sense strand
ucagaacuaugacuaccua

SEQ ID NO: 688096 - RNA, 19 nt, Homo sapiens
  misc_RNA (1)...(19): siRNA sense strand
cgacaaugaacccaaauuu

SEQ ID NO: 688097 - RNA, 19 nt, Homo sapiens
  misc_RNA (1)...(19): siRNA sense strand
gacaggaacaaucaguuua

SEQ ID NO: 688098 - RNA, 19 nt, Homo sapiens
  misc_RNA (1)...(19): siRNA sense strand
ccagaguggucuacaguau

SEQ ID NO: 688099 - RNA, 19 nt, Homo sapiens
  misc_RNA (1)...(19): siRNA sense strand
gguacucaauugacagaaa

SEQ ID NO: 688100 - RNA, 19 nt, Homo sapiens
  misc_RNA (1)...(19): siRNA sense strand
ccaauagcccugugaggua

SEQ ID NO: 688101 - RNA, 19 nt, Homo sapiens
  misc_RNA (1)...(19): siRNA sense strand
ccucgaaggucuuaucaau

SEQ ID NO: 688102 - RNA, 19 nt, Homo sapiens
  misc_RNA (1)...(19): siRNA sense strand
ggaggacugucaggaacua

SEQ ID NO: 688103 - RNA, 19 nt, Homo sapiens
  misc_RNA (1)...(19): siRNA sense strand
uuggagagauacuucaaua

SEQ ID NO: 688104 - RNA, 19 nt, Homo sapiens
  misc_RNA (1)...(19): siRNA sense strand
ucaaagcccuauuuccaau

SEQ ID NO: 688105 - RNA, 19 nt, Homo sapiens
  misc_RNA (1)...(19): siRNA sense strand
ggacuggccaagagaguuu

SEQ ID NO: 688106 - RNA, 19 nt, Homo sapiens
  misc_RNA (1)...(19): siRNA sense strand
agacaacacagccucaaua

SEQ ID NO: 688107 - RNA, 19 nt, Homo sapiens
  misc_RNA (1)...(19): siRNA sense strand
cagaauccaucucaaguag

SEQ ID NO: 688108 - RNA, 19 nt, Homo sapiens
  misc_RNA (1)...(19): siRNA sense strand
ucacaacugccaagucuuu

SEQ ID NO: 688109 - RNA, 19 nt, Homo sapiens
  misc_RNA (1)...(19): siRNA sense strand
ugaaauggaguacaagauu

SEQ ID NO: 688110 - RNA, 19 nt, Homo sapiens
  misc_RNA (1)...(19): siRNA sense strand
ggcaggaguucccgaaaug

SEQ ID NO: 688111 - RNA, 19 nt, Homo sapiens
  misc_RNA (1)...(19): siRNA sense strand
caucacaacugccaagucu

SEQ ID NO: 688112 - RNA, 19 nt, Homo sapiens
  misc_RNA (1)...(19): siRNA sense strand
cacgacaacugugaagaua

SEQ ID NO: 688113 - RNA, 19 nt, Homo sapiens
  misc_RNA (1)...(19): siRNA sense strand
agaaggagcuggauuuuga

SEQ ID NO: 688114 - RNA, 19 nt, Homo sapiens
  misc_RNA (1)...(19): siRNA sense strand
caaagaaacccaggaagga

SEQ ID NO: 688115 - RNA, 19 nt, Homo sapiens
  misc_RNA (1)...(19): siRNA sense strand
uaacgucccagagucauua

SEQ ID NO: 688116 - RNA, 19 nt, Homo sapiens
  misc_RNA (1)...(19): siRNA sense strand
ggugaugguuugggcauuu

SEQ ID NO: 688117 - RNA, 19 nt, Homo sapiens
  misc_RNA (1)...(19): siRNA sense strand
gaaggaaauggcucaguug

SEQ ID NO: 688118 - RNA, 19 nt, Homo sapiens
  misc_RNA (1)...(19): siRNA sense strand
ggaauuuauuugggaaaga

SEQ ID NO: 688119 - RNA, 19 nt, Homo sapiens
  misc_RNA (1)...(19): siRNA sense strand
gacccagauucuuccaaua

SEQ ID NO: 688120 - RNA, 19 nt, Homo sapiens
  misc_RNA (1)...(19): siRNA sense strand
ucacucugauguugauaaa

SEQ ID NO: 688121 - RNA, 19 nt, Homo sapiens
  misc_RNA (1)...(19): siRNA sense strand
ucagugcuguggauaaaga

SEQ ID NO: 688122 - RNA, 19 nt, Homo sapiens
  misc_RNA (1)...(19): siRNA sense strand
uggauaggcucaccaacaa

SEQ ID NO: 688123 - RNA, 19 nt, Homo sapiens
  misc_RNA (1)...(19): siRNA sense strand
ccagaucaaagcccuauuu

SEQ ID NO: 688124 - RNA, 19 nt, Homo sapiens
  misc_RNA (1)...(19): siRNA sense strand
gaaaaucagugcuguggau

SEQ ID NO: 688125 - RNA, 19 nt, Homo sapiens
  misc_RNA (1)...(19): siRNA sense strand
ucacaguccuugcaaugga

SEQ ID NO: 688126 - RNA, 19 nt, Homo sapiens
  misc_RNA (1)...(19): siRNA sense strand
cgaaggucuuaucaauaua

SEQ ID NO: 688127 - RNA, 19 nt, Homo sapiens
  misc_RNA (1)...(19): siRNA sense strand
gagcuaaugcugaaaugga

SEQ ID NO: 688128 - RNA, 19 nt, Homo sapiens
  misc_RNA (1)...(19): siRNA sense strand
gauaauuguggaagaugua

SEQ ID NO: 688129 - RNA, 19 nt, Homo sapiens
  misc_RNA (1)...(19): siRNA sense strand
gugaggagcaggccuacua

SEQ ID NO: 688130 - RNA, 19 nt, Homo sapiens
  misc_RNA (1)...(19): siRNA sense strand
ggaggacacggaagcguuu

SEQ ID NO: 688131 - RNA, 19 nt, Homo sapiens
  misc_RNA (1)...(19): siRNA sense strand
agaaagagacaucagagaa

SEQ ID NO: 688132 - RNA, 19 nt, Homo sapiens
  misc_RNA (1)...(19): siRNA sense strand
ugacagaaacacagacuug

SEQ ID NO: 688133 - RNA, 19 nt, Homo sapiens
  misc_RNA (1)...(19): siRNA sense strand
ggaccucagugguacaagu

SEQ ID NO: 688134 - RNA, 19 nt, Homo sapiens
  misc_RNA (1)...(19): siRNA sense strand
ggauaucaacgacaaugaa

SEQ ID NO: 688135 - RNA, 19 nt, Homo sapiens
  misc_RNA (1)...(19): siRNA sense strand
ucaguuguggccagaauua

SEQ ID NO: 688136 - RNA, 19 nt, Homo sapiens
  misc_RNA (1)...(19): siRNA sense strand
gcagacauaugcuuuugaa

SEQ ID NO: 688137 - RNA, 19 nt, Homo sapiens
  misc_RNA (1)...(19): siRNA sense strand
aaucagugcuguggauaaa

SEQ ID NO: 688138 - RNA, 19 nt, Homo sapiens
  misc_RNA (1)...(19): siRNA sense strand
ccagaauccaucucaagua

SEQ ID NO: 688139 - RNA, 19 nt, Homo sapiens
  misc_RNA (1)...(19): siRNA sense strand
gguguggaaucaguucuuu

SEQ ID NO: 688140 - RNA, 19 nt, Homo sapiens
  misc_RNA (1)...(19): siRNA sense strand
caauauugaugccaacagu

SEQ ID NO: 688141 - RNA, 19 nt, Homo sapiens
  misc_RNA (1)...(19): siRNA sense strand
gcagcuggguguggaauca

SEQ ID NO: 688142 - RNA, 19 nt, Homo sapiens
  misc_RNA (1)...(19): siRNA sense strand
ugaagauaauuguggaaga

SEQ ID NO: 688143 - RNA, 19 nt, Homo sapiens
  misc_RNA (1)...(19): siRNA sense strand
aaaguggaguucugccauu

SEQ ID NO: 688144 - RNA, 19 nt, Homo sapiens
  misc_RNA (1)...(19): siRNA sense strand
gcaaguuccauuuucauua

SEQ ID NO: 688145 - RNA, 19 nt, Homo sapiens
  misc_RNA (1)...(19): siRNA sense strand
agacaaaugcuauucacaa

SEQ ID NO: 688146 - RNA, 19 nt, Homo sapiens
  misc_RNA (1)...(19): siRNA sense strand
ggaauaucauuggcacugu

SEQ ID NO: 688147 - RNA, 19 nt, Homo sapiens
  misc_RNA (1)...(19): siRNA sense strand
aggaaggaaucauuacuau

SEQ ID NO: 688148 - RNA, 19 nt, Homo sapiens
  misc_RNA (1)...(19): siRNA sense strand
gacccuaacugaugucaac

SEQ ID NO: 688149 - RNA, 19 nt, Homo sapiens
  misc_RNA (1)...(19): siRNA sense strand
agaguggucuacaguauuc

SEQ ID NO: 688150 - RNA, 19 nt, Homo sapiens
  misc_RNA (1)...(19): siRNA sense strand
aauuaaagcugcugaugca

SEQ ID NO: 688151 - RNA, 19 nt, Homo sapiens
  misc_RNA (1)...(19): siRNA sense strand
ggaaucauuacuauacaga

SEQ ID NO: 688152 - RNA, 19 nt, Homo sapiens
  misc_RNA (1)...(19): siRNA sense strand
agacugcccuuccaaacau

SEQ ID NO: 688153 - RNA, 19 nt, Homo sapiens
  misc_RNA (1)...(19): siRNA sense strand
gcaaugcagaggccuaugu

SEQ ID NO: 688154 - RNA, 19 nt, Homo sapiens
  misc_RNA (1)...(19): siRNA sense strand
ggaucucccucacuuagca

SEQ ID NO: 688155 - RNA, 19 nt, Homo sapiens
  misc_RNA (1)...(19): siRNA sense strand
gaacaaucaguuuacuauc

SEQ ID NO: 688156 - RNA, 19 nt, Homo sapiens
  misc_RNA (1)...(19): siRNA sense strand
caggaaggaaucauuacua

SEQ ID NO: 688157 - RNA, 19 nt, Homo sapiens
  misc_RNA (1)...(19): siRNA sense strand
gauaauccaccucgcuuuc

SEQ ID NO: 688158 - RNA, 19 nt, Homo sapiens
  misc_RNA (1)...(19): siRNA sense strand
caucaaauacaucuuguca

SEQ ID NO: 688159 - RNA, 19 nt, Homo sapiens
  misc_RNA (1)...(19): siRNA sense strand
ugacaaagaaacccaggaa

SEQ ID NO: 688160 - RNA, 19 nt, Homo sapiens
  misc_RNA (1)...(19): siRNA sense strand
cgaagaaagagacaucaga

SEQ ID NO: 688161 - RNA, 19 nt, Homo sapiens
  misc_RNA (1)...(19): siRNA sense strand
ugacccagauucuuccaau

SEQ ID NO: 688162 - RNA, 19 nt, Homo sapiens
  misc_RNA (1)...(19): siRNA sense strand
ucuuugugcuggaggaaua

SEQ ID NO: 688163 - RNA, 19 nt, Homo sapiens
  misc_RNA (1)...(19): siRNA sense strand
cauacucgccugugucuug

SEQ ID NO: 688164 - RNA, 19 nt, Homo sapiens
  misc_RNA (1)...(19): siRNA sense strand
agacaggaacaaucaguuu

SEQ ID NO: 688165 - RNA, 19 nt, Homo sapiens
  misc_RNA (1)...(19): siRNA sense strand
gauagaagcugcaaauaaa

SEQ ID NO: 688166 - RNA, 19 nt, Homo sapiens
  misc_RNA (1)...(19): siRNA sense strand
uaacugaugucaacgauaa

SEQ ID NO: 688167 - RNA, 19 nt, Homo sapiens
  misc_RNA (1)...(19): siRNA sense strand
gaaauggaguacaagauug

SEQ ID NO: 688168 - RNA, 19 nt, Homo sapiens
  misc_RNA (1)...(19): siRNA sense strand
gagagauacuucaauauug

SEQ ID NO: 688169 - RNA, 19 nt, Homo sapiens
  misc_RNA (1)...(19): siRNA sense strand
ucacucagcucuuuagauu

SEQ ID NO: 688170 - RNA, 19 nt, Homo sapiens
  misc_RNA (1)...(19): siRNA sense strand
uaggaaagcuucacucuga

SEQ ID NO: 688171 - RNA, 19 nt, Homo sapiens
  misc_RNA (1)...(19): siRNA sense strand
ggaugugacuccagaaauu

SEQ ID NO: 688172 - RNA, 19 nt, Homo sapiens
  misc_RNA (1)...(19): siRNA sense strand
ggauagaagcugcaaauaa

SEQ ID NO: 688173 - RNA, 19 nt, Homo sapiens
  misc_RNA (1)...(19): siRNA sense strand
ggagagauacuucaauauu

SEQ ID NO: 688174 - RNA, 19 nt, Homo sapiens
  misc_RNA (1)...(19): siRNA sense strand
gaaagagacaucagagaaa

SEQ ID NO: 688175 - RNA, 19 nt, Homo sapiens
  misc_RNA (1)...(19): siRNA sense strand
ugacauggcugcacugaga

SEQ ID NO: 688176 - RNA, 19 nt, Homo sapiens
  misc_RNA (1)...(19): siRNA sense strand
acacagacuuggagagaua

SEQ ID NO: 688177 - RNA, 19 nt, Homo sapiens
  misc_RNA (1)...(19): siRNA sense strand
gaagauaauuguggaagau

SEQ ID NO: 688178 - RNA, 19 nt, Homo sapiens
  misc_RNA (1)...(19): siRNA sense strand
caacggaugcaacaaauaa

SEQ ID NO: 688179 - RNA, 19 nt, Homo sapiens
  misc_RNA (1)...(19): siRNA sense strand
gaauaucauuggcacugua

SEQ ID NO: 688180 - RNA, 19 nt, Homo sapiens
  misc_RNA (1)...(19): siRNA sense strand
gaaggaaucauuacuauac

SEQ ID NO: 688181 - RNA, 19 nt, Homo sapiens
  misc_RNA (1)...(19): siRNA sense strand
caacgacaaugaacccaaa

SEQ ID NO: 688182 - RNA, 19 nt, Homo sapiens
  misc_RNA (1)...(19): siRNA sense strand
ucgaaggucuuaucaauau

SEQ ID NO: 688183 - RNA, 19 nt, Homo sapiens
  misc_RNA (1)...(19): siRNA sense strand
gaauccaucucaaguagga

SEQ ID NO: 688184 - RNA, 19 nt, Homo sapiens
  misc_RNA (1)...(19): siRNA sense strand
ggaacaaucaguuuacuau

SEQ ID NO: 688185 - RNA, 19 nt, Homo sapiens
  misc_RNA (1)...(19): siRNA sense strand
caacacagccucaauacug

SEQ ID NO: 688186 - RNA, 19 nt, Homo sapiens
  misc_RNA (1)...(19): siRNA sense strand
cgacaacugugaagauaau

SEQ ID NO: 688187 - RNA, 19 nt, Homo sapiens
  misc_RNA (1)...(19): siRNA sense strand
ggaaggaaucauuacuaua

SEQ ID NO: 688188 - RNA, 19 nt, Homo sapiens
  misc_RNA (1)...(19): siRNA sense strand
ugaaggaaauggcucaguu

SEQ ID NO: 688189 - RNA, 19 nt, Homo sapiens
  misc_RNA (1)...(19): siRNA sense strand
caacaaauaaccacaacuu

SEQ ID NO: 688190 - RNA, 19 nt, Homo sapiens
  misc_RNA (1)...(19): siRNA sense strand
gacaaaugcuauucacaau

SEQ ID NO: 688191 - RNA, 19 nt, Homo sapiens
  misc_RNA (1)...(19): siRNA sense strand
gaucaaagcccuauuucca

SEQ ID NO: 688192 - RNA, 19 nt, Homo sapiens
  misc_RNA (1)...(19): siRNA sense strand
ccaccucgcuuuccucgaa

SEQ ID NO: 688193 - RNA, 19 nt, Homo sapiens
  misc_RNA (1)...(19): siRNA sense strand
uaacaacggaugcaacaaa

SEQ ID NO: 688194 - RNA, 19 nt, Homo sapiens
  misc_RNA (1)...(19): siRNA sense strand
gaacuaugacuaccuaagu

SEQ ID NO: 688195 - RNA, 19 nt, Homo sapiens
  misc_RNA (1)...(19): siRNA sense strand
ucagaacuaugacuaccua

SEQ ID NO: 688196 - RNA, 19 nt, Homo sapiens
  misc_RNA (1)...(19): siRNA sense strand
cgacaaugaacccaaauuu

SEQ ID NO: 688197 - RNA, 19 nt, Homo sapiens
  misc_RNA (1)...(19): siRNA sense strand
gacaggaacaaucaguuua

SEQ ID NO: 688198 - RNA, 19 nt, Homo sapiens
  misc_RNA (1)...(19): siRNA sense strand
ccagaguggucuacaguau

SEQ ID NO: 688199 - RNA, 19 nt, Homo sapiens
  misc_RNA (1)...(19): siRNA sense strand
gguacucaauugacagaaa

SEQ ID NO: 688200 - RNA, 19 nt, Homo sapiens
  misc_RNA (1)...(19): siRNA sense strand
ccaauagcccugugaggua

SEQ ID NO: 688201 - RNA, 19 nt, Homo sapiens
  misc_RNA (1)...(19): siRNA sense strand
ccucgaaggucuuaucaau

SEQ ID NO: 688202 - RNA, 19 nt, Homo sapiens
  misc_RNA (1)...(19): siRNA sense strand
ggaggacugucaggaacua

SEQ ID NO: 688203 - RNA, 19 nt, Homo sapiens
  misc_RNA (1)...(19): siRNA sense strand
uuggagagauacuucaaua

SEQ ID NO: 688204 - RNA, 19 nt, Homo sapiens
  misc_RNA (1)...(19): siRNA sense strand
ucaaagcccuauuuccaau

SEQ ID NO: 688205 - RNA, 19 nt, Homo sapiens
  misc_RNA (1)...(19): siRNA sense strand
ggacuggccaagagaguuu

SEQ ID NO: 688206 - RNA, 19 nt, Homo sapiens
  misc_RNA (1)...(19): siRNA sense strand
agacaacacagccucaaua

SEQ ID NO: 688207 - RNA, 19 nt, Homo sapiens
  misc_RNA (1)...(19): siRNA sense strand
cagaauccaucucaaguag

SEQ ID NO: 688208 - RNA, 19 nt, Homo sapiens
  misc_RNA (1)...(19): siRNA sense strand
ucacaacugccaagucuuu

SEQ ID NO: 688209 - RNA, 19 nt, Homo sapiens
  misc_RNA (1)...(19): siRNA sense strand
ugaaauggaguacaagauu

SEQ ID NO: 688210 - RNA, 19 nt, Homo sapiens
  misc_RNA (1)...(19): siRNA sense strand
ggcaggaguucccgaaaug

SEQ ID NO: 688211 - RNA, 19 nt, Homo sapiens
  misc_RNA (1)...(19): siRNA sense strand
caucacaacugccaagucu

SEQ ID NO: 688212 - RNA, 19 nt, Homo sapiens
  misc_RNA (1)...(19): siRNA sense strand
cacgacaacugugaagaua

SEQ ID NO: 688213 - RNA, 19 nt, Homo sapiens
  misc_RNA (1)...(19): siRNA sense strand
agaaggagcuggauuuuga

SEQ ID NO: 688214 - RNA, 19 nt, Homo sapiens
  misc_RNA (1)...(19): siRNA sense strand
caaagaaacccaggaagga

SEQ ID NO: 688215 - RNA, 19 nt, Homo sapiens
  misc_RNA (1)...(19): siRNA sense strand
uaacgucccagagucauua

SEQ ID NO: 688216 - RNA, 19 nt, Homo sapiens
  misc_RNA (1)...(19): siRNA sense strand
ggugaugguuugggcauuu

SEQ ID NO: 688217 - RNA, 19 nt, Homo sapiens
  misc_RNA (1)...(19): siRNA sense strand
gaaggaaauggcucaguug

SEQ ID NO: 688218 - RNA, 19 nt, Homo sapiens
  misc_RNA (1)...(19): siRNA sense strand
ggaauuuauuugggaaaga

SEQ ID NO: 688219 - RNA, 19 nt, Homo sapiens
  misc_RNA (1)...(19): siRNA sense strand
gacccagauucuuccaaua

SEQ ID NO: 688220 - RNA, 19 nt, Homo sapiens
  misc_RNA (1)...(19): siRNA sense strand
ucacucugauguugauaaa

SEQ ID NO: 688221 - RNA, 19 nt, Homo sapiens
  misc_RNA (1)...(19): siRNA sense strand
ucagugcuguggauaaaga

SEQ ID NO: 688222 - RNA, 19 nt, Homo sapiens
  misc_RNA (1)...(19): siRNA sense strand
uggauaggcucaccaacaa

SEQ ID NO: 688223 - RNA, 19 nt, Homo sapiens
  misc_RNA (1)...(19): siRNA sense strand
ccagaucaaagcccuauuu

SEQ ID NO: 688224 - RNA, 19 nt, Homo sapiens
  misc_RNA (1)...(19): siRNA sense strand
gaaaaucagugcuguggau

SEQ ID NO: 688225 - RNA, 19 nt, Homo sapiens
  misc_RNA (1)...(19): siRNA sense strand
ucacaguccuugcaaugga

SEQ ID NO: 688226 - RNA, 19 nt, Homo sapiens
  misc_RNA (1)...(19): siRNA sense strand
cgaaggucuuaucaauaua

SEQ ID NO: 688227 - RNA, 19 nt, Homo sapiens
  misc_RNA (1)...(19): siRNA sense strand
gagcuaaugcugaaaugga

SEQ ID NO: 688228 - RNA, 19 nt, Homo sapiens
  misc_RNA (1)...(19): siRNA sense strand
gauaauuguggaagaugua

SEQ ID NO: 688229 - RNA, 19 nt, Homo sapiens
  misc_RNA (1)...(19): siRNA sense strand
gugaggagcaggccuacua

SEQ ID NO: 688230 - RNA, 19 nt, Homo sapiens
  misc_RNA (1)...(19): siRNA sense strand
ggaggacacggaagcguuu

SEQ ID NO: 688231 - RNA, 19 nt, Homo sapiens
  misc_RNA (1)...(19): siRNA sense strand
agaaagagacaucagagaa

SEQ ID NO: 688232 - RNA, 19 nt, Homo sapiens
  misc_RNA (1)...(19): siRNA sense strand
ugacagaaacacagacuug

SEQ ID NO: 688233 - RNA, 19 nt, Homo sapiens
  misc_RNA (1)...(19): siRNA sense strand
ggaccucagugguacaagu

SEQ ID NO: 688234 - RNA, 19 nt, Homo sapiens
  misc_RNA (1)...(19): siRNA sense strand
ggauaucaacgacaaugaa

SEQ ID NO: 688235 - RNA, 19 nt, Homo sapiens
  misc_RNA (1)...(19): siRNA sense strand
ucaguuguggccagaauua

SEQ ID NO: 688236 - RNA, 19 nt, Homo sapiens
  misc_RNA (1)...(19): siRNA sense strand
gcagacauaugcuuuugaa

SEQ ID NO: 688237 - RNA, 19 nt, Homo sapiens
  misc_RNA (1)...(19): siRNA sense strand
aaucagugcuguggauaaa

SEQ ID NO: 688238 - RNA, 19 nt, Homo sapiens
  misc_RNA (1)...(19): siRNA sense strand
ccagaauccaucucaagua

SEQ ID NO: 688239 - RNA, 19 nt, Homo sapiens
  misc_RNA (1)...(19): siRNA sense strand
gguguggaaucaguucuuu

SEQ ID NO: 688240 - RNA, 19 nt, Homo sapiens
  misc_RNA (1)...(19): siRNA sense strand
caauauugaugccaacagu

SEQ ID NO: 688241 - RNA, 19 nt, Homo sapiens
  misc_RNA (1)...(19): siRNA sense strand
gcagcuggguguggaauca

SEQ ID NO: 688242 - RNA, 19 nt, Homo sapiens
  misc_RNA (1)...(19): siRNA sense strand
ugaagauaauuguggaaga

SEQ ID NO: 688243 - RNA, 19 nt, Homo sapiens
  misc_RNA (1)...(19): siRNA sense strand
aaaguggaguucugccauu

SEQ ID NO: 688244 - RNA, 19 nt, Homo sapiens
  misc_RNA (1)...(19): siRNA sense strand
gcaaguuccauuuucauua

SEQ ID NO: 688245 - RNA, 19 nt, Homo sapiens
  misc_RNA (1)...(19): siRNA sense strand
agacaaaugcuauucacaa

SEQ ID NO: 688246 - RNA, 19 nt, Homo sapiens
  misc_RNA (1)...(19): siRNA sense strand
ggaauaucauuggcacugu

SEQ ID NO: 688247 - RNA, 19 nt, Homo sapiens
  misc_RNA (1)...(19): siRNA sense strand
aggaaggaaucauuacuau

SEQ ID NO: 688248 - RNA, 19 nt, Homo sapiens
  misc_RNA (1)...(19): siRNA sense strand
gacccuaacugaugucaac

SEQ ID NO: 688249 - RNA, 19 nt, Homo sapiens
  misc_RNA (1)...(19): siRNA sense strand
agaguggucuacaguauuc

SEQ ID NO: 688250 - RNA, 19 nt, Homo sapiens
  misc_RNA (1)...(19): siRNA sense strand
aauuaaagcugcugaugca

SEQ ID NO: 688251 - RNA, 19 nt, Homo sapiens
  misc_RNA (1)...(19): siRNA sense strand
ggaaucauuacuauacaga

SEQ ID NO: 688252 - RNA, 19 nt, Homo sapiens
  misc_RNA (1)...(19): siRNA sense strand
agacugcccuuccaaacau

SEQ ID NO: 688253 - RNA, 19 nt, Homo sapiens
  misc_RNA (1)...(19): siRNA sense strand
gcaaugcagaggccuaugu

SEQ ID NO: 688254 - RNA, 19 nt, Homo sapiens
  misc_RNA (1)...(19): siRNA sense strand
ggaucucccucacuuagca

SEQ ID NO: 688255 - RNA, 19 nt, Homo sapiens
  misc_RNA (1)...(19): siRNA sense strand
gaacaaucaguuuacuauc

SEQ ID NO: 688256 - RNA, 19 nt, Homo sapiens
  misc_RNA (1)...(19): siRNA sense strand
caggaaggaaucauuacua

SEQ ID NO: 688257 - RNA, 19 nt, Homo sapiens
  misc_RNA (1)...(19): siRNA sense strand
gauaauccaccucgcuuuc

SEQ ID NO: 688258 - RNA, 19 nt, Homo sapiens
  misc_RNA (1)...(19): siRNA sense strand
caucaaauacaucuuguca

SEQ ID NO: 688259 - RNA, 19 nt, Homo sapiens
  misc_RNA (1)...(19): siRNA sense strand
ugacaaagaaacccaggaa

SEQ ID NO: 688260 - RNA, 19 nt, Homo sapiens
  misc_RNA (1)...(19): siRNA sense strand
cgaagaaagagacaucaga

SEQ ID NO: 688261 - RNA, 19 nt, Homo sapiens
  misc_RNA (1)...(19): siRNA sense strand
ugacccagauucuuccaau

SEQ ID NO: 688262 - RNA, 19 nt, Homo sapiens
  misc_RNA (1)...(19): siRNA sense strand
ucuuugugcuggaggaaua

SEQ ID NO: 688263 - RNA, 19 nt, Homo sapiens
  misc_RNA (1)...(19): siRNA sense strand
cauacucgccugugucuug

SEQ ID NO: 688264 - RNA, 19 nt, Homo sapiens
  misc_RNA (1)...(19): siRNA sense strand
agacaggaacaaucaguuu

SEQ ID NO: 688265 - RNA, 19 nt, Homo sapiens
  misc_RNA (1)...(19): siRNA sense strand
gagcaaaccugaugaagua

SEQ ID NO: 688266 - RNA, 19 nt, Homo sapiens
  misc_RNA (1)...(19): siRNA sense strand
ggagaagaaugcauuaaua

SEQ ID NO: 688267 - RNA, 19 nt, Homo sapiens
  misc_RNA (1)...(19): siRNA sense strand
ggacaaggcuauagaaguu

SEQ ID NO: 688268 - RNA, 19 nt, Homo sapiens
  misc_RNA (1)...(19): siRNA sense strand
gaagaucuuugaccauuaa

SEQ ID NO: 688269 - RNA, 19 nt, Homo sapiens
  misc_RNA (1)...(19): siRNA sense strand
gcaagacugugaucuaauu

SEQ ID NO: 688270 - RNA, 19 nt, Homo sapiens
  misc_RNA (1)...(19): siRNA sense strand
cuaaagagauguugaaaga

SEQ ID NO: 688271 - RNA, 19 nt, Homo sapiens
  misc_RNA (1)...(19): siRNA sense strand
caagaacuauucacacuuu

SEQ ID NO: 688272 - RNA, 19 nt, Homo sapiens
  misc_RNA (1)...(19): siRNA sense strand
uaaaggagguaucaaacua

SEQ ID NO: 688273 - RNA, 19 nt, Homo sapiens
  misc_RNA (1)...(19): siRNA sense strand
gaaauguaaugacagcuuu

SEQ ID NO: 688274 - RNA, 19 nt, Homo sapiens
  misc_RNA (1)...(19): siRNA sense strand
gcacacauauguugaagug

SEQ ID NO: 688275 - RNA, 19 nt, Homo sapiens
  misc_RNA (1)...(19): siRNA sense strand
gagaagaucuuugaccauu

SEQ ID NO: 688276 - RNA, 19 nt, Homo sapiens
  misc_RNA (1)...(19): siRNA sense strand
caaggaaacuggaaggaaa

SEQ ID NO: 688277 - RNA, 19 nt, Homo sapiens
  misc_RNA (1)...(19): siRNA sense strand
gcaauuaucuucaccugau

SEQ ID NO: 688278 - RNA, 19 nt, Homo sapiens
  misc_RNA (1)...(19): siRNA sense strand
gcugaaagauggcaauuau

SEQ ID NO: 688279 - RNA, 19 nt, Homo sapiens
  misc_RNA (1)...(19): siRNA sense strand
caagagacauguaaagugu

SEQ ID NO: 688280 - RNA, 19 nt, Homo sapiens
  misc_RNA (1)...(19): siRNA sense strand
gaagagcucuggagacagu

SEQ ID NO: 688281 - RNA, 19 nt, Homo sapiens
  misc_RNA (1)...(19): siRNA sense strand
gugaaugacuuaacuuuga

SEQ ID NO: 688282 - RNA, 19 nt, Homo sapiens
  misc_RNA (1)...(19): siRNA sense strand
gcaaacaguugucuaugug

SEQ ID NO: 688283 - RNA, 19 nt, Homo sapiens
  misc_RNA (1)...(19): siRNA sense strand
gaucaaggagcuaucaaua

SEQ ID NO: 688284 - RNA, 19 nt, Homo sapiens
  misc_RNA (1)...(19): siRNA sense strand
gaagaauggauuaccuuua

SEQ ID NO: 688285 - RNA, 19 nt, Homo sapiens
  misc_RNA (1)...(19): siRNA sense strand
gcagauauguagagaagau

SEQ ID NO: 688286 - RNA, 19 nt, Homo sapiens
  misc_RNA (1)...(19): siRNA sense strand
aaaguaagcucuccucuag

SEQ ID NO: 688287 - RNA, 19 nt, Homo sapiens
  misc_RNA (1)...(19): siRNA sense strand
gaaaguaacguucgacugu

SEQ ID NO: 688288 - RNA, 19 nt, Homo sapiens
  misc_RNA (1)...(19): siRNA sense strand
ggacaaugcuacaagaauc

SEQ ID NO: 688289 - RNA, 19 nt, Homo sapiens
  misc_RNA (1)...(19): siRNA sense strand
ugacuuaacuuugacauug

SEQ ID NO: 688290 - RNA, 19 nt, Homo sapiens
  misc_RNA (1)...(19): siRNA sense strand
aaacaaugaugaccacaaa

SEQ ID NO: 688291 - RNA, 19 nt, Homo sapiens
  misc_RNA (1)...(19): siRNA sense strand
gggaagaccacaaucguua

SEQ ID NO: 688292 - RNA, 19 nt, Homo sapiens
  misc_RNA (1)...(19): siRNA sense strand
gaccauauuuggacuaaug

SEQ ID NO: 688293 - RNA, 19 nt, Homo sapiens
  misc_RNA (1)...(19): siRNA sense strand
aaagagauguugaaagaga

SEQ ID NO: 688294 - RNA, 19 nt, Homo sapiens
  misc_RNA (1)...(19): siRNA sense strand
gaaaccuccuuggcauuua

SEQ ID NO: 688295 - RNA, 19 nt, Homo sapiens
  misc_RNA (1)...(19): siRNA sense strand
caaaugauguaacugaugu

SEQ ID NO: 688296 - RNA, 19 nt, Homo sapiens
  misc_RNA (1)...(19): siRNA sense strand
gagaagaugggcacacaua

SEQ ID NO: 688297 - RNA, 19 nt, Homo sapiens
  misc_RNA (1)...(19): siRNA sense strand
uaauauggcuggccuggaa

SEQ ID NO: 688298 - RNA, 19 nt, Homo sapiens
  misc_RNA (1)...(19): siRNA sense strand
ucaaggagcuaucaauauc

SEQ ID NO: 688299 - RNA, 19 nt, Homo sapiens
  misc_RNA (1)...(19): siRNA sense strand
gggaaacacuaagaacuuu

SEQ ID NO: 688300 - RNA, 19 nt, Homo sapiens
  misc_RNA (1)...(19): siRNA sense strand
ggaaguaacuguggauuuu

SEQ ID NO: 688301 - RNA, 19 nt, Homo sapiens
  misc_RNA (1)...(19): siRNA sense strand
ugaaagagauagaagagau

SEQ ID NO: 688302 - RNA, 19 nt, Homo sapiens
  misc_RNA (1)...(19): siRNA sense strand
gaacaagaccagaaugcuu

SEQ ID NO: 688303 - RNA, 19 nt, Homo sapiens
  misc_RNA (1)...(19): siRNA sense strand
acacauauguugaagugaa

SEQ ID NO: 688304 - RNA, 19 nt, Homo sapiens
  misc_RNA (1)...(19): siRNA sense strand
ugacugauuuggagaagaa

SEQ ID NO: 688305 - RNA, 19 nt, Homo sapiens
  misc_RNA (1)...(19): siRNA sense strand
gaaaauaucucuggaaguc

SEQ ID NO: 688306 - RNA, 19 nt, Homo sapiens
  misc_RNA (1)...(19): siRNA sense strand
cuauugagcuaaagacaaa

SEQ ID NO: 688307 - RNA, 19 nt, Homo sapiens
  misc_RNA (1)...(19): siRNA sense strand
gggaucagguggcugcuuu

SEQ ID NO: 688308 - RNA, 19 nt, Homo sapiens
  misc_RNA (1)...(19): siRNA sense strand
gaagaguuguuccuagaca

SEQ ID NO: 688309 - RNA, 19 nt, Homo sapiens
  misc_RNA (1)...(19): siRNA sense strand
aaacauaucugugcucucu

SEQ ID NO: 688310 - RNA, 19 nt, Homo sapiens
  misc_RNA (1)...(19): siRNA sense strand
aaacuaaucaucacucuug

SEQ ID NO: 688311 - RNA, 19 nt, Homo sapiens
  misc_RNA (1)...(19): siRNA sense strand
gagcuaaagacaaaccaua

SEQ ID NO: 688312 - RNA, 19 nt, Homo sapiens
  misc_RNA (1)...(19): siRNA sense strand
ccagugaugauguuaauaa

SEQ ID NO: 688313 - RNA, 19 nt, Homo sapiens
  misc_RNA (1)...(19): siRNA sense strand
ucagguggcugcuuuggaa

SEQ ID NO: 688314 - RNA, 19 nt, Homo sapiens
  misc_RNA (1)...(19): siRNA sense strand
ggaaacuccugcgauguga

SEQ ID NO: 688315 - RNA, 19 nt, Homo sapiens
  misc_RNA (1)...(19): siRNA sense strand
ggagguaucaaacuacaaa

SEQ ID NO: 688316 - RNA, 19 nt, Homo sapiens
  misc_RNA (1)...(19): siRNA sense strand
gagugaagguacaaguaaa

SEQ ID NO: 688317 - RNA, 19 nt, Homo sapiens
  misc_RNA (1)...(19): siRNA sense strand
ucaagaaauugugcuauug

SEQ ID NO: 688318 - RNA, 19 nt, Homo sapiens
  misc_RNA (1)...(19): siRNA sense strand
gucaagaaauugugcuauu

SEQ ID NO: 688319 - RNA, 19 nt, Homo sapiens
  misc_RNA (1)...(19): siRNA sense strand
ugugagcacuccaaacuuu

SEQ ID NO: 688320 - RNA, 19 nt, Homo sapiens
  misc_RNA (1)...(19): siRNA sense strand
gaagaugggcacacauaug

SEQ ID NO: 688321 - RNA, 19 nt, Homo sapiens
  misc_RNA (1)...(19): siRNA sense strand
acacauccguggaaacuug

SEQ ID NO: 688322 - RNA, 19 nt, Homo sapiens
  misc_RNA (1)...(19): siRNA sense strand
aaugacagcuuugcaguuu

SEQ ID NO: 688323 - RNA, 19 nt, Homo sapiens
  misc_RNA (1)...(19): siRNA sense strand
gaaagagauagaagagauu

SEQ ID NO: 688324 - RNA, 19 nt, Homo sapiens
  misc_RNA (1)...(19): siRNA sense strand
gaaccuguggugugaauga

SEQ ID NO: 688325 - RNA, 19 nt, Homo sapiens
  misc_RNA (1)...(19): siRNA sense strand
guaaaguguuuggacguuu

SEQ ID NO: 688326 - RNA, 19 nt, Homo sapiens
  misc_RNA (1)...(19): siRNA sense strand
caaaguaagcucuccucua

SEQ ID NO: 688327 - RNA, 19 nt, Homo sapiens
  misc_RNA (1)...(19): siRNA sense strand
aaacaugcaugggcaagaa

SEQ ID NO: 688328 - RNA, 19 nt, Homo sapiens
  misc_RNA (1)...(19): siRNA sense strand
agaagaucuuugaccauua

SEQ ID NO: 688329 - RNA, 19 nt, Homo sapiens
  misc_RNA (1)...(19): siRNA sense strand
caucagaguagacuuguuu

SEQ ID NO: 688330 - RNA, 19 nt, Homo sapiens
  misc_RNA (1)...(19): siRNA sense strand
agagacauguaaaguguuu

SEQ ID NO: 688331 - RNA, 19 nt, Homo sapiens
  misc_RNA (1)...(19): siRNA sense strand
uauugaaccugguaacuug

SEQ ID NO: 688332 - RNA, 19 nt, Homo sapiens
  misc_RNA (1)...(19): siRNA sense strand
gaagauaauggaauuccuu

SEQ ID NO: 688333 - RNA, 19 nt, Homo sapiens
  misc_RNA (1)...(19): siRNA sense strand
uaagaacuuuccacaagga

SEQ ID NO: 688334 - RNA, 19 nt, Homo sapiens
  misc_RNA (1)...(19): siRNA sense strand
gagagugaagguacaagua

SEQ ID NO: 688335 - RNA, 19 nt, Homo sapiens
  misc_RNA (1)...(19): siRNA sense strand
ccgauaaucaagaaacuua

SEQ ID NO: 688336 - RNA, 19 nt, Homo sapiens
  misc_RNA (1)...(19): siRNA sense strand
ccaaagaccaucagaguag

SEQ ID NO: 688337 - RNA, 19 nt, Homo sapiens
  misc_RNA (1)...(19): siRNA sense strand
caacauuacccaucucaau

SEQ ID NO: 688338 - RNA, 19 nt, Homo sapiens
  misc_RNA (1)...(19): siRNA sense strand
caagaaauugugcuauuga

SEQ ID NO: 688339 - RNA, 19 nt, Homo sapiens
  misc_RNA (1)...(19): siRNA sense strand
caaaccugaugaaguaaga

SEQ ID NO: 688340 - RNA, 19 nt, Homo sapiens
  misc_RNA (1)...(19): siRNA sense strand
caaacaaaccauggaaauu

SEQ ID NO: 688341 - RNA, 19 nt, Homo sapiens
  misc_RNA (1)...(19): siRNA sense strand
cuuccagacuucagaauuu

SEQ ID NO: 688342 - RNA, 19 nt, Homo sapiens
  misc_RNA (1)...(19): siRNA sense strand
gacaaaccauagagcagaa

SEQ ID NO: 688343 - RNA, 19 nt, Homo sapiens
  misc_RNA (1)...(19): siRNA sense strand
gaagggaguuugguaucug

SEQ ID NO: 688344 - RNA, 19 nt, Homo sapiens
  misc_RNA (1)...(19): siRNA sense strand
acauaucugugcucucuuu

SEQ ID NO: 688345 - RNA, 19 nt, Homo sapiens
  misc_RNA (1)...(19): siRNA sense strand
ggagcaaacaguugucuau

SEQ ID NO: 688346 - RNA, 19 nt, Homo sapiens
  misc_RNA (1)...(19): siRNA sense strand
cugguacgcuuccugauuu

SEQ ID NO: 688347 - RNA, 19 nt, Homo sapiens
  misc_RNA (1)...(19): siRNA sense strand
guaacuugcugaaagaucu

SEQ ID NO: 688348 - RNA, 19 nt, Homo sapiens
  misc_RNA (1)...(19): siRNA sense strand
gcauuuaugugucgauguc

SEQ ID NO: 688349 - RNA, 19 nt, Homo sapiens
  misc_RNA (1)...(19): siRNA sense strand
ggaggacgacgacuaccua

SEQ ID NO: 688350 - RNA, 19 nt, Homo sapiens
  misc_RNA (1)...(19): siRNA sense strand
acuaagaacuuuccacaag

SEQ ID NO: 688351 - RNA, 19 nt, Homo sapiens
  misc_RNA (1)...(19): siRNA sense strand
acacucaccuuugcugaaa

SEQ ID NO: 688352 - RNA, 19 nt, Homo sapiens
  misc_RNA (1)...(19): siRNA sense strand
aaauaagcgugacuuugaa

SEQ ID NO: 688353 - RNA, 19 nt, Homo sapiens
  misc_RNA (1)...(19): siRNA sense strand
cuaaucaucacucuuguuu

SEQ ID NO: 688354 - RNA, 19 nt, Homo sapiens
  misc_RNA (1)...(19): siRNA sense strand
gagaggacacucaccuuug

SEQ ID NO: 688355 - RNA, 19 nt, Homo sapiens
  misc_RNA (1)...(19): siRNA sense strand
gaaaguccaagcaaaauuu

SEQ ID NO: 688356 - RNA, 19 nt, Homo sapiens
  misc_RNA (1)...(19): siRNA sense strand
guucaaggauuuccgucuu

SEQ ID NO: 688357 - RNA, 19 nt, Homo sapiens
  misc_RNA (1)...(19): siRNA sense strand
ugaugaaaguccaagcaaa

SEQ ID NO: 688358 - RNA, 19 nt, Homo sapiens
  misc_RNA (1)...(19): siRNA sense strand
cggaagagcucuggagaca

SEQ ID NO: 688359 - RNA, 19 nt, Homo sapiens
  misc_RNA (1)...(19): siRNA sense strand
ugauguaacugauguaacu

SEQ ID NO: 688360 - RNA, 19 nt, Homo sapiens
  misc_RNA (1)...(19): siRNA sense strand
ccaguucucagucaucuaa

SEQ ID NO: 688361 - RNA, 19 nt, Homo sapiens
  misc_RNA (1)...(19): siRNA sense strand
aagaauggauuaccuuuac

SEQ ID NO: 688362 - RNA, 19 nt, Homo sapiens
  misc_RNA (1)...(19): siRNA sense strand
gcaguuggaagaaagagaa

SEQ ID NO: 688363 - RNA, 19 nt, Homo sapiens
  misc_RNA (1)...(19): siRNA sense strand
ggacgacgacuaccuaaac

SEQ ID NO: 688364 - RNA, 19 nt, Homo sapiens
  misc_RNA (1)...(19): siRNA sense strand
gcccaccgauaaucaagaa

SEQ ID NO: 688365 - RNA, 19 nt, Homo sapiens
  misc_RNA (1)...(19): siRNA sense strand
gcacaccuguuuaacuuug

SEQ ID NO: 688366 - RNA, 19 nt, Homo sapiens
  misc_RNA (1)...(19): siRNA sense strand
gaaagcaauuggaucacaa

SEQ ID NO: 688367 - RNA, 19 nt, Homo sapiens
  misc_RNA (1)...(19): siRNA sense strand
caaauacuacuacacaaga

SEQ ID NO: 688368 - RNA, 19 nt, Homo sapiens
  misc_RNA (1)...(19): siRNA sense strand
cgacaaauacuacuacaca

SEQ ID NO: 688369 - RNA, 19 nt, Homo sapiens
  misc_RNA (1)...(19): siRNA sense strand
gacaaauacuacuacacaa

SEQ ID NO: 688370 - RNA, 19 nt, Homo sapiens
  misc_RNA (1)...(19): siRNA sense strand
gcucucugcuugaauuuua

SEQ ID NO: 688371 - RNA, 19 nt, Homo sapiens
  misc_RNA (1)...(19): siRNA sense strand
caucauugcacaccuguuu

SEQ ID NO: 688372 - RNA, 19 nt, Homo sapiens
  misc_RNA (1)...(19): siRNA sense strand
guggaugccuuccugaaau

SEQ ID NO: 688373 - RNA, 19 nt, Homo sapiens
  misc_RNA (1)...(19): siRNA sense strand
uggaugccuuccugaaaua

SEQ ID NO: 688374 - RNA, 19 nt, Homo sapiens
  misc_RNA (1)...(19): siRNA sense strand
ugagaaggccgacaaauac

SEQ ID NO: 688375 - RNA, 19 nt, Homo sapiens
  misc_RNA (1)...(19): siRNA sense strand
ugagaaagcaauuggauca

SEQ ID NO: 688376 - RNA, 19 nt, Homo sapiens
  misc_RNA (1)...(19): siRNA sense strand
uugcacaccuguuuaacuu

SEQ ID NO: 688377 - RNA, 19 nt, Homo sapiens
  misc_RNA (1)...(19): siRNA sense strand
gguuagggcugaauguuuu

SEQ ID NO: 688378 - RNA, 19 nt, Homo sapiens
  misc_RNA (1)...(19): siRNA sense strand
acauacagcuauucacauc

SEQ ID NO: 688379 - RNA, 19 nt, Homo sapiens
  misc_RNA (1)...(19): siRNA sense strand
augagaaggccgacaaaua

SEQ ID NO: 688380 - RNA, 19 nt, Homo sapiens
  misc_RNA (1)...(19): siRNA sense strand
acaagcugguggccuauau

SEQ ID NO: 688381 - RNA, 19 nt, Homo sapiens
  misc_RNA (1)...(19): siRNA sense strand
guuucugguuguuugguua

SEQ ID NO: 688382 - RNA, 19 nt, Homo sapiens
  misc_RNA (1)...(19): siRNA sense strand
gcacacugagaaagcaauu

SEQ ID NO: 688383 - RNA, 19 nt, Homo sapiens
  misc_RNA (1)...(19): siRNA sense strand
gauccugcuuccugugugu

SEQ ID NO: 688384 - RNA, 19 nt, Homo sapiens
  misc_RNA (1)...(19): siRNA sense strand
gcugguggccuauaugauc

SEQ ID NO: 688385 - RNA, 19 nt, Homo sapiens
  misc_RNA (1)...(19): siRNA sense strand
agaaagcaauuggaucaca

SEQ ID NO: 688386 - RNA, 19 nt, Homo sapiens
  misc_RNA (1)...(19): siRNA sense strand
cuacauacagcuauucaca

SEQ ID NO: 688387 - RNA, 19 nt, Homo sapiens
  misc_RNA (1)...(19): siRNA sense strand
ucugcucucugcuugaauu

SEQ ID NO: 688388 - RNA, 19 nt, Homo sapiens
  misc_RNA (1)...(19): siRNA sense strand
ucauugcacaccuguuuaa

SEQ ID NO: 688389 - RNA, 19 nt, Homo sapiens
  misc_RNA (1)...(19): siRNA sense strand
caaccucaccuuccacaag

SEQ ID NO: 688390 - RNA, 19 nt, Homo sapiens
  misc_RNA (1)...(19): siRNA sense strand
gcaaucugcuguccuuccu

SEQ ID NO: 688391 - RNA, 19 nt, Homo sapiens
  misc_RNA (1)...(19): siRNA sense strand
cgucugcucucugcuugaa

SEQ ID NO: 688392 - RNA, 19 nt, Homo sapiens
  misc_RNA (1)...(19): siRNA sense strand
gaaggccgacaaauacuac

SEQ ID NO: 688393 - RNA, 19 nt, Homo sapiens
  misc_RNA (1)...(19): siRNA sense strand
auacagcuauucacaucau

SEQ ID NO: 688394 - RNA, 19 nt, Homo sapiens
  misc_RNA (1)...(19): siRNA sense strand
gcugaauguuuuccuguuu

SEQ ID NO: 688395 - RNA, 19 nt, Homo sapiens
  misc_RNA (1)...(19): siRNA sense strand
ucuccagccuaucucauga

SEQ ID NO: 688396 - RNA, 19 nt, Homo sapiens
  misc_RNA (1)...(19): siRNA sense strand
guuuaacuuugacugcuau

SEQ ID NO: 688397 - RNA, 19 nt, Homo sapiens
  misc_RNA (1)...(19): siRNA sense strand
uccauucucuccagccuau

SEQ ID NO: 688398 - RNA, 19 nt, Homo sapiens
  misc_RNA (1)...(19): siRNA sense strand
agaaggccgacaaauacua

SEQ ID NO: 688399 - RNA, 19 nt, Homo sapiens
  misc_RNA (1)...(19): siRNA sense strand
uguuuaacuuugacugcua

SEQ ID NO: 688400 - RNA, 19 nt, Homo sapiens
  misc_RNA (1)...(19): siRNA sense strand
gaagccgacaggccacaga

SEQ ID NO: 688401 - RNA, 19 nt, Homo sapiens
  misc_RNA (1)...(19): siRNA sense strand
gucgcaaucugcuguccuu

SEQ ID NO: 688402 - RNA, 19 nt, Homo sapiens
  misc_RNA (1)...(19): siRNA sense strand
augccuuccugaaauauga

SEQ ID NO: 688403 - RNA, 19 nt, Homo sapiens
  misc_RNA (1)...(19): siRNA sense strand
acaaauacuacuacacaag

SEQ ID NO: 688404 - RNA, 19 nt, Homo sapiens
  misc_RNA (1)...(19): siRNA sense strand
gagaaggccgacaaauacu

SEQ ID NO: 688405 - RNA, 19 nt, Homo sapiens
  misc_RNA (1)...(19): siRNA sense strand
gaggggcaccugcucauuu

SEQ ID NO: 688406 - RNA, 19 nt, Homo sapiens
  misc_RNA (1)...(19): siRNA sense strand
aauaugagaaggccgacaa

SEQ ID NO: 688407 - RNA, 19 nt, Homo sapiens
  misc_RNA (1)...(19): siRNA sense strand
gccgacaaauacuacuaca

SEQ ID NO: 688408 - RNA, 19 nt, Homo sapiens
  misc_RNA (1)...(19): siRNA sense strand
aagcugguggccuauauga

SEQ ID NO: 688409 - RNA, 19 nt, Homo sapiens
  misc_RNA (1)...(19): siRNA sense strand
gcacaccuguuuaacuuug

SEQ ID NO: 688410 - RNA, 19 nt, Homo sapiens
  misc_RNA (1)...(19): siRNA sense strand
gaaagcaauuggaucacaa

SEQ ID NO: 688411 - RNA, 19 nt, Homo sapiens
  misc_RNA (1)...(19): siRNA sense strand
caaauacuacuacacaaga

SEQ ID NO: 688412 - RNA, 19 nt, Homo sapiens
  misc_RNA (1)...(19): siRNA sense strand
cgacaaauacuacuacaca

SEQ ID NO: 688413 - RNA, 19 nt, Homo sapiens
  misc_RNA (1)...(19): siRNA sense strand
gacaaauacuacuacacaa

SEQ ID NO: 688414 - RNA, 19 nt, Homo sapiens
  misc_RNA (1)...(19): siRNA sense strand
gcucucugcuugaauuuua

SEQ ID NO: 688415 - RNA, 19 nt, Homo sapiens
  misc_RNA (1)...(19): siRNA sense strand
caucauugcacaccuguuu

SEQ ID NO: 688416 - RNA, 19 nt, Homo sapiens
  misc_RNA (1)...(19): siRNA sense strand
guggaugccuuccugaaau

SEQ ID NO: 688417 - RNA, 19 nt, Homo sapiens
  misc_RNA (1)...(19): siRNA sense strand
uggaugccuuccugaaaua

SEQ ID NO: 688418 - RNA, 19 nt, Homo sapiens
  misc_RNA (1)...(19): siRNA sense strand
ugagaaggccgacaaauac

SEQ ID NO: 688419 - RNA, 19 nt, Homo sapiens
  misc_RNA (1)...(19): siRNA sense strand
ugagaaagcaauuggauca

SEQ ID NO: 688420 - RNA, 19 nt, Homo sapiens
  misc_RNA (1)...(19): siRNA sense strand
uugcacaccuguuuaacuu

SEQ ID NO: 688421 - RNA, 19 nt, Homo sapiens
  misc_RNA (1)...(19): siRNA sense strand
gguuagggcugaauguuuu

SEQ ID NO: 688422 - RNA, 19 nt, Homo sapiens
  misc_RNA (1)...(19): siRNA sense strand
acauacagcuauucacauc

SEQ ID NO: 688423 - RNA, 19 nt, Homo sapiens
  misc_RNA (1)...(19): siRNA sense strand
augagaaggccgacaaaua

SEQ ID NO: 688424 - RNA, 19 nt, Homo sapiens
  misc_RNA (1)...(19): siRNA sense strand
acaagcugguggccuauau

SEQ ID NO: 688425 - RNA, 19 nt, Homo sapiens
  misc_RNA (1)...(19): siRNA sense strand
guuucugguuguuugguua

SEQ ID NO: 688426 - RNA, 19 nt, Homo sapiens
  misc_RNA (1)...(19): siRNA sense strand
gcacacugagaaagcaauu

SEQ ID NO: 688427 - RNA, 19 nt, Homo sapiens
  misc_RNA (1)...(19): siRNA sense strand
gauccugcuuccugugugu

SEQ ID NO: 688428 - RNA, 19 nt, Homo sapiens
  misc_RNA (1)...(19): siRNA sense strand
gcugguggccuauaugauc

SEQ ID NO: 688429 - RNA, 19 nt, Homo sapiens
  misc_RNA (1)...(19): siRNA sense strand
agaaagcaauuggaucaca

SEQ ID NO: 688430 - RNA, 19 nt, Homo sapiens
  misc_RNA (1)...(19): siRNA sense strand
cuacauacagcuauucaca

SEQ ID NO: 688431 - RNA, 19 nt, Homo sapiens
  misc_RNA (1)...(19): siRNA sense strand
ucugcucucugcuugaauu

SEQ ID NO: 688432 - RNA, 19 nt, Homo sapiens
  misc_RNA (1)...(19): siRNA sense strand
ucauugcacaccuguuuaa

SEQ ID NO: 688433 - RNA, 19 nt, Homo sapiens
  misc_RNA (1)...(19): siRNA sense strand
caaccucaccuuccacaag

SEQ ID NO: 688434 - RNA, 19 nt, Homo sapiens
  misc_RNA (1)...(19): siRNA sense strand
gcaaucugcuguccuuccu

SEQ ID NO: 688435 - RNA, 19 nt, Homo sapiens
  misc_RNA (1)...(19): siRNA sense strand
cgucugcucucugcuugaa

SEQ ID NO: 688436 - RNA, 19 nt, Homo sapiens
  misc_RNA (1)...(19): siRNA sense strand
gaaggccgacaaauacuac

SEQ ID NO: 688437 - RNA, 19 nt, Homo sapiens
  misc_RNA (1)...(19): siRNA sense strand
auacagcuauucacaucau

SEQ ID NO: 688438 - RNA, 19 nt, Homo sapiens
  misc_RNA (1)...(19): siRNA sense strand
gcugaauguuuuccuguuu

SEQ ID NO: 688439 - RNA, 19 nt, Homo sapiens
  misc_RNA (1)...(19): siRNA sense strand
ucuccagccuaucucauga

SEQ ID NO: 688440 - RNA, 19 nt, Homo sapiens
  misc_RNA (1)...(19): siRNA sense strand
guuuaacuuugacugcuau

SEQ ID NO: 688441 - RNA, 19 nt, Homo sapiens
  misc_RNA (1)...(19): siRNA sense strand
uccauucucuccagccuau

SEQ ID NO: 688442 - RNA, 19 nt, Homo sapiens
  misc_RNA (1)...(19): siRNA sense strand
agaaggccgacaaauacua

SEQ ID NO: 688443 - RNA, 19 nt, Homo sapiens
  misc_RNA (1)...(19): siRNA sense strand
uguuuaacuuugacugcua

SEQ ID NO: 688444 - RNA, 19 nt, Homo sapiens
  misc_RNA (1)...(19): siRNA sense strand
gaagccgacaggccacaga

SEQ ID NO: 688445 - RNA, 19 nt, Homo sapiens
  misc_RNA (1)...(19): siRNA sense strand
gucgcaaucugcuguccuu

SEQ ID NO: 688446 - RNA, 19 nt, Homo sapiens
  misc_RNA (1)...(19): siRNA sense strand
augccuuccugaaauauga

SEQ ID NO: 688447 - RNA, 19 nt, Homo sapiens
  misc_RNA (1)...(19): siRNA sense strand
acaaauacuacuacacaag

SEQ ID NO: 688448 - RNA, 19 nt, Homo sapiens
  misc_RNA (1)...(19): siRNA sense strand
gagaaggccgacaaauacu

SEQ ID NO: 688449 - RNA, 19 nt, Homo sapiens
  misc_RNA (1)...(19): siRNA sense strand
gaggggcaccugcucauuu

SEQ ID NO: 688450 - RNA, 19 nt, Homo sapiens
  misc_RNA (1)...(19): siRNA sense strand
aauaugagaaggccgacaa

SEQ ID NO: 688451 - RNA, 19 nt, Homo sapiens
  misc_RNA (1)...(19): siRNA sense strand
gccgacaaauacuacuaca

SEQ ID NO: 688452 - RNA, 19 nt, Homo sapiens
  misc_RNA (1)...(19): siRNA sense strand
aagcugguggccuauauga

SEQ ID NO: 688453 - RNA, 19 nt, Homo sapiens
  misc_RNA (1)...(19): siRNA sense strand
gcacaccuguuuaacuuug

SEQ ID NO: 688454 - RNA, 19 nt, Homo sapiens
  misc_RNA (1)...(19): siRNA sense strand
gaaagcaauuggaucacaa

SEQ ID NO: 688455 - RNA, 19 nt, Homo sapiens
  misc_RNA (1)...(19): siRNA sense strand
caaauacuacuacacaaga

SEQ ID NO: 688456 - RNA, 19 nt, Homo sapiens
  misc_RNA (1)...(19): siRNA sense strand
cgacaaauacuacuacaca

SEQ ID NO: 688457 - RNA, 19 nt, Homo sapiens
  misc_RNA (1)...(19): siRNA sense strand
gacaaauacuacuacacaa

SEQ ID NO: 688458 - RNA, 19 nt, Homo sapiens
  misc_RNA (1)...(19): siRNA sense strand
gcucucugcuugaauuuua

SEQ ID NO: 688459 - RNA, 19 nt, Homo sapiens
  misc_RNA (1)...(19): siRNA sense strand
caucauugcacaccuguuu

SEQ ID NO: 688460 - RNA, 19 nt, Homo sapiens
  misc_RNA (1)...(19): siRNA sense strand
guggaugccuuccugaaau

SEQ ID NO: 688461 - RNA, 19 nt, Homo sapiens
  misc_RNA (1)...(19): siRNA sense strand
uggaugccuuccugaaaua

SEQ ID NO: 688462 - RNA, 19 nt, Homo sapiens
  misc_RNA (1)...(19): siRNA sense strand
ugagaaggccgacaaauac

SEQ ID NO: 688463 - RNA, 19 nt, Homo sapiens
  misc_RNA (1)...(19): siRNA sense strand
ugagaaagcaauuggauca

SEQ ID NO: 688464 - RNA, 19 nt, Homo sapiens
  misc_RNA (1)...(19): siRNA sense strand
uugcacaccuguuuaacuu

SEQ ID NO: 688465 - RNA, 19 nt, Homo sapiens
  misc_RNA (1)...(19): siRNA sense strand
gguuagggcugaauguuuu

SEQ ID NO: 688466 - RNA, 19 nt, Homo sapiens
  misc_RNA (1)...(19): siRNA sense strand
acauacagcuauucacauc

SEQ ID NO: 688467 - RNA, 19 nt, Homo sapiens
  misc_RNA (1)...(19): siRNA sense strand
augagaaggccgacaaaua

SEQ ID NO: 688468 - RNA, 19 nt, Homo sapiens
  misc_RNA (1)...(19): siRNA sense strand
acaagcugguggccuauau

SEQ ID NO: 688469 - RNA, 19 nt, Homo sapiens
  misc_RNA (1)...(19): siRNA sense strand
guuucugguuguuugguua

SEQ ID NO: 688470 - RNA, 19 nt, Homo sapiens
  misc_RNA (1)...(19): siRNA sense strand
gcacacugagaaagcaauu

SEQ ID NO: 688471 - RNA, 19 nt, Homo sapiens
  misc_RNA (1)...(19): siRNA sense strand
gauccugcuuccugugugu

SEQ ID NO: 688472 - RNA, 19 nt, Homo sapiens
  misc_RNA (1)...(19): siRNA sense strand
gcugguggccuauaugauc

SEQ ID NO: 688473 - RNA, 19 nt, Homo sapiens
  misc_RNA (1)...(19): siRNA sense strand
agaaagcaauuggaucaca

SEQ ID NO: 688474 - RNA, 19 nt, Homo sapiens
  misc_RNA (1)...(19): siRNA sense strand
cuacauacagcuauucaca

SEQ ID NO: 688475 - RNA, 19 nt, Homo sapiens
  misc_RNA (1)...(19): siRNA sense strand
ucugcucucugcuugaauu

SEQ ID NO: 688476 - RNA, 19 nt, Homo sapiens
  misc_RNA (1)...(19): siRNA sense strand
ucauugcacaccuguuuaa

SEQ ID NO: 688477 - RNA, 19 nt, Homo sapiens
  misc_RNA (1)...(19): siRNA sense strand
caaccucaccuuccacaag

SEQ ID NO: 688478 - RNA, 19 nt, Homo sapiens
  misc_RNA (1)...(19): siRNA sense strand
gcaaucugcuguccuuccu

SEQ ID NO: 688479 - RNA, 19 nt, Homo sapiens
  misc_RNA (1)...(19): siRNA sense strand
cgucugcucucugcuugaa

SEQ ID NO: 688480 - RNA, 19 nt, Homo sapiens
  misc_RNA (1)...(19): siRNA sense strand
gaaggccgacaaauacuac

SEQ ID NO: 688481 - RNA, 19 nt, Homo sapiens
  misc_RNA (1)...(19): siRNA sense strand
auacagcuauucacaucau

SEQ ID NO: 688482 - RNA, 19 nt, Homo sapiens
  misc_RNA (1)...(19): siRNA sense strand
gcugaauguuuuccuguuu

SEQ ID NO: 688483 - RNA, 19 nt, Homo sapiens
  misc_RNA (1)...(19): siRNA sense strand
ucuccagccuaucucauga

SEQ ID NO: 688484 - RNA, 19 nt, Homo sapiens
  misc_RNA (1)...(19): siRNA sense strand
guuuaacuuugacugcuau

SEQ ID NO: 688485 - RNA, 19 nt, Homo sapiens
  misc_RNA (1)...(19): siRNA sense strand
uccauucucuccagccuau

SEQ ID NO: 688486 - RNA, 19 nt, Homo sapiens
  misc_RNA (1)...(19): siRNA sense strand
agaaggccgacaaauacua

SEQ ID NO: 688487 - RNA, 19 nt, Homo sapiens
  misc_RNA (1)...(19): siRNA sense strand
uguuuaacuuugacugcua

SEQ ID NO: 688488 - RNA, 19 nt, Homo sapiens
  misc_RNA (1)...(19): siRNA sense strand
gaagccgacaggccacaga

SEQ ID NO: 688489 - RNA, 19 nt, Homo sapiens
  misc_RNA (1)...(19): siRNA sense strand
gucgcaaucugcuguccuu

SEQ ID NO: 688490 - RNA, 19 nt, Homo sapiens
  misc_RNA (1)...(19): siRNA sense strand
augccuuccugaaauauga

SEQ ID NO: 688491 - RNA, 19 nt, Homo sapiens
  misc_RNA (1)...(19): siRNA sense strand
acaaauacuacuacacaag

SEQ ID NO: 688492 - RNA, 19 nt, Homo sapiens
  misc_RNA (1)...(19): siRNA sense strand
gagaaggccgacaaauacu

SEQ ID NO: 688493 - RNA, 19 nt, Homo sapiens
  misc_RNA (1)...(19): siRNA sense strand
gaggggcaccugcucauuu

SEQ ID NO: 688494 - RNA, 19 nt, Homo sapiens
  misc_RNA (1)...(19): siRNA sense strand
aauaugagaaggccgacaa

SEQ ID NO: 688495 - RNA, 19 nt, Homo sapiens
  misc_RNA (1)...(19): siRNA sense strand
gccgacaaauacuacuaca

SEQ ID NO: 688496 - RNA, 19 nt, Homo sapiens
  misc_RNA (1)...(19): siRNA sense strand
aagcugguggccuauauga

SEQ ID NO: 688497 - RNA, 19 nt, Homo sapiens
  misc_RNA (1)...(19): siRNA sense strand
uaaaaugugcggagaagga

SEQ ID NO: 688498 - RNA, 19 nt, Homo sapiens
  misc_RNA (1)...(19): siRNA sense strand
uuucaaaccccucgagaua

SEQ ID NO: 688499 - RNA, 19 nt, Homo sapiens
  misc_RNA (1)...(19): siRNA sense strand
uaaaaugugcggagaagga

SEQ ID NO: 688500 - RNA, 19 nt, Homo sapiens
  misc_RNA (1)...(19): siRNA sense strand
uuucaaaccccucgagaua

SEQ ID NO: 688501 - RNA, 19 nt, Homo sapiens
  misc_RNA (1)...(19): siRNA sense strand
uaaaaugugcggagaagga

SEQ ID NO: 688502 - RNA, 19 nt, Homo sapiens
  misc_RNA (1)...(19): siRNA sense strand
uuucaaaccccucgagaua

SEQ ID NO: 688503 - RNA, 19 nt, Homo sapiens
  misc_RNA (1)...(19): siRNA sense strand
uaaaaugugcggagaagga

SEQ ID NO: 688504 - RNA, 19 nt, Homo sapiens
  misc_RNA (1)...(19): siRNA sense strand
uuucaaaccccucgagaua

SEQ ID NO: 688505 - RNA, 19 nt, Homo sapiens
  misc_RNA (1)...(19): siRNA sense strand
uaaaaugugcggagaagga

SEQ ID NO: 688506 - RNA, 19 nt, Homo sapiens
  misc_RNA (1)...(19): siRNA sense strand
uuucaaaccccucgagaua

SEQ ID NO: 688507 - RNA, 19 nt, Homo sapiens
  misc_RNA (1)...(19): siRNA sense strand
uaaaaugugcggagaagga

SEQ ID NO: 688508 - RNA, 19 nt, Homo sapiens
  misc_RNA (1)...(19): siRNA sense strand
uuucaaaccccucgagaua

SEQ ID NO: 688509 - RNA, 19 nt, Homo sapiens
  misc_RNA (1)...(19): siRNA sense strand
uaaaaugugcggagaagga

SEQ ID NO: 688510 - RNA, 19 nt, Homo sapiens
  misc_RNA (1)...(19): siRNA sense strand
uuucaaaccccucgagaua

SEQ ID NO: 688511 - RNA, 19 nt, Homo sapiens
  misc_RNA (1)...(19): siRNA sense strand
uaaaaugugcggagaagga

SEQ ID NO: 688512 - RNA, 19 nt, Homo sapiens
  misc_RNA (1)...(19): siRNA sense strand
uuucaaaccccucgagaua

SEQ ID NO: 688513 - RNA, 19 nt, Homo sapiens
  misc_RNA (1)...(19): siRNA sense strand
uaaaaugugcggagaagga

SEQ ID NO: 688514 - RNA, 19 nt, Homo sapiens
  misc_RNA (1)...(19): siRNA sense strand
uuucaaaccccucgagaua

SEQ ID NO: 688515 - RNA, 19 nt, Homo sapiens
  misc_RNA (1)...(19): siRNA sense strand
gaagacaccuugaagauuu

SEQ ID NO: 688516 - RNA, 19 nt, Homo sapiens
  misc_RNA (1)...(19): siRNA sense strand
ugauaacgcuccagaaaua

SEQ ID NO: 688517 - RNA, 19 nt, Homo sapiens
  misc_RNA (1)...(19): siRNA sense strand
guccagagcuacaauauaa

SEQ ID NO: 688518 - RNA, 19 nt, Homo sapiens
  misc_RNA (1)...(19): siRNA sense strand
agaaugcccuggucacuua

SEQ ID NO: 688519 - RNA, 19 nt, Homo sapiens
  misc_RNA (1)...(19): siRNA sense strand
acuaucaccucuucuauua

SEQ ID NO: 688520 - RNA, 19 nt, Homo sapiens
  misc_RNA (1)...(19): siRNA sense strand
gauauucggugccagaaga

SEQ ID NO: 688521 - RNA, 19 nt, Homo sapiens
  misc_RNA (1)...(19): siRNA sense strand
ggucaagucuccuguuuua

SEQ ID NO: 688522 - RNA, 19 nt, Homo sapiens
  misc_RNA (1)...(19): siRNA sense strand
ccaccugccuuuuaaauua

SEQ ID NO: 688523 - RNA, 19 nt, Homo sapiens
  misc_RNA (1)...(19): siRNA sense strand
cagcucagcccuaauaauu

SEQ ID NO: 688524 - RNA, 19 nt, Homo sapiens
  misc_RNA (1)...(19): siRNA sense strand
gaguggagguggaaauaau

SEQ ID NO: 688525 - RNA, 19 nt, Homo sapiens
  misc_RNA (1)...(19): siRNA sense strand
ccucacagcuuuagaugga

SEQ ID NO: 688526 - RNA, 19 nt, Homo sapiens
  misc_RNA (1)...(19): siRNA sense strand
ggaagacaccuugaagauu

SEQ ID NO: 688527 - RNA, 19 nt, Homo sapiens
  misc_RNA (1)...(19): siRNA sense strand
ccaauuggauucacaaacu

SEQ ID NO: 688528 - RNA, 19 nt, Homo sapiens
  misc_RNA (1)...(19): siRNA sense strand
caaggcuucugaaauauuc

SEQ ID NO: 688529 - RNA, 19 nt, Homo sapiens
  misc_RNA (1)...(19): siRNA sense strand
ccuccuaugucucuauuaa

SEQ ID NO: 688530 - RNA, 19 nt, Homo sapiens
  misc_RNA (1)...(19): siRNA sense strand
ucuaugagauggaaauuca

SEQ ID NO: 688531 - RNA, 19 nt, Homo sapiens
  misc_RNA (1)...(19): siRNA sense strand
gaucacggcaggcaggaua

SEQ ID NO: 688532 - RNA, 19 nt, Homo sapiens
  misc_RNA (1)...(19): siRNA sense strand
gaacucgggugcugauggu

SEQ ID NO: 688533 - RNA, 19 nt, Homo sapiens
  misc_RNA (1)...(19): siRNA sense strand
gaaauucaaggccaagaug

SEQ ID NO: 688534 - RNA, 19 nt, Homo sapiens
  misc_RNA (1)...(19): siRNA sense strand
gcaaggcuucugaaauauu

SEQ ID NO: 688535 - RNA, 19 nt, Homo sapiens
  misc_RNA (1)...(19): siRNA sense strand
ugauugcucuucuaaaugu

SEQ ID NO: 688536 - RNA, 19 nt, Homo sapiens
  misc_RNA (1)...(19): siRNA sense strand
gcgauuugcucuuccuaau

SEQ ID NO: 688537 - RNA, 19 nt, Homo sapiens
  misc_RNA (1)...(19): siRNA sense strand
ggccaagaauccagagcua

SEQ ID NO: 688538 - RNA, 19 nt, Homo sapiens
  misc_RNA (1)...(19): siRNA sense strand
gaugguggaggucucuuua

SEQ ID NO: 688539 - RNA, 19 nt, Homo sapiens
  misc_RNA (1)...(19): siRNA sense strand
gagguggaaauaauagaua

SEQ ID NO: 688540 - RNA, 19 nt, Homo sapiens
  misc_RNA (1)...(19): siRNA sense strand
gcuaccagcucagcccuaa

SEQ ID NO: 688541 - RNA, 19 nt, Homo sapiens
  misc_RNA (1)...(19): siRNA sense strand
ugaacucccuccagagcua

SEQ ID NO: 688542 - RNA, 19 nt, Homo sapiens
  misc_RNA (1)...(19): siRNA sense strand
aaauaacuaucaccucuuc

SEQ ID NO: 688543 - RNA, 19 nt, Homo sapiens
  misc_RNA (1)...(19): siRNA sense strand
uaaaugaucacaucccaau

SEQ ID NO: 688544 - RNA, 19 nt, Homo sapiens
  misc_RNA (1)...(19): siRNA sense strand
ugagcaguuucgagacuua

SEQ ID NO: 688545 - RNA, 19 nt, Homo sapiens
  misc_RNA (1)...(19): siRNA sense strand
guacagugauugcucuucu

SEQ ID NO: 688546 - RNA, 19 nt, Homo sapiens
  misc_RNA (1)...(19): siRNA sense strand
gggaguugguccagagcua

SEQ ID NO: 688547 - RNA, 19 nt, Homo sapiens
  misc_RNA (1)...(19): siRNA sense strand
uacaauccuucgacuauga

SEQ ID NO: 688548 - RNA, 19 nt, Homo sapiens
  misc_RNA (1)...(19): siRNA sense strand
gauuugcucuuccuaaugc

SEQ ID NO: 688549 - RNA, 19 nt, Homo sapiens
  misc_RNA (1)...(19): siRNA sense strand
gaaauaacuaucaccucuu

SEQ ID NO: 688550 - RNA, 19 nt, Homo sapiens
  misc_RNA (1)...(19): siRNA sense strand
aagacaccuugaagauuua

SEQ ID NO: 688551 - RNA, 19 nt, Homo sapiens
  misc_RNA (1)...(19): siRNA sense strand
guugaucacuguuguggau

SEQ ID NO: 688552 - RNA, 19 nt, Homo sapiens
  misc_RNA (1)...(19): siRNA sense strand
ccaggcagauccgauauuc

SEQ ID NO: 688553 - RNA, 19 nt, Homo sapiens
  misc_RNA (1)...(19): siRNA sense strand
ggaggacgaaguggagaua

SEQ ID NO: 688554 - RNA, 19 nt, Homo sapiens
  misc_RNA (1)...(19): siRNA sense strand
acucaugucuggcugaaug

SEQ ID NO: 688555 - RNA, 19 nt, Homo sapiens
  misc_RNA (1)...(19): siRNA sense strand
agugauugcucuucuaaau

SEQ ID NO: 688556 - RNA, 19 nt, Homo sapiens
  misc_RNA (1)...(19): siRNA sense strand
gguccucgauguaaaugau

SEQ ID NO: 688557 - RNA, 19 nt, Homo sapiens
  misc_RNA (1)...(19): siRNA sense strand
uaccagcucagcccuaaua

SEQ ID NO: 688558 - RNA, 19 nt, Homo sapiens
  misc_RNA (1)...(19): siRNA sense strand
gguccagagcuacaauaua

SEQ ID NO: 688559 - RNA, 19 nt, Homo sapiens
  misc_RNA (1)...(19): siRNA sense strand
gauaacgcuccagaaauaa

SEQ ID NO: 688560 - RNA, 19 nt, Homo sapiens
  misc_RNA (1)...(19): siRNA sense strand
guauaucgcgugaguguuc

SEQ ID NO: 688561 - RNA, 19 nt, Homo sapiens
  misc_RNA (1)...(19): siRNA sense strand
ggaguggagguggaaauaa

SEQ ID NO: 688562 - RNA, 19 nt, Homo sapiens
  misc_RNA (1)...(19): siRNA sense strand
caagaauccagagcuagua

SEQ ID NO: 688563 - RNA, 19 nt, Homo sapiens
  misc_RNA (1)...(19): siRNA sense strand
cgacgauguugaucacugu

SEQ ID NO: 688564 - RNA, 19 nt, Homo sapiens
  misc_RNA (1)...(19): siRNA sense strand
gaggcgaucccauccgaaa

SEQ ID NO: 688565 - RNA, 19 nt, Homo sapiens
  misc_RNA (1)...(19): siRNA sense strand
ggcugaauguggcagauga

SEQ ID NO: 688566 - RNA, 19 nt, Homo sapiens
  misc_RNA (1)...(19): siRNA sense strand
aaugauaacgcuccagaaa

SEQ ID NO: 688567 - RNA, 19 nt, Homo sapiens
  misc_RNA (1)...(19): siRNA sense strand
ucugaaauauuccaauugg

SEQ ID NO: 688568 - RNA, 19 nt, Homo sapiens
  misc_RNA (1)...(19): siRNA sense strand
gagacgguguccuccuguu

SEQ ID NO: 688569 - RNA, 19 nt, Homo sapiens
  misc_RNA (1)...(19): siRNA sense strand
uggcagaugacaacgauaa

SEQ ID NO: 688570 - RNA, 19 nt, Homo sapiens
  misc_RNA (1)...(19): siRNA sense strand
uaacuaucaccucuucuau

SEQ ID NO: 688571 - RNA, 19 nt, Homo sapiens
  misc_RNA (1)...(19): siRNA sense strand
ggaaauucaaggccaagau

SEQ ID NO: 688572 - RNA, 19 nt, Homo sapiens
  misc_RNA (1)...(19): siRNA sense strand
uaaaugugcaagaucaaga

SEQ ID NO: 688573 - RNA, 19 nt, Homo sapiens
  misc_RNA (1)...(19): siRNA sense strand
gggccaggcagauccgaua

SEQ ID NO: 688574 - RNA, 19 nt, Homo sapiens
  misc_RNA (1)...(19): siRNA sense strand
ggagguggaaauaauagau

SEQ ID NO: 688575 - RNA, 19 nt, Homo sapiens
  misc_RNA (1)...(19): siRNA sense strand
ccuacaauccuucgacuau

SEQ ID NO: 688576 - RNA, 19 nt, Homo sapiens
  misc_RNA (1)...(19): siRNA sense strand
cuuacucucugacggauga

SEQ ID NO: 688577 - RNA, 19 nt, Homo sapiens
  misc_RNA (1)...(19): siRNA sense strand
gaauguggcagaugacaac

SEQ ID NO: 688578 - RNA, 19 nt, Homo sapiens
  misc_RNA (1)...(19): siRNA sense strand
uauggaacuucucguggaa

SEQ ID NO: 688579 - RNA, 19 nt, Homo sapiens
  misc_RNA (1)...(19): siRNA sense strand
caauuggauucacaaacug

SEQ ID NO: 688580 - RNA, 19 nt, Homo sapiens
  misc_RNA (1)...(19): siRNA sense strand
uuguggaugugaaugauaa

SEQ ID NO: 688581 - RNA, 19 nt, Homo sapiens
  misc_RNA (1)...(19): siRNA sense strand
aggacgaaguggagauaaa

SEQ ID NO: 688582 - RNA, 19 nt, Homo sapiens
  misc_RNA (1)...(19): siRNA sense strand
cuacaauccuucgacuaug

SEQ ID NO: 688583 - RNA, 19 nt, Homo sapiens
  misc_RNA (1)...(19): siRNA sense strand
aaacucaugucuggcugaa

SEQ ID NO: 688584 - RNA, 19 nt, Homo sapiens
  misc_RNA (1)...(19): siRNA sense strand
gaaugauaacgcuccagaa

SEQ ID NO: 688585 - RNA, 19 nt, Homo sapiens
  misc_RNA (1)...(19): siRNA sense strand
gaacggauggggccaagaa

SEQ ID NO: 688586 - RNA, 19 nt, Homo sapiens
  misc_RNA (1)...(19): siRNA sense strand
gcaguuucgagacuuagaa

SEQ ID NO: 688587 - RNA, 19 nt, Homo sapiens
  misc_RNA (1)...(19): siRNA sense strand
aaagggcgcaguucccauu

SEQ ID NO: 688588 - RNA, 19 nt, Homo sapiens
  misc_RNA (1)...(19): siRNA sense strand
cuaaccaccugccuuuuaa

SEQ ID NO: 688589 - RNA, 19 nt, Homo sapiens
  misc_RNA (1)...(19): siRNA sense strand
ccaagaauccagagcuagu

SEQ ID NO: 688590 - RNA, 19 nt, Homo sapiens
  misc_RNA (1)...(19): siRNA sense strand
uuucgagacuuagaacuga

SEQ ID NO: 688591 - RNA, 19 nt, Homo sapiens
  misc_RNA (1)...(19): siRNA sense strand
gggugccucuguccuccua

SEQ ID NO: 688592 - RNA, 19 nt, Homo sapiens
  misc_RNA (1)...(19): siRNA sense strand
gccuccaucuucucaguga

SEQ ID NO: 688593 - RNA, 19 nt, Homo sapiens
  misc_RNA (1)...(19): siRNA sense strand
ccacgacgauguugaucac

SEQ ID NO: 688594 - RNA, 19 nt, Homo sapiens
  misc_RNA (1)...(19): siRNA sense strand
guccguauaucgcgugagu

SEQ ID NO: 688595 - RNA, 19 nt, Homo sapiens
  misc_RNA (1)...(19): siRNA sense strand
cuucgacuaugagcaguuu

SEQ ID NO: 688596 - RNA, 19 nt, Homo sapiens
  misc_RNA (1)...(19): siRNA sense strand
uggaagacaccuugaagau

SEQ ID NO: 688597 - RNA, 19 nt, Homo sapiens
  misc_RNA (1)...(19): siRNA sense strand
acagugauugcucuucuaa

SEQ ID NO: 688598 - RNA, 19 nt, Homo sapiens
  misc_RNA (1)...(19): siRNA sense strand
uacagugauugcucuucua

SEQ ID NO: 688599 - RNA, 19 nt, Homo sapiens
  misc_RNA (1)...(19): siRNA sense strand
ucgcgugaguguuccagaa

SEQ ID NO: 688600 - RNA, 19 nt, Homo sapiens
  misc_RNA (1)...(19): siRNA sense strand
cgauguugaucacuguugu

SEQ ID NO: 688601 - RNA, 19 nt, Homo sapiens
  misc_RNA (1)...(19): siRNA sense strand
ucuaugcccuacaauccuu

SEQ ID NO: 688602 - RNA, 19 nt, Homo sapiens
  misc_RNA (1)...(19): siRNA sense strand
auaacuaucaccucuucua

SEQ ID NO: 688603 - RNA, 19 nt, Homo sapiens
  misc_RNA (1)...(19): siRNA sense strand
caagucuccuguuuuauuc

SEQ ID NO: 688604 - RNA, 19 nt, Homo sapiens
  misc_RNA (1)...(19): siRNA sense strand
gaauccagagcuaguacug

SEQ ID NO: 688605 - RNA, 19 nt, Homo sapiens
  misc_RNA (1)...(19): siRNA sense strand
ugguugcgguggacaaaga

SEQ ID NO: 688606 - RNA, 19 nt, Homo sapiens
  misc_RNA (1)...(19): siRNA sense strand
ggacgaaguggagauaaaa

SEQ ID NO: 688607 - RNA, 19 nt, Homo sapiens
  misc_RNA (1)...(19): siRNA sense strand
uaacguugacagccacaga

SEQ ID NO: 688608 - RNA, 19 nt, Homo sapiens
  misc_RNA (1)...(19): siRNA sense strand
gugauugcucuucuaaaug

SEQ ID NO: 688609 - RNA, 19 nt, Homo sapiens
  misc_RNA (1)...(19): siRNA sense strand
ucaccucuucuauuaauuc

SEQ ID NO: 688610 - RNA, 19 nt, Homo sapiens
  misc_RNA (1)...(19): siRNA sense strand
gcuccagaaauaacuauca

SEQ ID NO: 688611 - RNA, 19 nt, Homo sapiens
  misc_RNA (1)...(19): siRNA sense strand
gaucacuguuguggaugug

SEQ ID NO: 688612 - RNA, 19 nt, Homo sapiens
  misc_RNA (1)...(19): siRNA sense strand
cggaguggagguggaaaua

SEQ ID NO: 688613 - RNA, 19 nt, Homo sapiens
  misc_RNA (1)...(19): siRNA sense strand
guggaagacaccuugaaga

SEQ ID NO: 688614 - RNA, 19 nt, Homo sapiens
  misc_RNA (1)...(19): siRNA sense strand
gacuuagaacugagaguga

SEQ ID NO: 688615 - RNA, 19 nt, Homo sapiens
  misc_RNA (1)...(19): siRNA sense strand
gaagacaccuugaagauuu

SEQ ID NO: 688616 - RNA, 19 nt, Homo sapiens
  misc_RNA (1)...(19): siRNA sense strand
ugauaacgcuccagaaaua

SEQ ID NO: 688617 - RNA, 19 nt, Homo sapiens
  misc_RNA (1)...(19): siRNA sense strand
guccagagcuacaauauaa

SEQ ID NO: 688618 - RNA, 19 nt, Homo sapiens
  misc_RNA (1)...(19): siRNA sense strand
agaaugcccuggucacuua

SEQ ID NO: 688619 - RNA, 19 nt, Homo sapiens
  misc_RNA (1)...(19): siRNA sense strand
acuaucaccucuucuauua

SEQ ID NO: 688620 - RNA, 19 nt, Homo sapiens
  misc_RNA (1)...(19): siRNA sense strand
gauauucggugccagaaga

SEQ ID NO: 688621 - RNA, 19 nt, Homo sapiens
  misc_RNA (1)...(19): siRNA sense strand
ggucaagucuccuguuuua

SEQ ID NO: 688622 - RNA, 19 nt, Homo sapiens
  misc_RNA (1)...(19): siRNA sense strand
ccaccugccuuuuaaauua

SEQ ID NO: 688623 - RNA, 19 nt, Homo sapiens
  misc_RNA (1)...(19): siRNA sense strand
cagcucagcccuaauaauu

SEQ ID NO: 688624 - RNA, 19 nt, Homo sapiens
  misc_RNA (1)...(19): siRNA sense strand
gaguggagguggaaauaau

SEQ ID NO: 688625 - RNA, 19 nt, Homo sapiens
  misc_RNA (1)...(19): siRNA sense strand
ccucacagcuuuagaugga

SEQ ID NO: 688626 - RNA, 19 nt, Homo sapiens
  misc_RNA (1)...(19): siRNA sense strand
ggaagacaccuugaagauu

SEQ ID NO: 688627 - RNA, 19 nt, Homo sapiens
  misc_RNA (1)...(19): siRNA sense strand
ccaauuggauucacaaacu

SEQ ID NO: 688628 - RNA, 19 nt, Homo sapiens
  misc_RNA (1)...(19): siRNA sense strand
caaggcuucugaaauauuc

SEQ ID NO: 688629 - RNA, 19 nt, Homo sapiens
  misc_RNA (1)...(19): siRNA sense strand
ccuccuaugucucuauuaa

SEQ ID NO: 688630 - RNA, 19 nt, Homo sapiens
  misc_RNA (1)...(19): siRNA sense strand
ucuaugagauggaaauuca

SEQ ID NO: 688631 - RNA, 19 nt, Homo sapiens
  misc_RNA (1)...(19): siRNA sense strand
gaucacggcaggcaggaua

SEQ ID NO: 688632 - RNA, 19 nt, Homo sapiens
  misc_RNA (1)...(19): siRNA sense strand
gaacucgggugcugauggu

SEQ ID NO: 688633 - RNA, 19 nt, Homo sapiens
  misc_RNA (1)...(19): siRNA sense strand
gaaauucaaggccaagaug

SEQ ID NO: 688634 - RNA, 19 nt, Homo sapiens
  misc_RNA (1)...(19): siRNA sense strand
gcaaggcuucugaaauauu

SEQ ID NO: 688635 - RNA, 19 nt, Homo sapiens
  misc_RNA (1)...(19): siRNA sense strand
ugauugcucuucuaaaugu

SEQ ID NO: 688636 - RNA, 19 nt, Homo sapiens
  misc_RNA (1)...(19): siRNA sense strand
gcgauuugcucuuccuaau

SEQ ID NO: 688637 - RNA, 19 nt, Homo sapiens
  misc_RNA (1)...(19): siRNA sense strand
ggccaagaauccagagcua

SEQ ID NO: 688638 - RNA, 19 nt, Homo sapiens
  misc_RNA (1)...(19): siRNA sense strand
gaugguggaggucucuuua

SEQ ID NO: 688639 - RNA, 19 nt, Homo sapiens
  misc_RNA (1)...(19): siRNA sense strand
gagguggaaauaauagaua

SEQ ID NO: 688640 - RNA, 19 nt, Homo sapiens
  misc_RNA (1)...(19): siRNA sense strand
gcuaccagcucagcccuaa

SEQ ID NO: 688641 - RNA, 19 nt, Homo sapiens
  misc_RNA (1)...(19): siRNA sense strand
ugaacucccuccagagcua

SEQ ID NO: 688642 - RNA, 19 nt, Homo sapiens
  misc_RNA (1)...(19): siRNA sense strand
aaauaacuaucaccucuuc

SEQ ID NO: 688643 - RNA, 19 nt, Homo sapiens
  misc_RNA (1)...(19): siRNA sense strand
uaaaugaucacaucccaau

SEQ ID NO: 688644 - RNA, 19 nt, Homo sapiens
  misc_RNA (1)...(19): siRNA sense strand
ugagcaguuucgagacuua

SEQ ID NO: 688645 - RNA, 19 nt, Homo sapiens
  misc_RNA (1)...(19): siRNA sense strand
guacagugauugcucuucu

SEQ ID NO: 688646 - RNA, 19 nt, Homo sapiens
  misc_RNA (1)...(19): siRNA sense strand
gggaguugguccagagcua

SEQ ID NO: 688647 - RNA, 19 nt, Homo sapiens
  misc_RNA (1)...(19): siRNA sense strand
uacaauccuucgacuauga

SEQ ID NO: 688648 - RNA, 19 nt, Homo sapiens
  misc_RNA (1)...(19): siRNA sense strand
gauuugcucuuccuaaugc

SEQ ID NO: 688649 - RNA, 19 nt, Homo sapiens
  misc_RNA (1)...(19): siRNA sense strand
gaaauaacuaucaccucuu

SEQ ID NO: 688650 - RNA, 19 nt, Homo sapiens
  misc_RNA (1)...(19): siRNA sense strand
aagacaccuugaagauuua

SEQ ID NO: 688651 - RNA, 19 nt, Homo sapiens
  misc_RNA (1)...(19): siRNA sense strand
guugaucacuguuguggau

SEQ ID NO: 688652 - RNA, 19 nt, Homo sapiens
  misc_RNA (1)...(19): siRNA sense strand
ccaggcagauccgauauuc

SEQ ID NO: 688653 - RNA, 19 nt, Homo sapiens
  misc_RNA (1)...(19): siRNA sense strand
ggaggacgaaguggagaua

SEQ ID NO: 688654 - RNA, 19 nt, Homo sapiens
  misc_RNA (1)...(19): siRNA sense strand
acucaugucuggcugaaug

SEQ ID NO: 688655 - RNA, 19 nt, Homo sapiens
  misc_RNA (1)...(19): siRNA sense strand
agugauugcucuucuaaau

SEQ ID NO: 688656 - RNA, 19 nt, Homo sapiens
  misc_RNA (1)...(19): siRNA sense strand
gguccucgauguaaaugau

SEQ ID NO: 688657 - RNA, 19 nt, Homo sapiens
  misc_RNA (1)...(19): siRNA sense strand
uaccagcucagcccuaaua

SEQ ID NO: 688658 - RNA, 19 nt, Homo sapiens
  misc_RNA (1)...(19): siRNA sense strand
gguccagagcuacaauaua

SEQ ID NO: 688659 - RNA, 19 nt, Homo sapiens
  misc_RNA (1)...(19): siRNA sense strand
gauaacgcuccagaaauaa

SEQ ID NO: 688660 - RNA, 19 nt, Homo sapiens
  misc_RNA (1)...(19): siRNA sense strand
guauaucgcgugaguguuc

SEQ ID NO: 688661 - RNA, 19 nt, Homo sapiens
  misc_RNA (1)...(19): siRNA sense strand
ggaguggagguggaaauaa

SEQ ID NO: 688662 - RNA, 19 nt, Homo sapiens
  misc_RNA (1)...(19): siRNA sense strand
caagaauccagagcuagua

SEQ ID NO: 688663 - RNA, 19 nt, Homo sapiens
  misc_RNA (1)...(19): siRNA sense strand
cgacgauguugaucacugu

SEQ ID NO: 688664 - RNA, 19 nt, Homo sapiens
  misc_RNA (1)...(19): siRNA sense strand
gaggcgaucccauccgaaa

SEQ ID NO: 688665 - RNA, 19 nt, Homo sapiens
  misc_RNA (1)...(19): siRNA sense strand
ggcugaauguggcagauga

SEQ ID NO: 688666 - RNA, 19 nt, Homo sapiens
  misc_RNA (1)...(19): siRNA sense strand
aaugauaacgcuccagaaa

SEQ ID NO: 688667 - RNA, 19 nt, Homo sapiens
  misc_RNA (1)...(19): siRNA sense strand
ucugaaauauuccaauugg

SEQ ID NO: 688668 - RNA, 19 nt, Homo sapiens
  misc_RNA (1)...(19): siRNA sense strand
gagacgguguccuccuguu

SEQ ID NO: 688669 - RNA, 19 nt, Homo sapiens
  misc_RNA (1)...(19): siRNA sense strand
uggcagaugacaacgauaa

SEQ ID NO: 688670 - RNA, 19 nt, Homo sapiens
  misc_RNA (1)...(19): siRNA sense strand
uaacuaucaccucuucuau

SEQ ID NO: 688671 - RNA, 19 nt, Homo sapiens
  misc_RNA (1)...(19): siRNA sense strand
ggaaauucaaggccaagau

SEQ ID NO: 688672 - RNA, 19 nt, Homo sapiens
  misc_RNA (1)...(19): siRNA sense strand
uaaaugugcaagaucaaga

SEQ ID NO: 688673 - RNA, 19 nt, Homo sapiens
  misc_RNA (1)...(19): siRNA sense strand
gggccaggcagauccgaua

SEQ ID NO: 688674 - RNA, 19 nt, Homo sapiens
  misc_RNA (1)...(19): siRNA sense strand
ggagguggaaauaauagau

SEQ ID NO: 688675 - RNA, 19 nt, Homo sapiens
  misc_RNA (1)...(19): siRNA sense strand
ccuacaauccuucgacuau

SEQ ID NO: 688676 - RNA, 19 nt, Homo sapiens
  misc_RNA (1)...(19): siRNA sense strand
cuuacucucugacggauga

SEQ ID NO: 688677 - RNA, 19 nt, Homo sapiens
  misc_RNA (1)...(19): siRNA sense strand
gaauguggcagaugacaac

SEQ ID NO: 688678 - RNA, 19 nt, Homo sapiens
  misc_RNA (1)...(19): siRNA sense strand
uauggaacuucucguggaa

SEQ ID NO: 688679 - RNA, 19 nt, Homo sapiens
  misc_RNA (1)...(19): siRNA sense strand
caauuggauucacaaacug

SEQ ID NO: 688680 - RNA, 19 nt, Homo sapiens
  misc_RNA (1)...(19): siRNA sense strand
uuguggaugugaaugauaa

SEQ ID NO: 688681 - RNA, 19 nt, Homo sapiens
  misc_RNA (1)...(19): siRNA sense strand
aggacgaaguggagauaaa

SEQ ID NO: 688682 - RNA, 19 nt, Homo sapiens
  misc_RNA (1)...(19): siRNA sense strand
cuacaauccuucgacuaug

SEQ ID NO: 688683 - RNA, 19 nt, Homo sapiens
  misc_RNA (1)...(19): siRNA sense strand
aaacucaugucuggcugaa

SEQ ID NO: 688684 - RNA, 19 nt, Homo sapiens
  misc_RNA (1)...(19): siRNA sense strand
gaaugauaacgcuccagaa

SEQ ID NO: 688685 - RNA, 19 nt, Homo sapiens
  misc_RNA (1)...(19): siRNA sense strand
gaacggauggggccaagaa

SEQ ID NO: 688686 - RNA, 19 nt, Homo sapiens
  misc_RNA (1)...(19): siRNA sense strand
gcaguuucgagacuuagaa

SEQ ID NO: 688687 - RNA, 19 nt, Homo sapiens
  misc_RNA (1)...(19): siRNA sense strand
aaagggcgcaguucccauu

SEQ ID NO: 688688 - RNA, 19 nt, Homo sapiens
  misc_RNA (1)...(19): siRNA sense strand
cuaaccaccugccuuuuaa

SEQ ID NO: 688689 - RNA, 19 nt, Homo sapiens
  misc_RNA (1)...(19): siRNA sense strand
ccaagaauccagagcuagu

SEQ ID NO: 688690 - RNA, 19 nt, Homo sapiens
  misc_RNA (1)...(19): siRNA sense strand
uuucgagacuuagaacuga

SEQ ID NO: 688691 - RNA, 19 nt, Homo sapiens
  misc_RNA (1)...(19): siRNA sense strand
gggugccucuguccuccua

SEQ ID NO: 688692 - RNA, 19 nt, Homo sapiens
  misc_RNA (1)...(19): siRNA sense strand
gccuccaucuucucaguga

SEQ ID NO: 688693 - RNA, 19 nt, Homo sapiens
  misc_RNA (1)...(19): siRNA sense strand
ccacgacgauguugaucac

SEQ ID NO: 688694 - RNA, 19 nt, Homo sapiens
  misc_RNA (1)...(19): siRNA sense strand
guccguauaucgcgugagu

SEQ ID NO: 688695 - RNA, 19 nt, Homo sapiens
  misc_RNA (1)...(19): siRNA sense strand
cuucgacuaugagcaguuu

SEQ ID NO: 688696 - RNA, 19 nt, Homo sapiens
  misc_RNA (1)...(19): siRNA sense strand
uggaagacaccuugaagau

SEQ ID NO: 688697 - RNA, 19 nt, Homo sapiens
  misc_RNA (1)...(19): siRNA sense strand
acagugauugcucuucuaa

SEQ ID NO: 688698 - RNA, 19 nt, Homo sapiens
  misc_RNA (1)...(19): siRNA sense strand
uacagugauugcucuucua

SEQ ID NO: 688699 - RNA, 19 nt, Homo sapiens
  misc_RNA (1)...(19): siRNA sense strand
ucgcgugaguguuccagaa

SEQ ID NO: 688700 - RNA, 19 nt, Homo sapiens
  misc_RNA (1)...(19): siRNA sense strand
cgauguugaucacuguugu

SEQ ID NO: 688701 - RNA, 19 nt, Homo sapiens
  misc_RNA (1)...(19): siRNA sense strand
ucuaugcccuacaauccuu

SEQ ID NO: 688702 - RNA, 19 nt, Homo sapiens
  misc_RNA (1)...(19): siRNA sense strand
auaacuaucaccucuucua

SEQ ID NO: 688703 - RNA, 19 nt, Homo sapiens
  misc_RNA (1)...(19): siRNA sense strand
caagucuccuguuuuauuc

SEQ ID NO: 688704 - RNA, 19 nt, Homo sapiens
  misc_RNA (1)...(19): siRNA sense strand
gaauccagagcuaguacug

SEQ ID NO: 688705 - RNA, 19 nt, Homo sapiens
  misc_RNA (1)...(19): siRNA sense strand
ugguugcgguggacaaaga

SEQ ID NO: 688706 - RNA, 19 nt, Homo sapiens
  misc_RNA (1)...(19): siRNA sense strand
ggacgaaguggagauaaaa

SEQ ID NO: 688707 - RNA, 19 nt, Homo sapiens
  misc_RNA (1)...(19): siRNA sense strand
uaacguugacagccacaga

SEQ ID NO: 688708 - RNA, 19 nt, Homo sapiens
  misc_RNA (1)...(19): siRNA sense strand
gugauugcucuucuaaaug

SEQ ID NO: 688709 - RNA, 19 nt, Homo sapiens
  misc_RNA (1)...(19): siRNA sense strand
ucaccucuucuauuaauuc

SEQ ID NO: 688710 - RNA, 19 nt, Homo sapiens
  misc_RNA (1)...(19): siRNA sense strand
gcuccagaaauaacuauca

SEQ ID NO: 688711 - RNA, 19 nt, Homo sapiens
  misc_RNA (1)...(19): siRNA sense strand
gaucacuguuguggaugug

SEQ ID NO: 688712 - RNA, 19 nt, Homo sapiens
  misc_RNA (1)...(19): siRNA sense strand
cggaguggagguggaaaua

SEQ ID NO: 688713 - RNA, 19 nt, Homo sapiens
  misc_RNA (1)...(19): siRNA sense strand
guggaagacaccuugaaga

SEQ ID NO: 688714 - RNA, 19 nt, Homo sapiens
  misc_RNA (1)...(19): siRNA sense strand
gacuuagaacugagaguga

SEQ ID NO: 688715 - RNA, 19 nt, Homo sapiens
  misc_RNA (1)...(19): siRNA sense strand
gaagacaccuugaagauuu

SEQ ID NO: 688716 - RNA, 19 nt, Homo sapiens
  misc_RNA (1)...(19): siRNA sense strand
ugauaacgcuccagaaaua

SEQ ID NO: 688717 - RNA, 19 nt, Homo sapiens
  misc_RNA (1)...(19): siRNA sense strand
guccagagcuacaauauaa

SEQ ID NO: 688718 - RNA, 19 nt, Homo sapiens
  misc_RNA (1)...(19): siRNA sense strand
agaaugcccuggucacuua

SEQ ID NO: 688719 - RNA, 19 nt, Homo sapiens
  misc_RNA (1)...(19): siRNA sense strand
acuaucaccucuucuauua

SEQ ID NO: 688720 - RNA, 19 nt, Homo sapiens
  misc_RNA (1)...(19): siRNA sense strand
gauauucggugccagaaga

SEQ ID NO: 688721 - RNA, 19 nt, Homo sapiens
  misc_RNA (1)...(19): siRNA sense strand
ggucaagucuccuguuuua

SEQ ID NO: 688722 - RNA, 19 nt, Homo sapiens
  misc_RNA (1)...(19): siRNA sense strand
ccaccugccuuuuaaauua

SEQ ID NO: 688723 - RNA, 19 nt, Homo sapiens
  misc_RNA (1)...(19): siRNA sense strand
cagcucagcccuaauaauu

SEQ ID NO: 688724 - RNA, 19 nt, Homo sapiens
  misc_RNA (1)...(19): siRNA sense strand
gaguggagguggaaauaau

SEQ ID NO: 688725 - RNA, 19 nt, Homo sapiens
  misc_RNA (1)...(19): siRNA sense strand
ccucacagcuuuagaugga

SEQ ID NO: 688726 - RNA, 19 nt, Homo sapiens
  misc_RNA (1)...(19): siRNA sense strand
ggaagacaccuugaagauu

SEQ ID NO: 688727 - RNA, 19 nt, Homo sapiens
  misc_RNA (1)...(19): siRNA sense strand
ccaauuggauucacaaacu

SEQ ID NO: 688728 - RNA, 19 nt, Homo sapiens
  misc_RNA (1)...(19): siRNA sense strand
caaggcuucugaaauauuc

SEQ ID NO: 688729 - RNA, 19 nt, Homo sapiens
  misc_RNA (1)...(19): siRNA sense strand
ccuccuaugucucuauuaa

SEQ ID NO: 688730 - RNA, 19 nt, Homo sapiens
  misc_RNA (1)...(19): siRNA sense strand
ucuaugagauggaaauuca

SEQ ID NO: 688731 - RNA, 19 nt, Homo sapiens
  misc_RNA (1)...(19): siRNA sense strand
gaucacggcaggcaggaua

SEQ ID NO: 688732 - RNA, 19 nt, Homo sapiens
  misc_RNA (1)...(19): siRNA sense strand
gaacucgggugcugauggu

SEQ ID NO: 688733 - RNA, 19 nt, Homo sapiens
  misc_RNA (1)...(19): siRNA sense strand
gaaauucaaggccaagaug

SEQ ID NO: 688734 - RNA, 19 nt, Homo sapiens
  misc_RNA (1)...(19): siRNA sense strand
gcaaggcuucugaaauauu

SEQ ID NO: 688735 - RNA, 19 nt, Homo sapiens
  misc_RNA (1)...(19): siRNA sense strand
ugauugcucuucuaaaugu

SEQ ID NO: 688736 - RNA, 19 nt, Homo sapiens
  misc_RNA (1)...(19): siRNA sense strand
gcgauuugcucuuccuaau

SEQ ID NO: 688737 - RNA, 19 nt, Homo sapiens
  misc_RNA (1)...(19): siRNA sense strand
ggccaagaauccagagcua

SEQ ID NO: 688738 - RNA, 19 nt, Homo sapiens
  misc_RNA (1)...(19): siRNA sense strand
gaugguggaggucucuuua

SEQ ID NO: 688739 - RNA, 19 nt, Homo sapiens
  misc_RNA (1)...(19): siRNA sense strand
gagguggaaauaauagaua

SEQ ID NO: 688740 - RNA, 19 nt, Homo sapiens
  misc_RNA (1)...(19): siRNA sense strand
gcuaccagcucagcccuaa

SEQ ID NO: 688741 - RNA, 19 nt, Homo sapiens
  misc_RNA (1)...(19): siRNA sense strand
ugaacucccuccagagcua

SEQ ID NO: 688742 - RNA, 19 nt, Homo sapiens
  misc_RNA (1)...(19): siRNA sense strand
aaauaacuaucaccucuuc

SEQ ID NO: 688743 - RNA, 19 nt, Homo sapiens
  misc_RNA (1)...(19): siRNA sense strand
uaaaugaucacaucccaau

SEQ ID NO: 688744 - RNA, 19 nt, Homo sapiens
  misc_RNA (1)...(19): siRNA sense strand
ugagcaguuucgagacuua

SEQ ID NO: 688745 - RNA, 19 nt, Homo sapiens
  misc_RNA (1)...(19): siRNA sense strand
guacagugauugcucuucu

SEQ ID NO: 688746 - RNA, 19 nt, Homo sapiens
  misc_RNA (1)...(19): siRNA sense strand
gggaguugguccagagcua

SEQ ID NO: 688747 - RNA, 19 nt, Homo sapiens
  misc_RNA (1)...(19): siRNA sense strand
uacaauccuucgacuauga

SEQ ID NO: 688748 - RNA, 19 nt, Homo sapiens
  misc_RNA (1)...(19): siRNA sense strand
gauuugcucuuccuaaugc

SEQ ID NO: 688749 - RNA, 19 nt, Homo sapiens
  misc_RNA (1)...(19): siRNA sense strand
gaaauaacuaucaccucuu

SEQ ID NO: 688750 - RNA, 19 nt, Homo sapiens
  misc_RNA (1)...(19): siRNA sense strand
aagacaccuugaagauuua

SEQ ID NO: 688751 - RNA, 19 nt, Homo sapiens
  misc_RNA (1)...(19): siRNA sense strand
guugaucacuguuguggau

SEQ ID NO: 688752 - RNA, 19 nt, Homo sapiens
  misc_RNA (1)...(19): siRNA sense strand
ccaggcagauccgauauuc

SEQ ID NO: 688753 - RNA, 19 nt, Homo sapiens
  misc_RNA (1)...(19): siRNA sense strand
ggaggacgaaguggagaua

SEQ ID NO: 688754 - RNA, 19 nt, Homo sapiens
  misc_RNA (1)...(19): siRNA sense strand
acucaugucuggcugaaug

SEQ ID NO: 688755 - RNA, 19 nt, Homo sapiens
  misc_RNA (1)...(19): siRNA sense strand
agugauugcucuucuaaau

SEQ ID NO: 688756 - RNA, 19 nt, Homo sapiens
  misc_RNA (1)...(19): siRNA sense strand
gguccucgauguaaaugau

SEQ ID NO: 688757 - RNA, 19 nt, Homo sapiens
  misc_RNA (1)...(19): siRNA sense strand
uaccagcucagcccuaaua

SEQ ID NO: 688758 - RNA, 19 nt, Homo sapiens
  misc_RNA (1)...(19): siRNA sense strand
gguccagagcuacaauaua

SEQ ID NO: 688759 - RNA, 19 nt, Homo sapiens
  misc_RNA (1)...(19): siRNA sense strand
gauaacgcuccagaaauaa

SEQ ID NO: 688760 - RNA, 19 nt, Homo sapiens
  misc_RNA (1)...(19): siRNA sense strand
guauaucgcgugaguguuc

SEQ ID NO: 688761 - RNA, 19 nt, Homo sapiens
  misc_RNA (1)...(19): siRNA sense strand
ggaguggagguggaaauaa

SEQ ID NO: 688762 - RNA, 19 nt, Homo sapiens
  misc_RNA (1)...(19): siRNA sense strand
caagaauccagagcuagua

SEQ ID NO: 688763 - RNA, 19 nt, Homo sapiens
  misc_RNA (1)...(19): siRNA sense strand
cgacgauguugaucacugu

SEQ ID NO: 688764 - RNA, 19 nt, Homo sapiens
  misc_RNA (1)...(19): siRNA sense strand
gaggcgaucccauccgaaa

SEQ ID NO: 688765 - RNA, 19 nt, Homo sapiens
  misc_RNA (1)...(19): siRNA sense strand
ggcugaauguggcagauga

SEQ ID NO: 688766 - RNA, 19 nt, Homo sapiens
  misc_RNA (1)...(19): siRNA sense strand
aaugauaacgcuccagaaa

SEQ ID NO: 688767 - RNA, 19 nt, Homo sapiens
  misc_RNA (1)...(19): siRNA sense strand
ucugaaauauuccaauugg

SEQ ID NO: 688768 - RNA, 19 nt, Homo sapiens
  misc_RNA (1)...(19): siRNA sense strand
gagacgguguccuccuguu

SEQ ID NO: 688769 - RNA, 19 nt, Homo sapiens
  misc_RNA (1)...(19): siRNA sense strand
uggcagaugacaacgauaa

SEQ ID NO: 688770 - RNA, 19 nt, Homo sapiens
  misc_RNA (1)...(19): siRNA sense strand
uaacuaucaccucuucuau

SEQ ID NO: 688771 - RNA, 19 nt, Homo sapiens
  misc_RNA (1)...(19): siRNA sense strand
ggaaauucaaggccaagau

SEQ ID NO: 688772 - RNA, 19 nt, Homo sapiens
  misc_RNA (1)...(19): siRNA sense strand
uaaaugugcaagaucaaga

SEQ ID NO: 688773 - RNA, 19 nt, Homo sapiens
  misc_RNA (1)...(19): siRNA sense strand
gggccaggcagauccgaua

SEQ ID NO: 688774 - RNA, 19 nt, Homo sapiens
  misc_RNA (1)...(19): siRNA sense strand
ggagguggaaauaauagau

SEQ ID NO: 688775 - RNA, 19 nt, Homo sapiens
  misc_RNA (1)...(19): siRNA sense strand
ccuacaauccuucgacuau

SEQ ID NO: 688776 - RNA, 19 nt, Homo sapiens
  misc_RNA (1)...(19): siRNA sense strand
cuuacucucugacggauga

SEQ ID NO: 688777 - RNA, 19 nt, Homo sapiens
  misc_RNA (1)...(19): siRNA sense strand
gaauguggcagaugacaac

SEQ ID NO: 688778 - RNA, 19 nt, Homo sapiens
  misc_RNA (1)...(19): siRNA sense strand
uauggaacuucucguggaa

SEQ ID NO: 688779 - RNA, 19 nt, Homo sapiens
  misc_RNA (1)...(19): siRNA sense strand
caauuggauucacaaacug

SEQ ID NO: 688780 - RNA, 19 nt, Homo sapiens
  misc_RNA (1)...(19): siRNA sense strand
uuguggaugugaaugauaa

SEQ ID NO: 688781 - RNA, 19 nt, Homo sapiens
  misc_RNA (1)...(19): siRNA sense strand
aggacgaaguggagauaaa

SEQ ID NO: 688782 - RNA, 19 nt, Homo sapiens
  misc_RNA (1)...(19): siRNA sense strand
cuacaauccuucgacuaug

SEQ ID NO: 688783 - RNA, 19 nt, Homo sapiens
  misc_RNA (1)...(19): siRNA sense strand
aaacucaugucuggcugaa

SEQ ID NO: 688784 - RNA, 19 nt, Homo sapiens
  misc_RNA (1)...(19): siRNA sense strand
gaaugauaacgcuccagaa

SEQ ID NO: 688785 - RNA, 19 nt, Homo sapiens
  misc_RNA (1)...(19): siRNA sense strand
gaacggauggggccaagaa

SEQ ID NO: 688786 - RNA, 19 nt, Homo sapiens
  misc_RNA (1)...(19): siRNA sense strand
gcaguuucgagacuuagaa

SEQ ID NO: 688787 - RNA, 19 nt, Homo sapiens
  misc_RNA (1)...(19): siRNA sense strand
aaagggcgcaguucccauu

SEQ ID NO: 688788 - RNA, 19 nt, Homo sapiens
  misc_RNA (1)...(19): siRNA sense strand
cuaaccaccugccuuuuaa

SEQ ID NO: 688789 - RNA, 19 nt, Homo sapiens
  misc_RNA (1)...(19): siRNA sense strand
ccaagaauccagagcuagu

SEQ ID NO: 688790 - RNA, 19 nt, Homo sapiens
  misc_RNA (1)...(19): siRNA sense strand
uuucgagacuuagaacuga

SEQ ID NO: 688791 - RNA, 19 nt, Homo sapiens
  misc_RNA (1)...(19): siRNA sense strand
gggugccucuguccuccua

SEQ ID NO: 688792 - RNA, 19 nt, Homo sapiens
  misc_RNA (1)...(19): siRNA sense strand
gccuccaucuucucaguga

SEQ ID NO: 688793 - RNA, 19 nt, Homo sapiens
  misc_RNA (1)...(19): siRNA sense strand
ccacgacgauguugaucac

SEQ ID NO: 688794 - RNA, 19 nt, Homo sapiens
  misc_RNA (1)...(19): siRNA sense strand
guccguauaucgcgugagu

SEQ ID NO: 688795 - RNA, 19 nt, Homo sapiens
  misc_RNA (1)...(19): siRNA sense strand
cuucgacuaugagcaguuu

SEQ ID NO: 688796 - RNA, 19 nt, Homo sapiens
  misc_RNA (1)...(19): siRNA sense strand
uggaagacaccuugaagau

SEQ ID NO: 688797 - RNA, 19 nt, Homo sapiens
  misc_RNA (1)...(19): siRNA sense strand
acagugauugcucuucuaa

SEQ ID NO: 688798 - RNA, 19 nt, Homo sapiens
  misc_RNA (1)...(19): siRNA sense strand
uacagugauugcucuucua

SEQ ID NO: 688799 - RNA, 19 nt, Homo sapiens
  misc_RNA (1)...(19): siRNA sense strand
ucgcgugaguguuccagaa

SEQ ID NO: 688800 - RNA, 19 nt, Homo sapiens
  misc_RNA (1)...(19): siRNA sense strand
cgauguugaucacuguugu

SEQ ID NO: 688801 - RNA, 19 nt, Homo sapiens
  misc_RNA (1)...(19): siRNA sense strand
ucuaugcccuacaauccuu

SEQ ID NO: 688802 - RNA, 19 nt, Homo sapiens
  misc_RNA (1)...(19): siRNA sense strand
auaacuaucaccucuucua

SEQ ID NO: 688803 - RNA, 19 nt, Homo sapiens
  misc_RNA (1)...(19): siRNA sense strand
caagucuccuguuuuauuc

SEQ ID NO: 688804 - RNA, 19 nt, Homo sapiens
  misc_RNA (1)...(19): siRNA sense strand
gaauccagagcuaguacug

SEQ ID NO: 688805 - RNA, 19 nt, Homo sapiens
  misc_RNA (1)...(19): siRNA sense strand
ugguugcgguggacaaaga

SEQ ID NO: 688806 - RNA, 19 nt, Homo sapiens
  misc_RNA (1)...(19): siRNA sense strand
ggacgaaguggagauaaaa

SEQ ID NO: 688807 - RNA, 19 nt, Homo sapiens
  misc_RNA (1)...(19): siRNA sense strand
uaacguugacagccacaga

SEQ ID NO: 688808 - RNA, 19 nt, Homo sapiens
  misc_RNA (1)...(19): siRNA sense strand
gugauugcucuucuaaaug

SEQ ID NO: 688809 - RNA, 19 nt, Homo sapiens
  misc_RNA (1)...(19): siRNA sense strand
ucaccucuucuauuaauuc

SEQ ID NO: 688810 - RNA, 19 nt, Homo sapiens
  misc_RNA (1)...(19): siRNA sense strand
gcuccagaaauaacuauca

SEQ ID NO: 688811 - RNA, 19 nt, Homo sapiens
  misc_RNA (1)...(19): siRNA sense strand
gaucacuguuguggaugug

SEQ ID NO: 688812 - RNA, 19 nt, Homo sapiens
  misc_RNA (1)...(19): siRNA sense strand
cggaguggagguggaaaua

SEQ ID NO: 688813 - RNA, 19 nt, Homo sapiens
  misc_RNA (1)...(19): siRNA sense strand
guggaagacaccuugaaga

SEQ ID NO: 688814 - RNA, 19 nt, Homo sapiens
  misc_RNA (1)...(19): siRNA sense strand
gacuuagaacugagaguga

SEQ ID NO: 688815 - RNA, 19 nt, Homo sapiens
  misc_RNA (1)...(19): siRNA sense strand
gaugaagcaugguuacauu

SEQ ID NO: 688816 - RNA, 19 nt, Homo sapiens
  misc_RNA (1)...(19): siRNA sense strand
ccacagagcugggaaaauu

SEQ ID NO: 688817 - RNA, 19 nt, Homo sapiens
  misc_RNA (1)...(19): siRNA sense strand
ccaguuugguuucauugua

SEQ ID NO: 688818 - RNA, 19 nt, Homo sapiens
  misc_RNA (1)...(19): siRNA sense strand
aaacgccaggugcuuauua

SEQ ID NO: 688819 - RNA, 19 nt, Homo sapiens
  misc_RNA (1)...(19): siRNA sense strand
ucaagaguaucaacaaugc

SEQ ID NO: 688820 - RNA, 19 nt, Homo sapiens
  misc_RNA (1)...(19): siRNA sense strand
gcaaacgccaggugcuuau

SEQ ID NO: 688821 - RNA, 19 nt, Homo sapiens
  misc_RNA (1)...(19): siRNA sense strand
caaagucaucguccgguuu

SEQ ID NO: 688822 - RNA, 19 nt, Homo sapiens
  misc_RNA (1)...(19): siRNA sense strand
ggcaaacgccaggugcuua

SEQ ID NO: 688823 - RNA, 19 nt, Homo sapiens
  misc_RNA (1)...(19): siRNA sense strand
aaccucagcuggcaucaug

SEQ ID NO: 688824 - RNA, 19 nt, Homo sapiens
  misc_RNA (1)...(19): siRNA sense strand
caacaaugccgaaaagaga

SEQ ID NO: 688825 - RNA, 19 nt, Homo sapiens
  misc_RNA (1)...(19): siRNA sense strand
caggcaggcuaaacaagug

SEQ ID NO: 688826 - RNA, 19 nt, Homo sapiens
  misc_RNA (1)...(19): siRNA sense strand
ucucaagaguaucaacaau

SEQ ID NO: 688827 - RNA, 19 nt, Homo sapiens
  misc_RNA (1)...(19): siRNA sense strand
uuacauuggcgaauuugaa

SEQ ID NO: 688828 - RNA, 19 nt, Homo sapiens
  misc_RNA (1)...(19): siRNA sense strand
ucacaggcaggcuaaacaa

SEQ ID NO: 688829 - RNA, 19 nt, Homo sapiens
  misc_RNA (1)...(19): siRNA sense strand
ugguuacauuggcgaauuu

SEQ ID NO: 688830 - RNA, 19 nt, Homo sapiens
  misc_RNA (1)...(19): siRNA sense strand
uacauuggcgaauuugaaa

SEQ ID NO: 688831 - RNA, 19 nt, Homo sapiens
  misc_RNA (1)...(19): siRNA sense strand
ccgccaguuugguuucauu

SEQ ID NO: 688832 - RNA, 19 nt, Homo sapiens
  misc_RNA (1)...(19): siRNA sense strand
ugaugaugaagcaugguua

SEQ ID NO: 688833 - RNA, 19 nt, Homo sapiens
  misc_RNA (1)...(19): siRNA sense strand
caguuugguuucauuguac

SEQ ID NO: 688834 - RNA, 19 nt, Homo sapiens
  misc_RNA (1)...(19): siRNA sense strand
ccuggcagaugcucucaag

SEQ ID NO: 688835 - RNA, 19 nt, Homo sapiens
  misc_RNA (1)...(19): siRNA sense strand
aaagucaucguccgguuuc

SEQ ID NO: 688836 - RNA, 19 nt, Homo sapiens
  misc_RNA (1)...(19): siRNA sense strand
gaugaugaagcaugguuac

SEQ ID NO: 688837 - RNA, 19 nt, Homo sapiens
  misc_RNA (1)...(19): siRNA sense strand
gcacacagcucuucuuaaa

SEQ ID NO: 688838 - RNA, 19 nt, Homo sapiens
  misc_RNA (1)...(19): siRNA sense strand
gagaugcgcuuauguauau

SEQ ID NO: 688839 - RNA, 19 nt, Homo sapiens
  misc_RNA (1)...(19): siRNA sense strand
gaaacagaauucuauuugg

SEQ ID NO: 688840 - RNA, 19 nt, Homo sapiens
  misc_RNA (1)...(19): siRNA sense strand
caagagaugcgcuuaugua

SEQ ID NO: 688841 - RNA, 19 nt, Homo sapiens
  misc_RNA (1)...(19): siRNA sense strand
ggacacagaauccgaguga

SEQ ID NO: 688842 - RNA, 19 nt, Homo sapiens
  misc_RNA (1)...(19): siRNA sense strand
gcaaagaacaacacaguca

SEQ ID NO: 688843 - RNA, 19 nt, Homo sapiens
  misc_RNA (1)...(19): siRNA sense strand
gagaugaaacagaauucua

SEQ ID NO: 688844 - RNA, 19 nt, Homo sapiens
  misc_RNA (1)...(19): siRNA sense strand
ggcaagagaugcgcuuaug

SEQ ID NO: 688845 - RNA, 19 nt, Homo sapiens
  misc_RNA (1)...(19): siRNA sense strand
gaauccgagugaugcugua

SEQ ID NO: 688846 - RNA, 19 nt, Homo sapiens
  misc_RNA (1)...(19): siRNA sense strand
acacagcucuucuuaaaau

SEQ ID NO: 688847 - RNA, 19 nt, Homo sapiens
  misc_RNA (1)...(19): siRNA sense strand
agagaugcgcuuauguaua

SEQ ID NO: 688848 - RNA, 19 nt, Homo sapiens
  misc_RNA (1)...(19): siRNA sense strand
uggaaacaguggcaugguu

SEQ ID NO: 688849 - RNA, 19 nt, Homo sapiens
  misc_RNA (1)...(19): siRNA sense strand
gcaagagaugcgcuuaugu

SEQ ID NO: 688850 - RNA, 19 nt, Homo sapiens
  misc_RNA (1)...(19): siRNA sense strand
gcaugguucgugccaaauu

SEQ ID NO: 688851 - RNA, 19 nt, Homo sapiens
  misc_RNA (1)...(19): siRNA sense strand
cgcccgagaugaaacagaa

SEQ ID NO: 688852 - RNA, 19 nt, Homo sapiens
  misc_RNA (1)...(19): siRNA sense strand
acacagaauccgagugaug

SEQ ID NO: 688853 - RNA, 19 nt, Homo sapiens
  misc_RNA (1)...(19): siRNA sense strand
caugguucgugccaaauuc

SEQ ID NO: 688854 - RNA, 19 nt, Homo sapiens
  misc_RNA (1)...(19): siRNA sense strand
uaaggccauuggacacaga

SEQ ID NO: 688855 - RNA, 19 nt, Homo sapiens
  misc_RNA (1)...(19): siRNA sense strand
aagcaaagaacaacacagu

SEQ ID NO: 688856 - RNA, 19 nt, Homo sapiens
  misc_RNA (1)...(19): siRNA sense strand
gaaccaaagggagcacaca

SEQ ID NO: 688857 - RNA, 19 nt, Homo sapiens
  misc_RNA (1)...(19): siRNA sense strand
gggcaagagaugcgcuuau

SEQ ID NO: 688858 - RNA, 19 nt, Homo sapiens
  misc_RNA (1)...(19): siRNA sense strand
gccaaauuccgaagcaauc

SEQ ID NO: 688859 - RNA, 19 nt, Homo sapiens
  misc_RNA (1)...(19): siRNA sense strand
caaauuccgaagcaaucuu

SEQ ID NO: 688860 - RNA, 19 nt, Homo sapiens
  misc_RNA (1)...(19): siRNA sense strand
gaauucuauuugggcaaga

SEQ ID NO: 688861 - RNA, 19 nt, Homo sapiens
  misc_RNA (1)...(19): siRNA sense strand
aagagaugcgcuuauguau

SEQ ID NO: 688862 - RNA, 19 nt, Homo sapiens
  misc_RNA (1)...(19): siRNA sense strand
uaaagcaaagaacaacaca

SEQ ID NO: 688863 - RNA, 19 nt, Homo sapiens
  misc_RNA (1)...(19): siRNA sense strand
cagcucuucuuaaaauuga

SEQ ID NO: 688864 - RNA, 19 nt, Homo sapiens
  misc_RNA (1)...(19): siRNA sense strand
aaacaaaaccagagucauc

SEQ ID NO: 688865 - RNA, 19 nt, Homo sapiens
  misc_RNA (1)...(19): siRNA sense strand
caagaucuccaaauaguua

SEQ ID NO: 688866 - RNA, 19 nt, Homo sapiens
  misc_RNA (1)...(19): siRNA sense strand
aguacaagaucuccaaaua

SEQ ID NO: 688867 - RNA, 19 nt, Homo sapiens
  misc_RNA (1)...(19): siRNA sense strand
gcauuuccguuaccaagaa

SEQ ID NO: 688868 - RNA, 19 nt, Homo sapiens
  misc_RNA (1)...(19): siRNA sense strand
gcagaaagaaccuggaaga

SEQ ID NO: 688869 - RNA, 19 nt, Homo sapiens
  misc_RNA (1)...(19): siRNA sense strand
caacaaauccagacuccuu

SEQ ID NO: 688870 - RNA, 19 nt, Homo sapiens
  misc_RNA (1)...(19): siRNA sense strand
uacaagaucuccaaauagu

SEQ ID NO: 688871 - RNA, 19 nt, Homo sapiens
  misc_RNA (1)...(19): siRNA sense strand
uggaagacuugcagaaaga

SEQ ID NO: 688872 - RNA, 19 nt, Homo sapiens
  misc_RNA (1)...(19): siRNA sense strand
guacaagaucuccaaauag

SEQ ID NO: 688873 - RNA, 19 nt, Homo sapiens
  misc_RNA (1)...(19): siRNA sense strand
aauccagacuccuucagua

SEQ ID NO: 688874 - RNA, 19 nt, Homo sapiens
  misc_RNA (1)...(19): siRNA sense strand
ccagacuccuucaguacaa

SEQ ID NO: 688875 - RNA, 19 nt, Homo sapiens
  misc_RNA (1)...(19): siRNA sense strand
guggaagacuugcagaaag

SEQ ID NO: 688876 - RNA, 19 nt, Homo sapiens
  misc_RNA (1)...(19): siRNA sense strand
aagagcagauccuggaguu

SEQ ID NO: 688877 - RNA, 19 nt, Homo sapiens
  misc_RNA (1)...(19): siRNA sense strand
gguggaagacuugcagaaa

SEQ ID NO: 688878 - RNA, 19 nt, Homo sapiens
  misc_RNA (1)...(19): siRNA sense strand
ggccagagaaguguacaaa

SEQ ID NO: 688879 - RNA, 19 nt, Homo sapiens
  misc_RNA (1)...(19): siRNA sense strand
ccagagaaguguacaaaag

SEQ ID NO: 688880 - RNA, 19 nt, Homo sapiens
  misc_RNA (1)...(19): siRNA sense strand
agaaagaaccuggaagaca

SEQ ID NO: 688881 - RNA, 19 nt, Homo sapiens
  misc_RNA (1)...(19): siRNA sense strand
ccacugggagcaggaaauu

SEQ ID NO: 688882 - RNA, 19 nt, Homo sapiens
  misc_RNA (1)...(19): siRNA sense strand
ggaguugcugguccuagaa

SEQ ID NO: 688883 - RNA, 19 nt, Homo sapiens
  misc_RNA (1)...(19): siRNA sense strand
ggaagacuugcagaaagaa

SEQ ID NO: 688884 - RNA, 19 nt, Homo sapiens
  misc_RNA (1)...(19): siRNA sense strand
caguggcccugguggaaga

SEQ ID NO: 688885 - RNA, 19 nt, Homo sapiens
  misc_RNA (1)...(19): siRNA sense strand
uggaguugcugguccuaga

SEQ ID NO: 688886 - RNA, 19 nt, Homo sapiens
  misc_RNA (1)...(19): siRNA sense strand
ggcuguagcuguggaccaa

SEQ ID NO: 688887 - RNA, 19 nt, Homo sapiens
  misc_RNA (1)...(19): siRNA sense strand
gcuaaggccagagaagugu

SEQ ID NO: 688888 - RNA, 19 nt, Homo sapiens
  misc_RNA (1)...(19): siRNA sense strand
caagaucuccaaauaguua

SEQ ID NO: 688889 - RNA, 19 nt, Homo sapiens
  misc_RNA (1)...(19): siRNA sense strand
aguacaagaucuccaaaua

SEQ ID NO: 688890 - RNA, 19 nt, Homo sapiens
  misc_RNA (1)...(19): siRNA sense strand
gcauuuccguuaccaagaa

SEQ ID NO: 688891 - RNA, 19 nt, Homo sapiens
  misc_RNA (1)...(19): siRNA sense strand
gcagaaagaaccuggaaga

SEQ ID NO: 688892 - RNA, 19 nt, Homo sapiens
  misc_RNA (1)...(19): siRNA sense strand
caacaaauccagacuccuu

SEQ ID NO: 688893 - RNA, 19 nt, Homo sapiens
  misc_RNA (1)...(19): siRNA sense strand
uacaagaucuccaaauagu

SEQ ID NO: 688894 - RNA, 19 nt, Homo sapiens
  misc_RNA (1)...(19): siRNA sense strand
uggaagacuugcagaaaga

SEQ ID NO: 688895 - RNA, 19 nt, Homo sapiens
  misc_RNA (1)...(19): siRNA sense strand
guacaagaucuccaaauag

SEQ ID NO: 688896 - RNA, 19 nt, Homo sapiens
  misc_RNA (1)...(19): siRNA sense strand
aauccagacuccuucagua

SEQ ID NO: 688897 - RNA, 19 nt, Homo sapiens
  misc_RNA (1)...(19): siRNA sense strand
ccagacuccuucaguacaa

SEQ ID NO: 688898 - RNA, 19 nt, Homo sapiens
  misc_RNA (1)...(19): siRNA sense strand
guggaagacuugcagaaag

SEQ ID NO: 688899 - RNA, 19 nt, Homo sapiens
  misc_RNA (1)...(19): siRNA sense strand
aagagcagauccuggaguu

SEQ ID NO: 688900 - RNA, 19 nt, Homo sapiens
  misc_RNA (1)...(19): siRNA sense strand
gguggaagacuugcagaaa

SEQ ID NO: 688901 - RNA, 19 nt, Homo sapiens
  misc_RNA (1)...(19): siRNA sense strand
ggccagagaaguguacaaa

SEQ ID NO: 688902 - RNA, 19 nt, Homo sapiens
  misc_RNA (1)...(19): siRNA sense strand
ccagagaaguguacaaaag

SEQ ID NO: 688903 - RNA, 19 nt, Homo sapiens
  misc_RNA (1)...(19): siRNA sense strand
agaaagaaccuggaagaca

SEQ ID NO: 688904 - RNA, 19 nt, Homo sapiens
  misc_RNA (1)...(19): siRNA sense strand
ccacugggagcaggaaauu

SEQ ID NO: 688905 - RNA, 19 nt, Homo sapiens
  misc_RNA (1)...(19): siRNA sense strand
ggaguugcugguccuagaa

SEQ ID NO: 688906 - RNA, 19 nt, Homo sapiens
  misc_RNA (1)...(19): siRNA sense strand
ggaagacuugcagaaagaa

SEQ ID NO: 688907 - RNA, 19 nt, Homo sapiens
  misc_RNA (1)...(19): siRNA sense strand
caguggcccugguggaaga

SEQ ID NO: 688908 - RNA, 19 nt, Homo sapiens
  misc_RNA (1)...(19): siRNA sense strand
uggaguugcugguccuaga

SEQ ID NO: 688909 - RNA, 19 nt, Homo sapiens
  misc_RNA (1)...(19): siRNA sense strand
ggcuguagcuguggaccaa

SEQ ID NO: 688910 - RNA, 19 nt, Homo sapiens
  misc_RNA (1)...(19): siRNA sense strand
gcuaaggccagagaagugu

SEQ ID NO: 688911 - RNA, 19 nt, Homo sapiens
  misc_RNA (1)...(19): siRNA sense strand
caagaucuccaaauaguua

SEQ ID NO: 688912 - RNA, 19 nt, Homo sapiens
  misc_RNA (1)...(19): siRNA sense strand
aguacaagaucuccaaaua

SEQ ID NO: 688913 - RNA, 19 nt, Homo sapiens
  misc_RNA (1)...(19): siRNA sense strand
gcauuuccguuaccaagaa

SEQ ID NO: 688914 - RNA, 19 nt, Homo sapiens
  misc_RNA (1)...(19): siRNA sense strand
gcagaaagaaccuggaaga

SEQ ID NO: 688915 - RNA, 19 nt, Homo sapiens
  misc_RNA (1)...(19): siRNA sense strand
caacaaauccagacuccuu

SEQ ID NO: 688916 - RNA, 19 nt, Homo sapiens
  misc_RNA (1)...(19): siRNA sense strand
uacaagaucuccaaauagu

SEQ ID NO: 688917 - RNA, 19 nt, Homo sapiens
  misc_RNA (1)...(19): siRNA sense strand
uggaagacuugcagaaaga

SEQ ID NO: 688918 - RNA, 19 nt, Homo sapiens
  misc_RNA (1)...(19): siRNA sense strand
guacaagaucuccaaauag

SEQ ID NO: 688919 - RNA, 19 nt, Homo sapiens
  misc_RNA (1)...(19): siRNA sense strand
aauccagacuccuucagua

SEQ ID NO: 688920 - RNA, 19 nt, Homo sapiens
  misc_RNA (1)...(19): siRNA sense strand
ccagacuccuucaguacaa

SEQ ID NO: 688921 - RNA, 19 nt, Homo sapiens
  misc_RNA (1)...(19): siRNA sense strand
guggaagacuugcagaaag

SEQ ID NO: 688922 - RNA, 19 nt, Homo sapiens
  misc_RNA (1)...(19): siRNA sense strand
aagagcagauccuggaguu

SEQ ID NO: 688923 - RNA, 19 nt, Homo sapiens
  misc_RNA (1)...(19): siRNA sense strand
gguggaagacuugcagaaa

SEQ ID NO: 688924 - RNA, 19 nt, Homo sapiens
  misc_RNA (1)...(19): siRNA sense strand
ggccagagaaguguacaaa

SEQ ID NO: 688925 - RNA, 19 nt, Homo sapiens
  misc_RNA (1)...(19): siRNA sense strand
ccagagaaguguacaaaag

SEQ ID NO: 688926 - RNA, 19 nt, Homo sapiens
  misc_RNA (1)...(19): siRNA sense strand
agaaagaaccuggaagaca

SEQ ID NO: 688927 - RNA, 19 nt, Homo sapiens
  misc_RNA (1)...(19): siRNA sense strand
ccacugggagcaggaaauu

SEQ ID NO: 688928 - RNA, 19 nt, Homo sapiens
  misc_RNA (1)...(19): siRNA sense strand
ggaguugcugguccuagaa

SEQ ID NO: 688929 - RNA, 19 nt, Homo sapiens
  misc_RNA (1)...(19): siRNA sense strand
ggaagacuugcagaaagaa

SEQ ID NO: 688930 - RNA, 19 nt, Homo sapiens
  misc_RNA (1)...(19): siRNA sense strand
caguggcccugguggaaga

SEQ ID NO: 688931 - RNA, 19 nt, Homo sapiens
  misc_RNA (1)...(19): siRNA sense strand
uggaguugcugguccuaga

SEQ ID NO: 688932 - RNA, 19 nt, Homo sapiens
  misc_RNA (1)...(19): siRNA sense strand
ggcuguagcuguggaccaa

SEQ ID NO: 688933 - RNA, 19 nt, Homo sapiens
  misc_RNA (1)...(19): siRNA sense strand
gcuaaggccagagaagugu

SEQ ID NO: 688934 - RNA, 19 nt, Homo sapiens
  misc_RNA (1)...(19): siRNA sense strand
caagaucuccaaauaguua

SEQ ID NO: 688935 - RNA, 19 nt, Homo sapiens
  misc_RNA (1)...(19): siRNA sense strand
aguacaagaucuccaaaua

SEQ ID NO: 688936 - RNA, 19 nt, Homo sapiens
  misc_RNA (1)...(19): siRNA sense strand
gcauuuccguuaccaagaa

SEQ ID NO: 688937 - RNA, 19 nt, Homo sapiens
  misc_RNA (1)...(19): siRNA sense strand
gcagaaagaaccuggaaga

SEQ ID NO: 688938 - RNA, 19 nt, Homo sapiens
  misc_RNA (1)...(19): siRNA sense strand
caacaaauccagacuccuu

SEQ ID NO: 688939 - RNA, 19 nt, Homo sapiens
  misc_RNA (1)...(19): siRNA sense strand
uacaagaucuccaaauagu

SEQ ID NO: 688940 - RNA, 19 nt, Homo sapiens
  misc_RNA (1)...(19): siRNA sense strand
uggaagacuugcagaaaga

SEQ ID NO: 688941 - RNA, 19 nt, Homo sapiens
  misc_RNA (1)...(19): siRNA sense strand
guacaagaucuccaaauag

SEQ ID NO: 688942 - RNA, 19 nt, Homo sapiens
  misc_RNA (1)...(19): siRNA sense strand
aauccagacuccuucagua

SEQ ID NO: 688943 - RNA, 19 nt, Homo sapiens
  misc_RNA (1)...(19): siRNA sense strand
ccagacuccuucaguacaa

SEQ ID NO: 688944 - RNA, 19 nt, Homo sapiens
  misc_RNA (1)...(19): siRNA sense strand
guggaagacuugcagaaag

SEQ ID NO: 688945 - RNA, 19 nt, Homo sapiens
  misc_RNA (1)...(19): siRNA sense strand
aagagcagauccuggaguu

SEQ ID NO: 688946 - RNA, 19 nt, Homo sapiens
  misc_RNA (1)...(19): siRNA sense strand
gguggaagacuugcagaaa

SEQ ID NO: 688947 - RNA, 19 nt, Homo sapiens
  misc_RNA (1)...(19): siRNA sense strand
ggccagagaaguguacaaa

SEQ ID NO: 688948 - RNA, 19 nt, Homo sapiens
  misc_RNA (1)...(19): siRNA sense strand
ccagagaaguguacaaaag

SEQ ID NO: 688949 - RNA, 19 nt, Homo sapiens
  misc_RNA (1)...(19): siRNA sense strand
agaaagaaccuggaagaca

SEQ ID NO: 688950 - RNA, 19 nt, Homo sapiens
  misc_RNA (1)...(19): siRNA sense strand
ccacugggagcaggaaauu

SEQ ID NO: 688951 - RNA, 19 nt, Homo sapiens
  misc_RNA (1)...(19): siRNA sense strand
ggaguugcugguccuagaa

SEQ ID NO: 688952 - RNA, 19 nt, Homo sapiens
  misc_RNA (1)...(19): siRNA sense strand
ggaagacuugcagaaagaa

SEQ ID NO: 688953 - RNA, 19 nt, Homo sapiens
  misc_RNA (1)...(19): siRNA sense strand
caguggcccugguggaaga

SEQ ID NO: 688954 - RNA, 19 nt, Homo sapiens
  misc_RNA (1)...(19): siRNA sense strand
uggaguugcugguccuaga

SEQ ID NO: 688955 - RNA, 19 nt, Homo sapiens
  misc_RNA (1)...(19): siRNA sense strand
ggcuguagcuguggaccaa

SEQ ID NO: 688956 - RNA, 19 nt, Homo sapiens
  misc_RNA (1)...(19): siRNA sense strand
gcuaaggccagagaagugu

SEQ ID NO: 688957 - RNA, 19 nt, Homo sapiens
  misc_RNA (1)...(19): siRNA sense strand
caagaucuccaaauaguua

SEQ ID NO: 688958 - RNA, 19 nt, Homo sapiens
  misc_RNA (1)...(19): siRNA sense strand
aguacaagaucuccaaaua

SEQ ID NO: 688959 - RNA, 19 nt, Homo sapiens
  misc_RNA (1)...(19): siRNA sense strand
gcauuuccguuaccaagaa

SEQ ID NO: 688960 - RNA, 19 nt, Homo sapiens
  misc_RNA (1)...(19): siRNA sense strand
gcagaaagaaccuggaaga

SEQ ID NO: 688961 - RNA, 19 nt, Homo sapiens
  misc_RNA (1)...(19): siRNA sense strand
caacaaauccagacuccuu

SEQ ID NO: 688962 - RNA, 19 nt, Homo sapiens
  misc_RNA (1)...(19): siRNA sense strand
uacaagaucuccaaauagu

SEQ ID NO: 688963 - RNA, 19 nt, Homo sapiens
  misc_RNA (1)...(19): siRNA sense strand
uggaagacuugcagaaaga

SEQ ID NO: 688964 - RNA, 19 nt, Homo sapiens
  misc_RNA (1)...(19): siRNA sense strand
guacaagaucuccaaauag

SEQ ID NO: 688965 - RNA, 19 nt, Homo sapiens
  misc_RNA (1)...(19): siRNA sense strand
aauccagacuccuucagua

SEQ ID NO: 688966 - RNA, 19 nt, Homo sapiens
  misc_RNA (1)...(19): siRNA sense strand
ccagacuccuucaguacaa

SEQ ID NO: 688967 - RNA, 19 nt, Homo sapiens
  misc_RNA (1)...(19): siRNA sense strand
guggaagacuugcagaaag

SEQ ID NO: 688968 - RNA, 19 nt, Homo sapiens
  misc_RNA (1)...(19): siRNA sense strand
aagagcagauccuggaguu

SEQ ID NO: 688969 - RNA, 19 nt, Homo sapiens
  misc_RNA (1)...(19): siRNA sense strand
gguggaagacuugcagaaa

SEQ ID NO: 688970 - RNA, 19 nt, Homo sapiens
  misc_RNA (1)...(19): siRNA sense strand
ggccagagaaguguacaaa

SEQ ID NO: 688971 - RNA, 19 nt, Homo sapiens
  misc_RNA (1)...(19): siRNA sense strand
ccagagaaguguacaaaag

SEQ ID NO: 688972 - RNA, 19 nt, Homo sapiens
  misc_RNA (1)...(19): siRNA sense strand
agaaagaaccuggaagaca

SEQ ID NO: 688973 - RNA, 19 nt, Homo sapiens
  misc_RNA (1)...(19): siRNA sense strand
ccacugggagcaggaaauu

SEQ ID NO: 688974 - RNA, 19 nt, Homo sapiens
  misc_RNA (1)...(19): siRNA sense strand
ggaguugcugguccuagaa

SEQ ID NO: 688975 - RNA, 19 nt, Homo sapiens
  misc_RNA (1)...(19): siRNA sense strand
ggaagacuugcagaaagaa

SEQ ID NO: 688976 - RNA, 19 nt, Homo sapiens
  misc_RNA (1)...(19): siRNA sense strand
caguggcccugguggaaga

SEQ ID NO: 688977 - RNA, 19 nt, Homo sapiens
  misc_RNA (1)...(19): siRNA sense strand
uggaguugcugguccuaga

SEQ ID NO: 688978 - RNA, 19 nt, Homo sapiens
  misc_RNA (1)...(19): siRNA sense strand
ggcuguagcuguggaccaa

SEQ ID NO: 688979 - RNA, 19 nt, Homo sapiens
  misc_RNA (1)...(19): siRNA sense strand
gcuaaggccagagaagugu

SEQ ID NO: 688980 - RNA, 19 nt, Homo sapiens
  misc_RNA (1)...(19): siRNA sense strand
caagaucuccaaauaguua

SEQ ID NO: 688981 - RNA, 19 nt, Homo sapiens
  misc_RNA (1)...(19): siRNA sense strand
aguacaagaucuccaaaua

SEQ ID NO: 688982 - RNA, 19 nt, Homo sapiens
  misc_RNA (1)...(19): siRNA sense strand
gcauuuccguuaccaagaa

SEQ ID NO: 688983 - RNA, 19 nt, Homo sapiens
  misc_RNA (1)...(19): siRNA sense strand
gcagaaagaaccuggaaga

SEQ ID NO: 688984 - RNA, 19 nt, Homo sapiens
  misc_RNA (1)...(19): siRNA sense strand
caacaaauccagacuccuu

SEQ ID NO: 688985 - RNA, 19 nt, Homo sapiens
  misc_RNA (1)...(19): siRNA sense strand
uacaagaucuccaaauagu

SEQ ID NO: 688986 - RNA, 19 nt, Homo sapiens
  misc_RNA (1)...(19): siRNA sense strand
uggaagacuugcagaaaga

SEQ ID NO: 688987 - RNA, 19 nt, Homo sapiens
  misc_RNA (1)...(19): siRNA sense strand
guacaagaucuccaaauag

SEQ ID NO: 688988 - RNA, 19 nt, Homo sapiens
  misc_RNA (1)...(19): siRNA sense strand
aauccagacuccuucagua

SEQ ID NO: 688989 - RNA, 19 nt, Homo sapiens
  misc_RNA (1)...(19): siRNA sense strand
gggaauuccugcagagaag

SEQ ID NO: 688990 - RNA, 19 nt, Homo sapiens
  misc_RNA (1)...(19): siRNA sense strand
ccagacuccuucaguacaa

SEQ ID NO: 688991 - RNA, 19 nt, Homo sapiens
  misc_RNA (1)...(19): siRNA sense strand
guggaagacuugcagaaag

SEQ ID NO: 688992 - RNA, 19 nt, Homo sapiens
  misc_RNA (1)...(19): siRNA sense strand
ugauguggcucugggaauu

SEQ ID NO: 688993 - RNA, 19 nt, Homo sapiens
  misc_RNA (1)...(19): siRNA sense strand
aagagcagauccuggaguu

SEQ ID NO: 688994 - RNA, 19 nt, Homo sapiens
  misc_RNA (1)...(19): siRNA sense strand
gguggaagacuugcagaaa

SEQ ID NO: 688995 - RNA, 19 nt, Homo sapiens
  misc_RNA (1)...(19): siRNA sense strand
ggccagagaaguguacaaa

SEQ ID NO: 688996 - RNA, 19 nt, Homo sapiens
  misc_RNA (1)...(19): siRNA sense strand
ccagagaaguguacaaaag

SEQ ID NO: 688997 - RNA, 19 nt, Homo sapiens
  misc_RNA (1)...(19): siRNA sense strand
agaaagaaccuggaagaca

SEQ ID NO: 688998 - RNA, 19 nt, Homo sapiens
  misc_RNA (1)...(19): siRNA sense strand
ccacugggagcaggaaauu

SEQ ID NO: 688999 - RNA, 19 nt, Homo sapiens
  misc_RNA (1)...(19): siRNA sense strand
ggaguugcugguccuagaa

SEQ ID NO: 689000 - RNA, 19 nt, Homo sapiens
  misc_RNA (1)...(19): siRNA sense strand
ggaagacuugcagaaagaa

SEQ ID NO: 689001 - RNA, 19 nt, Homo sapiens
  misc_RNA (1)...(19): siRNA sense strand
caguggcccugguggaaga

SEQ ID NO: 689002 - RNA, 19 nt, Homo sapiens
  misc_RNA (1)...(19): siRNA sense strand
uggaguugcugguccuaga

SEQ ID NO: 689003 - RNA, 19 nt, Homo sapiens
  misc_RNA (1)...(19): siRNA sense strand
ggcuguagcuguggaccaa

SEQ ID NO: 689004 - RNA, 19 nt, Homo sapiens
  misc_RNA (1)...(19): siRNA sense strand
gcuaaggccagagaagugu

SEQ ID NO: 689005 - RNA, 19 nt, Homo sapiens
  misc_RNA (1)...(19): siRNA sense strand
ggaauuccugcagagaaga

SEQ ID NO: 689006 - RNA, 19 nt, Homo sapiens
  misc_RNA (1)...(19): siRNA sense strand
caagaucuccaaauaguua

SEQ ID NO: 689007 - RNA, 19 nt, Homo sapiens
  misc_RNA (1)...(19): siRNA sense strand
aguacaagaucuccaaaua

SEQ ID NO: 689008 - RNA, 19 nt, Homo sapiens
  misc_RNA (1)...(19): siRNA sense strand
gcauuuccguuaccaagaa

SEQ ID NO: 689009 - RNA, 19 nt, Homo sapiens
  misc_RNA (1)...(19): siRNA sense strand
gcagaaagaaccuggaaga

SEQ ID NO: 689010 - RNA, 19 nt, Homo sapiens
  misc_RNA (1)...(19): siRNA sense strand
caacaaauccagacuccuu

SEQ ID NO: 689011 - RNA, 19 nt, Homo sapiens
  misc_RNA (1)...(19): siRNA sense strand
uacaagaucuccaaauagu

SEQ ID NO: 689012 - RNA, 19 nt, Homo sapiens
  misc_RNA (1)...(19): siRNA sense strand
uggaagacuugcagaaaga

SEQ ID NO: 689013 - RNA, 19 nt, Homo sapiens
  misc_RNA (1)...(19): siRNA sense strand
guacaagaucuccaaauag

SEQ ID NO: 689014 - RNA, 19 nt, Homo sapiens
  misc_RNA (1)...(19): siRNA sense strand
aauccagacuccuucagua

SEQ ID NO: 689015 - RNA, 19 nt, Homo sapiens
  misc_RNA (1)...(19): siRNA sense strand
ccagacuccuucaguacaa

SEQ ID NO: 689016 - RNA, 19 nt, Homo sapiens
  misc_RNA (1)...(19): siRNA sense strand
guggaagacuugcagaaag

SEQ ID NO: 689017 - RNA, 19 nt, Homo sapiens
  misc_RNA (1)...(19): siRNA sense strand
aagagcagauccuggaguu

SEQ ID NO: 689018 - RNA, 19 nt, Homo sapiens
  misc_RNA (1)...(19): siRNA sense strand
gguggaagacuugcagaaa

SEQ ID NO: 689019 - RNA, 19 nt, Homo sapiens
  misc_RNA (1)...(19): siRNA sense strand
ggccagagaaguguacaaa

SEQ ID NO: 689020 - RNA, 19 nt, Homo sapiens
  misc_RNA (1)...(19): siRNA sense strand
ccagagaaguguacaaaag

SEQ ID NO: 689021 - RNA, 19 nt, Homo sapiens
  misc_RNA (1)...(19): siRNA sense strand
agaaagaaccuggaagaca

SEQ ID NO: 689022 - RNA, 19 nt, Homo sapiens
  misc_RNA (1)...(19): siRNA sense strand
ccacugggagcaggaaauu

SEQ ID NO: 689023 - RNA, 19 nt, Homo sapiens
  misc_RNA (1)...(19): siRNA sense strand
ggaguugcugguccuagaa

SEQ ID NO: 689024 - RNA, 19 nt, Homo sapiens
  misc_RNA (1)...(19): siRNA sense strand
ggaagacuugcagaaagaa

SEQ ID NO: 689025 - RNA, 19 nt, Homo sapiens
  misc_RNA (1)...(19): siRNA sense strand
caguggcccugguggaaga

SEQ ID NO: 689026 - RNA, 19 nt, Homo sapiens
  misc_RNA (1)...(19): siRNA sense strand
uggaguugcugguccuaga

SEQ ID NO: 689027 - RNA, 19 nt, Homo sapiens
  misc_RNA (1)...(19): siRNA sense strand
ggcuguagcuguggaccaa

SEQ ID NO: 689028 - RNA, 19 nt, Homo sapiens
  misc_RNA (1)...(19): siRNA sense strand
gcuaaggccagagaagugu

SEQ ID NO: 689029 - RNA, 19 nt, Homo sapiens
  misc_RNA (1)...(19): siRNA sense strand
caagaucuccaaauaguua

SEQ ID NO: 689030 - RNA, 19 nt, Homo sapiens
  misc_RNA (1)...(19): siRNA sense strand
aguacaagaucuccaaaua

SEQ ID NO: 689031 - RNA, 19 nt, Homo sapiens
  misc_RNA (1)...(19): siRNA sense strand
gcauuuccguuaccaagaa

SEQ ID NO: 689032 - RNA, 19 nt, Homo sapiens
  misc_RNA (1)...(19): siRNA sense strand
gcagaaagaaccuggaaga

SEQ ID NO: 689033 - RNA, 19 nt, Homo sapiens
  misc_RNA (1)...(19): siRNA sense strand
caacaaauccagacuccuu

SEQ ID NO: 689034 - RNA, 19 nt, Homo sapiens
  misc_RNA (1)...(19): siRNA sense strand
uacaagaucuccaaauagu

SEQ ID NO: 689035 - RNA, 19 nt, Homo sapiens
  misc_RNA (1)...(19): siRNA sense strand
uggaagacuugcagaaaga

SEQ ID NO: 689036 - RNA, 19 nt, Homo sapiens
  misc_RNA (1)...(19): siRNA sense strand
guacaagaucuccaaauag

SEQ ID NO: 689037 - RNA, 19 nt, Homo sapiens
  misc_RNA (1)...(19): siRNA sense strand
aauccagacuccuucagua

SEQ ID NO: 689038 - RNA, 19 nt, Homo sapiens
  misc_RNA (1)...(19): siRNA sense strand
ccagacuccuucaguacaa

SEQ ID NO: 689039 - RNA, 19 nt, Homo sapiens
  misc_RNA (1)...(19): siRNA sense strand
guggaagacuugcagaaag

SEQ ID NO: 689040 - RNA, 19 nt, Homo sapiens
  misc_RNA (1)...(19): siRNA sense strand
aagagcagauccuggaguu

SEQ ID NO: 689041 - RNA, 19 nt, Homo sapiens
  misc_RNA (1)...(19): siRNA sense strand
gguggaagacuugcagaaa

SEQ ID NO: 689042 - RNA, 19 nt, Homo sapiens
  misc_RNA (1)...(19): siRNA sense strand
ggccagagaaguguacaaa

SEQ ID NO: 689043 - RNA, 19 nt, Homo sapiens
  misc_RNA (1)...(19): siRNA sense strand
ccagagaaguguacaaaag

SEQ ID NO: 689044 - RNA, 19 nt, Homo sapiens
  misc_RNA (1)...(19): siRNA sense strand
agaaagaaccuggaagaca

SEQ ID NO: 689045 - RNA, 19 nt, Homo sapiens
  misc_RNA (1)...(19): siRNA sense strand
ccacugggagcaggaaauu

SEQ ID NO: 689046 - RNA, 19 nt, Homo sapiens
  misc_RNA (1)...(19): siRNA sense strand
ggaguugcugguccuagaa

SEQ ID NO: 689047 - RNA, 19 nt, Homo sapiens
  misc_RNA (1)...(19): siRNA sense strand
ggaagacuugcagaaagaa

SEQ ID NO: 689048 - RNA, 19 nt, Homo sapiens
  misc_RNA (1)...(19): siRNA sense strand
caguggcccugguggaaga

SEQ ID NO: 689049 - RNA, 19 nt, Homo sapiens
  misc_RNA (1)...(19): siRNA sense strand
uggaguugcugguccuaga

SEQ ID NO: 689050 - RNA, 19 nt, Homo sapiens
  misc_RNA (1)...(19): siRNA sense strand
ggcuguagcuguggaccaa

SEQ ID NO: 689051 - RNA, 19 nt, Homo sapiens
  misc_RNA (1)...(19): siRNA sense strand
gcuaaggccagagaagugu

SEQ ID NO: 689052 - RNA, 19 nt, Homo sapiens
  misc_RNA (1)...(19): siRNA sense strand
caagaucuccaaauaguua

SEQ ID NO: 689053 - RNA, 19 nt, Homo sapiens
  misc_RNA (1)...(19): siRNA sense strand
aguacaagaucuccaaaua

SEQ ID NO: 689054 - RNA, 19 nt, Homo sapiens
  misc_RNA (1)...(19): siRNA sense strand
gcauuuccguuaccaagaa

SEQ ID NO: 689055 - RNA, 19 nt, Homo sapiens
  misc_RNA (1)...(19): siRNA sense strand
gcagaaagaaccuggaaga

SEQ ID NO: 689056 - RNA, 19 nt, Homo sapiens
  misc_RNA (1)...(19): siRNA sense strand
caacaaauccagacuccuu

SEQ ID NO: 689057 - RNA, 19 nt, Homo sapiens
  misc_RNA (1)...(19): siRNA sense strand
uacaagaucuccaaauagu

SEQ ID NO: 689058 - RNA, 19 nt, Homo sapiens
  misc_RNA (1)...(19): siRNA sense strand
uggaagacuugcagaaaga

SEQ ID NO: 689059 - RNA, 19 nt, Homo sapiens
  misc_RNA (1)...(19): siRNA sense strand
guacaagaucuccaaauag

SEQ ID NO: 689060 - RNA, 19 nt, Homo sapiens
  misc_RNA (1)...(19): siRNA sense strand
aauccagacuccuucagua

SEQ ID NO: 689061 - RNA, 19 nt, Homo sapiens
  misc_RNA (1)...(19): siRNA sense strand
ccagacuccuucaguacaa

SEQ ID NO: 689062 - RNA, 19 nt, Homo sapiens
  misc_RNA (1)...(19): siRNA sense strand
guggaagacuugcagaaag

SEQ ID NO: 689063 - RNA, 19 nt, Homo sapiens
  misc_RNA (1)...(19): siRNA sense strand
aagagcagauccuggaguu

SEQ ID NO: 689064 - RNA, 19 nt, Homo sapiens
  misc_RNA (1)...(19): siRNA sense strand
gguggaagacuugcagaaa

SEQ ID NO: 689065 - RNA, 19 nt, Homo sapiens
  misc_RNA (1)...(19): siRNA sense strand
ggccagagaaguguacaaa

SEQ ID NO: 689066 - RNA, 19 nt, Homo sapiens
  misc_RNA (1)...(19): siRNA sense strand
ccagagaaguguacaaaag

SEQ ID NO: 689067 - RNA, 19 nt, Homo sapiens
  misc_RNA (1)...(19): siRNA sense strand
agaaagaaccuggaagaca

SEQ ID NO: 689068 - RNA, 19 nt, Homo sapiens
  misc_RNA (1)...(19): siRNA sense strand
ccacugggagcaggaaauu

SEQ ID NO: 689069 - RNA, 19 nt, Homo sapiens
  misc_RNA (1)...(19): siRNA sense strand
ggaguugcugguccuagaa

SEQ ID NO: 689070 - RNA, 19 nt, Homo sapiens
  misc_RNA (1)...(19): siRNA sense strand
ggaagacuugcagaaagaa

SEQ ID NO: 689071 - RNA, 19 nt, Homo sapiens
  misc_RNA (1)...(19): siRNA sense strand
caguggcccugguggaaga

SEQ ID NO: 689072 - RNA, 19 nt, Homo sapiens
  misc_RNA (1)...(19): siRNA sense strand
uggaguugcugguccuaga

SEQ ID NO: 689073 - RNA, 19 nt, Homo sapiens
  misc_RNA (1)...(19): siRNA sense strand
ggcuguagcuguggaccaa

SEQ ID NO: 689074 - RNA, 19 nt, Homo sapiens
  misc_RNA (1)...(19): siRNA sense strand
gcuaaggccagagaagugu

SEQ ID NO: 689075 - RNA, 19 nt, Homo sapiens
  misc_RNA (1)...(19): siRNA sense strand
caagaucuccaaauaguua

SEQ ID NO: 689076 - RNA, 19 nt, Homo sapiens
  misc_RNA (1)...(19): siRNA sense strand
aguacaagaucuccaaaua

SEQ ID NO: 689077 - RNA, 19 nt, Homo sapiens
  misc_RNA (1)...(19): siRNA sense strand
gcauuuccguuaccaagaa

SEQ ID NO: 689078 - RNA, 19 nt, Homo sapiens
  misc_RNA (1)...(19): siRNA sense strand
gcagaaagaaccuggaaga

SEQ ID NO: 689079 - RNA, 19 nt, Homo sapiens
  misc_RNA (1)...(19): siRNA sense strand
caacaaauccagacuccuu

SEQ ID NO: 689080 - RNA, 19 nt, Homo sapiens
  misc_RNA (1)...(19): siRNA sense strand
uacaagaucuccaaauagu

SEQ ID NO: 689081 - RNA, 19 nt, Homo sapiens
  misc_RNA (1)...(19): siRNA sense strand
uggaagacuugcagaaaga

SEQ ID NO: 689082 - RNA, 19 nt, Homo sapiens
  misc_RNA (1)...(19): siRNA sense strand
guacaagaucuccaaauag

SEQ ID NO: 689083 - RNA, 19 nt, Homo sapiens
  misc_RNA (1)...(19): siRNA sense strand
aauccagacuccuucagua

SEQ ID NO: 689084 - RNA, 19 nt, Homo sapiens
  misc_RNA (1)...(19): siRNA sense strand
ccagacuccuucaguacaa

SEQ ID NO: 689085 - RNA, 19 nt, Homo sapiens
  misc_RNA (1)...(19): siRNA sense strand
guggaagacuugcagaaag

SEQ ID NO: 689086 - RNA, 19 nt, Homo sapiens
  misc_RNA (1)...(19): siRNA sense strand
aagagcagauccuggaguu

SEQ ID NO: 689087 - RNA, 19 nt, Homo sapiens
  misc_RNA (1)...(19): siRNA sense strand
gguggaagacuugcagaaa

SEQ ID NO: 689088 - RNA, 19 nt, Homo sapiens
  misc_RNA (1)...(19): siRNA sense strand
ggccagagaaguguacaaa

SEQ ID NO: 689089 - RNA, 19 nt, Homo sapiens
  misc_RNA (1)...(19): siRNA sense strand
ccagagaaguguacaaaag

SEQ ID NO: 689090 - RNA, 19 nt, Homo sapiens
  misc_RNA (1)...(19): siRNA sense strand
agaaagaaccuggaagaca

SEQ ID NO: 689091 - RNA, 19 nt, Homo sapiens
  misc_RNA (1)...(19): siRNA sense strand
ccacugggagcaggaaauu

SEQ ID NO: 689092 - RNA, 19 nt, Homo sapiens
  misc_RNA (1)...(19): siRNA sense strand
ggaguugcugguccuagaa

SEQ ID NO: 689093 - RNA, 19 nt, Homo sapiens
  misc_RNA (1)...(19): siRNA sense strand
ggaagacuugcagaaagaa

SEQ ID NO: 689094 - RNA, 19 nt, Homo sapiens
  misc_RNA (1)...(19): siRNA sense strand
caguggcccugguggaaga

SEQ ID NO: 689095 - RNA, 19 nt, Homo sapiens
  misc_RNA (1)...(19): siRNA sense strand
uggaguugcugguccuaga

SEQ ID NO: 689096 - RNA, 19 nt, Homo sapiens
  misc_RNA (1)...(19): siRNA sense strand
ggcuguagcuguggaccaa

SEQ ID NO: 689097 - RNA, 19 nt, Homo sapiens
  misc_RNA (1)...(19): siRNA sense strand
gcuaaggccagagaagugu

SEQ ID NO: 689098 - RNA, 19 nt, Homo sapiens
  misc_RNA (1)...(19): siRNA sense strand
caagaucuccaaauaguua

SEQ ID NO: 689099 - RNA, 19 nt, Homo sapiens
  misc_RNA (1)...(19): siRNA sense strand
aguacaagaucuccaaaua

SEQ ID NO: 689100 - RNA, 19 nt, Homo sapiens
  misc_RNA (1)...(19): siRNA sense strand
gcauuuccguuaccaagaa

SEQ ID NO: 689101 - RNA, 19 nt, Homo sapiens
  misc_RNA (1)...(19): siRNA sense strand
gcagaaagaaccuggaaga

SEQ ID NO: 689102 - RNA, 19 nt, Homo sapiens
  misc_RNA (1)...(19): siRNA sense strand
caacaaauccagacuccuu

SEQ ID NO: 689103 - RNA, 19 nt, Homo sapiens
  misc_RNA (1)...(19): siRNA sense strand
uacaagaucuccaaauagu

SEQ ID NO: 689104 - RNA, 19 nt, Homo sapiens
  misc_RNA (1)...(19): siRNA sense strand
uggaagacuugcagaaaga

SEQ ID NO: 689105 - RNA, 19 nt, Homo sapiens
  misc_RNA (1)...(19): siRNA sense strand
guacaagaucuccaaauag

SEQ ID NO: 689106 - RNA, 19 nt, Homo sapiens
  misc_RNA (1)...(19): siRNA sense strand
aauccagacuccuucagua

SEQ ID NO: 689107 - RNA, 19 nt, Homo sapiens
  misc_RNA (1)...(19): siRNA sense strand
ccagacuccuucaguacaa

SEQ ID NO: 689108 - RNA, 19 nt, Homo sapiens
  misc_RNA (1)...(19): siRNA sense strand
guggaagacuugcagaaag

SEQ ID NO: 689109 - RNA, 19 nt, Homo sapiens
  misc_RNA (1)...(19): siRNA sense strand
aagagcagauccuggaguu

SEQ ID NO: 689110 - RNA, 19 nt, Homo sapiens
  misc_RNA (1)...(19): siRNA sense strand
gguggaagacuugcagaaa

SEQ ID NO: 689111 - RNA, 19 nt, Homo sapiens
  misc_RNA (1)...(19): siRNA sense strand
ggccagagaaguguacaaa

SEQ ID NO: 689112 - RNA, 19 nt, Homo sapiens
  misc_RNA (1)...(19): siRNA sense strand
ccagagaaguguacaaaag

SEQ ID NO: 689113 - RNA, 19 nt, Homo sapiens
  misc_RNA (1)...(19): siRNA sense strand
agaaagaaccuggaagaca

SEQ ID NO: 689114 - RNA, 19 nt, Homo sapiens
  misc_RNA (1)...(19): siRNA sense strand
ccacugggagcaggaaauu

SEQ ID NO: 689115 - RNA, 19 nt, Homo sapiens
  misc_RNA (1)...(19): siRNA sense strand
ggaguugcugguccuagaa

SEQ ID NO: 689116 - RNA, 19 nt, Homo sapiens
  misc_RNA (1)...(19): siRNA sense strand
ggaagacuugcagaaagaa

SEQ ID NO: 689117 - RNA, 19 nt, Homo sapiens
  misc_RNA (1)...(19): siRNA sense strand
caguggcccugguggaaga

SEQ ID NO: 689118 - RNA, 19 nt, Homo sapiens
  misc_RNA (1)...(19): siRNA sense strand
uggaguugcugguccuaga

SEQ ID NO: 689119 - RNA, 19 nt, Homo sapiens
  misc_RNA (1)...(19): siRNA sense strand
ggcuguagcuguggaccaa

SEQ ID NO: 689120 - RNA, 19 nt, Homo sapiens
  misc_RNA (1)...(19): siRNA sense strand
gcuaaggccagagaagugu

SEQ ID NO: 689121 - RNA, 19 nt, Homo sapiens
  misc_RNA (1)...(19): siRNA sense strand
caagaucuccaaauaguua

SEQ ID NO: 689122 - RNA, 19 nt, Homo sapiens
  misc_RNA (1)...(19): siRNA sense strand
aguacaagaucuccaaaua

SEQ ID NO: 689123 - RNA, 19 nt, Homo sapiens
  misc_RNA (1)...(19): siRNA sense strand
gcauuuccguuaccaagaa

SEQ ID NO: 689124 - RNA, 19 nt, Homo sapiens
  misc_RNA (1)...(19): siRNA sense strand
gcagaaagaaccuggaaga

SEQ ID NO: 689125 - RNA, 19 nt, Homo sapiens
  misc_RNA (1)...(19): siRNA sense strand
caacaaauccagacuccuu

SEQ ID NO: 689126 - RNA, 19 nt, Homo sapiens
  misc_RNA (1)...(19): siRNA sense strand
uacaagaucuccaaauagu

SEQ ID NO: 689127 - RNA, 19 nt, Homo sapiens
  misc_RNA (1)...(19): siRNA sense strand
uggaagacuugcagaaaga

SEQ ID NO: 689128 - RNA, 19 nt, Homo sapiens
  misc_RNA (1)...(19): siRNA sense strand
guacaagaucuccaaauag

SEQ ID NO: 689129 - RNA, 19 nt, Homo sapiens
  misc_RNA (1)...(19): siRNA sense strand
aauccagacuccuucagua

SEQ ID NO: 689130 - RNA, 19 nt, Homo sapiens
  misc_RNA (1)...(19): siRNA sense strand
gggaauuccugcagagaag

SEQ ID NO: 689131 - RNA, 19 nt, Homo sapiens
  misc_RNA (1)...(19): siRNA sense strand
ccagacuccuucaguacaa

SEQ ID NO: 689132 - RNA, 19 nt, Homo sapiens
  misc_RNA (1)...(19): siRNA sense strand
guggaagacuugcagaaag

SEQ ID NO: 689133 - RNA, 19 nt, Homo sapiens
  misc_RNA (1)...(19): siRNA sense strand
ugauguggcucugggaauu

SEQ ID NO: 689134 - RNA, 19 nt, Homo sapiens
  misc_RNA (1)...(19): siRNA sense strand
aagagcagauccuggaguu

SEQ ID NO: 689135 - RNA, 19 nt, Homo sapiens
  misc_RNA (1)...(19): siRNA sense strand
gguggaagacuugcagaaa

SEQ ID NO: 689136 - RNA, 19 nt, Homo sapiens
  misc_RNA (1)...(19): siRNA sense strand
ggccagagaaguguacaaa

SEQ ID NO: 689137 - RNA, 19 nt, Homo sapiens
  misc_RNA (1)...(19): siRNA sense strand
ccagagaaguguacaaaag

SEQ ID NO: 689138 - RNA, 19 nt, Homo sapiens
  misc_RNA (1)...(19): siRNA sense strand
agaaagaaccuggaagaca

SEQ ID NO: 689139 - RNA, 19 nt, Homo sapiens
  misc_RNA (1)...(19): siRNA sense strand
ccacugggagcaggaaauu

SEQ ID NO: 689140 - RNA, 19 nt, Homo sapiens
  misc_RNA (1)...(19): siRNA sense strand
ggaguugcugguccuagaa

SEQ ID NO: 689141 - RNA, 19 nt, Homo sapiens
  misc_RNA (1)...(19): siRNA sense strand
ggaagacuugcagaaagaa

SEQ ID NO: 689142 - RNA, 19 nt, Homo sapiens
  misc_RNA (1)...(19): siRNA sense strand
caguggcccugguggaaga

SEQ ID NO: 689143 - RNA, 19 nt, Homo sapiens
  misc_RNA (1)...(19): siRNA sense strand
uggaguugcugguccuaga

SEQ ID NO: 689144 - RNA, 19 nt, Homo sapiens
  misc_RNA (1)...(19): siRNA sense strand
ggcuguagcuguggaccaa

SEQ ID NO: 689145 - RNA, 19 nt, Homo sapiens
  misc_RNA (1)...(19): siRNA sense strand
gcuaaggccagagaagugu

SEQ ID NO: 689146 - RNA, 19 nt, Homo sapiens
  misc_RNA (1)...(19): siRNA sense strand
ggaauuccugcagagaaga

SEQ ID NO: 689147 - RNA, 19 nt, Homo sapiens
  misc_RNA (1)...(19): siRNA sense strand
caagaucuccaaauaguua

SEQ ID NO: 689148 - RNA, 19 nt, Homo sapiens
  misc_RNA (1)...(19): siRNA sense strand
aguacaagaucuccaaaua

SEQ ID NO: 689149 - RNA, 19 nt, Homo sapiens
  misc_RNA (1)...(19): siRNA sense strand
gcauuuccguuaccaagaa

SEQ ID NO: 689150 - RNA, 19 nt, Homo sapiens
  misc_RNA (1)...(19): siRNA sense strand
gcagaaagaaccuggaaga

SEQ ID NO: 689151 - RNA, 19 nt, Homo sapiens
  misc_RNA (1)...(19): siRNA sense strand
caacaaauccagacuccuu

SEQ ID NO: 689152 - RNA, 19 nt, Homo sapiens
  misc_RNA (1)...(19): siRNA sense strand
uacaagaucuccaaauagu

SEQ ID NO: 689153 - RNA, 19 nt, Homo sapiens
  misc_RNA (1)...(19): siRNA sense strand
uggaagacuugcagaaaga

SEQ ID NO: 689154 - RNA, 19 nt, Homo sapiens
  misc_RNA (1)...(19): siRNA sense strand
guacaagaucuccaaauag

SEQ ID NO: 689155 - RNA, 19 nt, Homo sapiens
  misc_RNA (1)...(19): siRNA sense strand
aauccagacuccuucagua

SEQ ID NO: 689156 - RNA, 19 nt, Homo sapiens
  misc_RNA (1)...(19): siRNA sense strand
ccagacuccuucaguacaa

SEQ ID NO: 689157 - RNA, 19 nt, Homo sapiens
  misc_RNA (1)...(19): siRNA sense strand
guggaagacuugcagaaag

SEQ ID NO: 689158 - RNA, 19 nt, Homo sapiens
  misc_RNA (1)...(19): siRNA sense strand
aagagcagauccuggaguu

SEQ ID NO: 689159 - RNA, 19 nt, Homo sapiens
  misc_RNA (1)...(19): siRNA sense strand
gguggaagacuugcagaaa

SEQ ID NO: 689160 - RNA, 19 nt, Homo sapiens
  misc_RNA (1)...(19): siRNA sense strand
ggccagagaaguguacaaa

SEQ ID NO: 689161 - RNA, 19 nt, Homo sapiens
  misc_RNA (1)...(19): siRNA sense strand
ccagagaaguguacaaaag

SEQ ID NO: 689162 - RNA, 19 nt, Homo sapiens
  misc_RNA (1)...(19): siRNA sense strand
agaaagaaccuggaagaca

SEQ ID NO: 689163 - RNA, 19 nt, Homo sapiens
  misc_RNA (1)...(19): siRNA sense strand
ccacugggagcaggaaauu

SEQ ID NO: 689164 - RNA, 19 nt, Homo sapiens
  misc_RNA (1)...(19): siRNA sense strand
ggaguugcugguccuagaa

SEQ ID NO: 689165 - RNA, 19 nt, Homo sapiens
  misc_RNA (1)...(19): siRNA sense strand
ggaagacuugcagaaagaa

SEQ ID NO: 689166 - RNA, 19 nt, Homo sapiens
  misc_RNA (1)...(19): siRNA sense strand
caguggcccugguggaaga

SEQ ID NO: 689167 - RNA, 19 nt, Homo sapiens
  misc_RNA (1)...(19): siRNA sense strand
uggaguugcugguccuaga

SEQ ID NO: 689168 - RNA, 19 nt, Homo sapiens
  misc_RNA (1)...(19): siRNA sense strand
ggcuguagcuguggaccaa

SEQ ID NO: 689169 - RNA, 19 nt, Homo sapiens
  misc_RNA (1)...(19): siRNA sense strand
gcuaaggccagagaagugu

SEQ ID NO: 689170 - RNA, 19 nt, Homo sapiens
  misc_RNA (1)...(19): siRNA sense strand
caagaucuccaaauaguua

SEQ ID NO: 689171 - RNA, 19 nt, Homo sapiens
  misc_RNA (1)...(19): siRNA sense strand
aguacaagaucuccaaaua

SEQ ID NO: 689172 - RNA, 19 nt, Homo sapiens
  misc_RNA (1)...(19): siRNA sense strand
gcauuuccguuaccaagaa

SEQ ID NO: 689173 - RNA, 19 nt, Homo sapiens
  misc_RNA (1)...(19): siRNA sense strand
gcagaaagaaccuggaaga

SEQ ID NO: 689174 - RNA, 19 nt, Homo sapiens
  misc_RNA (1)...(19): siRNA sense strand
caacaaauccagacuccuu

SEQ ID NO: 689175 - RNA, 19 nt, Homo sapiens
  misc_RNA (1)...(19): siRNA sense strand
uacaagaucuccaaauagu

SEQ ID NO: 689176 - RNA, 19 nt, Homo sapiens
  misc_RNA (1)...(19): siRNA sense strand
uggaagacuugcagaaaga

SEQ ID NO: 689177 - RNA, 19 nt, Homo sapiens
  misc_RNA (1)...(19): siRNA sense strand
guacaagaucuccaaauag

SEQ ID NO: 689178 - RNA, 19 nt, Homo sapiens
  misc_RNA (1)...(19): siRNA sense strand
aauccagacuccuucagua

SEQ ID NO: 689179 - RNA, 19 nt, Homo sapiens
  misc_RNA (1)...(19): siRNA sense strand
ccagacuccuucaguacaa

SEQ ID NO: 689180 - RNA, 19 nt, Homo sapiens
  misc_RNA (1)...(19): siRNA sense strand
guggaagacuugcagaaag

SEQ ID NO: 689181 - RNA, 19 nt, Homo sapiens
  misc_RNA (1)...(19): siRNA sense strand
aagagcagauccuggaguu

SEQ ID NO: 689182 - RNA, 19 nt, Homo sapiens
  misc_RNA (1)...(19): siRNA sense strand
gguggaagacuugcagaaa

SEQ ID NO: 689183 - RNA, 19 nt, Homo sapiens
  misc_RNA (1)...(19): siRNA sense strand
ggccagagaaguguacaaa

SEQ ID NO: 689184 - RNA, 19 nt, Homo sapiens
  misc_RNA (1)...(19): siRNA sense strand
ccagagaaguguacaaaag

SEQ ID NO: 689185 - RNA, 19 nt, Homo sapiens
  misc_RNA (1)...(19): siRNA sense strand
agaaagaaccuggaagaca

SEQ ID NO: 689186 - RNA, 19 nt, Homo sapiens
  misc_RNA (1)...(19): siRNA sense strand
ccacugggagcaggaaauu

SEQ ID NO: 689187 - RNA, 19 nt, Homo sapiens
  misc_RNA (1)...(19): siRNA sense strand
ggaguugcugguccuagaa

SEQ ID NO: 689188 - RNA, 19 nt, Homo sapiens
  misc_RNA (1)...(19): siRNA sense strand
ggaagacuugcagaaagaa

SEQ ID NO: 689189 - RNA, 19 nt, Homo sapiens
  misc_RNA (1)...(19): siRNA sense strand
caguggcccugguggaaga

SEQ ID NO: 689190 - RNA, 19 nt, Homo sapiens
  misc_RNA (1)...(19): siRNA sense strand
uggaguugcugguccuaga

SEQ ID NO: 689191 - RNA, 19 nt, Homo sapiens
  misc_RNA (1)...(19): siRNA sense strand
ggcuguagcuguggaccaa

SEQ ID NO: 689192 - RNA, 19 nt, Homo sapiens
  misc_RNA (1)...(19): siRNA sense strand
gcuaaggccagagaagugu

SEQ ID NO: 689193 - RNA, 19 nt, Homo sapiens
  misc_RNA (1)...(19): siRNA sense strand
caagaucuccaaauaguua

SEQ ID NO: 689194 - RNA, 19 nt, Homo sapiens
  misc_RNA (1)...(19): siRNA sense strand
aguacaagaucuccaaaua

SEQ ID NO: 689195 - RNA, 19 nt, Homo sapiens
  misc_RNA (1)...(19): siRNA sense strand
gcauuuccguuaccaagaa

SEQ ID NO: 689196 - RNA, 19 nt, Homo sapiens
  misc_RNA (1)...(19): siRNA sense strand
gcagaaagaaccuggaaga

SEQ ID NO: 689197 - RNA, 19 nt, Homo sapiens
  misc_RNA (1)...(19): siRNA sense strand
caacaaauccagacuccuu

SEQ ID NO: 689198 - RNA, 19 nt, Homo sapiens
  misc_RNA (1)...(19): siRNA sense strand
uacaagaucuccaaauagu

SEQ ID NO: 689199 - RNA, 19 nt, Homo sapiens
  misc_RNA (1)...(19): siRNA sense strand
uggaagacuugcagaaaga

SEQ ID NO: 689200 - RNA, 19 nt, Homo sapiens
  misc_RNA (1)...(19): siRNA sense strand
guacaagaucuccaaauag

SEQ ID NO: 689201 - RNA, 19 nt, Homo sapiens
  misc_RNA (1)...(19): siRNA sense strand
aauccagacuccuucagua

SEQ ID NO: 689202 - RNA, 19 nt, Homo sapiens
  misc_RNA (1)...(19): siRNA sense strand
ccagacuccuucaguacaa

SEQ ID NO: 689203 - RNA, 19 nt, Homo sapiens
  misc_RNA (1)...(19): siRNA sense strand
guggaagacuugcagaaag

SEQ ID NO: 689204 - RNA, 19 nt, Homo sapiens
  misc_RNA (1)...(19): siRNA sense strand
aagagcagauccuggaguu

SEQ ID NO: 689205 - RNA, 19 nt, Homo sapiens
  misc_RNA (1)...(19): siRNA sense strand
gguggaagacuugcagaaa

SEQ ID NO: 689206 - RNA, 19 nt, Homo sapiens
  misc_RNA (1)...(19): siRNA sense strand
ggccagagaaguguacaaa

SEQ ID NO: 689207 - RNA, 19 nt, Homo sapiens
  misc_RNA (1)...(19): siRNA sense strand
ccagagaaguguacaaaag

SEQ ID NO: 689208 - RNA, 19 nt, Homo sapiens
  misc_RNA (1)...(19): siRNA sense strand
agaaagaaccuggaagaca

SEQ ID NO: 689209 - RNA, 19 nt, Homo sapiens
  misc_RNA (1)...(19): siRNA sense strand
ccacugggagcaggaaauu

SEQ ID NO: 689210 - RNA, 19 nt, Homo sapiens
  misc_RNA (1)...(19): siRNA sense strand
ggaguugcugguccuagaa

SEQ ID NO: 689211 - RNA, 19 nt, Homo sapiens
  misc_RNA (1)...(19): siRNA sense strand
ggaagacuugcagaaagaa

SEQ ID NO: 689212 - RNA, 19 nt, Homo sapiens
  misc_RNA (1)...(19): siRNA sense strand
caguggcccugguggaaga

SEQ ID NO: 689213 - RNA, 19 nt, Homo sapiens
  misc_RNA (1)...(19): siRNA sense strand
uggaguugcugguccuaga

SEQ ID NO: 689214 - RNA, 19 nt, Homo sapiens
  misc_RNA (1)...(19): siRNA sense strand
ggcuguagcuguggaccaa

SEQ ID NO: 689215 - RNA, 19 nt, Homo sapiens
  misc_RNA (1)...(19): siRNA sense strand
gcuaaggccagagaagugu

SEQ ID NO: 689216 - RNA, 19 nt, Homo sapiens
  misc_RNA (1)...(19): siRNA sense strand
caagaucuccaaauaguua

SEQ ID NO: 689217 - RNA, 19 nt, Homo sapiens
  misc_RNA (1)...(19): siRNA sense strand
aguacaagaucuccaaaua

SEQ ID NO: 689218 - RNA, 19 nt, Homo sapiens
  misc_RNA (1)...(19): siRNA sense strand
gcauuuccguuaccaagaa

SEQ ID NO: 689219 - RNA, 19 nt, Homo sapiens
  misc_RNA (1)...(19): siRNA sense strand
gcagaaagaaccuggaaga

SEQ ID NO: 689220 - RNA, 19 nt, Homo sapiens
  misc_RNA (1)...(19): siRNA sense strand
caacaaauccagacuccuu

SEQ ID NO: 689221 - RNA, 19 nt, Homo sapiens
  misc_RNA (1)...(19): siRNA sense strand
uacaagaucuccaaauagu

SEQ ID NO: 689222 - RNA, 19 nt, Homo sapiens
  misc_RNA (1)...(19): siRNA sense strand
uggaagacuugcagaaaga

SEQ ID NO: 689223 - RNA, 19 nt, Homo sapiens
  misc_RNA (1)...(19): siRNA sense strand
guacaagaucuccaaauag

SEQ ID NO: 689224 - RNA, 19 nt, Homo sapiens
  misc_RNA (1)...(19): siRNA sense strand
aauccagacuccuucagua

SEQ ID NO: 689225 - RNA, 19 nt, Homo sapiens
  misc_RNA (1)...(19): siRNA sense strand
ccagacuccuucaguacaa

SEQ ID NO: 689226 - RNA, 19 nt, Homo sapiens
  misc_RNA (1)...(19): siRNA sense strand
guggaagacuugcagaaag

SEQ ID NO: 689227 - RNA, 19 nt, Homo sapiens
  misc_RNA (1)...(19): siRNA sense strand
aagagcagauccuggaguu

SEQ ID NO: 689228 - RNA, 19 nt, Homo sapiens
  misc_RNA (1)...(19): siRNA sense strand
gguggaagacuugcagaaa

SEQ ID NO: 689229 - RNA, 19 nt, Homo sapiens
  misc_RNA (1)...(19): siRNA sense strand
ggccagagaaguguacaaa

SEQ ID NO: 689230 - RNA, 19 nt, Homo sapiens
  misc_RNA (1)...(19): siRNA sense strand
ccagagaaguguacaaaag

SEQ ID NO: 689231 - RNA, 19 nt, Homo sapiens
  misc_RNA (1)...(19): siRNA sense strand
agaaagaaccuggaagaca

SEQ ID NO: 689232 - RNA, 19 nt, Homo sapiens
  misc_RNA (1)...(19): siRNA sense strand
ccacugggagcaggaaauu

SEQ ID NO: 689233 - RNA, 19 nt, Homo sapiens
  misc_RNA (1)...(19): siRNA sense strand
ggaguugcugguccuagaa

SEQ ID NO: 689234 - RNA, 19 nt, Homo sapiens
  misc_RNA (1)...(19): siRNA sense strand
ggaagacuugcagaaagaa

SEQ ID NO: 689235 - RNA, 19 nt, Homo sapiens
  misc_RNA (1)...(19): siRNA sense strand
caguggcccugguggaaga

SEQ ID NO: 689236 - RNA, 19 nt, Homo sapiens
  misc_RNA (1)...(19): siRNA sense strand
uggaguugcugguccuaga

SEQ ID NO: 689237 - RNA, 19 nt, Homo sapiens
  misc_RNA (1)...(19): siRNA sense strand
ggcuguagcuguggaccaa

SEQ ID NO: 689238 - RNA, 19 nt, Homo sapiens
  misc_RNA (1)...(19): siRNA sense strand
gcuaaggccagagaagugu

SEQ ID NO: 689239 - RNA, 19 nt, Homo sapiens
  misc_RNA (1)...(19): siRNA sense strand
caagaucuccaaauaguua

SEQ ID NO: 689240 - RNA, 19 nt, Homo sapiens
  misc_RNA (1)...(19): siRNA sense strand
aguacaagaucuccaaaua

SEQ ID NO: 689241 - RNA, 19 nt, Homo sapiens
  misc_RNA (1)...(19): siRNA sense strand
gcauuuccguuaccaagaa

SEQ ID NO: 689242 - RNA, 19 nt, Homo sapiens
  misc_RNA (1)...(19): siRNA sense strand
gcagaaagaaccuggaaga

SEQ ID NO: 689243 - RNA, 19 nt, Homo sapiens
  misc_RNA (1)...(19): siRNA sense strand
caacaaauccagacuccuu

SEQ ID NO: 689244 - RNA, 19 nt, Homo sapiens
  misc_RNA (1)...(19): siRNA sense strand
uacaagaucuccaaauagu

SEQ ID NO: 689245 - RNA, 19 nt, Homo sapiens
  misc_RNA (1)...(19): siRNA sense strand
uggaagacuugcagaaaga

SEQ ID NO: 689246 - RNA, 19 nt, Homo sapiens
  misc_RNA (1)...(19): siRNA sense strand
guacaagaucuccaaauag

SEQ ID NO: 689247 - RNA, 19 nt, Homo sapiens
  misc_RNA (1)...(19): siRNA sense strand
aauccagacuccuucagua

SEQ ID NO: 689248 - RNA, 19 nt, Homo sapiens
  misc_RNA (1)...(19): siRNA sense strand
ccagacuccuucaguacaa

SEQ ID NO: 689249 - RNA, 19 nt, Homo sapiens
  misc_RNA (1)...(19): siRNA sense strand
guggaagacuugcagaaag

SEQ ID NO: 689250 - RNA, 19 nt, Homo sapiens
  misc_RNA (1)...(19): siRNA sense strand
aagagcagauccuggaguu

SEQ ID NO: 689251 - RNA, 19 nt, Homo sapiens
  misc_RNA (1)...(19): siRNA sense strand
gguggaagacuugcagaaa

SEQ ID NO: 689252 - RNA, 19 nt, Homo sapiens
  misc_RNA (1)...(19): siRNA sense strand
ggccagagaaguguacaaa

SEQ ID NO: 689253 - RNA, 19 nt, Homo sapiens
  misc_RNA (1)...(19): siRNA sense strand
ccagagaaguguacaaaag

SEQ ID NO: 689254 - RNA, 19 nt, Homo sapiens
  misc_RNA (1)...(19): siRNA sense strand
agaaagaaccuggaagaca

SEQ ID NO: 689255 - RNA, 19 nt, Homo sapiens
  misc_RNA (1)...(19): siRNA sense strand
ccacugggagcaggaaauu

SEQ ID NO: 689256 - RNA, 19 nt, Homo sapiens
  misc_RNA (1)...(19): siRNA sense strand
ggaguugcugguccuagaa

SEQ ID NO: 689257 - RNA, 19 nt, Homo sapiens
  misc_RNA (1)...(19): siRNA sense strand
ggaagacuugcagaaagaa

SEQ ID NO: 689258 - RNA, 19 nt, Homo sapiens
  misc_RNA (1)...(19): siRNA sense strand
caguggcccugguggaaga

SEQ ID NO: 689259 - RNA, 19 nt, Homo sapiens
  misc_RNA (1)...(19): siRNA sense strand
uggaguugcugguccuaga

SEQ ID NO: 689260 - RNA, 19 nt, Homo sapiens
  misc_RNA (1)...(19): siRNA sense strand
ggcuguagcuguggaccaa

SEQ ID NO: 689261 - RNA, 19 nt, Homo sapiens
  misc_RNA (1)...(19): siRNA sense strand
gcuaaggccagagaagugu

SEQ ID NO: 689262 - RNA, 19 nt, Homo sapiens
  misc_RNA (1)...(19): siRNA sense strand
caagaucuccaaauaguua

SEQ ID NO: 689263 - RNA, 19 nt, Homo sapiens
  misc_RNA (1)...(19): siRNA sense strand
aguacaagaucuccaaaua

SEQ ID NO: 689264 - RNA, 19 nt, Homo sapiens
  misc_RNA (1)...(19): siRNA sense strand
gcauuuccguuaccaagaa

SEQ ID NO: 689265 - RNA, 19 nt, Homo sapiens
  misc_RNA (1)...(19): siRNA sense strand
gcagaaagaaccuggaaga

SEQ ID NO: 689266 - RNA, 19 nt, Homo sapiens
  misc_RNA (1)...(19): siRNA sense strand
caacaaauccagacuccuu

SEQ ID NO: 689267 - RNA, 19 nt, Homo sapiens
  misc_RNA (1)...(19): siRNA sense strand
uacaagaucuccaaauagu

SEQ ID NO: 689268 - RNA, 19 nt, Homo sapiens
  misc_RNA (1)...(19): siRNA sense strand
uggaagacuugcagaaaga

SEQ ID NO: 689269 - RNA, 19 nt, Homo sapiens
  misc_RNA (1)...(19): siRNA sense strand
guacaagaucuccaaauag

SEQ ID NO: 689270 - RNA, 19 nt, Homo sapiens
  misc_RNA (1)...(19): siRNA sense strand
aauccagacuccuucagua

SEQ ID NO: 689271 - RNA, 19 nt, Homo sapiens
  misc_RNA (1)...(19): siRNA sense strand
gggaauuccugcagagaag

SEQ ID NO: 689272 - RNA, 19 nt, Homo sapiens
  misc_RNA (1)...(19): siRNA sense strand
ccagacuccuucaguacaa

SEQ ID NO: 689273 - RNA, 19 nt, Homo sapiens
  misc_RNA (1)...(19): siRNA sense strand
guggaagacuugcagaaag

SEQ ID NO: 689274 - RNA, 19 nt, Homo sapiens
  misc_RNA (1)...(19): siRNA sense strand
ugauguggcucugggaauu

SEQ ID NO: 689275 - RNA, 19 nt, Homo sapiens
  misc_RNA (1)...(19): siRNA sense strand
aagagcagauccuggaguu

SEQ ID NO: 689276 - RNA, 19 nt, Homo sapiens
  misc_RNA (1)...(19): siRNA sense strand
gguggaagacuugcagaaa

SEQ ID NO: 689277 - RNA, 19 nt, Homo sapiens
  misc_RNA (1)...(19): siRNA sense strand
ggccagagaaguguacaaa

SEQ ID NO: 689278 - RNA, 19 nt, Homo sapiens
  misc_RNA (1)...(19): siRNA sense strand
ccagagaaguguacaaaag

SEQ ID NO: 689279 - RNA, 19 nt, Homo sapiens
  misc_RNA (1)...(19): siRNA sense strand
agaaagaaccuggaagaca

SEQ ID NO: 689280 - RNA, 19 nt, Homo sapiens
  misc_RNA (1)...(19): siRNA sense strand
ccacugggagcaggaaauu

SEQ ID NO: 689281 - RNA, 19 nt, Homo sapiens
  misc_RNA (1)...(19): siRNA sense strand
ggaguugcugguccuagaa

SEQ ID NO: 689282 - RNA, 19 nt, Homo sapiens
  misc_RNA (1)...(19): siRNA sense strand
ggaagacuugcagaaagaa

SEQ ID NO: 689283 - RNA, 19 nt, Homo sapiens
  misc_RNA (1)...(19): siRNA sense strand
caguggcccugguggaaga

SEQ ID NO: 689284 - RNA, 19 nt, Homo sapiens
  misc_RNA (1)...(19): siRNA sense strand
uggaguugcugguccuaga

SEQ ID NO: 689285 - RNA, 19 nt, Homo sapiens
  misc_RNA (1)...(19): siRNA sense strand
ggcuguagcuguggaccaa

SEQ ID NO: 689286 - RNA, 19 nt, Homo sapiens
  misc_RNA (1)...(19): siRNA sense strand
gcuaaggccagagaagugu

SEQ ID NO: 689287 - RNA, 19 nt, Homo sapiens
  misc_RNA (1)...(19): siRNA sense strand
ggaauuccugcagagaaga

SEQ ID NO: 689288 - RNA, 19 nt, Homo sapiens
  misc_RNA (1)...(19): siRNA sense strand
caagaucuccaaauaguua

SEQ ID NO: 689289 - RNA, 19 nt, Homo sapiens
  misc_RNA (1)...(19): siRNA sense strand
aguacaagaucuccaaaua

SEQ ID NO: 689290 - RNA, 19 nt, Homo sapiens
  misc_RNA (1)...(19): siRNA sense strand
gcauuuccguuaccaagaa

SEQ ID NO: 689291 - RNA, 19 nt, Homo sapiens
  misc_RNA (1)...(19): siRNA sense strand
gcagaaagaaccuggaaga

SEQ ID NO: 689292 - RNA, 19 nt, Homo sapiens
  misc_RNA (1)...(19): siRNA sense strand
caacaaauccagacuccuu

SEQ ID NO: 689293 - RNA, 19 nt, Homo sapiens
  misc_RNA (1)...(19): siRNA sense strand
uacaagaucuccaaauagu

SEQ ID NO: 689294 - RNA, 19 nt, Homo sapiens
  misc_RNA (1)...(19): siRNA sense strand
uggaagacuugcagaaaga

SEQ ID NO: 689295 - RNA, 19 nt, Homo sapiens
  misc_RNA (1)...(19): siRNA sense strand
guacaagaucuccaaauag

SEQ ID NO: 689296 - RNA, 19 nt, Homo sapiens
  misc_RNA (1)...(19): siRNA sense strand
aauccagacuccuucagua

SEQ ID NO: 689297 - RNA, 19 nt, Homo sapiens
  misc_RNA (1)...(19): siRNA sense strand
ccagacuccuucaguacaa

SEQ ID NO: 689298 - RNA, 19 nt, Homo sapiens
  misc_RNA (1)...(19): siRNA sense strand
guggaagacuugcagaaag

SEQ ID NO: 689299 - RNA, 19 nt, Homo sapiens
  misc_RNA (1)...(19): siRNA sense strand
aagagcagauccuggaguu

SEQ ID NO: 689300 - RNA, 19 nt, Homo sapiens
  misc_RNA (1)...(19): siRNA sense strand
gguggaagacuugcagaaa

SEQ ID NO: 689301 - RNA, 19 nt, Homo sapiens
  misc_RNA (1)...(19): siRNA sense strand
ggccagagaaguguacaaa

SEQ ID NO: 689302 - RNA, 19 nt, Homo sapiens
  misc_RNA (1)...(19): siRNA sense strand
ccagagaaguguacaaaag

SEQ ID NO: 689303 - RNA, 19 nt, Homo sapiens
  misc_RNA (1)...(19): siRNA sense strand
agaaagaaccuggaagaca

SEQ ID NO: 689304 - RNA, 19 nt, Homo sapiens
  misc_RNA (1)...(19): siRNA sense strand
ccacugggagcaggaaauu

SEQ ID NO: 689305 - RNA, 19 nt, Homo sapiens
  misc_RNA (1)...(19): siRNA sense strand
ggaguugcugguccuagaa

SEQ ID NO: 689306 - RNA, 19 nt, Homo sapiens
  misc_RNA (1)...(19): siRNA sense strand
ggaagacuugcagaaagaa

SEQ ID NO: 689307 - RNA, 19 nt, Homo sapiens
  misc_RNA (1)...(19): siRNA sense strand
caguggcccugguggaaga

SEQ ID NO: 689308 - RNA, 19 nt, Homo sapiens
  misc_RNA (1)...(19): siRNA sense strand
uggaguugcugguccuaga

SEQ ID NO: 689309 - RNA, 19 nt, Homo sapiens
  misc_RNA (1)...(19): siRNA sense strand
ggcuguagcuguggaccaa

SEQ ID NO: 689310 - RNA, 19 nt, Homo sapiens
  misc_RNA (1)...(19): siRNA sense strand
gcuaaggccagagaagugu

SEQ ID NO: 689311 - RNA, 19 nt, Homo sapiens
  misc_RNA (1)...(19): siRNA sense strand
caagaucuccaaauaguua

SEQ ID NO: 689312 - RNA, 19 nt, Homo sapiens
  misc_RNA (1)...(19): siRNA sense strand
aguacaagaucuccaaaua

SEQ ID NO: 689313 - RNA, 19 nt, Homo sapiens
  misc_RNA (1)...(19): siRNA sense strand
gcauuuccguuaccaagaa

SEQ ID NO: 689314 - RNA, 19 nt, Homo sapiens
  misc_RNA (1)...(19): siRNA sense strand
gcagaaagaaccuggaaga

SEQ ID NO: 689315 - RNA, 19 nt, Homo sapiens
  misc_RNA (1)...(19): siRNA sense strand
caacaaauccagacuccuu

SEQ ID NO: 689316 - RNA, 19 nt, Homo sapiens
  misc_RNA (1)...(19): siRNA sense strand
uacaagaucuccaaauagu

SEQ ID NO: 689317 - RNA, 19 nt, Homo sapiens
  misc_RNA (1)...(19): siRNA sense strand
uggaagacuugcagaaaga

SEQ ID NO: 689318 - RNA, 19 nt, Homo sapiens
  misc_RNA (1)...(19): siRNA sense strand
guacaagaucuccaaauag

SEQ ID NO: 689319 - RNA, 19 nt, Homo sapiens
  misc_RNA (1)...(19): siRNA sense strand
aauccagacuccuucagua

SEQ ID NO: 689320 - RNA, 19 nt, Homo sapiens
  misc_RNA (1)...(19): siRNA sense strand
ccagacuccuucaguacaa

SEQ ID NO: 689321 - RNA, 19 nt, Homo sapiens
  misc_RNA (1)...(19): siRNA sense strand
guggaagacuugcagaaag

SEQ ID NO: 689322 - RNA, 19 nt, Homo sapiens
  misc_RNA (1)...(19): siRNA sense strand
aagagcagauccuggaguu

SEQ ID NO: 689323 - RNA, 19 nt, Homo sapiens
  misc_RNA (1)...(19): siRNA sense strand
gguggaagacuugcagaaa

SEQ ID NO: 689324 - RNA, 19 nt, Homo sapiens
  misc_RNA (1)...(19): siRNA sense strand
ggccagagaaguguacaaa

SEQ ID NO: 689325 - RNA, 19 nt, Homo sapiens
  misc_RNA (1)...(19): siRNA sense strand
ccagagaaguguacaaaag

SEQ ID NO: 689326 - RNA, 19 nt, Homo sapiens
  misc_RNA (1)...(19): siRNA sense strand
agaaagaaccuggaagaca

SEQ ID NO: 689327 - RNA, 19 nt, Homo sapiens
  misc_RNA (1)...(19): siRNA sense strand
ccacugggagcaggaaauu

SEQ ID NO: 689328 - RNA, 19 nt, Homo sapiens
  misc_RNA (1)...(19): siRNA sense strand
ggaguugcugguccuagaa

SEQ ID NO: 689329 - RNA, 19 nt, Homo sapiens
  misc_RNA (1)...(19): siRNA sense strand
ggaagacuugcagaaagaa

SEQ ID NO: 689330 - RNA, 19 nt, Homo sapiens
  misc_RNA (1)...(19): siRNA sense strand
caguggcccugguggaaga

SEQ ID NO: 689331 - RNA, 19 nt, Homo sapiens
  misc_RNA (1)...(19): siRNA sense strand
uggaguugcugguccuaga

SEQ ID NO: 689332 - RNA, 19 nt, Homo sapiens
  misc_RNA (1)...(19): siRNA sense strand
ggcuguagcuguggaccaa

SEQ ID NO: 689333 - RNA, 19 nt, Homo sapiens
  misc_RNA (1)...(19): siRNA sense strand
gcuaaggccagagaagugu

SEQ ID NO: 689334 - RNA, 19 nt, Homo sapiens
  misc_RNA (1)...(19): siRNA sense strand
caagaucuccaaauaguua

SEQ ID NO: 689335 - RNA, 19 nt, Homo sapiens
  misc_RNA (1)...(19): siRNA sense strand
aguacaagaucuccaaaua

SEQ ID NO: 689336 - RNA, 19 nt, Homo sapiens
  misc_RNA (1)...(19): siRNA sense strand
gcauuuccguuaccaagaa

SEQ ID NO: 689337 - RNA, 19 nt, Homo sapiens
  misc_RNA (1)...(19): siRNA sense strand
gcagaaagaaccuggaaga

SEQ ID NO: 689338 - RNA, 19 nt, Homo sapiens
  misc_RNA (1)...(19): siRNA sense strand
caacaaauccagacuccuu

SEQ ID NO: 689339 - RNA, 19 nt, Homo sapiens
  misc_RNA (1)...(19): siRNA sense strand
uacaagaucuccaaauagu

SEQ ID NO: 689340 - RNA, 19 nt, Homo sapiens
  misc_RNA (1)...(19): siRNA sense strand
uggaagacuugcagaaaga

SEQ ID NO: 689341 - RNA, 19 nt, Homo sapiens
  misc_RNA (1)...(19): siRNA sense strand
guacaagaucuccaaauag

SEQ ID NO: 689342 - RNA, 19 nt, Homo sapiens
  misc_RNA (1)...(19): siRNA sense strand
aauccagacuccuucagua

SEQ ID NO: 689343 - RNA, 19 nt, Homo sapiens
  misc_RNA (1)...(19): siRNA sense strand
ccagacuccuucaguacaa

SEQ ID NO: 689344 - RNA, 19 nt, Homo sapiens
  misc_RNA (1)...(19): siRNA sense strand
guggaagacuugcagaaag

SEQ ID NO: 689345 - RNA, 19 nt, Homo sapiens
  misc_RNA (1)...(19): siRNA sense strand
aagagcagauccuggaguu

SEQ ID NO: 689346 - RNA, 19 nt, Homo sapiens
  misc_RNA (1)...(19): siRNA sense strand
gguggaagacuugcagaaa

SEQ ID NO: 689347 - RNA, 19 nt, Homo sapiens
  misc_RNA (1)...(19): siRNA sense strand
ggccagagaaguguacaaa

SEQ ID NO: 689348 - RNA, 19 nt, Homo sapiens
  misc_RNA (1)...(19): siRNA sense strand
ccagagaaguguacaaaag

SEQ ID NO: 689349 - RNA, 19 nt, Homo sapiens
  misc_RNA (1)...(19): siRNA sense strand
agaaagaaccuggaagaca

SEQ ID NO: 689350 - RNA, 19 nt, Homo sapiens
  misc_RNA (1)...(19): siRNA sense strand
ccacugggagcaggaaauu

SEQ ID NO: 689351 - RNA, 19 nt, Homo sapiens
  misc_RNA (1)...(19): siRNA sense strand
ggaguugcugguccuagaa

SEQ ID NO: 689352 - RNA, 19 nt, Homo sapiens
  misc_RNA (1)...(19): siRNA sense strand
ggaagacuugcagaaagaa

SEQ ID NO: 689353 - RNA, 19 nt, Homo sapiens
  misc_RNA (1)...(19): siRNA sense strand
caguggcccugguggaaga

SEQ ID NO: 689354 - RNA, 19 nt, Homo sapiens
  misc_RNA (1)...(19): siRNA sense strand
uggaguugcugguccuaga

SEQ ID NO: 689355 - RNA, 19 nt, Homo sapiens
  misc_RNA (1)...(19): siRNA sense strand
ggcuguagcuguggaccaa

SEQ ID NO: 689356 - RNA, 19 nt, Homo sapiens
  misc_RNA (1)...(19): siRNA sense strand
gcuaaggccagagaagugu

SEQ ID NO: 689357 - RNA, 19 nt, Homo sapiens
  misc_RNA (1)...(19): siRNA sense strand
caagaucuccaaauaguua

SEQ ID NO: 689358 - RNA, 19 nt, Homo sapiens
  misc_RNA (1)...(19): siRNA sense strand
aguacaagaucuccaaaua

SEQ ID NO: 689359 - RNA, 19 nt, Homo sapiens
  misc_RNA (1)...(19): siRNA sense strand
gcauuuccguuaccaagaa

SEQ ID NO: 689360 - RNA, 19 nt, Homo sapiens
  misc_RNA (1)...(19): siRNA sense strand
gcagaaagaaccuggaaga

SEQ ID NO: 689361 - RNA, 19 nt, Homo sapiens
  misc_RNA (1)...(19): siRNA sense strand
caacaaauccagacuccuu

SEQ ID NO: 689362 - RNA, 19 nt, Homo sapiens
  misc_RNA (1)...(19): siRNA sense strand
uacaagaucuccaaauagu

SEQ ID NO: 689363 - RNA, 19 nt, Homo sapiens
  misc_RNA (1)...(19): siRNA sense strand
uggaagacuugcagaaaga

SEQ ID NO: 689364 - RNA, 19 nt, Homo sapiens
  misc_RNA (1)...(19): siRNA sense strand
guacaagaucuccaaauag

SEQ ID NO: 689365 - RNA, 19 nt, Homo sapiens
  misc_RNA (1)...(19): siRNA sense strand
aauccagacuccuucagua

SEQ ID NO: 689366 - RNA, 19 nt, Homo sapiens
  misc_RNA (1)...(19): siRNA sense strand
ccagacuccuucaguacaa

SEQ ID NO: 689367 - RNA, 19 nt, Homo sapiens
  misc_RNA (1)...(19): siRNA sense strand
guggaagacuugcagaaag

SEQ ID NO: 689368 - RNA, 19 nt, Homo sapiens
  misc_RNA (1)...(19): siRNA sense strand
aagagcagauccuggaguu

SEQ ID NO: 689369 - RNA, 19 nt, Homo sapiens
  misc_RNA (1)...(19): siRNA sense strand
gguggaagacuugcagaaa

SEQ ID NO: 689370 - RNA, 19 nt, Homo sapiens
  misc_RNA (1)...(19): siRNA sense strand
ggccagagaaguguacaaa

SEQ ID NO: 689371 - RNA, 19 nt, Homo sapiens
  misc_RNA (1)...(19): siRNA sense strand
ccagagaaguguacaaaag

SEQ ID NO: 689372 - RNA, 19 nt, Homo sapiens
  misc_RNA (1)...(19): siRNA sense strand
agaaagaaccuggaagaca

SEQ ID NO: 689373 - RNA, 19 nt, Homo sapiens
  misc_RNA (1)...(19): siRNA sense strand
ccacugggagcaggaaauu

SEQ ID NO: 689374 - RNA, 19 nt, Homo sapiens
  misc_RNA (1)...(19): siRNA sense strand
ggaguugcugguccuagaa

SEQ ID NO: 689375 - RNA, 19 nt, Homo sapiens
  misc_RNA (1)...(19): siRNA sense strand
ggaagacuugcagaaagaa

SEQ ID NO: 689376 - RNA, 19 nt, Homo sapiens
  misc_RNA (1)...(19): siRNA sense strand
caguggcccugguggaaga

SEQ ID NO: 689377 - RNA, 19 nt, Homo sapiens
  misc_RNA (1)...(19): siRNA sense strand
uggaguugcugguccuaga

SEQ ID NO: 689378 - RNA, 19 nt, Homo sapiens
  misc_RNA (1)...(19): siRNA sense strand
ggcuguagcuguggaccaa

SEQ ID NO: 689379 - RNA, 19 nt, Homo sapiens
  misc_RNA (1)...(19): siRNA sense strand
gcuaaggccagagaagugu

SEQ ID NO: 689380 - RNA, 19 nt, Homo sapiens
  misc_RNA (1)...(19): siRNA sense strand
caagaucuccaaauaguua

SEQ ID NO: 689381 - RNA, 19 nt, Homo sapiens
  misc_RNA (1)...(19): siRNA sense strand
aguacaagaucuccaaaua

SEQ ID NO: 689382 - RNA, 19 nt, Homo sapiens
  misc_RNA (1)...(19): siRNA sense strand
gcauuuccguuaccaagaa

SEQ ID NO: 689383 - RNA, 19 nt, Homo sapiens
  misc_RNA (1)...(19): siRNA sense strand
gcagaaagaaccuggaaga

SEQ ID NO: 689384 - RNA, 19 nt, Homo sapiens
  misc_RNA (1)...(19): siRNA sense strand
caacaaauccagacuccuu

SEQ ID NO: 689385 - RNA, 19 nt, Homo sapiens
  misc_RNA (1)...(19): siRNA sense strand
uacaagaucuccaaauagu

SEQ ID NO: 689386 - RNA, 19 nt, Homo sapiens
  misc_RNA (1)...(19): siRNA sense strand
uggaagacuugcagaaaga

SEQ ID NO: 689387 - RNA, 19 nt, Homo sapiens
  misc_RNA (1)...(19): siRNA sense strand
guacaagaucuccaaauag

SEQ ID NO: 689388 - RNA, 19 nt, Homo sapiens
  misc_RNA (1)...(19): siRNA sense strand
aauccagacuccuucagua

SEQ ID NO: 689389 - RNA, 19 nt, Homo sapiens
  misc_RNA (1)...(19): siRNA sense strand
ccagacuccuucaguacaa

SEQ ID NO: 689390 - RNA, 19 nt, Homo sapiens
  misc_RNA (1)...(19): siRNA sense strand
guggaagacuugcagaaag

SEQ ID NO: 689391 - RNA, 19 nt, Homo sapiens
  misc_RNA (1)...(19): siRNA sense strand
aagagcagauccuggaguu

SEQ ID NO: 689392 - RNA, 19 nt, Homo sapiens
  misc_RNA (1)...(19): siRNA sense strand
gguggaagacuugcagaaa

SEQ ID NO: 689393 - RNA, 19 nt, Homo sapiens
  misc_RNA (1)...(19): siRNA sense strand
ggccagagaaguguacaaa

SEQ ID NO: 689394 - RNA, 19 nt, Homo sapiens
  misc_RNA (1)...(19): siRNA sense strand
ccagagaaguguacaaaag

SEQ ID NO: 689395 - RNA, 19 nt, Homo sapiens
  misc_RNA (1)...(19): siRNA sense strand
agaaagaaccuggaagaca

SEQ ID NO: 689396 - RNA, 19 nt, Homo sapiens
  misc_RNA (1)...(19): siRNA sense strand
ccacugggagcaggaaauu

SEQ ID NO: 689397 - RNA, 19 nt, Homo sapiens
  misc_RNA (1)...(19): siRNA sense strand
ggaguugcugguccuagaa

SEQ ID NO: 689398 - RNA, 19 nt, Homo sapiens
  misc_RNA (1)...(19): siRNA sense strand
ggaagacuugcagaaagaa

SEQ ID NO: 689399 - RNA, 19 nt, Homo sapiens
  misc_RNA (1)...(19): siRNA sense strand
caguggcccugguggaaga

SEQ ID NO: 689400 - RNA, 19 nt, Homo sapiens
  misc_RNA (1)...(19): siRNA sense strand
uggaguugcugguccuaga

SEQ ID NO: 689401 - RNA, 19 nt, Homo sapiens
  misc_RNA (1)...(19): siRNA sense strand
ggcuguagcuguggaccaa

SEQ ID NO: 689402 - RNA, 19 nt, Homo sapiens
  misc_RNA (1)...(19): siRNA sense strand
gcuaaggccagagaagugu

SEQ ID NO: 689403 - RNA, 19 nt, Homo sapiens
  misc_RNA (1)...(19): siRNA sense strand
caagaucuccaaauaguua

SEQ ID NO: 689404 - RNA, 19 nt, Homo sapiens
  misc_RNA (1)...(19): siRNA sense strand
aguacaagaucuccaaaua

SEQ ID NO: 689405 - RNA, 19 nt, Homo sapiens
  misc_RNA (1)...(19): siRNA sense strand
gcauuuccguuaccaagaa

SEQ ID NO: 689406 - RNA, 19 nt, Homo sapiens
  misc_RNA (1)...(19): siRNA sense strand
gcagaaagaaccuggaaga

SEQ ID NO: 689407 - RNA, 19 nt, Homo sapiens
  misc_RNA (1)...(19): siRNA sense strand
caacaaauccagacuccuu

SEQ ID NO: 689408 - RNA, 19 nt, Homo sapiens
  misc_RNA (1)...(19): siRNA sense strand
uacaagaucuccaaauagu

SEQ ID NO: 689409 - RNA, 19 nt, Homo sapiens
  misc_RNA (1)...(19): siRNA sense strand
uggaagacuugcagaaaga

SEQ ID NO: 689410 - RNA, 19 nt, Homo sapiens
  misc_RNA (1)...(19): siRNA sense strand
guacaagaucuccaaauag

SEQ ID NO: 689411 - RNA, 19 nt, Homo sapiens
  misc_RNA (1)...(19): siRNA sense strand
aauccagacuccuucagua

SEQ ID NO: 689412 - RNA, 19 nt, Homo sapiens
  misc_RNA (1)...(19): siRNA sense strand
gggaauuccugcagagaag

SEQ ID NO: 689413 - RNA, 19 nt, Homo sapiens
  misc_RNA (1)...(19): siRNA sense strand
ccagacuccuucaguacaa

SEQ ID NO: 689414 - RNA, 19 nt, Homo sapiens
  misc_RNA (1)...(19): siRNA sense strand
guggaagacuugcagaaag

SEQ ID NO: 689415 - RNA, 19 nt, Homo sapiens
  misc_RNA (1)...(19): siRNA sense strand
ugauguggcucugggaauu

SEQ ID NO: 689416 - RNA, 19 nt, Homo sapiens
  misc_RNA (1)...(19): siRNA sense strand
aagagcagauccuggaguu

SEQ ID NO: 689417 - RNA, 19 nt, Homo sapiens
  misc_RNA (1)...(19): siRNA sense strand
gguggaagacuugcagaaa

SEQ ID NO: 689418 - RNA, 19 nt, Homo sapiens
  misc_RNA (1)...(19): siRNA sense strand
ggccagagaaguguacaaa

SEQ ID NO: 689419 - RNA, 19 nt, Homo sapiens
  misc_RNA (1)...(19): siRNA sense strand
ccagagaaguguacaaaag

SEQ ID NO: 689420 - RNA, 19 nt, Homo sapiens
  misc_RNA (1)...(19): siRNA sense strand
agaaagaaccuggaagaca

SEQ ID NO: 689421 - RNA, 19 nt, Homo sapiens
  misc_RNA (1)...(19): siRNA sense strand
ccacugggagcaggaaauu

SEQ ID NO: 689422 - RNA, 19 nt, Homo sapiens
  misc_RNA (1)...(19): siRNA sense strand
ggaguugcugguccuagaa

SEQ ID NO: 689423 - RNA, 19 nt, Homo sapiens
  misc_RNA (1)...(19): siRNA sense strand
ggaagacuugcagaaagaa

SEQ ID NO: 689424 - RNA, 19 nt, Homo sapiens
  misc_RNA (1)...(19): siRNA sense strand
caguggcccugguggaaga

SEQ ID NO: 689425 - RNA, 19 nt, Homo sapiens
  misc_RNA (1)...(19): siRNA sense strand
uggaguugcugguccuaga

SEQ ID NO: 689426 - RNA, 19 nt, Homo sapiens
  misc_RNA (1)...(19): siRNA sense strand
ggcuguagcuguggaccaa

SEQ ID NO: 689427 - RNA, 19 nt, Homo sapiens
  misc_RNA (1)...(19): siRNA sense strand
gcuaaggccagagaagugu

SEQ ID NO: 689428 - RNA, 19 nt, Homo sapiens
  misc_RNA (1)...(19): siRNA sense strand
ggaauuccugcagagaaga

SEQ ID NO: 689429 - RNA, 19 nt, Homo sapiens
  misc_RNA (1)...(19): siRNA sense strand
caagaucuccaaauaguua

SEQ ID NO: 689430 - RNA, 19 nt, Homo sapiens
  misc_RNA (1)...(19): siRNA sense strand
aguacaagaucuccaaaua

SEQ ID NO: 689431 - RNA, 19 nt, Homo sapiens
  misc_RNA (1)...(19): siRNA sense strand
gcauuuccguuaccaagaa

SEQ ID NO: 689432 - RNA, 19 nt, Homo sapiens
  misc_RNA (1)...(19): siRNA sense strand
gcagaaagaaccuggaaga

SEQ ID NO: 689433 - RNA, 19 nt, Homo sapiens
  misc_RNA (1)...(19): siRNA sense strand
caacaaauccagacuccuu

SEQ ID NO: 689434 - RNA, 19 nt, Homo sapiens
  misc_RNA (1)...(19): siRNA sense strand
uacaagaucuccaaauagu

SEQ ID NO: 689435 - RNA, 19 nt, Homo sapiens
  misc_RNA (1)...(19): siRNA sense strand
uggaagacuugcagaaaga

SEQ ID NO: 689436 - RNA, 19 nt, Homo sapiens
  misc_RNA (1)...(19): siRNA sense strand
guacaagaucuccaaauag

SEQ ID NO: 689437 - RNA, 19 nt, Homo sapiens
  misc_RNA (1)...(19): siRNA sense strand
aauccagacuccuucagua

SEQ ID NO: 689438 - RNA, 19 nt, Homo sapiens
  misc_RNA (1)...(19): siRNA sense strand
ccagacuccuucaguacaa

SEQ ID NO: 689439 - RNA, 19 nt, Homo sapiens
  misc_RNA (1)...(19): siRNA sense strand
guggaagacuugcagaaag

SEQ ID NO: 689440 - RNA, 19 nt, Homo sapiens
  misc_RNA (1)...(19): siRNA sense strand
aagagcagauccuggaguu

SEQ ID NO: 689441 - RNA, 19 nt, Homo sapiens
  misc_RNA (1)...(19): siRNA sense strand
gguggaagacuugcagaaa

SEQ ID NO: 689442 - RNA, 19 nt, Homo sapiens
  misc_RNA (1)...(19): siRNA sense strand
ggccagagaaguguacaaa

SEQ ID NO: 689443 - RNA, 19 nt, Homo sapiens
  misc_RNA (1)...(19): siRNA sense strand
ccagagaaguguacaaaag

SEQ ID NO: 689444 - RNA, 19 nt, Homo sapiens
  misc_RNA (1)...(19): siRNA sense strand
agaaagaaccuggaagaca

SEQ ID NO: 689445 - RNA, 19 nt, Homo sapiens
  misc_RNA (1)...(19): siRNA sense strand
ccacugggagcaggaaauu

SEQ ID NO: 689446 - RNA, 19 nt, Homo sapiens
  misc_RNA (1)...(19): siRNA sense strand
ggaguugcugguccuagaa

SEQ ID NO: 689447 - RNA, 19 nt, Homo sapiens
  misc_RNA (1)...(19): siRNA sense strand
ggaagacuugcagaaagaa

SEQ ID NO: 689448 - RNA, 19 nt, Homo sapiens
  misc_RNA (1)...(19): siRNA sense strand
caguggcccugguggaaga

SEQ ID NO: 689449 - RNA, 19 nt, Homo sapiens
  misc_RNA (1)...(19): siRNA sense strand
uggaguugcugguccuaga

SEQ ID NO: 689450 - RNA, 19 nt, Homo sapiens
  misc_RNA (1)...(19): siRNA sense strand
ggcuguagcuguggaccaa

SEQ ID NO: 689451 - RNA, 19 nt, Homo sapiens
  misc_RNA (1)...(19): siRNA sense strand
gcuaaggccagagaagugu

SEQ ID NO: 689452 - RNA, 19 nt, Homo sapiens
  misc_RNA (1)...(19): siRNA sense strand
caagaucuccaaauaguua

SEQ ID NO: 689453 - RNA, 19 nt, Homo sapiens
  misc_RNA (1)...(19): siRNA sense strand
aguacaagaucuccaaaua

SEQ ID NO: 689454 - RNA, 19 nt, Homo sapiens
  misc_RNA (1)...(19): siRNA sense strand
gcauuuccguuaccaagaa

SEQ ID NO: 689455 - RNA, 19 nt, Homo sapiens
  misc_RNA (1)...(19): siRNA sense strand
gcagaaagaaccuggaaga

SEQ ID NO: 689456 - RNA, 19 nt, Homo sapiens
  misc_RNA (1)...(19): siRNA sense strand
caacaaauccagacuccuu

SEQ ID NO: 689457 - RNA, 19 nt, Homo sapiens
  misc_RNA (1)...(19): siRNA sense strand
uacaagaucuccaaauagu

SEQ ID NO: 689458 - RNA, 19 nt, Homo sapiens
  misc_RNA (1)...(19): siRNA sense strand
uggaagacuugcagaaaga

SEQ ID NO: 689459 - RNA, 19 nt, Homo sapiens
  misc_RNA (1)...(19): siRNA sense strand
guacaagaucuccaaauag

SEQ ID NO: 689460 - RNA, 19 nt, Homo sapiens
  misc_RNA (1)...(19): siRNA sense strand
aauccagacuccuucagua

SEQ ID NO: 689461 - RNA, 19 nt, Homo sapiens
  misc_RNA (1)...(19): siRNA sense strand
ccagacuccuucaguacaa

SEQ ID NO: 689462 - RNA, 19 nt, Homo sapiens
  misc_RNA (1)...(19): siRNA sense strand
guggaagacuugcagaaag

SEQ ID NO: 689463 - RNA, 19 nt, Homo sapiens
  misc_RNA (1)...(19): siRNA sense strand
aagagcagauccuggaguu

SEQ ID NO: 689464 - RNA, 19 nt, Homo sapiens
  misc_RNA (1)...(19): siRNA sense strand
gguggaagacuugcagaaa

SEQ ID NO: 689465 - RNA, 19 nt, Homo sapiens
  misc_RNA (1)...(19): siRNA sense strand
ggccagagaaguguacaaa

SEQ ID NO: 689466 - RNA, 19 nt, Homo sapiens
  misc_RNA (1)...(19): siRNA sense strand
ccagagaaguguacaaaag

SEQ ID NO: 689467 - RNA, 19 nt, Homo sapiens
  misc_RNA (1)...(19): siRNA sense strand
agaaagaaccuggaagaca

SEQ ID NO: 689468 - RNA, 19 nt, Homo sapiens
  misc_RNA (1)...(19): siRNA sense strand
ccacugggagcaggaaauu

SEQ ID NO: 689469 - RNA, 19 nt, Homo sapiens
  misc_RNA (1)...(19): siRNA sense strand
ggaguugcugguccuagaa

SEQ ID NO: 689470 - RNA, 19 nt, Homo sapiens
  misc_RNA (1)...(19): siRNA sense strand
ggaagacuugcagaaagaa

SEQ ID NO: 689471 - RNA, 19 nt, Homo sapiens
  misc_RNA (1)...(19): siRNA sense strand
caguggcccugguggaaga

SEQ ID NO: 689472 - RNA, 19 nt, Homo sapiens
  misc_RNA (1)...(19): siRNA sense strand
uggaguugcugguccuaga

SEQ ID NO: 689473 - RNA, 19 nt, Homo sapiens
  misc_RNA (1)...(19): siRNA sense strand
ggcuguagcuguggaccaa

SEQ ID NO: 689474 - RNA, 19 nt, Homo sapiens
  misc_RNA (1)...(19): siRNA sense strand
gcuaaggccagagaagugu

SEQ ID NO: 689475 - RNA, 19 nt, Homo sapiens
  misc_RNA (1)...(19): siRNA sense strand
caagaucuccaaauaguua

SEQ ID NO: 689476 - RNA, 19 nt, Homo sapiens
  misc_RNA (1)...(19): siRNA sense strand
aguacaagaucuccaaaua

SEQ ID NO: 689477 - RNA, 19 nt, Homo sapiens
  misc_RNA (1)...(19): siRNA sense strand
gcauuuccguuaccaagaa

SEQ ID NO: 689478 - RNA, 19 nt, Homo sapiens
  misc_RNA (1)...(19): siRNA sense strand
gcagaaagaaccuggaaga

SEQ ID NO: 689479 - RNA, 19 nt, Homo sapiens
  misc_RNA (1)...(19): siRNA sense strand
caacaaauccagacuccuu

SEQ ID NO: 689480 - RNA, 19 nt, Homo sapiens
  misc_RNA (1)...(19): siRNA sense strand
uacaagaucuccaaauagu

SEQ ID NO: 689481 - RNA, 19 nt, Homo sapiens
  misc_RNA (1)...(19): siRNA sense strand
uggaagacuugcagaaaga

SEQ ID NO: 689482 - RNA, 19 nt, Homo sapiens
  misc_RNA (1)...(19): siRNA sense strand
guacaagaucuccaaauag

SEQ ID NO: 689483 - RNA, 19 nt, Homo sapiens
  misc_RNA (1)...(19): siRNA sense strand
aauccagacuccuucagua

SEQ ID NO: 689484 - RNA, 19 nt, Homo sapiens
  misc_RNA (1)...(19): siRNA sense strand
ccagacuccuucaguacaa

SEQ ID NO: 689485 - RNA, 19 nt, Homo sapiens
  misc_RNA (1)...(19): siRNA sense strand
guggaagacuugcagaaag

SEQ ID NO: 689486 - RNA, 19 nt, Homo sapiens
  misc_RNA (1)...(19): siRNA sense strand
aagagcagauccuggaguu

SEQ ID NO: 689487 - RNA, 19 nt, Homo sapiens
  misc_RNA (1)...(19): siRNA sense strand
gguggaagacuugcagaaa

SEQ ID NO: 689488 - RNA, 19 nt, Homo sapiens
  misc_RNA (1)...(19): siRNA sense strand
ggccagagaaguguacaaa

SEQ ID NO: 689489 - RNA, 19 nt, Homo sapiens
  misc_RNA (1)...(19): siRNA sense strand
ccagagaaguguacaaaag

SEQ ID NO: 689490 - RNA, 19 nt, Homo sapiens
  misc_RNA (1)...(19): siRNA sense strand
agaaagaaccuggaagaca

SEQ ID NO: 689491 - RNA, 19 nt, Homo sapiens
  misc_RNA (1)...(19): siRNA sense strand
ccacugggagcaggaaauu

SEQ ID NO: 689492 - RNA, 19 nt, Homo sapiens
  misc_RNA (1)...(19): siRNA sense strand
ggaguugcugguccuagaa

SEQ ID NO: 689493 - RNA, 19 nt, Homo sapiens
  misc_RNA (1)...(19): siRNA sense strand
ggaagacuugcagaaagaa

SEQ ID NO: 689494 - RNA, 19 nt, Homo sapiens
  misc_RNA (1)...(19): siRNA sense strand
caguggcccugguggaaga

SEQ ID NO: 689495 - RNA, 19 nt, Homo sapiens
  misc_RNA (1)...(19): siRNA sense strand
uggaguugcugguccuaga

SEQ ID NO: 689496 - RNA, 19 nt, Homo sapiens
  misc_RNA (1)...(19): siRNA sense strand
ggcuguagcuguggaccaa

SEQ ID NO: 689497 - RNA, 19 nt, Homo sapiens
  misc_RNA (1)...(19): siRNA sense strand
gcuaaggccagagaagugu

SEQ ID NO: 689498 - RNA, 19 nt, Homo sapiens
  misc_RNA (1)...(19): siRNA sense strand
caagaucuccaaauaguua

SEQ ID NO: 689499 - RNA, 19 nt, Homo sapiens
  misc_RNA (1)...(19): siRNA sense strand
aguacaagaucuccaaaua

SEQ ID NO: 689500 - RNA, 19 nt, Homo sapiens
  misc_RNA (1)...(19): siRNA sense strand
gcauuuccguuaccaagaa

SEQ ID NO: 689501 - RNA, 19 nt, Homo sapiens
  misc_RNA (1)...(19): siRNA sense strand
gcagaaagaaccuggaaga

SEQ ID NO: 689502 - RNA, 19 nt, Homo sapiens
  misc_RNA (1)...(19): siRNA sense strand
caacaaauccagacuccuu

SEQ ID NO: 689503 - RNA, 19 nt, Homo sapiens
  misc_RNA (1)...(19): siRNA sense strand
uacaagaucuccaaauagu

SEQ ID NO: 689504 - RNA, 19 nt, Homo sapiens
  misc_RNA (1)...(19): siRNA sense strand
uggaagacuugcagaaaga

SEQ ID NO: 689505 - RNA, 19 nt, Homo sapiens
  misc_RNA (1)...(19): siRNA sense strand
guacaagaucuccaaauag

SEQ ID NO: 689506 - RNA, 19 nt, Homo sapiens
  misc_RNA (1)...(19): siRNA sense strand
aauccagacuccuucagua

SEQ ID NO: 689507 - RNA, 19 nt, Homo sapiens
  misc_RNA (1)...(19): siRNA sense strand
ccagacuccuucaguacaa

SEQ ID NO: 689508 - RNA, 19 nt, Homo sapiens
  misc_RNA (1)...(19): siRNA sense strand
guggaagacuugcagaaag

SEQ ID NO: 689509 - RNA, 19 nt, Homo sapiens
  misc_RNA (1)...(19): siRNA sense strand
aagagcagauccuggaguu

SEQ ID NO: 689510 - RNA, 19 nt, Homo sapiens
  misc_RNA (1)...(19): siRNA sense strand
gguggaagacuugcagaaa

SEQ ID NO: 689511 - RNA, 19 nt, Homo sapiens
  misc_RNA (1)...(19): siRNA sense strand
ggccagagaaguguacaaa

SEQ ID NO: 689512 - RNA, 19 nt, Homo sapiens
  misc_RNA (1)...(19): siRNA sense strand
ccagagaaguguacaaaag

SEQ ID NO: 689513 - RNA, 19 nt, Homo sapiens
  misc_RNA (1)...(19): siRNA sense strand
agaaagaaccuggaagaca

SEQ ID NO: 689514 - RNA, 19 nt, Homo sapiens
  misc_RNA (1)...(19): siRNA sense strand
ccacugggagcaggaaauu

SEQ ID NO: 689515 - RNA, 19 nt, Homo sapiens
  misc_RNA (1)...(19): siRNA sense strand
ggaguugcugguccuagaa

SEQ ID NO: 689516 - RNA, 19 nt, Homo sapiens
  misc_RNA (1)...(19): siRNA sense strand
ggaagacuugcagaaagaa

SEQ ID NO: 689517 - RNA, 19 nt, Homo sapiens
  misc_RNA (1)...(19): siRNA sense strand
caguggcccugguggaaga

SEQ ID NO: 689518 - RNA, 19 nt, Homo sapiens
  misc_RNA (1)...(19): siRNA sense strand
uggaguugcugguccuaga

SEQ ID NO: 689519 - RNA, 19 nt, Homo sapiens
  misc_RNA (1)...(19): siRNA sense strand
ggcuguagcuguggaccaa

SEQ ID NO: 689520 - RNA, 19 nt, Homo sapiens
  misc_RNA (1)...(19): siRNA sense strand
gcuaaggccagagaagugu

SEQ ID NO: 689521 - RNA, 19 nt, Homo sapiens
  misc_RNA (1)...(19): siRNA sense strand
caagaucuccaaauaguua

SEQ ID NO: 689522 - RNA, 19 nt, Homo sapiens
  misc_RNA (1)...(19): siRNA sense strand
aguacaagaucuccaaaua

SEQ ID NO: 689523 - RNA, 19 nt, Homo sapiens
  misc_RNA (1)...(19): siRNA sense strand
gcauuuccguuaccaagaa

SEQ ID NO: 689524 - RNA, 19 nt, Homo sapiens
  misc_RNA (1)...(19): siRNA sense strand
gcagaaagaaccuggaaga

SEQ ID NO: 689525 - RNA, 19 nt, Homo sapiens
  misc_RNA (1)...(19): siRNA sense strand
caacaaauccagacuccuu

SEQ ID NO: 689526 - RNA, 19 nt, Homo sapiens
  misc_RNA (1)...(19): siRNA sense strand
uacaagaucuccaaauagu

SEQ ID NO: 689527 - RNA, 19 nt, Homo sapiens
  misc_RNA (1)...(19): siRNA sense strand
uggaagacuugcagaaaga

SEQ ID NO: 689528 - RNA, 19 nt, Homo sapiens
  misc_RNA (1)...(19): siRNA sense strand
guacaagaucuccaaauag

SEQ ID NO: 689529 - RNA, 19 nt, Homo sapiens
  misc_RNA (1)...(19): siRNA sense strand
aauccagacuccuucagua

SEQ ID NO: 689530 - RNA, 19 nt, Homo sapiens
  misc_RNA (1)...(19): siRNA sense strand
ccagacuccuucaguacaa

SEQ ID NO: 689531 - RNA, 19 nt, Homo sapiens
  misc_RNA (1)...(19): siRNA sense strand
guggaagacuugcagaaag

SEQ ID NO: 689532 - RNA, 19 nt, Homo sapiens
  misc_RNA (1)...(19): siRNA sense strand
aagagcagauccuggaguu

SEQ ID NO: 689533 - RNA, 19 nt, Homo sapiens
  misc_RNA (1)...(19): siRNA sense strand
gguggaagacuugcagaaa

SEQ ID NO: 689534 - RNA, 19 nt, Homo sapiens
  misc_RNA (1)...(19): siRNA sense strand
ggccagagaaguguacaaa

SEQ ID NO: 689535 - RNA, 19 nt, Homo sapiens
  misc_RNA (1)...(19): siRNA sense strand
ccagagaaguguacaaaag

SEQ ID NO: 689536 - RNA, 19 nt, Homo sapiens
  misc_RNA (1)...(19): siRNA sense strand
agaaagaaccuggaagaca

SEQ ID NO: 689537 - RNA, 19 nt, Homo sapiens
  misc_RNA (1)...(19): siRNA sense strand
ccacugggagcaggaaauu

SEQ ID NO: 689538 - RNA, 19 nt, Homo sapiens
  misc_RNA (1)...(19): siRNA sense strand
ggaguugcugguccuagaa

SEQ ID NO: 689539 - RNA, 19 nt, Homo sapiens
  misc_RNA (1)...(19): siRNA sense strand
ggaagacuugcagaaagaa

SEQ ID NO: 689540 - RNA, 19 nt, Homo sapiens
  misc_RNA (1)...(19): siRNA sense strand
caguggcccugguggaaga

SEQ ID NO: 689541 - RNA, 19 nt, Homo sapiens
  misc_RNA (1)...(19): siRNA sense strand
uggaguugcugguccuaga

SEQ ID NO: 689542 - RNA, 19 nt, Homo sapiens
  misc_RNA (1)...(19): siRNA sense strand
ggcuguagcuguggaccaa

SEQ ID NO: 689543 - RNA, 19 nt, Homo sapiens
  misc_RNA (1)...(19): siRNA sense strand
gcuaaggccagagaagugu

SEQ ID NO: 689544 - RNA, 19 nt, Homo sapiens
  misc_RNA (1)...(19): siRNA sense strand
caagaucuccaaauaguua

SEQ ID NO: 689545 - RNA, 19 nt, Homo sapiens
  misc_RNA (1)...(19): siRNA sense strand
aguacaagaucuccaaaua

SEQ ID NO: 689546 - RNA, 19 nt, Homo sapiens
  misc_RNA (1)...(19): siRNA sense strand
gcauuuccguuaccaagaa

SEQ ID NO: 689547 - RNA, 19 nt, Homo sapiens
  misc_RNA (1)...(19): siRNA sense strand
gcagaaagaaccuggaaga

SEQ ID NO: 689548 - RNA, 19 nt, Homo sapiens
  misc_RNA (1)...(19): siRNA sense strand
caacaaauccagacuccuu

SEQ ID NO: 689549 - RNA, 19 nt, Homo sapiens
  misc_RNA (1)...(19): siRNA sense strand
uacaagaucuccaaauagu

SEQ ID NO: 689550 - RNA, 19 nt, Homo sapiens
  misc_RNA (1)...(19): siRNA sense strand
uggaagacuugcagaaaga

SEQ ID NO: 689551 - RNA, 19 nt, Homo sapiens
  misc_RNA (1)...(19): siRNA sense strand
guacaagaucuccaaauag

SEQ ID NO: 689552 - RNA, 19 nt, Homo sapiens
  misc_RNA (1)...(19): siRNA sense strand
aauccagacuccuucagua

SEQ ID NO: 689553 - RNA, 19 nt, Homo sapiens
  misc_RNA (1)...(19): siRNA sense strand
gggaauuccugcagagaag

SEQ ID NO: 689554 - RNA, 19 nt, Homo sapiens
  misc_RNA (1)...(19): siRNA sense strand
ccagacuccuucaguacaa

SEQ ID NO: 689555 - RNA, 19 nt, Homo sapiens
  misc_RNA (1)...(19): siRNA sense strand
guggaagacuugcagaaag

SEQ ID NO: 689556 - RNA, 19 nt, Homo sapiens
  misc_RNA (1)...(19): siRNA sense strand
ugauguggcucugggaauu

SEQ ID NO: 689557 - RNA, 19 nt, Homo sapiens
  misc_RNA (1)...(19): siRNA sense strand
aagagcagauccuggaguu

SEQ ID NO: 689558 - RNA, 19 nt, Homo sapiens
  misc_RNA (1)...(19): siRNA sense strand
gguggaagacuugcagaaa

SEQ ID NO: 689559 - RNA, 19 nt, Homo sapiens
  misc_RNA (1)...(19): siRNA sense strand
ggccagagaaguguacaaa

SEQ ID NO: 689560 - RNA, 19 nt, Homo sapiens
  misc_RNA (1)...(19): siRNA sense strand
ccagagaaguguacaaaag

SEQ ID NO: 689561 - RNA, 19 nt, Homo sapiens
  misc_RNA (1)...(19): siRNA sense strand
agaaagaaccuggaagaca

SEQ ID NO: 689562 - RNA, 19 nt, Homo sapiens
  misc_RNA (1)...(19): siRNA sense strand
ccacugggagcaggaaauu

SEQ ID NO: 689563 - RNA, 19 nt, Homo sapiens
  misc_RNA (1)...(19): siRNA sense strand
ggaguugcugguccuagaa

SEQ ID NO: 689564 - RNA, 19 nt, Homo sapiens
  misc_RNA (1)...(19): siRNA sense strand
ggaagacuugcagaaagaa

SEQ ID NO: 689565 - RNA, 19 nt, Homo sapiens
  misc_RNA (1)...(19): siRNA sense strand
caguggcccugguggaaga

SEQ ID NO: 689566 - RNA, 19 nt, Homo sapiens
  misc_RNA (1)...(19): siRNA sense strand
uggaguugcugguccuaga

SEQ ID NO: 689567 - RNA, 19 nt, Homo sapiens
  misc_RNA (1)...(19): siRNA sense strand
ggcuguagcuguggaccaa

SEQ ID NO: 689568 - RNA, 19 nt, Homo sapiens
  misc_RNA (1)...(19): siRNA sense strand
gcuaaggccagagaagugu

SEQ ID NO: 689569 - RNA, 19 nt, Homo sapiens
  misc_RNA (1)...(19): siRNA sense strand
ggaauuccugcagagaaga

SEQ ID NO: 689570 - RNA, 19 nt, Homo sapiens
  misc_RNA (1)...(19): siRNA sense strand
ucaaggagcuguuggauuu

SEQ ID NO: 689571 - RNA, 19 nt, Homo sapiens
  misc_RNA (1)...(19): siRNA sense strand
gaaagugguucacaaggua

SEQ ID NO: 689572 - RNA, 19 nt, Homo sapiens
  misc_RNA (1)...(19): siRNA sense strand
gcaaggcccuccaggauuu

SEQ ID NO: 689573 - RNA, 19 nt, Homo sapiens
  misc_RNA (1)...(19): siRNA sense strand
ggagagaagucuuauggaa

SEQ ID NO: 689574 - RNA, 19 nt, Homo sapiens
  misc_RNA (1)...(19): siRNA sense strand
aggaagagauggacuaaua

SEQ ID NO: 689575 - RNA, 19 nt, Homo sapiens
  misc_RNA (1)...(19): siRNA sense strand
gaacaaggccuacaaggau

SEQ ID NO: 689576 - RNA, 19 nt, Homo sapiens
  misc_RNA (1)...(19): siRNA sense strand
gaaagguccuccuggauca

SEQ ID NO: 689577 - RNA, 19 nt, Homo sapiens
  misc_RNA (1)...(19): siRNA sense strand
gggcuuccgugguguaaua

SEQ ID NO: 689578 - RNA, 19 nt, Homo sapiens
  misc_RNA (1)...(19): siRNA sense strand
cuacaaggcuccaaagguu

SEQ ID NO: 689579 - RNA, 19 nt, Homo sapiens
  misc_RNA (1)...(19): siRNA sense strand
gccaagaggugacaaagga

SEQ ID NO: 689580 - RNA, 19 nt, Homo sapiens
  misc_RNA (1)...(19): siRNA sense strand
ggacggaguaccagguuua

SEQ ID NO: 689581 - RNA, 19 nt, Homo sapiens
  misc_RNA (1)...(19): siRNA sense strand
gcacaaaggauuucuugga

SEQ ID NO: 689582 - RNA, 19 nt, Homo sapiens
  misc_RNA (1)...(19): siRNA sense strand
ggacuaauaggcaauauag

SEQ ID NO: 689583 - RNA, 19 nt, Homo sapiens
  misc_RNA (1)...(19): siRNA sense strand
ccagguaguuucaaaggaa

SEQ ID NO: 689584 - RNA, 19 nt, Homo sapiens
  misc_RNA (1)...(19): siRNA sense strand
gaaucacccugcccuguau

SEQ ID NO: 689585 - RNA, 19 nt, Homo sapiens
  misc_RNA (1)...(19): siRNA sense strand
ggaaucacccugcccugua

SEQ ID NO: 689586 - RNA, 19 nt, Homo sapiens
  misc_RNA (1)...(19): siRNA sense strand
uaaaggcaaggauggauua

SEQ ID NO: 689587 - RNA, 19 nt, Homo sapiens
  misc_RNA (1)...(19): siRNA sense strand
uaacagggcacaaaggauu

SEQ ID NO: 689588 - RNA, 19 nt, Homo sapiens
  misc_RNA (1)...(19): siRNA sense strand
gagagaagucuuauggaaa

SEQ ID NO: 689589 - RNA, 19 nt, Homo sapiens
  misc_RNA (1)...(19): siRNA sense strand
ggaacaaggccuacaagga

SEQ ID NO: 689590 - RNA, 19 nt, Homo sapiens
  misc_RNA (1)...(19): siRNA sense strand
gauuggcaguccaggcuua

SEQ ID NO: 689591 - RNA, 19 nt, Homo sapiens
  misc_RNA (1)...(19): siRNA sense strand
uaagggagaccaaggaauu

SEQ ID NO: 689592 - RNA, 19 nt, Homo sapiens
  misc_RNA (1)...(19): siRNA sense strand
cggaauaccuaguccaaga

SEQ ID NO: 689593 - RNA, 19 nt, Homo sapiens
  misc_RNA (1)...(19): siRNA sense strand
gaaccaauucucaguacaa

SEQ ID NO: 689594 - RNA, 19 nt, Homo sapiens
  misc_RNA (1)...(19): siRNA sense strand
caaaggaguuaguggaaag

SEQ ID NO: 689595 - RNA, 19 nt, Homo sapiens
  misc_RNA (1)...(19): siRNA sense strand
acaaggagcacccggauuu

SEQ ID NO: 689596 - RNA, 19 nt, Homo sapiens
  misc_RNA (1)...(19): siRNA sense strand
ggaaagaaaggaacaagag

SEQ ID NO: 689597 - RNA, 19 nt, Homo sapiens
  misc_RNA (1)...(19): siRNA sense strand
ccuccuggaucaauuguaa

SEQ ID NO: 689598 - RNA, 19 nt, Homo sapiens
  misc_RNA (1)...(19): siRNA sense strand
caugggaguuccuggcuuu

SEQ ID NO: 689599 - RNA, 19 nt, Homo sapiens
  misc_RNA (1)...(19): siRNA sense strand
ccaaaggcuucccuggauu

SEQ ID NO: 689600 - RNA, 19 nt, Homo sapiens
  misc_RNA (1)...(19): siRNA sense strand
guccagaauuugagacuga

SEQ ID NO: 689601 - RNA, 19 nt, Homo sapiens
  misc_RNA (1)...(19): siRNA sense strand
gaaaggauccaagggugaa

SEQ ID NO: 689602 - RNA, 19 nt, Homo sapiens
  misc_RNA (1)...(19): siRNA sense strand
ggaguugccugugucugaa

SEQ ID NO: 689603 - RNA, 19 nt, Homo sapiens
  misc_RNA (1)...(19): siRNA sense strand
ccucugggaucacagguuu

SEQ ID NO: 689604 - RNA, 19 nt, Homo sapiens
  misc_RNA (1)...(19): siRNA sense strand
gcugugaucucagguaauc

SEQ ID NO: 689605 - RNA, 19 nt, Homo sapiens
  misc_RNA (1)...(19): siRNA sense strand
gaacaagaggcaagaaagg

SEQ ID NO: 689606 - RNA, 19 nt, Homo sapiens
  misc_RNA (1)...(19): siRNA sense strand
gcaccaugcccuucaucua

SEQ ID NO: 689607 - RNA, 19 nt, Homo sapiens
  misc_RNA (1)...(19): siRNA sense strand
agagaagucuuauggaaag

SEQ ID NO: 689608 - RNA, 19 nt, Homo sapiens
  misc_RNA (1)...(19): siRNA sense strand
ucaaaggaguuaguggaaa

SEQ ID NO: 689609 - RNA, 19 nt, Homo sapiens
  misc_RNA (1)...(19): siRNA sense strand
gaaggggucuguuggauuc

SEQ ID NO: 689610 - RNA, 19 nt, Homo sapiens
  misc_RNA (1)...(19): siRNA sense strand
caaaggcuucccuggauuu

SEQ ID NO: 689611 - RNA, 19 nt, Homo sapiens
  misc_RNA (1)...(19): siRNA sense strand
cuggauggcuguaauggaa

SEQ ID NO: 689612 - RNA, 19 nt, Homo sapiens
  misc_RNA (1)...(19): siRNA sense strand
ugcagaagcuguccagguu

SEQ ID NO: 689613 - RNA, 19 nt, Homo sapiens
  misc_RNA (1)...(19): siRNA sense strand
gcaauugggccucuaggau

SEQ ID NO: 689614 - RNA, 19 nt, Homo sapiens
  misc_RNA (1)...(19): siRNA sense strand
cguccaaugucaaaccuuu

SEQ ID NO: 689615 - RNA, 19 nt, Homo sapiens
  misc_RNA (1)...(19): siRNA sense strand
uaaaggagccagaggagau

SEQ ID NO: 689616 - RNA, 19 nt, Homo sapiens
  misc_RNA (1)...(19): siRNA sense strand
gugcugugaucucagguaa

SEQ ID NO: 689617 - RNA, 19 nt, Homo sapiens
  misc_RNA (1)...(19): siRNA sense strand
gaucaauuguaaagaaagg

SEQ ID NO: 689618 - RNA, 19 nt, Homo sapiens
  misc_RNA (1)...(19): siRNA sense strand
aaaaggauauccaggaauu

SEQ ID NO: 689619 - RNA, 19 nt, Homo sapiens
  misc_RNA (1)...(19): siRNA sense strand
caagacguccaaugucaaa

SEQ ID NO: 689620 - RNA, 19 nt, Homo sapiens
  misc_RNA (1)...(19): siRNA sense strand
ggaaauccaggccuaguag

SEQ ID NO: 689621 - RNA, 19 nt, Homo sapiens
  misc_RNA (1)...(19): siRNA sense strand
ugacaucuuuggugcugaa

SEQ ID NO: 689622 - RNA, 19 nt, Homo sapiens
  misc_RNA (1)...(19): siRNA sense strand
gaggagaggcagcaguuug

SEQ ID NO: 689623 - RNA, 19 nt, Homo sapiens
  misc_RNA (1)...(19): siRNA sense strand
gcaaugauaaaucuuacug

SEQ ID NO: 689624 - RNA, 19 nt, Homo sapiens
  misc_RNA (1)...(19): siRNA sense strand
ucaacgaggugugccacua

SEQ ID NO: 689625 - RNA, 19 nt, Homo sapiens
  misc_RNA (1)...(19): siRNA sense strand
acaaggcuccaaagguuua

SEQ ID NO: 689626 - RNA, 19 nt, Homo sapiens
  misc_RNA (1)...(19): siRNA sense strand
gccagacaguugaaauuuc

SEQ ID NO: 689627 - RNA, 19 nt, Homo sapiens
  misc_RNA (1)...(19): siRNA sense strand
ggagaaagugguucacaag

SEQ ID NO: 689628 - RNA, 19 nt, Homo sapiens
  misc_RNA (1)...(19): siRNA sense strand
gggaguugccugugucuga

SEQ ID NO: 689629 - RNA, 19 nt, Homo sapiens
  misc_RNA (1)...(19): siRNA sense strand
ggaacaagaggcaagaaag

SEQ ID NO: 689630 - RNA, 19 nt, Homo sapiens
  misc_RNA (1)...(19): siRNA sense strand
cuggaucaauuguaaagaa

SEQ ID NO: 689631 - RNA, 19 nt, Homo sapiens
  misc_RNA (1)...(19): siRNA sense strand
ccuagggccucagggauuu

SEQ ID NO: 689632 - RNA, 19 nt, Homo sapiens
  misc_RNA (1)...(19): siRNA sense strand
gagaggagaaccaggacuu

SEQ ID NO: 689633 - RNA, 19 nt, Homo sapiens
  misc_RNA (1)...(19): siRNA sense strand
ggccagacaguugaaauuu

SEQ ID NO: 689634 - RNA, 19 nt, Homo sapiens
  misc_RNA (1)...(19): siRNA sense strand
ggacgaccuggaccaauug

SEQ ID NO: 689635 - RNA, 19 nt, Homo sapiens
  misc_RNA (1)...(19): siRNA sense strand
ggcauuaucaaaggaguua

SEQ ID NO: 689636 - RNA, 19 nt, Homo sapiens
  misc_RNA (1)...(19): siRNA sense strand
aaaccuaggccucaaagga

SEQ ID NO: 689637 - RNA, 19 nt, Homo sapiens
  misc_RNA (1)...(19): siRNA sense strand
gaacaagguccaaaaggaa

SEQ ID NO: 689638 - RNA, 19 nt, Homo sapiens
  misc_RNA (1)...(19): siRNA sense strand
cugaaacucuacacaacaa

SEQ ID NO: 689639 - RNA, 19 nt, Homo sapiens
  misc_RNA (1)...(19): siRNA sense strand
gggaguuccuggcuuucuu

SEQ ID NO: 689640 - RNA, 19 nt, Homo sapiens
  misc_RNA (1)...(19): siRNA sense strand
uggaauuccuggaccuaaa

SEQ ID NO: 689641 - RNA, 19 nt, Homo sapiens
  misc_RNA (1)...(19): siRNA sense strand
ggaagagauggacuaauag

SEQ ID NO: 689642 - RNA, 19 nt, Homo sapiens
  misc_RNA (1)...(19): siRNA sense strand
agaaagugguucacaaggu

SEQ ID NO: 689643 - RNA, 19 nt, Homo sapiens
  misc_RNA (1)...(19): siRNA sense strand
gggcacaaaggauuucuug

SEQ ID NO: 689644 - RNA, 19 nt, Homo sapiens
  misc_RNA (1)...(19): siRNA sense strand
gccagggaguccaggauug

SEQ ID NO: 689645 - RNA, 19 nt, Homo sapiens
  misc_RNA (1)...(19): siRNA sense strand
gggaaccaauucucaguac

SEQ ID NO: 689646 - RNA, 19 nt, Homo sapiens
  misc_RNA (1)...(19): siRNA sense strand
uggaaucacuggcccacaa

SEQ ID NO: 689647 - RNA, 19 nt, Homo sapiens
  misc_RNA (1)...(19): siRNA sense strand
gacugaaacucuacacaac

SEQ ID NO: 689648 - RNA, 19 nt, Homo sapiens
  misc_RNA (1)...(19): siRNA sense strand
ccacuacuuugcaaacaag

SEQ ID NO: 689649 - RNA, 19 nt, Homo sapiens
  misc_RNA (1)...(19): siRNA sense strand
gaccaaggaauuccagguu

SEQ ID NO: 689650 - RNA, 19 nt, Homo sapiens
  misc_RNA (1)...(19): siRNA sense strand
cccaaaggcuucccuggau

SEQ ID NO: 689651 - RNA, 19 nt, Homo sapiens
  misc_RNA (1)...(19): siRNA sense strand
ggguuuaccuggccugaag

SEQ ID NO: 689652 - RNA, 19 nt, Homo sapiens
  misc_RNA (1)...(19): siRNA sense strand
cagccugggucaaguggaa

SEQ ID NO: 689653 - RNA, 19 nt, Homo sapiens
  misc_RNA (1)...(19): siRNA sense strand
ggaaccaauucucaguaca

SEQ ID NO: 689654 - RNA, 19 nt, Homo sapiens
  misc_RNA (1)...(19): siRNA sense strand
cuggagagcuggaauucau

SEQ ID NO: 689655 - RNA, 19 nt, Homo sapiens
  misc_RNA (1)...(19): siRNA sense strand
gggacagccuggcgaaucu

SEQ ID NO: 689656 - RNA, 19 nt, Homo sapiens
  misc_RNA (1)...(19): siRNA sense strand
aggacgaccuggaccaauu

SEQ ID NO: 689657 - RNA, 19 nt, Homo sapiens
  misc_RNA (1)...(19): siRNA sense strand
cagcgggagagaagucuua

SEQ ID NO: 689658 - RNA, 19 nt, Homo sapiens
  misc_RNA (1)...(19): siRNA sense strand
cggauuuccuggagcugua

SEQ ID NO: 689659 - RNA, 19 nt, Homo sapiens
  misc_RNA (1)...(19): siRNA sense strand
gcuccacacucgagucagu

SEQ ID NO: 689660 - RNA, 19 nt, Homo sapiens
  misc_RNA (1)...(19): siRNA sense strand
ggccacuccuuucaucgaa

SEQ ID NO: 689661 - RNA, 19 nt, Homo sapiens
  misc_RNA (1)...(19): siRNA sense strand
gaagagauggacuaauagg

SEQ ID NO: 689662 - RNA, 19 nt, Homo sapiens
  misc_RNA (1)...(19): siRNA sense strand
uccaagacguccaauguca

SEQ ID NO: 689663 - RNA, 19 nt, Homo sapiens
  misc_RNA (1)...(19): siRNA sense strand
gggagccacuggugacauc

SEQ ID NO: 689664 - RNA, 19 nt, Homo sapiens
  misc_RNA (1)...(19): siRNA sense strand
agugggagcugucaguguu

SEQ ID NO: 689665 - RNA, 19 nt, Homo sapiens
  misc_RNA (1)...(19): siRNA sense strand
gccacuacuuugcaaacaa

SEQ ID NO: 689666 - RNA, 19 nt, Homo sapiens
  misc_RNA (1)...(19): siRNA sense strand
ccacuccuuucaucgaaug

SEQ ID NO: 689667 - RNA, 19 nt, Homo sapiens
  misc_RNA (1)...(19): siRNA sense strand
gcgcaaugauaaaucuuac

SEQ ID NO: 689668 - RNA, 19 nt, Homo sapiens
  misc_RNA (1)...(19): siRNA sense strand
ggcgcaaugauaaaucuua

SEQ ID NO: 689669 - RNA, 19 nt, Homo sapiens
  misc_RNA (1)...(19): siRNA sense strand
caacgaggugugccacuau

SEQ ID NO: 689670 - RNA, 19 nt, Homo sapiens
  misc_RNA (1)...(19): siRNA sense strand
ucaaggagcuguuggauuu

SEQ ID NO: 689671 - RNA, 19 nt, Homo sapiens
  misc_RNA (1)...(19): siRNA sense strand
gaaagugguucacaaggua

SEQ ID NO: 689672 - RNA, 19 nt, Homo sapiens
  misc_RNA (1)...(19): siRNA sense strand
gcaaggcccuccaggauuu

SEQ ID NO: 689673 - RNA, 19 nt, Homo sapiens
  misc_RNA (1)...(19): siRNA sense strand
ggagagaagucuuauggaa

SEQ ID NO: 689674 - RNA, 19 nt, Homo sapiens
  misc_RNA (1)...(19): siRNA sense strand
aggaagagauggacuaaua

SEQ ID NO: 689675 - RNA, 19 nt, Homo sapiens
  misc_RNA (1)...(19): siRNA sense strand
gaacaaggccuacaaggau

SEQ ID NO: 689676 - RNA, 19 nt, Homo sapiens
  misc_RNA (1)...(19): siRNA sense strand
gaaagguccuccuggauca

SEQ ID NO: 689677 - RNA, 19 nt, Homo sapiens
  misc_RNA (1)...(19): siRNA sense strand
gggcuuccgugguguaaua

SEQ ID NO: 689678 - RNA, 19 nt, Homo sapiens
  misc_RNA (1)...(19): siRNA sense strand
cuacaaggcuccaaagguu

SEQ ID NO: 689679 - RNA, 19 nt, Homo sapiens
  misc_RNA (1)...(19): siRNA sense strand
gccaagaggugacaaagga

SEQ ID NO: 689680 - RNA, 19 nt, Homo sapiens
  misc_RNA (1)...(19): siRNA sense strand
ggacggaguaccagguuua

SEQ ID NO: 689681 - RNA, 19 nt, Homo sapiens
  misc_RNA (1)...(19): siRNA sense strand
gcacaaaggauuucuugga

SEQ ID NO: 689682 - RNA, 19 nt, Homo sapiens
  misc_RNA (1)...(19): siRNA sense strand
ggacuaauaggcaauauag

SEQ ID NO: 689683 - RNA, 19 nt, Homo sapiens
  misc_RNA (1)...(19): siRNA sense strand
ccagguaguuucaaaggaa

SEQ ID NO: 689684 - RNA, 19 nt, Homo sapiens
  misc_RNA (1)...(19): siRNA sense strand
gaaucacccugcccuguau

SEQ ID NO: 689685 - RNA, 19 nt, Homo sapiens
  misc_RNA (1)...(19): siRNA sense strand
ggaaucacccugcccugua

SEQ ID NO: 689686 - RNA, 19 nt, Homo sapiens
  misc_RNA (1)...(19): siRNA sense strand
uaaaggcaaggauggauua

SEQ ID NO: 689687 - RNA, 19 nt, Homo sapiens
  misc_RNA (1)...(19): siRNA sense strand
uaacagggcacaaaggauu

SEQ ID NO: 689688 - RNA, 19 nt, Homo sapiens
  misc_RNA (1)...(19): siRNA sense strand
gagagaagucuuauggaaa

SEQ ID NO: 689689 - RNA, 19 nt, Homo sapiens
  misc_RNA (1)...(19): siRNA sense strand
ggaacaaggccuacaagga

SEQ ID NO: 689690 - RNA, 19 nt, Homo sapiens
  misc_RNA (1)...(19): siRNA sense strand
gauuggcaguccaggcuua

SEQ ID NO: 689691 - RNA, 19 nt, Homo sapiens
  misc_RNA (1)...(19): siRNA sense strand
uaagggagaccaaggaauu

SEQ ID NO: 689692 - RNA, 19 nt, Homo sapiens
  misc_RNA (1)...(19): siRNA sense strand
cggaauaccuaguccaaga

SEQ ID NO: 689693 - RNA, 19 nt, Homo sapiens
  misc_RNA (1)...(19): siRNA sense strand
gaaccaauucucaguacaa

SEQ ID NO: 689694 - RNA, 19 nt, Homo sapiens
  misc_RNA (1)...(19): siRNA sense strand
caaaggaguuaguggaaag

SEQ ID NO: 689695 - RNA, 19 nt, Homo sapiens
  misc_RNA (1)...(19): siRNA sense strand
acaaggagcacccggauuu

SEQ ID NO: 689696 - RNA, 19 nt, Homo sapiens
  misc_RNA (1)...(19): siRNA sense strand
ggaaagaaaggaacaagag

SEQ ID NO: 689697 - RNA, 19 nt, Homo sapiens
  misc_RNA (1)...(19): siRNA sense strand
ccuccuggaucaauuguaa

SEQ ID NO: 689698 - RNA, 19 nt, Homo sapiens
  misc_RNA (1)...(19): siRNA sense strand
caugggaguuccuggcuuu

SEQ ID NO: 689699 - RNA, 19 nt, Homo sapiens
  misc_RNA (1)...(19): siRNA sense strand
ccaaaggcuucccuggauu

SEQ ID NO: 689700 - RNA, 19 nt, Homo sapiens
  misc_RNA (1)...(19): siRNA sense strand
guccagaauuugagacuga

SEQ ID NO: 689701 - RNA, 19 nt, Homo sapiens
  misc_RNA (1)...(19): siRNA sense strand
gaaaggauccaagggugaa

SEQ ID NO: 689702 - RNA, 19 nt, Homo sapiens
  misc_RNA (1)...(19): siRNA sense strand
ggaguugccugugucugaa

SEQ ID NO: 689703 - RNA, 19 nt, Homo sapiens
  misc_RNA (1)...(19): siRNA sense strand
ccucugggaucacagguuu

SEQ ID NO: 689704 - RNA, 19 nt, Homo sapiens
  misc_RNA (1)...(19): siRNA sense strand
gcugugaucucagguaauc

SEQ ID NO: 689705 - RNA, 19 nt, Homo sapiens
  misc_RNA (1)...(19): siRNA sense strand
gaacaagaggcaagaaagg

SEQ ID NO: 689706 - RNA, 19 nt, Homo sapiens
  misc_RNA (1)...(19): siRNA sense strand
gcaccaugcccuucaucua

SEQ ID NO: 689707 - RNA, 19 nt, Homo sapiens
  misc_RNA (1)...(19): siRNA sense strand
agagaagucuuauggaaag

SEQ ID NO: 689708 - RNA, 19 nt, Homo sapiens
  misc_RNA (1)...(19): siRNA sense strand
ucaaaggaguuaguggaaa

SEQ ID NO: 689709 - RNA, 19 nt, Homo sapiens
  misc_RNA (1)...(19): siRNA sense strand
gaaggggucuguuggauuc

SEQ ID NO: 689710 - RNA, 19 nt, Homo sapiens
  misc_RNA (1)...(19): siRNA sense strand
caaaggcuucccuggauuu

SEQ ID NO: 689711 - RNA, 19 nt, Homo sapiens
  misc_RNA (1)...(19): siRNA sense strand
cuggauggcuguaauggaa

SEQ ID NO: 689712 - RNA, 19 nt, Homo sapiens
  misc_RNA (1)...(19): siRNA sense strand
ugcagaagcuguccagguu

SEQ ID NO: 689713 - RNA, 19 nt, Homo sapiens
  misc_RNA (1)...(19): siRNA sense strand
gcaauugggccucuaggau

SEQ ID NO: 689714 - RNA, 19 nt, Homo sapiens
  misc_RNA (1)...(19): siRNA sense strand
cguccaaugucaaaccuuu

SEQ ID NO: 689715 - RNA, 19 nt, Homo sapiens
  misc_RNA (1)...(19): siRNA sense strand
uaaaggagccagaggagau

SEQ ID NO: 689716 - RNA, 19 nt, Homo sapiens
  misc_RNA (1)...(19): siRNA sense strand
gugcugugaucucagguaa

SEQ ID NO: 689717 - RNA, 19 nt, Homo sapiens
  misc_RNA (1)...(19): siRNA sense strand
gaucaauuguaaagaaagg

SEQ ID NO: 689718 - RNA, 19 nt, Homo sapiens
  misc_RNA (1)...(19): siRNA sense strand
aaaaggauauccaggaauu

SEQ ID NO: 689719 - RNA, 19 nt, Homo sapiens
  misc_RNA (1)...(19): siRNA sense strand
caagacguccaaugucaaa

SEQ ID NO: 689720 - RNA, 19 nt, Homo sapiens
  misc_RNA (1)...(19): siRNA sense strand
ggaaauccaggccuaguag

SEQ ID NO: 689721 - RNA, 19 nt, Homo sapiens
  misc_RNA (1)...(19): siRNA sense strand
ugacaucuuuggugcugaa

SEQ ID NO: 689722 - RNA, 19 nt, Homo sapiens
  misc_RNA (1)...(19): siRNA sense strand
gaggagaggcagcaguuug

SEQ ID NO: 689723 - RNA, 19 nt, Homo sapiens
  misc_RNA (1)...(19): siRNA sense strand
gcaaugauaaaucuuacug

SEQ ID NO: 689724 - RNA, 19 nt, Homo sapiens
  misc_RNA (1)...(19): siRNA sense strand
ucaacgaggugugccacua

SEQ ID NO: 689725 - RNA, 19 nt, Homo sapiens
  misc_RNA (1)...(19): siRNA sense strand
acaaggcuccaaagguuua

SEQ ID NO: 689726 - RNA, 19 nt, Homo sapiens
  misc_RNA (1)...(19): siRNA sense strand
gccagacaguugaaauuuc

SEQ ID NO: 689727 - RNA, 19 nt, Homo sapiens
  misc_RNA (1)...(19): siRNA sense strand
ggagaaagugguucacaag

SEQ ID NO: 689728 - RNA, 19 nt, Homo sapiens
  misc_RNA (1)...(19): siRNA sense strand
gggaguugccugugucuga

SEQ ID NO: 689729 - RNA, 19 nt, Homo sapiens
  misc_RNA (1)...(19): siRNA sense strand
ggaacaagaggcaagaaag

SEQ ID NO: 689730 - RNA, 19 nt, Homo sapiens
  misc_RNA (1)...(19): siRNA sense strand
cuggaucaauuguaaagaa

SEQ ID NO: 689731 - RNA, 19 nt, Homo sapiens
  misc_RNA (1)...(19): siRNA sense strand
ccuagggccucagggauuu

SEQ ID NO: 689732 - RNA, 19 nt, Homo sapiens
  misc_RNA (1)...(19): siRNA sense strand
gagaggagaaccaggacuu

SEQ ID NO: 689733 - RNA, 19 nt, Homo sapiens
  misc_RNA (1)...(19): siRNA sense strand
ggccagacaguugaaauuu

SEQ ID NO: 689734 - RNA, 19 nt, Homo sapiens
  misc_RNA (1)...(19): siRNA sense strand
ggacgaccuggaccaauug

SEQ ID NO: 689735 - RNA, 19 nt, Homo sapiens
  misc_RNA (1)...(19): siRNA sense strand
ggcauuaucaaaggaguua

SEQ ID NO: 689736 - RNA, 19 nt, Homo sapiens
  misc_RNA (1)...(19): siRNA sense strand
aaaccuaggccucaaagga

SEQ ID NO: 689737 - RNA, 19 nt, Homo sapiens
  misc_RNA (1)...(19): siRNA sense strand
gaacaagguccaaaaggaa

SEQ ID NO: 689738 - RNA, 19 nt, Homo sapiens
  misc_RNA (1)...(19): siRNA sense strand
cugaaacucuacacaacaa

SEQ ID NO: 689739 - RNA, 19 nt, Homo sapiens
  misc_RNA (1)...(19): siRNA sense strand
gggaguuccuggcuuucuu

SEQ ID NO: 689740 - RNA, 19 nt, Homo sapiens
  misc_RNA (1)...(19): siRNA sense strand
uggaauuccuggaccuaaa

SEQ ID NO: 689741 - RNA, 19 nt, Homo sapiens
  misc_RNA (1)...(19): siRNA sense strand
ggaagagauggacuaauag

SEQ ID NO: 689742 - RNA, 19 nt, Homo sapiens
  misc_RNA (1)...(19): siRNA sense strand
agaaagugguucacaaggu

SEQ ID NO: 689743 - RNA, 19 nt, Homo sapiens
  misc_RNA (1)...(19): siRNA sense strand
gggcacaaaggauuucuug

SEQ ID NO: 689744 - RNA, 19 nt, Homo sapiens
  misc_RNA (1)...(19): siRNA sense strand
gccagggaguccaggauug

SEQ ID NO: 689745 - RNA, 19 nt, Homo sapiens
  misc_RNA (1)...(19): siRNA sense strand
gggaaccaauucucaguac

SEQ ID NO: 689746 - RNA, 19 nt, Homo sapiens
  misc_RNA (1)...(19): siRNA sense strand
uggaaucacuggcccacaa

SEQ ID NO: 689747 - RNA, 19 nt, Homo sapiens
  misc_RNA (1)...(19): siRNA sense strand
gacugaaacucuacacaac

SEQ ID NO: 689748 - RNA, 19 nt, Homo sapiens
  misc_RNA (1)...(19): siRNA sense strand
ccacuacuuugcaaacaag

SEQ ID NO: 689749 - RNA, 19 nt, Homo sapiens
  misc_RNA (1)...(19): siRNA sense strand
gaccaaggaauuccagguu

SEQ ID NO: 689750 - RNA, 19 nt, Homo sapiens
  misc_RNA (1)...(19): siRNA sense strand
cccaaaggcuucccuggau

SEQ ID NO: 689751 - RNA, 19 nt, Homo sapiens
  misc_RNA (1)...(19): siRNA sense strand
ggguuuaccuggccugaag

SEQ ID NO: 689752 - RNA, 19 nt, Homo sapiens
  misc_RNA (1)...(19): siRNA sense strand
cagccugggucaaguggaa

SEQ ID NO: 689753 - RNA, 19 nt, Homo sapiens
  misc_RNA (1)...(19): siRNA sense strand
ggaaccaauucucaguaca

SEQ ID NO: 689754 - RNA, 19 nt, Homo sapiens
  misc_RNA (1)...(19): siRNA sense strand
cuggagagcuggaauucau

SEQ ID NO: 689755 - RNA, 19 nt, Homo sapiens
  misc_RNA (1)...(19): siRNA sense strand
gggacagccuggcgaaucu

SEQ ID NO: 689756 - RNA, 19 nt, Homo sapiens
  misc_RNA (1)...(19): siRNA sense strand
aggacgaccuggaccaauu

SEQ ID NO: 689757 - RNA, 19 nt, Homo sapiens
  misc_RNA (1)...(19): siRNA sense strand
cagcgggagagaagucuua

SEQ ID NO: 689758 - RNA, 19 nt, Homo sapiens
  misc_RNA (1)...(19): siRNA sense strand
cggauuuccuggagcugua

SEQ ID NO: 689759 - RNA, 19 nt, Homo sapiens
  misc_RNA (1)...(19): siRNA sense strand
gcuccacacucgagucagu

SEQ ID NO: 689760 - RNA, 19 nt, Homo sapiens
  misc_RNA (1)...(19): siRNA sense strand
ggccacuccuuucaucgaa

SEQ ID NO: 689761 - RNA, 19 nt, Homo sapiens
  misc_RNA (1)...(19): siRNA sense strand
gaagagauggacuaauagg

SEQ ID NO: 689762 - RNA, 19 nt, Homo sapiens
  misc_RNA (1)...(19): siRNA sense strand
uccaagacguccaauguca

SEQ ID NO: 689763 - RNA, 19 nt, Homo sapiens
  misc_RNA (1)...(19): siRNA sense strand
gggagccacuggugacauc

SEQ ID NO: 689764 - RNA, 19 nt, Homo sapiens
  misc_RNA (1)...(19): siRNA sense strand
agugggagcugucaguguu

SEQ ID NO: 689765 - RNA, 19 nt, Homo sapiens
  misc_RNA (1)...(19): siRNA sense strand
gccacuacuuugcaaacaa

SEQ ID NO: 689766 - RNA, 19 nt, Homo sapiens
  misc_RNA (1)...(19): siRNA sense strand
ccacuccuuucaucgaaug

SEQ ID NO: 689767 - RNA, 19 nt, Homo sapiens
  misc_RNA (1)...(19): siRNA sense strand
gcgcaaugauaaaucuuac

SEQ ID NO: 689768 - RNA, 19 nt, Homo sapiens
  misc_RNA (1)...(19): siRNA sense strand
ggcgcaaugauaaaucuua

SEQ ID NO: 689769 - RNA, 19 nt, Homo sapiens
  misc_RNA (1)...(19): siRNA sense strand
caacgaggugugccacuau

SEQ ID NO: 689770 - RNA, 19 nt, Homo sapiens
  misc_RNA (1)...(19): siRNA sense strand
gcacuuacacucuguuuaa

SEQ ID NO: 689771 - RNA, 19 nt, Homo sapiens
  misc_RNA (1)...(19): siRNA sense strand
gaacaaagaaggagagauc

SEQ ID NO: 689772 - RNA, 19 nt, Homo sapiens
  misc_RNA (1)...(19): siRNA sense strand
gcaaccaugugaagaagaa

SEQ ID NO: 689773 - RNA, 19 nt, Homo sapiens
  misc_RNA (1)...(19): siRNA sense strand
gaacaagccugcagcucau

SEQ ID NO: 689774 - RNA, 19 nt, Homo sapiens
  misc_RNA (1)...(19): siRNA sense strand
gaacagugagggauacuug

SEQ ID NO: 689775 - RNA, 19 nt, Homo sapiens
  misc_RNA (1)...(19): siRNA sense strand
cagcuuaaggguauaguua

SEQ ID NO: 689776 - RNA, 19 nt, Homo sapiens
  misc_RNA (1)...(19): siRNA sense strand
gcaaauccaugagccacaa

SEQ ID NO: 689777 - RNA, 19 nt, Homo sapiens
  misc_RNA (1)...(19): siRNA sense strand
gaaaggcaaccaugugaag

SEQ ID NO: 689778 - RNA, 19 nt, Homo sapiens
  misc_RNA (1)...(19): siRNA sense strand
gaaaguggccauguacaag

SEQ ID NO: 689779 - RNA, 19 nt, Homo sapiens
  misc_RNA (1)...(19): siRNA sense strand
aaggagagaucaugaaagg

SEQ ID NO: 689780 - RNA, 19 nt, Homo sapiens
  misc_RNA (1)...(19): siRNA sense strand
caaagaaggagagaucaug

SEQ ID NO: 689781 - RNA, 19 nt, Homo sapiens
  misc_RNA (1)...(19): siRNA sense strand
caaugaacagugagggaua

SEQ ID NO: 689782 - RNA, 19 nt, Homo sapiens
  misc_RNA (1)...(19): siRNA sense strand
ggugguaucugggucugaa

SEQ ID NO: 689783 - RNA, 19 nt, Homo sapiens
  misc_RNA (1)...(19): siRNA sense strand
ugugacauauucaucaaug

SEQ ID NO: 689784 - RNA, 19 nt, Homo sapiens
  misc_RNA (1)...(19): siRNA sense strand
agaaggagagaucaugaaa

SEQ ID NO: 689785 - RNA, 19 nt, Homo sapiens
  misc_RNA (1)...(19): siRNA sense strand
ugaaaguggccauguacaa

SEQ ID NO: 689786 - RNA, 19 nt, Homo sapiens
  misc_RNA (1)...(19): siRNA sense strand
aagaugaggacagcacuua

SEQ ID NO: 689787 - RNA, 19 nt, Homo sapiens
  misc_RNA (1)...(19): siRNA sense strand
aaagaaggagagaucauga

SEQ ID NO: 689788 - RNA, 19 nt, Homo sapiens
  misc_RNA (1)...(19): siRNA sense strand
guaucugggucugaacaaa

SEQ ID NO: 689789 - RNA, 19 nt, Homo sapiens
  misc_RNA (1)...(19): siRNA sense strand
gaaggagagaucaugaaag

SEQ ID NO: 689790 - RNA, 19 nt, Homo sapiens
  misc_RNA (1)...(19): siRNA sense strand
gaugaggacagcacuuaca

SEQ ID NO: 689791 - RNA, 19 nt, Homo sapiens
  misc_RNA (1)...(19): siRNA sense strand
aagcuguacuuggcaauga

SEQ ID NO: 689792 - RNA, 19 nt, Homo sapiens
  misc_RNA (1)...(19): siRNA sense strand
acaccugagugcaaauuca

SEQ ID NO: 689793 - RNA, 19 nt, Homo sapiens
  misc_RNA (1)...(19): siRNA sense strand
agccucagcuuaaggguau

SEQ ID NO: 689794 - RNA, 19 nt, Homo sapiens
  misc_RNA (1)...(19): siRNA sense strand
gaguucaaaccaagcugua

SEQ ID NO: 689795 - RNA, 19 nt, Homo sapiens
  misc_RNA (1)...(19): siRNA sense strand
acagugagggauacuugua

SEQ ID NO: 689796 - RNA, 19 nt, Homo sapiens
  misc_RNA (1)...(19): siRNA sense strand
uuucacaccugagugcaaa

SEQ ID NO: 689797 - RNA, 19 nt, Homo sapiens
  misc_RNA (1)...(19): siRNA sense strand
caaccaagagcagaagugu

SEQ ID NO: 689798 - RNA, 19 nt, Homo sapiens
  misc_RNA (1)...(19): siRNA sense strand
ugcacgaucucacggaguu

SEQ ID NO: 689799 - RNA, 19 nt, Homo sapiens
  misc_RNA (1)...(19): siRNA sense strand
ugagugcaaauucaaagaa

SEQ ID NO: 689800 - RNA, 19 nt, Homo sapiens
  misc_RNA (1)...(19): siRNA sense strand
gaucaugaaaggcaaccau

SEQ ID NO: 689801 - RNA, 19 nt, Homo sapiens
  misc_RNA (1)...(19): siRNA sense strand
uccaaggaguucaaaccaa

SEQ ID NO: 689802 - RNA, 19 nt, Homo sapiens
  misc_RNA (1)...(19): siRNA sense strand
ugaaaggcaaccaugugaa

SEQ ID NO: 689803 - RNA, 19 nt, Homo sapiens
  misc_RNA (1)...(19): siRNA sense strand
agugguggcuauccaagga

SEQ ID NO: 689804 - RNA, 19 nt, Homo sapiens
  misc_RNA (1)...(19): siRNA sense strand
caugagccacaaugaauca

SEQ ID NO: 689805 - RNA, 19 nt, Homo sapiens
  misc_RNA (1)...(19): siRNA sense strand
uuguacaccucggaacuuu

SEQ ID NO: 689806 - RNA, 19 nt, Homo sapiens
  misc_RNA (1)...(19): siRNA sense strand
guacuuggcaaugaacagu

SEQ ID NO: 689807 - RNA, 19 nt, Homo sapiens
  misc_RNA (1)...(19): siRNA sense strand
uccaugagccacaaugaau

SEQ ID NO: 689808 - RNA, 19 nt, Homo sapiens
  misc_RNA (1)...(19): siRNA sense strand
caagcuauacagccgacaa

SEQ ID NO: 689809 - RNA, 19 nt, Homo sapiens
  misc_RNA (1)...(19): siRNA sense strand
ucacaccugagugcaaauu

SEQ ID NO: 689810 - RNA, 19 nt, Homo sapiens
  misc_RNA (1)...(19): siRNA sense strand
gcacuuacacucuguuuaa

SEQ ID NO: 689811 - RNA, 19 nt, Homo sapiens
  misc_RNA (1)...(19): siRNA sense strand
gaacaaagaaggagagauc

SEQ ID NO: 689812 - RNA, 19 nt, Homo sapiens
  misc_RNA (1)...(19): siRNA sense strand
gcaaccaugugaagaagaa

SEQ ID NO: 689813 - RNA, 19 nt, Homo sapiens
  misc_RNA (1)...(19): siRNA sense strand
gaacaagccugcagcucau

SEQ ID NO: 689814 - RNA, 19 nt, Homo sapiens
  misc_RNA (1)...(19): siRNA sense strand
gaacagugagggauacuug

SEQ ID NO: 689815 - RNA, 19 nt, Homo sapiens
  misc_RNA (1)...(19): siRNA sense strand
cagcuuaaggguauaguua

SEQ ID NO: 689816 - RNA, 19 nt, Homo sapiens
  misc_RNA (1)...(19): siRNA sense strand
gcaaauccaugagccacaa

SEQ ID NO: 689817 - RNA, 19 nt, Homo sapiens
  misc_RNA (1)...(19): siRNA sense strand
gaaaggcaaccaugugaag

SEQ ID NO: 689818 - RNA, 19 nt, Homo sapiens
  misc_RNA (1)...(19): siRNA sense strand
gaaaguggccauguacaag

SEQ ID NO: 689819 - RNA, 19 nt, Homo sapiens
  misc_RNA (1)...(19): siRNA sense strand
aaggagagaucaugaaagg

SEQ ID NO: 689820 - RNA, 19 nt, Homo sapiens
  misc_RNA (1)...(19): siRNA sense strand
caaagaaggagagaucaug

SEQ ID NO: 689821 - RNA, 19 nt, Homo sapiens
  misc_RNA (1)...(19): siRNA sense strand
caaugaacagugagggaua

SEQ ID NO: 689822 - RNA, 19 nt, Homo sapiens
  misc_RNA (1)...(19): siRNA sense strand
ggugguaucugggucugaa

SEQ ID NO: 689823 - RNA, 19 nt, Homo sapiens
  misc_RNA (1)...(19): siRNA sense strand
ugugacauauucaucaaug

SEQ ID NO: 689824 - RNA, 19 nt, Homo sapiens
  misc_RNA (1)...(19): siRNA sense strand
agaaggagagaucaugaaa

SEQ ID NO: 689825 - RNA, 19 nt, Homo sapiens
  misc_RNA (1)...(19): siRNA sense strand
ugaaaguggccauguacaa

SEQ ID NO: 689826 - RNA, 19 nt, Homo sapiens
  misc_RNA (1)...(19): siRNA sense strand
aagaugaggacagcacuua

SEQ ID NO: 689827 - RNA, 19 nt, Homo sapiens
  misc_RNA (1)...(19): siRNA sense strand
aaagaaggagagaucauga

SEQ ID NO: 689828 - RNA, 19 nt, Homo sapiens
  misc_RNA (1)...(19): siRNA sense strand
guaucugggucugaacaaa

SEQ ID NO: 689829 - RNA, 19 nt, Homo sapiens
  misc_RNA (1)...(19): siRNA sense strand
gaaggagagaucaugaaag

SEQ ID NO: 689830 - RNA, 19 nt, Homo sapiens
  misc_RNA (1)...(19): siRNA sense strand
gaugaggacagcacuuaca

SEQ ID NO: 689831 - RNA, 19 nt, Homo sapiens
  misc_RNA (1)...(19): siRNA sense strand
aagcuguacuuggcaauga

SEQ ID NO: 689832 - RNA, 19 nt, Homo sapiens
  misc_RNA (1)...(19): siRNA sense strand
acaccugagugcaaauuca

SEQ ID NO: 689833 - RNA, 19 nt, Homo sapiens
  misc_RNA (1)...(19): siRNA sense strand
agccucagcuuaaggguau

SEQ ID NO: 689834 - RNA, 19 nt, Homo sapiens
  misc_RNA (1)...(19): siRNA sense strand
gaguucaaaccaagcugua

SEQ ID NO: 689835 - RNA, 19 nt, Homo sapiens
  misc_RNA (1)...(19): siRNA sense strand
acagugagggauacuugua

SEQ ID NO: 689836 - RNA, 19 nt, Homo sapiens
  misc_RNA (1)...(19): siRNA sense strand
uuucacaccugagugcaaa

SEQ ID NO: 689837 - RNA, 19 nt, Homo sapiens
  misc_RNA (1)...(19): siRNA sense strand
caaccaagagcagaagugu

SEQ ID NO: 689838 - RNA, 19 nt, Homo sapiens
  misc_RNA (1)...(19): siRNA sense strand
ugcacgaucucacggaguu

SEQ ID NO: 689839 - RNA, 19 nt, Homo sapiens
  misc_RNA (1)...(19): siRNA sense strand
ugagugcaaauucaaagaa

SEQ ID NO: 689840 - RNA, 19 nt, Homo sapiens
  misc_RNA (1)...(19): siRNA sense strand
gaucaugaaaggcaaccau

SEQ ID NO: 689841 - RNA, 19 nt, Homo sapiens
  misc_RNA (1)...(19): siRNA sense strand
uccaaggaguucaaaccaa

SEQ ID NO: 689842 - RNA, 19 nt, Homo sapiens
  misc_RNA (1)...(19): siRNA sense strand
ugaaaggcaaccaugugaa

SEQ ID NO: 689843 - RNA, 19 nt, Homo sapiens
  misc_RNA (1)...(19): siRNA sense strand
agugguggcuauccaagga

SEQ ID NO: 689844 - RNA, 19 nt, Homo sapiens
  misc_RNA (1)...(19): siRNA sense strand
caugagccacaaugaauca

SEQ ID NO: 689845 - RNA, 19 nt, Homo sapiens
  misc_RNA (1)...(19): siRNA sense strand
uuguacaccucggaacuuu

SEQ ID NO: 689846 - RNA, 19 nt, Homo sapiens
  misc_RNA (1)...(19): siRNA sense strand
guacuuggcaaugaacagu

SEQ ID NO: 689847 - RNA, 19 nt, Homo sapiens
  misc_RNA (1)...(19): siRNA sense strand
uccaugagccacaaugaau

SEQ ID NO: 689848 - RNA, 19 nt, Homo sapiens
  misc_RNA (1)...(19): siRNA sense strand
caagcuauacagccgacaa

SEQ ID NO: 689849 - RNA, 19 nt, Homo sapiens
  misc_RNA (1)...(19): siRNA sense strand
ucacaccugagugcaaauu

SEQ ID NO: 689850 - RNA, 19 nt, Homo sapiens
  misc_RNA (1)...(19): siRNA sense strand
gaaagcugcugccaagaaa

SEQ ID NO: 689851 - RNA, 19 nt, Homo sapiens
  misc_RNA (1)...(19): siRNA sense strand
ggaaagcugcugccaagaa

SEQ ID NO: 689852 - RNA, 19 nt, Homo sapiens
  misc_RNA (1)...(19): siRNA sense strand
caacaagggccacaaagug

SEQ ID NO: 689853 - RNA, 19 nt, Homo sapiens
  misc_RNA (1)...(19): siRNA sense strand
gccacaaagugaccaagaa

SEQ ID NO: 689854 - RNA, 19 nt, Homo sapiens
  misc_RNA (1)...(19): siRNA sense strand
gcccucaaauuuaucaaga

SEQ ID NO: 689855 - RNA, 19 nt, Homo sapiens
  misc_RNA (1)...(19): siRNA sense strand
gaaggucuccaaggacaaa

SEQ ID NO: 689856 - RNA, 19 nt, Homo sapiens
  misc_RNA (1)...(19): siRNA sense strand
gggaggagcugagcaacgu

SEQ ID NO: 689857 - RNA, 19 nt, Homo sapiens
  misc_RNA (1)...(19): siRNA sense strand
ugaccaaacacaccaaguu

SEQ ID NO: 689858 - RNA, 19 nt, Homo sapiens
  misc_RNA (1)...(19): siRNA sense strand
gcccuacgcuacccuaugg

SEQ ID NO: 689859 - RNA, 19 nt, Homo sapiens
  misc_RNA (1)...(19): siRNA sense strand
gaccaaacacaccaaguuc

SEQ ID NO: 689860 - RNA, 19 nt, Homo sapiens
  misc_RNA (1)...(19): siRNA sense strand
uacugaaggucuccaagga

SEQ ID NO: 689861 - RNA, 19 nt, Homo sapiens
  misc_RNA (1)...(19): siRNA sense strand
aacaagggccacaaaguga

SEQ ID NO: 689862 - RNA, 19 nt, Homo sapiens
  misc_RNA (1)...(19): siRNA sense strand
ccauggaguuacugaaggu

SEQ ID NO: 689863 - RNA, 19 nt, Homo sapiens
  misc_RNA (1)...(19): siRNA sense strand
ucaacaagggccacaaagu

SEQ ID NO: 689864 - RNA, 19 nt, Homo sapiens
  misc_RNA (1)...(19): siRNA sense strand
ugaccaagaacgugagcaa

SEQ ID NO: 689865 - RNA, 19 nt, Homo sapiens
  misc_RNA (1)...(19): siRNA sense strand
ccucaacaagggccacaaa

SEQ ID NO: 689866 - RNA, 19 nt, Homo sapiens
  misc_RNA (1)...(19): siRNA sense strand
ggccacaaagugaccaaga

SEQ ID NO: 689867 - RNA, 19 nt, Homo sapiens
  misc_RNA (1)...(19): siRNA sense strand
ggaggagcugagcaacgua

SEQ ID NO: 689868 - RNA, 19 nt, Homo sapiens
  misc_RNA (1)...(19): siRNA sense strand
ccaaacacaccaaguucgu

SEQ ID NO: 689869 - RNA, 19 nt, Homo sapiens
  misc_RNA (1)...(19): siRNA sense strand
aagcugcugccaagaaaga

SEQ ID NO: 689870 - RNA, 19 nt, Homo sapiens
  misc_RNA (1)...(19): siRNA sense strand
ccacaaagugaccaagaac

SEQ ID NO: 689871 - RNA, 19 nt, Homo sapiens
  misc_RNA (1)...(19): siRNA sense strand
gaaagcugcugccaagaaa

SEQ ID NO: 689872 - RNA, 19 nt, Homo sapiens
  misc_RNA (1)...(19): siRNA sense strand
ggaaagcugcugccaagaa

SEQ ID NO: 689873 - RNA, 19 nt, Homo sapiens
  misc_RNA (1)...(19): siRNA sense strand
caacaagggccacaaagug

SEQ ID NO: 689874 - RNA, 19 nt, Homo sapiens
  misc_RNA (1)...(19): siRNA sense strand
gccacaaagugaccaagaa

SEQ ID NO: 689875 - RNA, 19 nt, Homo sapiens
  misc_RNA (1)...(19): siRNA sense strand
gcccucaaauuuaucaaga

SEQ ID NO: 689876 - RNA, 19 nt, Homo sapiens
  misc_RNA (1)...(19): siRNA sense strand
gaaggucuccaaggacaaa

SEQ ID NO: 689877 - RNA, 19 nt, Homo sapiens
  misc_RNA (1)...(19): siRNA sense strand
gggaggagcugagcaacgu

SEQ ID NO: 689878 - RNA, 19 nt, Homo sapiens
  misc_RNA (1)...(19): siRNA sense strand
ugaccaaacacaccaaguu

SEQ ID NO: 689879 - RNA, 19 nt, Homo sapiens
  misc_RNA (1)...(19): siRNA sense strand
gcccuacgcuacccuaugg

SEQ ID NO: 689880 - RNA, 19 nt, Homo sapiens
  misc_RNA (1)...(19): siRNA sense strand
gaccaaacacaccaaguuc

SEQ ID NO: 689881 - RNA, 19 nt, Homo sapiens
  misc_RNA (1)...(19): siRNA sense strand
uacugaaggucuccaagga

SEQ ID NO: 689882 - RNA, 19 nt, Homo sapiens
  misc_RNA (1)...(19): siRNA sense strand
aacaagggccacaaaguga

SEQ ID NO: 689883 - RNA, 19 nt, Homo sapiens
  misc_RNA (1)...(19): siRNA sense strand
ccauggaguuacugaaggu

SEQ ID NO: 689884 - RNA, 19 nt, Homo sapiens
  misc_RNA (1)...(19): siRNA sense strand
ucaacaagggccacaaagu

SEQ ID NO: 689885 - RNA, 19 nt, Homo sapiens
  misc_RNA (1)...(19): siRNA sense strand
ugaccaagaacgugagcaa

SEQ ID NO: 689886 - RNA, 19 nt, Homo sapiens
  misc_RNA (1)...(19): siRNA sense strand
ccucaacaagggccacaaa

SEQ ID NO: 689887 - RNA, 19 nt, Homo sapiens
  misc_RNA (1)...(19): siRNA sense strand
ggccacaaagugaccaaga

SEQ ID NO: 689888 - RNA, 19 nt, Homo sapiens
  misc_RNA (1)...(19): siRNA sense strand
ggaggagcugagcaacgua

SEQ ID NO: 689889 - RNA, 19 nt, Homo sapiens
  misc_RNA (1)...(19): siRNA sense strand
ccaaacacaccaaguucgu

SEQ ID NO: 689890 - RNA, 19 nt, Homo sapiens
  misc_RNA (1)...(19): siRNA sense strand
aagcugcugccaagaaaga

SEQ ID NO: 689891 - RNA, 19 nt, Homo sapiens
  misc_RNA (1)...(19): siRNA sense strand
ccacaaagugaccaagaac

SEQ ID NO: 689892 - RNA, 19 nt, Homo sapiens
  misc_RNA (1)...(19): siRNA sense strand
guaaaggugucuacuguuu

SEQ ID NO: 689893 - RNA, 19 nt, Homo sapiens
  misc_RNA (1)...(19): siRNA sense strand
guaacuggcucuucagauu

SEQ ID NO: 689894 - RNA, 19 nt, Homo sapiens
  misc_RNA (1)...(19): siRNA sense strand
gcacauugguggaacauuc

SEQ ID NO: 689895 - RNA, 19 nt, Homo sapiens
  misc_RNA (1)...(19): siRNA sense strand
guuaguggaucaucagaua

SEQ ID NO: 689896 - RNA, 19 nt, Homo sapiens
  misc_RNA (1)...(19): siRNA sense strand
gagcaaggcuuagaucaca

SEQ ID NO: 689897 - RNA, 19 nt, Homo sapiens
  misc_RNA (1)...(19): siRNA sense strand
gaaggaaugcuuuggaaga

SEQ ID NO: 689898 - RNA, 19 nt, Homo sapiens
  misc_RNA (1)...(19): siRNA sense strand
ugaauguggugccuguuua

SEQ ID NO: 689899 - RNA, 19 nt, Homo sapiens
  misc_RNA (1)...(19): siRNA sense strand
gauaaguaauggaacauca

SEQ ID NO: 689900 - RNA, 19 nt, Homo sapiens
  misc_RNA (1)...(19): siRNA sense strand
ugaaucagaucaaguggaa

SEQ ID NO: 689901 - RNA, 19 nt, Homo sapiens
  misc_RNA (1)...(19): siRNA sense strand
gugaaguucuuaacacauu

SEQ ID NO: 689902 - RNA, 19 nt, Homo sapiens
  misc_RNA (1)...(19): siRNA sense strand
ggacuuuauuaccgcuuua

SEQ ID NO: 689903 - RNA, 19 nt, Homo sapiens
  misc_RNA (1)...(19): siRNA sense strand
gaacauacacuuacaucuc

SEQ ID NO: 689904 - RNA, 19 nt, Homo sapiens
  misc_RNA (1)...(19): siRNA sense strand
gagcugguauguaaagaau

SEQ ID NO: 689905 - RNA, 19 nt, Homo sapiens
  misc_RNA (1)...(19): siRNA sense strand
gagcaccugugaauuuguu

SEQ ID NO: 689906 - RNA, 19 nt, Homo sapiens
  misc_RNA (1)...(19): siRNA sense strand
agagggacaugaagaauug

SEQ ID NO: 689907 - RNA, 19 nt, Homo sapiens
  misc_RNA (1)...(19): siRNA sense strand
gaacaucuuauuucacgaa

SEQ ID NO: 689908 - RNA, 19 nt, Homo sapiens
  misc_RNA (1)...(19): siRNA sense strand
caucuuauuucacgaaugu

SEQ ID NO: 689909 - RNA, 19 nt, Homo sapiens
  misc_RNA (1)...(19): siRNA sense strand
cagaaggaaugcuuuggaa

SEQ ID NO: 689910 - RNA, 19 nt, Homo sapiens
  misc_RNA (1)...(19): siRNA sense strand
gcucugggauauugaaugu

SEQ ID NO: 689911 - RNA, 19 nt, Homo sapiens
  misc_RNA (1)...(19): siRNA sense strand
gaauuuguggaacaucuua

SEQ ID NO: 689912 - RNA, 19 nt, Homo sapiens
  misc_RNA (1)...(19): siRNA sense strand
cgagugaucucagaaggaa

SEQ ID NO: 689913 - RNA, 19 nt, Homo sapiens
  misc_RNA (1)...(19): siRNA sense strand
acagauggcccuccaaauu

SEQ ID NO: 689914 - RNA, 19 nt, Homo sapiens
  misc_RNA (1)...(19): siRNA sense strand
gaagcugauugaacgaaug

SEQ ID NO: 689915 - RNA, 19 nt, Homo sapiens
  misc_RNA (1)...(19): siRNA sense strand
gcaaggcuuagaucacaua

SEQ ID NO: 689916 - RNA, 19 nt, Homo sapiens
  misc_RNA (1)...(19): siRNA sense strand
gcacuuacgcuucagcaau

SEQ ID NO: 689917 - RNA, 19 nt, Homo sapiens
  misc_RNA (1)...(19): siRNA sense strand
gugaucgucuccagaaaga

SEQ ID NO: 689918 - RNA, 19 nt, Homo sapiens
  misc_RNA (1)...(19): siRNA sense strand
gcuccaguuugaugaguuu

SEQ ID NO: 689919 - RNA, 19 nt, Homo sapiens
  misc_RNA (1)...(19): siRNA sense strand
gaauguggugccuguuuaa

SEQ ID NO: 689920 - RNA, 19 nt, Homo sapiens
  misc_RNA (1)...(19): siRNA sense strand
uaucagcauggacauauua

SEQ ID NO: 689921 - RNA, 19 nt, Homo sapiens
  misc_RNA (1)...(19): siRNA sense strand
gcagagggugggaucagua

SEQ ID NO: 689922 - RNA, 19 nt, Homo sapiens
  misc_RNA (1)...(19): siRNA sense strand
aauggaacaucaucuguga

SEQ ID NO: 689923 - RNA, 19 nt, Homo sapiens
  misc_RNA (1)...(19): siRNA sense strand
cagaucaaguggaauuugu

SEQ ID NO: 689924 - RNA, 19 nt, Homo sapiens
  misc_RNA (1)...(19): siRNA sense strand
guauugcacuuacgcuuca

SEQ ID NO: 689925 - RNA, 19 nt, Homo sapiens
  misc_RNA (1)...(19): siRNA sense strand
gcauggacauauuaacucu

SEQ ID NO: 689926 - RNA, 19 nt, Homo sapiens
  misc_RNA (1)...(19): siRNA sense strand
cgaugcauccgguuugaua

SEQ ID NO: 689927 - RNA, 19 nt, Homo sapiens
  misc_RNA (1)...(19): siRNA sense strand
ccauuaggcucugggauau

SEQ ID NO: 689928 - RNA, 19 nt, Homo sapiens
  misc_RNA (1)...(19): siRNA sense strand
cacgagcaccugugaauuu

SEQ ID NO: 689929 - RNA, 19 nt, Homo sapiens
  misc_RNA (1)...(19): siRNA sense strand
ccagaaagaggccaucaga

SEQ ID NO: 689930 - RNA, 19 nt, Homo sapiens
  misc_RNA (1)...(19): siRNA sense strand
ggaauguuugaaaguguua

SEQ ID NO: 689931 - RNA, 19 nt, Homo sapiens
  misc_RNA (1)...(19): siRNA sense strand
gcugguauguaaagaaugg

SEQ ID NO: 689932 - RNA, 19 nt, Homo sapiens
  misc_RNA (1)...(19): siRNA sense strand
acacauugauccaccacaa

SEQ ID NO: 689933 - RNA, 19 nt, Homo sapiens
  misc_RNA (1)...(19): siRNA sense strand
ccuacgagauaauucuauu

SEQ ID NO: 689934 - RNA, 19 nt, Homo sapiens
  misc_RNA (1)...(19): siRNA sense strand
ucacauagcagaaaacauu

SEQ ID NO: 689935 - RNA, 19 nt, Homo sapiens
  misc_RNA (1)...(19): siRNA sense strand
ggacugauggugaccuguu

SEQ ID NO: 689936 - RNA, 19 nt, Homo sapiens
  misc_RNA (1)...(19): siRNA sense strand
cauuguaacuggcucuuca

SEQ ID NO: 689937 - RNA, 19 nt, Homo sapiens
  misc_RNA (1)...(19): siRNA sense strand
ccacagauggcccuccaaa

SEQ ID NO: 689938 - RNA, 19 nt, Homo sapiens
  misc_RNA (1)...(19): siRNA sense strand
ucaguggccuacgagauaa

SEQ ID NO: 689939 - RNA, 19 nt, Homo sapiens
  misc_RNA (1)...(19): siRNA sense strand
gggacuuuauuaccgcuuu

SEQ ID NO: 689940 - RNA, 19 nt, Homo sapiens
  misc_RNA (1)...(19): siRNA sense strand
gcacgagcaccugugaauu

SEQ ID NO: 689941 - RNA, 19 nt, Homo sapiens
  misc_RNA (1)...(19): siRNA sense strand
cagauggcccuccaaauuc

SEQ ID NO: 689942 - RNA, 19 nt, Homo sapiens
  misc_RNA (1)...(19): siRNA sense strand
gaucaguaccuguuuaaaa

SEQ ID NO: 689943 - RNA, 19 nt, Homo sapiens
  misc_RNA (1)...(19): siRNA sense strand
gggaucaguaccuguuuaa

SEQ ID NO: 689944 - RNA, 19 nt, Homo sapiens
  misc_RNA (1)...(19): siRNA sense strand
ugggaucaguaccuguuua

SEQ ID NO: 689945 - RNA, 19 nt, Homo sapiens
  misc_RNA (1)...(19): siRNA sense strand
gcacugauccccuauggaa

SEQ ID NO: 689946 - RNA, 19 nt, Homo sapiens
  misc_RNA (1)...(19): siRNA sense strand
agaaagaggccaucagaag

SEQ ID NO: 689947 - RNA, 19 nt, Homo sapiens
  misc_RNA (1)...(19): siRNA sense strand
gcagagcugguauguaaag

SEQ ID NO: 689948 - RNA, 19 nt, Homo sapiens
  misc_RNA (1)...(19): siRNA sense strand
gaaguucuuaacacauuga

SEQ ID NO: 689949 - RNA, 19 nt, Homo sapiens
  misc_RNA (1)...(19): siRNA sense strand
gggugaaguucuuaacaca

SEQ ID NO: 689950 - RNA, 19 nt, Homo sapiens
  misc_RNA (1)...(19): siRNA sense strand
uguggaacaucuuauuuca

SEQ ID NO: 689951 - RNA, 19 nt, Homo sapiens
  misc_RNA (1)...(19): siRNA sense strand
aaggaaugcuuuggaagaa

SEQ ID NO: 689952 - RNA, 19 nt, Homo sapiens
  misc_RNA (1)...(19): siRNA sense strand
uauuaacucuuaccugaag

SEQ ID NO: 689953 - RNA, 19 nt, Homo sapiens
  misc_RNA (1)...(19): siRNA sense strand
aaucagaucaaguggaauu

SEQ ID NO: 689954 - RNA, 19 nt, Homo sapiens
  misc_RNA (1)...(19): siRNA sense strand
aaaggugucuacuguuuac

SEQ ID NO: 689955 - RNA, 19 nt, Homo sapiens
  misc_RNA (1)...(19): siRNA sense strand
aggcuuagaucacauagca

SEQ ID NO: 689956 - RNA, 19 nt, Homo sapiens
  misc_RNA (1)...(19): siRNA sense strand
gaucucagaaggaaugcuu

SEQ ID NO: 689957 - RNA, 19 nt, Homo sapiens
  misc_RNA (1)...(19): siRNA sense strand
gggaucgccugguuguuag

SEQ ID NO: 689958 - RNA, 19 nt, Homo sapiens
  misc_RNA (1)...(19): siRNA sense strand
gaauuuguucguacucuca

SEQ ID NO: 689959 - RNA, 19 nt, Homo sapiens
  misc_RNA (1)...(19): siRNA sense strand
cacuuacgcuucagcaaug

SEQ ID NO: 689960 - RNA, 19 nt, Homo sapiens
  misc_RNA (1)...(19): siRNA sense strand
caucagaaggaaacuauca

SEQ ID NO: 689961 - RNA, 19 nt, Homo sapiens
  misc_RNA (1)...(19): siRNA sense strand
gucauuauacccaaagauu

SEQ ID NO: 689962 - RNA, 19 nt, Homo sapiens
  misc_RNA (1)...(19): siRNA sense strand
ucaaguggaauuuguggaa

SEQ ID NO: 689963 - RNA, 19 nt, Homo sapiens
  misc_RNA (1)...(19): siRNA sense strand
gcugauugaacgaauggua

SEQ ID NO: 689964 - RNA, 19 nt, Homo sapiens
  misc_RNA (1)...(19): siRNA sense strand
gaacauucuggacgugugu

SEQ ID NO: 689965 - RNA, 19 nt, Homo sapiens
  misc_RNA (1)...(19): siRNA sense strand
gcauccgguuugauaacaa

SEQ ID NO: 689966 - RNA, 19 nt, Homo sapiens
  misc_RNA (1)...(19): siRNA sense strand
ucagaaggaaacuaucaaa

SEQ ID NO: 689967 - RNA, 19 nt, Homo sapiens
  misc_RNA (1)...(19): siRNA sense strand
aaagaggccaucagaagga

SEQ ID NO: 689968 - RNA, 19 nt, Homo sapiens
  misc_RNA (1)...(19): siRNA sense strand
guaauggaacaucaucugu

SEQ ID NO: 689969 - RNA, 19 nt, Homo sapiens
  misc_RNA (1)...(19): siRNA sense strand
uagagggacaugaagaauu

SEQ ID NO: 689970 - RNA, 19 nt, Homo sapiens
  misc_RNA (1)...(19): siRNA sense strand
ggagcacgagcaccuguga

SEQ ID NO: 689971 - RNA, 19 nt, Homo sapiens
  misc_RNA (1)...(19): siRNA sense strand
ugaaguucuuaacacauug

SEQ ID NO: 689972 - RNA, 19 nt, Homo sapiens
  misc_RNA (1)...(19): siRNA sense strand
agauggcccuccaaauuca

SEQ ID NO: 689973 - RNA, 19 nt, Homo sapiens
  misc_RNA (1)...(19): siRNA sense strand
uugcagcgggacuuuauua

SEQ ID NO: 689974 - RNA, 19 nt, Homo sapiens
  misc_RNA (1)...(19): siRNA sense strand
gaucaucagauaauaccau

SEQ ID NO: 689975 - RNA, 19 nt, Homo sapiens
  misc_RNA (1)...(19): siRNA sense strand
agggaucgccugguuguua

SEQ ID NO: 689976 - RNA, 19 nt, Homo sapiens
  misc_RNA (1)...(19): siRNA sense strand
ccaccacaaugaggcugua

SEQ ID NO: 689977 - RNA, 19 nt, Homo sapiens
  misc_RNA (1)...(19): siRNA sense strand
gugagagugugggauguga

SEQ ID NO: 689978 - RNA, 19 nt, Homo sapiens
  misc_RNA (1)...(19): siRNA sense strand
gacacaacuugcagaggau

SEQ ID NO: 689979 - RNA, 19 nt, Homo sapiens
  misc_RNA (1)...(19): siRNA sense strand
gaugcauccgguuugauaa

SEQ ID NO: 689980 - RNA, 19 nt, Homo sapiens
  misc_RNA (1)...(19): siRNA sense strand
gacaggaccaucaaagucu

SEQ ID NO: 689981 - RNA, 19 nt, Homo sapiens
  misc_RNA (1)...(19): siRNA sense strand
ugacaggaccaucaaaguc

SEQ ID NO: 689982 - RNA, 19 nt, Homo sapiens
  misc_RNA (1)...(19): siRNA sense strand
uaacuggcucuucagauuc

SEQ ID NO: 689983 - RNA, 19 nt, Homo sapiens
  misc_RNA (1)...(19): siRNA sense strand
uggaauguuugaaaguguu

SEQ ID NO: 689984 - RNA, 19 nt, Homo sapiens
  misc_RNA (1)...(19): siRNA sense strand
aacauacacuuacaucucu

SEQ ID NO: 689985 - RNA, 19 nt, Homo sapiens
  misc_RNA (1)...(19): siRNA sense strand
gaagaagcugauugaacga

SEQ ID NO: 689986 - RNA, 19 nt, Homo sapiens
  misc_RNA (1)...(19): siRNA sense strand
uguuucggcuccaguuuga

SEQ ID NO: 689987 - RNA, 19 nt, Homo sapiens
  misc_RNA (1)...(19): siRNA sense strand
gccaucagaaggaaacuau

SEQ ID NO: 689988 - RNA, 19 nt, Homo sapiens
  misc_RNA (1)...(19): siRNA sense strand
ggaauuuguggaacaucuu

SEQ ID NO: 689989 - RNA, 19 nt, Homo sapiens
  misc_RNA (1)...(19): siRNA sense strand
uaguagacuuugacgacaa

SEQ ID NO: 689990 - RNA, 19 nt, Homo sapiens
  misc_RNA (1)...(19): siRNA sense strand
gggcugccgucaauguagu

SEQ ID NO: 689991 - RNA, 19 nt, Homo sapiens
  misc_RNA (1)...(19): siRNA sense strand
ccuggaauguuugaaagug

SEQ ID NO: 689992 - RNA, 19 nt, Homo sapiens
  misc_RNA (1)...(19): siRNA sense strand
guaaaggugucuacuguuu

SEQ ID NO: 689993 - RNA, 19 nt, Homo sapiens
  misc_RNA (1)...(19): siRNA sense strand
guaacuggcucuucagauu

SEQ ID NO: 689994 - RNA, 19 nt, Homo sapiens
  misc_RNA (1)...(19): siRNA sense strand
gcacauugguggaacauuc

SEQ ID NO: 689995 - RNA, 19 nt, Homo sapiens
  misc_RNA (1)...(19): siRNA sense strand
guuaguggaucaucagaua

SEQ ID NO: 689996 - RNA, 19 nt, Homo sapiens
  misc_RNA (1)...(19): siRNA sense strand
gagcaaggcuuagaucaca

SEQ ID NO: 689997 - RNA, 19 nt, Homo sapiens
  misc_RNA (1)...(19): siRNA sense strand
gaaggaaugcuuuggaaga

SEQ ID NO: 689998 - RNA, 19 nt, Homo sapiens
  misc_RNA (1)...(19): siRNA sense strand
ugaauguggugccuguuua

SEQ ID NO: 689999 - RNA, 19 nt, Homo sapiens
  misc_RNA (1)...(19): siRNA sense strand
gauaaguaauggaacauca

SEQ ID NO: 690000 - RNA, 19 nt, Homo sapiens
  misc_RNA (1)...(19): siRNA sense strand
ugaaucagaucaaguggaa

SEQ ID NO: 690001 - RNA, 19 nt, Homo sapiens
  misc_RNA (1)...(19): siRNA sense strand
gugaaguucuuaacacauu

SEQ ID NO: 690002 - RNA, 19 nt, Homo sapiens
  misc_RNA (1)...(19): siRNA sense strand
ggacuuuauuaccgcuuua

SEQ ID NO: 690003 - RNA, 19 nt, Homo sapiens
  misc_RNA (1)...(19): siRNA sense strand
gaacauacacuuacaucuc

SEQ ID NO: 690004 - RNA, 19 nt, Homo sapiens
  misc_RNA (1)...(19): siRNA sense strand
gagcugguauguaaagaau

SEQ ID NO: 690005 - RNA, 19 nt, Homo sapiens
  misc_RNA (1)...(19): siRNA sense strand
gagcaccugugaauuuguu

SEQ ID NO: 690006 - RNA, 19 nt, Homo sapiens
  misc_RNA (1)...(19): siRNA sense strand
agagggacaugaagaauug

SEQ ID NO: 690007 - RNA, 19 nt, Homo sapiens
  misc_RNA (1)...(19): siRNA sense strand
gaacaucuuauuucacgaa

SEQ ID NO: 690008 - RNA, 19 nt, Homo sapiens
  misc_RNA (1)...(19): siRNA sense strand
caucuuauuucacgaaugu

SEQ ID NO: 690009 - RNA, 19 nt, Homo sapiens
  misc_RNA (1)...(19): siRNA sense strand
cagaaggaaugcuuuggaa

SEQ ID NO: 690010 - RNA, 19 nt, Homo sapiens
  misc_RNA (1)...(19): siRNA sense strand
gcucugggauauugaaugu

SEQ ID NO: 690011 - RNA, 19 nt, Homo sapiens
  misc_RNA (1)...(19): siRNA sense strand
gaauuuguggaacaucuua

SEQ ID NO: 690012 - RNA, 19 nt, Homo sapiens
  misc_RNA (1)...(19): siRNA sense strand
cgagugaucucagaaggaa

SEQ ID NO: 690013 - RNA, 19 nt, Homo sapiens
  misc_RNA (1)...(19): siRNA sense strand
acagauggcccuccaaauu

SEQ ID NO: 690014 - RNA, 19 nt, Homo sapiens
  misc_RNA (1)...(19): siRNA sense strand
gaagcugauugaacgaaug

SEQ ID NO: 690015 - RNA, 19 nt, Homo sapiens
  misc_RNA (1)...(19): siRNA sense strand
gcaaggcuuagaucacaua

SEQ ID NO: 690016 - RNA, 19 nt, Homo sapiens
  misc_RNA (1)...(19): siRNA sense strand
gcacuuacgcuucagcaau

SEQ ID NO: 690017 - RNA, 19 nt, Homo sapiens
  misc_RNA (1)...(19): siRNA sense strand
gugaucgucuccagaaaga

SEQ ID NO: 690018 - RNA, 19 nt, Homo sapiens
  misc_RNA (1)...(19): siRNA sense strand
gcuccaguuugaugaguuu

SEQ ID NO: 690019 - RNA, 19 nt, Homo sapiens
  misc_RNA (1)...(19): siRNA sense strand
gaauguggugccuguuuaa

SEQ ID NO: 690020 - RNA, 19 nt, Homo sapiens
  misc_RNA (1)...(19): siRNA sense strand
uaucagcauggacauauua

SEQ ID NO: 690021 - RNA, 19 nt, Homo sapiens
  misc_RNA (1)...(19): siRNA sense strand
gcagagggugggaucagua

SEQ ID NO: 690022 - RNA, 19 nt, Homo sapiens
  misc_RNA (1)...(19): siRNA sense strand
aauggaacaucaucuguga

SEQ ID NO: 690023 - RNA, 19 nt, Homo sapiens
  misc_RNA (1)...(19): siRNA sense strand
cagaucaaguggaauuugu

SEQ ID NO: 690024 - RNA, 19 nt, Homo sapiens
  misc_RNA (1)...(19): siRNA sense strand
guauugcacuuacgcuuca

SEQ ID NO: 690025 - RNA, 19 nt, Homo sapiens
  misc_RNA (1)...(19): siRNA sense strand
gcauggacauauuaacucu

SEQ ID NO: 690026 - RNA, 19 nt, Homo sapiens
  misc_RNA (1)...(19): siRNA sense strand
cgaugcauccgguuugaua

SEQ ID NO: 690027 - RNA, 19 nt, Homo sapiens
  misc_RNA (1)...(19): siRNA sense strand
ccauuaggcucugggauau

SEQ ID NO: 690028 - RNA, 19 nt, Homo sapiens
  misc_RNA (1)...(19): siRNA sense strand
cacgagcaccugugaauuu

SEQ ID NO: 690029 - RNA, 19 nt, Homo sapiens
  misc_RNA (1)...(19): siRNA sense strand
ccagaaagaggccaucaga

SEQ ID NO: 690030 - RNA, 19 nt, Homo sapiens
  misc_RNA (1)...(19): siRNA sense strand
ggaauguuugaaaguguua

SEQ ID NO: 690031 - RNA, 19 nt, Homo sapiens
  misc_RNA (1)...(19): siRNA sense strand
gcugguauguaaagaaugg

SEQ ID NO: 690032 - RNA, 19 nt, Homo sapiens
  misc_RNA (1)...(19): siRNA sense strand
acacauugauccaccacaa

SEQ ID NO: 690033 - RNA, 19 nt, Homo sapiens
  misc_RNA (1)...(19): siRNA sense strand
ccuacgagauaauucuauu

SEQ ID NO: 690034 - RNA, 19 nt, Homo sapiens
  misc_RNA (1)...(19): siRNA sense strand
ucacauagcagaaaacauu

SEQ ID NO: 690035 - RNA, 19 nt, Homo sapiens
  misc_RNA (1)...(19): siRNA sense strand
ggacugauggugaccuguu

SEQ ID NO: 690036 - RNA, 19 nt, Homo sapiens
  misc_RNA (1)...(19): siRNA sense strand
cauuguaacuggcucuuca

SEQ ID NO: 690037 - RNA, 19 nt, Homo sapiens
  misc_RNA (1)...(19): siRNA sense strand
ccacagauggcccuccaaa

SEQ ID NO: 690038 - RNA, 19 nt, Homo sapiens
  misc_RNA (1)...(19): siRNA sense strand
ucaguggccuacgagauaa

SEQ ID NO: 690039 - RNA, 19 nt, Homo sapiens
  misc_RNA (1)...(19): siRNA sense strand
gggacuuuauuaccgcuuu

SEQ ID NO: 690040 - RNA, 19 nt, Homo sapiens
  misc_RNA (1)...(19): siRNA sense strand
gcacgagcaccugugaauu

SEQ ID NO: 690041 - RNA, 19 nt, Homo sapiens
  misc_RNA (1)...(19): siRNA sense strand
cagauggcccuccaaauuc

SEQ ID NO: 690042 - RNA, 19 nt, Homo sapiens
  misc_RNA (1)...(19): siRNA sense strand
gaucaguaccuguuuaaaa

SEQ ID NO: 690043 - RNA, 19 nt, Homo sapiens
  misc_RNA (1)...(19): siRNA sense strand
gggaucaguaccuguuuaa

SEQ ID NO: 690044 - RNA, 19 nt, Homo sapiens
  misc_RNA (1)...(19): siRNA sense strand
ugggaucaguaccuguuua

SEQ ID NO: 690045 - RNA, 19 nt, Homo sapiens
  misc_RNA (1)...(19): siRNA sense strand
gcacugauccccuauggaa

SEQ ID NO: 690046 - RNA, 19 nt, Homo sapiens
  misc_RNA (1)...(19): siRNA sense strand
agaaagaggccaucagaag

SEQ ID NO: 690047 - RNA, 19 nt, Homo sapiens
  misc_RNA (1)...(19): siRNA sense strand
gcagagcugguauguaaag

SEQ ID NO: 690048 - RNA, 19 nt, Homo sapiens
  misc_RNA (1)...(19): siRNA sense strand
gaaguucuuaacacauuga

SEQ ID NO: 690049 - RNA, 19 nt, Homo sapiens
  misc_RNA (1)...(19): siRNA sense strand
gggugaaguucuuaacaca

SEQ ID NO: 690050 - RNA, 19 nt, Homo sapiens
  misc_RNA (1)...(19): siRNA sense strand
uguggaacaucuuauuuca

SEQ ID NO: 690051 - RNA, 19 nt, Homo sapiens
  misc_RNA (1)...(19): siRNA sense strand
aaggaaugcuuuggaagaa

SEQ ID NO: 690052 - RNA, 19 nt, Homo sapiens
  misc_RNA (1)...(19): siRNA sense strand
uauuaacucuuaccugaag

SEQ ID NO: 690053 - RNA, 19 nt, Homo sapiens
  misc_RNA (1)...(19): siRNA sense strand
aaucagaucaaguggaauu

SEQ ID NO: 690054 - RNA, 19 nt, Homo sapiens
  misc_RNA (1)...(19): siRNA sense strand
aaaggugucuacuguuuac

SEQ ID NO: 690055 - RNA, 19 nt, Homo sapiens
  misc_RNA (1)...(19): siRNA sense strand
aggcuuagaucacauagca

SEQ ID NO: 690056 - RNA, 19 nt, Homo sapiens
  misc_RNA (1)...(19): siRNA sense strand
gaucucagaaggaaugcuu

SEQ ID NO: 690057 - RNA, 19 nt, Homo sapiens
  misc_RNA (1)...(19): siRNA sense strand
gggaucgccugguuguuag

SEQ ID NO: 690058 - RNA, 19 nt, Homo sapiens
  misc_RNA (1)...(19): siRNA sense strand
gaauuuguucguacucuca

SEQ ID NO: 690059 - RNA, 19 nt, Homo sapiens
  misc_RNA (1)...(19): siRNA sense strand
cacuuacgcuucagcaaug

SEQ ID NO: 690060 - RNA, 19 nt, Homo sapiens
  misc_RNA (1)...(19): siRNA sense strand
caucagaaggaaacuauca

SEQ ID NO: 690061 - RNA, 19 nt, Homo sapiens
  misc_RNA (1)...(19): siRNA sense strand
gucauuauacccaaagauu

SEQ ID NO: 690062 - RNA, 19 nt, Homo sapiens
  misc_RNA (1)...(19): siRNA sense strand
ucaaguggaauuuguggaa

SEQ ID NO: 690063 - RNA, 19 nt, Homo sapiens
  misc_RNA (1)...(19): siRNA sense strand
gcugauugaacgaauggua

SEQ ID NO: 690064 - RNA, 19 nt, Homo sapiens
  misc_RNA (1)...(19): siRNA sense strand
gaacauucuggacgugugu

SEQ ID NO: 690065 - RNA, 19 nt, Homo sapiens
  misc_RNA (1)...(19): siRNA sense strand
gcauccgguuugauaacaa

SEQ ID NO: 690066 - RNA, 19 nt, Homo sapiens
  misc_RNA (1)...(19): siRNA sense strand
ucagaaggaaacuaucaaa

SEQ ID NO: 690067 - RNA, 19 nt, Homo sapiens
  misc_RNA (1)...(19): siRNA sense strand
aaagaggccaucagaagga

SEQ ID NO: 690068 - RNA, 19 nt, Homo sapiens
  misc_RNA (1)...(19): siRNA sense strand
guaauggaacaucaucugu

SEQ ID NO: 690069 - RNA, 19 nt, Homo sapiens
  misc_RNA (1)...(19): siRNA sense strand
uagagggacaugaagaauu

SEQ ID NO: 690070 - RNA, 19 nt, Homo sapiens
  misc_RNA (1)...(19): siRNA sense strand
ggagcacgagcaccuguga

SEQ ID NO: 690071 - RNA, 19 nt, Homo sapiens
  misc_RNA (1)...(19): siRNA sense strand
ugaaguucuuaacacauug

SEQ ID NO: 690072 - RNA, 19 nt, Homo sapiens
  misc_RNA (1)...(19): siRNA sense strand
agauggcccuccaaauuca

SEQ ID NO: 690073 - RNA, 19 nt, Homo sapiens
  misc_RNA (1)...(19): siRNA sense strand
uugcagcgggacuuuauua

SEQ ID NO: 690074 - RNA, 19 nt, Homo sapiens
  misc_RNA (1)...(19): siRNA sense strand
gaucaucagauaauaccau

SEQ ID NO: 690075 - RNA, 19 nt, Homo sapiens
  misc_RNA (1)...(19): siRNA sense strand
agggaucgccugguuguua

SEQ ID NO: 690076 - RNA, 19 nt, Homo sapiens
  misc_RNA (1)...(19): siRNA sense strand
ccaccacaaugaggcugua

SEQ ID NO: 690077 - RNA, 19 nt, Homo sapiens
  misc_RNA (1)...(19): siRNA sense strand
gugagagugugggauguga

SEQ ID NO: 690078 - RNA, 19 nt, Homo sapiens
  misc_RNA (1)...(19): siRNA sense strand
gacacaacuugcagaggau

SEQ ID NO: 690079 - RNA, 19 nt, Homo sapiens
  misc_RNA (1)...(19): siRNA sense strand
gaugcauccgguuugauaa

SEQ ID NO: 690080 - RNA, 19 nt, Homo sapiens
  misc_RNA (1)...(19): siRNA sense strand
gacaggaccaucaaagucu

SEQ ID NO: 690081 - RNA, 19 nt, Homo sapiens
  misc_RNA (1)...(19): siRNA sense strand
ugacaggaccaucaaaguc

SEQ ID NO: 690082 - RNA, 19 nt, Homo sapiens
  misc_RNA (1)...(19): siRNA sense strand
uaacuggcucuucagauuc

SEQ ID NO: 690083 - RNA, 19 nt, Homo sapiens
  misc_RNA (1)...(19): siRNA sense strand
uggaauguuugaaaguguu

SEQ ID NO: 690084 - RNA, 19 nt, Homo sapiens
  misc_RNA (1)...(19): siRNA sense strand
aacauacacuuacaucucu

SEQ ID NO: 690085 - RNA, 19 nt, Homo sapiens
  misc_RNA (1)...(19): siRNA sense strand
gaagaagcugauugaacga

SEQ ID NO: 690086 - RNA, 19 nt, Homo sapiens
  misc_RNA (1)...(19): siRNA sense strand
uguuucggcuccaguuuga

SEQ ID NO: 690087 - RNA, 19 nt, Homo sapiens
  misc_RNA (1)...(19): siRNA sense strand
gccaucagaaggaaacuau

SEQ ID NO: 690088 - RNA, 19 nt, Homo sapiens
  misc_RNA (1)...(19): siRNA sense strand
ggaauuuguggaacaucuu

SEQ ID NO: 690089 - RNA, 19 nt, Homo sapiens
  misc_RNA (1)...(19): siRNA sense strand
uaguagacuuugacgacaa

SEQ ID NO: 690090 - RNA, 19 nt, Homo sapiens
  misc_RNA (1)...(19): siRNA sense strand
gggcugccgucaauguagu

SEQ ID NO: 690091 - RNA, 19 nt, Homo sapiens
  misc_RNA (1)...(19): siRNA sense strand
ccuggaauguuugaaagug

SEQ ID NO: 690092 - RNA, 19 nt, Homo sapiens
  misc_RNA (1)...(19): siRNA sense strand
guaaaggugucuacuguuu

SEQ ID NO: 690093 - RNA, 19 nt, Homo sapiens
  misc_RNA (1)...(19): siRNA sense strand
guaacuggcucuucagauu

SEQ ID NO: 690094 - RNA, 19 nt, Homo sapiens
  misc_RNA (1)...(19): siRNA sense strand
gcacauugguggaacauuc

SEQ ID NO: 690095 - RNA, 19 nt, Homo sapiens
  misc_RNA (1)...(19): siRNA sense strand
guuaguggaucaucagaua

SEQ ID NO: 690096 - RNA, 19 nt, Homo sapiens
  misc_RNA (1)...(19): siRNA sense strand
gagcaaggcuuagaucaca

SEQ ID NO: 690097 - RNA, 19 nt, Homo sapiens
  misc_RNA (1)...(19): siRNA sense strand
gaaggaaugcuuuggaaga

SEQ ID NO: 690098 - RNA, 19 nt, Homo sapiens
  misc_RNA (1)...(19): siRNA sense strand
ugaauguggugccuguuua

SEQ ID NO: 690099 - RNA, 19 nt, Homo sapiens
  misc_RNA (1)...(19): siRNA sense strand
gauaaguaauggaacauca

SEQ ID NO: 690100 - RNA, 19 nt, Homo sapiens
  misc_RNA (1)...(19): siRNA sense strand
ugaaucagaucaaguggaa

SEQ ID NO: 690101 - RNA, 19 nt, Homo sapiens
  misc_RNA (1)...(19): siRNA sense strand
gugaaguucuuaacacauu

SEQ ID NO: 690102 - RNA, 19 nt, Homo sapiens
  misc_RNA (1)...(19): siRNA sense strand
ggacuuuauuaccgcuuua

SEQ ID NO: 690103 - RNA, 19 nt, Homo sapiens
  misc_RNA (1)...(19): siRNA sense strand
gaacauacacuuacaucuc

SEQ ID NO: 690104 - RNA, 19 nt, Homo sapiens
  misc_RNA (1)...(19): siRNA sense strand
gagcugguauguaaagaau

SEQ ID NO: 690105 - RNA, 19 nt, Homo sapiens
  misc_RNA (1)...(19): siRNA sense strand
gagcaccugugaauuuguu

SEQ ID NO: 690106 - RNA, 19 nt, Homo sapiens
  misc_RNA (1)...(19): siRNA sense strand
agagggacaugaagaauug

SEQ ID NO: 690107 - RNA, 19 nt, Homo sapiens
  misc_RNA (1)...(19): siRNA sense strand
gaacaucuuauuucacgaa

SEQ ID NO: 690108 - RNA, 19 nt, Homo sapiens
  misc_RNA (1)...(19): siRNA sense strand
caucuuauuucacgaaugu

SEQ ID NO: 690109 - RNA, 19 nt, Homo sapiens
  misc_RNA (1)...(19): siRNA sense strand
cagaaggaaugcuuuggaa

SEQ ID NO: 690110 - RNA, 19 nt, Homo sapiens
  misc_RNA (1)...(19): siRNA sense strand
gcucugggauauugaaugu

SEQ ID NO: 690111 - RNA, 19 nt, Homo sapiens
  misc_RNA (1)...(19): siRNA sense strand
gaauuuguggaacaucuua

SEQ ID NO: 690112 - RNA, 19 nt, Homo sapiens
  misc_RNA (1)...(19): siRNA sense strand
cgagugaucucagaaggaa

SEQ ID NO: 690113 - RNA, 19 nt, Homo sapiens
  misc_RNA (1)...(19): siRNA sense strand
acagauggcccuccaaauu

SEQ ID NO: 690114 - RNA, 19 nt, Homo sapiens
  misc_RNA (1)...(19): siRNA sense strand
gaagcugauugaacgaaug

SEQ ID NO: 690115 - RNA, 19 nt, Homo sapiens
  misc_RNA (1)...(19): siRNA sense strand
gcaaggcuuagaucacaua

SEQ ID NO: 690116 - RNA, 19 nt, Homo sapiens
  misc_RNA (1)...(19): siRNA sense strand
gcacuuacgcuucagcaau

SEQ ID NO: 690117 - RNA, 19 nt, Homo sapiens
  misc_RNA (1)...(19): siRNA sense strand
gugaucgucuccagaaaga

SEQ ID NO: 690118 - RNA, 19 nt, Homo sapiens
  misc_RNA (1)...(19): siRNA sense strand
gcuccaguuugaugaguuu

SEQ ID NO: 690119 - RNA, 19 nt, Homo sapiens
  misc_RNA (1)...(19): siRNA sense strand
gaauguggugccuguuuaa

SEQ ID NO: 690120 - RNA, 19 nt, Homo sapiens
  misc_RNA (1)...(19): siRNA sense strand
uaucagcauggacauauua

SEQ ID NO: 690121 - RNA, 19 nt, Homo sapiens
  misc_RNA (1)...(19): siRNA sense strand
gcagagggugggaucagua

SEQ ID NO: 690122 - RNA, 19 nt, Homo sapiens
  misc_RNA (1)...(19): siRNA sense strand
aauggaacaucaucuguga

SEQ ID NO: 690123 - RNA, 19 nt, Homo sapiens
  misc_RNA (1)...(19): siRNA sense strand
cagaucaaguggaauuugu

SEQ ID NO: 690124 - RNA, 19 nt, Homo sapiens
  misc_RNA (1)...(19): siRNA sense strand
guauugcacuuacgcuuca

SEQ ID NO: 690125 - RNA, 19 nt, Homo sapiens
  misc_RNA (1)...(19): siRNA sense strand
gcauggacauauuaacucu

SEQ ID NO: 690126 - RNA, 19 nt, Homo sapiens
  misc_RNA (1)...(19): siRNA sense strand
cgaugcauccgguuugaua

SEQ ID NO: 690127 - RNA, 19 nt, Homo sapiens
  misc_RNA (1)...(19): siRNA sense strand
ccauuaggcucugggauau

SEQ ID NO: 690128 - RNA, 19 nt, Homo sapiens
  misc_RNA (1)...(19): siRNA sense strand
cacgagcaccugugaauuu

SEQ ID NO: 690129 - RNA, 19 nt, Homo sapiens
  misc_RNA (1)...(19): siRNA sense strand
ccagaaagaggccaucaga

SEQ ID NO: 690130 - RNA, 19 nt, Homo sapiens
  misc_RNA (1)...(19): siRNA sense strand
ggaauguuugaaaguguua

SEQ ID NO: 690131 - RNA, 19 nt, Homo sapiens
  misc_RNA (1)...(19): siRNA sense strand
gcugguauguaaagaaugg

SEQ ID NO: 690132 - RNA, 19 nt, Homo sapiens
  misc_RNA (1)...(19): siRNA sense strand
acacauugauccaccacaa

SEQ ID NO: 690133 - RNA, 19 nt, Homo sapiens
  misc_RNA (1)...(19): siRNA sense strand
ccuacgagauaauucuauu

SEQ ID NO: 690134 - RNA, 19 nt, Homo sapiens
  misc_RNA (1)...(19): siRNA sense strand
ucacauagcagaaaacauu

SEQ ID NO: 690135 - RNA, 19 nt, Homo sapiens
  misc_RNA (1)...(19): siRNA sense strand
ggacugauggugaccuguu

SEQ ID NO: 690136 - RNA, 19 nt, Homo sapiens
  misc_RNA (1)...(19): siRNA sense strand
cauuguaacuggcucuuca

SEQ ID NO: 690137 - RNA, 19 nt, Homo sapiens
  misc_RNA (1)...(19): siRNA sense strand
ccacagauggcccuccaaa

SEQ ID NO: 690138 - RNA, 19 nt, Homo sapiens
  misc_RNA (1)...(19): siRNA sense strand
ucaguggccuacgagauaa

SEQ ID NO: 690139 - RNA, 19 nt, Homo sapiens
  misc_RNA (1)...(19): siRNA sense strand
gggacuuuauuaccgcuuu

SEQ ID NO: 690140 - RNA, 19 nt, Homo sapiens
  misc_RNA (1)...(19): siRNA sense strand
gcacgagcaccugugaauu

SEQ ID NO: 690141 - RNA, 19 nt, Homo sapiens
  misc_RNA (1)...(19): siRNA sense strand
cagauggcccuccaaauuc

SEQ ID NO: 690142 - RNA, 19 nt, Homo sapiens
  misc_RNA (1)...(19): siRNA sense strand
gaucaguaccuguuuaaaa

SEQ ID NO: 690143 - RNA, 19 nt, Homo sapiens
  misc_RNA (1)...(19): siRNA sense strand
gggaucaguaccuguuuaa

SEQ ID NO: 690144 - RNA, 19 nt, Homo sapiens
  misc_RNA (1)...(19): siRNA sense strand
ugggaucaguaccuguuua

SEQ ID NO: 690145 - RNA, 19 nt, Homo sapiens
  misc_RNA (1)...(19): siRNA sense strand
gcacugauccccuauggaa

SEQ ID NO: 690146 - RNA, 19 nt, Homo sapiens
  misc_RNA (1)...(19): siRNA sense strand
agaaagaggccaucagaag

SEQ ID NO: 690147 - RNA, 19 nt, Homo sapiens
  misc_RNA (1)...(19): siRNA sense strand
gcagagcugguauguaaag

SEQ ID NO: 690148 - RNA, 19 nt, Homo sapiens
  misc_RNA (1)...(19): siRNA sense strand
gaaguucuuaacacauuga

SEQ ID NO: 690149 - RNA, 19 nt, Homo sapiens
  misc_RNA (1)...(19): siRNA sense strand
gggugaaguucuuaacaca

SEQ ID NO: 690150 - RNA, 19 nt, Homo sapiens
  misc_RNA (1)...(19): siRNA sense strand
uguggaacaucuuauuuca

SEQ ID NO: 690151 - RNA, 19 nt, Homo sapiens
  misc_RNA (1)...(19): siRNA sense strand
aaggaaugcuuuggaagaa

SEQ ID NO: 690152 - RNA, 19 nt, Homo sapiens
  misc_RNA (1)...(19): siRNA sense strand
uauuaacucuuaccugaag

SEQ ID NO: 690153 - RNA, 19 nt, Homo sapiens
  misc_RNA (1)...(19): siRNA sense strand
aaucagaucaaguggaauu

SEQ ID NO: 690154 - RNA, 19 nt, Homo sapiens
  misc_RNA (1)...(19): siRNA sense strand
aaaggugucuacuguuuac

SEQ ID NO: 690155 - RNA, 19 nt, Homo sapiens
  misc_RNA (1)...(19): siRNA sense strand
aggcuuagaucacauagca

SEQ ID NO: 690156 - RNA, 19 nt, Homo sapiens
  misc_RNA (1)...(19): siRNA sense strand
gaucucagaaggaaugcuu

SEQ ID NO: 690157 - RNA, 19 nt, Homo sapiens
  misc_RNA (1)...(19): siRNA sense strand
gggaucgccugguuguuag

SEQ ID NO: 690158 - RNA, 19 nt, Homo sapiens
  misc_RNA (1)...(19): siRNA sense strand
gaauuuguucguacucuca

SEQ ID NO: 690159 - RNA, 19 nt, Homo sapiens
  misc_RNA (1)...(19): siRNA sense strand
cacuuacgcuucagcaaug

SEQ ID NO: 690160 - RNA, 19 nt, Homo sapiens
  misc_RNA (1)...(19): siRNA sense strand
caucagaaggaaacuauca

SEQ ID NO: 690161 - RNA, 19 nt, Homo sapiens
  misc_RNA (1)...(19): siRNA sense strand
gucauuauacccaaagauu

SEQ ID NO: 690162 - RNA, 19 nt, Homo sapiens
  misc_RNA (1)...(19): siRNA sense strand
ucaaguggaauuuguggaa

SEQ ID NO: 690163 - RNA, 19 nt, Homo sapiens
  misc_RNA (1)...(19): siRNA sense strand
gcugauugaacgaauggua

SEQ ID NO: 690164 - RNA, 19 nt, Homo sapiens
  misc_RNA (1)...(19): siRNA sense strand
gaacauucuggacgugugu

SEQ ID NO: 690165 - RNA, 19 nt, Homo sapiens
  misc_RNA (1)...(19): siRNA sense strand
gcauccgguuugauaacaa

SEQ ID NO: 690166 - RNA, 19 nt, Homo sapiens
  misc_RNA (1)...(19): siRNA sense strand
ucagaaggaaacuaucaaa

SEQ ID NO: 690167 - RNA, 19 nt, Homo sapiens
  misc_RNA (1)...(19): siRNA sense strand
aaagaggccaucagaagga

SEQ ID NO: 690168 - RNA, 19 nt, Homo sapiens
  misc_RNA (1)...(19): siRNA sense strand
guaauggaacaucaucugu

SEQ ID NO: 690169 - RNA, 19 nt, Homo sapiens
  misc_RNA (1)...(19): siRNA sense strand
uagagggacaugaagaauu

SEQ ID NO: 690170 - RNA, 19 nt, Homo sapiens
  misc_RNA (1)...(19): siRNA sense strand
ggagcacgagcaccuguga

SEQ ID NO: 690171 - RNA, 19 nt, Homo sapiens
  misc_RNA (1)...(19): siRNA sense strand
ugaaguucuuaacacauug

SEQ ID NO: 690172 - RNA, 19 nt, Homo sapiens
  misc_RNA (1)...(19): siRNA sense strand
agauggcccuccaaauuca

SEQ ID NO: 690173 - RNA, 19 nt, Homo sapiens
  misc_RNA (1)...(19): siRNA sense strand
uugcagcgggacuuuauua

SEQ ID NO: 690174 - RNA, 19 nt, Homo sapiens
  misc_RNA (1)...(19): siRNA sense strand
gaucaucagauaauaccau

SEQ ID NO: 690175 - RNA, 19 nt, Homo sapiens
  misc_RNA (1)...(19): siRNA sense strand
agggaucgccugguuguua

SEQ ID NO: 690176 - RNA, 19 nt, Homo sapiens
  misc_RNA (1)...(19): siRNA sense strand
ccaccacaaugaggcugua

SEQ ID NO: 690177 - RNA, 19 nt, Homo sapiens
  misc_RNA (1)...(19): siRNA sense strand
gugagagugugggauguga

SEQ ID NO: 690178 - RNA, 19 nt, Homo sapiens
  misc_RNA (1)...(19): siRNA sense strand
gacacaacuugcagaggau

SEQ ID NO: 690179 - RNA, 19 nt, Homo sapiens
  misc_RNA (1)...(19): siRNA sense strand
gaugcauccgguuugauaa

SEQ ID NO: 690180 - RNA, 19 nt, Homo sapiens
  misc_RNA (1)...(19): siRNA sense strand
gacaggaccaucaaagucu

SEQ ID NO: 690181 - RNA, 19 nt, Homo sapiens
  misc_RNA (1)...(19): siRNA sense strand
ugacaggaccaucaaaguc

SEQ ID NO: 690182 - RNA, 19 nt, Homo sapiens
  misc_RNA (1)...(19): siRNA sense strand
uaacuggcucuucagauuc

SEQ ID NO: 690183 - RNA, 19 nt, Homo sapiens
  misc_RNA (1)...(19): siRNA sense strand
uggaauguuugaaaguguu

SEQ ID NO: 690184 - RNA, 19 nt, Homo sapiens
  misc_RNA (1)...(19): siRNA sense strand
aacauacacuuacaucucu

SEQ ID NO: 690185 - RNA, 19 nt, Homo sapiens
  misc_RNA (1)...(19): siRNA sense strand
gaagaagcugauugaacga

SEQ ID NO: 690186 - RNA, 19 nt, Homo sapiens
  misc_RNA (1)...(19): siRNA sense strand
uguuucggcuccaguuuga

SEQ ID NO: 690187 - RNA, 19 nt, Homo sapiens
  misc_RNA (1)...(19): siRNA sense strand
gccaucagaaggaaacuau

SEQ ID NO: 690188 - RNA, 19 nt, Homo sapiens
  misc_RNA (1)...(19): siRNA sense strand
ggaauuuguggaacaucuu

SEQ ID NO: 690189 - RNA, 19 nt, Homo sapiens
  misc_RNA (1)...(19): siRNA sense strand
uaguagacuuugacgacaa

SEQ ID NO: 690190 - RNA, 19 nt, Homo sapiens
  misc_RNA (1)...(19): siRNA sense strand
gggcugccgucaauguagu

SEQ ID NO: 690191 - RNA, 19 nt, Homo sapiens
  misc_RNA (1)...(19): siRNA sense strand
ccuggaauguuugaaagug

SEQ ID NO: 690192 - RNA, 19 nt, Homo sapiens
  misc_RNA (1)...(19): siRNA sense strand
guaaaggugucuacuguuu

SEQ ID NO: 690193 - RNA, 19 nt, Homo sapiens
  misc_RNA (1)...(19): siRNA sense strand
guaacuggcucuucagauu

SEQ ID NO: 690194 - RNA, 19 nt, Homo sapiens
  misc_RNA (1)...(19): siRNA sense strand
gcacauugguggaacauuc

SEQ ID NO: 690195 - RNA, 19 nt, Homo sapiens
  misc_RNA (1)...(19): siRNA sense strand
guuaguggaucaucagaua

SEQ ID NO: 690196 - RNA, 19 nt, Homo sapiens
  misc_RNA (1)...(19): siRNA sense strand
gagcaaggcuuagaucaca

SEQ ID NO: 690197 - RNA, 19 nt, Homo sapiens
  misc_RNA (1)...(19): siRNA sense strand
gaaggaaugcuuuggaaga

SEQ ID NO: 690198 - RNA, 19 nt, Homo sapiens
  misc_RNA (1)...(19): siRNA sense strand
ugaauguggugccuguuua

SEQ ID NO: 690199 - RNA, 19 nt, Homo sapiens
  misc_RNA (1)...(19): siRNA sense strand
gauaaguaauggaacauca

SEQ ID NO: 690200 - RNA, 19 nt, Homo sapiens
  misc_RNA (1)...(19): siRNA sense strand
ugaaucagaucaaguggaa

SEQ ID NO: 690201 - RNA, 19 nt, Homo sapiens
  misc_RNA (1)...(19): siRNA sense strand
gugaaguucuuaacacauu

SEQ ID NO: 690202 - RNA, 19 nt, Homo sapiens
  misc_RNA (1)...(19): siRNA sense strand
ggacuuuauuaccgcuuua

SEQ ID NO: 690203 - RNA, 19 nt, Homo sapiens
  misc_RNA (1)...(19): siRNA sense strand
gaacauacacuuacaucuc

SEQ ID NO: 690204 - RNA, 19 nt, Homo sapiens
  misc_RNA (1)...(19): siRNA sense strand
gagcugguauguaaagaau

SEQ ID NO: 690205 - RNA, 19 nt, Homo sapiens
  misc_RNA (1)...(19): siRNA sense strand
gagcaccugugaauuuguu

SEQ ID NO: 690206 - RNA, 19 nt, Homo sapiens
  misc_RNA (1)...(19): siRNA sense strand
agagggacaugaagaauug

SEQ ID NO: 690207 - RNA, 19 nt, Homo sapiens
  misc_RNA (1)...(19): siRNA sense strand
gaacaucuuauuucacgaa

SEQ ID NO: 690208 - RNA, 19 nt, Homo sapiens
  misc_RNA (1)...(19): siRNA sense strand
caucuuauuucacgaaugu

SEQ ID NO: 690209 - RNA, 19 nt, Homo sapiens
  misc_RNA (1)...(19): siRNA sense strand
cagaaggaaugcuuuggaa

SEQ ID NO: 690210 - RNA, 19 nt, Homo sapiens
  misc_RNA (1)...(19): siRNA sense strand
gcucugggauauugaaugu

SEQ ID NO: 690211 - RNA, 19 nt, Homo sapiens
  misc_RNA (1)...(19): siRNA sense strand
gaauuuguggaacaucuua

SEQ ID NO: 690212 - RNA, 19 nt, Homo sapiens
  misc_RNA (1)...(19): siRNA sense strand
cgagugaucucagaaggaa

SEQ ID NO: 690213 - RNA, 19 nt, Homo sapiens
  misc_RNA (1)...(19): siRNA sense strand
acagauggcccuccaaauu

SEQ ID NO: 690214 - RNA, 19 nt, Homo sapiens
  misc_RNA (1)...(19): siRNA sense strand
gaagcugauugaacgaaug

SEQ ID NO: 690215 - RNA, 19 nt, Homo sapiens
  misc_RNA (1)...(19): siRNA sense strand
gcaaggcuuagaucacaua

SEQ ID NO: 690216 - RNA, 19 nt, Homo sapiens
  misc_RNA (1)...(19): siRNA sense strand
gcacuuacgcuucagcaau

SEQ ID NO: 690217 - RNA, 19 nt, Homo sapiens
  misc_RNA (1)...(19): siRNA sense strand
gugaucgucuccagaaaga

SEQ ID NO: 690218 - RNA, 19 nt, Homo sapiens
  misc_RNA (1)...(19): siRNA sense strand
gcuccaguuugaugaguuu

SEQ ID NO: 690219 - RNA, 19 nt, Homo sapiens
  misc_RNA (1)...(19): siRNA sense strand
gaauguggugccuguuuaa

SEQ ID NO: 690220 - RNA, 19 nt, Homo sapiens
  misc_RNA (1)...(19): siRNA sense strand
uaucagcauggacauauua

SEQ ID NO: 690221 - RNA, 19 nt, Homo sapiens
  misc_RNA (1)...(19): siRNA sense strand
gcagagggugggaucagua

SEQ ID NO: 690222 - RNA, 19 nt, Homo sapiens
  misc_RNA (1)...(19): siRNA sense strand
aauggaacaucaucuguga

SEQ ID NO: 690223 - RNA, 19 nt, Homo sapiens
  misc_RNA (1)...(19): siRNA sense strand
cagaucaaguggaauuugu

SEQ ID NO: 690224 - RNA, 19 nt, Homo sapiens
  misc_RNA (1)...(19): siRNA sense strand
guauugcacuuacgcuuca

SEQ ID NO: 690225 - RNA, 19 nt, Homo sapiens
  misc_RNA (1)...(19): siRNA sense strand
gcauggacauauuaacucu

SEQ ID NO: 690226 - RNA, 19 nt, Homo sapiens
  misc_RNA (1)...(19): siRNA sense strand
cgaugcauccgguuugaua

SEQ ID NO: 690227 - RNA, 19 nt, Homo sapiens
  misc_RNA (1)...(19): siRNA sense strand
ccauuaggcucugggauau

SEQ ID NO: 690228 - RNA, 19 nt, Homo sapiens
  misc_RNA (1)...(19): siRNA sense strand
cacgagcaccugugaauuu

SEQ ID NO: 690229 - RNA, 19 nt, Homo sapiens
  misc_RNA (1)...(19): siRNA sense strand
ccagaaagaggccaucaga

SEQ ID NO: 690230 - RNA, 19 nt, Homo sapiens
  misc_RNA (1)...(19): siRNA sense strand
ggaauguuugaaaguguua

SEQ ID NO: 690231 - RNA, 19 nt, Homo sapiens
  misc_RNA (1)...(19): siRNA sense strand
gcugguauguaaagaaugg

SEQ ID NO: 690232 - RNA, 19 nt, Homo sapiens
  misc_RNA (1)...(19): siRNA sense strand
acacauugauccaccacaa

SEQ ID NO: 690233 - RNA, 19 nt, Homo sapiens
  misc_RNA (1)...(19): siRNA sense strand
ccuacgagauaauucuauu

SEQ ID NO: 690234 - RNA, 19 nt, Homo sapiens
  misc_RNA (1)...(19): siRNA sense strand
ucacauagcagaaaacauu

SEQ ID NO: 690235 - RNA, 19 nt, Homo sapiens
  misc_RNA (1)...(19): siRNA sense strand
ggacugauggugaccuguu

SEQ ID NO: 690236 - RNA, 19 nt, Homo sapiens
  misc_RNA (1)...(19): siRNA sense strand
cauuguaacuggcucuuca

SEQ ID NO: 690237 - RNA, 19 nt, Homo sapiens
  misc_RNA (1)...(19): siRNA sense strand
ccacagauggcccuccaaa

SEQ ID NO: 690238 - RNA, 19 nt, Homo sapiens
  misc_RNA (1)...(19): siRNA sense strand
ucaguggccuacgagauaa

SEQ ID NO: 690239 - RNA, 19 nt, Homo sapiens
  misc_RNA (1)...(19): siRNA sense strand
gggacuuuauuaccgcuuu

SEQ ID NO: 690240 - RNA, 19 nt, Homo sapiens
  misc_RNA (1)...(19): siRNA sense strand
gcacgagcaccugugaauu

SEQ ID NO: 690241 - RNA, 19 nt, Homo sapiens
  misc_RNA (1)...(19): siRNA sense strand
cagauggcccuccaaauuc

SEQ ID NO: 690242 - RNA, 19 nt, Homo sapiens
  misc_RNA (1)...(19): siRNA sense strand
gaucaguaccuguuuaaaa

SEQ ID NO: 690243 - RNA, 19 nt, Homo sapiens
  misc_RNA (1)...(19): siRNA sense strand
gggaucaguaccuguuuaa

SEQ ID NO: 690244 - RNA, 19 nt, Homo sapiens
  misc_RNA (1)...(19): siRNA sense strand
ugggaucaguaccuguuua

SEQ ID NO: 690245 - RNA, 19 nt, Homo sapiens
  misc_RNA (1)...(19): siRNA sense strand
gcacugauccccuauggaa

SEQ ID NO: 690246 - RNA, 19 nt, Homo sapiens
  misc_RNA (1)...(19): siRNA sense strand
agaaagaggccaucagaag

SEQ ID NO: 690247 - RNA, 19 nt, Homo sapiens
  misc_RNA (1)...(19): siRNA sense strand
gcagagcugguauguaaag

SEQ ID NO: 690248 - RNA, 19 nt, Homo sapiens
  misc_RNA (1)...(19): siRNA sense strand
gaaguucuuaacacauuga

SEQ ID NO: 690249 - RNA, 19 nt, Homo sapiens
  misc_RNA (1)...(19): siRNA sense strand
gggugaaguucuuaacaca

SEQ ID NO: 690250 - RNA, 19 nt, Homo sapiens
  misc_RNA (1)...(19): siRNA sense strand
uguggaacaucuuauuuca

SEQ ID NO: 690251 - RNA, 19 nt, Homo sapiens
  misc_RNA (1)...(19): siRNA sense strand
aaggaaugcuuuggaagaa

SEQ ID NO: 690252 - RNA, 19 nt, Homo sapiens
  misc_RNA (1)...(19): siRNA sense strand
uauuaacucuuaccugaag

SEQ ID NO: 690253 - RNA, 19 nt, Homo sapiens
  misc_RNA (1)...(19): siRNA sense strand
aaucagaucaaguggaauu

SEQ ID NO: 690254 - RNA, 19 nt, Homo sapiens
  misc_RNA (1)...(19): siRNA sense strand
aaaggugucuacuguuuac

SEQ ID NO: 690255 - RNA, 19 nt, Homo sapiens
  misc_RNA (1)...(19): siRNA sense strand
aggcuuagaucacauagca

SEQ ID NO: 690256 - RNA, 19 nt, Homo sapiens
  misc_RNA (1)...(19): siRNA sense strand
gaucucagaaggaaugcuu

SEQ ID NO: 690257 - RNA, 19 nt, Homo sapiens
  misc_RNA (1)...(19): siRNA sense strand
gggaucgccugguuguuag

SEQ ID NO: 690258 - RNA, 19 nt, Homo sapiens
  misc_RNA (1)...(19): siRNA sense strand
gaauuuguucguacucuca

SEQ ID NO: 690259 - RNA, 19 nt, Homo sapiens
  misc_RNA (1)...(19): siRNA sense strand
cacuuacgcuucagcaaug

SEQ ID NO: 690260 - RNA, 19 nt, Homo sapiens
  misc_RNA (1)...(19): siRNA sense strand
caucagaaggaaacuauca

SEQ ID NO: 690261 - RNA, 19 nt, Homo sapiens
  misc_RNA (1)...(19): siRNA sense strand
gucauuauacccaaagauu

SEQ ID NO: 690262 - RNA, 19 nt, Homo sapiens
  misc_RNA (1)...(19): siRNA sense strand
ucaaguggaauuuguggaa

SEQ ID NO: 690263 - RNA, 19 nt, Homo sapiens
  misc_RNA (1)...(19): siRNA sense strand
gcugauugaacgaauggua

SEQ ID NO: 690264 - RNA, 19 nt, Homo sapiens
  misc_RNA (1)...(19): siRNA sense strand
gaacauucuggacgugugu

SEQ ID NO: 690265 - RNA, 19 nt, Homo sapiens
  misc_RNA (1)...(19): siRNA sense strand
gcauccgguuugauaacaa

SEQ ID NO: 690266 - RNA, 19 nt, Homo sapiens
  misc_RNA (1)...(19): siRNA sense strand
ucagaaggaaacuaucaaa

SEQ ID NO: 690267 - RNA, 19 nt, Homo sapiens
  misc_RNA (1)...(19): siRNA sense strand
aaagaggccaucagaagga

SEQ ID NO: 690268 - RNA, 19 nt, Homo sapiens
  misc_RNA (1)...(19): siRNA sense strand
guaauggaacaucaucugu

SEQ ID NO: 690269 - RNA, 19 nt, Homo sapiens
  misc_RNA (1)...(19): siRNA sense strand
uagagggacaugaagaauu

SEQ ID NO: 690270 - RNA, 19 nt, Homo sapiens
  misc_RNA (1)...(19): siRNA sense strand
ggagcacgagcaccuguga

SEQ ID NO: 690271 - RNA, 19 nt, Homo sapiens
  misc_RNA (1)...(19): siRNA sense strand
ugaaguucuuaacacauug

SEQ ID NO: 690272 - RNA, 19 nt, Homo sapiens
  misc_RNA (1)...(19): siRNA sense strand
agauggcccuccaaauuca

SEQ ID NO: 690273 - RNA, 19 nt, Homo sapiens
  misc_RNA (1)...(19): siRNA sense strand
uugcagcgggacuuuauua

SEQ ID NO: 690274 - RNA, 19 nt, Homo sapiens
  misc_RNA (1)...(19): siRNA sense strand
gaucaucagauaauaccau

SEQ ID NO: 690275 - RNA, 19 nt, Homo sapiens
  misc_RNA (1)...(19): siRNA sense strand
agggaucgccugguuguua

SEQ ID NO: 690276 - RNA, 19 nt, Homo sapiens
  misc_RNA (1)...(19): siRNA sense strand
ccaccacaaugaggcugua

SEQ ID NO: 690277 - RNA, 19 nt, Homo sapiens
  misc_RNA (1)...(19): siRNA sense strand
gugagagugugggauguga

SEQ ID NO: 690278 - RNA, 19 nt, Homo sapiens
  misc_RNA (1)...(19): siRNA sense strand
gacacaacuugcagaggau

SEQ ID NO: 690279 - RNA, 19 nt, Homo sapiens
  misc_RNA (1)...(19): siRNA sense strand
gaugcauccgguuugauaa

SEQ ID NO: 690280 - RNA, 19 nt, Homo sapiens
  misc_RNA (1)...(19): siRNA sense strand
gacaggaccaucaaagucu

SEQ ID NO: 690281 - RNA, 19 nt, Homo sapiens
  misc_RNA (1)...(19): siRNA sense strand
ugacaggaccaucaaaguc

SEQ ID NO: 690282 - RNA, 19 nt, Homo sapiens
  misc_RNA (1)...(19): siRNA sense strand
uaacuggcucuucagauuc

SEQ ID NO: 690283 - RNA, 19 nt, Homo sapiens
  misc_RNA (1)...(19): siRNA sense strand
uggaauguuugaaaguguu

SEQ ID NO: 690284 - RNA, 19 nt, Homo sapiens
  misc_RNA (1)...(19): siRNA sense strand
aacauacacuuacaucucu

SEQ ID NO: 690285 - RNA, 19 nt, Homo sapiens
  misc_RNA (1)...(19): siRNA sense strand
gaagaagcugauugaacga

SEQ ID NO: 690286 - RNA, 19 nt, Homo sapiens
  misc_RNA (1)...(19): siRNA sense strand
uguuucggcuccaguuuga

SEQ ID NO: 690287 - RNA, 19 nt, Homo sapiens
  misc_RNA (1)...(19): siRNA sense strand
gccaucagaaggaaacuau

SEQ ID NO: 690288 - RNA, 19 nt, Homo sapiens
  misc_RNA (1)...(19): siRNA sense strand
ggaauuuguggaacaucuu

SEQ ID NO: 690289 - RNA, 19 nt, Homo sapiens
  misc_RNA (1)...(19): siRNA sense strand
uaguagacuuugacgacaa

SEQ ID NO: 690290 - RNA, 19 nt, Homo sapiens
  misc_RNA (1)...(19): siRNA sense strand
gggcugccgucaauguagu

SEQ ID NO: 690291 - RNA, 19 nt, Homo sapiens
  misc_RNA (1)...(19): siRNA sense strand
ccuggaauguuugaaagug

SEQ ID NO: 690292 - RNA, 19 nt, Homo sapiens
  misc_RNA (1)...(19): siRNA sense strand
guaaaggugucuacuguuu

SEQ ID NO: 690293 - RNA, 19 nt, Homo sapiens
  misc_RNA (1)...(19): siRNA sense strand
guaacuggcucuucagauu

SEQ ID NO: 690294 - RNA, 19 nt, Homo sapiens
  misc_RNA (1)...(19): siRNA sense strand
gcacauugguggaacauuc

SEQ ID NO: 690295 - RNA, 19 nt, Homo sapiens
  misc_RNA (1)...(19): siRNA sense strand
guuaguggaucaucagaua

SEQ ID NO: 690296 - RNA, 19 nt, Homo sapiens
  misc_RNA (1)...(19): siRNA sense strand
gagcaaggcuuagaucaca

SEQ ID NO: 690297 - RNA, 19 nt, Homo sapiens
  misc_RNA (1)...(19): siRNA sense strand
gaaggaaugcuuuggaaga

SEQ ID NO: 690298 - RNA, 19 nt, Homo sapiens
  misc_RNA (1)...(19): siRNA sense strand
ugaauguggugccuguuua

SEQ ID NO: 690299 - RNA, 19 nt, Homo sapiens
  misc_RNA (1)...(19): siRNA sense strand
gauaaguaauggaacauca

SEQ ID NO: 690300 - RNA, 19 nt, Homo sapiens
  misc_RNA (1)...(19): siRNA sense strand
ugaaucagaucaaguggaa

SEQ ID NO: 690301 - RNA, 19 nt, Homo sapiens
  misc_RNA (1)...(19): siRNA sense strand
gugaaguucuuaacacauu

SEQ ID NO: 690302 - RNA, 19 nt, Homo sapiens
  misc_RNA (1)...(19): siRNA sense strand
ggacuuuauuaccgcuuua

SEQ ID NO: 690303 - RNA, 19 nt, Homo sapiens
  misc_RNA (1)...(19): siRNA sense strand
gaacauacacuuacaucuc

SEQ ID NO: 690304 - RNA, 19 nt, Homo sapiens
  misc_RNA (1)...(19): siRNA sense strand
gagcugguauguaaagaau

SEQ ID NO: 690305 - RNA, 19 nt, Homo sapiens
  misc_RNA (1)...(19): siRNA sense strand
gagcaccugugaauuuguu

SEQ ID NO: 690306 - RNA, 19 nt, Homo sapiens
  misc_RNA (1)...(19): siRNA sense strand
agagggacaugaagaauug

SEQ ID NO: 690307 - RNA, 19 nt, Homo sapiens
  misc_RNA (1)...(19): siRNA sense strand
gaacaucuuauuucacgaa

SEQ ID NO: 690308 - RNA, 19 nt, Homo sapiens
  misc_RNA (1)...(19): siRNA sense strand
caucuuauuucacgaaugu

SEQ ID NO: 690309 - RNA, 19 nt, Homo sapiens
  misc_RNA (1)...(19): siRNA sense strand
cagaaggaaugcuuuggaa

SEQ ID NO: 690310 - RNA, 19 nt, Homo sapiens
  misc_RNA (1)...(19): siRNA sense strand
gcucugggauauugaaugu

SEQ ID NO: 690311 - RNA, 19 nt, Homo sapiens
  misc_RNA (1)...(19): siRNA sense strand
gaauuuguggaacaucuua

SEQ ID NO: 690312 - RNA, 19 nt, Homo sapiens
  misc_RNA (1)...(19): siRNA sense strand
cgagugaucucagaaggaa

SEQ ID NO: 690313 - RNA, 19 nt, Homo sapiens
  misc_RNA (1)...(19): siRNA sense strand
acagauggcccuccaaauu

SEQ ID NO: 690314 - RNA, 19 nt, Homo sapiens
  misc_RNA (1)...(19): siRNA sense strand
gaagcugauugaacgaaug

SEQ ID NO: 690315 - RNA, 19 nt, Homo sapiens
  misc_RNA (1)...(19): siRNA sense strand
gcaaggcuuagaucacaua

SEQ ID NO: 690316 - RNA, 19 nt, Homo sapiens
  misc_RNA (1)...(19): siRNA sense strand
gcacuuacgcuucagcaau

SEQ ID NO: 690317 - RNA, 19 nt, Homo sapiens
  misc_RNA (1)...(19): siRNA sense strand
gugaucgucuccagaaaga

SEQ ID NO: 690318 - RNA, 19 nt, Homo sapiens
  misc_RNA (1)...(19): siRNA sense strand
gcuccaguuugaugaguuu

SEQ ID NO: 690319 - RNA, 19 nt, Homo sapiens
  misc_RNA (1)...(19): siRNA sense strand
gaauguggugccuguuuaa

SEQ ID NO: 690320 - RNA, 19 nt, Homo sapiens
  misc_RNA (1)...(19): siRNA sense strand
uaucagcauggacauauua

SEQ ID NO: 690321 - RNA, 19 nt, Homo sapiens
  misc_RNA (1)...(19): siRNA sense strand
gcagagggugggaucagua

SEQ ID NO: 690322 - RNA, 19 nt, Homo sapiens
  misc_RNA (1)...(19): siRNA sense strand
aauggaacaucaucuguga

SEQ ID NO: 690323 - RNA, 19 nt, Homo sapiens
  misc_RNA (1)...(19): siRNA sense strand
cagaucaaguggaauuugu

SEQ ID NO: 690324 - RNA, 19 nt, Homo sapiens
  misc_RNA (1)...(19): siRNA sense strand
guauugcacuuacgcuuca

SEQ ID NO: 690325 - RNA, 19 nt, Homo sapiens
  misc_RNA (1)...(19): siRNA sense strand
gcauggacauauuaacucu

SEQ ID NO: 690326 - RNA, 19 nt, Homo sapiens
  misc_RNA (1)...(19): siRNA sense strand
cgaugcauccgguuugaua

SEQ ID NO: 690327 - RNA, 19 nt, Homo sapiens
  misc_RNA (1)...(19): siRNA sense strand
ccauuaggcucugggauau

SEQ ID NO: 690328 - RNA, 19 nt, Homo sapiens
  misc_RNA (1)...(19): siRNA sense strand
cacgagcaccugugaauuu

SEQ ID NO: 690329 - RNA, 19 nt, Homo sapiens
  misc_RNA (1)...(19): siRNA sense strand
ccagaaagaggccaucaga

SEQ ID NO: 690330 - RNA, 19 nt, Homo sapiens
  misc_RNA (1)...(19): siRNA sense strand
ggaauguuugaaaguguua

SEQ ID NO: 690331 - RNA, 19 nt, Homo sapiens
  misc_RNA (1)...(19): siRNA sense strand
gcugguauguaaagaaugg

SEQ ID NO: 690332 - RNA, 19 nt, Homo sapiens
  misc_RNA (1)...(19): siRNA sense strand
acacauugauccaccacaa

SEQ ID NO: 690333 - RNA, 19 nt, Homo sapiens
  misc_RNA (1)...(19): siRNA sense strand
ccuacgagauaauucuauu

SEQ ID NO: 690334 - RNA, 19 nt, Homo sapiens
  misc_RNA (1)...(19): siRNA sense strand
ucacauagcagaaaacauu

SEQ ID NO: 690335 - RNA, 19 nt, Homo sapiens
  misc_RNA (1)...(19): siRNA sense strand
ggacugauggugaccuguu

SEQ ID NO: 690336 - RNA, 19 nt, Homo sapiens
  misc_RNA (1)...(19): siRNA sense strand
cauuguaacuggcucuuca

SEQ ID NO: 690337 - RNA, 19 nt, Homo sapiens
  misc_RNA (1)...(19): siRNA sense strand
ccacagauggcccuccaaa

SEQ ID NO: 690338 - RNA, 19 nt, Homo sapiens
  misc_RNA (1)...(19): siRNA sense strand
ucaguggccuacgagauaa

SEQ ID NO: 690339 - RNA, 19 nt, Homo sapiens
  misc_RNA (1)...(19): siRNA sense strand
gggacuuuauuaccgcuuu

SEQ ID NO: 690340 - RNA, 19 nt, Homo sapiens
  misc_RNA (1)...(19): siRNA sense strand
gcacgagcaccugugaauu

SEQ ID NO: 690341 - RNA, 19 nt, Homo sapiens
  misc_RNA (1)...(19): siRNA sense strand
cagauggcccuccaaauuc

SEQ ID NO: 690342 - RNA, 19 nt, Homo sapiens
  misc_RNA (1)...(19): siRNA sense strand
gaucaguaccuguuuaaaa

SEQ ID NO: 690343 - RNA, 19 nt, Homo sapiens
  misc_RNA (1)...(19): siRNA sense strand
gggaucaguaccuguuuaa

SEQ ID NO: 690344 - RNA, 19 nt, Homo sapiens
  misc_RNA (1)...(19): siRNA sense strand
ugggaucaguaccuguuua

SEQ ID NO: 690345 - RNA, 19 nt, Homo sapiens
  misc_RNA (1)...(19): siRNA sense strand
gcacugauccccuauggaa

SEQ ID NO: 690346 - RNA, 19 nt, Homo sapiens
  misc_RNA (1)...(19): siRNA sense strand
agaaagaggccaucagaag

SEQ ID NO: 690347 - RNA, 19 nt, Homo sapiens
  misc_RNA (1)...(19): siRNA sense strand
gcagagcugguauguaaag

SEQ ID NO: 690348 - RNA, 19 nt, Homo sapiens
  misc_RNA (1)...(19): siRNA sense strand
gaaguucuuaacacauuga

SEQ ID NO: 690349 - RNA, 19 nt, Homo sapiens
  misc_RNA (1)...(19): siRNA sense strand
gggugaaguucuuaacaca

SEQ ID NO: 690350 - RNA, 19 nt, Homo sapiens
  misc_RNA (1)...(19): siRNA sense strand
uguggaacaucuuauuuca

SEQ ID NO: 690351 - RNA, 19 nt, Homo sapiens
  misc_RNA (1)...(19): siRNA sense strand
aaggaaugcuuuggaagaa

SEQ ID NO: 690352 - RNA, 19 nt, Homo sapiens
  misc_RNA (1)...(19): siRNA sense strand
uauuaacucuuaccugaag

SEQ ID NO: 690353 - RNA, 19 nt, Homo sapiens
  misc_RNA (1)...(19): siRNA sense strand
aaucagaucaaguggaauu

SEQ ID NO: 690354 - RNA, 19 nt, Homo sapiens
  misc_RNA (1)...(19): siRNA sense strand
aaaggugucuacuguuuac

SEQ ID NO: 690355 - RNA, 19 nt, Homo sapiens
  misc_RNA (1)...(19): siRNA sense strand
aggcuuagaucacauagca

SEQ ID NO: 690356 - RNA, 19 nt, Homo sapiens
  misc_RNA (1)...(19): siRNA sense strand
gaucucagaaggaaugcuu

SEQ ID NO: 690357 - RNA, 19 nt, Homo sapiens
  misc_RNA (1)...(19): siRNA sense strand
gggaucgccugguuguuag

SEQ ID NO: 690358 - RNA, 19 nt, Homo sapiens
  misc_RNA (1)...(19): siRNA sense strand
gaauuuguucguacucuca

SEQ ID NO: 690359 - RNA, 19 nt, Homo sapiens
  misc_RNA (1)...(19): siRNA sense strand
cacuuacgcuucagcaaug

SEQ ID NO: 690360 - RNA, 19 nt, Homo sapiens
  misc_RNA (1)...(19): siRNA sense strand
caucagaaggaaacuauca

SEQ ID NO: 690361 - RNA, 19 nt, Homo sapiens
  misc_RNA (1)...(19): siRNA sense strand
gucauuauacccaaagauu

SEQ ID NO: 690362 - RNA, 19 nt, Homo sapiens
  misc_RNA (1)...(19): siRNA sense strand
ucaaguggaauuuguggaa

SEQ ID NO: 690363 - RNA, 19 nt, Homo sapiens
  misc_RNA (1)...(19): siRNA sense strand
gcugauugaacgaauggua

SEQ ID NO: 690364 - RNA, 19 nt, Homo sapiens
  misc_RNA (1)...(19): siRNA sense strand
gaacauucuggacgugugu

SEQ ID NO: 690365 - RNA, 19 nt, Homo sapiens
  misc_RNA (1)...(19): siRNA sense strand
gcauccgguuugauaacaa

SEQ ID NO: 690366 - RNA, 19 nt, Homo sapiens
  misc_RNA (1)...(19): siRNA sense strand
ucagaaggaaacuaucaaa

SEQ ID NO: 690367 - RNA, 19 nt, Homo sapiens
  misc_RNA (1)...(19): siRNA sense strand
aaagaggccaucagaagga

SEQ ID NO: 690368 - RNA, 19 nt, Homo sapiens
  misc_RNA (1)...(19): siRNA sense strand
guaauggaacaucaucugu

SEQ ID NO: 690369 - RNA, 19 nt, Homo sapiens
  misc_RNA (1)...(19): siRNA sense strand
uagagggacaugaagaauu

SEQ ID NO: 690370 - RNA, 19 nt, Homo sapiens
  misc_RNA (1)...(19): siRNA sense strand
ggagcacgagcaccuguga

SEQ ID NO: 690371 - RNA, 19 nt, Homo sapiens
  misc_RNA (1)...(19): siRNA sense strand
ugaaguucuuaacacauug

SEQ ID NO: 690372 - RNA, 19 nt, Homo sapiens
  misc_RNA (1)...(19): siRNA sense strand
agauggcccuccaaauuca

SEQ ID NO: 690373 - RNA, 19 nt, Homo sapiens
  misc_RNA (1)...(19): siRNA sense strand
uugcagcgggacuuuauua

SEQ ID NO: 690374 - RNA, 19 nt, Homo sapiens
  misc_RNA (1)...(19): siRNA sense strand
gaucaucagauaauaccau

SEQ ID NO: 690375 - RNA, 19 nt, Homo sapiens
  misc_RNA (1)...(19): siRNA sense strand
agggaucgccugguuguua

SEQ ID NO: 690376 - RNA, 19 nt, Homo sapiens
  misc_RNA (1)...(19): siRNA sense strand
ccaccacaaugaggcugua

SEQ ID NO: 690377 - RNA, 19 nt, Homo sapiens
  misc_RNA (1)...(19): siRNA sense strand
gugagagugugggauguga

SEQ ID NO: 690378 - RNA, 19 nt, Homo sapiens
  misc_RNA (1)...(19): siRNA sense strand
gacacaacuugcagaggau

SEQ ID NO: 690379 - RNA, 19 nt, Homo sapiens
  misc_RNA (1)...(19): siRNA sense strand
gaugcauccgguuugauaa

SEQ ID NO: 690380 - RNA, 19 nt, Homo sapiens
  misc_RNA (1)...(19): siRNA sense strand
gacaggaccaucaaagucu

SEQ ID NO: 690381 - RNA, 19 nt, Homo sapiens
  misc_RNA (1)...(19): siRNA sense strand
ugacaggaccaucaaaguc

SEQ ID NO: 690382 - RNA, 19 nt, Homo sapiens
  misc_RNA (1)...(19): siRNA sense strand
uaacuggcucuucagauuc

SEQ ID NO: 690383 - RNA, 19 nt, Homo sapiens
  misc_RNA (1)...(19): siRNA sense strand
uggaauguuugaaaguguu

SEQ ID NO: 690384 - RNA, 19 nt, Homo sapiens
  misc_RNA (1)...(19): siRNA sense strand
aacauacacuuacaucucu

SEQ ID NO: 690385 - RNA, 19 nt, Homo sapiens
  misc_RNA (1)...(19): siRNA sense strand
gaagaagcugauugaacga

SEQ ID NO: 690386 - RNA, 19 nt, Homo sapiens
  misc_RNA (1)...(19): siRNA sense strand
uguuucggcuccaguuuga

SEQ ID NO: 690387 - RNA, 19 nt, Homo sapiens
  misc_RNA (1)...(19): siRNA sense strand
gccaucagaaggaaacuau

SEQ ID NO: 690388 - RNA, 19 nt, Homo sapiens
  misc_RNA (1)...(19): siRNA sense strand
ggaauuuguggaacaucuu

SEQ ID NO: 690389 - RNA, 19 nt, Homo sapiens
  misc_RNA (1)...(19): siRNA sense strand
uaguagacuuugacgacaa

SEQ ID NO: 690390 - RNA, 19 nt, Homo sapiens
  misc_RNA (1)...(19): siRNA sense strand
gggcugccgucaauguagu

SEQ ID NO: 690391 - RNA, 19 nt, Homo sapiens
  misc_RNA (1)...(19): siRNA sense strand
ccuggaauguuugaaagug

SEQ ID NO: 690392 - RNA, 19 nt, Homo sapiens
  misc_RNA (1)...(19): siRNA sense strand
guaaaggugucuacuguuu

SEQ ID NO: 690393 - RNA, 19 nt, Homo sapiens
  misc_RNA (1)...(19): siRNA sense strand
guaacuggcucuucagauu

SEQ ID NO: 690394 - RNA, 19 nt, Homo sapiens
  misc_RNA (1)...(19): siRNA sense strand
gcacauugguggaacauuc

SEQ ID NO: 690395 - RNA, 19 nt, Homo sapiens
  misc_RNA (1)...(19): siRNA sense strand
guuaguggaucaucagaua

SEQ ID NO: 690396 - RNA, 19 nt, Homo sapiens
  misc_RNA (1)...(19): siRNA sense strand
gagcaaggcuuagaucaca

SEQ ID NO: 690397 - RNA, 19 nt, Homo sapiens
  misc_RNA (1)...(19): siRNA sense strand
gaaggaaugcuuuggaaga

SEQ ID NO: 690398 - RNA, 19 nt, Homo sapiens
  misc_RNA (1)...(19): siRNA sense strand
ugaauguggugccuguuua

SEQ ID NO: 690399 - RNA, 19 nt, Homo sapiens
  misc_RNA (1)...(19): siRNA sense strand
gauaaguaauggaacauca

SEQ ID NO: 690400 - RNA, 19 nt, Homo sapiens
  misc_RNA (1)...(19): siRNA sense strand
ugaaucagaucaaguggaa

SEQ ID NO: 690401 - RNA, 19 nt, Homo sapiens
  misc_RNA (1)...(19): siRNA sense strand
gugaaguucuuaacacauu

SEQ ID NO: 690402 - RNA, 19 nt, Homo sapiens
  misc_RNA (1)...(19): siRNA sense strand
ggacuuuauuaccgcuuua

SEQ ID NO: 690403 - RNA, 19 nt, Homo sapiens
  misc_RNA (1)...(19): siRNA sense strand
gaacauacacuuacaucuc

SEQ ID NO: 690404 - RNA, 19 nt, Homo sapiens
  misc_RNA (1)...(19): siRNA sense strand
gagcugguauguaaagaau

SEQ ID NO: 690405 - RNA, 19 nt, Homo sapiens
  misc_RNA (1)...(19): siRNA sense strand
gagcaccugugaauuuguu

SEQ ID NO: 690406 - RNA, 19 nt, Homo sapiens
  misc_RNA (1)...(19): siRNA sense strand
agagggacaugaagaauug

SEQ ID NO: 690407 - RNA, 19 nt, Homo sapiens
  misc_RNA (1)...(19): siRNA sense strand
gaacaucuuauuucacgaa

SEQ ID NO: 690408 - RNA, 19 nt, Homo sapiens
  misc_RNA (1)...(19): siRNA sense strand
caucuuauuucacgaaugu

SEQ ID NO: 690409 - RNA, 19 nt, Homo sapiens
  misc_RNA (1)...(19): siRNA sense strand
cagaaggaaugcuuuggaa

SEQ ID NO: 690410 - RNA, 19 nt, Homo sapiens
  misc_RNA (1)...(19): siRNA sense strand
gcucugggauauugaaugu

SEQ ID NO: 690411 - RNA, 19 nt, Homo sapiens
  misc_RNA (1)...(19): siRNA sense strand
gaauuuguggaacaucuua

SEQ ID NO: 690412 - RNA, 19 nt, Homo sapiens
  misc_RNA (1)...(19): siRNA sense strand
cgagugaucucagaaggaa

SEQ ID NO: 690413 - RNA, 19 nt, Homo sapiens
  misc_RNA (1)...(19): siRNA sense strand
acagauggcccuccaaauu

SEQ ID NO: 690414 - RNA, 19 nt, Homo sapiens
  misc_RNA (1)...(19): siRNA sense strand
gaagcugauugaacgaaug

SEQ ID NO: 690415 - RNA, 19 nt, Homo sapiens
  misc_RNA (1)...(19): siRNA sense strand
gcaaggcuuagaucacaua

SEQ ID NO: 690416 - RNA, 19 nt, Homo sapiens
  misc_RNA (1)...(19): siRNA sense strand
gcacuuacgcuucagcaau

SEQ ID NO: 690417 - RNA, 19 nt, Homo sapiens
  misc_RNA (1)...(19): siRNA sense strand
gugaucgucuccagaaaga

SEQ ID NO: 690418 - RNA, 19 nt, Homo sapiens
  misc_RNA (1)...(19): siRNA sense strand
gcuccaguuugaugaguuu

SEQ ID NO: 690419 - RNA, 19 nt, Homo sapiens
  misc_RNA (1)...(19): siRNA sense strand
gaauguggugccuguuuaa

SEQ ID NO: 690420 - RNA, 19 nt, Homo sapiens
  misc_RNA (1)...(19): siRNA sense strand
uaucagcauggacauauua

SEQ ID NO: 690421 - RNA, 19 nt, Homo sapiens
  misc_RNA (1)...(19): siRNA sense strand
gcagagggugggaucagua

SEQ ID NO: 690422 - RNA, 19 nt, Homo sapiens
  misc_RNA (1)...(19): siRNA sense strand
aauggaacaucaucuguga

SEQ ID NO: 690423 - RNA, 19 nt, Homo sapiens
  misc_RNA (1)...(19): siRNA sense strand
cagaucaaguggaauuugu

SEQ ID NO: 690424 - RNA, 19 nt, Homo sapiens
  misc_RNA (1)...(19): siRNA sense strand
guauugcacuuacgcuuca

SEQ ID NO: 690425 - RNA, 19 nt, Homo sapiens
  misc_RNA (1)...(19): siRNA sense strand
gcauggacauauuaacucu

SEQ ID NO: 690426 - RNA, 19 nt, Homo sapiens
  misc_RNA (1)...(19): siRNA sense strand
cgaugcauccgguuugaua

SEQ ID NO: 690427 - RNA, 19 nt, Homo sapiens
  misc_RNA (1)...(19): siRNA sense strand
ccauuaggcucugggauau

SEQ ID NO: 690428 - RNA, 19 nt, Homo sapiens
  misc_RNA (1)...(19): siRNA sense strand
cacgagcaccugugaauuu

SEQ ID NO: 690429 - RNA, 19 nt, Homo sapiens
  misc_RNA (1)...(19): siRNA sense strand
ccagaaagaggccaucaga

SEQ ID NO: 690430 - RNA, 19 nt, Homo sapiens
  misc_RNA (1)...(19): siRNA sense strand
ggaauguuugaaaguguua

SEQ ID NO: 690431 - RNA, 19 nt, Homo sapiens
  misc_RNA (1)...(19): siRNA sense strand
gcugguauguaaagaaugg

SEQ ID NO: 690432 - RNA, 19 nt, Homo sapiens
  misc_RNA (1)...(19): siRNA sense strand
acacauugauccaccacaa

SEQ ID NO: 690433 - RNA, 19 nt, Homo sapiens
  misc_RNA (1)...(19): siRNA sense strand
ccuacgagauaauucuauu

SEQ ID NO: 690434 - RNA, 19 nt, Homo sapiens
  misc_RNA (1)...(19): siRNA sense strand
ucacauagcagaaaacauu

SEQ ID NO: 690435 - RNA, 19 nt, Homo sapiens
  misc_RNA (1)...(19): siRNA sense strand
ggacugauggugaccuguu

SEQ ID NO: 690436 - RNA, 19 nt, Homo sapiens
  misc_RNA (1)...(19): siRNA sense strand
cauuguaacuggcucuuca

SEQ ID NO: 690437 - RNA, 19 nt, Homo sapiens
  misc_RNA (1)...(19): siRNA sense strand
ccacagauggcccuccaaa

SEQ ID NO: 690438 - RNA, 19 nt, Homo sapiens
  misc_RNA (1)...(19): siRNA sense strand
ucaguggccuacgagauaa

SEQ ID NO: 690439 - RNA, 19 nt, Homo sapiens
  misc_RNA (1)...(19): siRNA sense strand
gggacuuuauuaccgcuuu

SEQ ID NO: 690440 - RNA, 19 nt, Homo sapiens
  misc_RNA (1)...(19): siRNA sense strand
gcacgagcaccugugaauu

SEQ ID NO: 690441 - RNA, 19 nt, Homo sapiens
  misc_RNA (1)...(19): siRNA sense strand
cagauggcccuccaaauuc

SEQ ID NO: 690442 - RNA, 19 nt, Homo sapiens
  misc_RNA (1)...(19): siRNA sense strand
gaucaguaccuguuuaaaa

SEQ ID NO: 690443 - RNA, 19 nt, Homo sapiens
  misc_RNA (1)...(19): siRNA sense strand
gggaucaguaccuguuuaa

SEQ ID NO: 690444 - RNA, 19 nt, Homo sapiens
  misc_RNA (1)...(19): siRNA sense strand
ugggaucaguaccuguuua

SEQ ID NO: 690445 - RNA, 19 nt, Homo sapiens
  misc_RNA (1)...(19): siRNA sense strand
gcacugauccccuauggaa

SEQ ID NO: 690446 - RNA, 19 nt, Homo sapiens
  misc_RNA (1)...(19): siRNA sense strand
agaaagaggccaucagaag

SEQ ID NO: 690447 - RNA, 19 nt, Homo sapiens
  misc_RNA (1)...(19): siRNA sense strand
gcagagcugguauguaaag

SEQ ID NO: 690448 - RNA, 19 nt, Homo sapiens
  misc_RNA (1)...(19): siRNA sense strand
gaaguucuuaacacauuga

SEQ ID NO: 690449 - RNA, 19 nt, Homo sapiens
  misc_RNA (1)...(19): siRNA sense strand
gggugaaguucuuaacaca

SEQ ID NO: 690450 - RNA, 19 nt, Homo sapiens
  misc_RNA (1)...(19): siRNA sense strand
uguggaacaucuuauuuca

SEQ ID NO: 690451 - RNA, 19 nt, Homo sapiens
  misc_RNA (1)...(19): siRNA sense strand
aaggaaugcuuuggaagaa

SEQ ID NO: 690452 - RNA, 19 nt, Homo sapiens
  misc_RNA (1)...(19): siRNA sense strand
uauuaacucuuaccugaag

SEQ ID NO: 690453 - RNA, 19 nt, Homo sapiens
  misc_RNA (1)...(19): siRNA sense strand
aaucagaucaaguggaauu

SEQ ID NO: 690454 - RNA, 19 nt, Homo sapiens
  misc_RNA (1)...(19): siRNA sense strand
aaaggugucuacuguuuac

SEQ ID NO: 690455 - RNA, 19 nt, Homo sapiens
  misc_RNA (1)...(19): siRNA sense strand
aggcuuagaucacauagca

SEQ ID NO: 690456 - RNA, 19 nt, Homo sapiens
  misc_RNA (1)...(19): siRNA sense strand
gaucucagaaggaaugcuu

SEQ ID NO: 690457 - RNA, 19 nt, Homo sapiens
  misc_RNA (1)...(19): siRNA sense strand
gggaucgccugguuguuag

SEQ ID NO: 690458 - RNA, 19 nt, Homo sapiens
  misc_RNA (1)...(19): siRNA sense strand
gaauuuguucguacucuca

SEQ ID NO: 690459 - RNA, 19 nt, Homo sapiens
  misc_RNA (1)...(19): siRNA sense strand
cacuuacgcuucagcaaug

SEQ ID NO: 690460 - RNA, 19 nt, Homo sapiens
  misc_RNA (1)...(19): siRNA sense strand
caucagaaggaaacuauca

SEQ ID NO: 690461 - RNA, 19 nt, Homo sapiens
  misc_RNA (1)...(19): siRNA sense strand
gucauuauacccaaagauu

SEQ ID NO: 690462 - RNA, 19 nt, Homo sapiens
  misc_RNA (1)...(19): siRNA sense strand
ucaaguggaauuuguggaa

SEQ ID NO: 690463 - RNA, 19 nt, Homo sapiens
  misc_RNA (1)...(19): siRNA sense strand
gcugauugaacgaauggua

SEQ ID NO: 690464 - RNA, 19 nt, Homo sapiens
  misc_RNA (1)...(19): siRNA sense strand
gaacauucuggacgugugu

SEQ ID NO: 690465 - RNA, 19 nt, Homo sapiens
  misc_RNA (1)...(19): siRNA sense strand
gcauccgguuugauaacaa

SEQ ID NO: 690466 - RNA, 19 nt, Homo sapiens
  misc_RNA (1)...(19): siRNA sense strand
ucagaaggaaacuaucaaa

SEQ ID NO: 690467 - RNA, 19 nt, Homo sapiens
  misc_RNA (1)...(19): siRNA sense strand
aaagaggccaucagaagga

SEQ ID NO: 690468 - RNA, 19 nt, Homo sapiens
  misc_RNA (1)...(19): siRNA sense strand
guaauggaacaucaucugu

SEQ ID NO: 690469 - RNA, 19 nt, Homo sapiens
  misc_RNA (1)...(19): siRNA sense strand
uagagggacaugaagaauu

SEQ ID NO: 690470 - RNA, 19 nt, Homo sapiens
  misc_RNA (1)...(19): siRNA sense strand
ggagcacgagcaccuguga

SEQ ID NO: 690471 - RNA, 19 nt, Homo sapiens
  misc_RNA (1)...(19): siRNA sense strand
ugaaguucuuaacacauug

SEQ ID NO: 690472 - RNA, 19 nt, Homo sapiens
  misc_RNA (1)...(19): siRNA sense strand
agauggcccuccaaauuca

SEQ ID NO: 690473 - RNA, 19 nt, Homo sapiens
  misc_RNA (1)...(19): siRNA sense strand
uugcagcgggacuuuauua

SEQ ID NO: 690474 - RNA, 19 nt, Homo sapiens
  misc_RNA (1)...(19): siRNA sense strand
gaucaucagauaauaccau

SEQ ID NO: 690475 - RNA, 19 nt, Homo sapiens
  misc_RNA (1)...(19): siRNA sense strand
agggaucgccugguuguua

SEQ ID NO: 690476 - RNA, 19 nt, Homo sapiens
  misc_RNA (1)...(19): siRNA sense strand
ccaccacaaugaggcugua

SEQ ID NO: 690477 - RNA, 19 nt, Homo sapiens
  misc_RNA (1)...(19): siRNA sense strand
gugagagugugggauguga

SEQ ID NO: 690478 - RNA, 19 nt, Homo sapiens
  misc_RNA (1)...(19): siRNA sense strand
gacacaacuugcagaggau

SEQ ID NO: 690479 - RNA, 19 nt, Homo sapiens
  misc_RNA (1)...(19): siRNA sense strand
gaugcauccgguuugauaa

SEQ ID NO: 690480 - RNA, 19 nt, Homo sapiens
  misc_RNA (1)...(19): siRNA sense strand
gacaggaccaucaaagucu

SEQ ID NO: 690481 - RNA, 19 nt, Homo sapiens
  misc_RNA (1)...(19): siRNA sense strand
ugacaggaccaucaaaguc

SEQ ID NO: 690482 - RNA, 19 nt, Homo sapiens
  misc_RNA (1)...(19): siRNA sense strand
uaacuggcucuucagauuc

SEQ ID NO: 690483 - RNA, 19 nt, Homo sapiens
  misc_RNA (1)...(19): siRNA sense strand
uggaauguuugaaaguguu

SEQ ID NO: 690484 - RNA, 19 nt, Homo sapiens
  misc_RNA (1)...(19): siRNA sense strand
aacauacacuuacaucucu

SEQ ID NO: 690485 - RNA, 19 nt, Homo sapiens
  misc_RNA (1)...(19): siRNA sense strand
gaagaagcugauugaacga

SEQ ID NO: 690486 - RNA, 19 nt, Homo sapiens
  misc_RNA (1)...(19): siRNA sense strand
uguuucggcuccaguuuga

SEQ ID NO: 690487 - RNA, 19 nt, Homo sapiens
  misc_RNA (1)...(19): siRNA sense strand
gccaucagaaggaaacuau

SEQ ID NO: 690488 - RNA, 19 nt, Homo sapiens
  misc_RNA (1)...(19): siRNA sense strand
ggaauuuguggaacaucuu

SEQ ID NO: 690489 - RNA, 19 nt, Homo sapiens
  misc_RNA (1)...(19): siRNA sense strand
uaguagacuuugacgacaa

SEQ ID NO: 690490 - RNA, 19 nt, Homo sapiens
  misc_RNA (1)...(19): siRNA sense strand
gggcugccgucaauguagu

SEQ ID NO: 690491 - RNA, 19 nt, Homo sapiens
  misc_RNA (1)...(19): siRNA sense strand
ccuggaauguuugaaagug

SEQ ID NO: 690492 - RNA, 19 nt, Homo sapiens
  misc_RNA (1)...(19): siRNA sense strand
gaacagaacuucauucaaa

SEQ ID NO: 690493 - RNA, 19 nt, Homo sapiens
  misc_RNA (1)...(19): siRNA sense strand
gaaagucucugucaaaaua

SEQ ID NO: 690494 - RNA, 19 nt, Homo sapiens
  misc_RNA (1)...(19): siRNA sense strand
gcaauaggcuccauuagug

SEQ ID NO: 690495 - RNA, 19 nt, Homo sapiens
  misc_RNA (1)...(19): siRNA sense strand
gaaauacuauggacuacaa

SEQ ID NO: 690496 - RNA, 19 nt, Homo sapiens
  misc_RNA (1)...(19): siRNA sense strand
aagaauggcucaagaagua

SEQ ID NO: 690497 - RNA, 19 nt, Homo sapiens
  misc_RNA (1)...(19): siRNA sense strand
cagagaagcuucacaauca

SEQ ID NO: 690498 - RNA, 19 nt, Homo sapiens
  misc_RNA (1)...(19): siRNA sense strand
ggaacaugaucaacuuaua

SEQ ID NO: 690499 - RNA, 19 nt, Homo sapiens
  misc_RNA (1)...(19): siRNA sense strand
cagaagaaaugugugauua

SEQ ID NO: 690500 - RNA, 19 nt, Homo sapiens
  misc_RNA (1)...(19): siRNA sense strand
ggauacagauuccauaaau

SEQ ID NO: 690501 - RNA, 19 nt, Homo sapiens
  misc_RNA (1)...(19): siRNA sense strand
gaagugaugccauuuauug

SEQ ID NO: 690502 - RNA, 19 nt, Homo sapiens
  misc_RNA (1)...(19): siRNA sense strand
ggaaauuucugaagacugu

SEQ ID NO: 690503 - RNA, 19 nt, Homo sapiens
  misc_RNA (1)...(19): siRNA sense strand
acaaacagaucaaacagua

SEQ ID NO: 690504 - RNA, 19 nt, Homo sapiens
  misc_RNA (1)...(19): siRNA sense strand
ggacaagagucgacacaau

SEQ ID NO: 690505 - RNA, 19 nt, Homo sapiens
  misc_RNA (1)...(19): siRNA sense strand
gagaagugaugccauuuau

SEQ ID NO: 690506 - RNA, 19 nt, Homo sapiens
  misc_RNA (1)...(19): siRNA sense strand
uagauaauguggugaauug

SEQ ID NO: 690507 - RNA, 19 nt, Homo sapiens
  misc_RNA (1)...(19): siRNA sense strand
gaaagaauaaugacagaga

SEQ ID NO: 690508 - RNA, 19 nt, Homo sapiens
  misc_RNA (1)...(19): siRNA sense strand
uaacccaagucaaaucuaa

SEQ ID NO: 690509 - RNA, 19 nt, Homo sapiens
  misc_RNA (1)...(19): siRNA sense strand
gcagaugcuuccuuuaaau

SEQ ID NO: 690510 - RNA, 19 nt, Homo sapiens
  misc_RNA (1)...(19): siRNA sense strand
ggagaagugaugccauuua

SEQ ID NO: 690511 - RNA, 19 nt, Homo sapiens
  misc_RNA (1)...(19): siRNA sense strand
gcaaugaauucucacagau

SEQ ID NO: 690512 - RNA, 19 nt, Homo sapiens
  misc_RNA (1)...(19): siRNA sense strand
caagguccguuuauuaaug

SEQ ID NO: 690513 - RNA, 19 nt, Homo sapiens
  misc_RNA (1)...(19): siRNA sense strand
guugguaucugaaguagaa

SEQ ID NO: 690514 - RNA, 19 nt, Homo sapiens
  misc_RNA (1)...(19): siRNA sense strand
cgaaaugucucucugaagu

SEQ ID NO: 690515 - RNA, 19 nt, Homo sapiens
  misc_RNA (1)...(19): siRNA sense strand
gaaccagugcgaaggaaua

SEQ ID NO: 690516 - RNA, 19 nt, Homo sapiens
  misc_RNA (1)...(19): siRNA sense strand
ccuacaagaugcucaagua

SEQ ID NO: 690517 - RNA, 19 nt, Homo sapiens
  misc_RNA (1)...(19): siRNA sense strand
uaaggaacaugaucaacuu

SEQ ID NO: 690518 - RNA, 19 nt, Homo sapiens
  misc_RNA (1)...(19): siRNA sense strand
caacuuguguagagaaaga

SEQ ID NO: 690519 - RNA, 19 nt, Homo sapiens
  misc_RNA (1)...(19): siRNA sense strand
gaaguacugacacauuuaa

SEQ ID NO: 690520 - RNA, 19 nt, Homo sapiens
  misc_RNA (1)...(19): siRNA sense strand
caaggaacauuuaagagau

SEQ ID NO: 690521 - RNA, 19 nt, Homo sapiens
  misc_RNA (1)...(19): siRNA sense strand
acaaagcaaccauugauua

SEQ ID NO: 690522 - RNA, 19 nt, Homo sapiens
  misc_RNA (1)...(19): siRNA sense strand
caagucaaaucuaagcauu

SEQ ID NO: 690523 - RNA, 19 nt, Homo sapiens
  misc_RNA (1)...(19): siRNA sense strand
ggauauggcuugugauacu

SEQ ID NO: 690524 - RNA, 19 nt, Homo sapiens
  misc_RNA (1)...(19): siRNA sense strand
gcaaagaauggcucaagaa

SEQ ID NO: 690525 - RNA, 19 nt, Homo sapiens
  misc_RNA (1)...(19): siRNA sense strand
gaacauagaacgaacuuuu

SEQ ID NO: 690526 - RNA, 19 nt, Homo sapiens
  misc_RNA (1)...(19): siRNA sense strand
ugacaaugaugcaacuaaa

SEQ ID NO: 690527 - RNA, 19 nt, Homo sapiens
  misc_RNA (1)...(19): siRNA sense strand
aagaaguacugacacauuu

SEQ ID NO: 690528 - RNA, 19 nt, Homo sapiens
  misc_RNA (1)...(19): siRNA sense strand
agacacuucugauuuguuu

SEQ ID NO: 690529 - RNA, 19 nt, Homo sapiens
  misc_RNA (1)...(19): siRNA sense strand
ccaaaucuuucuucaggaa

SEQ ID NO: 690530 - RNA, 19 nt, Homo sapiens
  misc_RNA (1)...(19): siRNA sense strand
gcugaaauaccucaaauau

SEQ ID NO: 690531 - RNA, 19 nt, Homo sapiens
  misc_RNA (1)...(19): siRNA sense strand
gaaccagaagugcuuagua

SEQ ID NO: 690532 - RNA, 19 nt, Homo sapiens
  misc_RNA (1)...(19): siRNA sense strand
ggaaacauugcucagauuu

SEQ ID NO: 690533 - RNA, 19 nt, Homo sapiens
  misc_RNA (1)...(19): siRNA sense strand
gaacaugaucaacuuauag

SEQ ID NO: 690534 - RNA, 19 nt, Homo sapiens
  misc_RNA (1)...(19): siRNA sense strand
gauacgggcuuacagauac

SEQ ID NO: 690535 - RNA, 19 nt, Homo sapiens
  misc_RNA (1)...(19): siRNA sense strand
gauggucgcugaaaauuuu

SEQ ID NO: 690536 - RNA, 19 nt, Homo sapiens
  misc_RNA (1)...(19): siRNA sense strand
uuacucaucuggauuaugu

SEQ ID NO: 690537 - RNA, 19 nt, Homo sapiens
  misc_RNA (1)...(19): siRNA sense strand
gcaaguaggaccagcgaaa

SEQ ID NO: 690538 - RNA, 19 nt, Homo sapiens
  misc_RNA (1)...(19): siRNA sense strand
gaaauccaguuaacaacca

SEQ ID NO: 690539 - RNA, 19 nt, Homo sapiens
  misc_RNA (1)...(19): siRNA sense strand
ggacauauaacagcugaaa

SEQ ID NO: 690540 - RNA, 19 nt, Homo sapiens
  misc_RNA (1)...(19): siRNA sense strand
ggacagauaacccaaguca

SEQ ID NO: 690541 - RNA, 19 nt, Homo sapiens
  misc_RNA (1)...(19): siRNA sense strand
gacaagagucgacacaauu

SEQ ID NO: 690542 - RNA, 19 nt, Homo sapiens
  misc_RNA (1)...(19): siRNA sense strand
cacaugagauuccagaaga

SEQ ID NO: 690543 - RNA, 19 nt, Homo sapiens
  misc_RNA (1)...(19): siRNA sense strand
uaagagauuuccuaguuca

SEQ ID NO: 690544 - RNA, 19 nt, Homo sapiens
  misc_RNA (1)...(19): siRNA sense strand
gaaggauacagauuccaua

SEQ ID NO: 690545 - RNA, 19 nt, Homo sapiens
  misc_RNA (1)...(19): siRNA sense strand
acagauaacccaagucaaa

SEQ ID NO: 690546 - RNA, 19 nt, Homo sapiens
  misc_RNA (1)...(19): siRNA sense strand
cagcauaucuuuucuguug

SEQ ID NO: 690547 - RNA, 19 nt, Homo sapiens
  misc_RNA (1)...(19): siRNA sense strand
gaaggagcccagcaaagaa

SEQ ID NO: 690548 - RNA, 19 nt, Homo sapiens
  misc_RNA (1)...(19): siRNA sense strand
gcaggcugaugaagagaaa

SEQ ID NO: 690549 - RNA, 19 nt, Homo sapiens
  misc_RNA (1)...(19): siRNA sense strand
ugaagaauauccugaacau

SEQ ID NO: 690550 - RNA, 19 nt, Homo sapiens
  misc_RNA (1)...(19): siRNA sense strand
cagaagugcuuaguacuau

SEQ ID NO: 690551 - RNA, 19 nt, Homo sapiens
  misc_RNA (1)...(19): siRNA sense strand
aagcaaccauugauuagaa

SEQ ID NO: 690552 - RNA, 19 nt, Homo sapiens
  misc_RNA (1)...(19): siRNA sense strand
caagaaguacugacacauu

SEQ ID NO: 690553 - RNA, 19 nt, Homo sapiens
  misc_RNA (1)...(19): siRNA sense strand
ugagagaauucaugaagga

SEQ ID NO: 690554 - RNA, 19 nt, Homo sapiens
  misc_RNA (1)...(19): siRNA sense strand
uaugauccuuguucagaua

SEQ ID NO: 690555 - RNA, 19 nt, Homo sapiens
  misc_RNA (1)...(19): siRNA sense strand
guacaugauuggugcacaa

SEQ ID NO: 690556 - RNA, 19 nt, Homo sapiens
  misc_RNA (1)...(19): siRNA sense strand
gagaaguugugagagaauu

SEQ ID NO: 690557 - RNA, 19 nt, Homo sapiens
  misc_RNA (1)...(19): siRNA sense strand
ugaaagauccugaaacagu

SEQ ID NO: 690558 - RNA, 19 nt, Homo sapiens
  misc_RNA (1)...(19): siRNA sense strand
gaauaugagggaaacauug

SEQ ID NO: 690559 - RNA, 19 nt, Homo sapiens
  misc_RNA (1)...(19): siRNA sense strand
caaugaauucucacagaua

SEQ ID NO: 690560 - RNA, 19 nt, Homo sapiens
  misc_RNA (1)...(19): siRNA sense strand
augcaguucucauugauua

SEQ ID NO: 690561 - RNA, 19 nt, Homo sapiens
  misc_RNA (1)...(19): siRNA sense strand
agaaguaugcgaacuguaa

SEQ ID NO: 690562 - RNA, 19 nt, Homo sapiens
  misc_RNA (1)...(19): siRNA sense strand
cagaaagaauaaugacaga

SEQ ID NO: 690563 - RNA, 19 nt, Homo sapiens
  misc_RNA (1)...(19): siRNA sense strand
uggaggcccuucauuauau

SEQ ID NO: 690564 - RNA, 19 nt, Homo sapiens
  misc_RNA (1)...(19): siRNA sense strand
guuccaauguuucgaaaug

SEQ ID NO: 690565 - RNA, 19 nt, Homo sapiens
  misc_RNA (1)...(19): siRNA sense strand
ccaaauuaaucagcacauu

SEQ ID NO: 690566 - RNA, 19 nt, Homo sapiens
  misc_RNA (1)...(19): siRNA sense strand
acaagaugcucaaguaaag

SEQ ID NO: 690567 - RNA, 19 nt, Homo sapiens
  misc_RNA (1)...(19): siRNA sense strand
gagaauucaugaaggauac

SEQ ID NO: 690568 - RNA, 19 nt, Homo sapiens
  misc_RNA (1)...(19): siRNA sense strand
ccaggagacagcuauauuu

SEQ ID NO: 690569 - RNA, 19 nt, Homo sapiens
  misc_RNA (1)...(19): siRNA sense strand
caaauuaaucagcacauug

SEQ ID NO: 690570 - RNA, 19 nt, Homo sapiens
  misc_RNA (1)...(19): siRNA sense strand
ucaaggaacauuuaagaga

SEQ ID NO: 690571 - RNA, 19 nt, Homo sapiens
  misc_RNA (1)...(19): siRNA sense strand
gcaauuaugacaauguuag

SEQ ID NO: 690572 - RNA, 19 nt, Homo sapiens
  misc_RNA (1)...(19): siRNA sense strand
gcagauacgggcuuacaga

SEQ ID NO: 690573 - RNA, 19 nt, Homo sapiens
  misc_RNA (1)...(19): siRNA sense strand
ucaacagguucauacguuu

SEQ ID NO: 690574 - RNA, 19 nt, Homo sapiens
  misc_RNA (1)...(19): siRNA sense strand
guacauaguaggucaauac

SEQ ID NO: 690575 - RNA, 19 nt, Homo sapiens
  misc_RNA (1)...(19): siRNA sense strand
guacagaguggucauggaa

SEQ ID NO: 690576 - RNA, 19 nt, Homo sapiens
  misc_RNA (1)...(19): siRNA sense strand
cgacuugcguacucaaaug

SEQ ID NO: 690577 - RNA, 19 nt, Homo sapiens
  misc_RNA (1)...(19): siRNA sense strand
ucaaaaugcuccacuugua

SEQ ID NO: 690578 - RNA, 19 nt, Homo sapiens
  misc_RNA (1)...(19): siRNA sense strand
agaauauccugaacauaga

SEQ ID NO: 690579 - RNA, 19 nt, Homo sapiens
  misc_RNA (1)...(19): siRNA sense strand
gaagaauauccugaacaua

SEQ ID NO: 690580 - RNA, 19 nt, Homo sapiens
  misc_RNA (1)...(19): siRNA sense strand
gaaaagaggcaaagauaau

SEQ ID NO: 690581 - RNA, 19 nt, Homo sapiens
  misc_RNA (1)...(19): siRNA sense strand
aggauuaugugaacagaaa

SEQ ID NO: 690582 - RNA, 19 nt, Homo sapiens
  misc_RNA (1)...(19): siRNA sense strand
gaaacaagaauggcccaaa

SEQ ID NO: 690583 - RNA, 19 nt, Homo sapiens
  misc_RNA (1)...(19): siRNA sense strand
uauaacagcugaaauaccu

SEQ ID NO: 690584 - RNA, 19 nt, Homo sapiens
  misc_RNA (1)...(19): siRNA sense strand
ccagaagugcuuaguacua

SEQ ID NO: 690585 - RNA, 19 nt, Homo sapiens
  misc_RNA (1)...(19): siRNA sense strand
ugaaaugguuacaaagcaa

SEQ ID NO: 690586 - RNA, 19 nt, Homo sapiens
  misc_RNA (1)...(19): siRNA sense strand
aaucaagugugggauagua

SEQ ID NO: 690587 - RNA, 19 nt, Homo sapiens
  misc_RNA (1)...(19): siRNA sense strand
cagcaauuaugacaauguu

SEQ ID NO: 690588 - RNA, 19 nt, Homo sapiens
  misc_RNA (1)...(19): siRNA sense strand
gaaguagaagaaacugaaa

SEQ ID NO: 690589 - RNA, 19 nt, Homo sapiens
  misc_RNA (1)...(19): siRNA sense strand
cagaugcuuccuuuaaaua

SEQ ID NO: 690590 - RNA, 19 nt, Homo sapiens
  misc_RNA (1)...(19): siRNA sense strand
gacagcaugugcaaugaau

SEQ ID NO: 690591 - RNA, 19 nt, Homo sapiens
  misc_RNA (1)...(19): siRNA sense strand
uaauuugguugaagaagga

SEQ ID NO: 690592 - RNA, 19 nt, Homo sapiens
  misc_RNA (1)...(19): siRNA sense strand
gcaaguagcuccagaaaua

SEQ ID NO: 690593 - RNA, 19 nt, Homo sapiens
  misc_RNA (1)...(19): siRNA sense strand
gagaagaccuuuauacgaa

SEQ ID NO: 690594 - RNA, 19 nt, Homo sapiens
  misc_RNA (1)...(19): siRNA sense strand
ggacagucauugauaguua

SEQ ID NO: 690595 - RNA, 19 nt, Homo sapiens
  misc_RNA (1)...(19): siRNA sense strand
gaacauaugcucaaagauu

SEQ ID NO: 690596 - RNA, 19 nt, Homo sapiens
  misc_RNA (1)...(19): siRNA sense strand
gaauggacccuguugauaa

SEQ ID NO: 690597 - RNA, 19 nt, Homo sapiens
  misc_RNA (1)...(19): siRNA sense strand
gagcagcgaugaucaacuu

SEQ ID NO: 690598 - RNA, 19 nt, Homo sapiens
  misc_RNA (1)...(19): siRNA sense strand
gcaugugacuguuuauuug

SEQ ID NO: 690599 - RNA, 19 nt, Homo sapiens
  misc_RNA (1)...(19): siRNA sense strand
guagaaagaguguugguua

SEQ ID NO: 690600 - RNA, 19 nt, Homo sapiens
  misc_RNA (1)...(19): siRNA sense strand
gcaaucauguuggccguua

SEQ ID NO: 690601 - RNA, 19 nt, Homo sapiens
  misc_RNA (1)...(19): siRNA sense strand
gcucaaagauugugaagca

SEQ ID NO: 690602 - RNA, 19 nt, Homo sapiens
  misc_RNA (1)...(19): siRNA sense strand
uaaccaugcuguuggauuu

SEQ ID NO: 690603 - RNA, 19 nt, Homo sapiens
  misc_RNA (1)...(19): siRNA sense strand
ggaaucaugguaccaaaua

SEQ ID NO: 690604 - RNA, 19 nt, Homo sapiens
  misc_RNA (1)...(19): siRNA sense strand
gggagacgcucauaucaug

SEQ ID NO: 690605 - RNA, 19 nt, Homo sapiens
  misc_RNA (1)...(19): siRNA sense strand
ccaaggagcaguugaauau

SEQ ID NO: 690606 - RNA, 19 nt, Homo sapiens
  misc_RNA (1)...(19): siRNA sense strand
ggaagaagcaugugacugu

SEQ ID NO: 690607 - RNA, 19 nt, Homo sapiens
  misc_RNA (1)...(19): siRNA sense strand
gaacagugcauuccaaauc

SEQ ID NO: 690608 - RNA, 19 nt, Homo sapiens
  misc_RNA (1)...(19): siRNA sense strand
ggaugaacaggcucuauua

SEQ ID NO: 690609 - RNA, 19 nt, Homo sapiens
  misc_RNA (1)...(19): siRNA sense strand
ucaaaucucucaauaagca

SEQ ID NO: 690610 - RNA, 19 nt, Homo sapiens
  misc_RNA (1)...(19): siRNA sense strand
ggaauacucucauaaaaga

SEQ ID NO: 690611 - RNA, 19 nt, Homo sapiens
  misc_RNA (1)...(19): siRNA sense strand
gcauacaucugugacauug

SEQ ID NO: 690612 - RNA, 19 nt, Homo sapiens
  misc_RNA (1)...(19): siRNA sense strand
ggucauaugucaauagaag

SEQ ID NO: 690613 - RNA, 19 nt, Homo sapiens
  misc_RNA (1)...(19): siRNA sense strand
ugaccagucugcugcuuua

SEQ ID NO: 690614 - RNA, 19 nt, Homo sapiens
  misc_RNA (1)...(19): siRNA sense strand
cagaacauaugcucaaaga

SEQ ID NO: 690615 - RNA, 19 nt, Homo sapiens
  misc_RNA (1)...(19): siRNA sense strand
agaagcaugugacuguuua

SEQ ID NO: 690616 - RNA, 19 nt, Homo sapiens
  misc_RNA (1)...(19): siRNA sense strand
ggaauggacccuguugaua

SEQ ID NO: 690617 - RNA, 19 nt, Homo sapiens
  misc_RNA (1)...(19): siRNA sense strand
ucgaaacuguuguuagaua

SEQ ID NO: 690618 - RNA, 19 nt, Homo sapiens
  misc_RNA (1)...(19): siRNA sense strand
ggaaguugaaguagcaaua

SEQ ID NO: 690619 - RNA, 19 nt, Homo sapiens
  misc_RNA (1)...(19): siRNA sense strand
gagcgaaguuauagcaaau

SEQ ID NO: 690620 - RNA, 19 nt, Homo sapiens
  misc_RNA (1)...(19): siRNA sense strand
guacuggaacaucaaguua

SEQ ID NO: 690621 - RNA, 19 nt, Homo sapiens
  misc_RNA (1)...(19): siRNA sense strand
gaaagaguguugguuacug

SEQ ID NO: 690622 - RNA, 19 nt, Homo sapiens
  misc_RNA (1)...(19): siRNA sense strand
gaagaagcaugugacuguu

SEQ ID NO: 690623 - RNA, 19 nt, Homo sapiens
  misc_RNA (1)...(19): siRNA sense strand
guucaacaacagcuaauua

SEQ ID NO: 690624 - RNA, 19 nt, Homo sapiens
  misc_RNA (1)...(19): siRNA sense strand
gacuuacgaugaagaauau

SEQ ID NO: 690625 - RNA, 19 nt, Homo sapiens
  misc_RNA (1)...(19): siRNA sense strand
gauucagacuuuagacaaa

SEQ ID NO: 690626 - RNA, 19 nt, Homo sapiens
  misc_RNA (1)...(19): siRNA sense strand
gaaguugaaguagcaauaa

SEQ ID NO: 690627 - RNA, 19 nt, Homo sapiens
  misc_RNA (1)...(19): siRNA sense strand
guaggaauacucucauaaa

SEQ ID NO: 690628 - RNA, 19 nt, Homo sapiens
  misc_RNA (1)...(19): siRNA sense strand
aaguuuaucuggacuguuu

SEQ ID NO: 690629 - RNA, 19 nt, Homo sapiens
  misc_RNA (1)...(19): siRNA sense strand
ugucaaaucucucaauaag

SEQ ID NO: 690630 - RNA, 19 nt, Homo sapiens
  misc_RNA (1)...(19): siRNA sense strand
gaaacuaguggaaucuuug

SEQ ID NO: 690631 - RNA, 19 nt, Homo sapiens
  misc_RNA (1)...(19): siRNA sense strand
ccucauggcuauugauuca

SEQ ID NO: 690632 - RNA, 19 nt, Homo sapiens
  misc_RNA (1)...(19): siRNA sense strand
ugacuuacgaugaagaaua

SEQ ID NO: 690633 - RNA, 19 nt, Homo sapiens
  misc_RNA (1)...(19): siRNA sense strand
gcacuacaagcuauugaaa

SEQ ID NO: 690634 - RNA, 19 nt, Homo sapiens
  misc_RNA (1)...(19): siRNA sense strand
ugaaacuaguggaaucuuu

SEQ ID NO: 690635 - RNA, 19 nt, Homo sapiens
  misc_RNA (1)...(19): siRNA sense strand
gaaucaugguaccaaauau

SEQ ID NO: 690636 - RNA, 19 nt, Homo sapiens
  misc_RNA (1)...(19): siRNA sense strand
gaagaccuuuauacgaaau

SEQ ID NO: 690637 - RNA, 19 nt, Homo sapiens
  misc_RNA (1)...(19): siRNA sense strand
aagaauaccugcccuccuu

SEQ ID NO: 690638 - RNA, 19 nt, Homo sapiens
  misc_RNA (1)...(19): siRNA sense strand
gaauguagaaagaguguug

SEQ ID NO: 690639 - RNA, 19 nt, Homo sapiens
  misc_RNA (1)...(19): siRNA sense strand
guacuuuccuucaucgaau

SEQ ID NO: 690640 - RNA, 19 nt, Homo sapiens
  misc_RNA (1)...(19): siRNA sense strand
gcuagugcuuugcaggaua

SEQ ID NO: 690641 - RNA, 19 nt, Homo sapiens
  misc_RNA (1)...(19): siRNA sense strand
gaagaugaagccauguuug

SEQ ID NO: 690642 - RNA, 19 nt, Homo sapiens
  misc_RNA (1)...(19): siRNA sense strand
caaaucugguggaaucaug

SEQ ID NO: 690643 - RNA, 19 nt, Homo sapiens
  misc_RNA (1)...(19): siRNA sense strand
cagaauguguucaguaucu

SEQ ID NO: 690644 - RNA, 19 nt, Homo sapiens
  misc_RNA (1)...(19): siRNA sense strand
cgaaacuguuguuagauau

SEQ ID NO: 690645 - RNA, 19 nt, Homo sapiens
  misc_RNA (1)...(19): siRNA sense strand
cuucgaaacuguuguuaga

SEQ ID NO: 690646 - RNA, 19 nt, Homo sapiens
  misc_RNA (1)...(19): siRNA sense strand
gcuuaugucucuuggauag

SEQ ID NO: 690647 - RNA, 19 nt, Homo sapiens
  misc_RNA (1)...(19): siRNA sense strand
gggcuuaugucucuuggau

SEQ ID NO: 690648 - RNA, 19 nt, Homo sapiens
  misc_RNA (1)...(19): siRNA sense strand
gaaguuauagcaaaucaag

SEQ ID NO: 690649 - RNA, 19 nt, Homo sapiens
  misc_RNA (1)...(19): siRNA sense strand
uuacagugcucucggauca

SEQ ID NO: 690650 - RNA, 19 nt, Homo sapiens
  misc_RNA (1)...(19): siRNA sense strand
gcugcuaggucauauguca

SEQ ID NO: 690651 - RNA, 19 nt, Homo sapiens
  misc_RNA (1)...(19): siRNA sense strand
ccacuaauggagaaguuua

SEQ ID NO: 690652 - RNA, 19 nt, Homo sapiens
  misc_RNA (1)...(19): siRNA sense strand
uuacagaguaucucacuaa

SEQ ID NO: 690653 - RNA, 19 nt, Homo sapiens
  misc_RNA (1)...(19): siRNA sense strand
cagaaauaauucaggaguu

SEQ ID NO: 690654 - RNA, 19 nt, Homo sapiens
  misc_RNA (1)...(19): siRNA sense strand
caaacaguauuggcuuuau

SEQ ID NO: 690655 - RNA, 19 nt, Homo sapiens
  misc_RNA (1)...(19): siRNA sense strand
gaauauccagauccaauug

SEQ ID NO: 690656 - RNA, 19 nt, Homo sapiens
  misc_RNA (1)...(19): siRNA sense strand
ccucuuaucaaccagauua

SEQ ID NO: 690657 - RNA, 19 nt, Homo sapiens
  misc_RNA (1)...(19): siRNA sense strand
guaaagcuuucagcaacaa

SEQ ID NO: 690658 - RNA, 19 nt, Homo sapiens
  misc_RNA (1)...(19): siRNA sense strand
gaaucuuugugucaaguau

SEQ ID NO: 690659 - RNA, 19 nt, Homo sapiens
  misc_RNA (1)...(19): siRNA sense strand
ucaaguuucaccagaguua

SEQ ID NO: 690660 - RNA, 19 nt, Homo sapiens
  misc_RNA (1)...(19): siRNA sense strand
gcgaaguuauagcaaauca

SEQ ID NO: 690661 - RNA, 19 nt, Homo sapiens
  misc_RNA (1)...(19): siRNA sense strand
ggagugcugauuguuaaua

SEQ ID NO: 690662 - RNA, 19 nt, Homo sapiens
  misc_RNA (1)...(19): siRNA sense strand
gcuggagugcugauuguua

SEQ ID NO: 690663 - RNA, 19 nt, Homo sapiens
  misc_RNA (1)...(19): siRNA sense strand
caagaggcacuacaagcua

SEQ ID NO: 690664 - RNA, 19 nt, Homo sapiens
  misc_RNA (1)...(19): siRNA sense strand
ccagugggauuugcugauu

SEQ ID NO: 690665 - RNA, 19 nt, Homo sapiens
  misc_RNA (1)...(19): siRNA sense strand
gcaguugaauauccagauc

SEQ ID NO: 690666 - RNA, 19 nt, Homo sapiens
  misc_RNA (1)...(19): siRNA sense strand
ggaguucauuccucuuauc

SEQ ID NO: 690667 - RNA, 19 nt, Homo sapiens
  misc_RNA (1)...(19): siRNA sense strand
gaagccauguuuguagaau

SEQ ID NO: 690668 - RNA, 19 nt, Homo sapiens
  misc_RNA (1)...(19): siRNA sense strand
cauguuggccguuaugaaa

SEQ ID NO: 690669 - RNA, 19 nt, Homo sapiens
  misc_RNA (1)...(19): siRNA sense strand
aauggacccuguugauaaa

SEQ ID NO: 690670 - RNA, 19 nt, Homo sapiens
  misc_RNA (1)...(19): siRNA sense strand
gcagaugcacaaacaguau

SEQ ID NO: 690671 - RNA, 19 nt, Homo sapiens
  misc_RNA (1)...(19): siRNA sense strand
ugagcgaaguuauagcaaa

SEQ ID NO: 690672 - RNA, 19 nt, Homo sapiens
  misc_RNA (1)...(19): siRNA sense strand
gcaagucgaaccaguaaag

SEQ ID NO: 690673 - RNA, 19 nt, Homo sapiens
  misc_RNA (1)...(19): siRNA sense strand
gaugcgaacucugguaaca

SEQ ID NO: 690674 - RNA, 19 nt, Homo sapiens
  misc_RNA (1)...(19): siRNA sense strand
aaaugagggugaagaugaa

SEQ ID NO: 690675 - RNA, 19 nt, Homo sapiens
  misc_RNA (1)...(19): siRNA sense strand
gaggaggcucguaggaaua

SEQ ID NO: 690676 - RNA, 19 nt, Homo sapiens
  misc_RNA (1)...(19): siRNA sense strand
cacaaacaguauuggcuuu

SEQ ID NO: 690677 - RNA, 19 nt, Homo sapiens
  misc_RNA (1)...(19): siRNA sense strand
caaauucaagauacaggua

SEQ ID NO: 690678 - RNA, 19 nt, Homo sapiens
  misc_RNA (1)...(19): siRNA sense strand
aacauaugcucaaagauug

SEQ ID NO: 690679 - RNA, 19 nt, Homo sapiens
  misc_RNA (1)...(19): siRNA sense strand
gcauugaccaggaagaaga

SEQ ID NO: 690680 - RNA, 19 nt, Homo sapiens
  misc_RNA (1)...(19): siRNA sense strand
cagaggacauacagugaug

SEQ ID NO: 690681 - RNA, 19 nt, Homo sapiens
  misc_RNA (1)...(19): siRNA sense strand
gcagccugaugcuaaaguu

SEQ ID NO: 690682 - RNA, 19 nt, Homo sapiens
  misc_RNA (1)...(19): siRNA sense strand
ggaaacaagccuuaaugag

SEQ ID NO: 690683 - RNA, 19 nt, Homo sapiens
  misc_RNA (1)...(19): siRNA sense strand
aaaugaaacuaguggaauc

SEQ ID NO: 690684 - RNA, 19 nt, Homo sapiens
  misc_RNA (1)...(19): siRNA sense strand
uauagccaaugauagguuu

SEQ ID NO: 690685 - RNA, 19 nt, Homo sapiens
  misc_RNA (1)...(19): siRNA sense strand
cuggagugcugauuguuaa

SEQ ID NO: 690686 - RNA, 19 nt, Homo sapiens
  misc_RNA (1)...(19): siRNA sense strand
gauguugcagcuacuaauu

SEQ ID NO: 690687 - RNA, 19 nt, Homo sapiens
  misc_RNA (1)...(19): siRNA sense strand
cccagaauguguucaguau

SEQ ID NO: 690688 - RNA, 19 nt, Homo sapiens
  misc_RNA (1)...(19): siRNA sense strand
aaaucaaggugcagagaau

SEQ ID NO: 690689 - RNA, 19 nt, Homo sapiens
  misc_RNA (1)...(19): siRNA sense strand
agaagaccuuuauacgaaa

SEQ ID NO: 690690 - RNA, 19 nt, Homo sapiens
  misc_RNA (1)...(19): siRNA sense strand
acucagaacuaaccacugu

SEQ ID NO: 690691 - RNA, 19 nt, Homo sapiens
  misc_RNA (1)...(19): siRNA sense strand
gaugaagccauguuuguag

SEQ ID NO: 690692 - RNA, 19 nt, Homo sapiens
  misc_RNA (1)...(19): siRNA sense strand
uaaagacagucauggguua

SEQ ID NO: 690693 - RNA, 19 nt, Homo sapiens
  misc_RNA (1)...(19): siRNA sense strand
gaaaucugcccuuuaaauu

SEQ ID NO: 690694 - RNA, 19 nt, Homo sapiens
  misc_RNA (1)...(19): siRNA sense strand
gaagagaacgcccagauca

SEQ ID NO: 690695 - RNA, 19 nt, Homo sapiens
  misc_RNA (1)...(19): siRNA sense strand
gcacgcagcugcuuguagu

SEQ ID NO: 690696 - RNA, 19 nt, Homo sapiens
  misc_RNA (1)...(19): siRNA sense strand
ggaaaucugcccuuuaaau

SEQ ID NO: 690697 - RNA, 19 nt, Homo sapiens
  misc_RNA (1)...(19): siRNA sense strand
gauggaggauaaagugaaa

SEQ ID NO: 690698 - RNA, 19 nt, Homo sapiens
  misc_RNA (1)...(19): siRNA sense strand
gccaucaagugucaauuaa

SEQ ID NO: 690699 - RNA, 19 nt, Homo sapiens
  misc_RNA (1)...(19): siRNA sense strand
ugaccaagauucugaggaa

SEQ ID NO: 690700 - RNA, 19 nt, Homo sapiens
  misc_RNA (1)...(19): siRNA sense strand
gggacaauaucaacaauag

SEQ ID NO: 690701 - RNA, 19 nt, Homo sapiens
  misc_RNA (1)...(19): siRNA sense strand
cggaagagcuggagaaagg

SEQ ID NO: 690702 - RNA, 19 nt, Homo sapiens
  misc_RNA (1)...(19): siRNA sense strand
gggcaagccuaucguccua

SEQ ID NO: 690703 - RNA, 19 nt, Homo sapiens
  misc_RNA (1)...(19): siRNA sense strand
ccaaaguccugaucacugu

SEQ ID NO: 690704 - RNA, 19 nt, Homo sapiens
  misc_RNA (1)...(19): siRNA sense strand
cagauacgcuauucaguuc

SEQ ID NO: 690705 - RNA, 19 nt, Homo sapiens
  misc_RNA (1)...(19): siRNA sense strand
uaagggacauuaacgacaa

SEQ ID NO: 690706 - RNA, 19 nt, Homo sapiens
  misc_RNA (1)...(19): siRNA sense strand
cgacaaugcgccuuacuuu

SEQ ID NO: 690707 - RNA, 19 nt, Homo sapiens
  misc_RNA (1)...(19): siRNA sense strand
gaagugcaagcaauggaua

SEQ ID NO: 690708 - RNA, 19 nt, Homo sapiens
  misc_RNA (1)...(19): siRNA sense strand
ggccaucaagugucaauua

SEQ ID NO: 690709 - RNA, 19 nt, Homo sapiens
  misc_RNA (1)...(19): siRNA sense strand
gaacaaucccagaggaguu

SEQ ID NO: 690710 - RNA, 19 nt, Homo sapiens
  misc_RNA (1)...(19): siRNA sense strand
uaaaugaccaagauucuga

SEQ ID NO: 690711 - RNA, 19 nt, Homo sapiens
  misc_RNA (1)...(19): siRNA sense strand
gcuauucaguuccggaaga

SEQ ID NO: 690712 - RNA, 19 nt, Homo sapiens
  misc_RNA (1)...(19): siRNA sense strand
guuccuagcuacaacauca

SEQ ID NO: 690713 - RNA, 19 nt, Homo sapiens
  misc_RNA (1)...(19): siRNA sense strand
gacauuaauugcccuuuua

SEQ ID NO: 690714 - RNA, 19 nt, Homo sapiens
  misc_RNA (1)...(19): siRNA sense strand
gagaugcgguucccucuac

SEQ ID NO: 690715 - RNA, 19 nt, Homo sapiens
  misc_RNA (1)...(19): siRNA sense strand
aaacucauaucucgcugaa

SEQ ID NO: 690716 - RNA, 19 nt, Homo sapiens
  misc_RNA (1)...(19): siRNA sense strand
ccagauacgcuauucaguu

SEQ ID NO: 690717 - RNA, 19 nt, Homo sapiens
  misc_RNA (1)...(19): siRNA sense strand
ggugaucuguuucauccaa

SEQ ID NO: 690718 - RNA, 19 nt, Homo sapiens
  misc_RNA (1)...(19): siRNA sense strand
gcacccagauacgcuauuc

SEQ ID NO: 690719 - RNA, 19 nt, Homo sapiens
  misc_RNA (1)...(19): siRNA sense strand
ccgcuuauaucccagagaa

SEQ ID NO: 690720 - RNA, 19 nt, Homo sapiens
  misc_RNA (1)...(19): siRNA sense strand
aaucugcccuuuaaauuag

SEQ ID NO: 690721 - RNA, 19 nt, Homo sapiens
  misc_RNA (1)...(19): siRNA sense strand
ggacauuaauugcccuuuu

SEQ ID NO: 690722 - RNA, 19 nt, Homo sapiens
  misc_RNA (1)...(19): siRNA sense strand
guagaaguaagggacauua

SEQ ID NO: 690723 - RNA, 19 nt, Homo sapiens
  misc_RNA (1)...(19): siRNA sense strand
gcccaacuaugcagacaug

SEQ ID NO: 690724 - RNA, 19 nt, Homo sapiens
  misc_RNA (1)...(19): siRNA sense strand
gaguuucccucgucucugu

SEQ ID NO: 690725 - RNA, 19 nt, Homo sapiens
  misc_RNA (1)...(19): siRNA sense strand
gaacgacaaugccccagaa

SEQ ID NO: 690726 - RNA, 19 nt, Homo sapiens
  misc_RNA (1)...(19): siRNA sense strand
ggacagagacgcgcucaag

SEQ ID NO: 690727 - RNA, 19 nt, Homo sapiens
  misc_RNA (1)...(19): siRNA sense strand
uggaguagaaguagaagua

SEQ ID NO: 690728 - RNA, 19 nt, Homo sapiens
  misc_RNA (1)...(19): siRNA sense strand
caauggauaaugcaggaua

SEQ ID NO: 690729 - RNA, 19 nt, Homo sapiens
  misc_RNA (1)...(19): siRNA sense strand
gaccggaugcacccagaua

SEQ ID NO: 690730 - RNA, 19 nt, Homo sapiens
  misc_RNA (1)...(19): siRNA sense strand
agacagucauggguuaauu

SEQ ID NO: 690731 - RNA, 19 nt, Homo sapiens
  misc_RNA (1)...(19): siRNA sense strand
ggaguagaaguagaaguaa

SEQ ID NO: 690732 - RNA, 19 nt, Homo sapiens
  misc_RNA (1)...(19): siRNA sense strand
gagcccugcuggacagaga

SEQ ID NO: 690733 - RNA, 19 nt, Homo sapiens
  misc_RNA (1)...(19): siRNA sense strand
gaguagaaguagaaguaag

SEQ ID NO: 690734 - RNA, 19 nt, Homo sapiens
  misc_RNA (1)...(19): siRNA sense strand
gcggaagagucaccugauc

SEQ ID NO: 690735 - RNA, 19 nt, Homo sapiens
  misc_RNA (1)...(19): siRNA sense strand
agaacgcccagaucacuua

SEQ ID NO: 690736 - RNA, 19 nt, Homo sapiens
  misc_RNA (1)...(19): siRNA sense strand
gaccaagauucugaggaaa

SEQ ID NO: 690737 - RNA, 19 nt, Homo sapiens
  misc_RNA (1)...(19): siRNA sense strand
ucgugaaagugaauuagaa

SEQ ID NO: 690738 - RNA, 19 nt, Homo sapiens
  misc_RNA (1)...(19): siRNA sense strand
cuuauucccuggcugagaa

SEQ ID NO: 690739 - RNA, 19 nt, Homo sapiens
  misc_RNA (1)...(19): siRNA sense strand
gaaguaagggacauuaacg

SEQ ID NO: 690740 - RNA, 19 nt, Homo sapiens
  misc_RNA (1)...(19): siRNA sense strand
gucaggugauucgguauuu

SEQ ID NO: 690741 - RNA, 19 nt, Homo sapiens
  misc_RNA (1)...(19): siRNA sense strand
gauggaagugcaagcaaug

SEQ ID NO: 690742 - RNA, 19 nt, Homo sapiens
  misc_RNA (1)...(19): siRNA sense strand
uaccgacccugacgaagga

SEQ ID NO: 690743 - RNA, 19 nt, Homo sapiens
  misc_RNA (1)...(19): siRNA sense strand
gagccgacgguaguaagua

SEQ ID NO: 690744 - RNA, 19 nt, Homo sapiens
  misc_RNA (1)...(19): siRNA sense strand
gugauucgguauuuucuaa

SEQ ID NO: 690745 - RNA, 19 nt, Homo sapiens
  misc_RNA (1)...(19): siRNA sense strand
gauaaugcaggauauucug

SEQ ID NO: 690746 - RNA, 19 nt, Homo sapiens
  misc_RNA (1)...(19): siRNA sense strand
ggauaaugcaggauauucu

SEQ ID NO: 690747 - RNA, 19 nt, Homo sapiens
  misc_RNA (1)...(19): siRNA sense strand
gacaaugcgccuuacuuuc

SEQ ID NO: 690748 - RNA, 19 nt, Homo sapiens
  misc_RNA (1)...(19): siRNA sense strand
ggaagugcaagcaauggau

SEQ ID NO: 690749 - RNA, 19 nt, Homo sapiens
  misc_RNA (1)...(19): siRNA sense strand
gguauuccuuccgguaugu

SEQ ID NO: 690750 - RNA, 19 nt, Homo sapiens
  misc_RNA (1)...(19): siRNA sense strand
acauucugauggaggauaa

SEQ ID NO: 690751 - RNA, 19 nt, Homo sapiens
  misc_RNA (1)...(19): siRNA sense strand
ccacgaggagucaggauuc

SEQ ID NO: 690752 - RNA, 19 nt, Homo sapiens
  misc_RNA (1)...(19): siRNA sense strand
uauauggaguagaaguaga

SEQ ID NO: 690753 - RNA, 19 nt, Homo sapiens
  misc_RNA (1)...(19): siRNA sense strand
uuaacgacaaugcgccuua

SEQ ID NO: 690754 - RNA, 19 nt, Homo sapiens
  misc_RNA (1)...(19): siRNA sense strand
gacagucauggguuaauug

SEQ ID NO: 690755 - RNA, 19 nt, Homo sapiens
  misc_RNA (1)...(19): siRNA sense strand
gagaacgcccagaucacuu

SEQ ID NO: 690756 - RNA, 19 nt, Homo sapiens
  misc_RNA (1)...(19): siRNA sense strand
guaauucagggacaauauc

SEQ ID NO: 690757 - RNA, 19 nt, Homo sapiens
  misc_RNA (1)...(19): siRNA sense strand
ucaaugcggaagugaggua

SEQ ID NO: 690758 - RNA, 19 nt, Homo sapiens
  misc_RNA (1)...(19): siRNA sense strand
gaaaaugcagccacugaga

SEQ ID NO: 690759 - RNA, 19 nt, Homo sapiens
  misc_RNA (1)...(19): siRNA sense strand
uagaaguaagggacauuaa

SEQ ID NO: 690760 - RNA, 19 nt, Homo sapiens
  misc_RNA (1)...(19): siRNA sense strand
acgcccagaucacuuauuc

SEQ ID NO: 690761 - RNA, 19 nt, Homo sapiens
  misc_RNA (1)...(19): siRNA sense strand
agagguaggacgcagcuuu

SEQ ID NO: 690762 - RNA, 19 nt, Homo sapiens
  misc_RNA (1)...(19): siRNA sense strand
cagggacaauaucaacaau

SEQ ID NO: 690763 - RNA, 19 nt, Homo sapiens
  misc_RNA (1)...(19): siRNA sense strand
gagguauuccuuccgguau

SEQ ID NO: 690764 - RNA, 19 nt, Homo sapiens
  misc_RNA (1)...(19): siRNA sense strand
ucagggacaauaucaacaa

SEQ ID NO: 690765 - RNA, 19 nt, Homo sapiens
  misc_RNA (1)...(19): siRNA sense strand
gcugagcuccuucgacuac

SEQ ID NO: 690766 - RNA, 19 nt, Homo sapiens
  misc_RNA (1)...(19): siRNA sense strand
agauggaagugcaagcaau

SEQ ID NO: 690767 - RNA, 19 nt, Homo sapiens
  misc_RNA (1)...(19): siRNA sense strand
cguccuacguguccaucaa

SEQ ID NO: 690768 - RNA, 19 nt, Homo sapiens
  misc_RNA (1)...(19): siRNA sense strand
gaacgcccagaucacuuau

SEQ ID NO: 690769 - RNA, 19 nt, Homo sapiens
  misc_RNA (1)...(19): siRNA sense strand
gugaagagaacgcccagau

SEQ ID NO: 690770 - RNA, 19 nt, Homo sapiens
  misc_RNA (1)...(19): siRNA sense strand
uaguuuagucacagacaua

SEQ ID NO: 690771 - RNA, 19 nt, Homo sapiens
  misc_RNA (1)...(19): siRNA sense strand
guaaaugaccaagauucug

SEQ ID NO: 690772 - RNA, 19 nt, Homo sapiens
  misc_RNA (1)...(19): siRNA sense strand
cgugaaagugaauuagaaa

SEQ ID NO: 690773 - RNA, 19 nt, Homo sapiens
  misc_RNA (1)...(19): siRNA sense strand
uguaugcgcugagcuccuu

SEQ ID NO: 690774 - RNA, 19 nt, Homo sapiens
  misc_RNA (1)...(19): siRNA sense strand
gagccaaaguccugaucac

SEQ ID NO: 690775 - RNA, 19 nt, Homo sapiens
  misc_RNA (1)...(19): siRNA sense strand
uaacgacaaugcgccuuac

SEQ ID NO: 690776 - RNA, 19 nt, Homo sapiens
  misc_RNA (1)...(19): siRNA sense strand
gcaguuccgagacuugcaa

SEQ ID NO: 690777 - RNA, 19 nt, Homo sapiens
  misc_RNA (1)...(19): siRNA sense strand
gcuuauaucccagagaaca

SEQ ID NO: 690778 - RNA, 19 nt, Homo sapiens
  misc_RNA (1)...(19): siRNA sense strand
ggccuccuauuccgcuuau

SEQ ID NO: 690779 - RNA, 19 nt, Homo sapiens
  misc_RNA (1)...(19): siRNA sense strand
ccacggaaacucauaucuc

SEQ ID NO: 690780 - RNA, 19 nt, Homo sapiens
  misc_RNA (1)...(19): siRNA sense strand
ccaucaagugucaauuaaa

SEQ ID NO: 690781 - RNA, 19 nt, Homo sapiens
  misc_RNA (1)...(19): siRNA sense strand
acaaugcgccuuacuuucg

SEQ ID NO: 690782 - RNA, 19 nt, Homo sapiens
  misc_RNA (1)...(19): siRNA sense strand
aggcuuuccugcagaccua

SEQ ID NO: 690783 - RNA, 19 nt, Homo sapiens
  misc_RNA (1)...(19): siRNA sense strand
aauggauaaugcaggauau

SEQ ID NO: 690784 - RNA, 19 nt, Homo sapiens
  misc_RNA (1)...(19): siRNA sense strand
uaauucagggacaauauca

SEQ ID NO: 690785 - RNA, 19 nt, Homo sapiens
  misc_RNA (1)...(19): siRNA sense strand
aaaugcagccacugagaug

SEQ ID NO: 690786 - RNA, 19 nt, Homo sapiens
  misc_RNA (1)...(19): siRNA sense strand
gcagcugcuuguagucaac

SEQ ID NO: 690787 - RNA, 19 nt, Homo sapiens
  misc_RNA (1)...(19): siRNA sense strand
aaauggagccgacgguagu

SEQ ID NO: 690788 - RNA, 19 nt, Homo sapiens
  misc_RNA (1)...(19): siRNA sense strand
caaugcgccuuacuuucgu

SEQ ID NO: 690789 - RNA, 19 nt, Homo sapiens
  misc_RNA (1)...(19): siRNA sense strand
gacauucugauggaggaua

SEQ ID NO: 690790 - RNA, 19 nt, Homo sapiens
  misc_RNA (1)...(19): siRNA sense strand
gcaagcaauggauaaugca

SEQ ID NO: 690791 - RNA, 19 nt, Homo sapiens
  misc_RNA (1)...(19): siRNA sense strand
aaaucuagacauucugaug

SEQ ID NO: 690792 - RNA, 19 nt, Homo sapiens
  misc_RNA (1)...(19): siRNA sense strand
uaaagacagucauggguua

SEQ ID NO: 690793 - RNA, 19 nt, Homo sapiens
  misc_RNA (1)...(19): siRNA sense strand
gaaaucugcccuuuaaauu

SEQ ID NO: 690794 - RNA, 19 nt, Homo sapiens
  misc_RNA (1)...(19): siRNA sense strand
gaagagaacgcccagauca

SEQ ID NO: 690795 - RNA, 19 nt, Homo sapiens
  misc_RNA (1)...(19): siRNA sense strand
gcacgcagcugcuuguagu

SEQ ID NO: 690796 - RNA, 19 nt, Homo sapiens
  misc_RNA (1)...(19): siRNA sense strand
ggaaaucugcccuuuaaau

SEQ ID NO: 690797 - RNA, 19 nt, Homo sapiens
  misc_RNA (1)...(19): siRNA sense strand
gauggaggauaaagugaaa

SEQ ID NO: 690798 - RNA, 19 nt, Homo sapiens
  misc_RNA (1)...(19): siRNA sense strand
gccaucaagugucaauuaa

SEQ ID NO: 690799 - RNA, 19 nt, Homo sapiens
  misc_RNA (1)...(19): siRNA sense strand
ugaccaagauucugaggaa

SEQ ID NO: 690800 - RNA, 19 nt, Homo sapiens
  misc_RNA (1)...(19): siRNA sense strand
gggacaauaucaacaauag

SEQ ID NO: 690801 - RNA, 19 nt, Homo sapiens
  misc_RNA (1)...(19): siRNA sense strand
cggaagagcuggagaaagg

SEQ ID NO: 690802 - RNA, 19 nt, Homo sapiens
  misc_RNA (1)...(19): siRNA sense strand
gggcaagccuaucguccua

SEQ ID NO: 690803 - RNA, 19 nt, Homo sapiens
  misc_RNA (1)...(19): siRNA sense strand
ccaaaguccugaucacugu

SEQ ID NO: 690804 - RNA, 19 nt, Homo sapiens
  misc_RNA (1)...(19): siRNA sense strand
cagauacgcuauucaguuc

SEQ ID NO: 690805 - RNA, 19 nt, Homo sapiens
  misc_RNA (1)...(19): siRNA sense strand
uaagggacauuaacgacaa

SEQ ID NO: 690806 - RNA, 19 nt, Homo sapiens
  misc_RNA (1)...(19): siRNA sense strand
cgacaaugcgccuuacuuu

SEQ ID NO: 690807 - RNA, 19 nt, Homo sapiens
  misc_RNA (1)...(19): siRNA sense strand
gaagugcaagcaauggaua

SEQ ID NO: 690808 - RNA, 19 nt, Homo sapiens
  misc_RNA (1)...(19): siRNA sense strand
ggccaucaagugucaauua

SEQ ID NO: 690809 - RNA, 19 nt, Homo sapiens
  misc_RNA (1)...(19): siRNA sense strand
gaacaaucccagaggaguu

SEQ ID NO: 690810 - RNA, 19 nt, Homo sapiens
  misc_RNA (1)...(19): siRNA sense strand
uaaaugaccaagauucuga

SEQ ID NO: 690811 - RNA, 19 nt, Homo sapiens
  misc_RNA (1)...(19): siRNA sense strand
gcuauucaguuccggaaga

SEQ ID NO: 690812 - RNA, 19 nt, Homo sapiens
  misc_RNA (1)...(19): siRNA sense strand
guuccuagcuacaacauca

SEQ ID NO: 690813 - RNA, 19 nt, Homo sapiens
  misc_RNA (1)...(19): siRNA sense strand
gacauuaauugcccuuuua

SEQ ID NO: 690814 - RNA, 19 nt, Homo sapiens
  misc_RNA (1)...(19): siRNA sense strand
gagaugcgguucccucuac

SEQ ID NO: 690815 - RNA, 19 nt, Homo sapiens
  misc_RNA (1)...(19): siRNA sense strand
aaacucauaucucgcugaa

SEQ ID NO: 690816 - RNA, 19 nt, Homo sapiens
  misc_RNA (1)...(19): siRNA sense strand
ccagauacgcuauucaguu

SEQ ID NO: 690817 - RNA, 19 nt, Homo sapiens
  misc_RNA (1)...(19): siRNA sense strand
ggugaucuguuucauccaa

SEQ ID NO: 690818 - RNA, 19 nt, Homo sapiens
  misc_RNA (1)...(19): siRNA sense strand
gcacccagauacgcuauuc

SEQ ID NO: 690819 - RNA, 19 nt, Homo sapiens
  misc_RNA (1)...(19): siRNA sense strand
ccgcuuauaucccagagaa

SEQ ID NO: 690820 - RNA, 19 nt, Homo sapiens
  misc_RNA (1)...(19): siRNA sense strand
aaucugcccuuuaaauuag

SEQ ID NO: 690821 - RNA, 19 nt, Homo sapiens
  misc_RNA (1)...(19): siRNA sense strand
ggacauuaauugcccuuuu

SEQ ID NO: 690822 - RNA, 19 nt, Homo sapiens
  misc_RNA (1)...(19): siRNA sense strand
guagaaguaagggacauua

SEQ ID NO: 690823 - RNA, 19 nt, Homo sapiens
  misc_RNA (1)...(19): siRNA sense strand
gcccaacuaugcagacaug

SEQ ID NO: 690824 - RNA, 19 nt, Homo sapiens
  misc_RNA (1)...(19): siRNA sense strand
gaguuucccucgucucugu

SEQ ID NO: 690825 - RNA, 19 nt, Homo sapiens
  misc_RNA (1)...(19): siRNA sense strand
gaacgacaaugccccagaa

SEQ ID NO: 690826 - RNA, 19 nt, Homo sapiens
  misc_RNA (1)...(19): siRNA sense strand
ggacagagacgcgcucaag

SEQ ID NO: 690827 - RNA, 19 nt, Homo sapiens
  misc_RNA (1)...(19): siRNA sense strand
uggaguagaaguagaagua

SEQ ID NO: 690828 - RNA, 19 nt, Homo sapiens
  misc_RNA (1)...(19): siRNA sense strand
caauggauaaugcaggaua

SEQ ID NO: 690829 - RNA, 19 nt, Homo sapiens
  misc_RNA (1)...(19): siRNA sense strand
gaccggaugcacccagaua

SEQ ID NO: 690830 - RNA, 19 nt, Homo sapiens
  misc_RNA (1)...(19): siRNA sense strand
agacagucauggguuaauu

SEQ ID NO: 690831 - RNA, 19 nt, Homo sapiens
  misc_RNA (1)...(19): siRNA sense strand
ggaguagaaguagaaguaa

SEQ ID NO: 690832 - RNA, 19 nt, Homo sapiens
  misc_RNA (1)...(19): siRNA sense strand
gagcccugcuggacagaga

SEQ ID NO: 690833 - RNA, 19 nt, Homo sapiens
  misc_RNA (1)...(19): siRNA sense strand
gaguagaaguagaaguaag

SEQ ID NO: 690834 - RNA, 19 nt, Homo sapiens
  misc_RNA (1)...(19): siRNA sense strand
gcggaagagucaccugauc

SEQ ID NO: 690835 - RNA, 19 nt, Homo sapiens
  misc_RNA (1)...(19): siRNA sense strand
agaacgcccagaucacuua

SEQ ID NO: 690836 - RNA, 19 nt, Homo sapiens
  misc_RNA (1)...(19): siRNA sense strand
gaccaagauucugaggaaa

SEQ ID NO: 690837 - RNA, 19 nt, Homo sapiens
  misc_RNA (1)...(19): siRNA sense strand
ucgugaaagugaauuagaa

SEQ ID NO: 690838 - RNA, 19 nt, Homo sapiens
  misc_RNA (1)...(19): siRNA sense strand
cuuauucccuggcugagaa

SEQ ID NO: 690839 - RNA, 19 nt, Homo sapiens
  misc_RNA (1)...(19): siRNA sense strand
gaaguaagggacauuaacg

SEQ ID NO: 690840 - RNA, 19 nt, Homo sapiens
  misc_RNA (1)...(19): siRNA sense strand
gucaggugauucgguauuu

SEQ ID NO: 690841 - RNA, 19 nt, Homo sapiens
  misc_RNA (1)...(19): siRNA sense strand
gauggaagugcaagcaaug

SEQ ID NO: 690842 - RNA, 19 nt, Homo sapiens
  misc_RNA (1)...(19): siRNA sense strand
uaccgacccugacgaagga

SEQ ID NO: 690843 - RNA, 19 nt, Homo sapiens
  misc_RNA (1)...(19): siRNA sense strand
gagccgacgguaguaagua

SEQ ID NO: 690844 - RNA, 19 nt, Homo sapiens
  misc_RNA (1)...(19): siRNA sense strand
gugauucgguauuuucuaa

SEQ ID NO: 690845 - RNA, 19 nt, Homo sapiens
  misc_RNA (1)...(19): siRNA sense strand
gauaaugcaggauauucug

SEQ ID NO: 690846 - RNA, 19 nt, Homo sapiens
  misc_RNA (1)...(19): siRNA sense strand
ggauaaugcaggauauucu

SEQ ID NO: 690847 - RNA, 19 nt, Homo sapiens
  misc_RNA (1)...(19): siRNA sense strand
gacaaugcgccuuacuuuc

SEQ ID NO: 690848 - RNA, 19 nt, Homo sapiens
  misc_RNA (1)...(19): siRNA sense strand
ggaagugcaagcaauggau

SEQ ID NO: 690849 - RNA, 19 nt, Homo sapiens
  misc_RNA (1)...(19): siRNA sense strand
gguauuccuuccgguaugu

SEQ ID NO: 690850 - RNA, 19 nt, Homo sapiens
  misc_RNA (1)...(19): siRNA sense strand
acauucugauggaggauaa

SEQ ID NO: 690851 - RNA, 19 nt, Homo sapiens
  misc_RNA (1)...(19): siRNA sense strand
ccacgaggagucaggauuc

SEQ ID NO: 690852 - RNA, 19 nt, Homo sapiens
  misc_RNA (1)...(19): siRNA sense strand
uauauggaguagaaguaga

SEQ ID NO: 690853 - RNA, 19 nt, Homo sapiens
  misc_RNA (1)...(19): siRNA sense strand
uuaacgacaaugcgccuua

SEQ ID NO: 690854 - RNA, 19 nt, Homo sapiens
  misc_RNA (1)...(19): siRNA sense strand
gacagucauggguuaauug

SEQ ID NO: 690855 - RNA, 19 nt, Homo sapiens
  misc_RNA (1)...(19): siRNA sense strand
gagaacgcccagaucacuu

SEQ ID NO: 690856 - RNA, 19 nt, Homo sapiens
  misc_RNA (1)...(19): siRNA sense strand
guaauucagggacaauauc

SEQ ID NO: 690857 - RNA, 19 nt, Homo sapiens
  misc_RNA (1)...(19): siRNA sense strand
ucaaugcggaagugaggua

SEQ ID NO: 690858 - RNA, 19 nt, Homo sapiens
  misc_RNA (1)...(19): siRNA sense strand
gaaaaugcagccacugaga

SEQ ID NO: 690859 - RNA, 19 nt, Homo sapiens
  misc_RNA (1)...(19): siRNA sense strand
uagaaguaagggacauuaa

SEQ ID NO: 690860 - RNA, 19 nt, Homo sapiens
  misc_RNA (1)...(19): siRNA sense strand
acgcccagaucacuuauuc

SEQ ID NO: 690861 - RNA, 19 nt, Homo sapiens
  misc_RNA (1)...(19): siRNA sense strand
agagguaggacgcagcuuu

SEQ ID NO: 690862 - RNA, 19 nt, Homo sapiens
  misc_RNA (1)...(19): siRNA sense strand
cagggacaauaucaacaau

SEQ ID NO: 690863 - RNA, 19 nt, Homo sapiens
  misc_RNA (1)...(19): siRNA sense strand
gagguauuccuuccgguau

SEQ ID NO: 690864 - RNA, 19 nt, Homo sapiens
  misc_RNA (1)...(19): siRNA sense strand
ucagggacaauaucaacaa

SEQ ID NO: 690865 - RNA, 19 nt, Homo sapiens
  misc_RNA (1)...(19): siRNA sense strand
gcugagcuccuucgacuac

SEQ ID NO: 690866 - RNA, 19 nt, Homo sapiens
  misc_RNA (1)...(19): siRNA sense strand
agauggaagugcaagcaau

SEQ ID NO: 690867 - RNA, 19 nt, Homo sapiens
  misc_RNA (1)...(19): siRNA sense strand
cguccuacguguccaucaa

SEQ ID NO: 690868 - RNA, 19 nt, Homo sapiens
  misc_RNA (1)...(19): siRNA sense strand
gaacgcccagaucacuuau

SEQ ID NO: 690869 - RNA, 19 nt, Homo sapiens
  misc_RNA (1)...(19): siRNA sense strand
gugaagagaacgcccagau

SEQ ID NO: 690870 - RNA, 19 nt, Homo sapiens
  misc_RNA (1)...(19): siRNA sense strand
uaguuuagucacagacaua

SEQ ID NO: 690871 - RNA, 19 nt, Homo sapiens
  misc_RNA (1)...(19): siRNA sense strand
guaaaugaccaagauucug

SEQ ID NO: 690872 - RNA, 19 nt, Homo sapiens
  misc_RNA (1)...(19): siRNA sense strand
cgugaaagugaauuagaaa

SEQ ID NO: 690873 - RNA, 19 nt, Homo sapiens
  misc_RNA (1)...(19): siRNA sense strand
uguaugcgcugagcuccuu

SEQ ID NO: 690874 - RNA, 19 nt, Homo sapiens
  misc_RNA (1)...(19): siRNA sense strand
gagccaaaguccugaucac

SEQ ID NO: 690875 - RNA, 19 nt, Homo sapiens
  misc_RNA (1)...(19): siRNA sense strand
uaacgacaaugcgccuuac

SEQ ID NO: 690876 - RNA, 19 nt, Homo sapiens
  misc_RNA (1)...(19): siRNA sense strand
gcaguuccgagacuugcaa

SEQ ID NO: 690877 - RNA, 19 nt, Homo sapiens
  misc_RNA (1)...(19): siRNA sense strand
gcuuauaucccagagaaca

SEQ ID NO: 690878 - RNA, 19 nt, Homo sapiens
  misc_RNA (1)...(19): siRNA sense strand
ggccuccuauuccgcuuau

SEQ ID NO: 690879 - RNA, 19 nt, Homo sapiens
  misc_RNA (1)...(19): siRNA sense strand
ccacggaaacucauaucuc

SEQ ID NO: 690880 - RNA, 19 nt, Homo sapiens
  misc_RNA (1)...(19): siRNA sense strand
ccaucaagugucaauuaaa

SEQ ID NO: 690881 - RNA, 19 nt, Homo sapiens
  misc_RNA (1)...(19): siRNA sense strand
acaaugcgccuuacuuucg

SEQ ID NO: 690882 - RNA, 19 nt, Homo sapiens
  misc_RNA (1)...(19): siRNA sense strand
aggcuuuccugcagaccua

SEQ ID NO: 690883 - RNA, 19 nt, Homo sapiens
  misc_RNA (1)...(19): siRNA sense strand
aauggauaaugcaggauau

SEQ ID NO: 690884 - RNA, 19 nt, Homo sapiens
  misc_RNA (1)...(19): siRNA sense strand
uaauucagggacaauauca

SEQ ID NO: 690885 - RNA, 19 nt, Homo sapiens
  misc_RNA (1)...(19): siRNA sense strand
aaaugcagccacugagaug

SEQ ID NO: 690886 - RNA, 19 nt, Homo sapiens
  misc_RNA (1)...(19): siRNA sense strand
gcagcugcuuguagucaac

SEQ ID NO: 690887 - RNA, 19 nt, Homo sapiens
  misc_RNA (1)...(19): siRNA sense strand
aaauggagccgacgguagu

SEQ ID NO: 690888 - RNA, 19 nt, Homo sapiens
  misc_RNA (1)...(19): siRNA sense strand
caaugcgccuuacuuucgu

SEQ ID NO: 690889 - RNA, 19 nt, Homo sapiens
  misc_RNA (1)...(19): siRNA sense strand
gacauucugauggaggaua

SEQ ID NO: 690890 - RNA, 19 nt, Homo sapiens
  misc_RNA (1)...(19): siRNA sense strand
gcaagcaauggauaaugca

SEQ ID NO: 690891 - RNA, 19 nt, Homo sapiens
  misc_RNA (1)...(19): siRNA sense strand
aaaucuagacauucugaug

SEQ ID NO: 690892 - RNA, 19 nt, Homo sapiens
  misc_RNA (1)...(19): siRNA sense strand
caacaagaauggcuucaaa

SEQ ID NO: 690893 - RNA, 19 nt, Homo sapiens
  misc_RNA (1)...(19): siRNA sense strand
ggagaaauaucuggaagaa

SEQ ID NO: 690894 - RNA, 19 nt, Homo sapiens
  misc_RNA (1)...(19): siRNA sense strand
caacugggaugauacuuau

SEQ ID NO: 690895 - RNA, 19 nt, Homo sapiens
  misc_RNA (1)...(19): siRNA sense strand
gaucuugguuccucuaaug

SEQ ID NO: 690896 - RNA, 19 nt, Homo sapiens
  misc_RNA (1)...(19): siRNA sense strand
ccagugauagucaauauua

SEQ ID NO: 690897 - RNA, 19 nt, Homo sapiens
  misc_RNA (1)...(19): siRNA sense strand
gcaagaauagucagaguga

SEQ ID NO: 690898 - RNA, 19 nt, Homo sapiens
  misc_RNA (1)...(19): siRNA sense strand
agaaauaucuggaagaaac

SEQ ID NO: 690899 - RNA, 19 nt, Homo sapiens
  misc_RNA (1)...(19): siRNA sense strand
ggaagaagccucgccauca

SEQ ID NO: 690900 - RNA, 19 nt, Homo sapiens
  misc_RNA (1)...(19): siRNA sense strand
acacuaggaccuccaaaua

SEQ ID NO: 690901 - RNA, 19 nt, Homo sapiens
  misc_RNA (1)...(19): siRNA sense strand
gaugaggucuucggcuuug

SEQ ID NO: 690902 - RNA, 19 nt, Homo sapiens
  misc_RNA (1)...(19): siRNA sense strand
gggaugauacuuaugacua

SEQ ID NO: 690903 - RNA, 19 nt, Homo sapiens
  misc_RNA (1)...(19): siRNA sense strand
ggaccaagcacgccucuuc

SEQ ID NO: 690904 - RNA, 19 nt, Homo sapiens
  misc_RNA (1)...(19): siRNA sense strand
gaugauagcaccugucagu

SEQ ID NO: 690905 - RNA, 19 nt, Homo sapiens
  misc_RNA (1)...(19): siRNA sense strand
gaagaagccucgccaucac

SEQ ID NO: 690906 - RNA, 19 nt, Homo sapiens
  misc_RNA (1)...(19): siRNA sense strand
ccagaauccuccagaagau

SEQ ID NO: 690907 - RNA, 19 nt, Homo sapiens
  misc_RNA (1)...(19): siRNA sense strand
gcgcuccaguuccggauaa

SEQ ID NO: 690908 - RNA, 19 nt, Homo sapiens
  misc_RNA (1)...(19): siRNA sense strand
ccaaguggaccaucgauga

SEQ ID NO: 690909 - RNA, 19 nt, Homo sapiens
  misc_RNA (1)...(19): siRNA sense strand
guucacagcucaccauugc

SEQ ID NO: 690910 - RNA, 19 nt, Homo sapiens
  misc_RNA (1)...(19): siRNA sense strand
ggaugauacuuaugacuac

SEQ ID NO: 690911 - RNA, 19 nt, Homo sapiens
  misc_RNA (1)...(19): siRNA sense strand
aggaaggcgugaccgaaua

SEQ ID NO: 690912 - RNA, 19 nt, Homo sapiens
  misc_RNA (1)...(19): siRNA sense strand
ggagacaggaguccauuca

SEQ ID NO: 690913 - RNA, 19 nt, Homo sapiens
  misc_RNA (1)...(19): siRNA sense strand
gcaccagucccucuucaug

SEQ ID NO: 690914 - RNA, 19 nt, Homo sapiens
  misc_RNA (1)...(19): siRNA sense strand
gaagcaagaagaaggaaag

SEQ ID NO: 690915 - RNA, 19 nt, Homo sapiens
  misc_RNA (1)...(19): siRNA sense strand
caacaggugagaagaagga

SEQ ID NO: 690916 - RNA, 19 nt, Homo sapiens
  misc_RNA (1)...(19): siRNA sense strand
ggagaagcaagaagaagga

SEQ ID NO: 690917 - RNA, 19 nt, Homo sapiens
  misc_RNA (1)...(19): siRNA sense strand
acaacugggaugauacuua

SEQ ID NO: 690918 - RNA, 19 nt, Homo sapiens
  misc_RNA (1)...(19): siRNA sense strand
gcacuuugauggguauucu

SEQ ID NO: 690919 - RNA, 19 nt, Homo sapiens
  misc_RNA (1)...(19): siRNA sense strand
ugaaagcggagcugucuga

SEQ ID NO: 690920 - RNA, 19 nt, Homo sapiens
  misc_RNA (1)...(19): siRNA sense strand
gagcagaaggccauuacug

SEQ ID NO: 690921 - RNA, 19 nt, Homo sapiens
  misc_RNA (1)...(19): siRNA sense strand
ggaggaccaucggauaaag

SEQ ID NO: 690922 - RNA, 19 nt, Homo sapiens
  misc_RNA (1)...(19): siRNA sense strand
ggcagucacucacaacaag

SEQ ID NO: 690923 - RNA, 19 nt, Homo sapiens
  misc_RNA (1)...(19): siRNA sense strand
gaccuugugugcucagauc

SEQ ID NO: 690924 - RNA, 19 nt, Homo sapiens
  misc_RNA (1)...(19): siRNA sense strand
ccaagcacgccucuucaaa

SEQ ID NO: 690925 - RNA, 19 nt, Homo sapiens
  misc_RNA (1)...(19): siRNA sense strand
ggucagucauaguggagaa

SEQ ID NO: 690926 - RNA, 19 nt, Homo sapiens
  misc_RNA (1)...(19): siRNA sense strand
acuaggaccuccaaauaca

SEQ ID NO: 690927 - RNA, 19 nt, Homo sapiens
  misc_RNA (1)...(19): siRNA sense strand
uuugauggcuggagucaug

SEQ ID NO: 690928 - RNA, 19 nt, Homo sapiens
  misc_RNA (1)...(19): siRNA sense strand
uuugacaacugggaugaua

SEQ ID NO: 690929 - RNA, 19 nt, Homo sapiens
  misc_RNA (1)...(19): siRNA sense strand
ucaaacccaugaagaagag

SEQ ID NO: 690930 - RNA, 19 nt, Homo sapiens
  misc_RNA (1)...(19): siRNA sense strand
caccguggcugagguaugu

SEQ ID NO: 690931 - RNA, 19 nt, Homo sapiens
  misc_RNA (1)...(19): siRNA sense strand
gcaugaacccgucccuugu

SEQ ID NO: 690932 - RNA, 19 nt, Homo sapiens
  misc_RNA (1)...(19): siRNA sense strand
gagaacuccucaggcucua

SEQ ID NO: 690933 - RNA, 19 nt, Homo sapiens
  misc_RNA (1)...(19): siRNA sense strand
caagaauggcuucaaacug

SEQ ID NO: 690934 - RNA, 19 nt, Homo sapiens
  misc_RNA (1)...(19): siRNA sense strand
agaggaagcgcagggaaua

SEQ ID NO: 690935 - RNA, 19 nt, Homo sapiens
  misc_RNA (1)...(19): siRNA sense strand
gaaccagagccggcugaaa

SEQ ID NO: 690936 - RNA, 19 nt, Homo sapiens
  misc_RNA (1)...(19): siRNA sense strand
ucacuccucugcucucuac

SEQ ID NO: 690937 - RNA, 19 nt, Homo sapiens
  misc_RNA (1)...(19): siRNA sense strand
cccagacccugauaacuuc

SEQ ID NO: 690938 - RNA, 19 nt, Homo sapiens
  misc_RNA (1)...(19): siRNA sense strand
gcucucuacccacucauuu

SEQ ID NO: 690939 - RNA, 19 nt, Homo sapiens
  misc_RNA (1)...(19): siRNA sense strand
acagcuuccuggucaauau

SEQ ID NO: 690940 - RNA, 19 nt, Homo sapiens
  misc_RNA (1)...(19): siRNA sense strand
gccuacgccugcacuuuga

SEQ ID NO: 690941 - RNA, 19 nt, Homo sapiens
  misc_RNA (1)...(19): siRNA sense strand
ccuccgaaguaucgaaaga

SEQ ID NO: 690942 - RNA, 19 nt, Homo sapiens
  misc_RNA (1)...(19): siRNA sense strand
guggaggaccaucggauaa

SEQ ID NO: 690943 - RNA, 19 nt, Homo sapiens
  misc_RNA (1)...(19): siRNA sense strand
ggacaacccacugcuagca

SEQ ID NO: 690944 - RNA, 19 nt, Homo sapiens
  misc_RNA (1)...(19): siRNA sense strand
caagcacgccucuucaaag

SEQ ID NO: 690945 - RNA, 19 nt, Homo sapiens
  misc_RNA (1)...(19): siRNA sense strand
gaguauaagccgcugaaca

SEQ ID NO: 690946 - RNA, 19 nt, Homo sapiens
  misc_RNA (1)...(19): siRNA sense strand
caacacccguccauguacu

SEQ ID NO: 690947 - RNA, 19 nt, Homo sapiens
  misc_RNA (1)...(19): siRNA sense strand
uccgaaguaucgaaagauu

SEQ ID NO: 690948 - RNA, 19 nt, Homo sapiens
  misc_RNA (1)...(19): siRNA sense strand
cccaagcaccuguuuguga

SEQ ID NO: 690949 - RNA, 19 nt, Homo sapiens
  misc_RNA (1)...(19): siRNA sense strand
cagaggccauggagaagca

SEQ ID NO: 690950 - RNA, 19 nt, Homo sapiens
  misc_RNA (1)...(19): siRNA sense strand
agacaggaguccauucacu

SEQ ID NO: 690951 - RNA, 19 nt, Homo sapiens
  misc_RNA (1)...(19): siRNA sense strand
caggagcggucagucauag

SEQ ID NO: 690952 - RNA, 19 nt, Homo sapiens
  misc_RNA (1)...(19): siRNA sense strand
cagagugacccauguaucu

SEQ ID NO: 690953 - RNA, 19 nt, Homo sapiens
  misc_RNA (1)...(19): siRNA sense strand
ccaggagcggucagucaua

SEQ ID NO: 690954 - RNA, 19 nt, Homo sapiens
  misc_RNA (1)...(19): siRNA sense strand
gagggacaacccacugcua

SEQ ID NO: 690955 - RNA, 19 nt, Homo sapiens
  misc_RNA (1)...(19): siRNA sense strand
gagaaauaucuggaagaaa

SEQ ID NO: 690956 - RNA, 19 nt, Homo sapiens
  misc_RNA (1)...(19): siRNA sense strand
ugccagugauagucaauau

SEQ ID NO: 690957 - RNA, 19 nt, Homo sapiens
  misc_RNA (1)...(19): siRNA sense strand
ccucagcccgcaagaagaa

SEQ ID NO: 690958 - RNA, 19 nt, Homo sapiens
  misc_RNA (1)...(19): siRNA sense strand
ggaauaccagagcccauca

SEQ ID NO: 690959 - RNA, 19 nt, Homo sapiens
  misc_RNA (1)...(19): siRNA sense strand
ggagcggucagucauagug

SEQ ID NO: 690960 - RNA, 19 nt, Homo sapiens
  misc_RNA (1)...(19): siRNA sense strand
gggagucgcaauccucaga

SEQ ID NO: 690961 - RNA, 19 nt, Homo sapiens
  misc_RNA (1)...(19): siRNA sense strand
gcuaugauuucuggaucga

SEQ ID NO: 690962 - RNA, 19 nt, Homo sapiens
  misc_RNA (1)...(19): siRNA sense strand
gaggaccaucggauaaaga

SEQ ID NO: 690963 - RNA, 19 nt, Homo sapiens
  misc_RNA (1)...(19): siRNA sense strand
gggagaaauaucuggaaga

SEQ ID NO: 690964 - RNA, 19 nt, Homo sapiens
  misc_RNA (1)...(19): siRNA sense strand
gaggagcagaaggccauua

SEQ ID NO: 690965 - RNA, 19 nt, Homo sapiens
  misc_RNA (1)...(19): siRNA sense strand
ccauggagaagcaagaaga

SEQ ID NO: 690966 - RNA, 19 nt, Homo sapiens
  misc_RNA (1)...(19): siRNA sense strand
caggugagaagaaggaaug

SEQ ID NO: 690967 - RNA, 19 nt, Homo sapiens
  misc_RNA (1)...(19): siRNA sense strand
gagcuccucaaacccauga

SEQ ID NO: 690968 - RNA, 19 nt, Homo sapiens
  misc_RNA (1)...(19): siRNA sense strand
ccucaacacccguccaugu

SEQ ID NO: 690969 - RNA, 19 nt, Homo sapiens
  misc_RNA (1)...(19): siRNA sense strand
aguauaagccgcugaacau

SEQ ID NO: 690970 - RNA, 19 nt, Homo sapiens
  misc_RNA (1)...(19): siRNA sense strand
cccagaauccuccagaaga

SEQ ID NO: 690971 - RNA, 19 nt, Homo sapiens
  misc_RNA (1)...(19): siRNA sense strand
gcucuaccagcgcuucuga

SEQ ID NO: 690972 - RNA, 19 nt, Homo sapiens
  misc_RNA (1)...(19): siRNA sense strand
gaaguuggaaggcauugac

SEQ ID NO: 690973 - RNA, 19 nt, Homo sapiens
  misc_RNA (1)...(19): siRNA sense strand
gcugcagccucccaaaggu

SEQ ID NO: 690974 - RNA, 19 nt, Homo sapiens
  misc_RNA (1)...(19): siRNA sense strand
gaaauaucuggaagaaacu

SEQ ID NO: 690975 - RNA, 19 nt, Homo sapiens
  misc_RNA (1)...(19): siRNA sense strand
gcagucacucacaacaaga

SEQ ID NO: 690976 - RNA, 19 nt, Homo sapiens
  misc_RNA (1)...(19): siRNA sense strand
gcgaguauaagccgcugaa

SEQ ID NO: 690977 - RNA, 19 nt, Homo sapiens
  misc_RNA (1)...(19): siRNA sense strand
ccauguaucugggaagacu

SEQ ID NO: 690978 - RNA, 19 nt, Homo sapiens
  misc_RNA (1)...(19): siRNA sense strand
gaccaagcacgccucuuca

SEQ ID NO: 690979 - RNA, 19 nt, Homo sapiens
  misc_RNA (1)...(19): siRNA sense strand
gugcaccagucccucuuca

SEQ ID NO: 690980 - RNA, 19 nt, Homo sapiens
  misc_RNA (1)...(19): siRNA sense strand
aaccagagccggcugaaag

SEQ ID NO: 690981 - RNA, 19 nt, Homo sapiens
  misc_RNA (1)...(19): siRNA sense strand
uggcuggagucauggcuau

SEQ ID NO: 690982 - RNA, 19 nt, Homo sapiens
  misc_RNA (1)...(19): siRNA sense strand
ggaaggcgugaccgaauac

SEQ ID NO: 690983 - RNA, 19 nt, Homo sapiens
  misc_RNA (1)...(19): siRNA sense strand
cgccaucacggccgaauug

SEQ ID NO: 690984 - RNA, 19 nt, Homo sapiens
  misc_RNA (1)...(19): siRNA sense strand
gcugaaagcggagcugucu

SEQ ID NO: 690985 - RNA, 19 nt, Homo sapiens
  misc_RNA (1)...(19): siRNA sense strand
acccagacccugauaacuu

SEQ ID NO: 690986 - RNA, 19 nt, Homo sapiens
  misc_RNA (1)...(19): siRNA sense strand
uaugacuacuggugugauc

SEQ ID NO: 690987 - RNA, 19 nt, Homo sapiens
  misc_RNA (1)...(19): siRNA sense strand
cucaacacccguccaugua

SEQ ID NO: 690988 - RNA, 19 nt, Homo sapiens
  misc_RNA (1)...(19): siRNA sense strand
guuacaaggaggaggaguu

SEQ ID NO: 690989 - RNA, 19 nt, Homo sapiens
  misc_RNA (1)...(19): siRNA sense strand
cgaugaggucuucggcuuu

SEQ ID NO: 690990 - RNA, 19 nt, Homo sapiens
  misc_RNA (1)...(19): siRNA sense strand
gaccuccaaauacagcuuu

SEQ ID NO: 690991 - RNA, 19 nt, Homo sapiens
  misc_RNA (1)...(19): siRNA sense strand
caggaaggcgugaccgaau

SEQ ID NO: 690992 - RNA, 19 nt, Homo sapiens
  misc_RNA (1)...(19): siRNA sense strand
caacaagaauggcuucaaa

SEQ ID NO: 690993 - RNA, 19 nt, Homo sapiens
  misc_RNA (1)...(19): siRNA sense strand
ggagaaauaucuggaagaa

SEQ ID NO: 690994 - RNA, 19 nt, Homo sapiens
  misc_RNA (1)...(19): siRNA sense strand
caacugggaugauacuuau

SEQ ID NO: 690995 - RNA, 19 nt, Homo sapiens
  misc_RNA (1)...(19): siRNA sense strand
gaucuugguuccucuaaug

SEQ ID NO: 690996 - RNA, 19 nt, Homo sapiens
  misc_RNA (1)...(19): siRNA sense strand
agaaauaucuggaagaaac

SEQ ID NO: 690997 - RNA, 19 nt, Homo sapiens
  misc_RNA (1)...(19): siRNA sense strand
ggaagaagccucgccauca

SEQ ID NO: 690998 - RNA, 19 nt, Homo sapiens
  misc_RNA (1)...(19): siRNA sense strand
acacuaggaccuccaaaua

SEQ ID NO: 690999 - RNA, 19 nt, Homo sapiens
  misc_RNA (1)...(19): siRNA sense strand
gaugaggucuucggcuuug

SEQ ID NO: 691000 - RNA, 19 nt, Homo sapiens
  misc_RNA (1)...(19): siRNA sense strand
gggaugauacuuaugacua

SEQ ID NO: 691001 - RNA, 19 nt, Homo sapiens
  misc_RNA (1)...(19): siRNA sense strand
ggaccaagcacgccucuuc

SEQ ID NO: 691002 - RNA, 19 nt, Homo sapiens
  misc_RNA (1)...(19): siRNA sense strand
gaugauagcaccugucagu

SEQ ID NO: 691003 - RNA, 19 nt, Homo sapiens
  misc_RNA (1)...(19): siRNA sense strand
gaagaagccucgccaucac

SEQ ID NO: 691004 - RNA, 19 nt, Homo sapiens
  misc_RNA (1)...(19): siRNA sense strand
ccagaauccuccagaagau

SEQ ID NO: 691005 - RNA, 19 nt, Homo sapiens
  misc_RNA (1)...(19): siRNA sense strand
ccaaguggaccaucgauga

SEQ ID NO: 691006 - RNA, 19 nt, Homo sapiens
  misc_RNA (1)...(19): siRNA sense strand
gcgcuccaguuccggauaa

SEQ ID NO: 691007 - RNA, 19 nt, Homo sapiens
  misc_RNA (1)...(19): siRNA sense strand
guucacagcucaccauugc

SEQ ID NO: 691008 - RNA, 19 nt, Homo sapiens
  misc_RNA (1)...(19): siRNA sense strand
ggaugauacuuaugacuac

SEQ ID NO: 691009 - RNA, 19 nt, Homo sapiens
  misc_RNA (1)...(19): siRNA sense strand
aggaaggcgugaccgaaua

SEQ ID NO: 691010 - RNA, 19 nt, Homo sapiens
  misc_RNA (1)...(19): siRNA sense strand
gcaccagucccucuucaug

SEQ ID NO: 691011 - RNA, 19 nt, Homo sapiens
  misc_RNA (1)...(19): siRNA sense strand
gaagcaagaagaaggaaag

SEQ ID NO: 691012 - RNA, 19 nt, Homo sapiens
  misc_RNA (1)...(19): siRNA sense strand
caacaggugagaagaagga

SEQ ID NO: 691013 - RNA, 19 nt, Homo sapiens
  misc_RNA (1)...(19): siRNA sense strand
ggagaagcaagaagaagga

SEQ ID NO: 691014 - RNA, 19 nt, Homo sapiens
  misc_RNA (1)...(19): siRNA sense strand
acaacugggaugauacuua

SEQ ID NO: 691015 - RNA, 19 nt, Homo sapiens
  misc_RNA (1)...(19): siRNA sense strand
gcacuuugauggguauucu

SEQ ID NO: 691016 - RNA, 19 nt, Homo sapiens
  misc_RNA (1)...(19): siRNA sense strand
ugaaagcggagcugucuga

SEQ ID NO: 691017 - RNA, 19 nt, Homo sapiens
  misc_RNA (1)...(19): siRNA sense strand
gagcagaaggccauuacug

SEQ ID NO: 691018 - RNA, 19 nt, Homo sapiens
  misc_RNA (1)...(19): siRNA sense strand
ggaggaccaucggauaaag

SEQ ID NO: 691019 - RNA, 19 nt, Homo sapiens
  misc_RNA (1)...(19): siRNA sense strand
ggcagucacucacaacaag

SEQ ID NO: 691020 - RNA, 19 nt, Homo sapiens
  misc_RNA (1)...(19): siRNA sense strand
ccaagcacgccucuucaaa

SEQ ID NO: 691021 - RNA, 19 nt, Homo sapiens
  misc_RNA (1)...(19): siRNA sense strand
ggucagucauaguggagaa

SEQ ID NO: 691022 - RNA, 19 nt, Homo sapiens
  misc_RNA (1)...(19): siRNA sense strand
acuaggaccuccaaauaca

SEQ ID NO: 691023 - RNA, 19 nt, Homo sapiens
  misc_RNA (1)...(19): siRNA sense strand
uuugauggcuggagucaug

SEQ ID NO: 691024 - RNA, 19 nt, Homo sapiens
  misc_RNA (1)...(19): siRNA sense strand
uuugacaacugggaugaua

SEQ ID NO: 691025 - RNA, 19 nt, Homo sapiens
  misc_RNA (1)...(19): siRNA sense strand
ucaaacccaugaagaagag

SEQ ID NO: 691026 - RNA, 19 nt, Homo sapiens
  misc_RNA (1)...(19): siRNA sense strand
caccguggcugagguaugu

SEQ ID NO: 691027 - RNA, 19 nt, Homo sapiens
  misc_RNA (1)...(19): siRNA sense strand
gcaugaacccgucccuugu

SEQ ID NO: 691028 - RNA, 19 nt, Homo sapiens
  misc_RNA (1)...(19): siRNA sense strand
gagaacuccucaggcucua

SEQ ID NO: 691029 - RNA, 19 nt, Homo sapiens
  misc_RNA (1)...(19): siRNA sense strand
caagaauggcuucaaacug

SEQ ID NO: 691030 - RNA, 19 nt, Homo sapiens
  misc_RNA (1)...(19): siRNA sense strand
agaggaagcgcagggaaua

SEQ ID NO: 691031 - RNA, 19 nt, Homo sapiens
  misc_RNA (1)...(19): siRNA sense strand
gaaccagagccggcugaaa

SEQ ID NO: 691032 - RNA, 19 nt, Homo sapiens
  misc_RNA (1)...(19): siRNA sense strand
cccagacccugauaacuuc

SEQ ID NO: 691033 - RNA, 19 nt, Homo sapiens
  misc_RNA (1)...(19): siRNA sense strand
acagcuuccuggucaauau

SEQ ID NO: 691034 - RNA, 19 nt, Homo sapiens
  misc_RNA (1)...(19): siRNA sense strand
gccuacgccugcacuuuga

SEQ ID NO: 691035 - RNA, 19 nt, Homo sapiens
  misc_RNA (1)...(19): siRNA sense strand
ccuccgaaguaucgaaaga

SEQ ID NO: 691036 - RNA, 19 nt, Homo sapiens
  misc_RNA (1)...(19): siRNA sense strand
guggaggaccaucggauaa

SEQ ID NO: 691037 - RNA, 19 nt, Homo sapiens
  misc_RNA (1)...(19): siRNA sense strand
ggacaacccacugcuagca

SEQ ID NO: 691038 - RNA, 19 nt, Homo sapiens
  misc_RNA (1)...(19): siRNA sense strand
caagcacgccucuucaaag

SEQ ID NO: 691039 - RNA, 19 nt, Homo sapiens
  misc_RNA (1)...(19): siRNA sense strand
gaguauaagccgcugaaca

SEQ ID NO: 691040 - RNA, 19 nt, Homo sapiens
  misc_RNA (1)...(19): siRNA sense strand
caacacccguccauguacu

SEQ ID NO: 691041 - RNA, 19 nt, Homo sapiens
  misc_RNA (1)...(19): siRNA sense strand
uccgaaguaucgaaagauu

SEQ ID NO: 691042 - RNA, 19 nt, Homo sapiens
  misc_RNA (1)...(19): siRNA sense strand
cccaagcaccuguuuguga

SEQ ID NO: 691043 - RNA, 19 nt, Homo sapiens
  misc_RNA (1)...(19): siRNA sense strand
ccaggagcggucagucaua

SEQ ID NO: 691044 - RNA, 19 nt, Homo sapiens
  misc_RNA (1)...(19): siRNA sense strand
gagggacaacccacugcua

SEQ ID NO: 691045 - RNA, 19 nt, Homo sapiens
  misc_RNA (1)...(19): siRNA sense strand
cagaggccauggagaagca

SEQ ID NO: 691046 - RNA, 19 nt, Homo sapiens
  misc_RNA (1)...(19): siRNA sense strand
caggagcggucagucauag

SEQ ID NO: 691047 - RNA, 19 nt, Homo sapiens
  misc_RNA (1)...(19): siRNA sense strand
gagaaauaucuggaagaaa

SEQ ID NO: 691048 - RNA, 19 nt, Homo sapiens
  misc_RNA (1)...(19): siRNA sense strand
ccucagcccgcaagaagaa

SEQ ID NO: 691049 - RNA, 19 nt, Homo sapiens
  misc_RNA (1)...(19): siRNA sense strand
ggaauaccagagcccauca

SEQ ID NO: 691050 - RNA, 19 nt, Homo sapiens
  misc_RNA (1)...(19): siRNA sense strand
gggagucgcaauccucaga

SEQ ID NO: 691051 - RNA, 19 nt, Homo sapiens
  misc_RNA (1)...(19): siRNA sense strand
gcuaugauuucuggaucga

SEQ ID NO: 691052 - RNA, 19 nt, Homo sapiens
  misc_RNA (1)...(19): siRNA sense strand
gaggaccaucggauaaaga

SEQ ID NO: 691053 - RNA, 19 nt, Homo sapiens
  misc_RNA (1)...(19): siRNA sense strand
ggagcggucagucauagug

SEQ ID NO: 691054 - RNA, 19 nt, Homo sapiens
  misc_RNA (1)...(19): siRNA sense strand
gggagaaauaucuggaaga

SEQ ID NO: 691055 - RNA, 19 nt, Homo sapiens
  misc_RNA (1)...(19): siRNA sense strand
gaggagcagaaggccauua

SEQ ID NO: 691056 - RNA, 19 nt, Homo sapiens
  misc_RNA (1)...(19): siRNA sense strand
ccauggagaagcaagaaga

SEQ ID NO: 691057 - RNA, 19 nt, Homo sapiens
  misc_RNA (1)...(19): siRNA sense strand
gagcuccucaaacccauga

SEQ ID NO: 691058 - RNA, 19 nt, Homo sapiens
  misc_RNA (1)...(19): siRNA sense strand
ccucaacacccguccaugu

SEQ ID NO: 691059 - RNA, 19 nt, Homo sapiens
  misc_RNA (1)...(19): siRNA sense strand
caggugagaagaaggaaug

SEQ ID NO: 691060 - RNA, 19 nt, Homo sapiens
  misc_RNA (1)...(19): siRNA sense strand
gaaguuggaaggcauugac

SEQ ID NO: 691061 - RNA, 19 nt, Homo sapiens
  misc_RNA (1)...(19): siRNA sense strand
cccagaauccuccagaaga

SEQ ID NO: 691062 - RNA, 19 nt, Homo sapiens
  misc_RNA (1)...(19): siRNA sense strand
aguauaagccgcugaacau

SEQ ID NO: 691063 - RNA, 19 nt, Homo sapiens
  misc_RNA (1)...(19): siRNA sense strand
gcucuaccagcgcuucuga

SEQ ID NO: 691064 - RNA, 19 nt, Homo sapiens
  misc_RNA (1)...(19): siRNA sense strand
gcugcagccucccaaaggu

SEQ ID NO: 691065 - RNA, 19 nt, Homo sapiens
  misc_RNA (1)...(19): siRNA sense strand
gaaauaucuggaagaaacu

SEQ ID NO: 691066 - RNA, 19 nt, Homo sapiens
  misc_RNA (1)...(19): siRNA sense strand
gcgaguauaagccgcugaa

SEQ ID NO: 691067 - RNA, 19 nt, Homo sapiens
  misc_RNA (1)...(19): siRNA sense strand
gaccaagcacgccucuuca

SEQ ID NO: 691068 - RNA, 19 nt, Homo sapiens
  misc_RNA (1)...(19): siRNA sense strand
gugcaccagucccucuuca

SEQ ID NO: 691069 - RNA, 19 nt, Homo sapiens
  misc_RNA (1)...(19): siRNA sense strand
aaccagagccggcugaaag

SEQ ID NO: 691070 - RNA, 19 nt, Homo sapiens
  misc_RNA (1)...(19): siRNA sense strand
gcagucacucacaacaaga

SEQ ID NO: 691071 - RNA, 19 nt, Homo sapiens
  misc_RNA (1)...(19): siRNA sense strand
uggcuggagucauggcuau

SEQ ID NO: 691072 - RNA, 19 nt, Homo sapiens
  misc_RNA (1)...(19): siRNA sense strand
ggaaggcgugaccgaauac

SEQ ID NO: 691073 - RNA, 19 nt, Homo sapiens
  misc_RNA (1)...(19): siRNA sense strand
cgccaucacggccgaauug

SEQ ID NO: 691074 - RNA, 19 nt, Homo sapiens
  misc_RNA (1)...(19): siRNA sense strand
gcugaaagcggagcugucu

SEQ ID NO: 691075 - RNA, 19 nt, Homo sapiens
  misc_RNA (1)...(19): siRNA sense strand
acccagacccugauaacuu

SEQ ID NO: 691076 - RNA, 19 nt, Homo sapiens
  misc_RNA (1)...(19): siRNA sense strand
uaugacuacuggugugauc

SEQ ID NO: 691077 - RNA, 19 nt, Homo sapiens
  misc_RNA (1)...(19): siRNA sense strand
cucaacacccguccaugua

SEQ ID NO: 691078 - RNA, 19 nt, Homo sapiens
  misc_RNA (1)...(19): siRNA sense strand
guuacaaggaggaggaguu

SEQ ID NO: 691079 - RNA, 19 nt, Homo sapiens
  misc_RNA (1)...(19): siRNA sense strand
cgaugaggucuucggcuuu

SEQ ID NO: 691080 - RNA, 19 nt, Homo sapiens
  misc_RNA (1)...(19): siRNA sense strand
caggaaggcgugaccgaau

SEQ ID NO: 691081 - RNA, 19 nt, Homo sapiens
  misc_RNA (1)...(19): siRNA sense strand
gaccuccaaauacagcuuu

SEQ ID NO: 691082 - RNA, 19 nt, Homo sapiens
  misc_RNA (1)...(19): siRNA sense strand
gagaagcaagaagaaggaa

SEQ ID NO: 691083 - RNA, 19 nt, Homo sapiens
  misc_RNA (1)...(19): siRNA sense strand
caaguucacagcucaccau

SEQ ID NO: 691084 - RNA, 19 nt, Homo sapiens
  misc_RNA (1)...(19): siRNA sense strand
gcugagguauguggcuauc

SEQ ID NO: 691085 - RNA, 19 nt, Homo sapiens
  misc_RNA (1)...(19): siRNA sense strand
cgagaagacgggccacaag

SEQ ID NO: 691086 - RNA, 19 nt, Homo sapiens
  misc_RNA (1)...(19): siRNA sense strand
guacgggagucgcaauccu

SEQ ID NO: 691087 - RNA, 19 nt, Homo sapiens
  misc_RNA (1)...(19): siRNA sense strand
aggaguagcgggcaucuca

SEQ ID NO: 691088 - RNA, 19 nt, Homo sapiens
  misc_RNA (1)...(19): siRNA sense strand
uguggaggaccaucggaua

SEQ ID NO: 691089 - RNA, 19 nt, Homo sapiens
  misc_RNA (1)...(19): siRNA sense strand
cauggagaagcaagaagaa

SEQ ID NO: 691090 - RNA, 19 nt, Homo sapiens
  misc_RNA (1)...(19): siRNA sense strand
gaugauacuuaugacuacu

SEQ ID NO: 691091 - RNA, 19 nt, Homo sapiens
  misc_RNA (1)...(19): siRNA sense strand
cuugguuccucuaaugaug

SEQ ID NO: 691092 - RNA, 19 nt, Homo sapiens
  misc_RNA (1)...(19): siRNA sense strand
ccaauuaccuggucauuug

SEQ ID NO: 691093 - RNA, 19 nt, Homo sapiens
  misc_RNA (1)...(19): siRNA sense strand
ggagaaaugugcacucaug

SEQ ID NO: 691094 - RNA, 19 nt, Homo sapiens
  misc_RNA (1)...(19): siRNA sense strand
gcaagagcaugguaaauac

SEQ ID NO: 691095 - RNA, 19 nt, Homo sapiens
  misc_RNA (1)...(19): siRNA sense strand
gcgaggagacagccaauua

SEQ ID NO: 691096 - RNA, 19 nt, Homo sapiens
  misc_RNA (1)...(19): siRNA sense strand
aaagacggcuucagcaaga

SEQ ID NO: 691097 - RNA, 19 nt, Homo sapiens
  misc_RNA (1)...(19): siRNA sense strand
agaaacagaucaagcacuu

SEQ ID NO: 691098 - RNA, 19 nt, Homo sapiens
  misc_RNA (1)...(19): siRNA sense strand
gaggagaaaugugcacuca

SEQ ID NO: 691099 - RNA, 19 nt, Homo sapiens
  misc_RNA (1)...(19): siRNA sense strand
ugaggugucugaugaugaa

SEQ ID NO: 691100 - RNA, 19 nt, Homo sapiens
  misc_RNA (1)...(19): siRNA sense strand
acauugaggugucugauga

SEQ ID NO: 691101 - RNA, 19 nt, Homo sapiens
  misc_RNA (1)...(19): siRNA sense strand
agaaggccaugaaggagua

SEQ ID NO: 691102 - RNA, 19 nt, Homo sapiens
  misc_RNA (1)...(19): siRNA sense strand
gcaaagacggcuucagcaa

SEQ ID NO: 691103 - RNA, 19 nt, Homo sapiens
  misc_RNA (1)...(19): siRNA sense strand
cacaagaccuucguggaaa

SEQ ID NO: 691104 - RNA, 19 nt, Homo sapiens
  misc_RNA (1)...(19): siRNA sense strand
agacaaucgucaugcaauu

SEQ ID NO: 691105 - RNA, 19 nt, Homo sapiens
  misc_RNA (1)...(19): siRNA sense strand
aaacagaucaagcacuuug

SEQ ID NO: 691106 - RNA, 19 nt, Homo sapiens
  misc_RNA (1)...(19): siRNA sense strand
acaaucgucaugcaauuua

SEQ ID NO: 691107 - RNA, 19 nt, Homo sapiens
  misc_RNA (1)...(19): siRNA sense strand
gcaagaaggagaagagcau

SEQ ID NO: 691108 - RNA, 19 nt, Homo sapiens
  misc_RNA (1)...(19): siRNA sense strand
cugaggaacuccagaagug

SEQ ID NO: 691109 - RNA, 19 nt, Homo sapiens
  misc_RNA (1)...(19): siRNA sense strand
acacaagaccuucguggaa

SEQ ID NO: 691110 - RNA, 19 nt, Homo sapiens
  misc_RNA (1)...(19): siRNA sense strand
agaagagcaugcccuggaa

SEQ ID NO: 691111 - RNA, 19 nt, Homo sapiens
  misc_RNA (1)...(19): siRNA sense strand
gacaaucgucaugcaauuu

SEQ ID NO: 691112 - RNA, 19 nt, Homo sapiens
  misc_RNA (1)...(19): siRNA sense strand
uggaggagaugcgcaagaa

SEQ ID NO: 691113 - RNA, 19 nt, Homo sapiens
  misc_RNA (1)...(19): siRNA sense strand
agcaagagcaugguaaaua

SEQ ID NO: 691114 - RNA, 19 nt, Homo sapiens
  misc_RNA (1)...(19): siRNA sense strand
gaaggaugucaguguguga

SEQ ID NO: 691115 - RNA, 19 nt, Homo sapiens
  misc_RNA (1)...(19): siRNA sense strand
ugagggagcagaaacacaa

SEQ ID NO: 691116 - RNA, 19 nt, Homo sapiens
  misc_RNA (1)...(19): siRNA sense strand
gaaacagaucaagcacuuu

SEQ ID NO: 691117 - RNA, 19 nt, Homo sapiens
  misc_RNA (1)...(19): siRNA sense strand
gagcuggccaagagccuaa

SEQ ID NO: 691118 - RNA, 19 nt, Homo sapiens
  misc_RNA (1)...(19): siRNA sense strand
cgacacggccagucucuuc

SEQ ID NO: 691119 - RNA, 19 nt, Homo sapiens
  misc_RNA (1)...(19): siRNA sense strand
caaucgucaugcaauuuau

SEQ ID NO: 691120 - RNA, 19 nt, Homo sapiens
  misc_RNA (1)...(19): siRNA sense strand
uaaauaccaagcccgagaa

SEQ ID NO: 691121 - RNA, 19 nt, Homo sapiens
  misc_RNA (1)...(19): siRNA sense strand
ccaagacgggcgaugagaa

SEQ ID NO: 691122 - RNA, 19 nt, Homo sapiens
  misc_RNA (1)...(19): siRNA sense strand
gccaauuaccuggucauuu

SEQ ID NO: 691123 - RNA, 19 nt, Homo sapiens
  misc_RNA (1)...(19): siRNA sense strand
agcagaagcuggaggagau

SEQ ID NO: 691124 - RNA, 19 nt, Homo sapiens
  misc_RNA (1)...(19): siRNA sense strand
uggacacgcucagcaaaga

SEQ ID NO: 691125 - RNA, 19 nt, Homo sapiens
  misc_RNA (1)...(19): siRNA sense strand
gcaucgagaaggccaugaa

SEQ ID NO: 691126 - RNA, 19 nt, Homo sapiens
  misc_RNA (1)...(19): siRNA sense strand
gacagccgaucgccaguac

SEQ ID NO: 691127 - RNA, 19 nt, Homo sapiens
  misc_RNA (1)...(19): siRNA sense strand
gaagacggaggaggacuca

SEQ ID NO: 691128 - RNA, 19 nt, Homo sapiens
  misc_RNA (1)...(19): siRNA sense strand
gagaaggaugucagugugu

SEQ ID NO: 691129 - RNA, 19 nt, Homo sapiens
  misc_RNA (1)...(19): siRNA sense strand
ugaaggacgugcagaugcu

SEQ ID NO: 691130 - RNA, 19 nt, Homo sapiens
  misc_RNA (1)...(19): siRNA sense strand
guacauggagggcuucaac

SEQ ID NO: 691131 - RNA, 19 nt, Homo sapiens
  misc_RNA (1)...(19): siRNA sense strand
agacggaggaggacucaga

SEQ ID NO: 691132 - RNA, 19 nt, Homo sapiens
  misc_RNA (1)...(19): siRNA sense strand
ucgagaaggccaugaagga

SEQ ID NO: 691133 - RNA, 19 nt, Homo sapiens
  misc_RNA (1)...(19): siRNA sense strand
caagacgggcgaugagaag

SEQ ID NO: 691134 - RNA, 19 nt, Homo sapiens
  misc_RNA (1)...(19): siRNA sense strand
uccggcaguucuucacuaa

SEQ ID NO: 691135 - RNA, 19 nt, Homo sapiens
  misc_RNA (1)...(19): siRNA sense strand
uggaacgcauggagcaguu

SEQ ID NO: 691136 - RNA, 19 nt, Homo sapiens
  misc_RNA (1)...(19): siRNA sense strand
cgacgcaaaguaccacaug

SEQ ID NO: 691137 - RNA, 19 nt, Homo sapiens
  misc_RNA (1)...(19): siRNA sense strand
ggaggaggagcgcaagaag

SEQ ID NO: 691138 - RNA, 19 nt, Homo sapiens
  misc_RNA (1)...(19): siRNA sense strand
gugccaagcugcgcaucga

SEQ ID NO: 691139 - RNA, 19 nt, Homo sapiens
  misc_RNA (1)...(19): siRNA sense strand
ucagcaagagcaugguaaa

SEQ ID NO: 691140 - RNA, 19 nt, Homo sapiens
  misc_RNA (1)...(19): siRNA sense strand
ggaggugagggagcagaaa

SEQ ID NO: 691141 - RNA, 19 nt, Homo sapiens
  misc_RNA (1)...(19): siRNA sense strand
cagacaaucgucaugcaau

SEQ ID NO: 691142 - RNA, 19 nt, Homo sapiens
  misc_RNA (1)...(19): siRNA sense strand
ggaccacauugaggugucu

SEQ ID NO: 691143 - RNA, 19 nt, Homo sapiens
  misc_RNA (1)...(19): siRNA sense strand
gggaugacagccaaaagua

SEQ ID NO: 691144 - RNA, 19 nt, Homo sapiens
  misc_RNA (1)...(19): siRNA sense strand
ccagacaaucgucaugcaa

SEQ ID NO: 691145 - RNA, 19 nt, Homo sapiens
  misc_RNA (1)...(19): siRNA sense strand
gacgggcgaugagaaggau

SEQ ID NO: 691146 - RNA, 19 nt, Homo sapiens
  misc_RNA (1)...(19): siRNA sense strand
ccaagcugcgcaucgagaa

SEQ ID NO: 691147 - RNA, 19 nt, Homo sapiens
  misc_RNA (1)...(19): siRNA sense strand
gaaggagaaggaggaacug

SEQ ID NO: 691148 - RNA, 19 nt, Homo sapiens
  misc_RNA (1)...(19): siRNA sense strand
gaaaaucguugugaaagug

SEQ ID NO: 691149 - RNA, 19 nt, Homo sapiens
  misc_RNA (1)...(19): siRNA sense strand
gcuguaagaccuaaaguuc

SEQ ID NO: 691150 - RNA, 19 nt, Homo sapiens
  misc_RNA (1)...(19): siRNA sense strand
caagaagguugggaaagca

SEQ ID NO: 691151 - RNA, 19 nt, Homo sapiens
  misc_RNA (1)...(19): siRNA sense strand
agaccuaaaguucuuauga

SEQ ID NO: 691152 - RNA, 19 nt, Homo sapiens
  misc_RNA (1)...(19): siRNA sense strand
gcagaaaaucguugugaaa

SEQ ID NO: 691153 - RNA, 19 nt, Homo sapiens
  misc_RNA (1)...(19): siRNA sense strand
cguuugacauaccgacgua

SEQ ID NO: 691154 - RNA, 19 nt, Homo sapiens
  misc_RNA (1)...(19): siRNA sense strand
gugguuccaugugugcuaa

SEQ ID NO: 691155 - RNA, 19 nt, Homo sapiens
  misc_RNA (1)...(19): siRNA sense strand
uuccaugugugcuaaaugu

SEQ ID NO: 691156 - RNA, 19 nt, Homo sapiens
  misc_RNA (1)...(19): siRNA sense strand
ccugguaauagaauuguuu

SEQ ID NO: 691157 - RNA, 19 nt, Homo sapiens
  misc_RNA (1)...(19): siRNA sense strand
acauaccgacguaggcuuu

SEQ ID NO: 691158 - RNA, 19 nt, Homo sapiens
  misc_RNA (1)...(19): siRNA sense strand
gaaaaucguugugaaagug

SEQ ID NO: 691159 - RNA, 19 nt, Homo sapiens
  misc_RNA (1)...(19): siRNA sense strand
gcuguaagaccuaaaguuc

SEQ ID NO: 691160 - RNA, 19 nt, Homo sapiens
  misc_RNA (1)...(19): siRNA sense strand
caagaagguugggaaagca

SEQ ID NO: 691161 - RNA, 19 nt, Homo sapiens
  misc_RNA (1)...(19): siRNA sense strand
agaccuaaaguucuuauga

SEQ ID NO: 691162 - RNA, 19 nt, Homo sapiens
  misc_RNA (1)...(19): siRNA sense strand
gcagaaaaucguugugaaa

SEQ ID NO: 691163 - RNA, 19 nt, Homo sapiens
  misc_RNA (1)...(19): siRNA sense strand
cguuugacauaccgacgua

SEQ ID NO: 691164 - RNA, 19 nt, Homo sapiens
  misc_RNA (1)...(19): siRNA sense strand
gugguuccaugugugcuaa

SEQ ID NO: 691165 - RNA, 19 nt, Homo sapiens
  misc_RNA (1)...(19): siRNA sense strand
uuccaugugugcuaaaugu

SEQ ID NO: 691166 - RNA, 19 nt, Homo sapiens
  misc_RNA (1)...(19): siRNA sense strand
ccugguaauagaauuguuu

SEQ ID NO: 691167 - RNA, 19 nt, Homo sapiens
  misc_RNA (1)...(19): siRNA sense strand
acauaccgacguaggcuuu

SEQ ID NO: 691168 - RNA, 19 nt, Homo sapiens
  misc_RNA (1)...(19): siRNA sense strand
gaaaaucguugugaaagug

SEQ ID NO: 691169 - RNA, 19 nt, Homo sapiens
  misc_RNA (1)...(19): siRNA sense strand
gcuguaagaccuaaaguuc

SEQ ID NO: 691170 - RNA, 19 nt, Homo sapiens
  misc_RNA (1)...(19): siRNA sense strand
caagaagguugggaaagca

SEQ ID NO: 691171 - RNA, 19 nt, Homo sapiens
  misc_RNA (1)...(19): siRNA sense strand
agaccuaaaguucuuauga

SEQ ID NO: 691172 - RNA, 19 nt, Homo sapiens
  misc_RNA (1)...(19): siRNA sense strand
gcagaaaaucguugugaaa

SEQ ID NO: 691173 - RNA, 19 nt, Homo sapiens
  misc_RNA (1)...(19): siRNA sense strand
cguuugacauaccgacgua

SEQ ID NO: 691174 - RNA, 19 nt, Homo sapiens
  misc_RNA (1)...(19): siRNA sense strand
gugguuccaugugugcuaa

SEQ ID NO: 691175 - RNA, 19 nt, Homo sapiens
  misc_RNA (1)...(19): siRNA sense strand
uuccaugugugcuaaaugu

SEQ ID NO: 691176 - RNA, 19 nt, Homo sapiens
  misc_RNA (1)...(19): siRNA sense strand
ccugguaauagaauuguuu

SEQ ID NO: 691177 - RNA, 19 nt, Homo sapiens
  misc_RNA (1)...(19): siRNA sense strand
acauaccgacguaggcuuu

SEQ ID NO: 691178 - RNA, 19 nt, Homo sapiens
  misc_RNA (1)...(19): siRNA sense strand
gaaaaucguugugaaagug

SEQ ID NO: 691179 - RNA, 19 nt, Homo sapiens
  misc_RNA (1)...(19): siRNA sense strand
gcuguaagaccuaaaguuc

SEQ ID NO: 691180 - RNA, 19 nt, Homo sapiens
  misc_RNA (1)...(19): siRNA sense strand
caagaagguugggaaagca

SEQ ID NO: 691181 - RNA, 19 nt, Homo sapiens
  misc_RNA (1)...(19): siRNA sense strand
agaccuaaaguucuuauga

SEQ ID NO: 691182 - RNA, 19 nt, Homo sapiens
  misc_RNA (1)...(19): siRNA sense strand
gcagaaaaucguugugaaa

SEQ ID NO: 691183 - RNA, 19 nt, Homo sapiens
  misc_RNA (1)...(19): siRNA sense strand
cguuugacauaccgacgua

SEQ ID NO: 691184 - RNA, 19 nt, Homo sapiens
  misc_RNA (1)...(19): siRNA sense strand
gugguuccaugugugcuaa

SEQ ID NO: 691185 - RNA, 19 nt, Homo sapiens
  misc_RNA (1)...(19): siRNA sense strand
uuccaugugugcuaaaugu

SEQ ID NO: 691186 - RNA, 19 nt, Homo sapiens
  misc_RNA (1)...(19): siRNA sense strand
ccugguaauagaauuguuu

SEQ ID NO: 691187 - RNA, 19 nt, Homo sapiens
  misc_RNA (1)...(19): siRNA sense strand
acauaccgacguaggcuuu

SEQ ID NO: 691188 - RNA, 19 nt, Homo sapiens
  misc_RNA (1)...(19): siRNA sense strand
ggaaaccgauguggaagac

SEQ ID NO: 691189 - RNA, 19 nt, Homo sapiens
  misc_RNA (1)...(19): siRNA sense strand
uccgagggcuuccugaugu

SEQ ID NO: 691190 - RNA, 19 nt, Homo sapiens
  misc_RNA (1)...(19): siRNA sense strand
ugaagaggcagcccuggau

SEQ ID NO: 691191 - RNA, 19 nt, Homo sapiens
  misc_RNA (1)...(19): siRNA sense strand
ggaaaccgauguggaagac

SEQ ID NO: 691192 - RNA, 19 nt, Homo sapiens
  misc_RNA (1)...(19): siRNA sense strand
uccgagggcuuccugaugu

SEQ ID NO: 691193 - RNA, 19 nt, Homo sapiens
  misc_RNA (1)...(19): siRNA sense strand
ugaagaggcagcccuggau

SEQ ID NO: 691194 - RNA, 19 nt, Homo sapiens
  misc_RNA (1)...(19): siRNA sense strand
ggaaaccgauguggaagac

SEQ ID NO: 691195 - RNA, 19 nt, Homo sapiens
  misc_RNA (1)...(19): siRNA sense strand
uccgagggcuuccugaugu

SEQ ID NO: 691196 - RNA, 19 nt, Homo sapiens
  misc_RNA (1)...(19): siRNA sense strand
ugaagaggcagcccuggau

SEQ ID NO: 691197 - RNA, 19 nt, Homo sapiens
  misc_RNA (1)...(19): siRNA sense strand
ggaaaccgauguggaagac

SEQ ID NO: 691198 - RNA, 19 nt, Homo sapiens
  misc_RNA (1)...(19): siRNA sense strand
uccgagggcuuccugaugu

SEQ ID NO: 691199 - RNA, 19 nt, Homo sapiens
  misc_RNA (1)...(19): siRNA sense strand
ugaagaggcagcccuggau

SEQ ID NO: 691200 - RNA, 19 nt, Homo sapiens
  misc_RNA (1)...(19): siRNA sense strand
ggaaaccgauguggaagac

SEQ ID NO: 691201 - RNA, 19 nt, Homo sapiens
  misc_RNA (1)...(19): siRNA sense strand
uccgagggcuuccugaugu

SEQ ID NO: 691202 - RNA, 19 nt, Homo sapiens
  misc_RNA (1)...(19): siRNA sense strand
ugaagaggcagcccuggau

SEQ ID NO: 691203 - RNA, 19 nt, Homo sapiens
  misc_RNA (1)...(19): siRNA sense strand
ggaaaccgauguggaagac

SEQ ID NO: 691204 - RNA, 19 nt, Homo sapiens
  misc_RNA (1)...(19): siRNA sense strand
uccgagggcuuccugaugu

SEQ ID NO: 691205 - RNA, 19 nt, Homo sapiens
  misc_RNA (1)...(19): siRNA sense strand
ugaagaggcagcccuggau

SEQ ID NO: 691206 - RNA, 19 nt, Homo sapiens
  misc_RNA (1)...(19): siRNA sense strand
uggagaugcuggugcaaga

SEQ ID NO: 691207 - RNA, 19 nt, Homo sapiens
  misc_RNA (1)...(19): siRNA sense strand
gcaguuccgcuaccaggau

SEQ ID NO: 691208 - RNA, 19 nt, Homo sapiens
  misc_RNA (1)...(19): siRNA sense strand
ggccugacauccgcaccaa

SEQ ID NO: 691209 - RNA, 19 nt, Homo sapiens
  misc_RNA (1)...(19): siRNA sense strand
gcaccaaggagcagaucgu

SEQ ID NO: 691210 - RNA, 19 nt, Homo sapiens
  misc_RNA (1)...(19): siRNA sense strand
aggagcagaucguggagau

SEQ ID NO: 691211 - RNA, 19 nt, Homo sapiens
  misc_RNA (1)...(19): siRNA sense strand
uggagaugcuggugcaaga

SEQ ID NO: 691212 - RNA, 19 nt, Homo sapiens
  misc_RNA (1)...(19): siRNA sense strand
gcaguuccgcuaccaggau

SEQ ID NO: 691213 - RNA, 19 nt, Homo sapiens
  misc_RNA (1)...(19): siRNA sense strand
ggccugacauccgcaccaa

SEQ ID NO: 691214 - RNA, 19 nt, Homo sapiens
  misc_RNA (1)...(19): siRNA sense strand
gcaccaaggagcagaucgu

SEQ ID NO: 691215 - RNA, 19 nt, Homo sapiens
  misc_RNA (1)...(19): siRNA sense strand
aggagcagaucguggagau

SEQ ID NO: 691216 - RNA, 19 nt, Homo sapiens
  misc_RNA (1)...(19): siRNA sense strand
gaacacagcugucccagau

SEQ ID NO: 691217 - RNA, 19 nt, Homo sapiens
  misc_RNA (1)...(19): siRNA sense strand
gagcagagauguccacuga

SEQ ID NO: 691218 - RNA, 19 nt, Homo sapiens
  misc_RNA (1)...(19): siRNA sense strand
ggacgaagauugguauuug

SEQ ID NO: 691219 - RNA, 19 nt, Homo sapiens
  misc_RNA (1)...(19): siRNA sense strand
ggaaauaucuuagcuacug

SEQ ID NO: 691220 - RNA, 19 nt, Homo sapiens
  misc_RNA (1)...(19): siRNA sense strand
acaaucagcugacaauuaa

SEQ ID NO: 691221 - RNA, 19 nt, Homo sapiens
  misc_RNA (1)...(19): siRNA sense strand
caggagagcuauugaaauu

SEQ ID NO: 691222 - RNA, 19 nt, Homo sapiens
  misc_RNA (1)...(19): siRNA sense strand
ggaaggacaugaugaggaa

SEQ ID NO: 691223 - RNA, 19 nt, Homo sapiens
  misc_RNA (1)...(19): siRNA sense strand
gaacaugcucugaaagaua

SEQ ID NO: 691224 - RNA, 19 nt, Homo sapiens
  misc_RNA (1)...(19): siRNA sense strand
ggacaaugcugcaguucaa

SEQ ID NO: 691225 - RNA, 19 nt, Homo sapiens
  misc_RNA (1)...(19): siRNA sense strand
caagagaucacaacaaauu

SEQ ID NO: 691226 - RNA, 19 nt, Homo sapiens
  misc_RNA (1)...(19): siRNA sense strand
gacaaucagcugacaauua

SEQ ID NO: 691227 - RNA, 19 nt, Homo sapiens
  misc_RNA (1)...(19): siRNA sense strand
caaagucucugcuguuuca

SEQ ID NO: 691228 - RNA, 19 nt, Homo sapiens
  misc_RNA (1)...(19): siRNA sense strand
ggagagcuauugaaauugu

SEQ ID NO: 691229 - RNA, 19 nt, Homo sapiens
  misc_RNA (1)...(19): siRNA sense strand
gucaagagaucacaacaaa

SEQ ID NO: 691230 - RNA, 19 nt, Homo sapiens
  misc_RNA (1)...(19): siRNA sense strand
uaucuuagcuacuggauug

SEQ ID NO: 691231 - RNA, 19 nt, Homo sapiens
  misc_RNA (1)...(19): siRNA sense strand
gcuaagcaauucucacuug

SEQ ID NO: 691232 - RNA, 19 nt, Homo sapiens
  misc_RNA (1)...(19): siRNA sense strand
gaagauugguauuugacaa

SEQ ID NO: 691233 - RNA, 19 nt, Homo sapiens
  misc_RNA (1)...(19): siRNA sense strand
ggaaacgucugggcgauga

SEQ ID NO: 691234 - RNA, 19 nt, Homo sapiens
  misc_RNA (1)...(19): siRNA sense strand
gcagagauguccacugaag

SEQ ID NO: 691235 - RNA, 19 nt, Homo sapiens
  misc_RNA (1)...(19): siRNA sense strand
aagcaaagcugguccugaa

SEQ ID NO: 691236 - RNA, 19 nt, Homo sapiens
  misc_RNA (1)...(19): siRNA sense strand
aaagagaacuagccaaagu

SEQ ID NO: 691237 - RNA, 19 nt, Homo sapiens
  misc_RNA (1)...(19): siRNA sense strand
gaucuugguuugcucuuug

SEQ ID NO: 691238 - RNA, 19 nt, Homo sapiens
  misc_RNA (1)...(19): siRNA sense strand
gagaucagguucuggacaa

SEQ ID NO: 691239 - RNA, 19 nt, Homo sapiens
  misc_RNA (1)...(19): siRNA sense strand
gauguccacugaagaaaga

SEQ ID NO: 691240 - RNA, 19 nt, Homo sapiens
  misc_RNA (1)...(19): siRNA sense strand
gcuggaagccuuuaccuuu

SEQ ID NO: 691241 - RNA, 19 nt, Homo sapiens
  misc_RNA (1)...(19): siRNA sense strand
gaauguaaaucaccuucug

SEQ ID NO: 691242 - RNA, 19 nt, Homo sapiens
  misc_RNA (1)...(19): siRNA sense strand
aaacuaucaugcugaauug

SEQ ID NO: 691243 - RNA, 19 nt, Homo sapiens
  misc_RNA (1)...(19): siRNA sense strand
ucaaaccacugucugaaug

SEQ ID NO: 691244 - RNA, 19 nt, Homo sapiens
  misc_RNA (1)...(19): siRNA sense strand
gcaaaggccaggauguauu

SEQ ID NO: 691245 - RNA, 19 nt, Homo sapiens
  misc_RNA (1)...(19): siRNA sense strand
gaagcugucucgggcauug

SEQ ID NO: 691246 - RNA, 19 nt, Homo sapiens
  misc_RNA (1)...(19): siRNA sense strand
aauagaacaugcucugaaa

SEQ ID NO: 691247 - RNA, 19 nt, Homo sapiens
  misc_RNA (1)...(19): siRNA sense strand
aacaugcucugaaagauaa

SEQ ID NO: 691248 - RNA, 19 nt, Homo sapiens
  misc_RNA (1)...(19): siRNA sense strand
gacgaagauugguauuuga

SEQ ID NO: 691249 - RNA, 19 nt, Homo sapiens
  misc_RNA (1)...(19): siRNA sense strand
caagaaggagcacaagauu

SEQ ID NO: 691250 - RNA, 19 nt, Homo sapiens
  misc_RNA (1)...(19): siRNA sense strand
ucacauaucccaagucauc

SEQ ID NO: 691251 - RNA, 19 nt, Homo sapiens
  misc_RNA (1)...(19): siRNA sense strand
uauaugaagccuacaguaa

SEQ ID NO: 691252 - RNA, 19 nt, Homo sapiens
  misc_RNA (1)...(19): siRNA sense strand
acaauuaagucuccuagca

SEQ ID NO: 691253 - RNA, 19 nt, Homo sapiens
  misc_RNA (1)...(19): siRNA sense strand
ugcaagaccucaagaagga

SEQ ID NO: 691254 - RNA, 19 nt, Homo sapiens
  misc_RNA (1)...(19): siRNA sense strand
caaacuagaaccaacaaau

SEQ ID NO: 691255 - RNA, 19 nt, Homo sapiens
  misc_RNA (1)...(19): siRNA sense strand
gaaauagaacaugcucuga

SEQ ID NO: 691256 - RNA, 19 nt, Homo sapiens
  misc_RNA (1)...(19): siRNA sense strand
ucaauucugugcccgcaaa

SEQ ID NO: 691257 - RNA, 19 nt, Homo sapiens
  misc_RNA (1)...(19): siRNA sense strand
ggccauggcuaagcaauuc

SEQ ID NO: 691258 - RNA, 19 nt, Homo sapiens
  misc_RNA (1)...(19): siRNA sense strand
gaauggccauggcuaagca

SEQ ID NO: 691259 - RNA, 19 nt, Homo sapiens
  misc_RNA (1)...(19): siRNA sense strand
caaaggccaggauguauug

SEQ ID NO: 691260 - RNA, 19 nt, Homo sapiens
  misc_RNA (1)...(19): siRNA sense strand
gagagcuauugaaauugua

SEQ ID NO: 691261 - RNA, 19 nt, Homo sapiens
  misc_RNA (1)...(19): siRNA sense strand
gaugacaaccuaugcaaca

SEQ ID NO: 691262 - RNA, 19 nt, Homo sapiens
  misc_RNA (1)...(19): siRNA sense strand
gaaauuguagagucagaug

SEQ ID NO: 691263 - RNA, 19 nt, Homo sapiens
  misc_RNA (1)...(19): siRNA sense strand
gcuaauacccuggaucuca

SEQ ID NO: 691264 - RNA, 19 nt, Homo sapiens
  misc_RNA (1)...(19): siRNA sense strand
caaagcaaggcaagaaaga

SEQ ID NO: 691265 - RNA, 19 nt, Homo sapiens
  misc_RNA (1)...(19): siRNA sense strand
aaacuagaaccaacaaaug

SEQ ID NO: 691266 - RNA, 19 nt, Homo sapiens
  misc_RNA (1)...(19): siRNA sense strand
uuaaucagguaucuagaga

SEQ ID NO: 691267 - RNA, 19 nt, Homo sapiens
  misc_RNA (1)...(19): siRNA sense strand
cagcaaaggccaggaugua

SEQ ID NO: 691268 - RNA, 19 nt, Homo sapiens
  misc_RNA (1)...(19): siRNA sense strand
ggacugcccaggcuguauu

SEQ ID NO: 691269 - RNA, 19 nt, Homo sapiens
  misc_RNA (1)...(19): siRNA sense strand
acaaauguccaaaccguaa

SEQ ID NO: 691270 - RNA, 19 nt, Homo sapiens
  misc_RNA (1)...(19): siRNA sense strand
cgcaaagucucugcuguuu

SEQ ID NO: 691271 - RNA, 19 nt, Homo sapiens
  misc_RNA (1)...(19): siRNA sense strand
cagcagaagaucuugguuu

SEQ ID NO: 691272 - RNA, 19 nt, Homo sapiens
  misc_RNA (1)...(19): siRNA sense strand
aaacuccagugaugccaaa

SEQ ID NO: 691273 - RNA, 19 nt, Homo sapiens
  misc_RNA (1)...(19): siRNA sense strand
aauuaagucuccuagcaaa

SEQ ID NO: 691274 - RNA, 19 nt, Homo sapiens
  misc_RNA (1)...(19): siRNA sense strand
gaagagaaagaaauagaac

SEQ ID NO: 691275 - RNA, 19 nt, Homo sapiens
  misc_RNA (1)...(19): siRNA sense strand
ccauuuaccuccuuguucu

SEQ ID NO: 691276 - RNA, 19 nt, Homo sapiens
  misc_RNA (1)...(19): siRNA sense strand
gauuaaagagaaacaagga

SEQ ID NO: 691277 - RNA, 19 nt, Homo sapiens
  misc_RNA (1)...(19): siRNA sense strand
ccaagaaggagcacaagau

SEQ ID NO: 691278 - RNA, 19 nt, Homo sapiens
  misc_RNA (1)...(19): siRNA sense strand
gguaacaggaugaccuuga

SEQ ID NO: 691279 - RNA, 19 nt, Homo sapiens
  misc_RNA (1)...(19): siRNA sense strand
aaaccacugucugaaugua

SEQ ID NO: 691280 - RNA, 19 nt, Homo sapiens
  misc_RNA (1)...(19): siRNA sense strand
gcaggagagcuauugaaau

SEQ ID NO: 691281 - RNA, 19 nt, Homo sapiens
  misc_RNA (1)...(19): siRNA sense strand
gcacaggcuacaaucaguu

SEQ ID NO: 691282 - RNA, 19 nt, Homo sapiens
  misc_RNA (1)...(19): siRNA sense strand
uaugaagccuacaguaaag

SEQ ID NO: 691283 - RNA, 19 nt, Homo sapiens
  misc_RNA (1)...(19): siRNA sense strand
gcucuuugaugcucuugau

SEQ ID NO: 691284 - RNA, 19 nt, Homo sapiens
  misc_RNA (1)...(19): siRNA sense strand
guaacaggaugaccuugag

SEQ ID NO: 691285 - RNA, 19 nt, Homo sapiens
  misc_RNA (1)...(19): siRNA sense strand
agccacagcuguugaacuu

SEQ ID NO: 691286 - RNA, 19 nt, Homo sapiens
  misc_RNA (1)...(19): siRNA sense strand
gcaaagcugguccugaaca

SEQ ID NO: 691287 - RNA, 19 nt, Homo sapiens
  misc_RNA (1)...(19): siRNA sense strand
uagaacaugcucugaaaga

SEQ ID NO: 691288 - RNA, 19 nt, Homo sapiens
  misc_RNA (1)...(19): siRNA sense strand
gggcauugaacaaagcuaa

SEQ ID NO: 691289 - RNA, 19 nt, Homo sapiens
  misc_RNA (1)...(19): siRNA sense strand
aaagggagauggaugucau

SEQ ID NO: 691290 - RNA, 19 nt, Homo sapiens
  misc_RNA (1)...(19): siRNA sense strand
caaaagagaacuagccaaa

SEQ ID NO: 691291 - RNA, 19 nt, Homo sapiens
  misc_RNA (1)...(19): siRNA sense strand
uaagccggauucugcaaga

SEQ ID NO: 691292 - RNA, 19 nt, Homo sapiens
  misc_RNA (1)...(19): siRNA sense strand
cagaagaucuugguuugcu

SEQ ID NO: 691293 - RNA, 19 nt, Homo sapiens
  misc_RNA (1)...(19): siRNA sense strand
caauuaagucuccuagcaa

SEQ ID NO: 691294 - RNA, 19 nt, Homo sapiens
  misc_RNA (1)...(19): siRNA sense strand
aaauagaacaugcucugaa

SEQ ID NO: 691295 - RNA, 19 nt, Homo sapiens
  misc_RNA (1)...(19): siRNA sense strand
agcagaagaucuugguuug

SEQ ID NO: 691296 - RNA, 19 nt, Homo sapiens
  misc_RNA (1)...(19): siRNA sense strand
aagccagacuauucucaaa

SEQ ID NO: 691297 - RNA, 19 nt, Homo sapiens
  misc_RNA (1)...(19): siRNA sense strand
gauguuugcaggagagcua

SEQ ID NO: 691298 - RNA, 19 nt, Homo sapiens
  misc_RNA (1)...(19): siRNA sense strand
uguacacgcuauuugaaug

SEQ ID NO: 691299 - RNA, 19 nt, Homo sapiens
  misc_RNA (1)...(19): siRNA sense strand
acauaugacugcagagaag

SEQ ID NO: 691300 - RNA, 19 nt, Homo sapiens
  misc_RNA (1)...(19): siRNA sense strand
gggaaagggagauggaugu

SEQ ID NO: 691301 - RNA, 19 nt, Homo sapiens
  misc_RNA (1)...(19): siRNA sense strand
gagaaagaaauagaacaug

SEQ ID NO: 691302 - RNA, 19 nt, Homo sapiens
  misc_RNA (1)...(19): siRNA sense strand
uggaucaacuggacagcaa

SEQ ID NO: 691303 - RNA, 19 nt, Homo sapiens
  misc_RNA (1)...(19): siRNA sense strand
ucaggagauuugucaggaa

SEQ ID NO: 691304 - RNA, 19 nt, Homo sapiens
  misc_RNA (1)...(19): siRNA sense strand
gaaagggagauggauguca

SEQ ID NO: 691305 - RNA, 19 nt, Homo sapiens
  misc_RNA (1)...(19): siRNA sense strand
uaagggacgaagauuggua

SEQ ID NO: 691306 - RNA, 19 nt, Homo sapiens
  misc_RNA (1)...(19): siRNA sense strand
gaaagaaauagaacaugcu

SEQ ID NO: 691307 - RNA, 19 nt, Homo sapiens
  misc_RNA (1)...(19): siRNA sense strand
caagauugaagagaaagaa

SEQ ID NO: 691308 - RNA, 19 nt, Homo sapiens
  misc_RNA (1)...(19): siRNA sense strand
uguugaacuucccaccuua

SEQ ID NO: 691309 - RNA, 19 nt, Homo sapiens
  misc_RNA (1)...(19): siRNA sense strand
gcugauugguauugcuaau

SEQ ID NO: 691310 - RNA, 19 nt, Homo sapiens
  misc_RNA (1)...(19): siRNA sense strand
ggacagcaaaggccaggau

SEQ ID NO: 691311 - RNA, 19 nt, Homo sapiens
  misc_RNA (1)...(19): siRNA sense strand
ggacaugaugaggaaauug

SEQ ID NO: 691312 - RNA, 19 nt, Homo sapiens
  misc_RNA (1)...(19): siRNA sense strand
ggagauuugucaggaagag

SEQ ID NO: 691313 - RNA, 19 nt, Homo sapiens
  misc_RNA (1)...(19): siRNA sense strand
ugaauugcauguccuugag

SEQ ID NO: 691314 - RNA, 19 nt, Homo sapiens
  misc_RNA (1)...(19): siRNA sense strand
agagauguccacugaagaa

SEQ ID NO: 691315 - RNA, 19 nt, Homo sapiens
  misc_RNA (1)...(19): siRNA sense strand
auaugaagccuacaguaaa

SEQ ID NO: 691316 - RNA, 19 nt, Homo sapiens
  misc_RNA (1)...(19): siRNA sense strand
caacaacgacgccgaauua

SEQ ID NO: 691317 - RNA, 19 nt, Homo sapiens
  misc_RNA (1)...(19): siRNA sense strand
gaauggaacucaaagacaa

SEQ ID NO: 691318 - RNA, 19 nt, Homo sapiens
  misc_RNA (1)...(19): siRNA sense strand
gaaauugcuugcuuuagau

SEQ ID NO: 691319 - RNA, 19 nt, Homo sapiens
  misc_RNA (1)...(19): siRNA sense strand
gaacucaaaucuccuaagg

SEQ ID NO: 691320 - RNA, 19 nt, Homo sapiens
  misc_RNA (1)...(19): siRNA sense strand
gaucagagccucaaacaca

SEQ ID NO: 691321 - RNA, 19 nt, Homo sapiens
  misc_RNA (1)...(19): siRNA sense strand
gugaguggaucucuugaua

SEQ ID NO: 691322 - RNA, 19 nt, Homo sapiens
  misc_RNA (1)...(19): siRNA sense strand
ggaguauggucaucacaaa

SEQ ID NO: 691323 - RNA, 19 nt, Homo sapiens
  misc_RNA (1)...(19): siRNA sense strand
gaaaacgggugaauuuauu

SEQ ID NO: 691324 - RNA, 19 nt, Homo sapiens
  misc_RNA (1)...(19): siRNA sense strand
gaucacaugcuuacaguuu

SEQ ID NO: 691325 - RNA, 19 nt, Homo sapiens
  misc_RNA (1)...(19): siRNA sense strand
agaaauugcuugcuuuaga

SEQ ID NO: 691326 - RNA, 19 nt, Homo sapiens
  misc_RNA (1)...(19): siRNA sense strand
ggaaagaaaccaugcaaag

SEQ ID NO: 691327 - RNA, 19 nt, Homo sapiens
  misc_RNA (1)...(19): siRNA sense strand
gagacaacaucaucauuag

SEQ ID NO: 691328 - RNA, 19 nt, Homo sapiens
  misc_RNA (1)...(19): siRNA sense strand
caacgagacuucauuucau

SEQ ID NO: 691329 - RNA, 19 nt, Homo sapiens
  misc_RNA (1)...(19): siRNA sense strand
ccagagaaauugcuugcuu

SEQ ID NO: 691330 - RNA, 19 nt, Homo sapiens
  misc_RNA (1)...(19): siRNA sense strand
gcacagaauugauacuaac

SEQ ID NO: 691331 - RNA, 19 nt, Homo sapiens
  misc_RNA (1)...(19): siRNA sense strand
caugcaaagucucagaaua

SEQ ID NO: 691332 - RNA, 19 nt, Homo sapiens
  misc_RNA (1)...(19): siRNA sense strand
cagagaaauugcuugcuuu

SEQ ID NO: 691333 - RNA, 19 nt, Homo sapiens
  misc_RNA (1)...(19): siRNA sense strand
gaaagaaaccaugcaaagu

SEQ ID NO: 691334 - RNA, 19 nt, Homo sapiens
  misc_RNA (1)...(19): siRNA sense strand
agagacaacaucaucauua

SEQ ID NO: 691335 - RNA, 19 nt, Homo sapiens
  misc_RNA (1)...(19): siRNA sense strand
cuacaggccuccaggaaug

SEQ ID NO: 691336 - RNA, 19 nt, Homo sapiens
  misc_RNA (1)...(19): siRNA sense strand
gaguggaucucuugauaca

SEQ ID NO: 691337 - RNA, 19 nt, Homo sapiens
  misc_RNA (1)...(19): siRNA sense strand
gagaauguauacacaccuu

SEQ ID NO: 691338 - RNA, 19 nt, Homo sapiens
  misc_RNA (1)...(19): siRNA sense strand
aaacauaugaugcaaguga

SEQ ID NO: 691339 - RNA, 19 nt, Homo sapiens
  misc_RNA (1)...(19): siRNA sense strand
ggaguggaccagagaaauu

SEQ ID NO: 691340 - RNA, 19 nt, Homo sapiens
  misc_RNA (1)...(19): siRNA sense strand
gaacucaaagacaauauuc

SEQ ID NO: 691341 - RNA, 19 nt, Homo sapiens
  misc_RNA (1)...(19): siRNA sense strand
guuaacaaguggaauggaa

SEQ ID NO: 691342 - RNA, 19 nt, Homo sapiens
  misc_RNA (1)...(19): siRNA sense strand
guucugagguccgcucuuu

SEQ ID NO: 691343 - RNA, 19 nt, Homo sapiens
  misc_RNA (1)...(19): siRNA sense strand
agacagcacagaauugaua

SEQ ID NO: 691344 - RNA, 19 nt, Homo sapiens
  misc_RNA (1)...(19): siRNA sense strand
guaauuaccagcucagaug

SEQ ID NO: 691345 - RNA, 19 nt, Homo sapiens
  misc_RNA (1)...(19): siRNA sense strand
ggaguuguguggcggauca

SEQ ID NO: 691346 - RNA, 19 nt, Homo sapiens
  misc_RNA (1)...(19): siRNA sense strand
ggccaguguuuacauguuu

SEQ ID NO: 691347 - RNA, 19 nt, Homo sapiens
  misc_RNA (1)...(19): siRNA sense strand
caacgacgccgaauuacau

SEQ ID NO: 691348 - RNA, 19 nt, Homo sapiens
  misc_RNA (1)...(19): siRNA sense strand
uaacagggcaccagucguu

SEQ ID NO: 691349 - RNA, 19 nt, Homo sapiens
  misc_RNA (1)...(19): siRNA sense strand
gaacauuagugggacauac

SEQ ID NO: 691350 - RNA, 19 nt, Homo sapiens
  misc_RNA (1)...(19): siRNA sense strand
cagcaacaccaacaacuuu

SEQ ID NO: 691351 - RNA, 19 nt, Homo sapiens
  misc_RNA (1)...(19): siRNA sense strand
gcaguccgcuguguucaau

SEQ ID NO: 691352 - RNA, 19 nt, Homo sapiens
  misc_RNA (1)...(19): siRNA sense strand
ugcaaagucucagaauaua

SEQ ID NO: 691353 - RNA, 19 nt, Homo sapiens
  misc_RNA (1)...(19): siRNA sense strand
caaaugagagacaacauca

SEQ ID NO: 691354 - RNA, 19 nt, Homo sapiens
  misc_RNA (1)...(19): siRNA sense strand
uuucauugcucccuaaaga

SEQ ID NO: 691355 - RNA, 19 nt, Homo sapiens
  misc_RNA (1)...(19): siRNA sense strand
guggaucucuugauacauc

SEQ ID NO: 691356 - RNA, 19 nt, Homo sapiens
  misc_RNA (1)...(19): siRNA sense strand
agagagaaaugcaaagaag

SEQ ID NO: 691357 - RNA, 19 nt, Homo sapiens
  misc_RNA (1)...(19): siRNA sense strand
ggagagagaaaugcaaaga

SEQ ID NO: 691358 - RNA, 19 nt, Homo sapiens
  misc_RNA (1)...(19): siRNA sense strand
guuuacaguucaacaagaa

SEQ ID NO: 691359 - RNA, 19 nt, Homo sapiens
  misc_RNA (1)...(19): siRNA sense strand
agagugcugugaccuguuu

SEQ ID NO: 691360 - RNA, 19 nt, Homo sapiens
  misc_RNA (1)...(19): siRNA sense strand
acaggacaguguuuacaaa

SEQ ID NO: 691361 - RNA, 19 nt, Homo sapiens
  misc_RNA (1)...(19): siRNA sense strand
gggcaccagucguuaacaa

SEQ ID NO: 691362 - RNA, 19 nt, Homo sapiens
  misc_RNA (1)...(19): siRNA sense strand
gacaacaucaucauuagug

SEQ ID NO: 691363 - RNA, 19 nt, Homo sapiens
  misc_RNA (1)...(19): siRNA sense strand
gaauguauacacaccuuau

SEQ ID NO: 691364 - RNA, 19 nt, Homo sapiens
  misc_RNA (1)...(19): siRNA sense strand
ggaacucaaagacaauauu

SEQ ID NO: 691365 - RNA, 19 nt, Homo sapiens
  misc_RNA (1)...(19): siRNA sense strand
ggaauggaacucaaagaca

SEQ ID NO: 691366 - RNA, 19 nt, Homo sapiens
  misc_RNA (1)...(19): siRNA sense strand
caaagucucagaauauaca

SEQ ID NO: 691367 - RNA, 19 nt, Homo sapiens
  misc_RNA (1)...(19): siRNA sense strand
acaagcagcucagacaugu

SEQ ID NO: 691368 - RNA, 19 nt, Homo sapiens
  misc_RNA (1)...(19): siRNA sense strand
gaaugggacugaagaaacc

SEQ ID NO: 691369 - RNA, 19 nt, Homo sapiens
  misc_RNA (1)...(19): siRNA sense strand
caaguggaauggaacucaa

SEQ ID NO: 691370 - RNA, 19 nt, Homo sapiens
  misc_RNA (1)...(19): siRNA sense strand
caucagacagcacagaauu

SEQ ID NO: 691371 - RNA, 19 nt, Homo sapiens
  misc_RNA (1)...(19): siRNA sense strand
gagagagaaaugcaaagaa

SEQ ID NO: 691372 - RNA, 19 nt, Homo sapiens
  misc_RNA (1)...(19): siRNA sense strand
gcaacaacgacgccgaauu

SEQ ID NO: 691373 - RNA, 19 nt, Homo sapiens
  misc_RNA (1)...(19): siRNA sense strand
aaaccugucuacacacguu

SEQ ID NO: 691374 - RNA, 19 nt, Homo sapiens
  misc_RNA (1)...(19): siRNA sense strand
gaaaagugcauacaucaga

SEQ ID NO: 691375 - RNA, 19 nt, Homo sapiens
  misc_RNA (1)...(19): siRNA sense strand
ggaaugggacugaagaaac

SEQ ID NO: 691376 - RNA, 19 nt, Homo sapiens
  misc_RNA (1)...(19): siRNA sense strand
gaaaccuagucacauugga

SEQ ID NO: 691377 - RNA, 19 nt, Homo sapiens
  misc_RNA (1)...(19): siRNA sense strand
gagagacaacaucaucauu

SEQ ID NO: 691378 - RNA, 19 nt, Homo sapiens
  misc_RNA (1)...(19): siRNA sense strand
aaagaaaccaugcaaaguc

SEQ ID NO: 691379 - RNA, 19 nt, Homo sapiens
  misc_RNA (1)...(19): siRNA sense strand
ggagacagggaauugcauu

SEQ ID NO: 691380 - RNA, 19 nt, Homo sapiens
  misc_RNA (1)...(19): siRNA sense strand
guucugaugacaacacuuu

SEQ ID NO: 691381 - RNA, 19 nt, Homo sapiens
  misc_RNA (1)...(19): siRNA sense strand
ucaacgagacuucauuuca

SEQ ID NO: 691382 - RNA, 19 nt, Homo sapiens
  misc_RNA (1)...(19): siRNA sense strand
agagaaauugcuugcuuua

SEQ ID NO: 691383 - RNA, 19 nt, Homo sapiens
  misc_RNA (1)...(19): siRNA sense strand
gaaaccaugcaaagucuca

SEQ ID NO: 691384 - RNA, 19 nt, Homo sapiens
  misc_RNA (1)...(19): siRNA sense strand
cauuacaguuugaugguau

SEQ ID NO: 691385 - RNA, 19 nt, Homo sapiens
  misc_RNA (1)...(19): siRNA sense strand
ugagacaggccaguguuua

SEQ ID NO: 691386 - RNA, 19 nt, Homo sapiens
  misc_RNA (1)...(19): siRNA sense strand
gagagaaaugcaaagaaga

SEQ ID NO: 691387 - RNA, 19 nt, Homo sapiens
  misc_RNA (1)...(19): siRNA sense strand
ugucgcuacuggagaauuu

SEQ ID NO: 691388 - RNA, 19 nt, Homo sapiens
  misc_RNA (1)...(19): siRNA sense strand
gcucagacaugucgcuacu

SEQ ID NO: 691389 - RNA, 19 nt, Homo sapiens
  misc_RNA (1)...(19): siRNA sense strand
gcagagacuggagaaugua

SEQ ID NO: 691390 - RNA, 19 nt, Homo sapiens
  misc_RNA (1)...(19): siRNA sense strand
ugauggaacuguaaaacua

SEQ ID NO: 691391 - RNA, 19 nt, Homo sapiens
  misc_RNA (1)...(19): siRNA sense strand
guuaaaaucugggauauca

SEQ ID NO: 691392 - RNA, 19 nt, Homo sapiens
  misc_RNA (1)...(19): siRNA sense strand
acugaaaccugucuacaca

SEQ ID NO: 691393 - RNA, 19 nt, Homo sapiens
  misc_RNA (1)...(19): siRNA sense strand
gauggcaggaggguuguua

SEQ ID NO: 691394 - RNA, 19 nt, Homo sapiens
  misc_RNA (1)...(19): siRNA sense strand
cauacacaguccauggaaa

SEQ ID NO: 691395 - RNA, 19 nt, Homo sapiens
  misc_RNA (1)...(19): siRNA sense strand
caucacaaaugagagacaa

SEQ ID NO: 691396 - RNA, 19 nt, Homo sapiens
  misc_RNA (1)...(19): siRNA sense strand
aacgagacuucauuucauu

SEQ ID NO: 691397 - RNA, 19 nt, Homo sapiens
  misc_RNA (1)...(19): siRNA sense strand
aaugcagauucuacaguua

SEQ ID NO: 691398 - RNA, 19 nt, Homo sapiens
  misc_RNA (1)...(19): siRNA sense strand
guaugcaucuucaugaaaa

SEQ ID NO: 691399 - RNA, 19 nt, Homo sapiens
  misc_RNA (1)...(19): siRNA sense strand
acaggcaaaugucugagaa

SEQ ID NO: 691400 - RNA, 19 nt, Homo sapiens
  misc_RNA (1)...(19): siRNA sense strand
gaggcgaggagaacucaaa

SEQ ID NO: 691401 - RNA, 19 nt, Homo sapiens
  misc_RNA (1)...(19): siRNA sense strand
gcaguugggagucggaaug

SEQ ID NO: 691402 - RNA, 19 nt, Homo sapiens
  misc_RNA (1)...(19): siRNA sense strand
gcgaggagaacucaaaucu

SEQ ID NO: 691403 - RNA, 19 nt, Homo sapiens
  misc_RNA (1)...(19): siRNA sense strand
gggaaagaaaccaugcaaa

SEQ ID NO: 691404 - RNA, 19 nt, Homo sapiens
  misc_RNA (1)...(19): siRNA sense strand
ucauuacaguuugauggua

SEQ ID NO: 691405 - RNA, 19 nt, Homo sapiens
  misc_RNA (1)...(19): siRNA sense strand
cagcacagaauugauacua

SEQ ID NO: 691406 - RNA, 19 nt, Homo sapiens
  misc_RNA (1)...(19): siRNA sense strand
ucagacagcacagaauuga

SEQ ID NO: 691407 - RNA, 19 nt, Homo sapiens
  misc_RNA (1)...(19): siRNA sense strand
ucauuucauugcucccuaa

SEQ ID NO: 691408 - RNA, 19 nt, Homo sapiens
  misc_RNA (1)...(19): siRNA sense strand
cagcucagaugauggaacu

SEQ ID NO: 691409 - RNA, 19 nt, Homo sapiens
  misc_RNA (1)...(19): siRNA sense strand
guuaguggagcauaugauu

SEQ ID NO: 691410 - RNA, 19 nt, Homo sapiens
  misc_RNA (1)...(19): siRNA sense strand
gcugaaaggacaugaugau

SEQ ID NO: 691411 - RNA, 19 nt, Homo sapiens
  misc_RNA (1)...(19): siRNA sense strand
acaugucgcuacuggagaa

SEQ ID NO: 691412 - RNA, 19 nt, Homo sapiens
  misc_RNA (1)...(19): siRNA sense strand
ugcagagacuggagaaugu

SEQ ID NO: 691413 - RNA, 19 nt, Homo sapiens
  misc_RNA (1)...(19): siRNA sense strand
gaguggaccagagaaauug

SEQ ID NO: 691414 - RNA, 19 nt, Homo sapiens
  misc_RNA (1)...(19): siRNA sense strand
gcaccagucguuaacaagu

SEQ ID NO: 691415 - RNA, 19 nt, Homo sapiens
  misc_RNA (1)...(19): siRNA sense strand
aagaaaccaugcaaagucu

SEQ ID NO: 691416 - RNA, 19 nt, Homo sapiens
  misc_RNA (1)...(19): siRNA sense strand
caacaacgacgccgaauua

SEQ ID NO: 691417 - RNA, 19 nt, Homo sapiens
  misc_RNA (1)...(19): siRNA sense strand
gaauggaacucaaagacaa

SEQ ID NO: 691418 - RNA, 19 nt, Homo sapiens
  misc_RNA (1)...(19): siRNA sense strand
gaaauugcuugcuuuagau

SEQ ID NO: 691419 - RNA, 19 nt, Homo sapiens
  misc_RNA (1)...(19): siRNA sense strand
gaacucaaaucuccuaagg

SEQ ID NO: 691420 - RNA, 19 nt, Homo sapiens
  misc_RNA (1)...(19): siRNA sense strand
gaucagagccucaaacaca

SEQ ID NO: 691421 - RNA, 19 nt, Homo sapiens
  misc_RNA (1)...(19): siRNA sense strand
gugaguggaucucuugaua

SEQ ID NO: 691422 - RNA, 19 nt, Homo sapiens
  misc_RNA (1)...(19): siRNA sense strand
ggaguauggucaucacaaa

SEQ ID NO: 691423 - RNA, 19 nt, Homo sapiens
  misc_RNA (1)...(19): siRNA sense strand
gaaaacgggugaauuuauu

SEQ ID NO: 691424 - RNA, 19 nt, Homo sapiens
  misc_RNA (1)...(19): siRNA sense strand
gaucacaugcuuacaguuu

SEQ ID NO: 691425 - RNA, 19 nt, Homo sapiens
  misc_RNA (1)...(19): siRNA sense strand
agaaauugcuugcuuuaga

SEQ ID NO: 691426 - RNA, 19 nt, Homo sapiens
  misc_RNA (1)...(19): siRNA sense strand
ggaaagaaaccaugcaaag

SEQ ID NO: 691427 - RNA, 19 nt, Homo sapiens
  misc_RNA (1)...(19): siRNA sense strand
gagacaacaucaucauuag

SEQ ID NO: 691428 - RNA, 19 nt, Homo sapiens
  misc_RNA (1)...(19): siRNA sense strand
caacgagacuucauuucau

SEQ ID NO: 691429 - RNA, 19 nt, Homo sapiens
  misc_RNA (1)...(19): siRNA sense strand
ccagagaaauugcuugcuu

SEQ ID NO: 691430 - RNA, 19 nt, Homo sapiens
  misc_RNA (1)...(19): siRNA sense strand
gcacagaauugauacuaac

SEQ ID NO: 691431 - RNA, 19 nt, Homo sapiens
  misc_RNA (1)...(19): siRNA sense strand
caugcaaagucucagaaua

SEQ ID NO: 691432 - RNA, 19 nt, Homo sapiens
  misc_RNA (1)...(19): siRNA sense strand
cagagaaauugcuugcuuu

SEQ ID NO: 691433 - RNA, 19 nt, Homo sapiens
  misc_RNA (1)...(19): siRNA sense strand
gaaagaaaccaugcaaagu

SEQ ID NO: 691434 - RNA, 19 nt, Homo sapiens
  misc_RNA (1)...(19): siRNA sense strand
agagacaacaucaucauua

SEQ ID NO: 691435 - RNA, 19 nt, Homo sapiens
  misc_RNA (1)...(19): siRNA sense strand
cuacaggccuccaggaaug

SEQ ID NO: 691436 - RNA, 19 nt, Homo sapiens
  misc_RNA (1)...(19): siRNA sense strand
gaguggaucucuugauaca

SEQ ID NO: 691437 - RNA, 19 nt, Homo sapiens
  misc_RNA (1)...(19): siRNA sense strand
gagaauguauacacaccuu

SEQ ID NO: 691438 - RNA, 19 nt, Homo sapiens
  misc_RNA (1)...(19): siRNA sense strand
aaacauaugaugcaaguga

SEQ ID NO: 691439 - RNA, 19 nt, Homo sapiens
  misc_RNA (1)...(19): siRNA sense strand
ggaguggaccagagaaauu

SEQ ID NO: 691440 - RNA, 19 nt, Homo sapiens
  misc_RNA (1)...(19): siRNA sense strand
gaacucaaagacaauauuc

SEQ ID NO: 691441 - RNA, 19 nt, Homo sapiens
  misc_RNA (1)...(19): siRNA sense strand
guuaacaaguggaauggaa

SEQ ID NO: 691442 - RNA, 19 nt, Homo sapiens
  misc_RNA (1)...(19): siRNA sense strand
guucugagguccgcucuuu

SEQ ID NO: 691443 - RNA, 19 nt, Homo sapiens
  misc_RNA (1)...(19): siRNA sense strand
agacagcacagaauugaua

SEQ ID NO: 691444 - RNA, 19 nt, Homo sapiens
  misc_RNA (1)...(19): siRNA sense strand
guaauuaccagcucagaug

SEQ ID NO: 691445 - RNA, 19 nt, Homo sapiens
  misc_RNA (1)...(19): siRNA sense strand
ggaguuguguggcggauca

SEQ ID NO: 691446 - RNA, 19 nt, Homo sapiens
  misc_RNA (1)...(19): siRNA sense strand
ggccaguguuuacauguuu

SEQ ID NO: 691447 - RNA, 19 nt, Homo sapiens
  misc_RNA (1)...(19): siRNA sense strand
caacgacgccgaauuacau

SEQ ID NO: 691448 - RNA, 19 nt, Homo sapiens
  misc_RNA (1)...(19): siRNA sense strand
uaacagggcaccagucguu

SEQ ID NO: 691449 - RNA, 19 nt, Homo sapiens
  misc_RNA (1)...(19): siRNA sense strand
gaacauuagugggacauac

SEQ ID NO: 691450 - RNA, 19 nt, Homo sapiens
  misc_RNA (1)...(19): siRNA sense strand
cagcaacaccaacaacuuu

SEQ ID NO: 691451 - RNA, 19 nt, Homo sapiens
  misc_RNA (1)...(19): siRNA sense strand
gcaguccgcuguguucaau

SEQ ID NO: 691452 - RNA, 19 nt, Homo sapiens
  misc_RNA (1)...(19): siRNA sense strand
ugcaaagucucagaauaua

SEQ ID NO: 691453 - RNA, 19 nt, Homo sapiens
  misc_RNA (1)...(19): siRNA sense strand
caaaugagagacaacauca

SEQ ID NO: 691454 - RNA, 19 nt, Homo sapiens
  misc_RNA (1)...(19): siRNA sense strand
uuucauugcucccuaaaga

SEQ ID NO: 691455 - RNA, 19 nt, Homo sapiens
  misc_RNA (1)...(19): siRNA sense strand
guggaucucuugauacauc

SEQ ID NO: 691456 - RNA, 19 nt, Homo sapiens
  misc_RNA (1)...(19): siRNA sense strand
agagagaaaugcaaagaag

SEQ ID NO: 691457 - RNA, 19 nt, Homo sapiens
  misc_RNA (1)...(19): siRNA sense strand
ggagagagaaaugcaaaga

SEQ ID NO: 691458 - RNA, 19 nt, Homo sapiens
  misc_RNA (1)...(19): siRNA sense strand
guuuacaguucaacaagaa

SEQ ID NO: 691459 - RNA, 19 nt, Homo sapiens
  misc_RNA (1)...(19): siRNA sense strand
agagugcugugaccuguuu

SEQ ID NO: 691460 - RNA, 19 nt, Homo sapiens
  misc_RNA (1)...(19): siRNA sense strand
acaggacaguguuuacaaa

SEQ ID NO: 691461 - RNA, 19 nt, Homo sapiens
  misc_RNA (1)...(19): siRNA sense strand
gggcaccagucguuaacaa

SEQ ID NO: 691462 - RNA, 19 nt, Homo sapiens
  misc_RNA (1)...(19): siRNA sense strand
gacaacaucaucauuagug

SEQ ID NO: 691463 - RNA, 19 nt, Homo sapiens
  misc_RNA (1)...(19): siRNA sense strand
gaauguauacacaccuuau

SEQ ID NO: 691464 - RNA, 19 nt, Homo sapiens
  misc_RNA (1)...(19): siRNA sense strand
ggaacucaaagacaauauu

SEQ ID NO: 691465 - RNA, 19 nt, Homo sapiens
  misc_RNA (1)...(19): siRNA sense strand
ggaauggaacucaaagaca

SEQ ID NO: 691466 - RNA, 19 nt, Homo sapiens
  misc_RNA (1)...(19): siRNA sense strand
caaagucucagaauauaca

SEQ ID NO: 691467 - RNA, 19 nt, Homo sapiens
  misc_RNA (1)...(19): siRNA sense strand
acaagcagcucagacaugu

SEQ ID NO: 691468 - RNA, 19 nt, Homo sapiens
  misc_RNA (1)...(19): siRNA sense strand
gaaugggacugaagaaacc

SEQ ID NO: 691469 - RNA, 19 nt, Homo sapiens
  misc_RNA (1)...(19): siRNA sense strand
caaguggaauggaacucaa

SEQ ID NO: 691470 - RNA, 19 nt, Homo sapiens
  misc_RNA (1)...(19): siRNA sense strand
caucagacagcacagaauu

SEQ ID NO: 691471 - RNA, 19 nt, Homo sapiens
  misc_RNA (1)...(19): siRNA sense strand
gagagagaaaugcaaagaa

SEQ ID NO: 691472 - RNA, 19 nt, Homo sapiens
  misc_RNA (1)...(19): siRNA sense strand
gcaacaacgacgccgaauu

SEQ ID NO: 691473 - RNA, 19 nt, Homo sapiens
  misc_RNA (1)...(19): siRNA sense strand
aaaccugucuacacacguu

SEQ ID NO: 691474 - RNA, 19 nt, Homo sapiens
  misc_RNA (1)...(19): siRNA sense strand
gaaaagugcauacaucaga

SEQ ID NO: 691475 - RNA, 19 nt, Homo sapiens
  misc_RNA (1)...(19): siRNA sense strand
ggaaugggacugaagaaac

SEQ ID NO: 691476 - RNA, 19 nt, Homo sapiens
  misc_RNA (1)...(19): siRNA sense strand
gaaaccuagucacauugga

SEQ ID NO: 691477 - RNA, 19 nt, Homo sapiens
  misc_RNA (1)...(19): siRNA sense strand
gagagacaacaucaucauu

SEQ ID NO: 691478 - RNA, 19 nt, Homo sapiens
  misc_RNA (1)...(19): siRNA sense strand
aaagaaaccaugcaaaguc

SEQ ID NO: 691479 - RNA, 19 nt, Homo sapiens
  misc_RNA (1)...(19): siRNA sense strand
ggagacagggaauugcauu

SEQ ID NO: 691480 - RNA, 19 nt, Homo sapiens
  misc_RNA (1)...(19): siRNA sense strand
guucugaugacaacacuuu

SEQ ID NO: 691481 - RNA, 19 nt, Homo sapiens
  misc_RNA (1)...(19): siRNA sense strand
ucaacgagacuucauuuca

SEQ ID NO: 691482 - RNA, 19 nt, Homo sapiens
  misc_RNA (1)...(19): siRNA sense strand
agagaaauugcuugcuuua

SEQ ID NO: 691483 - RNA, 19 nt, Homo sapiens
  misc_RNA (1)...(19): siRNA sense strand
gaaaccaugcaaagucuca

SEQ ID NO: 691484 - RNA, 19 nt, Homo sapiens
  misc_RNA (1)...(19): siRNA sense strand
cauuacaguuugaugguau

SEQ ID NO: 691485 - RNA, 19 nt, Homo sapiens
  misc_RNA (1)...(19): siRNA sense strand
ugagacaggccaguguuua

SEQ ID NO: 691486 - RNA, 19 nt, Homo sapiens
  misc_RNA (1)...(19): siRNA sense strand
gagagaaaugcaaagaaga

SEQ ID NO: 691487 - RNA, 19 nt, Homo sapiens
  misc_RNA (1)...(19): siRNA sense strand
ugucgcuacuggagaauuu

SEQ ID NO: 691488 - RNA, 19 nt, Homo sapiens
  misc_RNA (1)...(19): siRNA sense strand
gcucagacaugucgcuacu

SEQ ID NO: 691489 - RNA, 19 nt, Homo sapiens
  misc_RNA (1)...(19): siRNA sense strand
gcagagacuggagaaugua

SEQ ID NO: 691490 - RNA, 19 nt, Homo sapiens
  misc_RNA (1)...(19): siRNA sense strand
ugauggaacuguaaaacua

SEQ ID NO: 691491 - RNA, 19 nt, Homo sapiens
  misc_RNA (1)...(19): siRNA sense strand
guuaaaaucugggauauca

SEQ ID NO: 691492 - RNA, 19 nt, Homo sapiens
  misc_RNA (1)...(19): siRNA sense strand
acugaaaccugucuacaca

SEQ ID NO: 691493 - RNA, 19 nt, Homo sapiens
  misc_RNA (1)...(19): siRNA sense strand
gauggcaggaggguuguua

SEQ ID NO: 691494 - RNA, 19 nt, Homo sapiens
  misc_RNA (1)...(19): siRNA sense strand
cauacacaguccauggaaa

SEQ ID NO: 691495 - RNA, 19 nt, Homo sapiens
  misc_RNA (1)...(19): siRNA sense strand
caucacaaaugagagacaa

SEQ ID NO: 691496 - RNA, 19 nt, Homo sapiens
  misc_RNA (1)...(19): siRNA sense strand
aacgagacuucauuucauu

SEQ ID NO: 691497 - RNA, 19 nt, Homo sapiens
  misc_RNA (1)...(19): siRNA sense strand
aaugcagauucuacaguua

SEQ ID NO: 691498 - RNA, 19 nt, Homo sapiens
  misc_RNA (1)...(19): siRNA sense strand
guaugcaucuucaugaaaa

SEQ ID NO: 691499 - RNA, 19 nt, Homo sapiens
  misc_RNA (1)...(19): siRNA sense strand
acaggcaaaugucugagaa

SEQ ID NO: 691500 - RNA, 19 nt, Homo sapiens
  misc_RNA (1)...(19): siRNA sense strand
gaggcgaggagaacucaaa

SEQ ID NO: 691501 - RNA, 19 nt, Homo sapiens
  misc_RNA (1)...(19): siRNA sense strand
gcaguugggagucggaaug

SEQ ID NO: 691502 - RNA, 19 nt, Homo sapiens
  misc_RNA (1)...(19): siRNA sense strand
gcgaggagaacucaaaucu

SEQ ID NO: 691503 - RNA, 19 nt, Homo sapiens
  misc_RNA (1)...(19): siRNA sense strand
gggaaagaaaccaugcaaa

SEQ ID NO: 691504 - RNA, 19 nt, Homo sapiens
  misc_RNA (1)...(19): siRNA sense strand
ucauuacaguuugauggua

SEQ ID NO: 691505 - RNA, 19 nt, Homo sapiens
  misc_RNA (1)...(19): siRNA sense strand
cagcacagaauugauacua

SEQ ID NO: 691506 - RNA, 19 nt, Homo sapiens
  misc_RNA (1)...(19): siRNA sense strand
ucagacagcacagaauuga

SEQ ID NO: 691507 - RNA, 19 nt, Homo sapiens
  misc_RNA (1)...(19): siRNA sense strand
ucauuucauugcucccuaa

SEQ ID NO: 691508 - RNA, 19 nt, Homo sapiens
  misc_RNA (1)...(19): siRNA sense strand
cagcucagaugauggaacu

SEQ ID NO: 691509 - RNA, 19 nt, Homo sapiens
  misc_RNA (1)...(19): siRNA sense strand
guuaguggagcauaugauu

SEQ ID NO: 691510 - RNA, 19 nt, Homo sapiens
  misc_RNA (1)...(19): siRNA sense strand
gcugaaaggacaugaugau

SEQ ID NO: 691511 - RNA, 19 nt, Homo sapiens
  misc_RNA (1)...(19): siRNA sense strand
acaugucgcuacuggagaa

SEQ ID NO: 691512 - RNA, 19 nt, Homo sapiens
  misc_RNA (1)...(19): siRNA sense strand
ugcagagacuggagaaugu

SEQ ID NO: 691513 - RNA, 19 nt, Homo sapiens
  misc_RNA (1)...(19): siRNA sense strand
gaguggaccagagaaauug

SEQ ID NO: 691514 - RNA, 19 nt, Homo sapiens
  misc_RNA (1)...(19): siRNA sense strand
gcaccagucguuaacaagu

SEQ ID NO: 691515 - RNA, 19 nt, Homo sapiens
  misc_RNA (1)...(19): siRNA sense strand
aagaaaccaugcaaagucu

SEQ ID NO: 691516 - RNA, 19 nt, Homo sapiens
  misc_RNA (1)...(19): siRNA sense strand
caacaacgacgccgaauua

SEQ ID NO: 691517 - RNA, 19 nt, Homo sapiens
  misc_RNA (1)...(19): siRNA sense strand
gaauggaacucaaagacaa

SEQ ID NO: 691518 - RNA, 19 nt, Homo sapiens
  misc_RNA (1)...(19): siRNA sense strand
gaaauugcuugcuuuagau

SEQ ID NO: 691519 - RNA, 19 nt, Homo sapiens
  misc_RNA (1)...(19): siRNA sense strand
gaacucaaaucuccuaagg

SEQ ID NO: 691520 - RNA, 19 nt, Homo sapiens
  misc_RNA (1)...(19): siRNA sense strand
gaucagagccucaaacaca

SEQ ID NO: 691521 - RNA, 19 nt, Homo sapiens
  misc_RNA (1)...(19): siRNA sense strand
gugaguggaucucuugaua

SEQ ID NO: 691522 - RNA, 19 nt, Homo sapiens
  misc_RNA (1)...(19): siRNA sense strand
ggaguauggucaucacaaa

SEQ ID NO: 691523 - RNA, 19 nt, Homo sapiens
  misc_RNA (1)...(19): siRNA sense strand
gaaaacgggugaauuuauu

SEQ ID NO: 691524 - RNA, 19 nt, Homo sapiens
  misc_RNA (1)...(19): siRNA sense strand
gaucacaugcuuacaguuu

SEQ ID NO: 691525 - RNA, 19 nt, Homo sapiens
  misc_RNA (1)...(19): siRNA sense strand
agaaauugcuugcuuuaga

SEQ ID NO: 691526 - RNA, 19 nt, Homo sapiens
  misc_RNA (1)...(19): siRNA sense strand
ggaaagaaaccaugcaaag

SEQ ID NO: 691527 - RNA, 19 nt, Homo sapiens
  misc_RNA (1)...(19): siRNA sense strand
gagacaacaucaucauuag

SEQ ID NO: 691528 - RNA, 19 nt, Homo sapiens
  misc_RNA (1)...(19): siRNA sense strand
caacgagacuucauuucau

SEQ ID NO: 691529 - RNA, 19 nt, Homo sapiens
  misc_RNA (1)...(19): siRNA sense strand
ccagagaaauugcuugcuu

SEQ ID NO: 691530 - RNA, 19 nt, Homo sapiens
  misc_RNA (1)...(19): siRNA sense strand
gcacagaauugauacuaac

SEQ ID NO: 691531 - RNA, 19 nt, Homo sapiens
  misc_RNA (1)...(19): siRNA sense strand
caugcaaagucucagaaua

SEQ ID NO: 691532 - RNA, 19 nt, Homo sapiens
  misc_RNA (1)...(19): siRNA sense strand
cagagaaauugcuugcuuu

SEQ ID NO: 691533 - RNA, 19 nt, Homo sapiens
  misc_RNA (1)...(19): siRNA sense strand
gaaagaaaccaugcaaagu

SEQ ID NO: 691534 - RNA, 19 nt, Homo sapiens
  misc_RNA (1)...(19): siRNA sense strand
agagacaacaucaucauua

SEQ ID NO: 691535 - RNA, 19 nt, Homo sapiens
  misc_RNA (1)...(19): siRNA sense strand
cuacaggccuccaggaaug

SEQ ID NO: 691536 - RNA, 19 nt, Homo sapiens
  misc_RNA (1)...(19): siRNA sense strand
gaguggaucucuugauaca

SEQ ID NO: 691537 - RNA, 19 nt, Homo sapiens
  misc_RNA (1)...(19): siRNA sense strand
gagaauguauacacaccuu

SEQ ID NO: 691538 - RNA, 19 nt, Homo sapiens
  misc_RNA (1)...(19): siRNA sense strand
aaacauaugaugcaaguga

SEQ ID NO: 691539 - RNA, 19 nt, Homo sapiens
  misc_RNA (1)...(19): siRNA sense strand
ggaguggaccagagaaauu

SEQ ID NO: 691540 - RNA, 19 nt, Homo sapiens
  misc_RNA (1)...(19): siRNA sense strand
gaacucaaagacaauauuc

SEQ ID NO: 691541 - RNA, 19 nt, Homo sapiens
  misc_RNA (1)...(19): siRNA sense strand
guuaacaaguggaauggaa

SEQ ID NO: 691542 - RNA, 19 nt, Homo sapiens
  misc_RNA (1)...(19): siRNA sense strand
guucugagguccgcucuuu

SEQ ID NO: 691543 - RNA, 19 nt, Homo sapiens
  misc_RNA (1)...(19): siRNA sense strand
agacagcacagaauugaua

SEQ ID NO: 691544 - RNA, 19 nt, Homo sapiens
  misc_RNA (1)...(19): siRNA sense strand
guaauuaccagcucagaug

SEQ ID NO: 691545 - RNA, 19 nt, Homo sapiens
  misc_RNA (1)...(19): siRNA sense strand
ggaguuguguggcggauca

SEQ ID NO: 691546 - RNA, 19 nt, Homo sapiens
  misc_RNA (1)...(19): siRNA sense strand
ggccaguguuuacauguuu

SEQ ID NO: 691547 - RNA, 19 nt, Homo sapiens
  misc_RNA (1)...(19): siRNA sense strand
caacgacgccgaauuacau

SEQ ID NO: 691548 - RNA, 19 nt, Homo sapiens
  misc_RNA (1)...(19): siRNA sense strand
uaacagggcaccagucguu

SEQ ID NO: 691549 - RNA, 19 nt, Homo sapiens
  misc_RNA (1)...(19): siRNA sense strand
gaacauuagugggacauac

SEQ ID NO: 691550 - RNA, 19 nt, Homo sapiens
  misc_RNA (1)...(19): siRNA sense strand
cagcaacaccaacaacuuu

SEQ ID NO: 691551 - RNA, 19 nt, Homo sapiens
  misc_RNA (1)...(19): siRNA sense strand
gcaguccgcuguguucaau

SEQ ID NO: 691552 - RNA, 19 nt, Homo sapiens
  misc_RNA (1)...(19): siRNA sense strand
ugcaaagucucagaauaua

SEQ ID NO: 691553 - RNA, 19 nt, Homo sapiens
  misc_RNA (1)...(19): siRNA sense strand
caaaugagagacaacauca

SEQ ID NO: 691554 - RNA, 19 nt, Homo sapiens
  misc_RNA (1)...(19): siRNA sense strand
uuucauugcucccuaaaga

SEQ ID NO: 691555 - RNA, 19 nt, Homo sapiens
  misc_RNA (1)...(19): siRNA sense strand
guggaucucuugauacauc

SEQ ID NO: 691556 - RNA, 19 nt, Homo sapiens
  misc_RNA (1)...(19): siRNA sense strand
agagagaaaugcaaagaag

SEQ ID NO: 691557 - RNA, 19 nt, Homo sapiens
  misc_RNA (1)...(19): siRNA sense strand
ggagagagaaaugcaaaga

SEQ ID NO: 691558 - RNA, 19 nt, Homo sapiens
  misc_RNA (1)...(19): siRNA sense strand
guuuacaguucaacaagaa

SEQ ID NO: 691559 - RNA, 19 nt, Homo sapiens
  misc_RNA (1)...(19): siRNA sense strand
agagugcugugaccuguuu

SEQ ID NO: 691560 - RNA, 19 nt, Homo sapiens
  misc_RNA (1)...(19): siRNA sense strand
acaggacaguguuuacaaa

SEQ ID NO: 691561 - RNA, 19 nt, Homo sapiens
  misc_RNA (1)...(19): siRNA sense strand
gggcaccagucguuaacaa

SEQ ID NO: 691562 - RNA, 19 nt, Homo sapiens
  misc_RNA (1)...(19): siRNA sense strand
gacaacaucaucauuagug

SEQ ID NO: 691563 - RNA, 19 nt, Homo sapiens
  misc_RNA (1)...(19): siRNA sense strand
gaauguauacacaccuuau

SEQ ID NO: 691564 - RNA, 19 nt, Homo sapiens
  misc_RNA (1)...(19): siRNA sense strand
ggaacucaaagacaauauu

SEQ ID NO: 691565 - RNA, 19 nt, Homo sapiens
  misc_RNA (1)...(19): siRNA sense strand
ggaauggaacucaaagaca

SEQ ID NO: 691566 - RNA, 19 nt, Homo sapiens
  misc_RNA (1)...(19): siRNA sense strand
caaagucucagaauauaca

SEQ ID NO: 691567 - RNA, 19 nt, Homo sapiens
  misc_RNA (1)...(19): siRNA sense strand
acaagcagcucagacaugu

SEQ ID NO: 691568 - RNA, 19 nt, Homo sapiens
  misc_RNA (1)...(19): siRNA sense strand
gaaugggacugaagaaacc

SEQ ID NO: 691569 - RNA, 19 nt, Homo sapiens
  misc_RNA (1)...(19): siRNA sense strand
caaguggaauggaacucaa

SEQ ID NO: 691570 - RNA, 19 nt, Homo sapiens
  misc_RNA (1)...(19): siRNA sense strand
caucagacagcacagaauu

SEQ ID NO: 691571 - RNA, 19 nt, Homo sapiens
  misc_RNA (1)...(19): siRNA sense strand
gagagagaaaugcaaagaa

SEQ ID NO: 691572 - RNA, 19 nt, Homo sapiens
  misc_RNA (1)...(19): siRNA sense strand
gcaacaacgacgccgaauu

SEQ ID NO: 691573 - RNA, 19 nt, Homo sapiens
  misc_RNA (1)...(19): siRNA sense strand
aaaccugucuacacacguu

SEQ ID NO: 691574 - RNA, 19 nt, Homo sapiens
  misc_RNA (1)...(19): siRNA sense strand
gaaaagugcauacaucaga

SEQ ID NO: 691575 - RNA, 19 nt, Homo sapiens
  misc_RNA (1)...(19): siRNA sense strand
ggaaugggacugaagaaac

SEQ ID NO: 691576 - RNA, 19 nt, Homo sapiens
  misc_RNA (1)...(19): siRNA sense strand
gaaaccuagucacauugga

SEQ ID NO: 691577 - RNA, 19 nt, Homo sapiens
  misc_RNA (1)...(19): siRNA sense strand
gagagacaacaucaucauu

SEQ ID NO: 691578 - RNA, 19 nt, Homo sapiens
  misc_RNA (1)...(19): siRNA sense strand
aaagaaaccaugcaaaguc

SEQ ID NO: 691579 - RNA, 19 nt, Homo sapiens
  misc_RNA (1)...(19): siRNA sense strand
ggagacagggaauugcauu

SEQ ID NO: 691580 - RNA, 19 nt, Homo sapiens
  misc_RNA (1)...(19): siRNA sense strand
guucugaugacaacacuuu

SEQ ID NO: 691581 - RNA, 19 nt, Homo sapiens
  misc_RNA (1)...(19): siRNA sense strand
ucaacgagacuucauuuca

SEQ ID NO: 691582 - RNA, 19 nt, Homo sapiens
  misc_RNA (1)...(19): siRNA sense strand
agagaaauugcuugcuuua

SEQ ID NO: 691583 - RNA, 19 nt, Homo sapiens
  misc_RNA (1)...(19): siRNA sense strand
gaaaccaugcaaagucuca

SEQ ID NO: 691584 - RNA, 19 nt, Homo sapiens
  misc_RNA (1)...(19): siRNA sense strand
cauuacaguuugaugguau

SEQ ID NO: 691585 - RNA, 19 nt, Homo sapiens
  misc_RNA (1)...(19): siRNA sense strand
ugagacaggccaguguuua

SEQ ID NO: 691586 - RNA, 19 nt, Homo sapiens
  misc_RNA (1)...(19): siRNA sense strand
gagagaaaugcaaagaaga

SEQ ID NO: 691587 - RNA, 19 nt, Homo sapiens
  misc_RNA (1)...(19): siRNA sense strand
ugucgcuacuggagaauuu

SEQ ID NO: 691588 - RNA, 19 nt, Homo sapiens
  misc_RNA (1)...(19): siRNA sense strand
gcucagacaugucgcuacu

SEQ ID NO: 691589 - RNA, 19 nt, Homo sapiens
  misc_RNA (1)...(19): siRNA sense strand
gcagagacuggagaaugua

SEQ ID NO: 691590 - RNA, 19 nt, Homo sapiens
  misc_RNA (1)...(19): siRNA sense strand
ugauggaacuguaaaacua

SEQ ID NO: 691591 - RNA, 19 nt, Homo sapiens
  misc_RNA (1)...(19): siRNA sense strand
guuaaaaucugggauauca

SEQ ID NO: 691592 - RNA, 19 nt, Homo sapiens
  misc_RNA (1)...(19): siRNA sense strand
acugaaaccugucuacaca

SEQ ID NO: 691593 - RNA, 19 nt, Homo sapiens
  misc_RNA (1)...(19): siRNA sense strand
gauggcaggaggguuguua

SEQ ID NO: 691594 - RNA, 19 nt, Homo sapiens
  misc_RNA (1)...(19): siRNA sense strand
cauacacaguccauggaaa

SEQ ID NO: 691595 - RNA, 19 nt, Homo sapiens
  misc_RNA (1)...(19): siRNA sense strand
caucacaaaugagagacaa

SEQ ID NO: 691596 - RNA, 19 nt, Homo sapiens
  misc_RNA (1)...(19): siRNA sense strand
aacgagacuucauuucauu

SEQ ID NO: 691597 - RNA, 19 nt, Homo sapiens
  misc_RNA (1)...(19): siRNA sense strand
aaugcagauucuacaguua

SEQ ID NO: 691598 - RNA, 19 nt, Homo sapiens
  misc_RNA (1)...(19): siRNA sense strand
guaugcaucuucaugaaaa

SEQ ID NO: 691599 - RNA, 19 nt, Homo sapiens
  misc_RNA (1)...(19): siRNA sense strand
acaggcaaaugucugagaa

SEQ ID NO: 691600 - RNA, 19 nt, Homo sapiens
  misc_RNA (1)...(19): siRNA sense strand
gaggcgaggagaacucaaa

SEQ ID NO: 691601 - RNA, 19 nt, Homo sapiens
  misc_RNA (1)...(19): siRNA sense strand
gcaguugggagucggaaug

SEQ ID NO: 691602 - RNA, 19 nt, Homo sapiens
  misc_RNA (1)...(19): siRNA sense strand
gcgaggagaacucaaaucu

SEQ ID NO: 691603 - RNA, 19 nt, Homo sapiens
  misc_RNA (1)...(19): siRNA sense strand
gggaaagaaaccaugcaaa

SEQ ID NO: 691604 - RNA, 19 nt, Homo sapiens
  misc_RNA (1)...(19): siRNA sense strand
ucauuacaguuugauggua

SEQ ID NO: 691605 - RNA, 19 nt, Homo sapiens
  misc_RNA (1)...(19): siRNA sense strand
cagcacagaauugauacua

SEQ ID NO: 691606 - RNA, 19 nt, Homo sapiens
  misc_RNA (1)...(19): siRNA sense strand
ucagacagcacagaauuga

SEQ ID NO: 691607 - RNA, 19 nt, Homo sapiens
  misc_RNA (1)...(19): siRNA sense strand
ucauuucauugcucccuaa

SEQ ID NO: 691608 - RNA, 19 nt, Homo sapiens
  misc_RNA (1)...(19): siRNA sense strand
cagcucagaugauggaacu

SEQ ID NO: 691609 - RNA, 19 nt, Homo sapiens
  misc_RNA (1)...(19): siRNA sense strand
guuaguggagcauaugauu

SEQ ID NO: 691610 - RNA, 19 nt, Homo sapiens
  misc_RNA (1)...(19): siRNA sense strand
gcugaaaggacaugaugau

SEQ ID NO: 691611 - RNA, 19 nt, Homo sapiens
  misc_RNA (1)...(19): siRNA sense strand
acaugucgcuacuggagaa

SEQ ID NO: 691612 - RNA, 19 nt, Homo sapiens
  misc_RNA (1)...(19): siRNA sense strand
ugcagagacuggagaaugu

SEQ ID NO: 691613 - RNA, 19 nt, Homo sapiens
  misc_RNA (1)...(19): siRNA sense strand
gaguggaccagagaaauug

SEQ ID NO: 691614 - RNA, 19 nt, Homo sapiens
  misc_RNA (1)...(19): siRNA sense strand
gcaccagucguuaacaagu

SEQ ID NO: 691615 - RNA, 19 nt, Homo sapiens
  misc_RNA (1)...(19): siRNA sense strand
aagaaaccaugcaaagucu

SEQ ID NO: 691616 - RNA, 19 nt, Homo sapiens
  misc_RNA (1)...(19): siRNA sense strand
caacaacgacgccgaauua

SEQ ID NO: 691617 - RNA, 19 nt, Homo sapiens
  misc_RNA (1)...(19): siRNA sense strand
gaauggaacucaaagacaa

SEQ ID NO: 691618 - RNA, 19 nt, Homo sapiens
  misc_RNA (1)...(19): siRNA sense strand
gaaauugcuugcuuuagau

SEQ ID NO: 691619 - RNA, 19 nt, Homo sapiens
  misc_RNA (1)...(19): siRNA sense strand
gaacucaaaucuccuaagg

SEQ ID NO: 691620 - RNA, 19 nt, Homo sapiens
  misc_RNA (1)...(19): siRNA sense strand
gaucagagccucaaacaca

SEQ ID NO: 691621 - RNA, 19 nt, Homo sapiens
  misc_RNA (1)...(19): siRNA sense strand
gugaguggaucucuugaua

SEQ ID NO: 691622 - RNA, 19 nt, Homo sapiens
  misc_RNA (1)...(19): siRNA sense strand
ggaguauggucaucacaaa

SEQ ID NO: 691623 - RNA, 19 nt, Homo sapiens
  misc_RNA (1)...(19): siRNA sense strand
gaaaacgggugaauuuauu

SEQ ID NO: 691624 - RNA, 19 nt, Homo sapiens
  misc_RNA (1)...(19): siRNA sense strand
gaucacaugcuuacaguuu

SEQ ID NO: 691625 - RNA, 19 nt, Homo sapiens
  misc_RNA (1)...(19): siRNA sense strand
agaaauugcuugcuuuaga

SEQ ID NO: 691626 - RNA, 19 nt, Homo sapiens
  misc_RNA (1)...(19): siRNA sense strand
ggaaagaaaccaugcaaag

SEQ ID NO: 691627 - RNA, 19 nt, Homo sapiens
  misc_RNA (1)...(19): siRNA sense strand
gagacaacaucaucauuag

SEQ ID NO: 691628 - RNA, 19 nt, Homo sapiens
  misc_RNA (1)...(19): siRNA sense strand
caacgagacuucauuucau

SEQ ID NO: 691629 - RNA, 19 nt, Homo sapiens
  misc_RNA (1)...(19): siRNA sense strand
ccagagaaauugcuugcuu

SEQ ID NO: 691630 - RNA, 19 nt, Homo sapiens
  misc_RNA (1)...(19): siRNA sense strand
gcacagaauugauacuaac

SEQ ID NO: 691631 - RNA, 19 nt, Homo sapiens
  misc_RNA (1)...(19): siRNA sense strand
caugcaaagucucagaaua

SEQ ID NO: 691632 - RNA, 19 nt, Homo sapiens
  misc_RNA (1)...(19): siRNA sense strand
cagagaaauugcuugcuuu

SEQ ID NO: 691633 - RNA, 19 nt, Homo sapiens
  misc_RNA (1)...(19): siRNA sense strand
gaaagaaaccaugcaaagu

SEQ ID NO: 691634 - RNA, 19 nt, Homo sapiens
  misc_RNA (1)...(19): siRNA sense strand
agagacaacaucaucauua

SEQ ID NO: 691635 - RNA, 19 nt, Homo sapiens
  misc_RNA (1)...(19): siRNA sense strand
cuacaggccuccaggaaug

SEQ ID NO: 691636 - RNA, 19 nt, Homo sapiens
  misc_RNA (1)...(19): siRNA sense strand
gaguggaucucuugauaca

SEQ ID NO: 691637 - RNA, 19 nt, Homo sapiens
  misc_RNA (1)...(19): siRNA sense strand
gagaauguauacacaccuu

SEQ ID NO: 691638 - RNA, 19 nt, Homo sapiens
  misc_RNA (1)...(19): siRNA sense strand
aaacauaugaugcaaguga

SEQ ID NO: 691639 - RNA, 19 nt, Homo sapiens
  misc_RNA (1)...(19): siRNA sense strand
ggaguggaccagagaaauu

SEQ ID NO: 691640 - RNA, 19 nt, Homo sapiens
  misc_RNA (1)...(19): siRNA sense strand
gaacucaaagacaauauuc

SEQ ID NO: 691641 - RNA, 19 nt, Homo sapiens
  misc_RNA (1)...(19): siRNA sense strand
guuaacaaguggaauggaa

SEQ ID NO: 691642 - RNA, 19 nt, Homo sapiens
  misc_RNA (1)...(19): siRNA sense strand
guucugagguccgcucuuu

SEQ ID NO: 691643 - RNA, 19 nt, Homo sapiens
  misc_RNA (1)...(19): siRNA sense strand
agacagcacagaauugaua

SEQ ID NO: 691644 - RNA, 19 nt, Homo sapiens
  misc_RNA (1)...(19): siRNA sense strand
guaauuaccagcucagaug

SEQ ID NO: 691645 - RNA, 19 nt, Homo sapiens
  misc_RNA (1)...(19): siRNA sense strand
ggaguuguguggcggauca

SEQ ID NO: 691646 - RNA, 19 nt, Homo sapiens
  misc_RNA (1)...(19): siRNA sense strand
ggccaguguuuacauguuu

SEQ ID NO: 691647 - RNA, 19 nt, Homo sapiens
  misc_RNA (1)...(19): siRNA sense strand
caacgacgccgaauuacau

SEQ ID NO: 691648 - RNA, 19 nt, Homo sapiens
  misc_RNA (1)...(19): siRNA sense strand
uaacagggcaccagucguu

SEQ ID NO: 691649 - RNA, 19 nt, Homo sapiens
  misc_RNA (1)...(19): siRNA sense strand
gaacauuagugggacauac

SEQ ID NO: 691650 - RNA, 19 nt, Homo sapiens
  misc_RNA (1)...(19): siRNA sense strand
cagcaacaccaacaacuuu

SEQ ID NO: 691651 - RNA, 19 nt, Homo sapiens
  misc_RNA (1)...(19): siRNA sense strand
gcaguccgcuguguucaau

SEQ ID NO: 691652 - RNA, 19 nt, Homo sapiens
  misc_RNA (1)...(19): siRNA sense strand
ugcaaagucucagaauaua

SEQ ID NO: 691653 - RNA, 19 nt, Homo sapiens
  misc_RNA (1)...(19): siRNA sense strand
caaaugagagacaacauca

SEQ ID NO: 691654 - RNA, 19 nt, Homo sapiens
  misc_RNA (1)...(19): siRNA sense strand
uuucauugcucccuaaaga

SEQ ID NO: 691655 - RNA, 19 nt, Homo sapiens
  misc_RNA (1)...(19): siRNA sense strand
guggaucucuugauacauc

SEQ ID NO: 691656 - RNA, 19 nt, Homo sapiens
  misc_RNA (1)...(19): siRNA sense strand
agagagaaaugcaaagaag

SEQ ID NO: 691657 - RNA, 19 nt, Homo sapiens
  misc_RNA (1)...(19): siRNA sense strand
ggagagagaaaugcaaaga

SEQ ID NO: 691658 - RNA, 19 nt, Homo sapiens
  misc_RNA (1)...(19): siRNA sense strand
guuuacaguucaacaagaa

SEQ ID NO: 691659 - RNA, 19 nt, Homo sapiens
  misc_RNA (1)...(19): siRNA sense strand
agagugcugugaccuguuu

SEQ ID NO: 691660 - RNA, 19 nt, Homo sapiens
  misc_RNA (1)...(19): siRNA sense strand
acaggacaguguuuacaaa

SEQ ID NO: 691661 - RNA, 19 nt, Homo sapiens
  misc_RNA (1)...(19): siRNA sense strand
gggcaccagucguuaacaa

SEQ ID NO: 691662 - RNA, 19 nt, Homo sapiens
  misc_RNA (1)...(19): siRNA sense strand
gacaacaucaucauuagug

SEQ ID NO: 691663 - RNA, 19 nt, Homo sapiens
  misc_RNA (1)...(19): siRNA sense strand
gaauguauacacaccuuau

SEQ ID NO: 691664 - RNA, 19 nt, Homo sapiens
  misc_RNA (1)...(19): siRNA sense strand
ggaacucaaagacaauauu

SEQ ID NO: 691665 - RNA, 19 nt, Homo sapiens
  misc_RNA (1)...(19): siRNA sense strand
ggaauggaacucaaagaca

SEQ ID NO: 691666 - RNA, 19 nt, Homo sapiens
  misc_RNA (1)...(19): siRNA sense strand
caaagucucagaauauaca

SEQ ID NO: 691667 - RNA, 19 nt, Homo sapiens
  misc_RNA (1)...(19): siRNA sense strand
acaagcagcucagacaugu

SEQ ID NO: 691668 - RNA, 19 nt, Homo sapiens
  misc_RNA (1)...(19): siRNA sense strand
gaaugggacugaagaaacc

SEQ ID NO: 691669 - RNA, 19 nt, Homo sapiens
  misc_RNA (1)...(19): siRNA sense strand
caaguggaauggaacucaa

SEQ ID NO: 691670 - RNA, 19 nt, Homo sapiens
  misc_RNA (1)...(19): siRNA sense strand
caucagacagcacagaauu

SEQ ID NO: 691671 - RNA, 19 nt, Homo sapiens
  misc_RNA (1)...(19): siRNA sense strand
gagagagaaaugcaaagaa

SEQ ID NO: 691672 - RNA, 19 nt, Homo sapiens
  misc_RNA (1)...(19): siRNA sense strand
gcaacaacgacgccgaauu

SEQ ID NO: 691673 - RNA, 19 nt, Homo sapiens
  misc_RNA (1)...(19): siRNA sense strand
aaaccugucuacacacguu

SEQ ID NO: 691674 - RNA, 19 nt, Homo sapiens
  misc_RNA (1)...(19): siRNA sense strand
gaaaagugcauacaucaga

SEQ ID NO: 691675 - RNA, 19 nt, Homo sapiens
  misc_RNA (1)...(19): siRNA sense strand
ggaaugggacugaagaaac

SEQ ID NO: 691676 - RNA, 19 nt, Homo sapiens
  misc_RNA (1)...(19): siRNA sense strand
gaaaccuagucacauugga

SEQ ID NO: 691677 - RNA, 19 nt, Homo sapiens
  misc_RNA (1)...(19): siRNA sense strand
gagagacaacaucaucauu

SEQ ID NO: 691678 - RNA, 19 nt, Homo sapiens
  misc_RNA (1)...(19): siRNA sense strand
aaagaaaccaugcaaaguc

SEQ ID NO: 691679 - RNA, 19 nt, Homo sapiens
  misc_RNA (1)...(19): siRNA sense strand
ggagacagggaauugcauu

SEQ ID NO: 691680 - RNA, 19 nt, Homo sapiens
  misc_RNA (1)...(19): siRNA sense strand
guucugaugacaacacuuu

SEQ ID NO: 691681 - RNA, 19 nt, Homo sapiens
  misc_RNA (1)...(19): siRNA sense strand
ucaacgagacuucauuuca

SEQ ID NO: 691682 - RNA, 19 nt, Homo sapiens
  misc_RNA (1)...(19): siRNA sense strand
agagaaauugcuugcuuua

SEQ ID NO: 691683 - RNA, 19 nt, Homo sapiens
  misc_RNA (1)...(19): siRNA sense strand
gaaaccaugcaaagucuca

SEQ ID NO: 691684 - RNA, 19 nt, Homo sapiens
  misc_RNA (1)...(19): siRNA sense strand
cauuacaguuugaugguau

SEQ ID NO: 691685 - RNA, 19 nt, Homo sapiens
  misc_RNA (1)...(19): siRNA sense strand
ugagacaggccaguguuua

SEQ ID NO: 691686 - RNA, 19 nt, Homo sapiens
  misc_RNA (1)...(19): siRNA sense strand
gagagaaaugcaaagaaga

SEQ ID NO: 691687 - RNA, 19 nt, Homo sapiens
  misc_RNA (1)...(19): siRNA sense strand
ugucgcuacuggagaauuu

SEQ ID NO: 691688 - RNA, 19 nt, Homo sapiens
  misc_RNA (1)...(19): siRNA sense strand
gcucagacaugucgcuacu

SEQ ID NO: 691689 - RNA, 19 nt, Homo sapiens
  misc_RNA (1)...(19): siRNA sense strand
gcagagacuggagaaugua

SEQ ID NO: 691690 - RNA, 19 nt, Homo sapiens
  misc_RNA (1)...(19): siRNA sense strand
ugauggaacuguaaaacua

SEQ ID NO: 691691 - RNA, 19 nt, Homo sapiens
  misc_RNA (1)...(19): siRNA sense strand
guuaaaaucugggauauca

SEQ ID NO: 691692 - RNA, 19 nt, Homo sapiens
  misc_RNA (1)...(19): siRNA sense strand
acugaaaccugucuacaca

SEQ ID NO: 691693 - RNA, 19 nt, Homo sapiens
  misc_RNA (1)...(19): siRNA sense strand
gauggcaggaggguuguua

SEQ ID NO: 691694 - RNA, 19 nt, Homo sapiens
  misc_RNA (1)...(19): siRNA sense strand
cauacacaguccauggaaa

SEQ ID NO: 691695 - RNA, 19 nt, Homo sapiens
  misc_RNA (1)...(19): siRNA sense strand
caucacaaaugagagacaa

SEQ ID NO: 691696 - RNA, 19 nt, Homo sapiens
  misc_RNA (1)...(19): siRNA sense strand
aacgagacuucauuucauu

SEQ ID NO: 691697 - RNA, 19 nt, Homo sapiens
  misc_RNA (1)...(19): siRNA sense strand
aaugcagauucuacaguua

SEQ ID NO: 691698 - RNA, 19 nt, Homo sapiens
  misc_RNA (1)...(19): siRNA sense strand
guaugcaucuucaugaaaa

SEQ ID NO: 691699 - RNA, 19 nt, Homo sapiens
  misc_RNA (1)...(19): siRNA sense strand
acaggcaaaugucugagaa

SEQ ID NO: 691700 - RNA, 19 nt, Homo sapiens
  misc_RNA (1)...(19): siRNA sense strand
gaggcgaggagaacucaaa

SEQ ID NO: 691701 - RNA, 19 nt, Homo sapiens
  misc_RNA (1)...(19): siRNA sense strand
gcaguugggagucggaaug

SEQ ID NO: 691702 - RNA, 19 nt, Homo sapiens
  misc_RNA (1)...(19): siRNA sense strand
gcgaggagaacucaaaucu

SEQ ID NO: 691703 - RNA, 19 nt, Homo sapiens
  misc_RNA (1)...(19): siRNA sense strand
gggaaagaaaccaugcaaa

SEQ ID NO: 691704 - RNA, 19 nt, Homo sapiens
  misc_RNA (1)...(19): siRNA sense strand
ucauuacaguuugauggua

SEQ ID NO: 691705 - RNA, 19 nt, Homo sapiens
  misc_RNA (1)...(19): siRNA sense strand
cagcacagaauugauacua

SEQ ID NO: 691706 - RNA, 19 nt, Homo sapiens
  misc_RNA (1)...(19): siRNA sense strand
ucagacagcacagaauuga

SEQ ID NO: 691707 - RNA, 19 nt, Homo sapiens
  misc_RNA (1)...(19): siRNA sense strand
ucauuucauugcucccuaa

SEQ ID NO: 691708 - RNA, 19 nt, Homo sapiens
  misc_RNA (1)...(19): siRNA sense strand
cagcucagaugauggaacu

SEQ ID NO: 691709 - RNA, 19 nt, Homo sapiens
  misc_RNA (1)...(19): siRNA sense strand
guuaguggagcauaugauu

SEQ ID NO: 691710 - RNA, 19 nt, Homo sapiens
  misc_RNA (1)...(19): siRNA sense strand
gcugaaaggacaugaugau

SEQ ID NO: 691711 - RNA, 19 nt, Homo sapiens
  misc_RNA (1)...(19): siRNA sense strand
acaugucgcuacuggagaa

SEQ ID NO: 691712 - RNA, 19 nt, Homo sapiens
  misc_RNA (1)...(19): siRNA sense strand
ugcagagacuggagaaugu

SEQ ID NO: 691713 - RNA, 19 nt, Homo sapiens
  misc_RNA (1)...(19): siRNA sense strand
gaguggaccagagaaauug

SEQ ID NO: 691714 - RNA, 19 nt, Homo sapiens
  misc_RNA (1)...(19): siRNA sense strand
gcaccagucguuaacaagu

SEQ ID NO: 691715 - RNA, 19 nt, Homo sapiens
  misc_RNA (1)...(19): siRNA sense strand
aagaaaccaugcaaagucu

SEQ ID NO: 691716 - RNA, 19 nt, Homo sapiens
  misc_RNA (1)...(19): siRNA sense strand
gcauuggacucccggaaga

SEQ ID NO: 691717 - RNA, 19 nt, Homo sapiens
  misc_RNA (1)...(19): siRNA sense strand
uguccgaggugcagaggaa

SEQ ID NO: 691718 - RNA, 19 nt, Homo sapiens
  misc_RNA (1)...(19): siRNA sense strand
gcgagcugauggccuggaa

SEQ ID NO: 691719 - RNA, 19 nt, Homo sapiens
  misc_RNA (1)...(19): siRNA sense strand
caagaucgagcgagugaac

SEQ ID NO: 691720 - RNA, 19 nt, Homo sapiens
  misc_RNA (1)...(19): siRNA sense strand
gcacaccuguuuaacuuug

SEQ ID NO: 691721 - RNA, 19 nt, Homo sapiens
  misc_RNA (1)...(19): siRNA sense strand
gaaagcaauuggaucacaa

SEQ ID NO: 691722 - RNA, 19 nt, Homo sapiens
  misc_RNA (1)...(19): siRNA sense strand
caaauacuacuacacaaga

SEQ ID NO: 691723 - RNA, 19 nt, Homo sapiens
  misc_RNA (1)...(19): siRNA sense strand
cgacaaauacuacuacaca

SEQ ID NO: 691724 - RNA, 19 nt, Homo sapiens
  misc_RNA (1)...(19): siRNA sense strand
gacaaauacuacuacacaa

SEQ ID NO: 691725 - RNA, 19 nt, Homo sapiens
  misc_RNA (1)...(19): siRNA sense strand
gcucucugcuugaauuuua

SEQ ID NO: 691726 - RNA, 19 nt, Homo sapiens
  misc_RNA (1)...(19): siRNA sense strand
caucauugcacaccuguuu

SEQ ID NO: 691727 - RNA, 19 nt, Homo sapiens
  misc_RNA (1)...(19): siRNA sense strand
guggaugccuuccugaaau

SEQ ID NO: 691728 - RNA, 19 nt, Homo sapiens
  misc_RNA (1)...(19): siRNA sense strand
uggaugccuuccugaaaua

SEQ ID NO: 691729 - RNA, 19 nt, Homo sapiens
  misc_RNA (1)...(19): siRNA sense strand
ugagaaggccgacaaauac

SEQ ID NO: 691730 - RNA, 19 nt, Homo sapiens
  misc_RNA (1)...(19): siRNA sense strand
ugagaaagcaauuggauca

SEQ ID NO: 691731 - RNA, 19 nt, Homo sapiens
  misc_RNA (1)...(19): siRNA sense strand
uugcacaccuguuuaacuu

SEQ ID NO: 691732 - RNA, 19 nt, Homo sapiens
  misc_RNA (1)...(19): siRNA sense strand
gguuagggcugaauguuuu

SEQ ID NO: 691733 - RNA, 19 nt, Homo sapiens
  misc_RNA (1)...(19): siRNA sense strand
acauacagcuauucacauc

SEQ ID NO: 691734 - RNA, 19 nt, Homo sapiens
  misc_RNA (1)...(19): siRNA sense strand
augagaaggccgacaaaua

SEQ ID NO: 691735 - RNA, 19 nt, Homo sapiens
  misc_RNA (1)...(19): siRNA sense strand
acaagcugguggccuauau

SEQ ID NO: 691736 - RNA, 19 nt, Homo sapiens
  misc_RNA (1)...(19): siRNA sense strand
guuucugguuguuugguua

SEQ ID NO: 691737 - RNA, 19 nt, Homo sapiens
  misc_RNA (1)...(19): siRNA sense strand
gcacacugagaaagcaauu

SEQ ID NO: 691738 - RNA, 19 nt, Homo sapiens
  misc_RNA (1)...(19): siRNA sense strand
gauccugcuuccugugugu

SEQ ID NO: 691739 - RNA, 19 nt, Homo sapiens
  misc_RNA (1)...(19): siRNA sense strand
gcugguggccuauaugauc

SEQ ID NO: 691740 - RNA, 19 nt, Homo sapiens
  misc_RNA (1)...(19): siRNA sense strand
agaaagcaauuggaucaca

SEQ ID NO: 691741 - RNA, 19 nt, Homo sapiens
  misc_RNA (1)...(19): siRNA sense strand
cuacauacagcuauucaca

SEQ ID NO: 691742 - RNA, 19 nt, Homo sapiens
  misc_RNA (1)...(19): siRNA sense strand
ucugcucucugcuugaauu

SEQ ID NO: 691743 - RNA, 19 nt, Homo sapiens
  misc_RNA (1)...(19): siRNA sense strand
ucauugcacaccuguuuaa

SEQ ID NO: 691744 - RNA, 19 nt, Homo sapiens
  misc_RNA (1)...(19): siRNA sense strand
caaccucaccuuccacaag

SEQ ID NO: 691745 - RNA, 19 nt, Homo sapiens
  misc_RNA (1)...(19): siRNA sense strand
gcaaucugcuguccuuccu

SEQ ID NO: 691746 - RNA, 19 nt, Homo sapiens
  misc_RNA (1)...(19): siRNA sense strand
cgucugcucucugcuugaa

SEQ ID NO: 691747 - RNA, 19 nt, Homo sapiens
  misc_RNA (1)...(19): siRNA sense strand
gaaggccgacaaauacuac

SEQ ID NO: 691748 - RNA, 19 nt, Homo sapiens
  misc_RNA (1)...(19): siRNA sense strand
auacagcuauucacaucau

SEQ ID NO: 691749 - RNA, 19 nt, Homo sapiens
  misc_RNA (1)...(19): siRNA sense strand
gcugaauguuuuccuguuu

SEQ ID NO: 691750 - RNA, 19 nt, Homo sapiens
  misc_RNA (1)...(19): siRNA sense strand
ucuccagccuaucucauga

SEQ ID NO: 691751 - RNA, 19 nt, Homo sapiens
  misc_RNA (1)...(19): siRNA sense strand
guuuaacuuugacugcuau

SEQ ID NO: 691752 - RNA, 19 nt, Homo sapiens
  misc_RNA (1)...(19): siRNA sense strand
uccauucucuccagccuau

SEQ ID NO: 691753 - RNA, 19 nt, Homo sapiens
  misc_RNA (1)...(19): siRNA sense strand
agaaggccgacaaauacua

SEQ ID NO: 691754 - RNA, 19 nt, Homo sapiens
  misc_RNA (1)...(19): siRNA sense strand
uguuuaacuuugacugcua

SEQ ID NO: 691755 - RNA, 19 nt, Homo sapiens
  misc_RNA (1)...(19): siRNA sense strand
gaagccgacaggccacaga

SEQ ID NO: 691756 - RNA, 19 nt, Homo sapiens
  misc_RNA (1)...(19): siRNA sense strand
gucgcaaucugcuguccuu

SEQ ID NO: 691757 - RNA, 19 nt, Homo sapiens
  misc_RNA (1)...(19): siRNA sense strand
augccuuccugaaauauga

SEQ ID NO: 691758 - RNA, 19 nt, Homo sapiens
  misc_RNA (1)...(19): siRNA sense strand
acaaauacuacuacacaag

SEQ ID NO: 691759 - RNA, 19 nt, Homo sapiens
  misc_RNA (1)...(19): siRNA sense strand
gagaaggccgacaaauacu

SEQ ID NO: 691760 - RNA, 19 nt, Homo sapiens
  misc_RNA (1)...(19): siRNA sense strand
gaggggcaccugcucauuu

SEQ ID NO: 691761 - RNA, 19 nt, Homo sapiens
  misc_RNA (1)...(19): siRNA sense strand
aauaugagaaggccgacaa

SEQ ID NO: 691762 - RNA, 19 nt, Homo sapiens
  misc_RNA (1)...(19): siRNA sense strand
gccgacaaauacuacuaca

SEQ ID NO: 691763 - RNA, 19 nt, Homo sapiens
  misc_RNA (1)...(19): siRNA sense strand
aagcugguggccuauauga

SEQ ID NO: 691764 - RNA, 19 nt, Homo sapiens
  misc_RNA (1)...(19): siRNA sense strand
gcacaccuguuuaacuuug

SEQ ID NO: 691765 - RNA, 19 nt, Homo sapiens
  misc_RNA (1)...(19): siRNA sense strand
gaaagcaauuggaucacaa

SEQ ID NO: 691766 - RNA, 19 nt, Homo sapiens
  misc_RNA (1)...(19): siRNA sense strand
caaauacuacuacacaaga

SEQ ID NO: 691767 - RNA, 19 nt, Homo sapiens
  misc_RNA (1)...(19): siRNA sense strand
cgacaaauacuacuacaca

SEQ ID NO: 691768 - RNA, 19 nt, Homo sapiens
  misc_RNA (1)...(19): siRNA sense strand
gacaaauacuacuacacaa

SEQ ID NO: 691769 - RNA, 19 nt, Homo sapiens
  misc_RNA (1)...(19): siRNA sense strand
gcucucugcuugaauuuua

SEQ ID NO: 691770 - RNA, 19 nt, Homo sapiens
  misc_RNA (1)...(19): siRNA sense strand
caucauugcacaccuguuu

SEQ ID NO: 691771 - RNA, 19 nt, Homo sapiens
  misc_RNA (1)...(19): siRNA sense strand
guggaugccuuccugaaau

SEQ ID NO: 691772 - RNA, 19 nt, Homo sapiens
  misc_RNA (1)...(19): siRNA sense strand
uggaugccuuccugaaaua

SEQ ID NO: 691773 - RNA, 19 nt, Homo sapiens
  misc_RNA (1)...(19): siRNA sense strand
ugagaaggccgacaaauac

SEQ ID NO: 691774 - RNA, 19 nt, Homo sapiens
  misc_RNA (1)...(19): siRNA sense strand
ugagaaagcaauuggauca

SEQ ID NO: 691775 - RNA, 19 nt, Homo sapiens
  misc_RNA (1)...(19): siRNA sense strand
uugcacaccuguuuaacuu

SEQ ID NO: 691776 - RNA, 19 nt, Homo sapiens
  misc_RNA (1)...(19): siRNA sense strand
gguuagggcugaauguuuu

SEQ ID NO: 691777 - RNA, 19 nt, Homo sapiens
  misc_RNA (1)...(19): siRNA sense strand
acauacagcuauucacauc

SEQ ID NO: 691778 - RNA, 19 nt, Homo sapiens
  misc_RNA (1)...(19): siRNA sense strand
augagaaggccgacaaaua

SEQ ID NO: 691779 - RNA, 19 nt, Homo sapiens
  misc_RNA (1)...(19): siRNA sense strand
acaagcugguggccuauau

SEQ ID NO: 691780 - RNA, 19 nt, Homo sapiens
  misc_RNA (1)...(19): siRNA sense strand
guuucugguuguuugguua

SEQ ID NO: 691781 - RNA, 19 nt, Homo sapiens
  misc_RNA (1)...(19): siRNA sense strand
gcacacugagaaagcaauu

SEQ ID NO: 691782 - RNA, 19 nt, Homo sapiens
  misc_RNA (1)...(19): siRNA sense strand
gauccugcuuccugugugu

SEQ ID NO: 691783 - RNA, 19 nt, Homo sapiens
  misc_RNA (1)...(19): siRNA sense strand
gcugguggccuauaugauc

SEQ ID NO: 691784 - RNA, 19 nt, Homo sapiens
  misc_RNA (1)...(19): siRNA sense strand
agaaagcaauuggaucaca

SEQ ID NO: 691785 - RNA, 19 nt, Homo sapiens
  misc_RNA (1)...(19): siRNA sense strand
cuacauacagcuauucaca

SEQ ID NO: 691786 - RNA, 19 nt, Homo sapiens
  misc_RNA (1)...(19): siRNA sense strand
ucugcucucugcuugaauu

SEQ ID NO: 691787 - RNA, 19 nt, Homo sapiens
  misc_RNA (1)...(19): siRNA sense strand
ucauugcacaccuguuuaa

SEQ ID NO: 691788 - RNA, 19 nt, Homo sapiens
  misc_RNA (1)...(19): siRNA sense strand
caaccucaccuuccacaag

SEQ ID NO: 691789 - RNA, 19 nt, Homo sapiens
  misc_RNA (1)...(19): siRNA sense strand
gcaaucugcuguccuuccu

SEQ ID NO: 691790 - RNA, 19 nt, Homo sapiens
  misc_RNA (1)...(19): siRNA sense strand
cgucugcucucugcuugaa

SEQ ID NO: 691791 - RNA, 19 nt, Homo sapiens
  misc_RNA (1)...(19): siRNA sense strand
gaaggccgacaaauacuac

SEQ ID NO: 691792 - RNA, 19 nt, Homo sapiens
  misc_RNA (1)...(19): siRNA sense strand
auacagcuauucacaucau

SEQ ID NO: 691793 - RNA, 19 nt, Homo sapiens
  misc_RNA (1)...(19): siRNA sense strand
gcugaauguuuuccuguuu

SEQ ID NO: 691794 - RNA, 19 nt, Homo sapiens
  misc_RNA (1)...(19): siRNA sense strand
ucuccagccuaucucauga

SEQ ID NO: 691795 - RNA, 19 nt, Homo sapiens
  misc_RNA (1)...(19): siRNA sense strand
guuuaacuuugacugcuau

SEQ ID NO: 691796 - RNA, 19 nt, Homo sapiens
  misc_RNA (1)...(19): siRNA sense strand
uccauucucuccagccuau

SEQ ID NO: 691797 - RNA, 19 nt, Homo sapiens
  misc_RNA (1)...(19): siRNA sense strand
agaaggccgacaaauacua

SEQ ID NO: 691798 - RNA, 19 nt, Homo sapiens
  misc_RNA (1)...(19): siRNA sense strand
uguuuaacuuugacugcua

SEQ ID NO: 691799 - RNA, 19 nt, Homo sapiens
  misc_RNA (1)...(19): siRNA sense strand
gaagccgacaggccacaga

SEQ ID NO: 691800 - RNA, 19 nt, Homo sapiens
  misc_RNA (1)...(19): siRNA sense strand
gucgcaaucugcuguccuu

SEQ ID NO: 691801 - RNA, 19 nt, Homo sapiens
  misc_RNA (1)...(19): siRNA sense strand
augccuuccugaaauauga

SEQ ID NO: 691802 - RNA, 19 nt, Homo sapiens
  misc_RNA (1)...(19): siRNA sense strand
acaaauacuacuacacaag

SEQ ID NO: 691803 - RNA, 19 nt, Homo sapiens
  misc_RNA (1)...(19): siRNA sense strand
gagaaggccgacaaauacu

SEQ ID NO: 691804 - RNA, 19 nt, Homo sapiens
  misc_RNA (1)...(19): siRNA sense strand
gaggggcaccugcucauuu

SEQ ID NO: 691805 - RNA, 19 nt, Homo sapiens
  misc_RNA (1)...(19): siRNA sense strand
aauaugagaaggccgacaa

SEQ ID NO: 691806 - RNA, 19 nt, Homo sapiens
  misc_RNA (1)...(19): siRNA sense strand
gccgacaaauacuacuaca

SEQ ID NO: 691807 - RNA, 19 nt, Homo sapiens
  misc_RNA (1)...(19): siRNA sense strand
aagcugguggccuauauga

SEQ ID NO: 691808 - RNA, 19 nt, Homo sapiens
  misc_RNA (1)...(19): siRNA sense strand
gcacaccuguuuaacuuug

SEQ ID NO: 691809 - RNA, 19 nt, Homo sapiens
  misc_RNA (1)...(19): siRNA sense strand
gaaagcaauuggaucacaa

SEQ ID NO: 691810 - RNA, 19 nt, Homo sapiens
  misc_RNA (1)...(19): siRNA sense strand
caaauacuacuacacaaga

SEQ ID NO: 691811 - RNA, 19 nt, Homo sapiens
  misc_RNA (1)...(19): siRNA sense strand
cgacaaauacuacuacaca

SEQ ID NO: 691812 - RNA, 19 nt, Homo sapiens
  misc_RNA (1)...(19): siRNA sense strand
gacaaauacuacuacacaa

SEQ ID NO: 691813 - RNA, 19 nt, Homo sapiens
  misc_RNA (1)...(19): siRNA sense strand
gcucucugcuugaauuuua

SEQ ID NO: 691814 - RNA, 19 nt, Homo sapiens
  misc_RNA (1)...(19): siRNA sense strand
caucauugcacaccuguuu

SEQ ID NO: 691815 - RNA, 19 nt, Homo sapiens
  misc_RNA (1)...(19): siRNA sense strand
guggaugccuuccugaaau

SEQ ID NO: 691816 - RNA, 19 nt, Homo sapiens
  misc_RNA (1)...(19): siRNA sense strand
uggaugccuuccugaaaua

SEQ ID NO: 691817 - RNA, 19 nt, Homo sapiens
  misc_RNA (1)...(19): siRNA sense strand
ugagaaggccgacaaauac

SEQ ID NO: 691818 - RNA, 19 nt, Homo sapiens
  misc_RNA (1)...(19): siRNA sense strand
ugagaaagcaauuggauca

SEQ ID NO: 691819 - RNA, 19 nt, Homo sapiens
  misc_RNA (1)...(19): siRNA sense strand
uugcacaccuguuuaacuu

SEQ ID NO: 691820 - RNA, 19 nt, Homo sapiens
  misc_RNA (1)...(19): siRNA sense strand
gguuagggcugaauguuuu

SEQ ID NO: 691821 - RNA, 19 nt, Homo sapiens
  misc_RNA (1)...(19): siRNA sense strand
acauacagcuauucacauc

SEQ ID NO: 691822 - RNA, 19 nt, Homo sapiens
  misc_RNA (1)...(19): siRNA sense strand
augagaaggccgacaaaua

SEQ ID NO: 691823 - RNA, 19 nt, Homo sapiens
  misc_RNA (1)...(19): siRNA sense strand
acaagcugguggccuauau

SEQ ID NO: 691824 - RNA, 19 nt, Homo sapiens
  misc_RNA (1)...(19): siRNA sense strand
guuucugguuguuugguua

SEQ ID NO: 691825 - RNA, 19 nt, Homo sapiens
  misc_RNA (1)...(19): siRNA sense strand
gcacacugagaaagcaauu

SEQ ID NO: 691826 - RNA, 19 nt, Homo sapiens
  misc_RNA (1)...(19): siRNA sense strand
gauccugcuuccugugugu

SEQ ID NO: 691827 - RNA, 19 nt, Homo sapiens
  misc_RNA (1)...(19): siRNA sense strand
gcugguggccuauaugauc

SEQ ID NO: 691828 - RNA, 19 nt, Homo sapiens
  misc_RNA (1)...(19): siRNA sense strand
agaaagcaauuggaucaca

SEQ ID NO: 691829 - RNA, 19 nt, Homo sapiens
  misc_RNA (1)...(19): siRNA sense strand
cuacauacagcuauucaca

SEQ ID NO: 691830 - RNA, 19 nt, Homo sapiens
  misc_RNA (1)...(19): siRNA sense strand
ucugcucucugcuugaauu

SEQ ID NO: 691831 - RNA, 19 nt, Homo sapiens
  misc_RNA (1)...(19): siRNA sense strand
ucauugcacaccuguuuaa

SEQ ID NO: 691832 - RNA, 19 nt, Homo sapiens
  misc_RNA (1)...(19): siRNA sense strand
caaccucaccuuccacaag

SEQ ID NO: 691833 - RNA, 19 nt, Homo sapiens
  misc_RNA (1)...(19): siRNA sense strand
gcaaucugcuguccuuccu

SEQ ID NO: 691834 - RNA, 19 nt, Homo sapiens
  misc_RNA (1)...(19): siRNA sense strand
cgucugcucucugcuugaa

SEQ ID NO: 691835 - RNA, 19 nt, Homo sapiens
  misc_RNA (1)...(19): siRNA sense strand
gaaggccgacaaauacuac

SEQ ID NO: 691836 - RNA, 19 nt, Homo sapiens
  misc_RNA (1)...(19): siRNA sense strand
auacagcuauucacaucau

SEQ ID NO: 691837 - RNA, 19 nt, Homo sapiens
  misc_RNA (1)...(19): siRNA sense strand
gcugaauguuuuccuguuu

SEQ ID NO: 691838 - RNA, 19 nt, Homo sapiens
  misc_RNA (1)...(19): siRNA sense strand
ucuccagccuaucucauga

SEQ ID NO: 691839 - RNA, 19 nt, Homo sapiens
  misc_RNA (1)...(19): siRNA sense strand
guuuaacuuugacugcuau

SEQ ID NO: 691840 - RNA, 19 nt, Homo sapiens
  misc_RNA (1)...(19): siRNA sense strand
uccauucucuccagccuau

SEQ ID NO: 691841 - RNA, 19 nt, Homo sapiens
  misc_RNA (1)...(19): siRNA sense strand
agaaggccgacaaauacua

SEQ ID NO: 691842 - RNA, 19 nt, Homo sapiens
  misc_RNA (1)...(19): siRNA sense strand
uguuuaacuuugacugcua

SEQ ID NO: 691843 - RNA, 19 nt, Homo sapiens
  misc_RNA (1)...(19): siRNA sense strand
gaagccgacaggccacaga

SEQ ID NO: 691844 - RNA, 19 nt, Homo sapiens
  misc_RNA (1)...(19): siRNA sense strand
gucgcaaucugcuguccuu

SEQ ID NO: 691845 - RNA, 19 nt, Homo sapiens
  misc_RNA (1)...(19): siRNA sense strand
augccuuccugaaauauga

SEQ ID NO: 691846 - RNA, 19 nt, Homo sapiens
  misc_RNA (1)...(19): siRNA sense strand
acaaauacuacuacacaag

SEQ ID NO: 691847 - RNA, 19 nt, Homo sapiens
  misc_RNA (1)...(19): siRNA sense strand
gagaaggccgacaaauacu

SEQ ID NO: 691848 - RNA, 19 nt, Homo sapiens
  misc_RNA (1)...(19): siRNA sense strand
gaggggcaccugcucauuu

SEQ ID NO: 691849 - RNA, 19 nt, Homo sapiens
  misc_RNA (1)...(19): siRNA sense strand
aauaugagaaggccgacaa

SEQ ID NO: 691850 - RNA, 19 nt, Homo sapiens
  misc_RNA (1)...(19): siRNA sense strand
gccgacaaauacuacuaca

SEQ ID NO: 691851 - RNA, 19 nt, Homo sapiens
  misc_RNA (1)...(19): siRNA sense strand
aagcugguggccuauauga

SEQ ID NO: 691852 - RNA, 19 nt, Homo sapiens
  misc_RNA (1)...(19): siRNA sense strand
ucagagcucucaucgcuua

SEQ ID NO: 691853 - RNA, 19 nt, Homo sapiens
  misc_RNA (1)...(19): siRNA sense strand
ggaaguaaauauccgguau

SEQ ID NO: 691854 - RNA, 19 nt, Homo sapiens
  misc_RNA (1)...(19): siRNA sense strand
guagauauguguugagugu

SEQ ID NO: 691855 - RNA, 19 nt, Homo sapiens
  misc_RNA (1)...(19): siRNA sense strand
gcaaagacagaguuuaauu

SEQ ID NO: 691856 - RNA, 19 nt, Homo sapiens
  misc_RNA (1)...(19): siRNA sense strand
gaauccaccucgaagaauu

SEQ ID NO: 691857 - RNA, 19 nt, Homo sapiens
  misc_RNA (1)...(19): siRNA sense strand
ggcauugacuuagaaauuu

SEQ ID NO: 691858 - RNA, 19 nt, Homo sapiens
  misc_RNA (1)...(19): siRNA sense strand
ggaaaguccugauggaagu

SEQ ID NO: 691859 - RNA, 19 nt, Homo sapiens
  misc_RNA (1)...(19): siRNA sense strand
gaggauuauuucaacguua

SEQ ID NO: 691860 - RNA, 19 nt, Homo sapiens
  misc_RNA (1)...(19): siRNA sense strand
gaaguuccuuucaaauuag

SEQ ID NO: 691861 - RNA, 19 nt, Homo sapiens
  misc_RNA (1)...(19): siRNA sense strand
gaagagacaaguagauaug

SEQ ID NO: 691862 - RNA, 19 nt, Homo sapiens
  misc_RNA (1)...(19): siRNA sense strand
ggacuuugcccuauuccua

SEQ ID NO: 691863 - RNA, 19 nt, Homo sapiens
  misc_RNA (1)...(19): siRNA sense strand
ugauaaugcucccguguuu

SEQ ID NO: 691864 - RNA, 19 nt, Homo sapiens
  misc_RNA (1)...(19): siRNA sense strand
ccaccucgaagaauuauua

SEQ ID NO: 691865 - RNA, 19 nt, Homo sapiens
  misc_RNA (1)...(19): siRNA sense strand
gcauugacuuagaaauuug

SEQ ID NO: 691866 - RNA, 19 nt, Homo sapiens
  misc_RNA (1)...(19): siRNA sense strand
gagaagauuugcggaagga

SEQ ID NO: 691867 - RNA, 19 nt, Homo sapiens
  misc_RNA (1)...(19): siRNA sense strand
caacgacaaugcaccuguu

SEQ ID NO: 691868 - RNA, 19 nt, Homo sapiens
  misc_RNA (1)...(19): siRNA sense strand
cagagaagccgaaaugaug

SEQ ID NO: 691869 - RNA, 19 nt, Homo sapiens
  misc_RNA (1)...(19): siRNA sense strand
gaagaaguuccuuucaaau

SEQ ID NO: 691870 - RNA, 19 nt, Homo sapiens
  misc_RNA (1)...(19): siRNA sense strand
ccacgugguuguuguaauc

SEQ ID NO: 691871 - RNA, 19 nt, Homo sapiens
  misc_RNA (1)...(19): siRNA sense strand
guaccagccucuucaaucu

SEQ ID NO: 691872 - RNA, 19 nt, Homo sapiens
  misc_RNA (1)...(19): siRNA sense strand
caggagguauacaggguua

SEQ ID NO: 691873 - RNA, 19 nt, Homo sapiens
  misc_RNA (1)...(19): siRNA sense strand
caccuaaucuucgcggaua

SEQ ID NO: 691874 - RNA, 19 nt, Homo sapiens
  misc_RNA (1)...(19): siRNA sense strand
gaagauuugcggaaggaaa

SEQ ID NO: 691875 - RNA, 19 nt, Homo sapiens
  misc_RNA (1)...(19): siRNA sense strand
acugagggcugcuuucaaa

SEQ ID NO: 691876 - RNA, 19 nt, Homo sapiens
  misc_RNA (1)...(19): siRNA sense strand
gaacaucagagcucucauc

SEQ ID NO: 691877 - RNA, 19 nt, Homo sapiens
  misc_RNA (1)...(19): siRNA sense strand
uaggauagaucgagagaag

SEQ ID NO: 691878 - RNA, 19 nt, Homo sapiens
  misc_RNA (1)...(19): siRNA sense strand
caaagacagaguuuaauuc

SEQ ID NO: 691879 - RNA, 19 nt, Homo sapiens
  misc_RNA (1)...(19): siRNA sense strand
gcuccgcccucuucgauau

SEQ ID NO: 691880 - RNA, 19 nt, Homo sapiens
  misc_RNA (1)...(19): siRNA sense strand
gcacaucuccgacaucaac

SEQ ID NO: 691881 - RNA, 19 nt, Homo sapiens
  misc_RNA (1)...(19): siRNA sense strand
uuacggaugccaaugauaa

SEQ ID NO: 691882 - RNA, 19 nt, Homo sapiens
  misc_RNA (1)...(19): siRNA sense strand
caaaaggcauugacuuaga

SEQ ID NO: 691883 - RNA, 19 nt, Homo sapiens
  misc_RNA (1)...(19): siRNA sense strand
acaaguagauauguguuga

SEQ ID NO: 691884 - RNA, 19 nt, Homo sapiens
  misc_RNA (1)...(19): siRNA sense strand
gauaaugcucccguguuua

SEQ ID NO: 691885 - RNA, 19 nt, Homo sapiens
  misc_RNA (1)...(19): siRNA sense strand
cuacaacgucacaaucaua

SEQ ID NO: 691886 - RNA, 19 nt, Homo sapiens
  misc_RNA (1)...(19): siRNA sense strand
guaaaauucucucuggauu

SEQ ID NO: 691887 - RNA, 19 nt, Homo sapiens
  misc_RNA (1)...(19): siRNA sense strand
aaucaauacuucucucugu

SEQ ID NO: 691888 - RNA, 19 nt, Homo sapiens
  misc_RNA (1)...(19): siRNA sense strand
uagaaauuguugacgagaa

SEQ ID NO: 691889 - RNA, 19 nt, Homo sapiens
  misc_RNA (1)...(19): siRNA sense strand
cgcgggagcuguuguccua

SEQ ID NO: 691890 - RNA, 19 nt, Homo sapiens
  misc_RNA (1)...(19): siRNA sense strand
gacaugcuauacucaggaa

SEQ ID NO: 691891 - RNA, 19 nt, Homo sapiens
  misc_RNA (1)...(19): siRNA sense strand
ggagagcggggauuuguua

SEQ ID NO: 691892 - RNA, 19 nt, Homo sapiens
  misc_RNA (1)...(19): siRNA sense strand
cugcaaagacagaguuuaa

SEQ ID NO: 691893 - RNA, 19 nt, Homo sapiens
  misc_RNA (1)...(19): siRNA sense strand
agaaauuguugacgagaau

SEQ ID NO: 691894 - RNA, 19 nt, Homo sapiens
  misc_RNA (1)...(19): siRNA sense strand
ggauagaucgagagaagau

SEQ ID NO: 691895 - RNA, 19 nt, Homo sapiens
  misc_RNA (1)...(19): siRNA sense strand
gcagauccgauacacgauu

SEQ ID NO: 691896 - RNA, 19 nt, Homo sapiens
  misc_RNA (1)...(19): siRNA sense strand
cucaggaucugcuguguga

SEQ ID NO: 691897 - RNA, 19 nt, Homo sapiens
  misc_RNA (1)...(19): siRNA sense strand
gcagacagcagacuacaac

SEQ ID NO: 691898 - RNA, 19 nt, Homo sapiens
  misc_RNA (1)...(19): siRNA sense strand
guccuucucuaaccagauu

SEQ ID NO: 691899 - RNA, 19 nt, Homo sapiens
  misc_RNA (1)...(19): siRNA sense strand
uguaauagcccucauaaaa

SEQ ID NO: 691900 - RNA, 19 nt, Homo sapiens
  misc_RNA (1)...(19): siRNA sense strand
gaaguuauacaccaucaac

SEQ ID NO: 691901 - RNA, 19 nt, Homo sapiens
  misc_RNA (1)...(19): siRNA sense strand
gugcagaggauuauuucaa

SEQ ID NO: 691902 - RNA, 19 nt, Homo sapiens
  misc_RNA (1)...(19): siRNA sense strand
gaaaguccugauggaagua

SEQ ID NO: 691903 - RNA, 19 nt, Homo sapiens
  misc_RNA (1)...(19): siRNA sense strand
gcaccacguuucguugcaa

SEQ ID NO: 691904 - RNA, 19 nt, Homo sapiens
  misc_RNA (1)...(19): siRNA sense strand
ccuccagccucgacacuga

SEQ ID NO: 691905 - RNA, 19 nt, Homo sapiens
  misc_RNA (1)...(19): siRNA sense strand
ccucgaagaauuauuacaa

SEQ ID NO: 691906 - RNA, 19 nt, Homo sapiens
  misc_RNA (1)...(19): siRNA sense strand
uagaauccaccucgaagaa

SEQ ID NO: 691907 - RNA, 19 nt, Homo sapiens
  misc_RNA (1)...(19): siRNA sense strand
gaguuacggaugccaauga

SEQ ID NO: 691908 - RNA, 19 nt, Homo sapiens
  misc_RNA (1)...(19): siRNA sense strand
gagcucucaucgcuuaauc

SEQ ID NO: 691909 - RNA, 19 nt, Homo sapiens
  misc_RNA (1)...(19): siRNA sense strand
guuagugaacgguaggaua

SEQ ID NO: 691910 - RNA, 19 nt, Homo sapiens
  misc_RNA (1)...(19): siRNA sense strand
gguuguaugugccaguaau

SEQ ID NO: 691911 - RNA, 19 nt, Homo sapiens
  misc_RNA (1)...(19): siRNA sense strand
gacaaggauucugggcaaa

SEQ ID NO: 691912 - RNA, 19 nt, Homo sapiens
  misc_RNA (1)...(19): siRNA sense strand
gaaaagucagguacuguuu

SEQ ID NO: 691913 - RNA, 19 nt, Homo sapiens
  misc_RNA (1)...(19): siRNA sense strand
cuuagaaauuugugaguca

SEQ ID NO: 691914 - RNA, 19 nt, Homo sapiens
  misc_RNA (1)...(19): siRNA sense strand
ugaugauccuucuaugguu

SEQ ID NO: 691915 - RNA, 19 nt, Homo sapiens
  misc_RNA (1)...(19): siRNA sense strand
ccagagaagccgaaaugau

SEQ ID NO: 691916 - RNA, 19 nt, Homo sapiens
  misc_RNA (1)...(19): siRNA sense strand
gaacuguaauagcccucau

SEQ ID NO: 691917 - RNA, 19 nt, Homo sapiens
  misc_RNA (1)...(19): siRNA sense strand
gagacaaguagauaugugu

SEQ ID NO: 691918 - RNA, 19 nt, Homo sapiens
  misc_RNA (1)...(19): siRNA sense strand
caauacuucucucugucaa

SEQ ID NO: 691919 - RNA, 19 nt, Homo sapiens
  misc_RNA (1)...(19): siRNA sense strand
ggauucugcucaagaugca

SEQ ID NO: 691920 - RNA, 19 nt, Homo sapiens
  misc_RNA (1)...(19): siRNA sense strand
aggguuagccuccaagaaa

SEQ ID NO: 691921 - RNA, 19 nt, Homo sapiens
  misc_RNA (1)...(19): siRNA sense strand
cagauccgauacacgauuc

SEQ ID NO: 691922 - RNA, 19 nt, Homo sapiens
  misc_RNA (1)...(19): siRNA sense strand
ccuaugccuuccucaauuc

SEQ ID NO: 691923 - RNA, 19 nt, Homo sapiens
  misc_RNA (1)...(19): siRNA sense strand
ucuucaaucucaauccaaa

SEQ ID NO: 691924 - RNA, 19 nt, Homo sapiens
  misc_RNA (1)...(19): siRNA sense strand
gcuuaugacccuucuuugu

SEQ ID NO: 691925 - RNA, 19 nt, Homo sapiens
  misc_RNA (1)...(19): siRNA sense strand
gagaagccgaaaugaugaa

SEQ ID NO: 691926 - RNA, 19 nt, Homo sapiens
  misc_RNA (1)...(19): siRNA sense strand
ugaagagacaaguagauau

SEQ ID NO: 691927 - RNA, 19 nt, Homo sapiens
  misc_RNA (1)...(19): siRNA sense strand
ucaagaugcagauguggaa

SEQ ID NO: 691928 - RNA, 19 nt, Homo sapiens
  misc_RNA (1)...(19): siRNA sense strand
ggauagccugcaagaggua

SEQ ID NO: 691929 - RNA, 19 nt, Homo sapiens
  misc_RNA (1)...(19): siRNA sense strand
ccacgugucugagaacaac

SEQ ID NO: 691930 - RNA, 19 nt, Homo sapiens
  misc_RNA (1)...(19): siRNA sense strand
gacuacaacgucacaauca

SEQ ID NO: 691931 - RNA, 19 nt, Homo sapiens
  misc_RNA (1)...(19): siRNA sense strand
uaauagcccucauaaaagu

SEQ ID NO: 691932 - RNA, 19 nt, Homo sapiens
  misc_RNA (1)...(19): siRNA sense strand
ggauggaggaguacacaca

SEQ ID NO: 691933 - RNA, 19 nt, Homo sapiens
  misc_RNA (1)...(19): siRNA sense strand
guuguuguaauccaagaua

SEQ ID NO: 691934 - RNA, 19 nt, Homo sapiens
  misc_RNA (1)...(19): siRNA sense strand
acucuauucuggccaguga

SEQ ID NO: 691935 - RNA, 19 nt, Homo sapiens
  misc_RNA (1)...(19): siRNA sense strand
aaucauagccaccgacaag

SEQ ID NO: 691936 - RNA, 19 nt, Homo sapiens
  misc_RNA (1)...(19): siRNA sense strand
gacaaguagauauguguug

SEQ ID NO: 691937 - RNA, 19 nt, Homo sapiens
  misc_RNA (1)...(19): siRNA sense strand
agaggauuauuucaacguu

SEQ ID NO: 691938 - RNA, 19 nt, Homo sapiens
  misc_RNA (1)...(19): siRNA sense strand
agagacaaguagauaugug

SEQ ID NO: 691939 - RNA, 19 nt, Homo sapiens
  misc_RNA (1)...(19): siRNA sense strand
cauaucuggauccgaguua

SEQ ID NO: 691940 - RNA, 19 nt, Homo sapiens
  misc_RNA (1)...(19): siRNA sense strand
cuaagcggcaccacccaua

SEQ ID NO: 691941 - RNA, 19 nt, Homo sapiens
  misc_RNA (1)...(19): siRNA sense strand
guggaaggcaauucacuga

SEQ ID NO: 691942 - RNA, 19 nt, Homo sapiens
  misc_RNA (1)...(19): siRNA sense strand
aggcauugacuuagaaauu

SEQ ID NO: 691943 - RNA, 19 nt, Homo sapiens
  misc_RNA (1)...(19): siRNA sense strand
gcaccacccauaucuggau

SEQ ID NO: 691944 - RNA, 19 nt, Homo sapiens
  misc_RNA (1)...(19): siRNA sense strand
uguauugccucucauucug

SEQ ID NO: 691945 - RNA, 19 nt, Homo sapiens
  misc_RNA (1)...(19): siRNA sense strand
gggagcagacagcagacua

SEQ ID NO: 691946 - RNA, 19 nt, Homo sapiens
  misc_RNA (1)...(19): siRNA sense strand
aauccaccucgaagaauua

SEQ ID NO: 691947 - RNA, 19 nt, Homo sapiens
  misc_RNA (1)...(19): siRNA sense strand
uaaccagauuccagaggau

SEQ ID NO: 691948 - RNA, 19 nt, Homo sapiens
  misc_RNA (1)...(19): siRNA sense strand
augcagagaucaccuaugc

SEQ ID NO: 691949 - RNA, 19 nt, Homo sapiens
  misc_RNA (1)...(19): siRNA sense strand
uuagugcagaggauuauuu

SEQ ID NO: 691950 - RNA, 19 nt, Homo sapiens
  misc_RNA (1)...(19): siRNA sense strand
gugaugauccuucuauggu

SEQ ID NO: 691951 - RNA, 19 nt, Homo sapiens
  misc_RNA (1)...(19): siRNA sense strand
cgacaucaacgacaaugca

SEQ ID NO: 691952 - RNA, 19 nt, Homo sapiens
  misc_RNA (1)...(19): siRNA sense strand
ucagagcucucaucgcuua

SEQ ID NO: 691953 - RNA, 19 nt, Homo sapiens
  misc_RNA (1)...(19): siRNA sense strand
ggaaguaaauauccgguau

SEQ ID NO: 691954 - RNA, 19 nt, Homo sapiens
  misc_RNA (1)...(19): siRNA sense strand
guagauauguguugagugu

SEQ ID NO: 691955 - RNA, 19 nt, Homo sapiens
  misc_RNA (1)...(19): siRNA sense strand
gcaaagacagaguuuaauu

SEQ ID NO: 691956 - RNA, 19 nt, Homo sapiens
  misc_RNA (1)...(19): siRNA sense strand
gaauccaccucgaagaauu

SEQ ID NO: 691957 - RNA, 19 nt, Homo sapiens
  misc_RNA (1)...(19): siRNA sense strand
ggcauugacuuagaaauuu

SEQ ID NO: 691958 - RNA, 19 nt, Homo sapiens
  misc_RNA (1)...(19): siRNA sense strand
ggaaaguccugauggaagu

SEQ ID NO: 691959 - RNA, 19 nt, Homo sapiens
  misc_RNA (1)...(19): siRNA sense strand
gaggauuauuucaacguua

SEQ ID NO: 691960 - RNA, 19 nt, Homo sapiens
  misc_RNA (1)...(19): siRNA sense strand
gaaguuccuuucaaauuag

SEQ ID NO: 691961 - RNA, 19 nt, Homo sapiens
  misc_RNA (1)...(19): siRNA sense strand
gaagagacaaguagauaug

SEQ ID NO: 691962 - RNA, 19 nt, Homo sapiens
  misc_RNA (1)...(19): siRNA sense strand
ggacuuugcccuauuccua

SEQ ID NO: 691963 - RNA, 19 nt, Homo sapiens
  misc_RNA (1)...(19): siRNA sense strand
ugauaaugcucccguguuu

SEQ ID NO: 691964 - RNA, 19 nt, Homo sapiens
  misc_RNA (1)...(19): siRNA sense strand
ccaccucgaagaauuauua

SEQ ID NO: 691965 - RNA, 19 nt, Homo sapiens
  misc_RNA (1)...(19): siRNA sense strand
gcauugacuuagaaauuug

SEQ ID NO: 691966 - RNA, 19 nt, Homo sapiens
  misc_RNA (1)...(19): siRNA sense strand
gagaagauuugcggaagga

SEQ ID NO: 691967 - RNA, 19 nt, Homo sapiens
  misc_RNA (1)...(19): siRNA sense strand
caacgacaaugcaccuguu

SEQ ID NO: 691968 - RNA, 19 nt, Homo sapiens
  misc_RNA (1)...(19): siRNA sense strand
cagagaagccgaaaugaug

SEQ ID NO: 691969 - RNA, 19 nt, Homo sapiens
  misc_RNA (1)...(19): siRNA sense strand
gaagaaguuccuuucaaau

SEQ ID NO: 691970 - RNA, 19 nt, Homo sapiens
  misc_RNA (1)...(19): siRNA sense strand
ccacgugguuguuguaauc

SEQ ID NO: 691971 - RNA, 19 nt, Homo sapiens
  misc_RNA (1)...(19): siRNA sense strand
guaccagccucuucaaucu

SEQ ID NO: 691972 - RNA, 19 nt, Homo sapiens
  misc_RNA (1)...(19): siRNA sense strand
caggagguauacaggguua

SEQ ID NO: 691973 - RNA, 19 nt, Homo sapiens
  misc_RNA (1)...(19): siRNA sense strand
caccuaaucuucgcggaua

SEQ ID NO: 691974 - RNA, 19 nt, Homo sapiens
  misc_RNA (1)...(19): siRNA sense strand
gaagauuugcggaaggaaa

SEQ ID NO: 691975 - RNA, 19 nt, Homo sapiens
  misc_RNA (1)...(19): siRNA sense strand
acugagggcugcuuucaaa

SEQ ID NO: 691976 - RNA, 19 nt, Homo sapiens
  misc_RNA (1)...(19): siRNA sense strand
gaacaucagagcucucauc

SEQ ID NO: 691977 - RNA, 19 nt, Homo sapiens
  misc_RNA (1)...(19): siRNA sense strand
uaggauagaucgagagaag

SEQ ID NO: 691978 - RNA, 19 nt, Homo sapiens
  misc_RNA (1)...(19): siRNA sense strand
caaagacagaguuuaauuc

SEQ ID NO: 691979 - RNA, 19 nt, Homo sapiens
  misc_RNA (1)...(19): siRNA sense strand
gcuccgcccucuucgauau

SEQ ID NO: 691980 - RNA, 19 nt, Homo sapiens
  misc_RNA (1)...(19): siRNA sense strand
gcacaucuccgacaucaac

SEQ ID NO: 691981 - RNA, 19 nt, Homo sapiens
  misc_RNA (1)...(19): siRNA sense strand
uuacggaugccaaugauaa

SEQ ID NO: 691982 - RNA, 19 nt, Homo sapiens
  misc_RNA (1)...(19): siRNA sense strand
caaaaggcauugacuuaga

SEQ ID NO: 691983 - RNA, 19 nt, Homo sapiens
  misc_RNA (1)...(19): siRNA sense strand
acaaguagauauguguuga

SEQ ID NO: 691984 - RNA, 19 nt, Homo sapiens
  misc_RNA (1)...(19): siRNA sense strand
gauaaugcucccguguuua

SEQ ID NO: 691985 - RNA, 19 nt, Homo sapiens
  misc_RNA (1)...(19): siRNA sense strand
cuacaacgucacaaucaua

SEQ ID NO: 691986 - RNA, 19 nt, Homo sapiens
  misc_RNA (1)...(19): siRNA sense strand
guaaaauucucucuggauu

SEQ ID NO: 691987 - RNA, 19 nt, Homo sapiens
  misc_RNA (1)...(19): siRNA sense strand
aaucaauacuucucucugu

SEQ ID NO: 691988 - RNA, 19 nt, Homo sapiens
  misc_RNA (1)...(19): siRNA sense strand
uagaaauuguugacgagaa

SEQ ID NO: 691989 - RNA, 19 nt, Homo sapiens
  misc_RNA (1)...(19): siRNA sense strand
cgcgggagcuguuguccua

SEQ ID NO: 691990 - RNA, 19 nt, Homo sapiens
  misc_RNA (1)...(19): siRNA sense strand
gacaugcuauacucaggaa

SEQ ID NO: 691991 - RNA, 19 nt, Homo sapiens
  misc_RNA (1)...(19): siRNA sense strand
ggagagcggggauuuguua

SEQ ID NO: 691992 - RNA, 19 nt, Homo sapiens
  misc_RNA (1)...(19): siRNA sense strand
cugcaaagacagaguuuaa

SEQ ID NO: 691993 - RNA, 19 nt, Homo sapiens
  misc_RNA (1)...(19): siRNA sense strand
agaaauuguugacgagaau

SEQ ID NO: 691994 - RNA, 19 nt, Homo sapiens
  misc_RNA (1)...(19): siRNA sense strand
ggauagaucgagagaagau

SEQ ID NO: 691995 - RNA, 19 nt, Homo sapiens
  misc_RNA (1)...(19): siRNA sense strand
gcagauccgauacacgauu

SEQ ID NO: 691996 - RNA, 19 nt, Homo sapiens
  misc_RNA (1)...(19): siRNA sense strand
cucaggaucugcuguguga

SEQ ID NO: 691997 - RNA, 19 nt, Homo sapiens
  misc_RNA (1)...(19): siRNA sense strand
gcagacagcagacuacaac

SEQ ID NO: 691998 - RNA, 19 nt, Homo sapiens
  misc_RNA (1)...(19): siRNA sense strand
guccuucucuaaccagauu

SEQ ID NO: 691999 - RNA, 19 nt, Homo sapiens
  misc_RNA (1)...(19): siRNA sense strand
uguaauagcccucauaaaa

SEQ ID NO: 692000 - RNA, 19 nt, Homo sapiens
  misc_RNA (1)...(19): siRNA sense strand
gaaguuauacaccaucaac

SEQ ID NO: 692001 - RNA, 19 nt, Homo sapiens
  misc_RNA (1)...(19): siRNA sense strand
gugcagaggauuauuucaa

SEQ ID NO: 692002 - RNA, 19 nt, Homo sapiens
  misc_RNA (1)...(19): siRNA sense strand
gaaaguccugauggaagua

SEQ ID NO: 692003 - RNA, 19 nt, Homo sapiens
  misc_RNA (1)...(19): siRNA sense strand
gcaccacguuucguugcaa

SEQ ID NO: 692004 - RNA, 19 nt, Homo sapiens
  misc_RNA (1)...(19): siRNA sense strand
ccuccagccucgacacuga

SEQ ID NO: 692005 - RNA, 19 nt, Homo sapiens
  misc_RNA (1)...(19): siRNA sense strand
ccucgaagaauuauuacaa

SEQ ID NO: 692006 - RNA, 19 nt, Homo sapiens
  misc_RNA (1)...(19): siRNA sense strand
uagaauccaccucgaagaa

SEQ ID NO: 692007 - RNA, 19 nt, Homo sapiens
  misc_RNA (1)...(19): siRNA sense strand
gaguuacggaugccaauga

SEQ ID NO: 692008 - RNA, 19 nt, Homo sapiens
  misc_RNA (1)...(19): siRNA sense strand
gagcucucaucgcuuaauc

SEQ ID NO: 692009 - RNA, 19 nt, Homo sapiens
  misc_RNA (1)...(19): siRNA sense strand
guuagugaacgguaggaua

SEQ ID NO: 692010 - RNA, 19 nt, Homo sapiens
  misc_RNA (1)...(19): siRNA sense strand
gguuguaugugccaguaau

SEQ ID NO: 692011 - RNA, 19 nt, Homo sapiens
  misc_RNA (1)...(19): siRNA sense strand
gacaaggauucugggcaaa

SEQ ID NO: 692012 - RNA, 19 nt, Homo sapiens
  misc_RNA (1)...(19): siRNA sense strand
gaaaagucagguacuguuu

SEQ ID NO: 692013 - RNA, 19 nt, Homo sapiens
  misc_RNA (1)...(19): siRNA sense strand
cuuagaaauuugugaguca

SEQ ID NO: 692014 - RNA, 19 nt, Homo sapiens
  misc_RNA (1)...(19): siRNA sense strand
ugaugauccuucuaugguu

SEQ ID NO: 692015 - RNA, 19 nt, Homo sapiens
  misc_RNA (1)...(19): siRNA sense strand
ccagagaagccgaaaugau

SEQ ID NO: 692016 - RNA, 19 nt, Homo sapiens
  misc_RNA (1)...(19): siRNA sense strand
gaacuguaauagcccucau

SEQ ID NO: 692017 - RNA, 19 nt, Homo sapiens
  misc_RNA (1)...(19): siRNA sense strand
gagacaaguagauaugugu

SEQ ID NO: 692018 - RNA, 19 nt, Homo sapiens
  misc_RNA (1)...(19): siRNA sense strand
caauacuucucucugucaa

SEQ ID NO: 692019 - RNA, 19 nt, Homo sapiens
  misc_RNA (1)...(19): siRNA sense strand
ggauucugcucaagaugca

SEQ ID NO: 692020 - RNA, 19 nt, Homo sapiens
  misc_RNA (1)...(19): siRNA sense strand
aggguuagccuccaagaaa

SEQ ID NO: 692021 - RNA, 19 nt, Homo sapiens
  misc_RNA (1)...(19): siRNA sense strand
cagauccgauacacgauuc

SEQ ID NO: 692022 - RNA, 19 nt, Homo sapiens
  misc_RNA (1)...(19): siRNA sense strand
ccuaugccuuccucaauuc

SEQ ID NO: 692023 - RNA, 19 nt, Homo sapiens
  misc_RNA (1)...(19): siRNA sense strand
ucuucaaucucaauccaaa

SEQ ID NO: 692024 - RNA, 19 nt, Homo sapiens
  misc_RNA (1)...(19): siRNA sense strand
gcuuaugacccuucuuugu

SEQ ID NO: 692025 - RNA, 19 nt, Homo sapiens
  misc_RNA (1)...(19): siRNA sense strand
gagaagccgaaaugaugaa

SEQ ID NO: 692026 - RNA, 19 nt, Homo sapiens
  misc_RNA (1)...(19): siRNA sense strand
ugaagagacaaguagauau

SEQ ID NO: 692027 - RNA, 19 nt, Homo sapiens
  misc_RNA (1)...(19): siRNA sense strand
ucaagaugcagauguggaa

SEQ ID NO: 692028 - RNA, 19 nt, Homo sapiens
  misc_RNA (1)...(19): siRNA sense strand
ggauagccugcaagaggua

SEQ ID NO: 692029 - RNA, 19 nt, Homo sapiens
  misc_RNA (1)...(19): siRNA sense strand
ccacgugucugagaacaac

SEQ ID NO: 692030 - RNA, 19 nt, Homo sapiens
  misc_RNA (1)...(19): siRNA sense strand
gacuacaacgucacaauca

SEQ ID NO: 692031 - RNA, 19 nt, Homo sapiens
  misc_RNA (1)...(19): siRNA sense strand
uaauagcccucauaaaagu

SEQ ID NO: 692032 - RNA, 19 nt, Homo sapiens
  misc_RNA (1)...(19): siRNA sense strand
ggauggaggaguacacaca

SEQ ID NO: 692033 - RNA, 19 nt, Homo sapiens
  misc_RNA (1)...(19): siRNA sense strand
guuguuguaauccaagaua

SEQ ID NO: 692034 - RNA, 19 nt, Homo sapiens
  misc_RNA (1)...(19): siRNA sense strand
acucuauucuggccaguga

SEQ ID NO: 692035 - RNA, 19 nt, Homo sapiens
  misc_RNA (1)...(19): siRNA sense strand
aaucauagccaccgacaag

SEQ ID NO: 692036 - RNA, 19 nt, Homo sapiens
  misc_RNA (1)...(19): siRNA sense strand
gacaaguagauauguguug

SEQ ID NO: 692037 - RNA, 19 nt, Homo sapiens
  misc_RNA (1)...(19): siRNA sense strand
agaggauuauuucaacguu

SEQ ID NO: 692038 - RNA, 19 nt, Homo sapiens
  misc_RNA (1)...(19): siRNA sense strand
agagacaaguagauaugug

SEQ ID NO: 692039 - RNA, 19 nt, Homo sapiens
  misc_RNA (1)...(19): siRNA sense strand
cauaucuggauccgaguua

SEQ ID NO: 692040 - RNA, 19 nt, Homo sapiens
  misc_RNA (1)...(19): siRNA sense strand
cuaagcggcaccacccaua

SEQ ID NO: 692041 - RNA, 19 nt, Homo sapiens
  misc_RNA (1)...(19): siRNA sense strand
guggaaggcaauucacuga

SEQ ID NO: 692042 - RNA, 19 nt, Homo sapiens
  misc_RNA (1)...(19): siRNA sense strand
aggcauugacuuagaaauu

SEQ ID NO: 692043 - RNA, 19 nt, Homo sapiens
  misc_RNA (1)...(19): siRNA sense strand
gcaccacccauaucuggau

SEQ ID NO: 692044 - RNA, 19 nt, Homo sapiens
  misc_RNA (1)...(19): siRNA sense strand
uguauugccucucauucug

SEQ ID NO: 692045 - RNA, 19 nt, Homo sapiens
  misc_RNA (1)...(19): siRNA sense strand
gggagcagacagcagacua

SEQ ID NO: 692046 - RNA, 19 nt, Homo sapiens
  misc_RNA (1)...(19): siRNA sense strand
aauccaccucgaagaauua

SEQ ID NO: 692047 - RNA, 19 nt, Homo sapiens
  misc_RNA (1)...(19): siRNA sense strand
uaaccagauuccagaggau

SEQ ID NO: 692048 - RNA, 19 nt, Homo sapiens
  misc_RNA (1)...(19): siRNA sense strand
augcagagaucaccuaugc

SEQ ID NO: 692049 - RNA, 19 nt, Homo sapiens
  misc_RNA (1)...(19): siRNA sense strand
uuagugcagaggauuauuu

SEQ ID NO: 692050 - RNA, 19 nt, Homo sapiens
  misc_RNA (1)...(19): siRNA sense strand
gugaugauccuucuauggu

SEQ ID NO: 692051 - RNA, 19 nt, Homo sapiens
  misc_RNA (1)...(19): siRNA sense strand
cgacaucaacgacaaugca

SEQ ID NO: 692052 - RNA, 19 nt, Homo sapiens
  misc_RNA (1)...(19): siRNA sense strand
gaaggaauauuucacagua

SEQ ID NO: 692053 - RNA, 19 nt, Homo sapiens
  misc_RNA (1)...(19): siRNA sense strand
cuacaaagauaccaccuua

SEQ ID NO: 692054 - RNA, 19 nt, Homo sapiens
  misc_RNA (1)...(19): siRNA sense strand
gcaaguaguuacacucuga

SEQ ID NO: 692055 - RNA, 19 nt, Homo sapiens
  misc_RNA (1)...(19): siRNA sense strand
gguccuaacucacuacaaa

SEQ ID NO: 692056 - RNA, 19 nt, Homo sapiens
  misc_RNA (1)...(19): siRNA sense strand
gaacagugaucgccuugau

SEQ ID NO: 692057 - RNA, 19 nt, Homo sapiens
  misc_RNA (1)...(19): siRNA sense strand
gagcacaguuuacaucaau

SEQ ID NO: 692058 - RNA, 19 nt, Homo sapiens
  misc_RNA (1)...(19): siRNA sense strand
gaaguuuacugccaagugu

SEQ ID NO: 692059 - RNA, 19 nt, Homo sapiens
  misc_RNA (1)...(19): siRNA sense strand
guaaauauccugaguugau

SEQ ID NO: 692060 - RNA, 19 nt, Homo sapiens
  misc_RNA (1)...(19): siRNA sense strand
aaagauaccaccuuaauga

SEQ ID NO: 692061 - RNA, 19 nt, Homo sapiens
  misc_RNA (1)...(19): siRNA sense strand
guacaacauuuccacuuga

SEQ ID NO: 692062 - RNA, 19 nt, Homo sapiens
  misc_RNA (1)...(19): siRNA sense strand
caggagaaaucacgacaaa

SEQ ID NO: 692063 - RNA, 19 nt, Homo sapiens
  misc_RNA (1)...(19): siRNA sense strand
guacauugcccuauuccua

SEQ ID NO: 692064 - RNA, 19 nt, Homo sapiens
  misc_RNA (1)...(19): siRNA sense strand
gcgcggagaaggaauauuu

SEQ ID NO: 692065 - RNA, 19 nt, Homo sapiens
  misc_RNA (1)...(19): siRNA sense strand
gaaacagacuccagauggu

SEQ ID NO: 692066 - RNA, 19 nt, Homo sapiens
  misc_RNA (1)...(19): siRNA sense strand
gguacaacauuuccacuug

SEQ ID NO: 692067 - RNA, 19 nt, Homo sapiens
  misc_RNA (1)...(19): siRNA sense strand
ggaagcagccucugugugu

SEQ ID NO: 692068 - RNA, 19 nt, Homo sapiens
  misc_RNA (1)...(19): siRNA sense strand
cuaacucacuacaaagaua

SEQ ID NO: 692069 - RNA, 19 nt, Homo sapiens
  misc_RNA (1)...(19): siRNA sense strand
cgcaagaucucgucuguga

SEQ ID NO: 692070 - RNA, 19 nt, Homo sapiens
  misc_RNA (1)...(19): siRNA sense strand
gauaccaccuuaaugacaa

SEQ ID NO: 692071 - RNA, 19 nt, Homo sapiens
  misc_RNA (1)...(19): siRNA sense strand
gagacuuacuugugaguga

SEQ ID NO: 692072 - RNA, 19 nt, Homo sapiens
  misc_RNA (1)...(19): siRNA sense strand
cgaccgggaugaaggcaua

SEQ ID NO: 692073 - RNA, 19 nt, Homo sapiens
  misc_RNA (1)...(19): siRNA sense strand
uaggaaaccucgccaagga

SEQ ID NO: 692074 - RNA, 19 nt, Homo sapiens
  misc_RNA (1)...(19): siRNA sense strand
gaacauaaccccggaauug

SEQ ID NO: 692075 - RNA, 19 nt, Homo sapiens
  misc_RNA (1)...(19): siRNA sense strand
gaagagcacaguuuacauc

SEQ ID NO: 692076 - RNA, 19 nt, Homo sapiens
  misc_RNA (1)...(19): siRNA sense strand
cagagaagagcacaguuua

SEQ ID NO: 692077 - RNA, 19 nt, Homo sapiens
  misc_RNA (1)...(19): siRNA sense strand
uaagccagguacaacauuu

SEQ ID NO: 692078 - RNA, 19 nt, Homo sapiens
  misc_RNA (1)...(19): siRNA sense strand
ccaacagacuuccuacaug

SEQ ID NO: 692079 - RNA, 19 nt, Homo sapiens
  misc_RNA (1)...(19): siRNA sense strand
gagaucaccuacuccuuuc

SEQ ID NO: 692080 - RNA, 19 nt, Homo sapiens
  misc_RNA (1)...(19): siRNA sense strand
cagauccgcuauucaauuc

SEQ ID NO: 692081 - RNA, 19 nt, Homo sapiens
  misc_RNA (1)...(19): siRNA sense strand
cuacauagcaguaauugug

SEQ ID NO: 692082 - RNA, 19 nt, Homo sapiens
  misc_RNA (1)...(19): siRNA sense strand
caccuaaucuucgcggaua

SEQ ID NO: 692083 - RNA, 19 nt, Homo sapiens
  misc_RNA (1)...(19): siRNA sense strand
ggagaaaucacgacaaagg

SEQ ID NO: 692084 - RNA, 19 nt, Homo sapiens
  misc_RNA (1)...(19): siRNA sense strand
cgauaacccuccaguguuc

SEQ ID NO: 692085 - RNA, 19 nt, Homo sapiens
  misc_RNA (1)...(19): siRNA sense strand
ucacggaugccaacgauaa

SEQ ID NO: 692086 - RNA, 19 nt, Homo sapiens
  misc_RNA (1)...(19): siRNA sense strand
caaaguggcacgacccaaa

SEQ ID NO: 692087 - RNA, 19 nt, Homo sapiens
  misc_RNA (1)...(19): siRNA sense strand
ggagaucccagaauacaau

SEQ ID NO: 692088 - RNA, 19 nt, Homo sapiens
  misc_RNA (1)...(19): siRNA sense strand
ccaagacagaguucaauuu

SEQ ID NO: 692089 - RNA, 19 nt, Homo sapiens
  misc_RNA (1)...(19): siRNA sense strand
uauccugaguugauucuaa

SEQ ID NO: 692090 - RNA, 19 nt, Homo sapiens
  misc_RNA (1)...(19): siRNA sense strand
ccacugcaguauccaaguu

SEQ ID NO: 692091 - RNA, 19 nt, Homo sapiens
  misc_RNA (1)...(19): siRNA sense strand
gcaguaauugugcaggaua

SEQ ID NO: 692092 - RNA, 19 nt, Homo sapiens
  misc_RNA (1)...(19): siRNA sense strand
gcuccgcccucuucgauau

SEQ ID NO: 692093 - RNA, 19 nt, Homo sapiens
  misc_RNA (1)...(19): siRNA sense strand
gagaagagcacaguuuaca

SEQ ID NO: 692094 - RNA, 19 nt, Homo sapiens
  misc_RNA (1)...(19): siRNA sense strand
ggagaaggaauauuucaca

SEQ ID NO: 692095 - RNA, 19 nt, Homo sapiens
  misc_RNA (1)...(19): siRNA sense strand
gcacaguuuacaucaauug

SEQ ID NO: 692096 - RNA, 19 nt, Homo sapiens
  misc_RNA (1)...(19): siRNA sense strand
gaaagcggagacuuacuug

SEQ ID NO: 692097 - RNA, 19 nt, Homo sapiens
  misc_RNA (1)...(19): siRNA sense strand
gaucucgucugugacaaug

SEQ ID NO: 692098 - RNA, 19 nt, Homo sapiens
  misc_RNA (1)...(19): siRNA sense strand
gcacaucuccgacgucaac

SEQ ID NO: 692099 - RNA, 19 nt, Homo sapiens
  misc_RNA (1)...(19): siRNA sense strand
gaagcagccucuguguguu

SEQ ID NO: 692100 - RNA, 19 nt, Homo sapiens
  misc_RNA (1)...(19): siRNA sense strand
gaauagaccgagaacagau

SEQ ID NO: 692101 - RNA, 19 nt, Homo sapiens
  misc_RNA (1)...(19): siRNA sense strand
gaauacaaucucaccauca

SEQ ID NO: 692102 - RNA, 19 nt, Homo sapiens
  misc_RNA (1)...(19): siRNA sense strand
ccucaaagaacuauuacaa

SEQ ID NO: 692103 - RNA, 19 nt, Homo sapiens
  misc_RNA (1)...(19): siRNA sense strand
acagugaucgccuugauaa

SEQ ID NO: 692104 - RNA, 19 nt, Homo sapiens
  misc_RNA (1)...(19): siRNA sense strand
caacgauugugcaccugaa

SEQ ID NO: 692105 - RNA, 19 nt, Homo sapiens
  misc_RNA (1)...(19): siRNA sense strand
ccagauccgcuauucaauu

SEQ ID NO: 692106 - RNA, 19 nt, Homo sapiens
  misc_RNA (1)...(19): siRNA sense strand
ggucguaaauauccugagu

SEQ ID NO: 692107 - RNA, 19 nt, Homo sapiens
  misc_RNA (1)...(19): siRNA sense strand
caaagauaccaccuuaaug

SEQ ID NO: 692108 - RNA, 19 nt, Homo sapiens
  misc_RNA (1)...(19): siRNA sense strand
acaaagauaccaccuuaau

SEQ ID NO: 692109 - RNA, 19 nt, Homo sapiens
  misc_RNA (1)...(19): siRNA sense strand
guaauugugcaggauauaa

SEQ ID NO: 692110 - RNA, 19 nt, Homo sapiens
  misc_RNA (1)...(19): siRNA sense strand
agagaucaccuacuccuuu

SEQ ID NO: 692111 - RNA, 19 nt, Homo sapiens
  misc_RNA (1)...(19): siRNA sense strand
ucuccgacgucaacgauaa

SEQ ID NO: 692112 - RNA, 19 nt, Homo sapiens
  misc_RNA (1)...(19): siRNA sense strand
gcaccugaaguuauuguga

SEQ ID NO: 692113 - RNA, 19 nt, Homo sapiens
  misc_RNA (1)...(19): siRNA sense strand
ucguaaauauccugaguug

SEQ ID NO: 692114 - RNA, 19 nt, Homo sapiens
  misc_RNA (1)...(19): siRNA sense strand
ggacagagaagagcacagu

SEQ ID NO: 692115 - RNA, 19 nt, Homo sapiens
  misc_RNA (1)...(19): siRNA sense strand
gagaaaucacgacaaagga

SEQ ID NO: 692116 - RNA, 19 nt, Homo sapiens
  misc_RNA (1)...(19): siRNA sense strand
gagaaacagacuccagaug

SEQ ID NO: 692117 - RNA, 19 nt, Homo sapiens
  misc_RNA (1)...(19): siRNA sense strand
ucaccuacuccuuucauaa

SEQ ID NO: 692118 - RNA, 19 nt, Homo sapiens
  misc_RNA (1)...(19): siRNA sense strand
acagagaagagcacaguuu

SEQ ID NO: 692119 - RNA, 19 nt, Homo sapiens
  misc_RNA (1)...(19): siRNA sense strand
caaauccgaaucaaaguca

SEQ ID NO: 692120 - RNA, 19 nt, Homo sapiens
  misc_RNA (1)...(19): siRNA sense strand
caagaucucgucugugaca

SEQ ID NO: 692121 - RNA, 19 nt, Homo sapiens
  misc_RNA (1)...(19): siRNA sense strand
gaggagaucccagaauaca

SEQ ID NO: 692122 - RNA, 19 nt, Homo sapiens
  misc_RNA (1)...(19): siRNA sense strand
cccagaaagcggagacuua

SEQ ID NO: 692123 - RNA, 19 nt, Homo sapiens
  misc_RNA (1)...(19): siRNA sense strand
ucacgacaaaggaugauuu

SEQ ID NO: 692124 - RNA, 19 nt, Homo sapiens
  misc_RNA (1)...(19): siRNA sense strand
gugcaggauauaaaugaua

SEQ ID NO: 692125 - RNA, 19 nt, Homo sapiens
  misc_RNA (1)...(19): siRNA sense strand
gagaaaauggagaaguuua

SEQ ID NO: 692126 - RNA, 19 nt, Homo sapiens
  misc_RNA (1)...(19): siRNA sense strand
cagaauagaccgagaacag

SEQ ID NO: 692127 - RNA, 19 nt, Homo sapiens
  misc_RNA (1)...(19): siRNA sense strand
caagacagaguucaauuuu

SEQ ID NO: 692128 - RNA, 19 nt, Homo sapiens
  misc_RNA (1)...(19): siRNA sense strand
gggaaaugccaaguuuauu

SEQ ID NO: 692129 - RNA, 19 nt, Homo sapiens
  misc_RNA (1)...(19): siRNA sense strand
gauugugcaccugaaguua

SEQ ID NO: 692130 - RNA, 19 nt, Homo sapiens
  misc_RNA (1)...(19): siRNA sense strand
gcugaaaauccacuaaaua

SEQ ID NO: 692131 - RNA, 19 nt, Homo sapiens
  misc_RNA (1)...(19): siRNA sense strand
ggagacccaccucaaagug

SEQ ID NO: 692132 - RNA, 19 nt, Homo sapiens
  misc_RNA (1)...(19): siRNA sense strand
gcgccucuaucgcucaaau

SEQ ID NO: 692133 - RNA, 19 nt, Homo sapiens
  misc_RNA (1)...(19): siRNA sense strand
gacaacgaguacuuugauc

SEQ ID NO: 692134 - RNA, 19 nt, Homo sapiens
  misc_RNA (1)...(19): siRNA sense strand
uauugugacuucaguaucu

SEQ ID NO: 692135 - RNA, 19 nt, Homo sapiens
  misc_RNA (1)...(19): siRNA sense strand
acgcagagaucaccuacuc

SEQ ID NO: 692136 - RNA, 19 nt, Homo sapiens
  misc_RNA (1)...(19): siRNA sense strand
guccagauccgcuauucaa

SEQ ID NO: 692137 - RNA, 19 nt, Homo sapiens
  misc_RNA (1)...(19): siRNA sense strand
ugacagaauagaccgagaa

SEQ ID NO: 692138 - RNA, 19 nt, Homo sapiens
  misc_RNA (1)...(19): siRNA sense strand
gaucucagugcucuucuuc

SEQ ID NO: 692139 - RNA, 19 nt, Homo sapiens
  misc_RNA (1)...(19): siRNA sense strand
agaaagcggagacuuacuu

SEQ ID NO: 692140 - RNA, 19 nt, Homo sapiens
  misc_RNA (1)...(19): siRNA sense strand
ugacaacgaguacuuugau

SEQ ID NO: 692141 - RNA, 19 nt, Homo sapiens
  misc_RNA (1)...(19): siRNA sense strand
caguaauugugcaggauau

SEQ ID NO: 692142 - RNA, 19 nt, Homo sapiens
  misc_RNA (1)...(19): siRNA sense strand
caaugccucuugggaacaa

SEQ ID NO: 692143 - RNA, 19 nt, Homo sapiens
  misc_RNA (1)...(19): siRNA sense strand
gccaagacagaguucaauu

SEQ ID NO: 692144 - RNA, 19 nt, Homo sapiens
  misc_RNA (1)...(19): siRNA sense strand
ggauagccugcaagaggua

SEQ ID NO: 692145 - RNA, 19 nt, Homo sapiens
  misc_RNA (1)...(19): siRNA sense strand
gacccaaauccgaaucaaa

SEQ ID NO: 692146 - RNA, 19 nt, Homo sapiens
  misc_RNA (1)...(19): siRNA sense strand
uccagauggucguaaauau

SEQ ID NO: 692147 - RNA, 19 nt, Homo sapiens
  misc_RNA (1)...(19): siRNA sense strand
auucagauguugguccuaa

SEQ ID NO: 692148 - RNA, 19 nt, Homo sapiens
  misc_RNA (1)...(19): siRNA sense strand
gauccgcuauucaauucca

SEQ ID NO: 692149 - RNA, 19 nt, Homo sapiens
  misc_RNA (1)...(19): siRNA sense strand
uaauguggacgaacaagug

SEQ ID NO: 692150 - RNA, 19 nt, Homo sapiens
  misc_RNA (1)...(19): siRNA sense strand
ccagauggucguaaauauc

SEQ ID NO: 692151 - RNA, 19 nt, Homo sapiens
  misc_RNA (1)...(19): siRNA sense strand
gacuccagauggucguaaa

SEQ ID NO: 692152 - RNA, 19 nt, Homo sapiens
  misc_RNA (1)...(19): siRNA sense strand
gaaggaauauuucacagua

SEQ ID NO: 692153 - RNA, 19 nt, Homo sapiens
  misc_RNA (1)...(19): siRNA sense strand
cuacaaagauaccaccuua

SEQ ID NO: 692154 - RNA, 19 nt, Homo sapiens
  misc_RNA (1)...(19): siRNA sense strand
gcaaguaguuacacucuga

SEQ ID NO: 692155 - RNA, 19 nt, Homo sapiens
  misc_RNA (1)...(19): siRNA sense strand
gguccuaacucacuacaaa

SEQ ID NO: 692156 - RNA, 19 nt, Homo sapiens
  misc_RNA (1)...(19): siRNA sense strand
gaacagugaucgccuugau

SEQ ID NO: 692157 - RNA, 19 nt, Homo sapiens
  misc_RNA (1)...(19): siRNA sense strand
gagcacaguuuacaucaau

SEQ ID NO: 692158 - RNA, 19 nt, Homo sapiens
  misc_RNA (1)...(19): siRNA sense strand
gaaguuuacugccaagugu

SEQ ID NO: 692159 - RNA, 19 nt, Homo sapiens
  misc_RNA (1)...(19): siRNA sense strand
guaaauauccugaguugau

SEQ ID NO: 692160 - RNA, 19 nt, Homo sapiens
  misc_RNA (1)...(19): siRNA sense strand
aaagauaccaccuuaauga

SEQ ID NO: 692161 - RNA, 19 nt, Homo sapiens
  misc_RNA (1)...(19): siRNA sense strand
guacaacauuuccacuuga

SEQ ID NO: 692162 - RNA, 19 nt, Homo sapiens
  misc_RNA (1)...(19): siRNA sense strand
caggagaaaucacgacaaa

SEQ ID NO: 692163 - RNA, 19 nt, Homo sapiens
  misc_RNA (1)...(19): siRNA sense strand
guacauugcccuauuccua

SEQ ID NO: 692164 - RNA, 19 nt, Homo sapiens
  misc_RNA (1)...(19): siRNA sense strand
gcgcggagaaggaauauuu

SEQ ID NO: 692165 - RNA, 19 nt, Homo sapiens
  misc_RNA (1)...(19): siRNA sense strand
gaaacagacuccagauggu

SEQ ID NO: 692166 - RNA, 19 nt, Homo sapiens
  misc_RNA (1)...(19): siRNA sense strand
gguacaacauuuccacuug

SEQ ID NO: 692167 - RNA, 19 nt, Homo sapiens
  misc_RNA (1)...(19): siRNA sense strand
ggaagcagccucugugugu

SEQ ID NO: 692168 - RNA, 19 nt, Homo sapiens
  misc_RNA (1)...(19): siRNA sense strand
cuaacucacuacaaagaua

SEQ ID NO: 692169 - RNA, 19 nt, Homo sapiens
  misc_RNA (1)...(19): siRNA sense strand
cgcaagaucucgucuguga

SEQ ID NO: 692170 - RNA, 19 nt, Homo sapiens
  misc_RNA (1)...(19): siRNA sense strand
gauaccaccuuaaugacaa

SEQ ID NO: 692171 - RNA, 19 nt, Homo sapiens
  misc_RNA (1)...(19): siRNA sense strand
gagacuuacuugugaguga

SEQ ID NO: 692172 - RNA, 19 nt, Homo sapiens
  misc_RNA (1)...(19): siRNA sense strand
cgaccgggaugaaggcaua

SEQ ID NO: 692173 - RNA, 19 nt, Homo sapiens
  misc_RNA (1)...(19): siRNA sense strand
uaggaaaccucgccaagga

SEQ ID NO: 692174 - RNA, 19 nt, Homo sapiens
  misc_RNA (1)...(19): siRNA sense strand
gaacauaaccccggaauug

SEQ ID NO: 692175 - RNA, 19 nt, Homo sapiens
  misc_RNA (1)...(19): siRNA sense strand
gaagagcacaguuuacauc

SEQ ID NO: 692176 - RNA, 19 nt, Homo sapiens
  misc_RNA (1)...(19): siRNA sense strand
cagagaagagcacaguuua

SEQ ID NO: 692177 - RNA, 19 nt, Homo sapiens
  misc_RNA (1)...(19): siRNA sense strand
uaagccagguacaacauuu

SEQ ID NO: 692178 - RNA, 19 nt, Homo sapiens
  misc_RNA (1)...(19): siRNA sense strand
ccaacagacuuccuacaug

SEQ ID NO: 692179 - RNA, 19 nt, Homo sapiens
  misc_RNA (1)...(19): siRNA sense strand
gagaucaccuacuccuuuc

SEQ ID NO: 692180 - RNA, 19 nt, Homo sapiens
  misc_RNA (1)...(19): siRNA sense strand
cagauccgcuauucaauuc

SEQ ID NO: 692181 - RNA, 19 nt, Homo sapiens
  misc_RNA (1)...(19): siRNA sense strand
cuacauagcaguaauugug

SEQ ID NO: 692182 - RNA, 19 nt, Homo sapiens
  misc_RNA (1)...(19): siRNA sense strand
caccuaaucuucgcggaua

SEQ ID NO: 692183 - RNA, 19 nt, Homo sapiens
  misc_RNA (1)...(19): siRNA sense strand
ggagaaaucacgacaaagg

SEQ ID NO: 692184 - RNA, 19 nt, Homo sapiens
  misc_RNA (1)...(19): siRNA sense strand
cgauaacccuccaguguuc

SEQ ID NO: 692185 - RNA, 19 nt, Homo sapiens
  misc_RNA (1)...(19): siRNA sense strand
ucacggaugccaacgauaa

SEQ ID NO: 692186 - RNA, 19 nt, Homo sapiens
  misc_RNA (1)...(19): siRNA sense strand
caaaguggcacgacccaaa

SEQ ID NO: 692187 - RNA, 19 nt, Homo sapiens
  misc_RNA (1)...(19): siRNA sense strand
ggagaucccagaauacaau

SEQ ID NO: 692188 - RNA, 19 nt, Homo sapiens
  misc_RNA (1)...(19): siRNA sense strand
ccaagacagaguucaauuu

SEQ ID NO: 692189 - RNA, 19 nt, Homo sapiens
  misc_RNA (1)...(19): siRNA sense strand
uauccugaguugauucuaa

SEQ ID NO: 692190 - RNA, 19 nt, Homo sapiens
  misc_RNA (1)...(19): siRNA sense strand
ccacugcaguauccaaguu

SEQ ID NO: 692191 - RNA, 19 nt, Homo sapiens
  misc_RNA (1)...(19): siRNA sense strand
gcaguaauugugcaggaua

SEQ ID NO: 692192 - RNA, 19 nt, Homo sapiens
  misc_RNA (1)...(19): siRNA sense strand
gcuccgcccucuucgauau

SEQ ID NO: 692193 - RNA, 19 nt, Homo sapiens
  misc_RNA (1)...(19): siRNA sense strand
gagaagagcacaguuuaca

SEQ ID NO: 692194 - RNA, 19 nt, Homo sapiens
  misc_RNA (1)...(19): siRNA sense strand
ggagaaggaauauuucaca

SEQ ID NO: 692195 - RNA, 19 nt, Homo sapiens
  misc_RNA (1)...(19): siRNA sense strand
gcacaguuuacaucaauug

SEQ ID NO: 692196 - RNA, 19 nt, Homo sapiens
  misc_RNA (1)...(19): siRNA sense strand
gaaagcggagacuuacuug

SEQ ID NO: 692197 - RNA, 19 nt, Homo sapiens
  misc_RNA (1)...(19): siRNA sense strand
gaucucgucugugacaaug

SEQ ID NO: 692198 - RNA, 19 nt, Homo sapiens
  misc_RNA (1)...(19): siRNA sense strand
gcacaucuccgacgucaac

SEQ ID NO: 692199 - RNA, 19 nt, Homo sapiens
  misc_RNA (1)...(19): siRNA sense strand
gaagcagccucuguguguu

SEQ ID NO: 692200 - RNA, 19 nt, Homo sapiens
  misc_RNA (1)...(19): siRNA sense strand
gaauagaccgagaacagau

SEQ ID NO: 692201 - RNA, 19 nt, Homo sapiens
  misc_RNA (1)...(19): siRNA sense strand
gaauacaaucucaccauca

SEQ ID NO: 692202 - RNA, 19 nt, Homo sapiens
  misc_RNA (1)...(19): siRNA sense strand
ccucaaagaacuauuacaa

SEQ ID NO: 692203 - RNA, 19 nt, Homo sapiens
  misc_RNA (1)...(19): siRNA sense strand
acagugaucgccuugauaa

SEQ ID NO: 692204 - RNA, 19 nt, Homo sapiens
  misc_RNA (1)...(19): siRNA sense strand
caacgauugugcaccugaa

SEQ ID NO: 692205 - RNA, 19 nt, Homo sapiens
  misc_RNA (1)...(19): siRNA sense strand
ccagauccgcuauucaauu

SEQ ID NO: 692206 - RNA, 19 nt, Homo sapiens
  misc_RNA (1)...(19): siRNA sense strand
ggucguaaauauccugagu

SEQ ID NO: 692207 - RNA, 19 nt, Homo sapiens
  misc_RNA (1)...(19): siRNA sense strand
caaagauaccaccuuaaug

SEQ ID NO: 692208 - RNA, 19 nt, Homo sapiens
  misc_RNA (1)...(19): siRNA sense strand
acaaagauaccaccuuaau

SEQ ID NO: 692209 - RNA, 19 nt, Homo sapiens
  misc_RNA (1)...(19): siRNA sense strand
guaauugugcaggauauaa

SEQ ID NO: 692210 - RNA, 19 nt, Homo sapiens
  misc_RNA (1)...(19): siRNA sense strand
agagaucaccuacuccuuu

SEQ ID NO: 692211 - RNA, 19 nt, Homo sapiens
  misc_RNA (1)...(19): siRNA sense strand
ucuccgacgucaacgauaa

SEQ ID NO: 692212 - RNA, 19 nt, Homo sapiens
  misc_RNA (1)...(19): siRNA sense strand
gcaccugaaguuauuguga

SEQ ID NO: 692213 - RNA, 19 nt, Homo sapiens
  misc_RNA (1)...(19): siRNA sense strand
ucguaaauauccugaguug

SEQ ID NO: 692214 - RNA, 19 nt, Homo sapiens
  misc_RNA (1)...(19): siRNA sense strand
ggacagagaagagcacagu

SEQ ID NO: 692215 - RNA, 19 nt, Homo sapiens
  misc_RNA (1)...(19): siRNA sense strand
gagaaaucacgacaaagga

SEQ ID NO: 692216 - RNA, 19 nt, Homo sapiens
  misc_RNA (1)...(19): siRNA sense strand
gagaaacagacuccagaug

SEQ ID NO: 692217 - RNA, 19 nt, Homo sapiens
  misc_RNA (1)...(19): siRNA sense strand
ucaccuacuccuuucauaa

SEQ ID NO: 692218 - RNA, 19 nt, Homo sapiens
  misc_RNA (1)...(19): siRNA sense strand
acagagaagagcacaguuu

SEQ ID NO: 692219 - RNA, 19 nt, Homo sapiens
  misc_RNA (1)...(19): siRNA sense strand
caaauccgaaucaaaguca

SEQ ID NO: 692220 - RNA, 19 nt, Homo sapiens
  misc_RNA (1)...(19): siRNA sense strand
caagaucucgucugugaca

SEQ ID NO: 692221 - RNA, 19 nt, Homo sapiens
  misc_RNA (1)...(19): siRNA sense strand
gaggagaucccagaauaca

SEQ ID NO: 692222 - RNA, 19 nt, Homo sapiens
  misc_RNA (1)...(19): siRNA sense strand
cccagaaagcggagacuua

SEQ ID NO: 692223 - RNA, 19 nt, Homo sapiens
  misc_RNA (1)...(19): siRNA sense strand
ucacgacaaaggaugauuu

SEQ ID NO: 692224 - RNA, 19 nt, Homo sapiens
  misc_RNA (1)...(19): siRNA sense strand
gugcaggauauaaaugaua

SEQ ID NO: 692225 - RNA, 19 nt, Homo sapiens
  misc_RNA (1)...(19): siRNA sense strand
gagaaaauggagaaguuua

SEQ ID NO: 692226 - RNA, 19 nt, Homo sapiens
  misc_RNA (1)...(19): siRNA sense strand
cagaauagaccgagaacag

SEQ ID NO: 692227 - RNA, 19 nt, Homo sapiens
  misc_RNA (1)...(19): siRNA sense strand
caagacagaguucaauuuu

SEQ ID NO: 692228 - RNA, 19 nt, Homo sapiens
  misc_RNA (1)...(19): siRNA sense strand
gggaaaugccaaguuuauu

SEQ ID NO: 692229 - RNA, 19 nt, Homo sapiens
  misc_RNA (1)...(19): siRNA sense strand
gauugugcaccugaaguua

SEQ ID NO: 692230 - RNA, 19 nt, Homo sapiens
  misc_RNA (1)...(19): siRNA sense strand
gcugaaaauccacuaaaua

SEQ ID NO: 692231 - RNA, 19 nt, Homo sapiens
  misc_RNA (1)...(19): siRNA sense strand
ggagacccaccucaaagug

SEQ ID NO: 692232 - RNA, 19 nt, Homo sapiens
  misc_RNA (1)...(19): siRNA sense strand
gcgccucuaucgcucaaau

SEQ ID NO: 692233 - RNA, 19 nt, Homo sapiens
  misc_RNA (1)...(19): siRNA sense strand
gacaacgaguacuuugauc

SEQ ID NO: 692234 - RNA, 19 nt, Homo sapiens
  misc_RNA (1)...(19): siRNA sense strand
uauugugacuucaguaucu

SEQ ID NO: 692235 - RNA, 19 nt, Homo sapiens
  misc_RNA (1)...(19): siRNA sense strand
acgcagagaucaccuacuc

SEQ ID NO: 692236 - RNA, 19 nt, Homo sapiens
  misc_RNA (1)...(19): siRNA sense strand
guccagauccgcuauucaa

SEQ ID NO: 692237 - RNA, 19 nt, Homo sapiens
  misc_RNA (1)...(19): siRNA sense strand
ugacagaauagaccgagaa

SEQ ID NO: 692238 - RNA, 19 nt, Homo sapiens
  misc_RNA (1)...(19): siRNA sense strand
gaucucagugcucuucuuc

SEQ ID NO: 692239 - RNA, 19 nt, Homo sapiens
  misc_RNA (1)...(19): siRNA sense strand
agaaagcggagacuuacuu

SEQ ID NO: 692240 - RNA, 19 nt, Homo sapiens
  misc_RNA (1)...(19): siRNA sense strand
ugacaacgaguacuuugau

SEQ ID NO: 692241 - RNA, 19 nt, Homo sapiens
  misc_RNA (1)...(19): siRNA sense strand
caguaauugugcaggauau

SEQ ID NO: 692242 - RNA, 19 nt, Homo sapiens
  misc_RNA (1)...(19): siRNA sense strand
caaugccucuugggaacaa

SEQ ID NO: 692243 - RNA, 19 nt, Homo sapiens
  misc_RNA (1)...(19): siRNA sense strand
gccaagacagaguucaauu

SEQ ID NO: 692244 - RNA, 19 nt, Homo sapiens
  misc_RNA (1)...(19): siRNA sense strand
ggauagccugcaagaggua

SEQ ID NO: 692245 - RNA, 19 nt, Homo sapiens
  misc_RNA (1)...(19): siRNA sense strand
gacccaaauccgaaucaaa

SEQ ID NO: 692246 - RNA, 19 nt, Homo sapiens
  misc_RNA (1)...(19): siRNA sense strand
uccagauggucguaaauau

SEQ ID NO: 692247 - RNA, 19 nt, Homo sapiens
  misc_RNA (1)...(19): siRNA sense strand
auucagauguugguccuaa

SEQ ID NO: 692248 - RNA, 19 nt, Homo sapiens
  misc_RNA (1)...(19): siRNA sense strand
gauccgcuauucaauucca

SEQ ID NO: 692249 - RNA, 19 nt, Homo sapiens
  misc_RNA (1)...(19): siRNA sense strand
uaauguggacgaacaagug

SEQ ID NO: 692250 - RNA, 19 nt, Homo sapiens
  misc_RNA (1)...(19): siRNA sense strand
ccagauggucguaaauauc

SEQ ID NO: 692251 - RNA, 19 nt, Homo sapiens
  misc_RNA (1)...(19): siRNA sense strand
gacuccagauggucguaaa

SEQ ID NO: 692252 - RNA, 19 nt, Homo sapiens
  misc_RNA (1)...(19): siRNA sense strand
gcagauagcuugcaagaga

SEQ ID NO: 692253 - RNA, 19 nt, Homo sapiens
  misc_RNA (1)...(19): siRNA sense strand
gaaauccuaugccaacuaa

SEQ ID NO: 692254 - RNA, 19 nt, Homo sapiens
  misc_RNA (1)...(19): siRNA sense strand
gaucacagcuaccgacaaa

SEQ ID NO: 692255 - RNA, 19 nt, Homo sapiens
  misc_RNA (1)...(19): siRNA sense strand
ggaaauagcuccggaugga

SEQ ID NO: 692256 - RNA, 19 nt, Homo sapiens
  misc_RNA (1)...(19): siRNA sense strand
agagauagcuacacaauug

SEQ ID NO: 692257 - RNA, 19 nt, Homo sapiens
  misc_RNA (1)...(19): siRNA sense strand
gaacuggacuuugaagaga

SEQ ID NO: 692258 - RNA, 19 nt, Homo sapiens
  misc_RNA (1)...(19): siRNA sense strand
gcucugcgcucuucgauau

SEQ ID NO: 692259 - RNA, 19 nt, Homo sapiens
  misc_RNA (1)...(19): siRNA sense strand
gaugaagccucuugguuug

SEQ ID NO: 692260 - RNA, 19 nt, Homo sapiens
  misc_RNA (1)...(19): siRNA sense strand
gaucuagauucuggauuua

SEQ ID NO: 692261 - RNA, 19 nt, Homo sapiens
  misc_RNA (1)...(19): siRNA sense strand
gauccgcacuucucuuuga

SEQ ID NO: 692262 - RNA, 19 nt, Homo sapiens
  misc_RNA (1)...(19): siRNA sense strand
gcauguagcugagaacaau

SEQ ID NO: 692263 - RNA, 19 nt, Homo sapiens
  misc_RNA (1)...(19): siRNA sense strand
ggacuuugccuuauuccua

SEQ ID NO: 692264 - RNA, 19 nt, Homo sapiens
  misc_RNA (1)...(19): siRNA sense strand
ccaccgaccuuuagccaaa

SEQ ID NO: 692265 - RNA, 19 nt, Homo sapiens
  misc_RNA (1)...(19): siRNA sense strand
gaaaucaucuaugccuuca

SEQ ID NO: 692266 - RNA, 19 nt, Homo sapiens
  misc_RNA (1)...(19): siRNA sense strand
cgacguguguucuggaauu

SEQ ID NO: 692267 - RNA, 19 nt, Homo sapiens
  misc_RNA (1)...(19): siRNA sense strand
ugaucuagauucuggauuu

SEQ ID NO: 692268 - RNA, 19 nt, Homo sapiens
  misc_RNA (1)...(19): siRNA sense strand
aaugggaacuuacuuguga

SEQ ID NO: 692269 - RNA, 19 nt, Homo sapiens
  misc_RNA (1)...(19): siRNA sense strand
cuaauggccuugucuccua

SEQ ID NO: 692270 - RNA, 19 nt, Homo sapiens
  misc_RNA (1)...(19): siRNA sense strand
gcaagauccugauguaggu

SEQ ID NO: 692271 - RNA, 19 nt, Homo sapiens
  misc_RNA (1)...(19): siRNA sense strand
ccucuugguuugaaaguaa

SEQ ID NO: 692272 - RNA, 19 nt, Homo sapiens
  misc_RNA (1)...(19): siRNA sense strand
gcaagaagucgacgugugu

SEQ ID NO: 692273 - RNA, 19 nt, Homo sapiens
  misc_RNA (1)...(19): siRNA sense strand
ggacaucacacugcauauu

SEQ ID NO: 692274 - RNA, 19 nt, Homo sapiens
  misc_RNA (1)...(19): siRNA sense strand
gaagugagacaacuguuca

SEQ ID NO: 692275 - RNA, 19 nt, Homo sapiens
  misc_RNA (1)...(19): siRNA sense strand
gggaagagcagccacauca

SEQ ID NO: 692276 - RNA, 19 nt, Homo sapiens
  misc_RNA (1)...(19): siRNA sense strand
gcuacaguuucaccuagua

SEQ ID NO: 692277 - RNA, 19 nt, Homo sapiens
  misc_RNA (1)...(19): siRNA sense strand
uaaugacaauccagaaaug

SEQ ID NO: 692278 - RNA, 19 nt, Homo sapiens
  misc_RNA (1)...(19): siRNA sense strand
gcagaucccagaauacaau

SEQ ID NO: 692279 - RNA, 19 nt, Homo sapiens
  misc_RNA (1)...(19): siRNA sense strand
gggcagaggcgaaugcuau

SEQ ID NO: 692280 - RNA, 19 nt, Homo sapiens
  misc_RNA (1)...(19): siRNA sense strand
gaaaugccuucuaauucag

SEQ ID NO: 692281 - RNA, 19 nt, Homo sapiens
  misc_RNA (1)...(19): siRNA sense strand
ugaugaagccucuugguuu

SEQ ID NO: 692282 - RNA, 19 nt, Homo sapiens
  misc_RNA (1)...(19): siRNA sense strand
agauaacccuggcuucuga

SEQ ID NO: 692283 - RNA, 19 nt, Homo sapiens
  misc_RNA (1)...(19): siRNA sense strand
uuggagaacuggacuuuga

SEQ ID NO: 692284 - RNA, 19 nt, Homo sapiens
  misc_RNA (1)...(19): siRNA sense strand
uguucaagcuggacaguaa

SEQ ID NO: 692285 - RNA, 19 nt, Homo sapiens
  misc_RNA (1)...(19): siRNA sense strand
gaggagauuuguggcaaga

SEQ ID NO: 692286 - RNA, 19 nt, Homo sapiens
  misc_RNA (1)...(19): siRNA sense strand
gagauacaaccugaccuua

SEQ ID NO: 692287 - RNA, 19 nt, Homo sapiens
  misc_RNA (1)...(19): siRNA sense strand
gaagagagagauagcuaca

SEQ ID NO: 692288 - RNA, 19 nt, Homo sapiens
  misc_RNA (1)...(19): siRNA sense strand
ggagauuuguggcaagaag

SEQ ID NO: 692289 - RNA, 19 nt, Homo sapiens
  misc_RNA (1)...(19): siRNA sense strand
gcaaggaagugagacaacu

SEQ ID NO: 692290 - RNA, 19 nt, Homo sapiens
  misc_RNA (1)...(19): siRNA sense strand
gauacaaccugaccuuagc

SEQ ID NO: 692291 - RNA, 19 nt, Homo sapiens
  misc_RNA (1)...(19): siRNA sense strand
gagcagaucccagaauaca

SEQ ID NO: 692292 - RNA, 19 nt, Homo sapiens
  misc_RNA (1)...(19): siRNA sense strand
caacauauacaagaagaug

SEQ ID NO: 692293 - RNA, 19 nt, Homo sapiens
  misc_RNA (1)...(19): siRNA sense strand
gacaucacacugcauauug

SEQ ID NO: 692294 - RNA, 19 nt, Homo sapiens
  misc_RNA (1)...(19): siRNA sense strand
gcacuucucuuugauucag

SEQ ID NO: 692295 - RNA, 19 nt, Homo sapiens
  misc_RNA (1)...(19): siRNA sense strand
guaaugacaauccagaaau

SEQ ID NO: 692296 - RNA, 19 nt, Homo sapiens
  misc_RNA (1)...(19): siRNA sense strand
caaaacacaugaucuagau

SEQ ID NO: 692297 - RNA, 19 nt, Homo sapiens
  misc_RNA (1)...(19): siRNA sense strand
agagagagauagcuacaca

SEQ ID NO: 692298 - RNA, 19 nt, Homo sapiens
  misc_RNA (1)...(19): siRNA sense strand
uagggaaccucgccaagga

SEQ ID NO: 692299 - RNA, 19 nt, Homo sapiens
  misc_RNA (1)...(19): siRNA sense strand
gaccaucacucugcacauc

SEQ ID NO: 692300 - RNA, 19 nt, Homo sapiens
  misc_RNA (1)...(19): siRNA sense strand
aaauaucacugagcuggaa

SEQ ID NO: 692301 - RNA, 19 nt, Homo sapiens
  misc_RNA (1)...(19): siRNA sense strand
ggacugccguugcccugau

SEQ ID NO: 692302 - RNA, 19 nt, Homo sapiens
  misc_RNA (1)...(19): siRNA sense strand
gcuucugaaucccaacaua

SEQ ID NO: 692303 - RNA, 19 nt, Homo sapiens
  misc_RNA (1)...(19): siRNA sense strand
uaaaagugauggccauuga

SEQ ID NO: 692304 - RNA, 19 nt, Homo sapiens
  misc_RNA (1)...(19): siRNA sense strand
gacaacccaccgaccuuua

SEQ ID NO: 692305 - RNA, 19 nt, Homo sapiens
  misc_RNA (1)...(19): siRNA sense strand
cacugcauauuguaaagua

SEQ ID NO: 692306 - RNA, 19 nt, Homo sapiens
  misc_RNA (1)...(19): siRNA sense strand
ugagacaacuguucaagcu

SEQ ID NO: 692307 - RNA, 19 nt, Homo sapiens
  misc_RNA (1)...(19): siRNA sense strand
ggaagugagacaacuguuc

SEQ ID NO: 692308 - RNA, 19 nt, Homo sapiens
  misc_RNA (1)...(19): siRNA sense strand
ccacugagggcuacuuuca

SEQ ID NO: 692309 - RNA, 19 nt, Homo sapiens
  misc_RNA (1)...(19): siRNA sense strand
gagagauagcuacacaauu

SEQ ID NO: 692310 - RNA, 19 nt, Homo sapiens
  misc_RNA (1)...(19): siRNA sense strand
caagaucuucuaugugaug

SEQ ID NO: 692311 - RNA, 19 nt, Homo sapiens
  misc_RNA (1)...(19): siRNA sense strand
gagccuccauugcgcaugu

SEQ ID NO: 692312 - RNA, 19 nt, Homo sapiens
  misc_RNA (1)...(19): siRNA sense strand
gaaaaugggaacuuacuug

SEQ ID NO: 692313 - RNA, 19 nt, Homo sapiens
  misc_RNA (1)...(19): siRNA sense strand
ucgcagaugcaaaugauaa

SEQ ID NO: 692314 - RNA, 19 nt, Homo sapiens
  misc_RNA (1)...(19): siRNA sense strand
gaagccucuugguuugaaa

SEQ ID NO: 692315 - RNA, 19 nt, Homo sapiens
  misc_RNA (1)...(19): siRNA sense strand
ggagcuacaguuucaccua

SEQ ID NO: 692316 - RNA, 19 nt, Homo sapiens
  misc_RNA (1)...(19): siRNA sense strand
aggcggagcuacaguuuca

SEQ ID NO: 692317 - RNA, 19 nt, Homo sapiens
  misc_RNA (1)...(19): siRNA sense strand
aaacacaugaucuagauuc

SEQ ID NO: 692318 - RNA, 19 nt, Homo sapiens
  misc_RNA (1)...(19): siRNA sense strand
caucaauauuggcaaggaa

SEQ ID NO: 692319 - RNA, 19 nt, Homo sapiens
  misc_RNA (1)...(19): siRNA sense strand
ucuaugccuucaucaauau

SEQ ID NO: 692320 - RNA, 19 nt, Homo sapiens
  misc_RNA (1)...(19): siRNA sense strand
aaucaucuaugccuucauc

SEQ ID NO: 692321 - RNA, 19 nt, Homo sapiens
  misc_RNA (1)...(19): siRNA sense strand
gacguguguucuggaauuu

SEQ ID NO: 692322 - RNA, 19 nt, Homo sapiens
  misc_RNA (1)...(19): siRNA sense strand
ugaagccucuugguuugaa

SEQ ID NO: 692323 - RNA, 19 nt, Homo sapiens
  misc_RNA (1)...(19): siRNA sense strand
acaccgaguuuaaauuucu

SEQ ID NO: 692324 - RNA, 19 nt, Homo sapiens
  misc_RNA (1)...(19): siRNA sense strand
ccuggugucugcuucaaga

SEQ ID NO: 692325 - RNA, 19 nt, Homo sapiens
  misc_RNA (1)...(19): siRNA sense strand
caucaaugccgaaaucauc

SEQ ID NO: 692326 - RNA, 19 nt, Homo sapiens
  misc_RNA (1)...(19): siRNA sense strand
cguguguucuggaauuuga

SEQ ID NO: 692327 - RNA, 19 nt, Homo sapiens
  misc_RNA (1)...(19): siRNA sense strand
gaauacaaugugacgauca

SEQ ID NO: 692328 - RNA, 19 nt, Homo sapiens
  misc_RNA (1)...(19): siRNA sense strand
gcagaggcgaaugcuauuu

SEQ ID NO: 692329 - RNA, 19 nt, Homo sapiens
  misc_RNA (1)...(19): siRNA sense strand
acccagagcuaguacugaa

SEQ ID NO: 692330 - RNA, 19 nt, Homo sapiens
  misc_RNA (1)...(19): siRNA sense strand
cauacagguuggugacaga

SEQ ID NO: 692331 - RNA, 19 nt, Homo sapiens
  misc_RNA (1)...(19): siRNA sense strand
ggagauaacccuggcuucu

SEQ ID NO: 692332 - RNA, 19 nt, Homo sapiens
  misc_RNA (1)...(19): siRNA sense strand
ggaacucaccacuauugga

SEQ ID NO: 692333 - RNA, 19 nt, Homo sapiens
  misc_RNA (1)...(19): siRNA sense strand
caucuaugccuucaucaau

SEQ ID NO: 692334 - RNA, 19 nt, Homo sapiens
  misc_RNA (1)...(19): siRNA sense strand
gggucaauguugcagagaa

SEQ ID NO: 692335 - RNA, 19 nt, Homo sapiens
  misc_RNA (1)...(19): siRNA sense strand
ggccuugucuccuacuaca

SEQ ID NO: 692336 - RNA, 19 nt, Homo sapiens
  misc_RNA (1)...(19): siRNA sense strand
ucacacugcauauuguaaa

SEQ ID NO: 692337 - RNA, 19 nt, Homo sapiens
  misc_RNA (1)...(19): siRNA sense strand
guggacaucacacugcaua

SEQ ID NO: 692338 - RNA, 19 nt, Homo sapiens
  misc_RNA (1)...(19): siRNA sense strand
ccgcacuucucuuugauuc

SEQ ID NO: 692339 - RNA, 19 nt, Homo sapiens
  misc_RNA (1)...(19): siRNA sense strand
ucucuuugauucagaagga

SEQ ID NO: 692340 - RNA, 19 nt, Homo sapiens
  misc_RNA (1)...(19): siRNA sense strand
ucauguaacugugcugauc

SEQ ID NO: 692341 - RNA, 19 nt, Homo sapiens
  misc_RNA (1)...(19): siRNA sense strand
caucacacugcauauugua

SEQ ID NO: 692342 - RNA, 19 nt, Homo sapiens
  misc_RNA (1)...(19): siRNA sense strand
ugauguaggugucaauucg

SEQ ID NO: 692343 - RNA, 19 nt, Homo sapiens
  misc_RNA (1)...(19): siRNA sense strand
cgacaacccaccgaccuuu

SEQ ID NO: 692344 - RNA, 19 nt, Homo sapiens
  misc_RNA (1)...(19): siRNA sense strand
cccaacauauacaagaaga

SEQ ID NO: 692345 - RNA, 19 nt, Homo sapiens
  misc_RNA (1)...(19): siRNA sense strand
gugaugaagccucuugguu

SEQ ID NO: 692346 - RNA, 19 nt, Homo sapiens
  misc_RNA (1)...(19): siRNA sense strand
accacaagaucuucuaugu

SEQ ID NO: 692347 - RNA, 19 nt, Homo sapiens
  misc_RNA (1)...(19): siRNA sense strand
guaguggcguuggccuuga

SEQ ID NO: 692348 - RNA, 19 nt, Homo sapiens
  misc_RNA (1)...(19): siRNA sense strand
cagaauacaaugugacgau

SEQ ID NO: 692349 - RNA, 19 nt, Homo sapiens
  misc_RNA (1)...(19): siRNA sense strand
ugaaaguaaugacaaucca

SEQ ID NO: 692350 - RNA, 19 nt, Homo sapiens
  misc_RNA (1)...(19): siRNA sense strand
ugaaaaugcugcaccacaa

SEQ ID NO: 692351 - RNA, 19 nt, Homo sapiens
  misc_RNA (1)...(19): siRNA sense strand
ggacgaccgcaacgacaau

SEQ ID NO: 692352 - RNA, 19 nt, Homo sapiens
  misc_RNA (1)...(19): siRNA sense strand
gcagauagcuugcaagaga

SEQ ID NO: 692353 - RNA, 19 nt, Homo sapiens
  misc_RNA (1)...(19): siRNA sense strand
gaaauccuaugccaacuaa

SEQ ID NO: 692354 - RNA, 19 nt, Homo sapiens
  misc_RNA (1)...(19): siRNA sense strand
gaucacagcuaccgacaaa

SEQ ID NO: 692355 - RNA, 19 nt, Homo sapiens
  misc_RNA (1)...(19): siRNA sense strand
ggaaauagcuccggaugga

SEQ ID NO: 692356 - RNA, 19 nt, Homo sapiens
  misc_RNA (1)...(19): siRNA sense strand
agagauagcuacacaauug

SEQ ID NO: 692357 - RNA, 19 nt, Homo sapiens
  misc_RNA (1)...(19): siRNA sense strand
gaacuggacuuugaagaga

SEQ ID NO: 692358 - RNA, 19 nt, Homo sapiens
  misc_RNA (1)...(19): siRNA sense strand
gcucugcgcucuucgauau

SEQ ID NO: 692359 - RNA, 19 nt, Homo sapiens
  misc_RNA (1)...(19): siRNA sense strand
gaugaagccucuugguuug

SEQ ID NO: 692360 - RNA, 19 nt, Homo sapiens
  misc_RNA (1)...(19): siRNA sense strand
gaucuagauucuggauuua

SEQ ID NO: 692361 - RNA, 19 nt, Homo sapiens
  misc_RNA (1)...(19): siRNA sense strand
gauccgcacuucucuuuga

SEQ ID NO: 692362 - RNA, 19 nt, Homo sapiens
  misc_RNA (1)...(19): siRNA sense strand
gcauguagcugagaacaau

SEQ ID NO: 692363 - RNA, 19 nt, Homo sapiens
  misc_RNA (1)...(19): siRNA sense strand
ggacuuugccuuauuccua

SEQ ID NO: 692364 - RNA, 19 nt, Homo sapiens
  misc_RNA (1)...(19): siRNA sense strand
ccaccgaccuuuagccaaa

SEQ ID NO: 692365 - RNA, 19 nt, Homo sapiens
  misc_RNA (1)...(19): siRNA sense strand
gaaaucaucuaugccuuca

SEQ ID NO: 692366 - RNA, 19 nt, Homo sapiens
  misc_RNA (1)...(19): siRNA sense strand
cgacguguguucuggaauu

SEQ ID NO: 692367 - RNA, 19 nt, Homo sapiens
  misc_RNA (1)...(19): siRNA sense strand
ugaucuagauucuggauuu

SEQ ID NO: 692368 - RNA, 19 nt, Homo sapiens
  misc_RNA (1)...(19): siRNA sense strand
aaugggaacuuacuuguga

SEQ ID NO: 692369 - RNA, 19 nt, Homo sapiens
  misc_RNA (1)...(19): siRNA sense strand
cuaauggccuugucuccua

SEQ ID NO: 692370 - RNA, 19 nt, Homo sapiens
  misc_RNA (1)...(19): siRNA sense strand
gcaagauccugauguaggu

SEQ ID NO: 692371 - RNA, 19 nt, Homo sapiens
  misc_RNA (1)...(19): siRNA sense strand
ccucuugguuugaaaguaa

SEQ ID NO: 692372 - RNA, 19 nt, Homo sapiens
  misc_RNA (1)...(19): siRNA sense strand
gcaagaagucgacgugugu

SEQ ID NO: 692373 - RNA, 19 nt, Homo sapiens
  misc_RNA (1)...(19): siRNA sense strand
ggacaucacacugcauauu

SEQ ID NO: 692374 - RNA, 19 nt, Homo sapiens
  misc_RNA (1)...(19): siRNA sense strand
gaagugagacaacuguuca

SEQ ID NO: 692375 - RNA, 19 nt, Homo sapiens
  misc_RNA (1)...(19): siRNA sense strand
gggaagagcagccacauca

SEQ ID NO: 692376 - RNA, 19 nt, Homo sapiens
  misc_RNA (1)...(19): siRNA sense strand
gcuacaguuucaccuagua

SEQ ID NO: 692377 - RNA, 19 nt, Homo sapiens
  misc_RNA (1)...(19): siRNA sense strand
uaaugacaauccagaaaug

SEQ ID NO: 692378 - RNA, 19 nt, Homo sapiens
  misc_RNA (1)...(19): siRNA sense strand
gcagaucccagaauacaau

SEQ ID NO: 692379 - RNA, 19 nt, Homo sapiens
  misc_RNA (1)...(19): siRNA sense strand
gggcagaggcgaaugcuau

SEQ ID NO: 692380 - RNA, 19 nt, Homo sapiens
  misc_RNA (1)...(19): siRNA sense strand
gaaaugccuucuaauucag

SEQ ID NO: 692381 - RNA, 19 nt, Homo sapiens
  misc_RNA (1)...(19): siRNA sense strand
ugaugaagccucuugguuu

SEQ ID NO: 692382 - RNA, 19 nt, Homo sapiens
  misc_RNA (1)...(19): siRNA sense strand
agauaacccuggcuucuga

SEQ ID NO: 692383 - RNA, 19 nt, Homo sapiens
  misc_RNA (1)...(19): siRNA sense strand
uuggagaacuggacuuuga

SEQ ID NO: 692384 - RNA, 19 nt, Homo sapiens
  misc_RNA (1)...(19): siRNA sense strand
uguucaagcuggacaguaa

SEQ ID NO: 692385 - RNA, 19 nt, Homo sapiens
  misc_RNA (1)...(19): siRNA sense strand
gaggagauuuguggcaaga

SEQ ID NO: 692386 - RNA, 19 nt, Homo sapiens
  misc_RNA (1)...(19): siRNA sense strand
gagauacaaccugaccuua

SEQ ID NO: 692387 - RNA, 19 nt, Homo sapiens
  misc_RNA (1)...(19): siRNA sense strand
gaagagagagauagcuaca

SEQ ID NO: 692388 - RNA, 19 nt, Homo sapiens
  misc_RNA (1)...(19): siRNA sense strand
ggagauuuguggcaagaag

SEQ ID NO: 692389 - RNA, 19 nt, Homo sapiens
  misc_RNA (1)...(19): siRNA sense strand
gcaaggaagugagacaacu

SEQ ID NO: 692390 - RNA, 19 nt, Homo sapiens
  misc_RNA (1)...(19): siRNA sense strand
gauacaaccugaccuuagc

SEQ ID NO: 692391 - RNA, 19 nt, Homo sapiens
  misc_RNA (1)...(19): siRNA sense strand
gagcagaucccagaauaca

SEQ ID NO: 692392 - RNA, 19 nt, Homo sapiens
  misc_RNA (1)...(19): siRNA sense strand
caacauauacaagaagaug

SEQ ID NO: 692393 - RNA, 19 nt, Homo sapiens
  misc_RNA (1)...(19): siRNA sense strand
gacaucacacugcauauug

SEQ ID NO: 692394 - RNA, 19 nt, Homo sapiens
  misc_RNA (1)...(19): siRNA sense strand
gcacuucucuuugauucag

SEQ ID NO: 692395 - RNA, 19 nt, Homo sapiens
  misc_RNA (1)...(19): siRNA sense strand
guaaugacaauccagaaau

SEQ ID NO: 692396 - RNA, 19 nt, Homo sapiens
  misc_RNA (1)...(19): siRNA sense strand
caaaacacaugaucuagau

SEQ ID NO: 692397 - RNA, 19 nt, Homo sapiens
  misc_RNA (1)...(19): siRNA sense strand
agagagagauagcuacaca

SEQ ID NO: 692398 - RNA, 19 nt, Homo sapiens
  misc_RNA (1)...(19): siRNA sense strand
uagggaaccucgccaagga

SEQ ID NO: 692399 - RNA, 19 nt, Homo sapiens
  misc_RNA (1)...(19): siRNA sense strand
gaccaucacucugcacauc

SEQ ID NO: 692400 - RNA, 19 nt, Homo sapiens
  misc_RNA (1)...(19): siRNA sense strand
aaauaucacugagcuggaa

SEQ ID NO: 692401 - RNA, 19 nt, Homo sapiens
  misc_RNA (1)...(19): siRNA sense strand
ggacugccguugcccugau

SEQ ID NO: 692402 - RNA, 19 nt, Homo sapiens
  misc_RNA (1)...(19): siRNA sense strand
gcuucugaaucccaacaua

SEQ ID NO: 692403 - RNA, 19 nt, Homo sapiens
  misc_RNA (1)...(19): siRNA sense strand
uaaaagugauggccauuga

SEQ ID NO: 692404 - RNA, 19 nt, Homo sapiens
  misc_RNA (1)...(19): siRNA sense strand
gacaacccaccgaccuuua

SEQ ID NO: 692405 - RNA, 19 nt, Homo sapiens
  misc_RNA (1)...(19): siRNA sense strand
cacugcauauuguaaagua

SEQ ID NO: 692406 - RNA, 19 nt, Homo sapiens
  misc_RNA (1)...(19): siRNA sense strand
ugagacaacuguucaagcu

SEQ ID NO: 692407 - RNA, 19 nt, Homo sapiens
  misc_RNA (1)...(19): siRNA sense strand
ggaagugagacaacuguuc

SEQ ID NO: 692408 - RNA, 19 nt, Homo sapiens
  misc_RNA (1)...(19): siRNA sense strand
ccacugagggcuacuuuca

SEQ ID NO: 692409 - RNA, 19 nt, Homo sapiens
  misc_RNA (1)...(19): siRNA sense strand
gagagauagcuacacaauu

SEQ ID NO: 692410 - RNA, 19 nt, Homo sapiens
  misc_RNA (1)...(19): siRNA sense strand
caagaucuucuaugugaug

SEQ ID NO: 692411 - RNA, 19 nt, Homo sapiens
  misc_RNA (1)...(19): siRNA sense strand
gagccuccauugcgcaugu

SEQ ID NO: 692412 - RNA, 19 nt, Homo sapiens
  misc_RNA (1)...(19): siRNA sense strand
gaaaaugggaacuuacuug

SEQ ID NO: 692413 - RNA, 19 nt, Homo sapiens
  misc_RNA (1)...(19): siRNA sense strand
ucgcagaugcaaaugauaa

SEQ ID NO: 692414 - RNA, 19 nt, Homo sapiens
  misc_RNA (1)...(19): siRNA sense strand
gaagccucuugguuugaaa

SEQ ID NO: 692415 - RNA, 19 nt, Homo sapiens
  misc_RNA (1)...(19): siRNA sense strand
ggagcuacaguuucaccua

SEQ ID NO: 692416 - RNA, 19 nt, Homo sapiens
  misc_RNA (1)...(19): siRNA sense strand
aggcggagcuacaguuuca

SEQ ID NO: 692417 - RNA, 19 nt, Homo sapiens
  misc_RNA (1)...(19): siRNA sense strand
aaacacaugaucuagauuc

SEQ ID NO: 692418 - RNA, 19 nt, Homo sapiens
  misc_RNA (1)...(19): siRNA sense strand
caucaauauuggcaaggaa

SEQ ID NO: 692419 - RNA, 19 nt, Homo sapiens
  misc_RNA (1)...(19): siRNA sense strand
ucuaugccuucaucaauau

SEQ ID NO: 692420 - RNA, 19 nt, Homo sapiens
  misc_RNA (1)...(19): siRNA sense strand
aaucaucuaugccuucauc

SEQ ID NO: 692421 - RNA, 19 nt, Homo sapiens
  misc_RNA (1)...(19): siRNA sense strand
gacguguguucuggaauuu

SEQ ID NO: 692422 - RNA, 19 nt, Homo sapiens
  misc_RNA (1)...(19): siRNA sense strand
ugaagccucuugguuugaa

SEQ ID NO: 692423 - RNA, 19 nt, Homo sapiens
  misc_RNA (1)...(19): siRNA sense strand
acaccgaguuuaaauuucu

SEQ ID NO: 692424 - RNA, 19 nt, Homo sapiens
  misc_RNA (1)...(19): siRNA sense strand
ccuggugucugcuucaaga

SEQ ID NO: 692425 - RNA, 19 nt, Homo sapiens
  misc_RNA (1)...(19): siRNA sense strand
caucaaugccgaaaucauc

SEQ ID NO: 692426 - RNA, 19 nt, Homo sapiens
  misc_RNA (1)...(19): siRNA sense strand
cguguguucuggaauuuga

SEQ ID NO: 692427 - RNA, 19 nt, Homo sapiens
  misc_RNA (1)...(19): siRNA sense strand
gaauacaaugugacgauca

SEQ ID NO: 692428 - RNA, 19 nt, Homo sapiens
  misc_RNA (1)...(19): siRNA sense strand
gcagaggcgaaugcuauuu

SEQ ID NO: 692429 - RNA, 19 nt, Homo sapiens
  misc_RNA (1)...(19): siRNA sense strand
acccagagcuaguacugaa

SEQ ID NO: 692430 - RNA, 19 nt, Homo sapiens
  misc_RNA (1)...(19): siRNA sense strand
cauacagguuggugacaga

SEQ ID NO: 692431 - RNA, 19 nt, Homo sapiens
  misc_RNA (1)...(19): siRNA sense strand
ggagauaacccuggcuucu

SEQ ID NO: 692432 - RNA, 19 nt, Homo sapiens
  misc_RNA (1)...(19): siRNA sense strand
ggaacucaccacuauugga

SEQ ID NO: 692433 - RNA, 19 nt, Homo sapiens
  misc_RNA (1)...(19): siRNA sense strand
caucuaugccuucaucaau

SEQ ID NO: 692434 - RNA, 19 nt, Homo sapiens
  misc_RNA (1)...(19): siRNA sense strand
gggucaauguugcagagaa

SEQ ID NO: 692435 - RNA, 19 nt, Homo sapiens
  misc_RNA (1)...(19): siRNA sense strand
ggccuugucuccuacuaca

SEQ ID NO: 692436 - RNA, 19 nt, Homo sapiens
  misc_RNA (1)...(19): siRNA sense strand
ucacacugcauauuguaaa

SEQ ID NO: 692437 - RNA, 19 nt, Homo sapiens
  misc_RNA (1)...(19): siRNA sense strand
guggacaucacacugcaua

SEQ ID NO: 692438 - RNA, 19 nt, Homo sapiens
  misc_RNA (1)...(19): siRNA sense strand
ccgcacuucucuuugauuc

SEQ ID NO: 692439 - RNA, 19 nt, Homo sapiens
  misc_RNA (1)...(19): siRNA sense strand
ucucuuugauucagaagga

SEQ ID NO: 692440 - RNA, 19 nt, Homo sapiens
  misc_RNA (1)...(19): siRNA sense strand
ucauguaacugugcugauc

SEQ ID NO: 692441 - RNA, 19 nt, Homo sapiens
  misc_RNA (1)...(19): siRNA sense strand
caucacacugcauauugua

SEQ ID NO: 692442 - RNA, 19 nt, Homo sapiens
  misc_RNA (1)...(19): siRNA sense strand
ugauguaggugucaauucg

SEQ ID NO: 692443 - RNA, 19 nt, Homo sapiens
  misc_RNA (1)...(19): siRNA sense strand
cgacaacccaccgaccuuu

SEQ ID NO: 692444 - RNA, 19 nt, Homo sapiens
  misc_RNA (1)...(19): siRNA sense strand
cccaacauauacaagaaga

SEQ ID NO: 692445 - RNA, 19 nt, Homo sapiens
  misc_RNA (1)...(19): siRNA sense strand
gugaugaagccucuugguu

SEQ ID NO: 692446 - RNA, 19 nt, Homo sapiens
  misc_RNA (1)...(19): siRNA sense strand
accacaagaucuucuaugu

SEQ ID NO: 692447 - RNA, 19 nt, Homo sapiens
  misc_RNA (1)...(19): siRNA sense strand
guaguggcguuggccuuga

SEQ ID NO: 692448 - RNA, 19 nt, Homo sapiens
  misc_RNA (1)...(19): siRNA sense strand
cagaauacaaugugacgau

SEQ ID NO: 692449 - RNA, 19 nt, Homo sapiens
  misc_RNA (1)...(19): siRNA sense strand
ugaaaguaaugacaaucca

SEQ ID NO: 692450 - RNA, 19 nt, Homo sapiens
  misc_RNA (1)...(19): siRNA sense strand
ugaaaaugcugcaccacaa

SEQ ID NO: 692451 - RNA, 19 nt, Homo sapiens
  misc_RNA (1)...(19): siRNA sense strand
ggacgaccgcaacgacaau

SEQ ID NO: 692452 - RNA, 19 nt, Homo sapiens
  misc_RNA (1)...(19): siRNA sense strand
gcaacacacugcagaauua

SEQ ID NO: 692453 - RNA, 19 nt, Homo sapiens
  misc_RNA (1)...(19): siRNA sense strand
gaaaucagauggcaguaaa

SEQ ID NO: 692454 - RNA, 19 nt, Homo sapiens
  misc_RNA (1)...(19): siRNA sense strand
gaaagacggaguuuaauuu

SEQ ID NO: 692455 - RNA, 19 nt, Homo sapiens
  misc_RNA (1)...(19): siRNA sense strand
gcagaaauccuaccacuug

SEQ ID NO: 692456 - RNA, 19 nt, Homo sapiens
  misc_RNA (1)...(19): siRNA sense strand
gaagacaccuuuggacaga

SEQ ID NO: 692457 - RNA, 19 nt, Homo sapiens
  misc_RNA (1)...(19): siRNA sense strand
gcucugcgcucuucgauau

SEQ ID NO: 692458 - RNA, 19 nt, Homo sapiens
  misc_RNA (1)...(19): siRNA sense strand
ggaaagacggaguuuaauu

SEQ ID NO: 692459 - RNA, 19 nt, Homo sapiens
  misc_RNA (1)...(19): siRNA sense strand
gaacacauauugcuuugcu

SEQ ID NO: 692460 - RNA, 19 nt, Homo sapiens
  misc_RNA (1)...(19): siRNA sense strand
ggacuuugccuuauuccua

SEQ ID NO: 692461 - RNA, 19 nt, Homo sapiens
  misc_RNA (1)...(19): siRNA sense strand
gaaggugauguuccauuua

SEQ ID NO: 692462 - RNA, 19 nt, Homo sapiens
  misc_RNA (1)...(19): siRNA sense strand
caggaaagacggaguuuaa

SEQ ID NO: 692463 - RNA, 19 nt, Homo sapiens
  misc_RNA (1)...(19): siRNA sense strand
ugacugaugccaaugauaa

SEQ ID NO: 692464 - RNA, 19 nt, Homo sapiens
  misc_RNA (1)...(19): siRNA sense strand
aauuugaccugaacucuaa

SEQ ID NO: 692465 - RNA, 19 nt, Homo sapiens
  misc_RNA (1)...(19): siRNA sense strand
gaauccagaguacaauaua

SEQ ID NO: 692466 - RNA, 19 nt, Homo sapiens
  misc_RNA (1)...(19): siRNA sense strand
aaggugauguuccauuuaa

SEQ ID NO: 692467 - RNA, 19 nt, Homo sapiens
  misc_RNA (1)...(19): siRNA sense strand
gcaguugaguucaggacaa

SEQ ID NO: 692468 - RNA, 19 nt, Homo sapiens
  misc_RNA (1)...(19): siRNA sense strand
guaaauacccugagauggu

SEQ ID NO: 692469 - RNA, 19 nt, Homo sapiens
  misc_RNA (1)...(19): siRNA sense strand
gaggagauaugcgggaaga

SEQ ID NO: 692470 - RNA, 19 nt, Homo sapiens
  misc_RNA (1)...(19): siRNA sense strand
gagcugggaacacauauug

SEQ ID NO: 692471 - RNA, 19 nt, Homo sapiens
  misc_RNA (1)...(19): siRNA sense strand
gggaacacauauugcuuug

SEQ ID NO: 692472 - RNA, 19 nt, Homo sapiens
  misc_RNA (1)...(19): siRNA sense strand
guagugagcaguugaguuc

SEQ ID NO: 692473 - RNA, 19 nt, Homo sapiens
  misc_RNA (1)...(19): siRNA sense strand
caaaguccgugacaaggau

SEQ ID NO: 692474 - RNA, 19 nt, Homo sapiens
  misc_RNA (1)...(19): siRNA sense strand
ggagguagaagucauagau

SEQ ID NO: 692475 - RNA, 19 nt, Homo sapiens
  misc_RNA (1)...(19): siRNA sense strand
ggagaucgaggacauuaau

SEQ ID NO: 692476 - RNA, 19 nt, Homo sapiens
  misc_RNA (1)...(19): siRNA sense strand
gagaaaagcagaaauccua

SEQ ID NO: 692477 - RNA, 19 nt, Homo sapiens
  misc_RNA (1)...(19): siRNA sense strand
uggcacacgauuuauauua

SEQ ID NO: 692478 - RNA, 19 nt, Homo sapiens
  misc_RNA (1)...(19): siRNA sense strand
ugauaaugcuccaguguuc

SEQ ID NO: 692479 - RNA, 19 nt, Homo sapiens
  misc_RNA (1)...(19): siRNA sense strand
gcacacgauuuauauuagg

SEQ ID NO: 692480 - RNA, 19 nt, Homo sapiens
  misc_RNA (1)...(19): siRNA sense strand
cagccuggcacacgauuua

SEQ ID NO: 692481 - RNA, 19 nt, Homo sapiens
  misc_RNA (1)...(19): siRNA sense strand
aggcugagcugcaguuuua

SEQ ID NO: 692482 - RNA, 19 nt, Homo sapiens
  misc_RNA (1)...(19): siRNA sense strand
gcaaugcacaguggaggua

SEQ ID NO: 692483 - RNA, 19 nt, Homo sapiens
  misc_RNA (1)...(19): siRNA sense strand
cagaaauccuaccacuuga

SEQ ID NO: 692484 - RNA, 19 nt, Homo sapiens
  misc_RNA (1)...(19): siRNA sense strand
uaaauuggaaggugauguu

SEQ ID NO: 692485 - RNA, 19 nt, Homo sapiens
  misc_RNA (1)...(19): siRNA sense strand
ucacagucuuccuauauag

SEQ ID NO: 692486 - RNA, 19 nt, Homo sapiens
  misc_RNA (1)...(19): siRNA sense strand
ggcacacgauuuauauuag

SEQ ID NO: 692487 - RNA, 19 nt, Homo sapiens
  misc_RNA (1)...(19): siRNA sense strand
gaguucaggacaagacaua

SEQ ID NO: 692488 - RNA, 19 nt, Homo sapiens
  misc_RNA (1)...(19): siRNA sense strand
gagccucuauuucacaagu

SEQ ID NO: 692489 - RNA, 19 nt, Homo sapiens
  misc_RNA (1)...(19): siRNA sense strand
ggcaguaaauacccugaga

SEQ ID NO: 692490 - RNA, 19 nt, Homo sapiens
  misc_RNA (1)...(19): siRNA sense strand
ggauauugguagcaacaca

SEQ ID NO: 692491 - RNA, 19 nt, Homo sapiens
  misc_RNA (1)...(19): siRNA sense strand
ggccuuauuuccacuuugu

SEQ ID NO: 692492 - RNA, 19 nt, Homo sapiens
  misc_RNA (1)...(19): siRNA sense strand
ggacgguggaggaaugauu

SEQ ID NO: 692493 - RNA, 19 nt, Homo sapiens
  misc_RNA (1)...(19): siRNA sense strand
gcacagauacacguucuag

SEQ ID NO: 692494 - RNA, 19 nt, Homo sapiens
  misc_RNA (1)...(19): siRNA sense strand
gaacuuuuaucacgugaau

SEQ ID NO: 692495 - RNA, 19 nt, Homo sapiens
  misc_RNA (1)...(19): siRNA sense strand
gcgagcagaauccagagua

SEQ ID NO: 692496 - RNA, 19 nt, Homo sapiens
  misc_RNA (1)...(19): siRNA sense strand
gacaaggauuccagacaca

SEQ ID NO: 692497 - RNA, 19 nt, Homo sapiens
  misc_RNA (1)...(19): siRNA sense strand
cuagccagaucacccaauu

SEQ ID NO: 692498 - RNA, 19 nt, Homo sapiens
  misc_RNA (1)...(19): siRNA sense strand
aaucagauggcaguaaaua

SEQ ID NO: 692499 - RNA, 19 nt, Homo sapiens
  misc_RNA (1)...(19): siRNA sense strand
cagauacacguucuaguga

SEQ ID NO: 692500 - RNA, 19 nt, Homo sapiens
  misc_RNA (1)...(19): siRNA sense strand
caauuugaccugaacucua

SEQ ID NO: 692501 - RNA, 19 nt, Homo sapiens
  misc_RNA (1)...(19): siRNA sense strand
ucaguucggagaagccuua

SEQ ID NO: 692502 - RNA, 19 nt, Homo sapiens
  misc_RNA (1)...(19): siRNA sense strand
ccaacggccaagucucuua

SEQ ID NO: 692503 - RNA, 19 nt, Homo sapiens
  misc_RNA (1)...(19): siRNA sense strand
cucacagucuuccuauaua

SEQ ID NO: 692504 - RNA, 19 nt, Homo sapiens
  misc_RNA (1)...(19): siRNA sense strand
cuugugcucuggaauuuga

SEQ ID NO: 692505 - RNA, 19 nt, Homo sapiens
  misc_RNA (1)...(19): siRNA sense strand
cagaauccagaguacaaua

SEQ ID NO: 692506 - RNA, 19 nt, Homo sapiens
  misc_RNA (1)...(19): siRNA sense strand
ucucuacccaaccuaauua

SEQ ID NO: 692507 - RNA, 19 nt, Homo sapiens
  misc_RNA (1)...(19): siRNA sense strand
ucaaugccgagauuacuuu

SEQ ID NO: 692508 - RNA, 19 nt, Homo sapiens
  misc_RNA (1)...(19): siRNA sense strand
guauacagggugagccuuu

SEQ ID NO: 692509 - RNA, 19 nt, Homo sapiens
  misc_RNA (1)...(19): siRNA sense strand
ugaauugacuucccaucag

SEQ ID NO: 692510 - RNA, 19 nt, Homo sapiens
  misc_RNA (1)...(19): siRNA sense strand
cguauaaauuagugacaga

SEQ ID NO: 692511 - RNA, 19 nt, Homo sapiens
  misc_RNA (1)...(19): siRNA sense strand
gcucaaaguccgugacaag

SEQ ID NO: 692512 - RNA, 19 nt, Homo sapiens
  misc_RNA (1)...(19): siRNA sense strand
gggugucaaugccgagauu

SEQ ID NO: 692513 - RNA, 19 nt, Homo sapiens
  misc_RNA (1)...(19): siRNA sense strand
agacauacuuugcggugau

SEQ ID NO: 692514 - RNA, 19 nt, Homo sapiens
  misc_RNA (1)...(19): siRNA sense strand
cagccuggucucuguguua

SEQ ID NO: 692515 - RNA, 19 nt, Homo sapiens
  misc_RNA (1)...(19): siRNA sense strand
gcaucacccugcacauugg

SEQ ID NO: 692516 - RNA, 19 nt, Homo sapiens
  misc_RNA (1)...(19): siRNA sense strand
guucagcguccaggaguua

SEQ ID NO: 692517 - RNA, 19 nt, Homo sapiens
  misc_RNA (1)...(19): siRNA sense strand
cagugaagcuagccagauc

SEQ ID NO: 692518 - RNA, 19 nt, Homo sapiens
  misc_RNA (1)...(19): siRNA sense strand
acccugagaugguauugaa

SEQ ID NO: 692519 - RNA, 19 nt, Homo sapiens
  misc_RNA (1)...(19): siRNA sense strand
gacauacuuugcggugauu

SEQ ID NO: 692520 - RNA, 19 nt, Homo sapiens
  misc_RNA (1)...(19): siRNA sense strand
acagauacacguucuagug

SEQ ID NO: 692521 - RNA, 19 nt, Homo sapiens
  misc_RNA (1)...(19): siRNA sense strand
guggagaucgaggacauua

SEQ ID NO: 692522 - RNA, 19 nt, Homo sapiens
  misc_RNA (1)...(19): siRNA sense strand
cuucaagaaacacguauaa

SEQ ID NO: 692523 - RNA, 19 nt, Homo sapiens
  misc_RNA (1)...(19): siRNA sense strand
cagacacaauggagaagug

SEQ ID NO: 692524 - RNA, 19 nt, Homo sapiens
  misc_RNA (1)...(19): siRNA sense strand
gucaaagaauauuccauag

SEQ ID NO: 692525 - RNA, 19 nt, Homo sapiens
  misc_RNA (1)...(19): siRNA sense strand
uuaaugaccacacgccaaa

SEQ ID NO: 692526 - RNA, 19 nt, Homo sapiens
  misc_RNA (1)...(19): siRNA sense strand
cauccuacguguccauaag

SEQ ID NO: 692527 - RNA, 19 nt, Homo sapiens
  misc_RNA (1)...(19): siRNA sense strand
agcgggagcugucauccua

SEQ ID NO: 692528 - RNA, 19 nt, Homo sapiens
  misc_RNA (1)...(19): siRNA sense strand
ucucacagucuuccuauau

SEQ ID NO: 692529 - RNA, 19 nt, Homo sapiens
  misc_RNA (1)...(19): siRNA sense strand
cagcaucacccugcacauu

SEQ ID NO: 692530 - RNA, 19 nt, Homo sapiens
  misc_RNA (1)...(19): siRNA sense strand
gcacaguggagguagaagu

SEQ ID NO: 692531 - RNA, 19 nt, Homo sapiens
  misc_RNA (1)...(19): siRNA sense strand
ucuagugacugaugccaau

SEQ ID NO: 692532 - RNA, 19 nt, Homo sapiens
  misc_RNA (1)...(19): siRNA sense strand
gauacacguucuagugacu

SEQ ID NO: 692533 - RNA, 19 nt, Homo sapiens
  misc_RNA (1)...(19): siRNA sense strand
aauccuaccacuugacuuu

SEQ ID NO: 692534 - RNA, 19 nt, Homo sapiens
  misc_RNA (1)...(19): siRNA sense strand
ggagauaugcgggaagaag

SEQ ID NO: 692535 - RNA, 19 nt, Homo sapiens
  misc_RNA (1)...(19): siRNA sense strand
caacucagucccagugauc

SEQ ID NO: 692536 - RNA, 19 nt, Homo sapiens
  misc_RNA (1)...(19): siRNA sense strand
gaaauccuaccacuugacu

SEQ ID NO: 692537 - RNA, 19 nt, Homo sapiens
  misc_RNA (1)...(19): siRNA sense strand
gacggaguuuaauuuccua

SEQ ID NO: 692538 - RNA, 19 nt, Homo sapiens
  misc_RNA (1)...(19): siRNA sense strand
gcagaauuaccaacucagu

SEQ ID NO: 692539 - RNA, 19 nt, Homo sapiens
  misc_RNA (1)...(19): siRNA sense strand
gcaagggacgguggaggaa

SEQ ID NO: 692540 - RNA, 19 nt, Homo sapiens
  misc_RNA (1)...(19): siRNA sense strand
cagcuugugcucuggaauu

SEQ ID NO: 692541 - RNA, 19 nt, Homo sapiens
  misc_RNA (1)...(19): siRNA sense strand
agacaccuuuggacagaga

SEQ ID NO: 692542 - RNA, 19 nt, Homo sapiens
  misc_RNA (1)...(19): siRNA sense strand
guucggagaagccuuacuu

SEQ ID NO: 692543 - RNA, 19 nt, Homo sapiens
  misc_RNA (1)...(19): siRNA sense strand
ccuggucucuguguuaaau

SEQ ID NO: 692544 - RNA, 19 nt, Homo sapiens
  misc_RNA (1)...(19): siRNA sense strand
ggacgaccgcaacgacaau

SEQ ID NO: 692545 - RNA, 19 nt, Homo sapiens
  misc_RNA (1)...(19): siRNA sense strand
aguguucagucaagacgua

SEQ ID NO: 692546 - RNA, 19 nt, Homo sapiens
  misc_RNA (1)...(19): siRNA sense strand
aaagacggaguuuaauuuc

SEQ ID NO: 692547 - RNA, 19 nt, Homo sapiens
  misc_RNA (1)...(19): siRNA sense strand
uaaauccgaauccgugguu

SEQ ID NO: 692548 - RNA, 19 nt, Homo sapiens
  misc_RNA (1)...(19): siRNA sense strand
gccuggagccucuauuuca

SEQ ID NO: 692549 - RNA, 19 nt, Homo sapiens
  misc_RNA (1)...(19): siRNA sense strand
ucaaaguccgugacaagga

SEQ ID NO: 692550 - RNA, 19 nt, Homo sapiens
  misc_RNA (1)...(19): siRNA sense strand
gugaauugacuucccauca

SEQ ID NO: 692551 - RNA, 19 nt, Homo sapiens
  misc_RNA (1)...(19): siRNA sense strand
aggaggugcugccggauau

SEQ ID NO: 692552 - RNA, 19 nt, Homo sapiens
  misc_RNA (1)...(19): siRNA sense strand
gcaacacacugcagaauua

SEQ ID NO: 692553 - RNA, 19 nt, Homo sapiens
  misc_RNA (1)...(19): siRNA sense strand
gaaaucagauggcaguaaa

SEQ ID NO: 692554 - RNA, 19 nt, Homo sapiens
  misc_RNA (1)...(19): siRNA sense strand
gaaagacggaguuuaauuu

SEQ ID NO: 692555 - RNA, 19 nt, Homo sapiens
  misc_RNA (1)...(19): siRNA sense strand
gcagaaauccuaccacuug

SEQ ID NO: 692556 - RNA, 19 nt, Homo sapiens
  misc_RNA (1)...(19): siRNA sense strand
gaagacaccuuuggacaga

SEQ ID NO: 692557 - RNA, 19 nt, Homo sapiens
  misc_RNA (1)...(19): siRNA sense strand
gcucugcgcucuucgauau

SEQ ID NO: 692558 - RNA, 19 nt, Homo sapiens
  misc_RNA (1)...(19): siRNA sense strand
ggaaagacggaguuuaauu

SEQ ID NO: 692559 - RNA, 19 nt, Homo sapiens
  misc_RNA (1)...(19): siRNA sense strand
gaacacauauugcuuugcu

SEQ ID NO: 692560 - RNA, 19 nt, Homo sapiens
  misc_RNA (1)...(19): siRNA sense strand
ggacuuugccuuauuccua

SEQ ID NO: 692561 - RNA, 19 nt, Homo sapiens
  misc_RNA (1)...(19): siRNA sense strand
gaaggugauguuccauuua

SEQ ID NO: 692562 - RNA, 19 nt, Homo sapiens
  misc_RNA (1)...(19): siRNA sense strand
caggaaagacggaguuuaa

SEQ ID NO: 692563 - RNA, 19 nt, Homo sapiens
  misc_RNA (1)...(19): siRNA sense strand
ugacugaugccaaugauaa

SEQ ID NO: 692564 - RNA, 19 nt, Homo sapiens
  misc_RNA (1)...(19): siRNA sense strand
aauuugaccugaacucuaa

SEQ ID NO: 692565 - RNA, 19 nt, Homo sapiens
  misc_RNA (1)...(19): siRNA sense strand
gaauccagaguacaauaua

SEQ ID NO: 692566 - RNA, 19 nt, Homo sapiens
  misc_RNA (1)...(19): siRNA sense strand
aaggugauguuccauuuaa

SEQ ID NO: 692567 - RNA, 19 nt, Homo sapiens
  misc_RNA (1)...(19): siRNA sense strand
gcaguugaguucaggacaa

SEQ ID NO: 692568 - RNA, 19 nt, Homo sapiens
  misc_RNA (1)...(19): siRNA sense strand
guaaauacccugagauggu

SEQ ID NO: 692569 - RNA, 19 nt, Homo sapiens
  misc_RNA (1)...(19): siRNA sense strand
gaggagauaugcgggaaga

SEQ ID NO: 692570 - RNA, 19 nt, Homo sapiens
  misc_RNA (1)...(19): siRNA sense strand
gagcugggaacacauauug

SEQ ID NO: 692571 - RNA, 19 nt, Homo sapiens
  misc_RNA (1)...(19): siRNA sense strand
gggaacacauauugcuuug

SEQ ID NO: 692572 - RNA, 19 nt, Homo sapiens
  misc_RNA (1)...(19): siRNA sense strand
guagugagcaguugaguuc

SEQ ID NO: 692573 - RNA, 19 nt, Homo sapiens
  misc_RNA (1)...(19): siRNA sense strand
caaaguccgugacaaggau

SEQ ID NO: 692574 - RNA, 19 nt, Homo sapiens
  misc_RNA (1)...(19): siRNA sense strand
ggagguagaagucauagau

SEQ ID NO: 692575 - RNA, 19 nt, Homo sapiens
  misc_RNA (1)...(19): siRNA sense strand
ggagaucgaggacauuaau

SEQ ID NO: 692576 - RNA, 19 nt, Homo sapiens
  misc_RNA (1)...(19): siRNA sense strand
gagaaaagcagaaauccua

SEQ ID NO: 692577 - RNA, 19 nt, Homo sapiens
  misc_RNA (1)...(19): siRNA sense strand
uggcacacgauuuauauua

SEQ ID NO: 692578 - RNA, 19 nt, Homo sapiens
  misc_RNA (1)...(19): siRNA sense strand
ugauaaugcuccaguguuc

SEQ ID NO: 692579 - RNA, 19 nt, Homo sapiens
  misc_RNA (1)...(19): siRNA sense strand
gcacacgauuuauauuagg

SEQ ID NO: 692580 - RNA, 19 nt, Homo sapiens
  misc_RNA (1)...(19): siRNA sense strand
cagccuggcacacgauuua

SEQ ID NO: 692581 - RNA, 19 nt, Homo sapiens
  misc_RNA (1)...(19): siRNA sense strand
aggcugagcugcaguuuua

SEQ ID NO: 692582 - RNA, 19 nt, Homo sapiens
  misc_RNA (1)...(19): siRNA sense strand
gcaaugcacaguggaggua

SEQ ID NO: 692583 - RNA, 19 nt, Homo sapiens
  misc_RNA (1)...(19): siRNA sense strand
cagaaauccuaccacuuga

SEQ ID NO: 692584 - RNA, 19 nt, Homo sapiens
  misc_RNA (1)...(19): siRNA sense strand
uaaauuggaaggugauguu

SEQ ID NO: 692585 - RNA, 19 nt, Homo sapiens
  misc_RNA (1)...(19): siRNA sense strand
ucacagucuuccuauauag

SEQ ID NO: 692586 - RNA, 19 nt, Homo sapiens
  misc_RNA (1)...(19): siRNA sense strand
ggcacacgauuuauauuag

SEQ ID NO: 692587 - RNA, 19 nt, Homo sapiens
  misc_RNA (1)...(19): siRNA sense strand
gaguucaggacaagacaua

SEQ ID NO: 692588 - RNA, 19 nt, Homo sapiens
  misc_RNA (1)...(19): siRNA sense strand
gagccucuauuucacaagu

SEQ ID NO: 692589 - RNA, 19 nt, Homo sapiens
  misc_RNA (1)...(19): siRNA sense strand
ggcaguaaauacccugaga

SEQ ID NO: 692590 - RNA, 19 nt, Homo sapiens
  misc_RNA (1)...(19): siRNA sense strand
ggauauugguagcaacaca

SEQ ID NO: 692591 - RNA, 19 nt, Homo sapiens
  misc_RNA (1)...(19): siRNA sense strand
ggccuuauuuccacuuugu

SEQ ID NO: 692592 - RNA, 19 nt, Homo sapiens
  misc_RNA (1)...(19): siRNA sense strand
ggacgguggaggaaugauu

SEQ ID NO: 692593 - RNA, 19 nt, Homo sapiens
  misc_RNA (1)...(19): siRNA sense strand
gcacagauacacguucuag

SEQ ID NO: 692594 - RNA, 19 nt, Homo sapiens
  misc_RNA (1)...(19): siRNA sense strand
gaacuuuuaucacgugaau

SEQ ID NO: 692595 - RNA, 19 nt, Homo sapiens
  misc_RNA (1)...(19): siRNA sense strand
gcgagcagaauccagagua

SEQ ID NO: 692596 - RNA, 19 nt, Homo sapiens
  misc_RNA (1)...(19): siRNA sense strand
gacaaggauuccagacaca

SEQ ID NO: 692597 - RNA, 19 nt, Homo sapiens
  misc_RNA (1)...(19): siRNA sense strand
cuagccagaucacccaauu

SEQ ID NO: 692598 - RNA, 19 nt, Homo sapiens
  misc_RNA (1)...(19): siRNA sense strand
aaucagauggcaguaaaua

SEQ ID NO: 692599 - RNA, 19 nt, Homo sapiens
  misc_RNA (1)...(19): siRNA sense strand
cagauacacguucuaguga

SEQ ID NO: 692600 - RNA, 19 nt, Homo sapiens
  misc_RNA (1)...(19): siRNA sense strand
caauuugaccugaacucua

SEQ ID NO: 692601 - RNA, 19 nt, Homo sapiens
  misc_RNA (1)...(19): siRNA sense strand
ucaguucggagaagccuua

SEQ ID NO: 692602 - RNA, 19 nt, Homo sapiens
  misc_RNA (1)...(19): siRNA sense strand
ccaacggccaagucucuua

SEQ ID NO: 692603 - RNA, 19 nt, Homo sapiens
  misc_RNA (1)...(19): siRNA sense strand
cucacagucuuccuauaua

SEQ ID NO: 692604 - RNA, 19 nt, Homo sapiens
  misc_RNA (1)...(19): siRNA sense strand
cuugugcucuggaauuuga

SEQ ID NO: 692605 - RNA, 19 nt, Homo sapiens
  misc_RNA (1)...(19): siRNA sense strand
cagaauccagaguacaaua

SEQ ID NO: 692606 - RNA, 19 nt, Homo sapiens
  misc_RNA (1)...(19): siRNA sense strand
ucucuacccaaccuaauua

SEQ ID NO: 692607 - RNA, 19 nt, Homo sapiens
  misc_RNA (1)...(19): siRNA sense strand
ucaaugccgagauuacuuu

SEQ ID NO: 692608 - RNA, 19 nt, Homo sapiens
  misc_RNA (1)...(19): siRNA sense strand
guauacagggugagccuuu

SEQ ID NO: 692609 - RNA, 19 nt, Homo sapiens
  misc_RNA (1)...(19): siRNA sense strand
ugaauugacuucccaucag

SEQ ID NO: 692610 - RNA, 19 nt, Homo sapiens
  misc_RNA (1)...(19): siRNA sense strand
cguauaaauuagugacaga

SEQ ID NO: 692611 - RNA, 19 nt, Homo sapiens
  misc_RNA (1)...(19): siRNA sense strand
gcucaaaguccgugacaag

SEQ ID NO: 692612 - RNA, 19 nt, Homo sapiens
  misc_RNA (1)...(19): siRNA sense strand
gggugucaaugccgagauu

SEQ ID NO: 692613 - RNA, 19 nt, Homo sapiens
  misc_RNA (1)...(19): siRNA sense strand
agacauacuuugcggugau

SEQ ID NO: 692614 - RNA, 19 nt, Homo sapiens
  misc_RNA (1)...(19): siRNA sense strand
cagccuggucucuguguua

SEQ ID NO: 692615 - RNA, 19 nt, Homo sapiens
  misc_RNA (1)...(19): siRNA sense strand
gcaucacccugcacauugg

SEQ ID NO: 692616 - RNA, 19 nt, Homo sapiens
  misc_RNA (1)...(19): siRNA sense strand
guucagcguccaggaguua

SEQ ID NO: 692617 - RNA, 19 nt, Homo sapiens
  misc_RNA (1)...(19): siRNA sense strand
cagugaagcuagccagauc

SEQ ID NO: 692618 - RNA, 19 nt, Homo sapiens
  misc_RNA (1)...(19): siRNA sense strand
acccugagaugguauugaa

SEQ ID NO: 692619 - RNA, 19 nt, Homo sapiens
  misc_RNA (1)...(19): siRNA sense strand
gacauacuuugcggugauu

SEQ ID NO: 692620 - RNA, 19 nt, Homo sapiens
  misc_RNA (1)...(19): siRNA sense strand
acagauacacguucuagug

SEQ ID NO: 692621 - RNA, 19 nt, Homo sapiens
  misc_RNA (1)...(19): siRNA sense strand
guggagaucgaggacauua

SEQ ID NO: 692622 - RNA, 19 nt, Homo sapiens
  misc_RNA (1)...(19): siRNA sense strand
cuucaagaaacacguauaa

SEQ ID NO: 692623 - RNA, 19 nt, Homo sapiens
  misc_RNA (1)...(19): siRNA sense strand
cagacacaauggagaagug

SEQ ID NO: 692624 - RNA, 19 nt, Homo sapiens
  misc_RNA (1)...(19): siRNA sense strand
gucaaagaauauuccauag

SEQ ID NO: 692625 - RNA, 19 nt, Homo sapiens
  misc_RNA (1)...(19): siRNA sense strand
uuaaugaccacacgccaaa

SEQ ID NO: 692626 - RNA, 19 nt, Homo sapiens
  misc_RNA (1)...(19): siRNA sense strand
cauccuacguguccauaag

SEQ ID NO: 692627 - RNA, 19 nt, Homo sapiens
  misc_RNA (1)...(19): siRNA sense strand
agcgggagcugucauccua

SEQ ID NO: 692628 - RNA, 19 nt, Homo sapiens
  misc_RNA (1)...(19): siRNA sense strand
ucucacagucuuccuauau

SEQ ID NO: 692629 - RNA, 19 nt, Homo sapiens
  misc_RNA (1)...(19): siRNA sense strand
cagcaucacccugcacauu

SEQ ID NO: 692630 - RNA, 19 nt, Homo sapiens
  misc_RNA (1)...(19): siRNA sense strand
gcacaguggagguagaagu

SEQ ID NO: 692631 - RNA, 19 nt, Homo sapiens
  misc_RNA (1)...(19): siRNA sense strand
ucuagugacugaugccaau

SEQ ID NO: 692632 - RNA, 19 nt, Homo sapiens
  misc_RNA (1)...(19): siRNA sense strand
gauacacguucuagugacu

SEQ ID NO: 692633 - RNA, 19 nt, Homo sapiens
  misc_RNA (1)...(19): siRNA sense strand
aauccuaccacuugacuuu

SEQ ID NO: 692634 - RNA, 19 nt, Homo sapiens
  misc_RNA (1)...(19): siRNA sense strand
ggagauaugcgggaagaag

SEQ ID NO: 692635 - RNA, 19 nt, Homo sapiens
  misc_RNA (1)...(19): siRNA sense strand
caacucagucccagugauc

SEQ ID NO: 692636 - RNA, 19 nt, Homo sapiens
  misc_RNA (1)...(19): siRNA sense strand
gaaauccuaccacuugacu

SEQ ID NO: 692637 - RNA, 19 nt, Homo sapiens
  misc_RNA (1)...(19): siRNA sense strand
gacggaguuuaauuuccua

SEQ ID NO: 692638 - RNA, 19 nt, Homo sapiens
  misc_RNA (1)...(19): siRNA sense strand
gcagaauuaccaacucagu

SEQ ID NO: 692639 - RNA, 19 nt, Homo sapiens
  misc_RNA (1)...(19): siRNA sense strand
gcaagggacgguggaggaa

SEQ ID NO: 692640 - RNA, 19 nt, Homo sapiens
  misc_RNA (1)...(19): siRNA sense strand
cagcuugugcucuggaauu

SEQ ID NO: 692641 - RNA, 19 nt, Homo sapiens
  misc_RNA (1)...(19): siRNA sense strand
agacaccuuuggacagaga

SEQ ID NO: 692642 - RNA, 19 nt, Homo sapiens
  misc_RNA (1)...(19): siRNA sense strand
guucggagaagccuuacuu

SEQ ID NO: 692643 - RNA, 19 nt, Homo sapiens
  misc_RNA (1)...(19): siRNA sense strand
ccuggucucuguguuaaau

SEQ ID NO: 692644 - RNA, 19 nt, Homo sapiens
  misc_RNA (1)...(19): siRNA sense strand
ggacgaccgcaacgacaau

SEQ ID NO: 692645 - RNA, 19 nt, Homo sapiens
  misc_RNA (1)...(19): siRNA sense strand
aguguucagucaagacgua

SEQ ID NO: 692646 - RNA, 19 nt, Homo sapiens
  misc_RNA (1)...(19): siRNA sense strand
aaagacggaguuuaauuuc

SEQ ID NO: 692647 - RNA, 19 nt, Homo sapiens
  misc_RNA (1)...(19): siRNA sense strand
uaaauccgaauccgugguu

SEQ ID NO: 692648 - RNA, 19 nt, Homo sapiens
  misc_RNA (1)...(19): siRNA sense strand
gccuggagccucuauuuca

SEQ ID NO: 692649 - RNA, 19 nt, Homo sapiens
  misc_RNA (1)...(19): siRNA sense strand
ucaaaguccgugacaagga

SEQ ID NO: 692650 - RNA, 19 nt, Homo sapiens
  misc_RNA (1)...(19): siRNA sense strand
gugaauugacuucccauca

SEQ ID NO: 692651 - RNA, 19 nt, Homo sapiens
  misc_RNA (1)...(19): siRNA sense strand
aggaggugcugccggauau

SEQ ID NO: 692652 - RNA, 19 nt, Homo sapiens
  misc_RNA (1)...(19): siRNA sense strand
gggcaaaucuuuagucuga

SEQ ID NO: 692653 - RNA, 19 nt, Homo sapiens
  misc_RNA (1)...(19): siRNA sense strand
gaaagacggaguuuaauuu

SEQ ID NO: 692654 - RNA, 19 nt, Homo sapiens
  misc_RNA (1)...(19): siRNA sense strand
gacaauagcccagaaguua

SEQ ID NO: 692655 - RNA, 19 nt, Homo sapiens
  misc_RNA (1)...(19): siRNA sense strand
ucaaagagcggagaaauua

SEQ ID NO: 692656 - RNA, 19 nt, Homo sapiens
  misc_RNA (1)...(19): siRNA sense strand
uaaacucucugcagaagua

SEQ ID NO: 692657 - RNA, 19 nt, Homo sapiens
  misc_RNA (1)...(19): siRNA sense strand
uaacccaaguuucucauua

SEQ ID NO: 692658 - RNA, 19 nt, Homo sapiens
  misc_RNA (1)...(19): siRNA sense strand
ggcaucaacucagaaauua

SEQ ID NO: 692659 - RNA, 19 nt, Homo sapiens
  misc_RNA (1)...(19): siRNA sense strand
ucagagacgucaacgauaa

SEQ ID NO: 692660 - RNA, 19 nt, Homo sapiens
  misc_RNA (1)...(19): siRNA sense strand
caacagaguuaccaucguu

SEQ ID NO: 692661 - RNA, 19 nt, Homo sapiens
  misc_RNA (1)...(19): siRNA sense strand
caaggaauauucaaugguu

SEQ ID NO: 692662 - RNA, 19 nt, Homo sapiens
  misc_RNA (1)...(19): siRNA sense strand
gcacaagauuuauacuaga

SEQ ID NO: 692663 - RNA, 19 nt, Homo sapiens
  misc_RNA (1)...(19): siRNA sense strand
gcucugcgcucuucgauau

SEQ ID NO: 692664 - RNA, 19 nt, Homo sapiens
  misc_RNA (1)...(19): siRNA sense strand
gauuaucucuucauccaaa

SEQ ID NO: 692665 - RNA, 19 nt, Homo sapiens
  misc_RNA (1)...(19): siRNA sense strand
ggaaagacggaguuuaauu

SEQ ID NO: 692666 - RNA, 19 nt, Homo sapiens
  misc_RNA (1)...(19): siRNA sense strand
gcaauugaguucaggacaa

SEQ ID NO: 692667 - RNA, 19 nt, Homo sapiens
  misc_RNA (1)...(19): siRNA sense strand
ggacuuugccuuauuccua

SEQ ID NO: 692668 - RNA, 19 nt, Homo sapiens
  misc_RNA (1)...(19): siRNA sense strand
gaaguuacauuccauucuc

SEQ ID NO: 692669 - RNA, 19 nt, Homo sapiens
  misc_RNA (1)...(19): siRNA sense strand
gcaaaucuuuagucugaau

SEQ ID NO: 692670 - RNA, 19 nt, Homo sapiens
  misc_RNA (1)...(19): siRNA sense strand
gaacacuaauugcuuugau

SEQ ID NO: 692671 - RNA, 19 nt, Homo sapiens
  misc_RNA (1)...(19): siRNA sense strand
gcggagaaauuaccacuca

SEQ ID NO: 692672 - RNA, 19 nt, Homo sapiens
  misc_RNA (1)...(19): siRNA sense strand
caggaaagacggaguuuaa

SEQ ID NO: 692673 - RNA, 19 nt, Homo sapiens
  misc_RNA (1)...(19): siRNA sense strand
gaagagaccaaggaauauu

SEQ ID NO: 692674 - RNA, 19 nt, Homo sapiens
  misc_RNA (1)...(19): siRNA sense strand
gaaauuaccacucaaaaga

SEQ ID NO: 692675 - RNA, 19 nt, Homo sapiens
  misc_RNA (1)...(19): siRNA sense strand
gggcaucaacucagaaauu

SEQ ID NO: 692676 - RNA, 19 nt, Homo sapiens
  misc_RNA (1)...(19): siRNA sense strand
ccaccaggcguccuacuua

SEQ ID NO: 692677 - RNA, 19 nt, Homo sapiens
  misc_RNA (1)...(19): siRNA sense strand
caaaauacaugaccaagau

SEQ ID NO: 692678 - RNA, 19 nt, Homo sapiens
  misc_RNA (1)...(19): siRNA sense strand
ggagaaauuaccacucaaa

SEQ ID NO: 692679 - RNA, 19 nt, Homo sapiens
  misc_RNA (1)...(19): siRNA sense strand
ggccaagucuccuacucua

SEQ ID NO: 692680 - RNA, 19 nt, Homo sapiens
  misc_RNA (1)...(19): siRNA sense strand
gaggagauaugcgggaaga

SEQ ID NO: 692681 - RNA, 19 nt, Homo sapiens
  misc_RNA (1)...(19): siRNA sense strand
cguauaaguugguaacaga

SEQ ID NO: 692682 - RNA, 19 nt, Homo sapiens
  misc_RNA (1)...(19): siRNA sense strand
gaagucccuuuuaagauua

SEQ ID NO: 692683 - RNA, 19 nt, Homo sapiens
  misc_RNA (1)...(19): siRNA sense strand
uaaccgacgccaaugauaa

SEQ ID NO: 692684 - RNA, 19 nt, Homo sapiens
  misc_RNA (1)...(19): siRNA sense strand
gcagaaguauaaacucucu

SEQ ID NO: 692685 - RNA, 19 nt, Homo sapiens
  misc_RNA (1)...(19): siRNA sense strand
ggcacaagauuuauacuag

SEQ ID NO: 692686 - RNA, 19 nt, Homo sapiens
  misc_RNA (1)...(19): siRNA sense strand
ggagaucgaggacauuaau

SEQ ID NO: 692687 - RNA, 19 nt, Homo sapiens
  misc_RNA (1)...(19): siRNA sense strand
uugaagagaccaaggaaua

SEQ ID NO: 692688 - RNA, 19 nt, Homo sapiens
  misc_RNA (1)...(19): siRNA sense strand
cagccuggcacaagauuua

SEQ ID NO: 692689 - RNA, 19 nt, Homo sapiens
  misc_RNA (1)...(19): siRNA sense strand
cgaagucccuuuuaagauu

SEQ ID NO: 692690 - RNA, 19 nt, Homo sapiens
  misc_RNA (1)...(19): siRNA sense strand
cagcauaagcgucauccua

SEQ ID NO: 692691 - RNA, 19 nt, Homo sapiens
  misc_RNA (1)...(19): siRNA sense strand
agaugcagauauuggcuua

SEQ ID NO: 692692 - RNA, 19 nt, Homo sapiens
  misc_RNA (1)...(19): siRNA sense strand
aggcugagcugcaguuuua

SEQ ID NO: 692693 - RNA, 19 nt, Homo sapiens
  misc_RNA (1)...(19): siRNA sense strand
gcaccacuguguugcaagu

SEQ ID NO: 692694 - RNA, 19 nt, Homo sapiens
  misc_RNA (1)...(19): siRNA sense strand
gaaccgggcaaaucuuuag

SEQ ID NO: 692695 - RNA, 19 nt, Homo sapiens
  misc_RNA (1)...(19): siRNA sense strand
guagugagcaauugaguuc

SEQ ID NO: 692696 - RNA, 19 nt, Homo sapiens
  misc_RNA (1)...(19): siRNA sense strand
gaccaaggaauauucaaug

SEQ ID NO: 692697 - RNA, 19 nt, Homo sapiens
  misc_RNA (1)...(19): siRNA sense strand
gcauaagcgucauccuaca

SEQ ID NO: 692698 - RNA, 19 nt, Homo sapiens
  misc_RNA (1)...(19): siRNA sense strand
agcagaagaugcagauauu

SEQ ID NO: 692699 - RNA, 19 nt, Homo sapiens
  misc_RNA (1)...(19): siRNA sense strand
ggacugguugcacaaugua

SEQ ID NO: 692700 - RNA, 19 nt, Homo sapiens
  misc_RNA (1)...(19): siRNA sense strand
aacccaaguuucucauuaa

SEQ ID NO: 692701 - RNA, 19 nt, Homo sapiens
  misc_RNA (1)...(19): siRNA sense strand
gaaacuggauuuugaagag

SEQ ID NO: 692702 - RNA, 19 nt, Homo sapiens
  misc_RNA (1)...(19): siRNA sense strand
gaguucaggacaagacaua

SEQ ID NO: 692703 - RNA, 19 nt, Homo sapiens
  misc_RNA (1)...(19): siRNA sense strand
ggauggugguggacugguu

SEQ ID NO: 692704 - RNA, 19 nt, Homo sapiens
  misc_RNA (1)...(19): siRNA sense strand
ggaacuggcacuggagaaa

SEQ ID NO: 692705 - RNA, 19 nt, Homo sapiens
  misc_RNA (1)...(19): siRNA sense strand
ggccuuauuuccacuuugu

SEQ ID NO: 692706 - RNA, 19 nt, Homo sapiens
  misc_RNA (1)...(19): siRNA sense strand
caagucuccuacucuauca

SEQ ID NO: 692707 - RNA, 19 nt, Homo sapiens
  misc_RNA (1)...(19): siRNA sense strand
gaacuuuuaucacgugaau

SEQ ID NO: 692708 - RNA, 19 nt, Homo sapiens
  misc_RNA (1)...(19): siRNA sense strand
uauaaacucucucuuaacc

SEQ ID NO: 692709 - RNA, 19 nt, Homo sapiens
  misc_RNA (1)...(19): siRNA sense strand
agacauacuuuguggugau

SEQ ID NO: 692710 - RNA, 19 nt, Homo sapiens
  misc_RNA (1)...(19): siRNA sense strand
cuggaacacuaauugcuuu

SEQ ID NO: 692711 - RNA, 19 nt, Homo sapiens
  misc_RNA (1)...(19): siRNA sense strand
guaaccgacgccaaugaua

SEQ ID NO: 692712 - RNA, 19 nt, Homo sapiens
  misc_RNA (1)...(19): siRNA sense strand
ccacugagcuccggaucca

SEQ ID NO: 692713 - RNA, 19 nt, Homo sapiens
  misc_RNA (1)...(19): siRNA sense strand
cuugugcucuggaauuuga

SEQ ID NO: 692714 - RNA, 19 nt, Homo sapiens
  misc_RNA (1)...(19): siRNA sense strand
gacauacuuuguggugauu

SEQ ID NO: 692715 - RNA, 19 nt, Homo sapiens
  misc_RNA (1)...(19): siRNA sense strand
ucaguucggagaagccuua

SEQ ID NO: 692716 - RNA, 19 nt, Homo sapiens
  misc_RNA (1)...(19): siRNA sense strand
uaucagagacgucaacgau

SEQ ID NO: 692717 - RNA, 19 nt, Homo sapiens
  misc_RNA (1)...(19): siRNA sense strand
gaguuaccaucguuuaguc

SEQ ID NO: 692718 - RNA, 19 nt, Homo sapiens
  misc_RNA (1)...(19): siRNA sense strand
uaucauggccagcgaccua

SEQ ID NO: 692719 - RNA, 19 nt, Homo sapiens
  misc_RNA (1)...(19): siRNA sense strand
gcccagaaguuacauucca

SEQ ID NO: 692720 - RNA, 19 nt, Homo sapiens
  misc_RNA (1)...(19): siRNA sense strand
cagaaccgggcaaaucuuu

SEQ ID NO: 692721 - RNA, 19 nt, Homo sapiens
  misc_RNA (1)...(19): siRNA sense strand
uagcagaagaugcagauau

SEQ ID NO: 692722 - RNA, 19 nt, Homo sapiens
  misc_RNA (1)...(19): siRNA sense strand
gcacaauguacaguugaaa

SEQ ID NO: 692723 - RNA, 19 nt, Homo sapiens
  misc_RNA (1)...(19): siRNA sense strand
guucagcguccaggaguua

SEQ ID NO: 692724 - RNA, 19 nt, Homo sapiens
  misc_RNA (1)...(19): siRNA sense strand
caaccgagacguguacaga

SEQ ID NO: 692725 - RNA, 19 nt, Homo sapiens
  misc_RNA (1)...(19): siRNA sense strand
gcagauauuggcuuaaacu

SEQ ID NO: 692726 - RNA, 19 nt, Homo sapiens
  misc_RNA (1)...(19): siRNA sense strand
gcagaagaugcagauauug

SEQ ID NO: 692727 - RNA, 19 nt, Homo sapiens
  misc_RNA (1)...(19): siRNA sense strand
uacauuccauucucuacuu

SEQ ID NO: 692728 - RNA, 19 nt, Homo sapiens
  misc_RNA (1)...(19): siRNA sense strand
ggaauauucaaugguugua

SEQ ID NO: 692729 - RNA, 19 nt, Homo sapiens
  misc_RNA (1)...(19): siRNA sense strand
cuacagaaccgggcaaauc

SEQ ID NO: 692730 - RNA, 19 nt, Homo sapiens
  misc_RNA (1)...(19): siRNA sense strand
guggagaucgaggacauua

SEQ ID NO: 692731 - RNA, 19 nt, Homo sapiens
  misc_RNA (1)...(19): siRNA sense strand
cgacuucccauccugaguu

SEQ ID NO: 692732 - RNA, 19 nt, Homo sapiens
  misc_RNA (1)...(19): siRNA sense strand
uaagcgucauccuacauau

SEQ ID NO: 692733 - RNA, 19 nt, Homo sapiens
  misc_RNA (1)...(19): siRNA sense strand
uuaaugaccacacgccaaa

SEQ ID NO: 692734 - RNA, 19 nt, Homo sapiens
  misc_RNA (1)...(19): siRNA sense strand
caauugaguucaggacaag

SEQ ID NO: 692735 - RNA, 19 nt, Homo sapiens
  misc_RNA (1)...(19): siRNA sense strand
uaacagauggaacccuaga

SEQ ID NO: 692736 - RNA, 19 nt, Homo sapiens
  misc_RNA (1)...(19): siRNA sense strand
ugacaauagcccagaaguu

SEQ ID NO: 692737 - RNA, 19 nt, Homo sapiens
  misc_RNA (1)...(19): siRNA sense strand
ggagauaugcgggaagaag

SEQ ID NO: 692738 - RNA, 19 nt, Homo sapiens
  misc_RNA (1)...(19): siRNA sense strand
acagaguuaccaucguuua

SEQ ID NO: 692739 - RNA, 19 nt, Homo sapiens
  misc_RNA (1)...(19): siRNA sense strand
gagcuccggauccagguaa

SEQ ID NO: 692740 - RNA, 19 nt, Homo sapiens
  misc_RNA (1)...(19): siRNA sense strand
gacggaguuuaauuuccua

SEQ ID NO: 692741 - RNA, 19 nt, Homo sapiens
  misc_RNA (1)...(19): siRNA sense strand
ccaagucuccuacucuauc

SEQ ID NO: 692742 - RNA, 19 nt, Homo sapiens
  misc_RNA (1)...(19): siRNA sense strand
guugcacaauguacaguug

SEQ ID NO: 692743 - RNA, 19 nt, Homo sapiens
  misc_RNA (1)...(19): siRNA sense strand
agagucagccuucgggaaa

SEQ ID NO: 692744 - RNA, 19 nt, Homo sapiens
  misc_RNA (1)...(19): siRNA sense strand
ccagguaaccgacgccaau

SEQ ID NO: 692745 - RNA, 19 nt, Homo sapiens
  misc_RNA (1)...(19): siRNA sense strand
gcacagccuggcacaagau

SEQ ID NO: 692746 - RNA, 19 nt, Homo sapiens
  misc_RNA (1)...(19): siRNA sense strand
gaaaauggggagguuaauu

SEQ ID NO: 692747 - RNA, 19 nt, Homo sapiens
  misc_RNA (1)...(19): siRNA sense strand
gagggcaucaacucagaaa

SEQ ID NO: 692748 - RNA, 19 nt, Homo sapiens
  misc_RNA (1)...(19): siRNA sense strand
cagcuugugcucuggaauu

SEQ ID NO: 692749 - RNA, 19 nt, Homo sapiens
  misc_RNA (1)...(19): siRNA sense strand
augcagauauuggcuuaaa

SEQ ID NO: 692750 - RNA, 19 nt, Homo sapiens
  misc_RNA (1)...(19): siRNA sense strand
agaaguagcagaagaugca

SEQ ID NO: 692751 - RNA, 19 nt, Homo sapiens
  misc_RNA (1)...(19): siRNA sense strand
ggaacacuaauugcuuuga

SEQ ID NO: 692752 - RNA, 19 nt, Homo sapiens
  misc_RNA (1)...(19): siRNA sense strand
gggcaaaucuuuagucuga

SEQ ID NO: 692753 - RNA, 19 nt, Homo sapiens
  misc_RNA (1)...(19): siRNA sense strand
gaaagacggaguuuaauuu

SEQ ID NO: 692754 - RNA, 19 nt, Homo sapiens
  misc_RNA (1)...(19): siRNA sense strand
gacaauagcccagaaguua

SEQ ID NO: 692755 - RNA, 19 nt, Homo sapiens
  misc_RNA (1)...(19): siRNA sense strand
ucaaagagcggagaaauua

SEQ ID NO: 692756 - RNA, 19 nt, Homo sapiens
  misc_RNA (1)...(19): siRNA sense strand
uaaacucucugcagaagua

SEQ ID NO: 692757 - RNA, 19 nt, Homo sapiens
  misc_RNA (1)...(19): siRNA sense strand
uaacccaaguuucucauua

SEQ ID NO: 692758 - RNA, 19 nt, Homo sapiens
  misc_RNA (1)...(19): siRNA sense strand
ggcaucaacucagaaauua

SEQ ID NO: 692759 - RNA, 19 nt, Homo sapiens
  misc_RNA (1)...(19): siRNA sense strand
ucagagacgucaacgauaa

SEQ ID NO: 692760 - RNA, 19 nt, Homo sapiens
  misc_RNA (1)...(19): siRNA sense strand
caacagaguuaccaucguu

SEQ ID NO: 692761 - RNA, 19 nt, Homo sapiens
  misc_RNA (1)...(19): siRNA sense strand
caaggaauauucaaugguu

SEQ ID NO: 692762 - RNA, 19 nt, Homo sapiens
  misc_RNA (1)...(19): siRNA sense strand
gcacaagauuuauacuaga

SEQ ID NO: 692763 - RNA, 19 nt, Homo sapiens
  misc_RNA (1)...(19): siRNA sense strand
gcucugcgcucuucgauau

SEQ ID NO: 692764 - RNA, 19 nt, Homo sapiens
  misc_RNA (1)...(19): siRNA sense strand
gauuaucucuucauccaaa

SEQ ID NO: 692765 - RNA, 19 nt, Homo sapiens
  misc_RNA (1)...(19): siRNA sense strand
ggaaagacggaguuuaauu

SEQ ID NO: 692766 - RNA, 19 nt, Homo sapiens
  misc_RNA (1)...(19): siRNA sense strand
gcaauugaguucaggacaa

SEQ ID NO: 692767 - RNA, 19 nt, Homo sapiens
  misc_RNA (1)...(19): siRNA sense strand
ggacuuugccuuauuccua

SEQ ID NO: 692768 - RNA, 19 nt, Homo sapiens
  misc_RNA (1)...(19): siRNA sense strand
gaaguuacauuccauucuc

SEQ ID NO: 692769 - RNA, 19 nt, Homo sapiens
  misc_RNA (1)...(19): siRNA sense strand
gcaaaucuuuagucugaau

SEQ ID NO: 692770 - RNA, 19 nt, Homo sapiens
  misc_RNA (1)...(19): siRNA sense strand
gaacacuaauugcuuugau

SEQ ID NO: 692771 - RNA, 19 nt, Homo sapiens
  misc_RNA (1)...(19): siRNA sense strand
gcggagaaauuaccacuca

SEQ ID NO: 692772 - RNA, 19 nt, Homo sapiens
  misc_RNA (1)...(19): siRNA sense strand
caggaaagacggaguuuaa

SEQ ID NO: 692773 - RNA, 19 nt, Homo sapiens
  misc_RNA (1)...(19): siRNA sense strand
gaagagaccaaggaauauu

SEQ ID NO: 692774 - RNA, 19 nt, Homo sapiens
  misc_RNA (1)...(19): siRNA sense strand
gaaauuaccacucaaaaga

SEQ ID NO: 692775 - RNA, 19 nt, Homo sapiens
  misc_RNA (1)...(19): siRNA sense strand
gggcaucaacucagaaauu

SEQ ID NO: 692776 - RNA, 19 nt, Homo sapiens
  misc_RNA (1)...(19): siRNA sense strand
ccaccaggcguccuacuua

SEQ ID NO: 692777 - RNA, 19 nt, Homo sapiens
  misc_RNA (1)...(19): siRNA sense strand
caaaauacaugaccaagau

SEQ ID NO: 692778 - RNA, 19 nt, Homo sapiens
  misc_RNA (1)...(19): siRNA sense strand
ggagaaauuaccacucaaa

SEQ ID NO: 692779 - RNA, 19 nt, Homo sapiens
  misc_RNA (1)...(19): siRNA sense strand
ggccaagucuccuacucua

SEQ ID NO: 692780 - RNA, 19 nt, Homo sapiens
  misc_RNA (1)...(19): siRNA sense strand
gaggagauaugcgggaaga

SEQ ID NO: 692781 - RNA, 19 nt, Homo sapiens
  misc_RNA (1)...(19): siRNA sense strand
cguauaaguugguaacaga

SEQ ID NO: 692782 - RNA, 19 nt, Homo sapiens
  misc_RNA (1)...(19): siRNA sense strand
gaagucccuuuuaagauua

SEQ ID NO: 692783 - RNA, 19 nt, Homo sapiens
  misc_RNA (1)...(19): siRNA sense strand
uaaccgacgccaaugauaa

SEQ ID NO: 692784 - RNA, 19 nt, Homo sapiens
  misc_RNA (1)...(19): siRNA sense strand
gcagaaguauaaacucucu

SEQ ID NO: 692785 - RNA, 19 nt, Homo sapiens
  misc_RNA (1)...(19): siRNA sense strand
ggcacaagauuuauacuag

SEQ ID NO: 692786 - RNA, 19 nt, Homo sapiens
  misc_RNA (1)...(19): siRNA sense strand
ggagaucgaggacauuaau

SEQ ID NO: 692787 - RNA, 19 nt, Homo sapiens
  misc_RNA (1)...(19): siRNA sense strand
uugaagagaccaaggaaua

SEQ ID NO: 692788 - RNA, 19 nt, Homo sapiens
  misc_RNA (1)...(19): siRNA sense strand
cagccuggcacaagauuua

SEQ ID NO: 692789 - RNA, 19 nt, Homo sapiens
  misc_RNA (1)...(19): siRNA sense strand
cgaagucccuuuuaagauu

SEQ ID NO: 692790 - RNA, 19 nt, Homo sapiens
  misc_RNA (1)...(19): siRNA sense strand
cagcauaagcgucauccua

SEQ ID NO: 692791 - RNA, 19 nt, Homo sapiens
  misc_RNA (1)...(19): siRNA sense strand
agaugcagauauuggcuua

SEQ ID NO: 692792 - RNA, 19 nt, Homo sapiens
  misc_RNA (1)...(19): siRNA sense strand
aggcugagcugcaguuuua

SEQ ID NO: 692793 - RNA, 19 nt, Homo sapiens
  misc_RNA (1)...(19): siRNA sense strand
gcaccacuguguugcaagu

SEQ ID NO: 692794 - RNA, 19 nt, Homo sapiens
  misc_RNA (1)...(19): siRNA sense strand
gaaccgggcaaaucuuuag

SEQ ID NO: 692795 - RNA, 19 nt, Homo sapiens
  misc_RNA (1)...(19): siRNA sense strand
guagugagcaauugaguuc

SEQ ID NO: 692796 - RNA, 19 nt, Homo sapiens
  misc_RNA (1)...(19): siRNA sense strand
gaccaaggaauauucaaug

SEQ ID NO: 692797 - RNA, 19 nt, Homo sapiens
  misc_RNA (1)...(19): siRNA sense strand
gcauaagcgucauccuaca

SEQ ID NO: 692798 - RNA, 19 nt, Homo sapiens
  misc_RNA (1)...(19): siRNA sense strand
agcagaagaugcagauauu

SEQ ID NO: 692799 - RNA, 19 nt, Homo sapiens
  misc_RNA (1)...(19): siRNA sense strand
ggacugguugcacaaugua

SEQ ID NO: 692800 - RNA, 19 nt, Homo sapiens
  misc_RNA (1)...(19): siRNA sense strand
aacccaaguuucucauuaa

SEQ ID NO: 692801 - RNA, 19 nt, Homo sapiens
  misc_RNA (1)...(19): siRNA sense strand
gaaacuggauuuugaagag

SEQ ID NO: 692802 - RNA, 19 nt, Homo sapiens
  misc_RNA (1)...(19): siRNA sense strand
gaguucaggacaagacaua

SEQ ID NO: 692803 - RNA, 19 nt, Homo sapiens
  misc_RNA (1)...(19): siRNA sense strand
ggauggugguggacugguu

SEQ ID NO: 692804 - RNA, 19 nt, Homo sapiens
  misc_RNA (1)...(19): siRNA sense strand
ggaacuggcacuggagaaa

SEQ ID NO: 692805 - RNA, 19 nt, Homo sapiens
  misc_RNA (1)...(19): siRNA sense strand
ggccuuauuuccacuuugu

SEQ ID NO: 692806 - RNA, 19 nt, Homo sapiens
  misc_RNA (1)...(19): siRNA sense strand
caagucuccuacucuauca

SEQ ID NO: 692807 - RNA, 19 nt, Homo sapiens
  misc_RNA (1)...(19): siRNA sense strand
gaacuuuuaucacgugaau

SEQ ID NO: 692808 - RNA, 19 nt, Homo sapiens
  misc_RNA (1)...(19): siRNA sense strand
uauaaacucucucuuaacc

SEQ ID NO: 692809 - RNA, 19 nt, Homo sapiens
  misc_RNA (1)...(19): siRNA sense strand
agacauacuuuguggugau

SEQ ID NO: 692810 - RNA, 19 nt, Homo sapiens
  misc_RNA (1)...(19): siRNA sense strand
cuggaacacuaauugcuuu

SEQ ID NO: 692811 - RNA, 19 nt, Homo sapiens
  misc_RNA (1)...(19): siRNA sense strand
guaaccgacgccaaugaua

SEQ ID NO: 692812 - RNA, 19 nt, Homo sapiens
  misc_RNA (1)...(19): siRNA sense strand
ccacugagcuccggaucca

SEQ ID NO: 692813 - RNA, 19 nt, Homo sapiens
  misc_RNA (1)...(19): siRNA sense strand
cuugugcucuggaauuuga

SEQ ID NO: 692814 - RNA, 19 nt, Homo sapiens
  misc_RNA (1)...(19): siRNA sense strand
gacauacuuuguggugauu

SEQ ID NO: 692815 - RNA, 19 nt, Homo sapiens
  misc_RNA (1)...(19): siRNA sense strand
ucaguucggagaagccuua

SEQ ID NO: 692816 - RNA, 19 nt, Homo sapiens
  misc_RNA (1)...(19): siRNA sense strand
uaucagagacgucaacgau

SEQ ID NO: 692817 - RNA, 19 nt, Homo sapiens
  misc_RNA (1)...(19): siRNA sense strand
gaguuaccaucguuuaguc

SEQ ID NO: 692818 - RNA, 19 nt, Homo sapiens
  misc_RNA (1)...(19): siRNA sense strand
uaucauggccagcgaccua

SEQ ID NO: 692819 - RNA, 19 nt, Homo sapiens
  misc_RNA (1)...(19): siRNA sense strand
gcccagaaguuacauucca

SEQ ID NO: 692820 - RNA, 19 nt, Homo sapiens
  misc_RNA (1)...(19): siRNA sense strand
cagaaccgggcaaaucuuu

SEQ ID NO: 692821 - RNA, 19 nt, Homo sapiens
  misc_RNA (1)...(19): siRNA sense strand
uagcagaagaugcagauau

SEQ ID NO: 692822 - RNA, 19 nt, Homo sapiens
  misc_RNA (1)...(19): siRNA sense strand
gcacaauguacaguugaaa

SEQ ID NO: 692823 - RNA, 19 nt, Homo sapiens
  misc_RNA (1)...(19): siRNA sense strand
guucagcguccaggaguua

SEQ ID NO: 692824 - RNA, 19 nt, Homo sapiens
  misc_RNA (1)...(19): siRNA sense strand
caaccgagacguguacaga

SEQ ID NO: 692825 - RNA, 19 nt, Homo sapiens
  misc_RNA (1)...(19): siRNA sense strand
gcagauauuggcuuaaacu

SEQ ID NO: 692826 - RNA, 19 nt, Homo sapiens
  misc_RNA (1)...(19): siRNA sense strand
gcagaagaugcagauauug

SEQ ID NO: 692827 - RNA, 19 nt, Homo sapiens
  misc_RNA (1)...(19): siRNA sense strand
uacauuccauucucuacuu

SEQ ID NO: 692828 - RNA, 19 nt, Homo sapiens
  misc_RNA (1)...(19): siRNA sense strand
ggaauauucaaugguugua

SEQ ID NO: 692829 - RNA, 19 nt, Homo sapiens
  misc_RNA (1)...(19): siRNA sense strand
cuacagaaccgggcaaauc

SEQ ID NO: 692830 - RNA, 19 nt, Homo sapiens
  misc_RNA (1)...(19): siRNA sense strand
guggagaucgaggacauua

SEQ ID NO: 692831 - RNA, 19 nt, Homo sapiens
  misc_RNA (1)...(19): siRNA sense strand
cgacuucccauccugaguu

SEQ ID NO: 692832 - RNA, 19 nt, Homo sapiens
  misc_RNA (1)...(19): siRNA sense strand
uaagcgucauccuacauau

SEQ ID NO: 692833 - RNA, 19 nt, Homo sapiens
  misc_RNA (1)...(19): siRNA sense strand
uuaaugaccacacgccaaa

SEQ ID NO: 692834 - RNA, 19 nt, Homo sapiens
  misc_RNA (1)...(19): siRNA sense strand
caauugaguucaggacaag

SEQ ID NO: 692835 - RNA, 19 nt, Homo sapiens
  misc_RNA (1)...(19): siRNA sense strand
uaacagauggaacccuaga

SEQ ID NO: 692836 - RNA, 19 nt, Homo sapiens
  misc_RNA (1)...(19): siRNA sense strand
ugacaauagcccagaaguu

SEQ ID NO: 692837 - RNA, 19 nt, Homo sapiens
  misc_RNA (1)...(19): siRNA sense strand
ggagauaugcgggaagaag

SEQ ID NO: 692838 - RNA, 19 nt, Homo sapiens
  misc_RNA (1)...(19): siRNA sense strand
acagaguuaccaucguuua

SEQ ID NO: 692839 - RNA, 19 nt, Homo sapiens
  misc_RNA (1)...(19): siRNA sense strand
gagcuccggauccagguaa

SEQ ID NO: 692840 - RNA, 19 nt, Homo sapiens
  misc_RNA (1)...(19): siRNA sense strand
gacggaguuuaauuuccua

SEQ ID NO: 692841 - RNA, 19 nt, Homo sapiens
  misc_RNA (1)...(19): siRNA sense strand
ccaagucuccuacucuauc

SEQ ID NO: 692842 - RNA, 19 nt, Homo sapiens
  misc_RNA (1)...(19): siRNA sense strand
guugcacaauguacaguug

SEQ ID NO: 692843 - RNA, 19 nt, Homo sapiens
  misc_RNA (1)...(19): siRNA sense strand
agagucagccuucgggaaa

SEQ ID NO: 692844 - RNA, 19 nt, Homo sapiens
  misc_RNA (1)...(19): siRNA sense strand
ccagguaaccgacgccaau

SEQ ID NO: 692845 - RNA, 19 nt, Homo sapiens
  misc_RNA (1)...(19): siRNA sense strand
gcacagccuggcacaagau

SEQ ID NO: 692846 - RNA, 19 nt, Homo sapiens
  misc_RNA (1)...(19): siRNA sense strand
gaaaauggggagguuaauu

SEQ ID NO: 692847 - RNA, 19 nt, Homo sapiens
  misc_RNA (1)...(19): siRNA sense strand
gagggcaucaacucagaaa

SEQ ID NO: 692848 - RNA, 19 nt, Homo sapiens
  misc_RNA (1)...(19): siRNA sense strand
cagcuugugcucuggaauu

SEQ ID NO: 692849 - RNA, 19 nt, Homo sapiens
  misc_RNA (1)...(19): siRNA sense strand
augcagauauuggcuuaaa

SEQ ID NO: 692850 - RNA, 19 nt, Homo sapiens
  misc_RNA (1)...(19): siRNA sense strand
agaaguagcagaagaugca

SEQ ID NO: 692851 - RNA, 19 nt, Homo sapiens
  misc_RNA (1)...(19): siRNA sense strand
ggaacacuaauugcuuuga

SEQ ID NO: 692852 - RNA, 19 nt, Homo sapiens
  misc_RNA (1)...(19): siRNA sense strand
gaacagagaucucauagcu

SEQ ID NO: 692853 - RNA, 19 nt, Homo sapiens
  misc_RNA (1)...(19): siRNA sense strand
ggacuuugccuuauucuua

SEQ ID NO: 692854 - RNA, 19 nt, Homo sapiens
  misc_RNA (1)...(19): siRNA sense strand
gaagucagguguaauauag

SEQ ID NO: 692855 - RNA, 19 nt, Homo sapiens
  misc_RNA (1)...(19): siRNA sense strand
gagcaaauaugcaaagaga

SEQ ID NO: 692856 - RNA, 19 nt, Homo sapiens
  misc_RNA (1)...(19): siRNA sense strand
ucucauagcuugauauuga

SEQ ID NO: 692857 - RNA, 19 nt, Homo sapiens
  misc_RNA (1)...(19): siRNA sense strand
gcagacaacuugcaagaga

SEQ ID NO: 692858 - RNA, 19 nt, Homo sapiens
  misc_RNA (1)...(19): siRNA sense strand
ggagaagucagguguaaua

SEQ ID NO: 692859 - RNA, 19 nt, Homo sapiens
  misc_RNA (1)...(19): siRNA sense strand
gaagaacagagaucucaua

SEQ ID NO: 692860 - RNA, 19 nt, Homo sapiens
  misc_RNA (1)...(19): siRNA sense strand
gacauuccauucaagauuu

SEQ ID NO: 692861 - RNA, 19 nt, Homo sapiens
  misc_RNA (1)...(19): siRNA sense strand
guagaagcaucaccuugua

SEQ ID NO: 692862 - RNA, 19 nt, Homo sapiens
  misc_RNA (1)...(19): siRNA sense strand
aaacagacauuccauucaa

SEQ ID NO: 692863 - RNA, 19 nt, Homo sapiens
  misc_RNA (1)...(19): siRNA sense strand
ggacggagguggucucucu

SEQ ID NO: 692864 - RNA, 19 nt, Homo sapiens
  misc_RNA (1)...(19): siRNA sense strand
ccacaucuccuacucuaua

SEQ ID NO: 692865 - RNA, 19 nt, Homo sapiens
  misc_RNA (1)...(19): siRNA sense strand
gacaacagcccagaaauaa

SEQ ID NO: 692866 - RNA, 19 nt, Homo sapiens
  misc_RNA (1)...(19): siRNA sense strand
gaaccucgcuaaggaucua

SEQ ID NO: 692867 - RNA, 19 nt, Homo sapiens
  misc_RNA (1)...(19): siRNA sense strand
cgacaacagcccagaaaua

SEQ ID NO: 692868 - RNA, 19 nt, Homo sapiens
  misc_RNA (1)...(19): siRNA sense strand
gcaaauaugcaaagagaga

SEQ ID NO: 692869 - RNA, 19 nt, Homo sapiens
  misc_RNA (1)...(19): siRNA sense strand
ccacggauccugauauaaa

SEQ ID NO: 692870 - RNA, 19 nt, Homo sapiens
  misc_RNA (1)...(19): siRNA sense strand
gcaaauacccagaguuauc

SEQ ID NO: 692871 - RNA, 19 nt, Homo sapiens
  misc_RNA (1)...(19): siRNA sense strand
gaagaugugaguugcaauu

SEQ ID NO: 692872 - RNA, 19 nt, Homo sapiens
  misc_RNA (1)...(19): siRNA sense strand
ucaaggauaccaaugauaa

SEQ ID NO: 692873 - RNA, 19 nt, Homo sapiens
  misc_RNA (1)...(19): siRNA sense strand
gaauagaccgugagcaaau

SEQ ID NO: 692874 - RNA, 19 nt, Homo sapiens
  misc_RNA (1)...(19): siRNA sense strand
ucacuucucucucugauca

SEQ ID NO: 692875 - RNA, 19 nt, Homo sapiens
  misc_RNA (1)...(19): siRNA sense strand
gagaagaagaugugaguug

SEQ ID NO: 692876 - RNA, 19 nt, Homo sapiens
  misc_RNA (1)...(19): siRNA sense strand
gaugugaguugcaauugga

SEQ ID NO: 692877 - RNA, 19 nt, Homo sapiens
  misc_RNA (1)...(19): siRNA sense strand
gaaauaaucaucacuucuc

SEQ ID NO: 692878 - RNA, 19 nt, Homo sapiens
  misc_RNA (1)...(19): siRNA sense strand
guacacgacuaucgcuuga

SEQ ID NO: 692879 - RNA, 19 nt, Homo sapiens
  misc_RNA (1)...(19): siRNA sense strand
gagagcagacaccagaaua

SEQ ID NO: 692880 - RNA, 19 nt, Homo sapiens
  misc_RNA (1)...(19): siRNA sense strand
gacaugguuugcaguguuu

SEQ ID NO: 692881 - RNA, 19 nt, Homo sapiens
  misc_RNA (1)...(19): siRNA sense strand
uggcaaauacccagaguua

SEQ ID NO: 692882 - RNA, 19 nt, Homo sapiens
  misc_RNA (1)...(19): siRNA sense strand
caacagcccagaaauaauc

SEQ ID NO: 692883 - RNA, 19 nt, Homo sapiens
  misc_RNA (1)...(19): siRNA sense strand
cagcagagacgaauauaga

SEQ ID NO: 692884 - RNA, 19 nt, Homo sapiens
  misc_RNA (1)...(19): siRNA sense strand
gaaacagacauuccauuca

SEQ ID NO: 692885 - RNA, 19 nt, Homo sapiens
  misc_RNA (1)...(19): siRNA sense strand
ggccacaucuccuacucua

SEQ ID NO: 692886 - RNA, 19 nt, Homo sapiens
  misc_RNA (1)...(19): siRNA sense strand
gcaagccgccucuuucuuc

SEQ ID NO: 692887 - RNA, 19 nt, Homo sapiens
  misc_RNA (1)...(19): siRNA sense strand
gagaaaacagguaugauua

SEQ ID NO: 692888 - RNA, 19 nt, Homo sapiens
  misc_RNA (1)...(19): siRNA sense strand
gguguaauauagaaacaga

SEQ ID NO: 692889 - RNA, 19 nt, Homo sapiens
  misc_RNA (1)...(19): siRNA sense strand
ugucaagucuggaccugua

SEQ ID NO: 692890 - RNA, 19 nt, Homo sapiens
  misc_RNA (1)...(19): siRNA sense strand
gcagacaccagaauacaau

SEQ ID NO: 692891 - RNA, 19 nt, Homo sapiens
  misc_RNA (1)...(19): siRNA sense strand
gggacuuacuugugaagaa

SEQ ID NO: 692892 - RNA, 19 nt, Homo sapiens
  misc_RNA (1)...(19): siRNA sense strand
agaauaaccagucauuuga

SEQ ID NO: 692893 - RNA, 19 nt, Homo sapiens
  misc_RNA (1)...(19): siRNA sense strand
gagaucucauagcuugaua

SEQ ID NO: 692894 - RNA, 19 nt, Homo sapiens
  misc_RNA (1)...(19): siRNA sense strand
gaaauuucugucaaggaua

SEQ ID NO: 692895 - RNA, 19 nt, Homo sapiens
  misc_RNA (1)...(19): siRNA sense strand
cagaaauaaucaucacuuc

SEQ ID NO: 692896 - RNA, 19 nt, Homo sapiens
  misc_RNA (1)...(19): siRNA sense strand
gcaaagagagaagaagaug

SEQ ID NO: 692897 - RNA, 19 nt, Homo sapiens
  misc_RNA (1)...(19): siRNA sense strand
ugagauaaacuacuacuuc

SEQ ID NO: 692898 - RNA, 19 nt, Homo sapiens
  misc_RNA (1)...(19): siRNA sense strand
gacuuugccuuauucuuau

SEQ ID NO: 692899 - RNA, 19 nt, Homo sapiens
  misc_RNA (1)...(19): siRNA sense strand
gauuaagaauaaccaguca

SEQ ID NO: 692900 - RNA, 19 nt, Homo sapiens
  misc_RNA (1)...(19): siRNA sense strand
aauagaccgugagcaaaua

SEQ ID NO: 692901 - RNA, 19 nt, Homo sapiens
  misc_RNA (1)...(19): siRNA sense strand
uugaagauguagaaaggua

SEQ ID NO: 692902 - RNA, 19 nt, Homo sapiens
  misc_RNA (1)...(19): siRNA sense strand
aagaauaaccagucauuug

SEQ ID NO: 692903 - RNA, 19 nt, Homo sapiens
  misc_RNA (1)...(19): siRNA sense strand
gaucucauagcuugauauu

SEQ ID NO: 692904 - RNA, 19 nt, Homo sapiens
  misc_RNA (1)...(19): siRNA sense strand
ggcaggugcuauuuccuuu

SEQ ID NO: 692905 - RNA, 19 nt, Homo sapiens
  misc_RNA (1)...(19): siRNA sense strand
ggucaaugcugagauaaac

SEQ ID NO: 692906 - RNA, 19 nt, Homo sapiens
  misc_RNA (1)...(19): siRNA sense strand
agacaugguuugcaguguu

SEQ ID NO: 692907 - RNA, 19 nt, Homo sapiens
  misc_RNA (1)...(19): siRNA sense strand
ggauccugauauaaacaua

SEQ ID NO: 692908 - RNA, 19 nt, Homo sapiens
  misc_RNA (1)...(19): siRNA sense strand
gggaggauuugacuucaca

SEQ ID NO: 692909 - RNA, 19 nt, Homo sapiens
  misc_RNA (1)...(19): siRNA sense strand
aaacacgggaucuggauuu

SEQ ID NO: 692910 - RNA, 19 nt, Homo sapiens
  misc_RNA (1)...(19): siRNA sense strand
aaucaucacuucucucucu

SEQ ID NO: 692911 - RNA, 19 nt, Homo sapiens
  misc_RNA (1)...(19): siRNA sense strand
gagagaagaagaugugagu

SEQ ID NO: 692912 - RNA, 19 nt, Homo sapiens
  misc_RNA (1)...(19): siRNA sense strand
gcagagacgaauauagaau

SEQ ID NO: 692913 - RNA, 19 nt, Homo sapiens
  misc_RNA (1)...(19): siRNA sense strand
gaaucugcauccgcuggua

SEQ ID NO: 692914 - RNA, 19 nt, Homo sapiens
  misc_RNA (1)...(19): siRNA sense strand
ugauugaggauguuaauga

SEQ ID NO: 692915 - RNA, 19 nt, Homo sapiens
  misc_RNA (1)...(19): siRNA sense strand
ugccacggauccugauaua

SEQ ID NO: 692916 - RNA, 19 nt, Homo sapiens
  misc_RNA (1)...(19): siRNA sense strand
ggacuuacuugugaagaac

SEQ ID NO: 692917 - RNA, 19 nt, Homo sapiens
  misc_RNA (1)...(19): siRNA sense strand
ugccaccgcucacauagaa

SEQ ID NO: 692918 - RNA, 19 nt, Homo sapiens
  misc_RNA (1)...(19): siRNA sense strand
gcuccgcguucuucgauau

SEQ ID NO: 692919 - RNA, 19 nt, Homo sapiens
  misc_RNA (1)...(19): siRNA sense strand
uaauuccgaugguggcaaa

SEQ ID NO: 692920 - RNA, 19 nt, Homo sapiens
  misc_RNA (1)...(19): siRNA sense strand
augcugagauaaacuacua

SEQ ID NO: 692921 - RNA, 19 nt, Homo sapiens
  misc_RNA (1)...(19): siRNA sense strand
cagagacgaauauagaauu

SEQ ID NO: 692922 - RNA, 19 nt, Homo sapiens
  misc_RNA (1)...(19): siRNA sense strand
aaagagagaagaagaugug

SEQ ID NO: 692923 - RNA, 19 nt, Homo sapiens
  misc_RNA (1)...(19): siRNA sense strand
ccaaugaagacaugguuug

SEQ ID NO: 692924 - RNA, 19 nt, Homo sapiens
  misc_RNA (1)...(19): siRNA sense strand
agaagucagguguaauaua

SEQ ID NO: 692925 - RNA, 19 nt, Homo sapiens
  misc_RNA (1)...(19): siRNA sense strand
gaucagauuuuggagaauu

SEQ ID NO: 692926 - RNA, 19 nt, Homo sapiens
  misc_RNA (1)...(19): siRNA sense strand
gcacugcccagagcacaaa

SEQ ID NO: 692927 - RNA, 19 nt, Homo sapiens
  misc_RNA (1)...(19): siRNA sense strand
ucaaugcugagauaaacua

SEQ ID NO: 692928 - RNA, 19 nt, Homo sapiens
  misc_RNA (1)...(19): siRNA sense strand
acuacaaacuggugacaga

SEQ ID NO: 692929 - RNA, 19 nt, Homo sapiens
  misc_RNA (1)...(19): siRNA sense strand
ccagaaauaaucaucacuu

SEQ ID NO: 692930 - RNA, 19 nt, Homo sapiens
  misc_RNA (1)...(19): siRNA sense strand
gaauaaccagucauuugau

SEQ ID NO: 692931 - RNA, 19 nt, Homo sapiens
  misc_RNA (1)...(19): siRNA sense strand
gaaaacagguaugauuaag

SEQ ID NO: 692932 - RNA, 19 nt, Homo sapiens
  misc_RNA (1)...(19): siRNA sense strand
gcccagagcacaaaacaua

SEQ ID NO: 692933 - RNA, 19 nt, Homo sapiens
  misc_RNA (1)...(19): siRNA sense strand
gggaagaacagagaucuca

SEQ ID NO: 692934 - RNA, 19 nt, Homo sapiens
  misc_RNA (1)...(19): siRNA sense strand
agucagguguaauauagaa

SEQ ID NO: 692935 - RNA, 19 nt, Homo sapiens
  misc_RNA (1)...(19): siRNA sense strand
gaucuggauuucggaggaa

SEQ ID NO: 692936 - RNA, 19 nt, Homo sapiens
  misc_RNA (1)...(19): siRNA sense strand
gagaauucaccuccaggaa

SEQ ID NO: 692937 - RNA, 19 nt, Homo sapiens
  misc_RNA (1)...(19): siRNA sense strand
cggaggaaauggagaaguc

SEQ ID NO: 692938 - RNA, 19 nt, Homo sapiens
  misc_RNA (1)...(19): siRNA sense strand
agacaacuugcaagagaua

SEQ ID NO: 692939 - RNA, 19 nt, Homo sapiens
  misc_RNA (1)...(19): siRNA sense strand
cauagaaauccuugaugaa

SEQ ID NO: 692940 - RNA, 19 nt, Homo sapiens
  misc_RNA (1)...(19): siRNA sense strand
ccgaauagaccgugagcaa

SEQ ID NO: 692941 - RNA, 19 nt, Homo sapiens
  misc_RNA (1)...(19): siRNA sense strand
aagaagaugugaguugcaa

SEQ ID NO: 692942 - RNA, 19 nt, Homo sapiens
  misc_RNA (1)...(19): siRNA sense strand
gagcagacaccagaauaca

SEQ ID NO: 692943 - RNA, 19 nt, Homo sapiens
  misc_RNA (1)...(19): siRNA sense strand
caauaacuacuacaaacug

SEQ ID NO: 692944 - RNA, 19 nt, Homo sapiens
  misc_RNA (1)...(19): siRNA sense strand
agacauuccauucaagauu

SEQ ID NO: 692945 - RNA, 19 nt, Homo sapiens
  misc_RNA (1)...(19): siRNA sense strand
agaaacagacauuccauuc

SEQ ID NO: 692946 - RNA, 19 nt, Homo sapiens
  misc_RNA (1)...(19): siRNA sense strand
gguggaaaauccuuuaaau

SEQ ID NO: 692947 - RNA, 19 nt, Homo sapiens
  misc_RNA (1)...(19): siRNA sense strand
cgaccgcccuguacucucu

SEQ ID NO: 692948 - RNA, 19 nt, Homo sapiens
  misc_RNA (1)...(19): siRNA sense strand
ucaauggccacaucuccua

SEQ ID NO: 692949 - RNA, 19 nt, Homo sapiens
  misc_RNA (1)...(19): siRNA sense strand
gaagcaucaccuuguaugu

SEQ ID NO: 692950 - RNA, 19 nt, Homo sapiens
  misc_RNA (1)...(19): siRNA sense strand
gacagccacugaccaggau

SEQ ID NO: 692951 - RNA, 19 nt, Homo sapiens
  misc_RNA (1)...(19): siRNA sense strand
gagccuccauugcgcaagu

SEQ ID NO: 692952 - RNA, 19 nt, Homo sapiens
  misc_RNA (1)...(19): siRNA sense strand
gaacagagaucucauagcu

SEQ ID NO: 692953 - RNA, 19 nt, Homo sapiens
  misc_RNA (1)...(19): siRNA sense strand
ggacuuugccuuauucuua

SEQ ID NO: 692954 - RNA, 19 nt, Homo sapiens
  misc_RNA (1)...(19): siRNA sense strand
gaagucagguguaauauag

SEQ ID NO: 692955 - RNA, 19 nt, Homo sapiens
  misc_RNA (1)...(19): siRNA sense strand
gagcaaauaugcaaagaga

SEQ ID NO: 692956 - RNA, 19 nt, Homo sapiens
  misc_RNA (1)...(19): siRNA sense strand
ucucauagcuugauauuga

SEQ ID NO: 692957 - RNA, 19 nt, Homo sapiens
  misc_RNA (1)...(19): siRNA sense strand
gcagacaacuugcaagaga

SEQ ID NO: 692958 - RNA, 19 nt, Homo sapiens
  misc_RNA (1)...(19): siRNA sense strand
ggagaagucagguguaaua

SEQ ID NO: 692959 - RNA, 19 nt, Homo sapiens
  misc_RNA (1)...(19): siRNA sense strand
gaagaacagagaucucaua

SEQ ID NO: 692960 - RNA, 19 nt, Homo sapiens
  misc_RNA (1)...(19): siRNA sense strand
gacauuccauucaagauuu

SEQ ID NO: 692961 - RNA, 19 nt, Homo sapiens
  misc_RNA (1)...(19): siRNA sense strand
guagaagcaucaccuugua

SEQ ID NO: 692962 - RNA, 19 nt, Homo sapiens
  misc_RNA (1)...(19): siRNA sense strand
aaacagacauuccauucaa

SEQ ID NO: 692963 - RNA, 19 nt, Homo sapiens
  misc_RNA (1)...(19): siRNA sense strand
ggacggagguggucucucu

SEQ ID NO: 692964 - RNA, 19 nt, Homo sapiens
  misc_RNA (1)...(19): siRNA sense strand
ccacaucuccuacucuaua

SEQ ID NO: 692965 - RNA, 19 nt, Homo sapiens
  misc_RNA (1)...(19): siRNA sense strand
gacaacagcccagaaauaa

SEQ ID NO: 692966 - RNA, 19 nt, Homo sapiens
  misc_RNA (1)...(19): siRNA sense strand
gaaccucgcuaaggaucua

SEQ ID NO: 692967 - RNA, 19 nt, Homo sapiens
  misc_RNA (1)...(19): siRNA sense strand
cgacaacagcccagaaaua

SEQ ID NO: 692968 - RNA, 19 nt, Homo sapiens
  misc_RNA (1)...(19): siRNA sense strand
gcaaauaugcaaagagaga

SEQ ID NO: 692969 - RNA, 19 nt, Homo sapiens
  misc_RNA (1)...(19): siRNA sense strand
ccacggauccugauauaaa

SEQ ID NO: 692970 - RNA, 19 nt, Homo sapiens
  misc_RNA (1)...(19): siRNA sense strand
gcaaauacccagaguuauc

SEQ ID NO: 692971 - RNA, 19 nt, Homo sapiens
  misc_RNA (1)...(19): siRNA sense strand
gaagaugugaguugcaauu

SEQ ID NO: 692972 - RNA, 19 nt, Homo sapiens
  misc_RNA (1)...(19): siRNA sense strand
ucaaggauaccaaugauaa

SEQ ID NO: 692973 - RNA, 19 nt, Homo sapiens
  misc_RNA (1)...(19): siRNA sense strand
gaauagaccgugagcaaau

SEQ ID NO: 692974 - RNA, 19 nt, Homo sapiens
  misc_RNA (1)...(19): siRNA sense strand
ucacuucucucucugauca

SEQ ID NO: 692975 - RNA, 19 nt, Homo sapiens
  misc_RNA (1)...(19): siRNA sense strand
gagaagaagaugugaguug

SEQ ID NO: 692976 - RNA, 19 nt, Homo sapiens
  misc_RNA (1)...(19): siRNA sense strand
gaugugaguugcaauugga

SEQ ID NO: 692977 - RNA, 19 nt, Homo sapiens
  misc_RNA (1)...(19): siRNA sense strand
gaaauaaucaucacuucuc

SEQ ID NO: 692978 - RNA, 19 nt, Homo sapiens
  misc_RNA (1)...(19): siRNA sense strand
guacacgacuaucgcuuga

SEQ ID NO: 692979 - RNA, 19 nt, Homo sapiens
  misc_RNA (1)...(19): siRNA sense strand
gagagcagacaccagaaua

SEQ ID NO: 692980 - RNA, 19 nt, Homo sapiens
  misc_RNA (1)...(19): siRNA sense strand
gacaugguuugcaguguuu

SEQ ID NO: 692981 - RNA, 19 nt, Homo sapiens
  misc_RNA (1)...(19): siRNA sense strand
uggcaaauacccagaguua

SEQ ID NO: 692982 - RNA, 19 nt, Homo sapiens
  misc_RNA (1)...(19): siRNA sense strand
caacagcccagaaauaauc

SEQ ID NO: 692983 - RNA, 19 nt, Homo sapiens
  misc_RNA (1)...(19): siRNA sense strand
cagcagagacgaauauaga

SEQ ID NO: 692984 - RNA, 19 nt, Homo sapiens
  misc_RNA (1)...(19): siRNA sense strand
gaaacagacauuccauuca

SEQ ID NO: 692985 - RNA, 19 nt, Homo sapiens
  misc_RNA (1)...(19): siRNA sense strand
ggccacaucuccuacucua

SEQ ID NO: 692986 - RNA, 19 nt, Homo sapiens
  misc_RNA (1)...(19): siRNA sense strand
gcaagccgccucuuucuuc

SEQ ID NO: 692987 - RNA, 19 nt, Homo sapiens
  misc_RNA (1)...(19): siRNA sense strand
gagaaaacagguaugauua

SEQ ID NO: 692988 - RNA, 19 nt, Homo sapiens
  misc_RNA (1)...(19): siRNA sense strand
gguguaauauagaaacaga

SEQ ID NO: 692989 - RNA, 19 nt, Homo sapiens
  misc_RNA (1)...(19): siRNA sense strand
ugucaagucuggaccugua

SEQ ID NO: 692990 - RNA, 19 nt, Homo sapiens
  misc_RNA (1)...(19): siRNA sense strand
gcagacaccagaauacaau

SEQ ID NO: 692991 - RNA, 19 nt, Homo sapiens
  misc_RNA (1)...(19): siRNA sense strand
gggacuuacuugugaagaa

SEQ ID NO: 692992 - RNA, 19 nt, Homo sapiens
  misc_RNA (1)...(19): siRNA sense strand
agaauaaccagucauuuga

SEQ ID NO: 692993 - RNA, 19 nt, Homo sapiens
  misc_RNA (1)...(19): siRNA sense strand
gagaucucauagcuugaua

SEQ ID NO: 692994 - RNA, 19 nt, Homo sapiens
  misc_RNA (1)...(19): siRNA sense strand
gaaauuucugucaaggaua

SEQ ID NO: 692995 - RNA, 19 nt, Homo sapiens
  misc_RNA (1)...(19): siRNA sense strand
cagaaauaaucaucacuuc

SEQ ID NO: 692996 - RNA, 19 nt, Homo sapiens
  misc_RNA (1)...(19): siRNA sense strand
gcaaagagagaagaagaug

SEQ ID NO: 692997 - RNA, 19 nt, Homo sapiens
  misc_RNA (1)...(19): siRNA sense strand
ugagauaaacuacuacuuc

SEQ ID NO: 692998 - RNA, 19 nt, Homo sapiens
  misc_RNA (1)...(19): siRNA sense strand
gacuuugccuuauucuuau

SEQ ID NO: 692999 - RNA, 19 nt, Homo sapiens
  misc_RNA (1)...(19): siRNA sense strand
gauuaagaauaaccaguca

SEQ ID NO: 693000 - RNA, 19 nt, Homo sapiens
  misc_RNA (1)...(19): siRNA sense strand
aauagaccgugagcaaaua

SEQ ID NO: 693001 - RNA, 19 nt, Homo sapiens
  misc_RNA (1)...(19): siRNA sense strand
uugaagauguagaaaggua

SEQ ID NO: 693002 - RNA, 19 nt, Homo sapiens
  misc_RNA (1)...(19): siRNA sense strand
aagaauaaccagucauuug

SEQ ID NO: 693003 - RNA, 19 nt, Homo sapiens
  misc_RNA (1)...(19): siRNA sense strand
gaucucauagcuugauauu

SEQ ID NO: 693004 - RNA, 19 nt, Homo sapiens
  misc_RNA (1)...(19): siRNA sense strand
ggcaggugcuauuuccuuu

SEQ ID NO: 693005 - RNA, 19 nt, Homo sapiens
  misc_RNA (1)...(19): siRNA sense strand
ggucaaugcugagauaaac

SEQ ID NO: 693006 - RNA, 19 nt, Homo sapiens
  misc_RNA (1)...(19): siRNA sense strand
agacaugguuugcaguguu

SEQ ID NO: 693007 - RNA, 19 nt, Homo sapiens
  misc_RNA (1)...(19): siRNA sense strand
ggauccugauauaaacaua

SEQ ID NO: 693008 - RNA, 19 nt, Homo sapiens
  misc_RNA (1)...(19): siRNA sense strand
gggaggauuugacuucaca

SEQ ID NO: 693009 - RNA, 19 nt, Homo sapiens
  misc_RNA (1)...(19): siRNA sense strand
aaacacgggaucuggauuu

SEQ ID NO: 693010 - RNA, 19 nt, Homo sapiens
  misc_RNA (1)...(19): siRNA sense strand
aaucaucacuucucucucu

SEQ ID NO: 693011 - RNA, 19 nt, Homo sapiens
  misc_RNA (1)...(19): siRNA sense strand
gagagaagaagaugugagu

SEQ ID NO: 693012 - RNA, 19 nt, Homo sapiens
  misc_RNA (1)...(19): siRNA sense strand
gcagagacgaauauagaau

SEQ ID NO: 693013 - RNA, 19 nt, Homo sapiens
  misc_RNA (1)...(19): siRNA sense strand
gaaucugcauccgcuggua

SEQ ID NO: 693014 - RNA, 19 nt, Homo sapiens
  misc_RNA (1)...(19): siRNA sense strand
ugauugaggauguuaauga

SEQ ID NO: 693015 - RNA, 19 nt, Homo sapiens
  misc_RNA (1)...(19): siRNA sense strand
ugccacggauccugauaua

SEQ ID NO: 693016 - RNA, 19 nt, Homo sapiens
  misc_RNA (1)...(19): siRNA sense strand
ggacuuacuugugaagaac

SEQ ID NO: 693017 - RNA, 19 nt, Homo sapiens
  misc_RNA (1)...(19): siRNA sense strand
ugccaccgcucacauagaa

SEQ ID NO: 693018 - RNA, 19 nt, Homo sapiens
  misc_RNA (1)...(19): siRNA sense strand
gcuccgcguucuucgauau

SEQ ID NO: 693019 - RNA, 19 nt, Homo sapiens
  misc_RNA (1)...(19): siRNA sense strand
uaauuccgaugguggcaaa

SEQ ID NO: 693020 - RNA, 19 nt, Homo sapiens
  misc_RNA (1)...(19): siRNA sense strand
augcugagauaaacuacua

SEQ ID NO: 693021 - RNA, 19 nt, Homo sapiens
  misc_RNA (1)...(19): siRNA sense strand
cagagacgaauauagaauu

SEQ ID NO: 693022 - RNA, 19 nt, Homo sapiens
  misc_RNA (1)...(19): siRNA sense strand
aaagagagaagaagaugug

SEQ ID NO: 693023 - RNA, 19 nt, Homo sapiens
  misc_RNA (1)...(19): siRNA sense strand
ccaaugaagacaugguuug

SEQ ID NO: 693024 - RNA, 19 nt, Homo sapiens
  misc_RNA (1)...(19): siRNA sense strand
agaagucagguguaauaua

SEQ ID NO: 693025 - RNA, 19 nt, Homo sapiens
  misc_RNA (1)...(19): siRNA sense strand
gaucagauuuuggagaauu

SEQ ID NO: 693026 - RNA, 19 nt, Homo sapiens
  misc_RNA (1)...(19): siRNA sense strand
gcacugcccagagcacaaa

SEQ ID NO: 693027 - RNA, 19 nt, Homo sapiens
  misc_RNA (1)...(19): siRNA sense strand
ucaaugcugagauaaacua

SEQ ID NO: 693028 - RNA, 19 nt, Homo sapiens
  misc_RNA (1)...(19): siRNA sense strand
acuacaaacuggugacaga

SEQ ID NO: 693029 - RNA, 19 nt, Homo sapiens
  misc_RNA (1)...(19): siRNA sense strand
ccagaaauaaucaucacuu

SEQ ID NO: 693030 - RNA, 19 nt, Homo sapiens
  misc_RNA (1)...(19): siRNA sense strand
gaauaaccagucauuugau

SEQ ID NO: 693031 - RNA, 19 nt, Homo sapiens
  misc_RNA (1)...(19): siRNA sense strand
gaaaacagguaugauuaag

SEQ ID NO: 693032 - RNA, 19 nt, Homo sapiens
  misc_RNA (1)...(19): siRNA sense strand
gcccagagcacaaaacaua

SEQ ID NO: 693033 - RNA, 19 nt, Homo sapiens
  misc_RNA (1)...(19): siRNA sense strand
gggaagaacagagaucuca

SEQ ID NO: 693034 - RNA, 19 nt, Homo sapiens
  misc_RNA (1)...(19): siRNA sense strand
agucagguguaauauagaa

SEQ ID NO: 693035 - RNA, 19 nt, Homo sapiens
  misc_RNA (1)...(19): siRNA sense strand
gaucuggauuucggaggaa

SEQ ID NO: 693036 - RNA, 19 nt, Homo sapiens
  misc_RNA (1)...(19): siRNA sense strand
gagaauucaccuccaggaa

SEQ ID NO: 693037 - RNA, 19 nt, Homo sapiens
  misc_RNA (1)...(19): siRNA sense strand
cggaggaaauggagaaguc

SEQ ID NO: 693038 - RNA, 19 nt, Homo sapiens
  misc_RNA (1)...(19): siRNA sense strand
agacaacuugcaagagaua

SEQ ID NO: 693039 - RNA, 19 nt, Homo sapiens
  misc_RNA (1)...(19): siRNA sense strand
cauagaaauccuugaugaa

SEQ ID NO: 693040 - RNA, 19 nt, Homo sapiens
  misc_RNA (1)...(19): siRNA sense strand
ccgaauagaccgugagcaa

SEQ ID NO: 693041 - RNA, 19 nt, Homo sapiens
  misc_RNA (1)...(19): siRNA sense strand
aagaagaugugaguugcaa

SEQ ID NO: 693042 - RNA, 19 nt, Homo sapiens
  misc_RNA (1)...(19): siRNA sense strand
gagcagacaccagaauaca

SEQ ID NO: 693043 - RNA, 19 nt, Homo sapiens
  misc_RNA (1)...(19): siRNA sense strand
caauaacuacuacaaacug

SEQ ID NO: 693044 - RNA, 19 nt, Homo sapiens
  misc_RNA (1)...(19): siRNA sense strand
agacauuccauucaagauu

SEQ ID NO: 693045 - RNA, 19 nt, Homo sapiens
  misc_RNA (1)...(19): siRNA sense strand
agaaacagacauuccauuc

SEQ ID NO: 693046 - RNA, 19 nt, Homo sapiens
  misc_RNA (1)...(19): siRNA sense strand
gguggaaaauccuuuaaau

SEQ ID NO: 693047 - RNA, 19 nt, Homo sapiens
  misc_RNA (1)...(19): siRNA sense strand
cgaccgcccuguacucucu

SEQ ID NO: 693048 - RNA, 19 nt, Homo sapiens
  misc_RNA (1)...(19): siRNA sense strand
ucaauggccacaucuccua

SEQ ID NO: 693049 - RNA, 19 nt, Homo sapiens
  misc_RNA (1)...(19): siRNA sense strand
gaagcaucaccuuguaugu

SEQ ID NO: 693050 - RNA, 19 nt, Homo sapiens
  misc_RNA (1)...(19): siRNA sense strand
gacagccacugaccaggau

SEQ ID NO: 693051 - RNA, 19 nt, Homo sapiens
  misc_RNA (1)...(19): siRNA sense strand
gagccuccauugcgcaagu

SEQ ID NO: 693052 - RNA, 19 nt, Homo sapiens
  misc_RNA (1)...(19): siRNA sense strand
gaagucagguguagcuuaa

SEQ ID NO: 693053 - RNA, 19 nt, Homo sapiens
  misc_RNA (1)...(19): siRNA sense strand
gcagagcgcucaccacuug

SEQ ID NO: 693054 - RNA, 19 nt, Homo sapiens
  misc_RNA (1)...(19): siRNA sense strand
uggcaaauauccagaauua

SEQ ID NO: 693055 - RNA, 19 nt, Homo sapiens
  misc_RNA (1)...(19): siRNA sense strand
gagcaaauaugcaaagaga

SEQ ID NO: 693056 - RNA, 19 nt, Homo sapiens
  misc_RNA (1)...(19): siRNA sense strand
ugaauucgcugagcaaaua

SEQ ID NO: 693057 - RNA, 19 nt, Homo sapiens
  misc_RNA (1)...(19): siRNA sense strand
guagagguguuccauuuaa

SEQ ID NO: 693058 - RNA, 19 nt, Homo sapiens
  misc_RNA (1)...(19): siRNA sense strand
gcacauuacugacgucaau

SEQ ID NO: 693059 - RNA, 19 nt, Homo sapiens
  misc_RNA (1)...(19): siRNA sense strand
uaacgaguauuucucauug

SEQ ID NO: 693060 - RNA, 19 nt, Homo sapiens
  misc_RNA (1)...(19): siRNA sense strand
gaauuaguauugcagaaga

SEQ ID NO: 693061 - RNA, 19 nt, Homo sapiens
  misc_RNA (1)...(19): siRNA sense strand
ucacaucuguugaucauug

SEQ ID NO: 693062 - RNA, 19 nt, Homo sapiens
  misc_RNA (1)...(19): siRNA sense strand
aagauaaccucaacaaaga

SEQ ID NO: 693063 - RNA, 19 nt, Homo sapiens
  misc_RNA (1)...(19): siRNA sense strand
gcaaauauccagaauuagu

SEQ ID NO: 693064 - RNA, 19 nt, Homo sapiens
  misc_RNA (1)...(19): siRNA sense strand
gacaacagcccagaaauaa

SEQ ID NO: 693065 - RNA, 19 nt, Homo sapiens
  misc_RNA (1)...(19): siRNA sense strand
gaucacuuauuccuucuuu

SEQ ID NO: 693066 - RNA, 19 nt, Homo sapiens
  misc_RNA (1)...(19): siRNA sense strand
gauaagaauccugguaaua

SEQ ID NO: 693067 - RNA, 19 nt, Homo sapiens
  misc_RNA (1)...(19): siRNA sense strand
gaaccucgcuaaggaucua

SEQ ID NO: 693068 - RNA, 19 nt, Homo sapiens
  misc_RNA (1)...(19): siRNA sense strand
cgacaacagcccagaaaua

SEQ ID NO: 693069 - RNA, 19 nt, Homo sapiens
  misc_RNA (1)...(19): siRNA sense strand
gcaaauaugcaaagagaga

SEQ ID NO: 693070 - RNA, 19 nt, Homo sapiens
  misc_RNA (1)...(19): siRNA sense strand
gcagaagauccugauauua

SEQ ID NO: 693071 - RNA, 19 nt, Homo sapiens
  misc_RNA (1)...(19): siRNA sense strand
uaagaauccugguaauaga

SEQ ID NO: 693072 - RNA, 19 nt, Homo sapiens
  misc_RNA (1)...(19): siRNA sense strand
gaaagacaauccugauggu

SEQ ID NO: 693073 - RNA, 19 nt, Homo sapiens
  misc_RNA (1)...(19): siRNA sense strand
acucagagaucacuuauuc

SEQ ID NO: 693074 - RNA, 19 nt, Homo sapiens
  misc_RNA (1)...(19): siRNA sense strand
gaagaugugaguugcaauu

SEQ ID NO: 693075 - RNA, 19 nt, Homo sapiens
  misc_RNA (1)...(19): siRNA sense strand
gcuagucgcuguaagagau

SEQ ID NO: 693076 - RNA, 19 nt, Homo sapiens
  misc_RNA (1)...(19): siRNA sense strand
gaauagaccgugagcaaau

SEQ ID NO: 693077 - RNA, 19 nt, Homo sapiens
  misc_RNA (1)...(19): siRNA sense strand
caagauaaccucaacaaag

SEQ ID NO: 693078 - RNA, 19 nt, Homo sapiens
  misc_RNA (1)...(19): siRNA sense strand
ggaagucagguguagcuua

SEQ ID NO: 693079 - RNA, 19 nt, Homo sapiens
  misc_RNA (1)...(19): siRNA sense strand
gagcaaauaccaacuaagu

SEQ ID NO: 693080 - RNA, 19 nt, Homo sapiens
  misc_RNA (1)...(19): siRNA sense strand
gagaagaagaugugaguug

SEQ ID NO: 693081 - RNA, 19 nt, Homo sapiens
  misc_RNA (1)...(19): siRNA sense strand
aaguagagguguuccauuu

SEQ ID NO: 693082 - RNA, 19 nt, Homo sapiens
  misc_RNA (1)...(19): siRNA sense strand
caggaaacauucuaacuca

SEQ ID NO: 693083 - RNA, 19 nt, Homo sapiens
  misc_RNA (1)...(19): siRNA sense strand
gaugugaguugcaauugga

SEQ ID NO: 693084 - RNA, 19 nt, Homo sapiens
  misc_RNA (1)...(19): siRNA sense strand
gaagauccugauauuagua

SEQ ID NO: 693085 - RNA, 19 nt, Homo sapiens
  misc_RNA (1)...(19): siRNA sense strand
ucacgucacucucugauca

SEQ ID NO: 693086 - RNA, 19 nt, Homo sapiens
  misc_RNA (1)...(19): siRNA sense strand
gguaauagaugccaaugac

SEQ ID NO: 693087 - RNA, 19 nt, Homo sapiens
  misc_RNA (1)...(19): siRNA sense strand
cagaagauccugauauuag

SEQ ID NO: 693088 - RNA, 19 nt, Homo sapiens
  misc_RNA (1)...(19): siRNA sense strand
gauaaccucaacaaagaua

SEQ ID NO: 693089 - RNA, 19 nt, Homo sapiens
  misc_RNA (1)...(19): siRNA sense strand
caacagcccagaaauaauc

SEQ ID NO: 693090 - RNA, 19 nt, Homo sapiens
  misc_RNA (1)...(19): siRNA sense strand
cgauaaacauagaagcaaa

SEQ ID NO: 693091 - RNA, 19 nt, Homo sapiens
  misc_RNA (1)...(19): siRNA sense strand
gauucuagcuauugcucua

SEQ ID NO: 693092 - RNA, 19 nt, Homo sapiens
  misc_RNA (1)...(19): siRNA sense strand
ccggaaagaugaaauaaac

SEQ ID NO: 693093 - RNA, 19 nt, Homo sapiens
  misc_RNA (1)...(19): siRNA sense strand
ugcagaagauccugauauu

SEQ ID NO: 693094 - RNA, 19 nt, Homo sapiens
  misc_RNA (1)...(19): siRNA sense strand
gguguuccauuuaagauuc

SEQ ID NO: 693095 - RNA, 19 nt, Homo sapiens
  misc_RNA (1)...(19): siRNA sense strand
cagauaagaauccugguaa

SEQ ID NO: 693096 - RNA, 19 nt, Homo sapiens
  misc_RNA (1)...(19): siRNA sense strand
guacugaccgccuuagaug

SEQ ID NO: 693097 - RNA, 19 nt, Homo sapiens
  misc_RNA (1)...(19): siRNA sense strand
gcaaagagagaagaagaug

SEQ ID NO: 693098 - RNA, 19 nt, Homo sapiens
  misc_RNA (1)...(19): siRNA sense strand
aagcgguacugcucagaua

SEQ ID NO: 693099 - RNA, 19 nt, Homo sapiens
  misc_RNA (1)...(19): siRNA sense strand
ugaagcagauaagaagauu

SEQ ID NO: 693100 - RNA, 19 nt, Homo sapiens
  misc_RNA (1)...(19): siRNA sense strand
aauagaccgugagcaaaua

SEQ ID NO: 693101 - RNA, 19 nt, Homo sapiens
  misc_RNA (1)...(19): siRNA sense strand
uguagaaguuguagacgaa

SEQ ID NO: 693102 - RNA, 19 nt, Homo sapiens
  misc_RNA (1)...(19): siRNA sense strand
gguguaaaguaauuguaga

SEQ ID NO: 693103 - RNA, 19 nt, Homo sapiens
  misc_RNA (1)...(19): siRNA sense strand
ccgaggaucucucucaaca

SEQ ID NO: 693104 - RNA, 19 nt, Homo sapiens
  misc_RNA (1)...(19): siRNA sense strand
ggagaaagacaauccugau

SEQ ID NO: 693105 - RNA, 19 nt, Homo sapiens
  misc_RNA (1)...(19): siRNA sense strand
gaaguagaaagauauacga

SEQ ID NO: 693106 - RNA, 19 nt, Homo sapiens
  misc_RNA (1)...(19): siRNA sense strand
gaucaaaugaauccagaau

SEQ ID NO: 693107 - RNA, 19 nt, Homo sapiens
  misc_RNA (1)...(19): siRNA sense strand
ccauaacccugcacauuac

SEQ ID NO: 693108 - RNA, 19 nt, Homo sapiens
  misc_RNA (1)...(19): siRNA sense strand
gagagaagaagaugugagu

SEQ ID NO: 693109 - RNA, 19 nt, Homo sapiens
  misc_RNA (1)...(19): siRNA sense strand
aagagguacugccggauuu

SEQ ID NO: 693110 - RNA, 19 nt, Homo sapiens
  misc_RNA (1)...(19): siRNA sense strand
gcaccuccauccugagagu

SEQ ID NO: 693111 - RNA, 19 nt, Homo sapiens
  misc_RNA (1)...(19): siRNA sense strand
guacugcucagauaagaau

SEQ ID NO: 693112 - RNA, 19 nt, Homo sapiens
  misc_RNA (1)...(19): siRNA sense strand
gagaaagacaauccugaug

SEQ ID NO: 693113 - RNA, 19 nt, Homo sapiens
  misc_RNA (1)...(19): siRNA sense strand
ugauugaggauguuaauga

SEQ ID NO: 693114 - RNA, 19 nt, Homo sapiens
  misc_RNA (1)...(19): siRNA sense strand
ggacgagggcaucaacuca

SEQ ID NO: 693115 - RNA, 19 nt, Homo sapiens
  misc_RNA (1)...(19): siRNA sense strand
accauaacccugcacauua

SEQ ID NO: 693116 - RNA, 19 nt, Homo sapiens
  misc_RNA (1)...(19): siRNA sense strand
gaccgaggaucucucucaa

SEQ ID NO: 693117 - RNA, 19 nt, Homo sapiens
  misc_RNA (1)...(19): siRNA sense strand
gggaacaauucuugagucu

SEQ ID NO: 693118 - RNA, 19 nt, Homo sapiens
  misc_RNA (1)...(19): siRNA sense strand
gggacuuacuugugaagga

SEQ ID NO: 693119 - RNA, 19 nt, Homo sapiens
  misc_RNA (1)...(19): siRNA sense strand
uaacucagcagccuuugga

SEQ ID NO: 693120 - RNA, 19 nt, Homo sapiens
  misc_RNA (1)...(19): siRNA sense strand
cagaauuaguauugcagaa

SEQ ID NO: 693121 - RNA, 19 nt, Homo sapiens
  misc_RNA (1)...(19): siRNA sense strand
ggcagguacuauuuccuuu

SEQ ID NO: 693122 - RNA, 19 nt, Homo sapiens
  misc_RNA (1)...(19): siRNA sense strand
ucaguucucugcuccaagu

SEQ ID NO: 693123 - RNA, 19 nt, Homo sapiens
  misc_RNA (1)...(19): siRNA sense strand
caagagguacugccggauu

SEQ ID NO: 693124 - RNA, 19 nt, Homo sapiens
  misc_RNA (1)...(19): siRNA sense strand
aaagagagaagaagaugug

SEQ ID NO: 693125 - RNA, 19 nt, Homo sapiens
  misc_RNA (1)...(19): siRNA sense strand
ucaacucagagaucacuua

SEQ ID NO: 693126 - RNA, 19 nt, Homo sapiens
  misc_RNA (1)...(19): siRNA sense strand
caggacguguacaggguua

SEQ ID NO: 693127 - RNA, 19 nt, Homo sapiens
  misc_RNA (1)...(19): siRNA sense strand
uaauagaugccaaugacaa

SEQ ID NO: 693128 - RNA, 19 nt, Homo sapiens
  misc_RNA (1)...(19): siRNA sense strand
gggaugggaacaauucuug

SEQ ID NO: 693129 - RNA, 19 nt, Homo sapiens
  misc_RNA (1)...(19): siRNA sense strand
agaagauccugauauuagu

SEQ ID NO: 693130 - RNA, 19 nt, Homo sapiens
  misc_RNA (1)...(19): siRNA sense strand
aggcugagaugcaguuuua

SEQ ID NO: 693131 - RNA, 19 nt, Homo sapiens
  misc_RNA (1)...(19): siRNA sense strand
ggauuacacuacaggaaac

SEQ ID NO: 693132 - RNA, 19 nt, Homo sapiens
  misc_RNA (1)...(19): siRNA sense strand
gcagguacuauuuccuuug

SEQ ID NO: 693133 - RNA, 19 nt, Homo sapiens
  misc_RNA (1)...(19): siRNA sense strand
ggcaucaacucagagauca

SEQ ID NO: 693134 - RNA, 19 nt, Homo sapiens
  misc_RNA (1)...(19): siRNA sense strand
uaaguccuaacgaguauuu

SEQ ID NO: 693135 - RNA, 19 nt, Homo sapiens
  misc_RNA (1)...(19): siRNA sense strand
gcugagcaaauaccaacua

SEQ ID NO: 693136 - RNA, 19 nt, Homo sapiens
  misc_RNA (1)...(19): siRNA sense strand
uagcuuaaguagagguguu

SEQ ID NO: 693137 - RNA, 19 nt, Homo sapiens
  misc_RNA (1)...(19): siRNA sense strand
caacucagagaucacuuau

SEQ ID NO: 693138 - RNA, 19 nt, Homo sapiens
  misc_RNA (1)...(19): siRNA sense strand
ucagauaagaauccuggua

SEQ ID NO: 693139 - RNA, 19 nt, Homo sapiens
  misc_RNA (1)...(19): siRNA sense strand
gauccugauauuaguauga

SEQ ID NO: 693140 - RNA, 19 nt, Homo sapiens
  misc_RNA (1)...(19): siRNA sense strand
ccgaauagaccgugagcaa

SEQ ID NO: 693141 - RNA, 19 nt, Homo sapiens
  misc_RNA (1)...(19): siRNA sense strand
cugagcaaauaccaacuaa

SEQ ID NO: 693142 - RNA, 19 nt, Homo sapiens
  misc_RNA (1)...(19): siRNA sense strand
aagaagaugugaguugcaa

SEQ ID NO: 693143 - RNA, 19 nt, Homo sapiens
  misc_RNA (1)...(19): siRNA sense strand
gguggaaaauccuuuaaau

SEQ ID NO: 693144 - RNA, 19 nt, Homo sapiens
  misc_RNA (1)...(19): siRNA sense strand
guucgcagauagcuugcaa

SEQ ID NO: 693145 - RNA, 19 nt, Homo sapiens
  misc_RNA (1)...(19): siRNA sense strand
cgaauagaccgugagcaaa

SEQ ID NO: 693146 - RNA, 19 nt, Homo sapiens
  misc_RNA (1)...(19): siRNA sense strand
gcucuacgccugcgacagu

SEQ ID NO: 693147 - RNA, 19 nt, Homo sapiens
  misc_RNA (1)...(19): siRNA sense strand
gauugaggauguuaaugac

SEQ ID NO: 693148 - RNA, 19 nt, Homo sapiens
  misc_RNA (1)...(19): siRNA sense strand
gaucagauuauggaggauu

SEQ ID NO: 693149 - RNA, 19 nt, Homo sapiens
  misc_RNA (1)...(19): siRNA sense strand
gguggcaaauauccagaau

SEQ ID NO: 693150 - RNA, 19 nt, Homo sapiens
  misc_RNA (1)...(19): siRNA sense strand
ccgauccgcuacucgauuc

SEQ ID NO: 693151 - RNA, 19 nt, Homo sapiens
  misc_RNA (1)...(19): siRNA sense strand
cacaagauaaccucaacaa

SEQ ID NO: 693152 - RNA, 19 nt, Homo sapiens
  misc_RNA (1)...(19): siRNA sense strand
gaagucagguguagcuuaa

SEQ ID NO: 693153 - RNA, 19 nt, Homo sapiens
  misc_RNA (1)...(19): siRNA sense strand
gcagagcgcucaccacuug

SEQ ID NO: 693154 - RNA, 19 nt, Homo sapiens
  misc_RNA (1)...(19): siRNA sense strand
uggcaaauauccagaauua

SEQ ID NO: 693155 - RNA, 19 nt, Homo sapiens
  misc_RNA (1)...(19): siRNA sense strand
gagcaaauaugcaaagaga

SEQ ID NO: 693156 - RNA, 19 nt, Homo sapiens
  misc_RNA (1)...(19): siRNA sense strand
ugaauucgcugagcaaaua

SEQ ID NO: 693157 - RNA, 19 nt, Homo sapiens
  misc_RNA (1)...(19): siRNA sense strand
guagagguguuccauuuaa

SEQ ID NO: 693158 - RNA, 19 nt, Homo sapiens
  misc_RNA (1)...(19): siRNA sense strand
gcacauuacugacgucaau

SEQ ID NO: 693159 - RNA, 19 nt, Homo sapiens
  misc_RNA (1)...(19): siRNA sense strand
uaacgaguauuucucauug

SEQ ID NO: 693160 - RNA, 19 nt, Homo sapiens
  misc_RNA (1)...(19): siRNA sense strand
gaauuaguauugcagaaga

SEQ ID NO: 693161 - RNA, 19 nt, Homo sapiens
  misc_RNA (1)...(19): siRNA sense strand
ucacaucuguugaucauug

SEQ ID NO: 693162 - RNA, 19 nt, Homo sapiens
  misc_RNA (1)...(19): siRNA sense strand
aagauaaccucaacaaaga

SEQ ID NO: 693163 - RNA, 19 nt, Homo sapiens
  misc_RNA (1)...(19): siRNA sense strand
gcaaauauccagaauuagu

SEQ ID NO: 693164 - RNA, 19 nt, Homo sapiens
  misc_RNA (1)...(19): siRNA sense strand
gacaacagcccagaaauaa

SEQ ID NO: 693165 - RNA, 19 nt, Homo sapiens
  misc_RNA (1)...(19): siRNA sense strand
gaucacuuauuccuucuuu

SEQ ID NO: 693166 - RNA, 19 nt, Homo sapiens
  misc_RNA (1)...(19): siRNA sense strand
gauaagaauccugguaaua

SEQ ID NO: 693167 - RNA, 19 nt, Homo sapiens
  misc_RNA (1)...(19): siRNA sense strand
gaaccucgcuaaggaucua

SEQ ID NO: 693168 - RNA, 19 nt, Homo sapiens
  misc_RNA (1)...(19): siRNA sense strand
cgacaacagcccagaaaua

SEQ ID NO: 693169 - RNA, 19 nt, Homo sapiens
  misc_RNA (1)...(19): siRNA sense strand
gcaaauaugcaaagagaga

SEQ ID NO: 693170 - RNA, 19 nt, Homo sapiens
  misc_RNA (1)...(19): siRNA sense strand
gcagaagauccugauauua

SEQ ID NO: 693171 - RNA, 19 nt, Homo sapiens
  misc_RNA (1)...(19): siRNA sense strand
uaagaauccugguaauaga

SEQ ID NO: 693172 - RNA, 19 nt, Homo sapiens
  misc_RNA (1)...(19): siRNA sense strand
gaaagacaauccugauggu

SEQ ID NO: 693173 - RNA, 19 nt, Homo sapiens
  misc_RNA (1)...(19): siRNA sense strand
acucagagaucacuuauuc

SEQ ID NO: 693174 - RNA, 19 nt, Homo sapiens
  misc_RNA (1)...(19): siRNA sense strand
gaagaugugaguugcaauu

SEQ ID NO: 693175 - RNA, 19 nt, Homo sapiens
  misc_RNA (1)...(19): siRNA sense strand
gcuagucgcuguaagagau

SEQ ID NO: 693176 - RNA, 19 nt, Homo sapiens
  misc_RNA (1)...(19): siRNA sense strand
gaauagaccgugagcaaau

SEQ ID NO: 693177 - RNA, 19 nt, Homo sapiens
  misc_RNA (1)...(19): siRNA sense strand
caagauaaccucaacaaag

SEQ ID NO: 693178 - RNA, 19 nt, Homo sapiens
  misc_RNA (1)...(19): siRNA sense strand
ggaagucagguguagcuua

SEQ ID NO: 693179 - RNA, 19 nt, Homo sapiens
  misc_RNA (1)...(19): siRNA sense strand
gagcaaauaccaacuaagu

SEQ ID NO: 693180 - RNA, 19 nt, Homo sapiens
  misc_RNA (1)...(19): siRNA sense strand
gagaagaagaugugaguug

SEQ ID NO: 693181 - RNA, 19 nt, Homo sapiens
  misc_RNA (1)...(19): siRNA sense strand
aaguagagguguuccauuu

SEQ ID NO: 693182 - RNA, 19 nt, Homo sapiens
  misc_RNA (1)...(19): siRNA sense strand
caggaaacauucuaacuca

SEQ ID NO: 693183 - RNA, 19 nt, Homo sapiens
  misc_RNA (1)...(19): siRNA sense strand
gaugugaguugcaauugga

SEQ ID NO: 693184 - RNA, 19 nt, Homo sapiens
  misc_RNA (1)...(19): siRNA sense strand
gaagauccugauauuagua

SEQ ID NO: 693185 - RNA, 19 nt, Homo sapiens
  misc_RNA (1)...(19): siRNA sense strand
ucacgucacucucugauca

SEQ ID NO: 693186 - RNA, 19 nt, Homo sapiens
  misc_RNA (1)...(19): siRNA sense strand
gguaauagaugccaaugac

SEQ ID NO: 693187 - RNA, 19 nt, Homo sapiens
  misc_RNA (1)...(19): siRNA sense strand
cagaagauccugauauuag

SEQ ID NO: 693188 - RNA, 19 nt, Homo sapiens
  misc_RNA (1)...(19): siRNA sense strand
gauaaccucaacaaagaua

SEQ ID NO: 693189 - RNA, 19 nt, Homo sapiens
  misc_RNA (1)...(19): siRNA sense strand
caacagcccagaaauaauc

SEQ ID NO: 693190 - RNA, 19 nt, Homo sapiens
  misc_RNA (1)...(19): siRNA sense strand
cgauaaacauagaagcaaa

SEQ ID NO: 693191 - RNA, 19 nt, Homo sapiens
  misc_RNA (1)...(19): siRNA sense strand
gauucuagcuauugcucua

SEQ ID NO: 693192 - RNA, 19 nt, Homo sapiens
  misc_RNA (1)...(19): siRNA sense strand
ccggaaagaugaaauaaac

SEQ ID NO: 693193 - RNA, 19 nt, Homo sapiens
  misc_RNA (1)...(19): siRNA sense strand
ugcagaagauccugauauu

SEQ ID NO: 693194 - RNA, 19 nt, Homo sapiens
  misc_RNA (1)...(19): siRNA sense strand
gguguuccauuuaagauuc

SEQ ID NO: 693195 - RNA, 19 nt, Homo sapiens
  misc_RNA (1)...(19): siRNA sense strand
cagauaagaauccugguaa

SEQ ID NO: 693196 - RNA, 19 nt, Homo sapiens
  misc_RNA (1)...(19): siRNA sense strand
guacugaccgccuuagaug

SEQ ID NO: 693197 - RNA, 19 nt, Homo sapiens
  misc_RNA (1)...(19): siRNA sense strand
gcaaagagagaagaagaug

SEQ ID NO: 693198 - RNA, 19 nt, Homo sapiens
  misc_RNA (1)...(19): siRNA sense strand
aagcgguacugcucagaua

SEQ ID NO: 693199 - RNA, 19 nt, Homo sapiens
  misc_RNA (1)...(19): siRNA sense strand
ugaagcagauaagaagauu

SEQ ID NO: 693200 - RNA, 19 nt, Homo sapiens
  misc_RNA (1)...(19): siRNA sense strand
aauagaccgugagcaaaua

SEQ ID NO: 693201 - RNA, 19 nt, Homo sapiens
  misc_RNA (1)...(19): siRNA sense strand
uguagaaguuguagacgaa

SEQ ID NO: 693202 - RNA, 19 nt, Homo sapiens
  misc_RNA (1)...(19): siRNA sense strand
gguguaaaguaauuguaga

SEQ ID NO: 693203 - RNA, 19 nt, Homo sapiens
  misc_RNA (1)...(19): siRNA sense strand
ccgaggaucucucucaaca

SEQ ID NO: 693204 - RNA, 19 nt, Homo sapiens
  misc_RNA (1)...(19): siRNA sense strand
ggagaaagacaauccugau

SEQ ID NO: 693205 - RNA, 19 nt, Homo sapiens
  misc_RNA (1)...(19): siRNA sense strand
gaaguagaaagauauacga

SEQ ID NO: 693206 - RNA, 19 nt, Homo sapiens
  misc_RNA (1)...(19): siRNA sense strand
gaucaaaugaauccagaau

SEQ ID NO: 693207 - RNA, 19 nt, Homo sapiens
  misc_RNA (1)...(19): siRNA sense strand
ccauaacccugcacauuac

SEQ ID NO: 693208 - RNA, 19 nt, Homo sapiens
  misc_RNA (1)...(19): siRNA sense strand
gagagaagaagaugugagu

SEQ ID NO: 693209 - RNA, 19 nt, Homo sapiens
  misc_RNA (1)...(19): siRNA sense strand
aagagguacugccggauuu

SEQ ID NO: 693210 - RNA, 19 nt, Homo sapiens
  misc_RNA (1)...(19): siRNA sense strand
gcaccuccauccugagagu

SEQ ID NO: 693211 - RNA, 19 nt, Homo sapiens
  misc_RNA (1)...(19): siRNA sense strand
guacugcucagauaagaau

SEQ ID NO: 693212 - RNA, 19 nt, Homo sapiens
  misc_RNA (1)...(19): siRNA sense strand
gagaaagacaauccugaug

SEQ ID NO: 693213 - RNA, 19 nt, Homo sapiens
  misc_RNA (1)...(19): siRNA sense strand
ugauugaggauguuaauga

SEQ ID NO: 693214 - RNA, 19 nt, Homo sapiens
  misc_RNA (1)...(19): siRNA sense strand
ggacgagggcaucaacuca

SEQ ID NO: 693215 - RNA, 19 nt, Homo sapiens
  misc_RNA (1)...(19): siRNA sense strand
accauaacccugcacauua

SEQ ID NO: 693216 - RNA, 19 nt, Homo sapiens
  misc_RNA (1)...(19): siRNA sense strand
gaccgaggaucucucucaa

SEQ ID NO: 693217 - RNA, 19 nt, Homo sapiens
  misc_RNA (1)...(19): siRNA sense strand
gggaacaauucuugagucu

SEQ ID NO: 693218 - RNA, 19 nt, Homo sapiens
  misc_RNA (1)...(19): siRNA sense strand
gggacuuacuugugaagga

SEQ ID NO: 693219 - RNA, 19 nt, Homo sapiens
  misc_RNA (1)...(19): siRNA sense strand
uaacucagcagccuuugga

SEQ ID NO: 693220 - RNA, 19 nt, Homo sapiens
  misc_RNA (1)...(19): siRNA sense strand
cagaauuaguauugcagaa

SEQ ID NO: 693221 - RNA, 19 nt, Homo sapiens
  misc_RNA (1)...(19): siRNA sense strand
ggcagguacuauuuccuuu

SEQ ID NO: 693222 - RNA, 19 nt, Homo sapiens
  misc_RNA (1)...(19): siRNA sense strand
ucaguucucugcuccaagu

SEQ ID NO: 693223 - RNA, 19 nt, Homo sapiens
  misc_RNA (1)...(19): siRNA sense strand
caagagguacugccggauu

SEQ ID NO: 693224 - RNA, 19 nt, Homo sapiens
  misc_RNA (1)...(19): siRNA sense strand
aaagagagaagaagaugug

SEQ ID NO: 693225 - RNA, 19 nt, Homo sapiens
  misc_RNA (1)...(19): siRNA sense strand
ucaacucagagaucacuua

SEQ ID NO: 693226 - RNA, 19 nt, Homo sapiens
  misc_RNA (1)...(19): siRNA sense strand
caggacguguacaggguua

SEQ ID NO: 693227 - RNA, 19 nt, Homo sapiens
  misc_RNA (1)...(19): siRNA sense strand
uaauagaugccaaugacaa

SEQ ID NO: 693228 - RNA, 19 nt, Homo sapiens
  misc_RNA (1)...(19): siRNA sense strand
gggaugggaacaauucuug

SEQ ID NO: 693229 - RNA, 19 nt, Homo sapiens
  misc_RNA (1)...(19): siRNA sense strand
agaagauccugauauuagu

SEQ ID NO: 693230 - RNA, 19 nt, Homo sapiens
  misc_RNA (1)...(19): siRNA sense strand
aggcugagaugcaguuuua

SEQ ID NO: 693231 - RNA, 19 nt, Homo sapiens
  misc_RNA (1)...(19): siRNA sense strand
ggauuacacuacaggaaac

SEQ ID NO: 693232 - RNA, 19 nt, Homo sapiens
  misc_RNA (1)...(19): siRNA sense strand
gcagguacuauuuccuuug

SEQ ID NO: 693233 - RNA, 19 nt, Homo sapiens
  misc_RNA (1)...(19): siRNA sense strand
ggcaucaacucagagauca

SEQ ID NO: 693234 - RNA, 19 nt, Homo sapiens
  misc_RNA (1)...(19): siRNA sense strand
uaaguccuaacgaguauuu

SEQ ID NO: 693235 - RNA, 19 nt, Homo sapiens
  misc_RNA (1)...(19): siRNA sense strand
gcugagcaaauaccaacua

SEQ ID NO: 693236 - RNA, 19 nt, Homo sapiens
  misc_RNA (1)...(19): siRNA sense strand
uagcuuaaguagagguguu

SEQ ID NO: 693237 - RNA, 19 nt, Homo sapiens
  misc_RNA (1)...(19): siRNA sense strand
caacucagagaucacuuau

SEQ ID NO: 693238 - RNA, 19 nt, Homo sapiens
  misc_RNA (1)...(19): siRNA sense strand
ucagauaagaauccuggua

SEQ ID NO: 693239 - RNA, 19 nt, Homo sapiens
  misc_RNA (1)...(19): siRNA sense strand
gauccugauauuaguauga

SEQ ID NO: 693240 - RNA, 19 nt, Homo sapiens
  misc_RNA (1)...(19): siRNA sense strand
ccgaauagaccgugagcaa

SEQ ID NO: 693241 - RNA, 19 nt, Homo sapiens
  misc_RNA (1)...(19): siRNA sense strand
cugagcaaauaccaacuaa

SEQ ID NO: 693242 - RNA, 19 nt, Homo sapiens
  misc_RNA (1)...(19): siRNA sense strand
aagaagaugugaguugcaa

SEQ ID NO: 693243 - RNA, 19 nt, Homo sapiens
  misc_RNA (1)...(19): siRNA sense strand
gguggaaaauccuuuaaau

SEQ ID NO: 693244 - RNA, 19 nt, Homo sapiens
  misc_RNA (1)...(19): siRNA sense strand
guucgcagauagcuugcaa

SEQ ID NO: 693245 - RNA, 19 nt, Homo sapiens
  misc_RNA (1)...(19): siRNA sense strand
cgaauagaccgugagcaaa

SEQ ID NO: 693246 - RNA, 19 nt, Homo sapiens
  misc_RNA (1)...(19): siRNA sense strand
gcucuacgccugcgacagu

SEQ ID NO: 693247 - RNA, 19 nt, Homo sapiens
  misc_RNA (1)...(19): siRNA sense strand
gauugaggauguuaaugac

SEQ ID NO: 693248 - RNA, 19 nt, Homo sapiens
  misc_RNA (1)...(19): siRNA sense strand
gaucagauuauggaggauu

SEQ ID NO: 693249 - RNA, 19 nt, Homo sapiens
  misc_RNA (1)...(19): siRNA sense strand
gguggcaaauauccagaau

SEQ ID NO: 693250 - RNA, 19 nt, Homo sapiens
  misc_RNA (1)...(19): siRNA sense strand
ccgauccgcuacucgauuc

SEQ ID NO: 693251 - RNA, 19 nt, Homo sapiens
  misc_RNA (1)...(19): siRNA sense strand
cacaagauaaccucaacaa

SEQ ID NO: 693252 - RNA, 19 nt, Homo sapiens
  misc_RNA (1)...(19): siRNA sense strand
ggacaaaggaugaggauga

SEQ ID NO: 693253 - RNA, 19 nt, Homo sapiens
  misc_RNA (1)...(19): siRNA sense strand
aaagaaacguggcaugaaa

SEQ ID NO: 693254 - RNA, 19 nt, Homo sapiens
  misc_RNA (1)...(19): siRNA sense strand
gcaggagucuggaugaaga

SEQ ID NO: 693255 - RNA, 19 nt, Homo sapiens
  misc_RNA (1)...(19): siRNA sense strand
ucagcaaacuguccaagua

SEQ ID NO: 693256 - RNA, 19 nt, Homo sapiens
  misc_RNA (1)...(19): siRNA sense strand
gaagacagcaacagagauu

SEQ ID NO: 693257 - RNA, 19 nt, Homo sapiens
  misc_RNA (1)...(19): siRNA sense strand
gaugagcaguccucuaaga

SEQ ID NO: 693258 - RNA, 19 nt, Homo sapiens
  misc_RNA (1)...(19): siRNA sense strand
gcacaggcaucaauuucug

SEQ ID NO: 693259 - RNA, 19 nt, Homo sapiens
  misc_RNA (1)...(19): siRNA sense strand
gaaugaagaagcagauuug

SEQ ID NO: 693260 - RNA, 19 nt, Homo sapiens
  misc_RNA (1)...(19): siRNA sense strand
gaccagccguguagaagaa

SEQ ID NO: 693261 - RNA, 19 nt, Homo sapiens
  misc_RNA (1)...(19): siRNA sense strand
caccugcuauggacaaaua

SEQ ID NO: 693262 - RNA, 19 nt, Homo sapiens
  misc_RNA (1)...(19): siRNA sense strand
guucagagacuaccacaaa

SEQ ID NO: 693263 - RNA, 19 nt, Homo sapiens
  misc_RNA (1)...(19): siRNA sense strand
gaagguggcccagcagaaa

SEQ ID NO: 693264 - RNA, 19 nt, Homo sapiens
  misc_RNA (1)...(19): siRNA sense strand
gaucaucagugcuggagau

SEQ ID NO: 693265 - RNA, 19 nt, Homo sapiens
  misc_RNA (1)...(19): siRNA sense strand
gacaaaggaugaggaugaa

SEQ ID NO: 693266 - RNA, 19 nt, Homo sapiens
  misc_RNA (1)...(19): siRNA sense strand
cuacaaccagugauucuua

SEQ ID NO: 693267 - RNA, 19 nt, Homo sapiens
  misc_RNA (1)...(19): siRNA sense strand
ugaccgggcuucagcaaga

SEQ ID NO: 693268 - RNA, 19 nt, Homo sapiens
  misc_RNA (1)...(19): siRNA sense strand
ugucagaaauggaggaaga

SEQ ID NO: 693269 - RNA, 19 nt, Homo sapiens
  misc_RNA (1)...(19): siRNA sense strand
acacgaaggucuacucaag

SEQ ID NO: 693270 - RNA, 19 nt, Homo sapiens
  misc_RNA (1)...(19): siRNA sense strand
gagacuaccacaaacacua

SEQ ID NO: 693271 - RNA, 19 nt, Homo sapiens
  misc_RNA (1)...(19): siRNA sense strand
gguguuaacagaacugaaa

SEQ ID NO: 693272 - RNA, 19 nt, Homo sapiens
  misc_RNA (1)...(19): siRNA sense strand
aaagaccucugaccgauca

SEQ ID NO: 693273 - RNA, 19 nt, Homo sapiens
  misc_RNA (1)...(19): siRNA sense strand
gaaagcacgcuccagacaa

SEQ ID NO: 693274 - RNA, 19 nt, Homo sapiens
  misc_RNA (1)...(19): siRNA sense strand
uagcagauauaaaguccaa

SEQ ID NO: 693275 - RNA, 19 nt, Homo sapiens
  misc_RNA (1)...(19): siRNA sense strand
ugaggaagcagagucuuua

SEQ ID NO: 693276 - RNA, 19 nt, Homo sapiens
  misc_RNA (1)...(19): siRNA sense strand
ggaaagcacgcuccagaca

SEQ ID NO: 693277 - RNA, 19 nt, Homo sapiens
  misc_RNA (1)...(19): siRNA sense strand
ggaugaggaugaaacugau

SEQ ID NO: 693278 - RNA, 19 nt, Homo sapiens
  misc_RNA (1)...(19): siRNA sense strand
gaaauggaggaagaaauga

SEQ ID NO: 693279 - RNA, 19 nt, Homo sapiens
  misc_RNA (1)...(19): siRNA sense strand
ugaagaagcagauuuggau

SEQ ID NO: 693280 - RNA, 19 nt, Homo sapiens
  misc_RNA (1)...(19): siRNA sense strand
caaagaaacguggcaugaa

SEQ ID NO: 693281 - RNA, 19 nt, Homo sapiens
  misc_RNA (1)...(19): siRNA sense strand
uggaugagcaguccucuaa

SEQ ID NO: 693282 - RNA, 19 nt, Homo sapiens
  misc_RNA (1)...(19): siRNA sense strand
ggagcagccucgugagaag

SEQ ID NO: 693283 - RNA, 19 nt, Homo sapiens
  misc_RNA (1)...(19): siRNA sense strand
agaaauggaggaagaaaug

SEQ ID NO: 693284 - RNA, 19 nt, Homo sapiens
  misc_RNA (1)...(19): siRNA sense strand
ucaaagaaacguggcauga

SEQ ID NO: 693285 - RNA, 19 nt, Homo sapiens
  misc_RNA (1)...(19): siRNA sense strand
ucaagacccucacucuaca

SEQ ID NO: 693286 - RNA, 19 nt, Homo sapiens
  misc_RNA (1)...(19): siRNA sense strand
gcaucaauuucuggacaaa

SEQ ID NO: 693287 - RNA, 19 nt, Homo sapiens
  misc_RNA (1)...(19): siRNA sense strand
accagaggcugaaagauga

SEQ ID NO: 693288 - RNA, 19 nt, Homo sapiens
  misc_RNA (1)...(19): siRNA sense strand
ggaugaagagccuaucugu

SEQ ID NO: 693289 - RNA, 19 nt, Homo sapiens
  misc_RNA (1)...(19): siRNA sense strand
gacagcaacagagauuaua

SEQ ID NO: 693290 - RNA, 19 nt, Homo sapiens
  misc_RNA (1)...(19): siRNA sense strand
gggcaggagucuggaugaa

SEQ ID NO: 693291 - RNA, 19 nt, Homo sapiens
  misc_RNA (1)...(19): siRNA sense strand
cagcaacagagauuauaaa

SEQ ID NO: 693292 - RNA, 19 nt, Homo sapiens
  misc_RNA (1)...(19): siRNA sense strand
ugaaacugauggcucugaa

SEQ ID NO: 693293 - RNA, 19 nt, Homo sapiens
  misc_RNA (1)...(19): siRNA sense strand
cacuacaacugcaaaggaa

SEQ ID NO: 693294 - RNA, 19 nt, Homo sapiens
  misc_RNA (1)...(19): siRNA sense strand
cugaagaggucaaagaaac

SEQ ID NO: 693295 - RNA, 19 nt, Homo sapiens
  misc_RNA (1)...(19): siRNA sense strand
aaagcacgcuccagacaag

SEQ ID NO: 693296 - RNA, 19 nt, Homo sapiens
  misc_RNA (1)...(19): siRNA sense strand
gaaaacaaaacuucaggaa

SEQ ID NO: 693297 - RNA, 19 nt, Homo sapiens
  misc_RNA (1)...(19): siRNA sense strand
caucagagucaucagcaaa

SEQ ID NO: 693298 - RNA, 19 nt, Homo sapiens
  misc_RNA (1)...(19): siRNA sense strand
cagacaagcucggcagaca

SEQ ID NO: 693299 - RNA, 19 nt, Homo sapiens
  misc_RNA (1)...(19): siRNA sense strand
aaacugauggcucugaaga

SEQ ID NO: 693300 - RNA, 19 nt, Homo sapiens
  misc_RNA (1)...(19): siRNA sense strand
agaaugaagaagcagauuu

SEQ ID NO: 693301 - RNA, 19 nt, Homo sapiens
  misc_RNA (1)...(19): siRNA sense strand
agaagaagacagcaacaga

SEQ ID NO: 693302 - RNA, 19 nt, Homo sapiens
  misc_RNA (1)...(19): siRNA sense strand
uaaaguccaagcuugagaa

SEQ ID NO: 693303 - RNA, 19 nt, Homo sapiens
  misc_RNA (1)...(19): siRNA sense strand
augaagagccuaucuguca

SEQ ID NO: 693304 - RNA, 19 nt, Homo sapiens
  misc_RNA (1)...(19): siRNA sense strand
aguccaagcuugagaaggu

SEQ ID NO: 693305 - RNA, 19 nt, Homo sapiens
  misc_RNA (1)...(19): siRNA sense strand
gaggcacaggcaucaauuu

SEQ ID NO: 693306 - RNA, 19 nt, Homo sapiens
  misc_RNA (1)...(19): siRNA sense strand
gaagagccuaucugucauc

SEQ ID NO: 693307 - RNA, 19 nt, Homo sapiens
  misc_RNA (1)...(19): siRNA sense strand
aaaugagaaugaagaagca

SEQ ID NO: 693308 - RNA, 19 nt, Homo sapiens
  misc_RNA (1)...(19): siRNA sense strand
caacugcaaaggaaaugga

SEQ ID NO: 693309 - RNA, 19 nt, Homo sapiens
  misc_RNA (1)...(19): siRNA sense strand
cgucaagacccucacucua

SEQ ID NO: 693310 - RNA, 19 nt, Homo sapiens
  misc_RNA (1)...(19): siRNA sense strand
guaauccuacaaccaguga

SEQ ID NO: 693311 - RNA, 19 nt, Homo sapiens
  misc_RNA (1)...(19): siRNA sense strand
gaaucgggagguaguaauc

SEQ ID NO: 693312 - RNA, 19 nt, Homo sapiens
  misc_RNA (1)...(19): siRNA sense strand
caaaggaugaggaugaaac

SEQ ID NO: 693313 - RNA, 19 nt, Homo sapiens
  misc_RNA (1)...(19): siRNA sense strand
caaacacuacaacugcaaa

SEQ ID NO: 693314 - RNA, 19 nt, Homo sapiens
  misc_RNA (1)...(19): siRNA sense strand
ggcaucaauuucuggacaa

SEQ ID NO: 693315 - RNA, 19 nt, Homo sapiens
  misc_RNA (1)...(19): siRNA sense strand
gcugaaagaugaaaauggu

SEQ ID NO: 693316 - RNA, 19 nt, Homo sapiens
  misc_RNA (1)...(19): siRNA sense strand
aaccagaggcugaaagaug

SEQ ID NO: 693317 - RNA, 19 nt, Homo sapiens
  misc_RNA (1)...(19): siRNA sense strand
ggaaucgggagguaguaau

SEQ ID NO: 693318 - RNA, 19 nt, Homo sapiens
  misc_RNA (1)...(19): siRNA sense strand
gagaaugaagaagcagauu

SEQ ID NO: 693319 - RNA, 19 nt, Homo sapiens
  misc_RNA (1)...(19): siRNA sense strand
agcagagucuuuacggaaa

SEQ ID NO: 693320 - RNA, 19 nt, Homo sapiens
  misc_RNA (1)...(19): siRNA sense strand
agacagcaacagagauuau

SEQ ID NO: 693321 - RNA, 19 nt, Homo sapiens
  misc_RNA (1)...(19): siRNA sense strand
gucaagacccucacucuac

SEQ ID NO: 693322 - RNA, 19 nt, Homo sapiens
  misc_RNA (1)...(19): siRNA sense strand
gaaaauggugcccucauca

SEQ ID NO: 693323 - RNA, 19 nt, Homo sapiens
  misc_RNA (1)...(19): siRNA sense strand
ugaagagccuaucugucau

SEQ ID NO: 693324 - RNA, 19 nt, Homo sapiens
  misc_RNA (1)...(19): siRNA sense strand
agagcuagcagauauaaag

SEQ ID NO: 693325 - RNA, 19 nt, Homo sapiens
  misc_RNA (1)...(19): siRNA sense strand
acacuacaacugcaaagga

SEQ ID NO: 693326 - RNA, 19 nt, Homo sapiens
  misc_RNA (1)...(19): siRNA sense strand
aagaagacagcaacagaga

SEQ ID NO: 693327 - RNA, 19 nt, Homo sapiens
  misc_RNA (1)...(19): siRNA sense strand
aagaagcagauuuggauga

SEQ ID NO: 693328 - RNA, 19 nt, Homo sapiens
  misc_RNA (1)...(19): siRNA sense strand
acagcaacagagauuauaa

SEQ ID NO: 693329 - RNA, 19 nt, Homo sapiens
  misc_RNA (1)...(19): siRNA sense strand
aaacguggcaugaaagacu

SEQ ID NO: 693330 - RNA, 19 nt, Homo sapiens
  misc_RNA (1)...(19): siRNA sense strand
aggaugaggaugaaacuga

SEQ ID NO: 693331 - RNA, 19 nt, Homo sapiens
  misc_RNA (1)...(19): siRNA sense strand
cuacaacugcaaaggaaau

SEQ ID NO: 693332 - RNA, 19 nt, Homo sapiens
  misc_RNA (1)...(19): siRNA sense strand
gagcuagcagauauaaagu

SEQ ID NO: 693333 - RNA, 19 nt, Homo sapiens
  misc_RNA (1)...(19): siRNA sense strand
gaagaggcacaggcaucaa

SEQ ID NO: 693334 - RNA, 19 nt, Homo sapiens
  misc_RNA (1)...(19): siRNA sense strand
gaagcccacagacacugaa

SEQ ID NO: 693335 - RNA, 19 nt, Homo sapiens
  misc_RNA (1)...(19): siRNA sense strand
cagcaaacuguccaaguag

SEQ ID NO: 693336 - RNA, 19 nt, Homo sapiens
  misc_RNA (1)...(19): siRNA sense strand
cagaaauggaggaagaaau

SEQ ID NO: 693337 - RNA, 19 nt, Homo sapiens
  misc_RNA (1)...(19): siRNA sense strand
agaagcagauuuggaugag

SEQ ID NO: 693338 - RNA, 19 nt, Homo sapiens
  misc_RNA (1)...(19): siRNA sense strand
acgaaggucuacucaaggu

SEQ ID NO: 693339 - RNA, 19 nt, Homo sapiens
  misc_RNA (1)...(19): siRNA sense strand
agaaacguggcaugaaaga

SEQ ID NO: 693340 - RNA, 19 nt, Homo sapiens
  misc_RNA (1)...(19): siRNA sense strand
gaagaggucaaagaaacgu

SEQ ID NO: 693341 - RNA, 19 nt, Homo sapiens
  misc_RNA (1)...(19): siRNA sense strand
ucagagacuaccacaaaca

SEQ ID NO: 693342 - RNA, 19 nt, Homo sapiens
  misc_RNA (1)...(19): siRNA sense strand
aaauggugcccucaucaga

SEQ ID NO: 693343 - RNA, 19 nt, Homo sapiens
  misc_RNA (1)...(19): siRNA sense strand
aaauggaggaagaaaugaa

SEQ ID NO: 693344 - RNA, 19 nt, Homo sapiens
  misc_RNA (1)...(19): siRNA sense strand
auauaaaguccaagcuuga

SEQ ID NO: 693345 - RNA, 19 nt, Homo sapiens
  misc_RNA (1)...(19): siRNA sense strand
gaaacugauggcucugaag

SEQ ID NO: 693346 - RNA, 19 nt, Homo sapiens
  misc_RNA (1)...(19): siRNA sense strand
gcaguuccagcaacagaag

SEQ ID NO: 693347 - RNA, 19 nt, Homo sapiens
  misc_RNA (1)...(19): siRNA sense strand
cagcaguuccagcaacaga

SEQ ID NO: 693348 - RNA, 19 nt, Homo sapiens
  misc_RNA (1)...(19): siRNA sense strand
caccaguucccaccugcua

SEQ ID NO: 693349 - RNA, 19 nt, Homo sapiens
  misc_RNA (1)...(19): siRNA sense strand
acaaccagaggcugaaaga

SEQ ID NO: 693350 - RNA, 19 nt, Homo sapiens
  misc_RNA (1)...(19): siRNA sense strand
ucaggaagcccagcuagag

SEQ ID NO: 693351 - RNA, 19 nt, Homo sapiens
  misc_RNA (1)...(19): siRNA sense strand
caagcucggcagacacgaa

SEQ ID NO: 693352 - RNA, 19 nt, Homo sapiens
  misc_RNA (1)...(19): siRNA sense strand
ggacaaaggaugaggauga

SEQ ID NO: 693353 - RNA, 19 nt, Homo sapiens
  misc_RNA (1)...(19): siRNA sense strand
aaagaaacguggcaugaaa

SEQ ID NO: 693354 - RNA, 19 nt, Homo sapiens
  misc_RNA (1)...(19): siRNA sense strand
ucagcaaacuguccaagua

SEQ ID NO: 693355 - RNA, 19 nt, Homo sapiens
  misc_RNA (1)...(19): siRNA sense strand
gaagacagcaacagagauu

SEQ ID NO: 693356 - RNA, 19 nt, Homo sapiens
  misc_RNA (1)...(19): siRNA sense strand
gaugagcaguccucuaaga

SEQ ID NO: 693357 - RNA, 19 nt, Homo sapiens
  misc_RNA (1)...(19): siRNA sense strand
gcacaggcaucaauuucug

SEQ ID NO: 693358 - RNA, 19 nt, Homo sapiens
  misc_RNA (1)...(19): siRNA sense strand
gaaugaagaagcagauuug

SEQ ID NO: 693359 - RNA, 19 nt, Homo sapiens
  misc_RNA (1)...(19): siRNA sense strand
gaccagccguguagaagaa

SEQ ID NO: 693360 - RNA, 19 nt, Homo sapiens
  misc_RNA (1)...(19): siRNA sense strand
gaagguggcccagcagaaa

SEQ ID NO: 693361 - RNA, 19 nt, Homo sapiens
  misc_RNA (1)...(19): siRNA sense strand
gaucaucagugcuggagau

SEQ ID NO: 693362 - RNA, 19 nt, Homo sapiens
  misc_RNA (1)...(19): siRNA sense strand
gacaaaggaugaggaugaa

SEQ ID NO: 693363 - RNA, 19 nt, Homo sapiens
  misc_RNA (1)...(19): siRNA sense strand
cuacaaccagugauucuua

SEQ ID NO: 693364 - RNA, 19 nt, Homo sapiens
  misc_RNA (1)...(19): siRNA sense strand
ugaccgggcuucagcaaga

SEQ ID NO: 693365 - RNA, 19 nt, Homo sapiens
  misc_RNA (1)...(19): siRNA sense strand
ugucagaaauggaggaaga

SEQ ID NO: 693366 - RNA, 19 nt, Homo sapiens
  misc_RNA (1)...(19): siRNA sense strand
aaagaccucugaccgauca

SEQ ID NO: 693367 - RNA, 19 nt, Homo sapiens
  misc_RNA (1)...(19): siRNA sense strand
gguguuaacagaacugaaa

SEQ ID NO: 693368 - RNA, 19 nt, Homo sapiens
  misc_RNA (1)...(19): siRNA sense strand
uagcagauauaaaguccaa

SEQ ID NO: 693369 - RNA, 19 nt, Homo sapiens
  misc_RNA (1)...(19): siRNA sense strand
ggaugaggaugaaacugau

SEQ ID NO: 693370 - RNA, 19 nt, Homo sapiens
  misc_RNA (1)...(19): siRNA sense strand
gaaauggaggaagaaauga

SEQ ID NO: 693371 - RNA, 19 nt, Homo sapiens
  misc_RNA (1)...(19): siRNA sense strand
caaagaaacguggcaugaa

SEQ ID NO: 693372 - RNA, 19 nt, Homo sapiens
  misc_RNA (1)...(19): siRNA sense strand
ugaagaagcagauuuggau

SEQ ID NO: 693373 - RNA, 19 nt, Homo sapiens
  misc_RNA (1)...(19): siRNA sense strand
uggaugagcaguccucuaa

SEQ ID NO: 693374 - RNA, 19 nt, Homo sapiens
  misc_RNA (1)...(19): siRNA sense strand
ucaaagaaacguggcauga

SEQ ID NO: 693375 - RNA, 19 nt, Homo sapiens
  misc_RNA (1)...(19): siRNA sense strand
agaaauggaggaagaaaug

SEQ ID NO: 693376 - RNA, 19 nt, Homo sapiens
  misc_RNA (1)...(19): siRNA sense strand
gcaucaauuucuggacaaa

SEQ ID NO: 693377 - RNA, 19 nt, Homo sapiens
  misc_RNA (1)...(19): siRNA sense strand
accagaggcugaaagauga

SEQ ID NO: 693378 - RNA, 19 nt, Homo sapiens
  misc_RNA (1)...(19): siRNA sense strand
gacagcaacagagauuaua

SEQ ID NO: 693379 - RNA, 19 nt, Homo sapiens
  misc_RNA (1)...(19): siRNA sense strand
ugaaacugauggcucugaa

SEQ ID NO: 693380 - RNA, 19 nt, Homo sapiens
  misc_RNA (1)...(19): siRNA sense strand
cagcaacagagauuauaaa

SEQ ID NO: 693381 - RNA, 19 nt, Homo sapiens
  misc_RNA (1)...(19): siRNA sense strand
cugaagaggucaaagaaac

SEQ ID NO: 693382 - RNA, 19 nt, Homo sapiens
  misc_RNA (1)...(19): siRNA sense strand
gaaaacaaaacuucaggaa

SEQ ID NO: 693383 - RNA, 19 nt, Homo sapiens
  misc_RNA (1)...(19): siRNA sense strand
caucagagucaucagcaaa

SEQ ID NO: 693384 - RNA, 19 nt, Homo sapiens
  misc_RNA (1)...(19): siRNA sense strand
aaacugauggcucugaaga

SEQ ID NO: 693385 - RNA, 19 nt, Homo sapiens
  misc_RNA (1)...(19): siRNA sense strand
agaagaagacagcaacaga

SEQ ID NO: 693386 - RNA, 19 nt, Homo sapiens
  misc_RNA (1)...(19): siRNA sense strand
agaaugaagaagcagauuu

SEQ ID NO: 693387 - RNA, 19 nt, Homo sapiens
  misc_RNA (1)...(19): siRNA sense strand
uaaaguccaagcuugagaa

SEQ ID NO: 693388 - RNA, 19 nt, Homo sapiens
  misc_RNA (1)...(19): siRNA sense strand
aguccaagcuugagaaggu

SEQ ID NO: 693389 - RNA, 19 nt, Homo sapiens
  misc_RNA (1)...(19): siRNA sense strand
gaggcacaggcaucaauuu

SEQ ID NO: 693390 - RNA, 19 nt, Homo sapiens
  misc_RNA (1)...(19): siRNA sense strand
aaaugagaaugaagaagca

SEQ ID NO: 693391 - RNA, 19 nt, Homo sapiens
  misc_RNA (1)...(19): siRNA sense strand
gaaucgggagguaguaauc

SEQ ID NO: 693392 - RNA, 19 nt, Homo sapiens
  misc_RNA (1)...(19): siRNA sense strand
caaaggaugaggaugaaac

SEQ ID NO: 693393 - RNA, 19 nt, Homo sapiens
  misc_RNA (1)...(19): siRNA sense strand
guaauccuacaaccaguga

SEQ ID NO: 693394 - RNA, 19 nt, Homo sapiens
  misc_RNA (1)...(19): siRNA sense strand
ggcaucaauuucuggacaa

SEQ ID NO: 693395 - RNA, 19 nt, Homo sapiens
  misc_RNA (1)...(19): siRNA sense strand
gcugaaagaugaaaauggu

SEQ ID NO: 693396 - RNA, 19 nt, Homo sapiens
  misc_RNA (1)...(19): siRNA sense strand
aaccagaggcugaaagaug

SEQ ID NO: 693397 - RNA, 19 nt, Homo sapiens
  misc_RNA (1)...(19): siRNA sense strand
ggaaucgggagguaguaau

SEQ ID NO: 693398 - RNA, 19 nt, Homo sapiens
  misc_RNA (1)...(19): siRNA sense strand
agacagcaacagagauuau

SEQ ID NO: 693399 - RNA, 19 nt, Homo sapiens
  misc_RNA (1)...(19): siRNA sense strand
gagaaugaagaagcagauu

SEQ ID NO: 693400 - RNA, 19 nt, Homo sapiens
  misc_RNA (1)...(19): siRNA sense strand
agagcuagcagauauaaag

SEQ ID NO: 693401 - RNA, 19 nt, Homo sapiens
  misc_RNA (1)...(19): siRNA sense strand
gaaaauggugcccucauca

SEQ ID NO: 693402 - RNA, 19 nt, Homo sapiens
  misc_RNA (1)...(19): siRNA sense strand
aagaagacagcaacagaga

SEQ ID NO: 693403 - RNA, 19 nt, Homo sapiens
  misc_RNA (1)...(19): siRNA sense strand
aaacguggcaugaaagacu

SEQ ID NO: 693404 - RNA, 19 nt, Homo sapiens
  misc_RNA (1)...(19): siRNA sense strand
aggaugaggaugaaacuga

SEQ ID NO: 693405 - RNA, 19 nt, Homo sapiens
  misc_RNA (1)...(19): siRNA sense strand
aagaagcagauuuggauga

SEQ ID NO: 693406 - RNA, 19 nt, Homo sapiens
  misc_RNA (1)...(19): siRNA sense strand
acagcaacagagauuauaa

SEQ ID NO: 693407 - RNA, 19 nt, Homo sapiens
  misc_RNA (1)...(19): siRNA sense strand
gagcuagcagauauaaagu

SEQ ID NO: 693408 - RNA, 19 nt, Homo sapiens
  misc_RNA (1)...(19): siRNA sense strand
gaagaggcacaggcaucaa

SEQ ID NO: 693409 - RNA, 19 nt, Homo sapiens
  misc_RNA (1)...(19): siRNA sense strand
cagaaauggaggaagaaau

SEQ ID NO: 693410 - RNA, 19 nt, Homo sapiens
  misc_RNA (1)...(19): siRNA sense strand
cagcaaacuguccaaguag

SEQ ID NO: 693411 - RNA, 19 nt, Homo sapiens
  misc_RNA (1)...(19): siRNA sense strand
agaagcagauuuggaugag

SEQ ID NO: 693412 - RNA, 19 nt, Homo sapiens
  misc_RNA (1)...(19): siRNA sense strand
gaagaggucaaagaaacgu

SEQ ID NO: 693413 - RNA, 19 nt, Homo sapiens
  misc_RNA (1)...(19): siRNA sense strand
agaaacguggcaugaaaga

SEQ ID NO: 693414 - RNA, 19 nt, Homo sapiens
  misc_RNA (1)...(19): siRNA sense strand
gaaacugauggcucugaag

SEQ ID NO: 693415 - RNA, 19 nt, Homo sapiens
  misc_RNA (1)...(19): siRNA sense strand
aaauggugcccucaucaga

SEQ ID NO: 693416 - RNA, 19 nt, Homo sapiens
  misc_RNA (1)...(19): siRNA sense strand
aaauggaggaagaaaugaa

SEQ ID NO: 693417 - RNA, 19 nt, Homo sapiens
  misc_RNA (1)...(19): siRNA sense strand
auauaaaguccaagcuuga

SEQ ID NO: 693418 - RNA, 19 nt, Homo sapiens
  misc_RNA (1)...(19): siRNA sense strand
ucaggaagcccagcuagag

SEQ ID NO: 693419 - RNA, 19 nt, Homo sapiens
  misc_RNA (1)...(19): siRNA sense strand
acaaccagaggcugaaaga

SEQ ID NO: 693420 - RNA, 19 nt, Homo sapiens
  misc_RNA (1)...(19): siRNA sense strand
ugaccagccguguagaaga

SEQ ID NO: 693421 - RNA, 19 nt, Homo sapiens
  misc_RNA (1)...(19): siRNA sense strand
ucagaaauggaggaagaaa

SEQ ID NO: 693422 - RNA, 19 nt, Homo sapiens
  misc_RNA (1)...(19): siRNA sense strand
gcccagcagaaacaagaaa

SEQ ID NO: 693423 - RNA, 19 nt, Homo sapiens
  misc_RNA (1)...(19): siRNA sense strand
ggacaaaggaugaggauga

SEQ ID NO: 693424 - RNA, 19 nt, Homo sapiens
  misc_RNA (1)...(19): siRNA sense strand
aaagaaacguggcaugaaa

SEQ ID NO: 693425 - RNA, 19 nt, Homo sapiens
  misc_RNA (1)...(19): siRNA sense strand
gaagacagcaacagagauu

SEQ ID NO: 693426 - RNA, 19 nt, Homo sapiens
  misc_RNA (1)...(19): siRNA sense strand
gaugagcaguccucuaaga

SEQ ID NO: 693427 - RNA, 19 nt, Homo sapiens
  misc_RNA (1)...(19): siRNA sense strand
gcacaggcaucaauuucug

SEQ ID NO: 693428 - RNA, 19 nt, Homo sapiens
  misc_RNA (1)...(19): siRNA sense strand
gaaugaagaagcagauuug

SEQ ID NO: 693429 - RNA, 19 nt, Homo sapiens
  misc_RNA (1)...(19): siRNA sense strand
gaccagccguguagaagaa

SEQ ID NO: 693430 - RNA, 19 nt, Homo sapiens
  misc_RNA (1)...(19): siRNA sense strand
gaagguggcccagcagaaa

SEQ ID NO: 693431 - RNA, 19 nt, Homo sapiens
  misc_RNA (1)...(19): siRNA sense strand
gaucaucagugcuggagau

SEQ ID NO: 693432 - RNA, 19 nt, Homo sapiens
  misc_RNA (1)...(19): siRNA sense strand
gacaaaggaugaggaugaa

SEQ ID NO: 693433 - RNA, 19 nt, Homo sapiens
  misc_RNA (1)...(19): siRNA sense strand
cuacaaccagugauucuua

SEQ ID NO: 693434 - RNA, 19 nt, Homo sapiens
  misc_RNA (1)...(19): siRNA sense strand
ugaccgggcuucagcaaga

SEQ ID NO: 693435 - RNA, 19 nt, Homo sapiens
  misc_RNA (1)...(19): siRNA sense strand
ugucagaaauggaggaaga

SEQ ID NO: 693436 - RNA, 19 nt, Homo sapiens
  misc_RNA (1)...(19): siRNA sense strand
aaagaccucugaccgauca

SEQ ID NO: 693437 - RNA, 19 nt, Homo sapiens
  misc_RNA (1)...(19): siRNA sense strand
uagcagauauaaaguccaa

SEQ ID NO: 693438 - RNA, 19 nt, Homo sapiens
  misc_RNA (1)...(19): siRNA sense strand
ggaugaggaugaaacugau

SEQ ID NO: 693439 - RNA, 19 nt, Homo sapiens
  misc_RNA (1)...(19): siRNA sense strand
gaaauggaggaagaaauga

SEQ ID NO: 693440 - RNA, 19 nt, Homo sapiens
  misc_RNA (1)...(19): siRNA sense strand
caaagaaacguggcaugaa

SEQ ID NO: 693441 - RNA, 19 nt, Homo sapiens
  misc_RNA (1)...(19): siRNA sense strand
ugaagaagcagauuuggau

SEQ ID NO: 693442 - RNA, 19 nt, Homo sapiens
  misc_RNA (1)...(19): siRNA sense strand
uggaugagcaguccucuaa

SEQ ID NO: 693443 - RNA, 19 nt, Homo sapiens
  misc_RNA (1)...(19): siRNA sense strand
ucaaagaaacguggcauga

SEQ ID NO: 693444 - RNA, 19 nt, Homo sapiens
  misc_RNA (1)...(19): siRNA sense strand
agaaauggaggaagaaaug

SEQ ID NO: 693445 - RNA, 19 nt, Homo sapiens
  misc_RNA (1)...(19): siRNA sense strand
gcaucaauuucuggacaaa

SEQ ID NO: 693446 - RNA, 19 nt, Homo sapiens
  misc_RNA (1)...(19): siRNA sense strand
gacagcaacagagauuaua

SEQ ID NO: 693447 - RNA, 19 nt, Homo sapiens
  misc_RNA (1)...(19): siRNA sense strand
ugaaacugauggcucugaa

SEQ ID NO: 693448 - RNA, 19 nt, Homo sapiens
  misc_RNA (1)...(19): siRNA sense strand
cagcaacagagauuauaaa

SEQ ID NO: 693449 - RNA, 19 nt, Homo sapiens
  misc_RNA (1)...(19): siRNA sense strand
cugaagaggucaaagaaac

SEQ ID NO: 693450 - RNA, 19 nt, Homo sapiens
  misc_RNA (1)...(19): siRNA sense strand
gaaaacaaaacuucaggaa

SEQ ID NO: 693451 - RNA, 19 nt, Homo sapiens
  misc_RNA (1)...(19): siRNA sense strand
aaacugauggcucugaaga

SEQ ID NO: 693452 - RNA, 19 nt, Homo sapiens
  misc_RNA (1)...(19): siRNA sense strand
agaagaagacagcaacaga

SEQ ID NO: 693453 - RNA, 19 nt, Homo sapiens
  misc_RNA (1)...(19): siRNA sense strand
agaaugaagaagcagauuu

SEQ ID NO: 693454 - RNA, 19 nt, Homo sapiens
  misc_RNA (1)...(19): siRNA sense strand
uaaaguccaagcuugagaa

SEQ ID NO: 693455 - RNA, 19 nt, Homo sapiens
  misc_RNA (1)...(19): siRNA sense strand
aguccaagcuugagaaggu

SEQ ID NO: 693456 - RNA, 19 nt, Homo sapiens
  misc_RNA (1)...(19): siRNA sense strand
gaggcacaggcaucaauuu

SEQ ID NO: 693457 - RNA, 19 nt, Homo sapiens
  misc_RNA (1)...(19): siRNA sense strand
aaaugagaaugaagaagca

SEQ ID NO: 693458 - RNA, 19 nt, Homo sapiens
  misc_RNA (1)...(19): siRNA sense strand
gaaucgggagguaguaauc

SEQ ID NO: 693459 - RNA, 19 nt, Homo sapiens
  misc_RNA (1)...(19): siRNA sense strand
caaaggaugaggaugaaac

SEQ ID NO: 693460 - RNA, 19 nt, Homo sapiens
  misc_RNA (1)...(19): siRNA sense strand
guaauccuacaaccaguga

SEQ ID NO: 693461 - RNA, 19 nt, Homo sapiens
  misc_RNA (1)...(19): siRNA sense strand
ggcaucaauuucuggacaa

SEQ ID NO: 693462 - RNA, 19 nt, Homo sapiens
  misc_RNA (1)...(19): siRNA sense strand
ggaaucgggagguaguaau

SEQ ID NO: 693463 - RNA, 19 nt, Homo sapiens
  misc_RNA (1)...(19): siRNA sense strand
gagaaugaagaagcagauu

SEQ ID NO: 693464 - RNA, 19 nt, Homo sapiens
  misc_RNA (1)...(19): siRNA sense strand
agacagcaacagagauuau

SEQ ID NO: 693465 - RNA, 19 nt, Homo sapiens
  misc_RNA (1)...(19): siRNA sense strand
agagcuagcagauauaaag

SEQ ID NO: 693466 - RNA, 19 nt, Homo sapiens
  misc_RNA (1)...(19): siRNA sense strand
aagaagacagcaacagaga

SEQ ID NO: 693467 - RNA, 19 nt, Homo sapiens
  misc_RNA (1)...(19): siRNA sense strand
aaacguggcaugaaagacu

SEQ ID NO: 693468 - RNA, 19 nt, Homo sapiens
  misc_RNA (1)...(19): siRNA sense strand
aagaagcagauuuggauga

SEQ ID NO: 693469 - RNA, 19 nt, Homo sapiens
  misc_RNA (1)...(19): siRNA sense strand
acagcaacagagauuauaa

SEQ ID NO: 693470 - RNA, 19 nt, Homo sapiens
  misc_RNA (1)...(19): siRNA sense strand
aggaugaggaugaaacuga

SEQ ID NO: 693471 - RNA, 19 nt, Homo sapiens
  misc_RNA (1)...(19): siRNA sense strand
gagcuagcagauauaaagu

SEQ ID NO: 693472 - RNA, 19 nt, Homo sapiens
  misc_RNA (1)...(19): siRNA sense strand
gaagaggcacaggcaucaa

SEQ ID NO: 693473 - RNA, 19 nt, Homo sapiens
  misc_RNA (1)...(19): siRNA sense strand
cagaaauggaggaagaaau

SEQ ID NO: 693474 - RNA, 19 nt, Homo sapiens
  misc_RNA (1)...(19): siRNA sense strand
gaagaggucaaagaaacgu

SEQ ID NO: 693475 - RNA, 19 nt, Homo sapiens
  misc_RNA (1)...(19): siRNA sense strand
agaagcagauuuggaugag

SEQ ID NO: 693476 - RNA, 19 nt, Homo sapiens
  misc_RNA (1)...(19): siRNA sense strand
agaaacguggcaugaaaga

SEQ ID NO: 693477 - RNA, 19 nt, Homo sapiens
  misc_RNA (1)...(19): siRNA sense strand
gaaacugauggcucugaag

SEQ ID NO: 693478 - RNA, 19 nt, Homo sapiens
  misc_RNA (1)...(19): siRNA sense strand
aaauggaggaagaaaugaa

SEQ ID NO: 693479 - RNA, 19 nt, Homo sapiens
  misc_RNA (1)...(19): siRNA sense strand
auauaaaguccaagcuuga

SEQ ID NO: 693480 - RNA, 19 nt, Homo sapiens
  misc_RNA (1)...(19): siRNA sense strand
ucaggaagcccagcuagag

SEQ ID NO: 693481 - RNA, 19 nt, Homo sapiens
  misc_RNA (1)...(19): siRNA sense strand
ugaccagccguguagaaga

SEQ ID NO: 693482 - RNA, 19 nt, Homo sapiens
  misc_RNA (1)...(19): siRNA sense strand
ucagaaauggaggaagaaa

SEQ ID NO: 693483 - RNA, 19 nt, Homo sapiens
  misc_RNA (1)...(19): siRNA sense strand
gcccagcagaaacaagaaa

SEQ ID NO: 693484 - RNA, 19 nt, Homo sapiens
  misc_RNA (1)...(19): siRNA sense strand
ggacaaaggaugaggauga

SEQ ID NO: 693485 - RNA, 19 nt, Homo sapiens
  misc_RNA (1)...(19): siRNA sense strand
aaagaaacguggcaugaaa

SEQ ID NO: 693486 - RNA, 19 nt, Homo sapiens
  misc_RNA (1)...(19): siRNA sense strand
gcaggagucuggaugaaga

SEQ ID NO: 693487 - RNA, 19 nt, Homo sapiens
  misc_RNA (1)...(19): siRNA sense strand
gaagacagcaacagagauu

SEQ ID NO: 693488 - RNA, 19 nt, Homo sapiens
  misc_RNA (1)...(19): siRNA sense strand
gaugagcaguccucuaaga

SEQ ID NO: 693489 - RNA, 19 nt, Homo sapiens
  misc_RNA (1)...(19): siRNA sense strand
gcacaggcaucaauuucug

SEQ ID NO: 693490 - RNA, 19 nt, Homo sapiens
  misc_RNA (1)...(19): siRNA sense strand
gaaugaagaagcagauuug

SEQ ID NO: 693491 - RNA, 19 nt, Homo sapiens
  misc_RNA (1)...(19): siRNA sense strand
gaccagccguguagaagaa

SEQ ID NO: 693492 - RNA, 19 nt, Homo sapiens
  misc_RNA (1)...(19): siRNA sense strand
caccugcuauggacaaaua

SEQ ID NO: 693493 - RNA, 19 nt, Homo sapiens
  misc_RNA (1)...(19): siRNA sense strand
guucagagacuaccacaaa

SEQ ID NO: 693494 - RNA, 19 nt, Homo sapiens
  misc_RNA (1)...(19): siRNA sense strand
gaagguggcccagcagaaa

SEQ ID NO: 693495 - RNA, 19 nt, Homo sapiens
  misc_RNA (1)...(19): siRNA sense strand
gaucaucagugcuggagau

SEQ ID NO: 693496 - RNA, 19 nt, Homo sapiens
  misc_RNA (1)...(19): siRNA sense strand
gacaaaggaugaggaugaa

SEQ ID NO: 693497 - RNA, 19 nt, Homo sapiens
  misc_RNA (1)...(19): siRNA sense strand
cuacaaccagugauucuua

SEQ ID NO: 693498 - RNA, 19 nt, Homo sapiens
  misc_RNA (1)...(19): siRNA sense strand
ugaccgggcuucagcaaga

SEQ ID NO: 693499 - RNA, 19 nt, Homo sapiens
  misc_RNA (1)...(19): siRNA sense strand
ugucagaaauggaggaaga

SEQ ID NO: 693500 - RNA, 19 nt, Homo sapiens
  misc_RNA (1)...(19): siRNA sense strand
acacgaaggucuacucaag

SEQ ID NO: 693501 - RNA, 19 nt, Homo sapiens
  misc_RNA (1)...(19): siRNA sense strand
gagacuaccacaaacacua

SEQ ID NO: 693502 - RNA, 19 nt, Homo sapiens
  misc_RNA (1)...(19): siRNA sense strand
aaagaccucugaccgauca

SEQ ID NO: 693503 - RNA, 19 nt, Homo sapiens
  misc_RNA (1)...(19): siRNA sense strand
gaaagcacgcuccagacaa

SEQ ID NO: 693504 - RNA, 19 nt, Homo sapiens
  misc_RNA (1)...(19): siRNA sense strand
uagcagauauaaaguccaa

SEQ ID NO: 693505 - RNA, 19 nt, Homo sapiens
  misc_RNA (1)...(19): siRNA sense strand
ugaggaagcagagucuuua

SEQ ID NO: 693506 - RNA, 19 nt, Homo sapiens
  misc_RNA (1)...(19): siRNA sense strand
ggaaagcacgcuccagaca

SEQ ID NO: 693507 - RNA, 19 nt, Homo sapiens
  misc_RNA (1)...(19): siRNA sense strand
ggaugaggaugaaacugau

SEQ ID NO: 693508 - RNA, 19 nt, Homo sapiens
  misc_RNA (1)...(19): siRNA sense strand
gaaauggaggaagaaauga

SEQ ID NO: 693509 - RNA, 19 nt, Homo sapiens
  misc_RNA (1)...(19): siRNA sense strand
ugaagaagcagauuuggau

SEQ ID NO: 693510 - RNA, 19 nt, Homo sapiens
  misc_RNA (1)...(19): siRNA sense strand
caaagaaacguggcaugaa

SEQ ID NO: 693511 - RNA, 19 nt, Homo sapiens
  misc_RNA (1)...(19): siRNA sense strand
uggaugagcaguccucuaa

SEQ ID NO: 693512 - RNA, 19 nt, Homo sapiens
  misc_RNA (1)...(19): siRNA sense strand
ggagcagccucgugagaag

SEQ ID NO: 693513 - RNA, 19 nt, Homo sapiens
  misc_RNA (1)...(19): siRNA sense strand
agaaauggaggaagaaaug

SEQ ID NO: 693514 - RNA, 19 nt, Homo sapiens
  misc_RNA (1)...(19): siRNA sense strand
ucaaagaaacguggcauga

SEQ ID NO: 693515 - RNA, 19 nt, Homo sapiens
  misc_RNA (1)...(19): siRNA sense strand
ucaagacccucacucuaca

SEQ ID NO: 693516 - RNA, 19 nt, Homo sapiens
  misc_RNA (1)...(19): siRNA sense strand
gcaucaauuucuggacaaa

SEQ ID NO: 693517 - RNA, 19 nt, Homo sapiens
  misc_RNA (1)...(19): siRNA sense strand
ggaugaagagccuaucugu

SEQ ID NO: 693518 - RNA, 19 nt, Homo sapiens
  misc_RNA (1)...(19): siRNA sense strand
gacagcaacagagauuaua

SEQ ID NO: 693519 - RNA, 19 nt, Homo sapiens
  misc_RNA (1)...(19): siRNA sense strand
gggcaggagucuggaugaa

SEQ ID NO: 693520 - RNA, 19 nt, Homo sapiens
  misc_RNA (1)...(19): siRNA sense strand
cagcaacagagauuauaaa

SEQ ID NO: 693521 - RNA, 19 nt, Homo sapiens
  misc_RNA (1)...(19): siRNA sense strand
ugaaacugauggcucugaa

SEQ ID NO: 693522 - RNA, 19 nt, Homo sapiens
  misc_RNA (1)...(19): siRNA sense strand
cacuacaacugcaaaggaa

SEQ ID NO: 693523 - RNA, 19 nt, Homo sapiens
  misc_RNA (1)...(19): siRNA sense strand
cugaagaggucaaagaaac

SEQ ID NO: 693524 - RNA, 19 nt, Homo sapiens
  misc_RNA (1)...(19): siRNA sense strand
aaagcacgcuccagacaag

SEQ ID NO: 693525 - RNA, 19 nt, Homo sapiens
  misc_RNA (1)...(19): siRNA sense strand
gaaaacaaaacuucaggaa

SEQ ID NO: 693526 - RNA, 19 nt, Homo sapiens
  misc_RNA (1)...(19): siRNA sense strand
aaacugauggcucugaaga

SEQ ID NO: 693527 - RNA, 19 nt, Homo sapiens
  misc_RNA (1)...(19): siRNA sense strand
cagacaagcucggcagaca

SEQ ID NO: 693528 - RNA, 19 nt, Homo sapiens
  misc_RNA (1)...(19): siRNA sense strand
agaaugaagaagcagauuu

SEQ ID NO: 693529 - RNA, 19 nt, Homo sapiens
  misc_RNA (1)...(19): siRNA sense strand
agaagaagacagcaacaga

SEQ ID NO: 693530 - RNA, 19 nt, Homo sapiens
  misc_RNA (1)...(19): siRNA sense strand
uaaaguccaagcuugagaa

SEQ ID NO: 693531 - RNA, 19 nt, Homo sapiens
  misc_RNA (1)...(19): siRNA sense strand
augaagagccuaucuguca

SEQ ID NO: 693532 - RNA, 19 nt, Homo sapiens
  misc_RNA (1)...(19): siRNA sense strand
aguccaagcuugagaaggu

SEQ ID NO: 693533 - RNA, 19 nt, Homo sapiens
  misc_RNA (1)...(19): siRNA sense strand
gaggcacaggcaucaauuu

SEQ ID NO: 693534 - RNA, 19 nt, Homo sapiens
  misc_RNA (1)...(19): siRNA sense strand
gaagagccuaucugucauc

SEQ ID NO: 693535 - RNA, 19 nt, Homo sapiens
  misc_RNA (1)...(19): siRNA sense strand
aaaugagaaugaagaagca

SEQ ID NO: 693536 - RNA, 19 nt, Homo sapiens
  misc_RNA (1)...(19): siRNA sense strand
caacugcaaaggaaaugga

SEQ ID NO: 693537 - RNA, 19 nt, Homo sapiens
  misc_RNA (1)...(19): siRNA sense strand
cgucaagacccucacucua

SEQ ID NO: 693538 - RNA, 19 nt, Homo sapiens
  misc_RNA (1)...(19): siRNA sense strand
guaauccuacaaccaguga

SEQ ID NO: 693539 - RNA, 19 nt, Homo sapiens
  misc_RNA (1)...(19): siRNA sense strand
gaaucgggagguaguaauc

SEQ ID NO: 693540 - RNA, 19 nt, Homo sapiens
  misc_RNA (1)...(19): siRNA sense strand
caaaggaugaggaugaaac

SEQ ID NO: 693541 - RNA, 19 nt, Homo sapiens
  misc_RNA (1)...(19): siRNA sense strand
caaacacuacaacugcaaa

SEQ ID NO: 693542 - RNA, 19 nt, Homo sapiens
  misc_RNA (1)...(19): siRNA sense strand
ggcaucaauuucuggacaa

SEQ ID NO: 693543 - RNA, 19 nt, Homo sapiens
  misc_RNA (1)...(19): siRNA sense strand
ggaaucgggagguaguaau

SEQ ID NO: 693544 - RNA, 19 nt, Homo sapiens
  misc_RNA (1)...(19): siRNA sense strand
gagaaugaagaagcagauu

SEQ ID NO: 693545 - RNA, 19 nt, Homo sapiens
  misc_RNA (1)...(19): siRNA sense strand
agacagcaacagagauuau

SEQ ID NO: 693546 - RNA, 19 nt, Homo sapiens
  misc_RNA (1)...(19): siRNA sense strand
agcagagucuuuacggaaa

SEQ ID NO: 693547 - RNA, 19 nt, Homo sapiens
  misc_RNA (1)...(19): siRNA sense strand
gucaagacccucacucuac

SEQ ID NO: 693548 - RNA, 19 nt, Homo sapiens
  misc_RNA (1)...(19): siRNA sense strand
agagcuagcagauauaaag

SEQ ID NO: 693549 - RNA, 19 nt, Homo sapiens
  misc_RNA (1)...(19): siRNA sense strand
ugaagagccuaucugucau

SEQ ID NO: 693550 - RNA, 19 nt, Homo sapiens
  misc_RNA (1)...(19): siRNA sense strand
acacuacaacugcaaagga

SEQ ID NO: 693551 - RNA, 19 nt, Homo sapiens
  misc_RNA (1)...(19): siRNA sense strand
aagaagacagcaacagaga

SEQ ID NO: 693552 - RNA, 19 nt, Homo sapiens
  misc_RNA (1)...(19): siRNA sense strand
aagaagcagauuuggauga

SEQ ID NO: 693553 - RNA, 19 nt, Homo sapiens
  misc_RNA (1)...(19): siRNA sense strand
acagcaacagagauuauaa

SEQ ID NO: 693554 - RNA, 19 nt, Homo sapiens
  misc_RNA (1)...(19): siRNA sense strand
aaacguggcaugaaagacu

SEQ ID NO: 693555 - RNA, 19 nt, Homo sapiens
  misc_RNA (1)...(19): siRNA sense strand
aggaugaggaugaaacuga

SEQ ID NO: 693556 - RNA, 19 nt, Homo sapiens
  misc_RNA (1)...(19): siRNA sense strand
cuacaacugcaaaggaaau

SEQ ID NO: 693557 - RNA, 19 nt, Homo sapiens
  misc_RNA (1)...(19): siRNA sense strand
gagcuagcagauauaaagu

SEQ ID NO: 693558 - RNA, 19 nt, Homo sapiens
  misc_RNA (1)...(19): siRNA sense strand
gaagaggcacaggcaucaa

SEQ ID NO: 693559 - RNA, 19 nt, Homo sapiens
  misc_RNA (1)...(19): siRNA sense strand
gaagcccacagacacugaa

SEQ ID NO: 693560 - RNA, 19 nt, Homo sapiens
  misc_RNA (1)...(19): siRNA sense strand
cagaaauggaggaagaaau

SEQ ID NO: 693561 - RNA, 19 nt, Homo sapiens
  misc_RNA (1)...(19): siRNA sense strand
acgaaggucuacucaaggu

SEQ ID NO: 693562 - RNA, 19 nt, Homo sapiens
  misc_RNA (1)...(19): siRNA sense strand
agaaacguggcaugaaaga

SEQ ID NO: 693563 - RNA, 19 nt, Homo sapiens
  misc_RNA (1)...(19): siRNA sense strand
gaagaggucaaagaaacgu

SEQ ID NO: 693564 - RNA, 19 nt, Homo sapiens
  misc_RNA (1)...(19): siRNA sense strand
agaagcagauuuggaugag

SEQ ID NO: 693565 - RNA, 19 nt, Homo sapiens
  misc_RNA (1)...(19): siRNA sense strand
ucagagacuaccacaaaca

SEQ ID NO: 693566 - RNA, 19 nt, Homo sapiens
  misc_RNA (1)...(19): siRNA sense strand
aaauggaggaagaaaugaa

SEQ ID NO: 693567 - RNA, 19 nt, Homo sapiens
  misc_RNA (1)...(19): siRNA sense strand
auauaaaguccaagcuuga

SEQ ID NO: 693568 - RNA, 19 nt, Homo sapiens
  misc_RNA (1)...(19): siRNA sense strand
gcaguuccagcaacagaag

SEQ ID NO: 693569 - RNA, 19 nt, Homo sapiens
  misc_RNA (1)...(19): siRNA sense strand
gaaacugauggcucugaag

SEQ ID NO: 693570 - RNA, 19 nt, Homo sapiens
  misc_RNA (1)...(19): siRNA sense strand
caccaguucccaccugcua

SEQ ID NO: 693571 - RNA, 19 nt, Homo sapiens
  misc_RNA (1)...(19): siRNA sense strand
cagcaguuccagcaacaga

SEQ ID NO: 693572 - RNA, 19 nt, Homo sapiens
  misc_RNA (1)...(19): siRNA sense strand
ucaggaagcccagcuagag

SEQ ID NO: 693573 - RNA, 19 nt, Homo sapiens
  misc_RNA (1)...(19): siRNA sense strand
gcaucuccuucuacgucaa

SEQ ID NO: 693574 - RNA, 19 nt, Homo sapiens
  misc_RNA (1)...(19): siRNA sense strand
ucagaaauggaggaagaaa

SEQ ID NO: 693575 - RNA, 19 nt, Homo sapiens
  misc_RNA (1)...(19): siRNA sense strand
ugaccagccguguagaaga

SEQ ID NO: 693576 - RNA, 19 nt, Homo sapiens
  misc_RNA (1)...(19): siRNA sense strand
caagcucggcagacacgaa

SEQ ID NO: 693577 - RNA, 19 nt, Homo sapiens
  misc_RNA (1)...(19): siRNA sense strand
gcaaaggaaauggacaaaa

SEQ ID NO: 693578 - RNA, 19 nt, Homo sapiens
  misc_RNA (1)...(19): siRNA sense strand
gcccagcagaaacaagaaa

SEQ ID NO: 693579 - RNA, 19 nt, Homo sapiens
  misc_RNA (1)...(19): siRNA sense strand
ugacuccuguacgggauga

SEQ ID NO: 693580 - RNA, 19 nt, Homo sapiens
  misc_RNA (1)...(19): siRNA sense strand
ggacaaaggaugaggauga

SEQ ID NO: 693581 - RNA, 19 nt, Homo sapiens
  misc_RNA (1)...(19): siRNA sense strand
aaagaaacguggcaugaaa

SEQ ID NO: 693582 - RNA, 19 nt, Homo sapiens
  misc_RNA (1)...(19): siRNA sense strand
gcaggagucuggaugaaga

SEQ ID NO: 693583 - RNA, 19 nt, Homo sapiens
  misc_RNA (1)...(19): siRNA sense strand
ucagcaaacuguccaagua

SEQ ID NO: 693584 - RNA, 19 nt, Homo sapiens
  misc_RNA (1)...(19): siRNA sense strand
gaagacagcaacagagauu

SEQ ID NO: 693585 - RNA, 19 nt, Homo sapiens
  misc_RNA (1)...(19): siRNA sense strand
gaugagcaguccucuaaga

SEQ ID NO: 693586 - RNA, 19 nt, Homo sapiens
  misc_RNA (1)...(19): siRNA sense strand
gcacaggcaucaauuucug

SEQ ID NO: 693587 - RNA, 19 nt, Homo sapiens
  misc_RNA (1)...(19): siRNA sense strand
gaaugaagaagcagauuug

SEQ ID NO: 693588 - RNA, 19 nt, Homo sapiens
  misc_RNA (1)...(19): siRNA sense strand
gaccagccguguagaagaa

SEQ ID NO: 693589 - RNA, 19 nt, Homo sapiens
  misc_RNA (1)...(19): siRNA sense strand
caccugcuauggacaaaua

SEQ ID NO: 693590 - RNA, 19 nt, Homo sapiens
  misc_RNA (1)...(19): siRNA sense strand
guucagagacuaccacaaa

SEQ ID NO: 693591 - RNA, 19 nt, Homo sapiens
  misc_RNA (1)...(19): siRNA sense strand
gaagguggcccagcagaaa

SEQ ID NO: 693592 - RNA, 19 nt, Homo sapiens
  misc_RNA (1)...(19): siRNA sense strand
gaucaucagugcuggagau

SEQ ID NO: 693593 - RNA, 19 nt, Homo sapiens
  misc_RNA (1)...(19): siRNA sense strand
gacaaaggaugaggaugaa

SEQ ID NO: 693594 - RNA, 19 nt, Homo sapiens
  misc_RNA (1)...(19): siRNA sense strand
cuacaaccagugauucuua

SEQ ID NO: 693595 - RNA, 19 nt, Homo sapiens
  misc_RNA (1)...(19): siRNA sense strand
ugaccgggcuucagcaaga

SEQ ID NO: 693596 - RNA, 19 nt, Homo sapiens
  misc_RNA (1)...(19): siRNA sense strand
ugucagaaauggaggaaga

SEQ ID NO: 693597 - RNA, 19 nt, Homo sapiens
  misc_RNA (1)...(19): siRNA sense strand
acacgaaggucuacucaag

SEQ ID NO: 693598 - RNA, 19 nt, Homo sapiens
  misc_RNA (1)...(19): siRNA sense strand
gagacuaccacaaacacua

SEQ ID NO: 693599 - RNA, 19 nt, Homo sapiens
  misc_RNA (1)...(19): siRNA sense strand
gguguuaacagaacugaaa

SEQ ID NO: 693600 - RNA, 19 nt, Homo sapiens
  misc_RNA (1)...(19): siRNA sense strand
aaagaccucugaccgauca

SEQ ID NO: 693601 - RNA, 19 nt, Homo sapiens
  misc_RNA (1)...(19): siRNA sense strand
gaaagcacgcuccagacaa

SEQ ID NO: 693602 - RNA, 19 nt, Homo sapiens
  misc_RNA (1)...(19): siRNA sense strand
uagcagauauaaaguccaa

SEQ ID NO: 693603 - RNA, 19 nt, Homo sapiens
  misc_RNA (1)...(19): siRNA sense strand
ugaggaagcagagucuuua

SEQ ID NO: 693604 - RNA, 19 nt, Homo sapiens
  misc_RNA (1)...(19): siRNA sense strand
ggaaagcacgcuccagaca

SEQ ID NO: 693605 - RNA, 19 nt, Homo sapiens
  misc_RNA (1)...(19): siRNA sense strand
ggaugaggaugaaacugau

SEQ ID NO: 693606 - RNA, 19 nt, Homo sapiens
  misc_RNA (1)...(19): siRNA sense strand
gaaauggaggaagaaauga

SEQ ID NO: 693607 - RNA, 19 nt, Homo sapiens
  misc_RNA (1)...(19): siRNA sense strand
ugaagaagcagauuuggau

SEQ ID NO: 693608 - RNA, 19 nt, Homo sapiens
  misc_RNA (1)...(19): siRNA sense strand
caaagaaacguggcaugaa

SEQ ID NO: 693609 - RNA, 19 nt, Homo sapiens
  misc_RNA (1)...(19): siRNA sense strand
uggaugagcaguccucuaa

SEQ ID NO: 693610 - RNA, 19 nt, Homo sapiens
  misc_RNA (1)...(19): siRNA sense strand
ggagcagccucgugagaag

SEQ ID NO: 693611 - RNA, 19 nt, Homo sapiens
  misc_RNA (1)...(19): siRNA sense strand
agaaauggaggaagaaaug

SEQ ID NO: 693612 - RNA, 19 nt, Homo sapiens
  misc_RNA (1)...(19): siRNA sense strand
ucaaagaaacguggcauga

SEQ ID NO: 693613 - RNA, 19 nt, Homo sapiens
  misc_RNA (1)...(19): siRNA sense strand
ucaagacccucacucuaca

SEQ ID NO: 693614 - RNA, 19 nt, Homo sapiens
  misc_RNA (1)...(19): siRNA sense strand
gcaucaauuucuggacaaa

SEQ ID NO: 693615 - RNA, 19 nt, Homo sapiens
  misc_RNA (1)...(19): siRNA sense strand
accagaggcugaaagauga

SEQ ID NO: 693616 - RNA, 19 nt, Homo sapiens
  misc_RNA (1)...(19): siRNA sense strand
ggaugaagagccuaucugu

SEQ ID NO: 693617 - RNA, 19 nt, Homo sapiens
  misc_RNA (1)...(19): siRNA sense strand
gacagcaacagagauuaua

SEQ ID NO: 693618 - RNA, 19 nt, Homo sapiens
  misc_RNA (1)...(19): siRNA sense strand
gggcaggagucuggaugaa

SEQ ID NO: 693619 - RNA, 19 nt, Homo sapiens
  misc_RNA (1)...(19): siRNA sense strand
cagcaacagagauuauaaa

SEQ ID NO: 693620 - RNA, 19 nt, Homo sapiens
  misc_RNA (1)...(19): siRNA sense strand
ugaaacugauggcucugaa

SEQ ID NO: 693621 - RNA, 19 nt, Homo sapiens
  misc_RNA (1)...(19): siRNA sense strand
cacuacaacugcaaaggaa

SEQ ID NO: 693622 - RNA, 19 nt, Homo sapiens
  misc_RNA (1)...(19): siRNA sense strand
cugaagaggucaaagaaac

SEQ ID NO: 693623 - RNA, 19 nt, Homo sapiens
  misc_RNA (1)...(19): siRNA sense strand
aaagcacgcuccagacaag

SEQ ID NO: 693624 - RNA, 19 nt, Homo sapiens
  misc_RNA (1)...(19): siRNA sense strand
gaaaacaaaacuucaggaa

SEQ ID NO: 693625 - RNA, 19 nt, Homo sapiens
  misc_RNA (1)...(19): siRNA sense strand
caucagagucaucagcaaa

SEQ ID NO: 693626 - RNA, 19 nt, Homo sapiens
  misc_RNA (1)...(19): siRNA sense strand
cagacaagcucggcagaca

SEQ ID NO: 693627 - RNA, 19 nt, Homo sapiens
  misc_RNA (1)...(19): siRNA sense strand
aaacugauggcucugaaga

SEQ ID NO: 693628 - RNA, 19 nt, Homo sapiens
  misc_RNA (1)...(19): siRNA sense strand
agaaugaagaagcagauuu

SEQ ID NO: 693629 - RNA, 19 nt, Homo sapiens
  misc_RNA (1)...(19): siRNA sense strand
agaagaagacagcaacaga

SEQ ID NO: 693630 - RNA, 19 nt, Homo sapiens
  misc_RNA (1)...(19): siRNA sense strand
uaaaguccaagcuugagaa

SEQ ID NO: 693631 - RNA, 19 nt, Homo sapiens
  misc_RNA (1)...(19): siRNA sense strand
augaagagccuaucuguca

SEQ ID NO: 693632 - RNA, 19 nt, Homo sapiens
  misc_RNA (1)...(19): siRNA sense strand
aguccaagcuugagaaggu

SEQ ID NO: 693633 - RNA, 19 nt, Homo sapiens
  misc_RNA (1)...(19): siRNA sense strand
gaggcacaggcaucaauuu

SEQ ID NO: 693634 - RNA, 19 nt, Homo sapiens
  misc_RNA (1)...(19): siRNA sense strand
gaagagccuaucugucauc

SEQ ID NO: 693635 - RNA, 19 nt, Homo sapiens
  misc_RNA (1)...(19): siRNA sense strand
aaaugagaaugaagaagca

SEQ ID NO: 693636 - RNA, 19 nt, Homo sapiens
  misc_RNA (1)...(19): siRNA sense strand
caacugcaaaggaaaugga

SEQ ID NO: 693637 - RNA, 19 nt, Homo sapiens
  misc_RNA (1)...(19): siRNA sense strand
cgucaagacccucacucua

SEQ ID NO: 693638 - RNA, 19 nt, Homo sapiens
  misc_RNA (1)...(19): siRNA sense strand
guaauccuacaaccaguga

SEQ ID NO: 693639 - RNA, 19 nt, Homo sapiens
  misc_RNA (1)...(19): siRNA sense strand
gaaucgggagguaguaauc

SEQ ID NO: 693640 - RNA, 19 nt, Homo sapiens
  misc_RNA (1)...(19): siRNA sense strand
caaaggaugaggaugaaac

SEQ ID NO: 693641 - RNA, 19 nt, Homo sapiens
  misc_RNA (1)...(19): siRNA sense strand
caaacacuacaacugcaaa

SEQ ID NO: 693642 - RNA, 19 nt, Homo sapiens
  misc_RNA (1)...(19): siRNA sense strand
ggcaucaauuucuggacaa

SEQ ID NO: 693643 - RNA, 19 nt, Homo sapiens
  misc_RNA (1)...(19): siRNA sense strand
gcugaaagaugaaaauggu

SEQ ID NO: 693644 - RNA, 19 nt, Homo sapiens
  misc_RNA (1)...(19): siRNA sense strand
aaccagaggcugaaagaug

SEQ ID NO: 693645 - RNA, 19 nt, Homo sapiens
  misc_RNA (1)...(19): siRNA sense strand
ggaaucgggagguaguaau

SEQ ID NO: 693646 - RNA, 19 nt, Homo sapiens
  misc_RNA (1)...(19): siRNA sense strand
gagaaugaagaagcagauu

SEQ ID NO: 693647 - RNA, 19 nt, Homo sapiens
  misc_RNA (1)...(19): siRNA sense strand
agcagagucuuuacggaaa

SEQ ID NO: 693648 - RNA, 19 nt, Homo sapiens
  misc_RNA (1)...(19): siRNA sense strand
agacagcaacagagauuau

SEQ ID NO: 693649 - RNA, 19 nt, Homo sapiens
  misc_RNA (1)...(19): siRNA sense strand
gucaagacccucacucuac

SEQ ID NO: 693650 - RNA, 19 nt, Homo sapiens
  misc_RNA (1)...(19): siRNA sense strand
gaaaauggugcccucauca

SEQ ID NO: 693651 - RNA, 19 nt, Homo sapiens
  misc_RNA (1)...(19): siRNA sense strand
ugaagagccuaucugucau

SEQ ID NO: 693652 - RNA, 19 nt, Homo sapiens
  misc_RNA (1)...(19): siRNA sense strand
agagcuagcagauauaaag

SEQ ID NO: 693653 - RNA, 19 nt, Homo sapiens
  misc_RNA (1)...(19): siRNA sense strand
acacuacaacugcaaagga

SEQ ID NO: 693654 - RNA, 19 nt, Homo sapiens
  misc_RNA (1)...(19): siRNA sense strand
aagaagacagcaacagaga

SEQ ID NO: 693655 - RNA, 19 nt, Homo sapiens
  misc_RNA (1)...(19): siRNA sense strand
aagaagcagauuuggauga

SEQ ID NO: 693656 - RNA, 19 nt, Homo sapiens
  misc_RNA (1)...(19): siRNA sense strand
acagcaacagagauuauaa

SEQ ID NO: 693657 - RNA, 19 nt, Homo sapiens
  misc_RNA (1)...(19): siRNA sense strand
aaacguggcaugaaagacu

SEQ ID NO: 693658 - RNA, 19 nt, Homo sapiens
  misc_RNA (1)...(19): siRNA sense strand
aggaugaggaugaaacuga

SEQ ID NO: 693659 - RNA, 19 nt, Homo sapiens
  misc_RNA (1)...(19): siRNA sense strand
cuacaacugcaaaggaaau

SEQ ID NO: 693660 - RNA, 19 nt, Homo sapiens
  misc_RNA (1)...(19): siRNA sense strand
gagcuagcagauauaaagu

SEQ ID NO: 693661 - RNA, 19 nt, Homo sapiens
  misc_RNA (1)...(19): siRNA sense strand
gaagaggcacaggcaucaa

SEQ ID NO: 693662 - RNA, 19 nt, Homo sapiens
  misc_RNA (1)...(19): siRNA sense strand
gaagcccacagacacugaa

SEQ ID NO: 693663 - RNA, 19 nt, Homo sapiens
  misc_RNA (1)...(19): siRNA sense strand
cagcaaacuguccaaguag

SEQ ID NO: 693664 - RNA, 19 nt, Homo sapiens
  misc_RNA (1)...(19): siRNA sense strand
cagaaauggaggaagaaau

SEQ ID NO: 693665 - RNA, 19 nt, Homo sapiens
  misc_RNA (1)...(19): siRNA sense strand
agaagcagauuuggaugag

SEQ ID NO: 693666 - RNA, 19 nt, Homo sapiens
  misc_RNA (1)...(19): siRNA sense strand
acgaaggucuacucaaggu

SEQ ID NO: 693667 - RNA, 19 nt, Homo sapiens
  misc_RNA (1)...(19): siRNA sense strand
agaaacguggcaugaaaga

SEQ ID NO: 693668 - RNA, 19 nt, Homo sapiens
  misc_RNA (1)...(19): siRNA sense strand
gaagaggucaaagaaacgu

SEQ ID NO: 693669 - RNA, 19 nt, Homo sapiens
  misc_RNA (1)...(19): siRNA sense strand
ucagagacuaccacaaaca

SEQ ID NO: 693670 - RNA, 19 nt, Homo sapiens
  misc_RNA (1)...(19): siRNA sense strand
aaauggugcccucaucaga

SEQ ID NO: 693671 - RNA, 19 nt, Homo sapiens
  misc_RNA (1)...(19): siRNA sense strand
aaauggaggaagaaaugaa

SEQ ID NO: 693672 - RNA, 19 nt, Homo sapiens
  misc_RNA (1)...(19): siRNA sense strand
auauaaaguccaagcuuga

SEQ ID NO: 693673 - RNA, 19 nt, Homo sapiens
  misc_RNA (1)...(19): siRNA sense strand
gaaacugauggcucugaag

SEQ ID NO: 693674 - RNA, 19 nt, Homo sapiens
  misc_RNA (1)...(19): siRNA sense strand
gcaguuccagcaacagaag

SEQ ID NO: 693675 - RNA, 19 nt, Homo sapiens
  misc_RNA (1)...(19): siRNA sense strand
cagcaguuccagcaacaga

SEQ ID NO: 693676 - RNA, 19 nt, Homo sapiens
  misc_RNA (1)...(19): siRNA sense strand
caccaguucccaccugcua

SEQ ID NO: 693677 - RNA, 19 nt, Homo sapiens
  misc_RNA (1)...(19): siRNA sense strand
acaaccagaggcugaaaga

SEQ ID NO: 693678 - RNA, 19 nt, Homo sapiens
  misc_RNA (1)...(19): siRNA sense strand
ucaggaagcccagcuagag

SEQ ID NO: 693679 - RNA, 19 nt, Homo sapiens
  misc_RNA (1)...(19): siRNA sense strand
caagcucggcagacacgaa

SEQ ID NO: 693680 - RNA, 19 nt, Homo sapiens
  misc_RNA (1)...(19): siRNA sense strand
ggacaaaggaugaggauga

SEQ ID NO: 693681 - RNA, 19 nt, Homo sapiens
  misc_RNA (1)...(19): siRNA sense strand
aaagaaacguggcaugaaa

SEQ ID NO: 693682 - RNA, 19 nt, Homo sapiens
  misc_RNA (1)...(19): siRNA sense strand
ucagcaaacuguccaagua

SEQ ID NO: 693683 - RNA, 19 nt, Homo sapiens
  misc_RNA (1)...(19): siRNA sense strand
gaagacagcaacagagauu

SEQ ID NO: 693684 - RNA, 19 nt, Homo sapiens
  misc_RNA (1)...(19): siRNA sense strand
gaugagcaguccucuaaga

SEQ ID NO: 693685 - RNA, 19 nt, Homo sapiens
  misc_RNA (1)...(19): siRNA sense strand
gcacaggcaucaauuucug

SEQ ID NO: 693686 - RNA, 19 nt, Homo sapiens
  misc_RNA (1)...(19): siRNA sense strand
gaaugaagaagcagauuug

SEQ ID NO: 693687 - RNA, 19 nt, Homo sapiens
  misc_RNA (1)...(19): siRNA sense strand
gaccagccguguagaagaa

SEQ ID NO: 693688 - RNA, 19 nt, Homo sapiens
  misc_RNA (1)...(19): siRNA sense strand
gaagguggcccagcagaaa

SEQ ID NO: 693689 - RNA, 19 nt, Homo sapiens
  misc_RNA (1)...(19): siRNA sense strand
gaucaucagugcuggagau

SEQ ID NO: 693690 - RNA, 19 nt, Homo sapiens
  misc_RNA (1)...(19): siRNA sense strand
gacaaaggaugaggaugaa

SEQ ID NO: 693691 - RNA, 19 nt, Homo sapiens
  misc_RNA (1)...(19): siRNA sense strand
cuacaaccagugauucuua

SEQ ID NO: 693692 - RNA, 19 nt, Homo sapiens
  misc_RNA (1)...(19): siRNA sense strand
ugaccgggcuucagcaaga

SEQ ID NO: 693693 - RNA, 19 nt, Homo sapiens
  misc_RNA (1)...(19): siRNA sense strand
ugucagaaauggaggaaga

SEQ ID NO: 693694 - RNA, 19 nt, Homo sapiens
  misc_RNA (1)...(19): siRNA sense strand
aaagaccucugaccgauca

SEQ ID NO: 693695 - RNA, 19 nt, Homo sapiens
  misc_RNA (1)...(19): siRNA sense strand
gguguuaacagaacugaaa

SEQ ID NO: 693696 - RNA, 19 nt, Homo sapiens
  misc_RNA (1)...(19): siRNA sense strand
uagcagauauaaaguccaa

SEQ ID NO: 693697 - RNA, 19 nt, Homo sapiens
  misc_RNA (1)...(19): siRNA sense strand
ggaugaggaugaaacugau

SEQ ID NO: 693698 - RNA, 19 nt, Homo sapiens
  misc_RNA (1)...(19): siRNA sense strand
gaaauggaggaagaaauga

SEQ ID NO: 693699 - RNA, 19 nt, Homo sapiens
  misc_RNA (1)...(19): siRNA sense strand
caaagaaacguggcaugaa

SEQ ID NO: 693700 - RNA, 19 nt, Homo sapiens
  misc_RNA (1)...(19): siRNA sense strand
ugaagaagcagauuuggau

SEQ ID NO: 693701 - RNA, 19 nt, Homo sapiens
  misc_RNA (1)...(19): siRNA sense strand
uggaugagcaguccucuaa

SEQ ID NO: 693702 - RNA, 19 nt, Homo sapiens
  misc_RNA (1)...(19): siRNA sense strand
ucaaagaaacguggcauga

SEQ ID NO: 693703 - RNA, 19 nt, Homo sapiens
  misc_RNA (1)...(19): siRNA sense strand
agaaauggaggaagaaaug

SEQ ID NO: 693704 - RNA, 19 nt, Homo sapiens
  misc_RNA (1)...(19): siRNA sense strand
gcaucaauuucuggacaaa

SEQ ID NO: 693705 - RNA, 19 nt, Homo sapiens
  misc_RNA (1)...(19): siRNA sense strand
accagaggcugaaagauga

SEQ ID NO: 693706 - RNA, 19 nt, Homo sapiens
  misc_RNA (1)...(19): siRNA sense strand
gacagcaacagagauuaua

SEQ ID NO: 693707 - RNA, 19 nt, Homo sapiens
  misc_RNA (1)...(19): siRNA sense strand
ugaaacugauggcucugaa

SEQ ID NO: 693708 - RNA, 19 nt, Homo sapiens
  misc_RNA (1)...(19): siRNA sense strand
cagcaacagagauuauaaa

SEQ ID NO: 693709 - RNA, 19 nt, Homo sapiens
  misc_RNA (1)...(19): siRNA sense strand
cugaagaggucaaagaaac

SEQ ID NO: 693710 - RNA, 19 nt, Homo sapiens
  misc_RNA (1)...(19): siRNA sense strand
gaaaacaaaacuucaggaa

SEQ ID NO: 693711 - RNA, 19 nt, Homo sapiens
  misc_RNA (1)...(19): siRNA sense strand
caucagagucaucagcaaa

SEQ ID NO: 693712 - RNA, 19 nt, Homo sapiens
  misc_RNA (1)...(19): siRNA sense strand
aaacugauggcucugaaga

SEQ ID NO: 693713 - RNA, 19 nt, Homo sapiens
  misc_RNA (1)...(19): siRNA sense strand
agaagaagacagcaacaga

SEQ ID NO: 693714 - RNA, 19 nt, Homo sapiens
  misc_RNA (1)...(19): siRNA sense strand
agaaugaagaagcagauuu

SEQ ID NO: 693715 - RNA, 19 nt, Homo sapiens
  misc_RNA (1)...(19): siRNA sense strand
uaaaguccaagcuugagaa

SEQ ID NO: 693716 - RNA, 19 nt, Homo sapiens
  misc_RNA (1)...(19): siRNA sense strand
aguccaagcuugagaaggu

SEQ ID NO: 693717 - RNA, 19 nt, Homo sapiens
  misc_RNA (1)...(19): siRNA sense strand
gaggcacaggcaucaauuu

SEQ ID NO: 693718 - RNA, 19 nt, Homo sapiens
  misc_RNA (1)...(19): siRNA sense strand
aaaugagaaugaagaagca

SEQ ID NO: 693719 - RNA, 19 nt, Homo sapiens
  misc_RNA (1)...(19): siRNA sense strand
gaaucgggagguaguaauc

SEQ ID NO: 693720 - RNA, 19 nt, Homo sapiens
  misc_RNA (1)...(19): siRNA sense strand
caaaggaugaggaugaaac

SEQ ID NO: 693721 - RNA, 19 nt, Homo sapiens
  misc_RNA (1)...(19): siRNA sense strand
guaauccuacaaccaguga

SEQ ID NO: 693722 - RNA, 19 nt, Homo sapiens
  misc_RNA (1)...(19): siRNA sense strand
ggcaucaauuucuggacaa

SEQ ID NO: 693723 - RNA, 19 nt, Homo sapiens
  misc_RNA (1)...(19): siRNA sense strand
gcugaaagaugaaaauggu

SEQ ID NO: 693724 - RNA, 19 nt, Homo sapiens
  misc_RNA (1)...(19): siRNA sense strand
aaccagaggcugaaagaug

SEQ ID NO: 693725 - RNA, 19 nt, Homo sapiens
  misc_RNA (1)...(19): siRNA sense strand
ggaaucgggagguaguaau

SEQ ID NO: 693726 - RNA, 19 nt, Homo sapiens
  misc_RNA (1)...(19): siRNA sense strand
agacagcaacagagauuau

SEQ ID NO: 693727 - RNA, 19 nt, Homo sapiens
  misc_RNA (1)...(19): siRNA sense strand
gagaaugaagaagcagauu

SEQ ID NO: 693728 - RNA, 19 nt, Homo sapiens
  misc_RNA (1)...(19): siRNA sense strand
agagcuagcagauauaaag

SEQ ID NO: 693729 - RNA, 19 nt, Homo sapiens
  misc_RNA (1)...(19): siRNA sense strand
gaaaauggugcccucauca

SEQ ID NO: 693730 - RNA, 19 nt, Homo sapiens
  misc_RNA (1)...(19): siRNA sense strand
aagaagacagcaacagaga

SEQ ID NO: 693731 - RNA, 19 nt, Homo sapiens
  misc_RNA (1)...(19): siRNA sense strand
aaacguggcaugaaagacu

SEQ ID NO: 693732 - RNA, 19 nt, Homo sapiens
  misc_RNA (1)...(19): siRNA sense strand
aggaugaggaugaaacuga

SEQ ID NO: 693733 - RNA, 19 nt, Homo sapiens
  misc_RNA (1)...(19): siRNA sense strand
aagaagcagauuuggauga

SEQ ID NO: 693734 - RNA, 19 nt, Homo sapiens
  misc_RNA (1)...(19): siRNA sense strand
acagcaacagagauuauaa

SEQ ID NO: 693735 - RNA, 19 nt, Homo sapiens
  misc_RNA (1)...(19): siRNA sense strand
gagcuagcagauauaaagu

SEQ ID NO: 693736 - RNA, 19 nt, Homo sapiens
  misc_RNA (1)...(19): siRNA sense strand
gaagaggcacaggcaucaa

SEQ ID NO: 693737 - RNA, 19 nt, Homo sapiens
  misc_RNA (1)...(19): siRNA sense strand
cagaaauggaggaagaaau

SEQ ID NO: 693738 - RNA, 19 nt, Homo sapiens
  misc_RNA (1)...(19): siRNA sense strand
cagcaaacuguccaaguag

SEQ ID NO: 693739 - RNA, 19 nt, Homo sapiens
  misc_RNA (1)...(19): siRNA sense strand
agaagcagauuuggaugag

SEQ ID NO: 693740 - RNA, 19 nt, Homo sapiens
  misc_RNA (1)...(19): siRNA sense strand
gaagaggucaaagaaacgu

SEQ ID NO: 693741 - RNA, 19 nt, Homo sapiens
  misc_RNA (1)...(19): siRNA sense strand
agaaacguggcaugaaaga

SEQ ID NO: 693742 - RNA, 19 nt, Homo sapiens
  misc_RNA (1)...(19): siRNA sense strand
gaaacugauggcucugaag

SEQ ID NO: 693743 - RNA, 19 nt, Homo sapiens
  misc_RNA (1)...(19): siRNA sense strand
aaauggugcccucaucaga

SEQ ID NO: 693744 - RNA, 19 nt, Homo sapiens
  misc_RNA (1)...(19): siRNA sense strand
aaauggaggaagaaaugaa

SEQ ID NO: 693745 - RNA, 19 nt, Homo sapiens
  misc_RNA (1)...(19): siRNA sense strand
auauaaaguccaagcuuga

SEQ ID NO: 693746 - RNA, 19 nt, Homo sapiens
  misc_RNA (1)...(19): siRNA sense strand
ucaggaagcccagcuagag

SEQ ID NO: 693747 - RNA, 19 nt, Homo sapiens
  misc_RNA (1)...(19): siRNA sense strand
acaaccagaggcugaaaga

SEQ ID NO: 693748 - RNA, 19 nt, Homo sapiens
  misc_RNA (1)...(19): siRNA sense strand
ugaccagccguguagaaga

SEQ ID NO: 693749 - RNA, 19 nt, Homo sapiens
  misc_RNA (1)...(19): siRNA sense strand
ucagaaauggaggaagaaa

SEQ ID NO: 693750 - RNA, 19 nt, Homo sapiens
  misc_RNA (1)...(19): siRNA sense strand
gcccagcagaaacaagaaa

SEQ ID NO: 693751 - RNA, 19 nt, Homo sapiens
  misc_RNA (1)...(19): siRNA sense strand
ggacaaaggaugaggauga

SEQ ID NO: 693752 - RNA, 19 nt, Homo sapiens
  misc_RNA (1)...(19): siRNA sense strand
aaagaaacguggcaugaaa

SEQ ID NO: 693753 - RNA, 19 nt, Homo sapiens
  misc_RNA (1)...(19): siRNA sense strand
gaagacagcaacagagauu

SEQ ID NO: 693754 - RNA, 19 nt, Homo sapiens
  misc_RNA (1)...(19): siRNA sense strand
gaugagcaguccucuaaga

SEQ ID NO: 693755 - RNA, 19 nt, Homo sapiens
  misc_RNA (1)...(19): siRNA sense strand
gcacaggcaucaauuucug

SEQ ID NO: 693756 - RNA, 19 nt, Homo sapiens
  misc_RNA (1)...(19): siRNA sense strand
gaaugaagaagcagauuug

SEQ ID NO: 693757 - RNA, 19 nt, Homo sapiens
  misc_RNA (1)...(19): siRNA sense strand
gaccagccguguagaagaa

SEQ ID NO: 693758 - RNA, 19 nt, Homo sapiens
  misc_RNA (1)...(19): siRNA sense strand
gaagguggcccagcagaaa

SEQ ID NO: 693759 - RNA, 19 nt, Homo sapiens
  misc_RNA (1)...(19): siRNA sense strand
gaucaucagugcuggagau

SEQ ID NO: 693760 - RNA, 19 nt, Homo sapiens
  misc_RNA (1)...(19): siRNA sense strand
gacaaaggaugaggaugaa

SEQ ID NO: 693761 - RNA, 19 nt, Homo sapiens
  misc_RNA (1)...(19): siRNA sense strand
cuacaaccagugauucuua

SEQ ID NO: 693762 - RNA, 19 nt, Homo sapiens
  misc_RNA (1)...(19): siRNA sense strand
ugaccgggcuucagcaaga

SEQ ID NO: 693763 - RNA, 19 nt, Homo sapiens
  misc_RNA (1)...(19): siRNA sense strand
ugucagaaauggaggaaga

SEQ ID NO: 693764 - RNA, 19 nt, Homo sapiens
  misc_RNA (1)...(19): siRNA sense strand
aaagaccucugaccgauca

SEQ ID NO: 693765 - RNA, 19 nt, Homo sapiens
  misc_RNA (1)...(19): siRNA sense strand
uagcagauauaaaguccaa

SEQ ID NO: 693766 - RNA, 19 nt, Homo sapiens
  misc_RNA (1)...(19): siRNA sense strand
ggaugaggaugaaacugau

SEQ ID NO: 693767 - RNA, 19 nt, Homo sapiens
  misc_RNA (1)...(19): siRNA sense strand
gaaauggaggaagaaauga

SEQ ID NO: 693768 - RNA, 19 nt, Homo sapiens
  misc_RNA (1)...(19): siRNA sense strand
caaagaaacguggcaugaa

SEQ ID NO: 693769 - RNA, 19 nt, Homo sapiens
  misc_RNA (1)...(19): siRNA sense strand
ugaagaagcagauuuggau

SEQ ID NO: 693770 - RNA, 19 nt, Homo sapiens
  misc_RNA (1)...(19): siRNA sense strand
uggaugagcaguccucuaa

SEQ ID NO: 693771 - RNA, 19 nt, Homo sapiens
  misc_RNA (1)...(19): siRNA sense strand
ucaaagaaacguggcauga

SEQ ID NO: 693772 - RNA, 19 nt, Homo sapiens
  misc_RNA (1)...(19): siRNA sense strand
agaaauggaggaagaaaug

SEQ ID NO: 693773 - RNA, 19 nt, Homo sapiens
  misc_RNA (1)...(19): siRNA sense strand
gcaucaauuucuggacaaa

SEQ ID NO: 693774 - RNA, 19 nt, Homo sapiens
  misc_RNA (1)...(19): siRNA sense strand
gacagcaacagagauuaua

SEQ ID NO: 693775 - RNA, 19 nt, Homo sapiens
  misc_RNA (1)...(19): siRNA sense strand
ugaaacugauggcucugaa

SEQ ID NO: 693776 - RNA, 19 nt, Homo sapiens
  misc_RNA (1)...(19): siRNA sense strand
cagcaacagagauuauaaa

SEQ ID NO: 693777 - RNA, 19 nt, Homo sapiens
  misc_RNA (1)...(19): siRNA sense strand
cugaagaggucaaagaaac

SEQ ID NO: 693778 - RNA, 19 nt, Homo sapiens
  misc_RNA (1)...(19): siRNA sense strand
gaaaacaaaacuucaggaa

SEQ ID NO: 693779 - RNA, 19 nt, Homo sapiens
  misc_RNA (1)...(19): siRNA sense strand
aaacugauggcucugaaga

SEQ ID NO: 693780 - RNA, 19 nt, Homo sapiens
  misc_RNA (1)...(19): siRNA sense strand
agaagaagacagcaacaga

SEQ ID NO: 693781 - RNA, 19 nt, Homo sapiens
  misc_RNA (1)...(19): siRNA sense strand
agaaugaagaagcagauuu

SEQ ID NO: 693782 - RNA, 19 nt, Homo sapiens
  misc_RNA (1)...(19): siRNA sense strand
uaaaguccaagcuugagaa

SEQ ID NO: 693783 - RNA, 19 nt, Homo sapiens
  misc_RNA (1)...(19): siRNA sense strand
aguccaagcuugagaaggu

SEQ ID NO: 693784 - RNA, 19 nt, Homo sapiens
  misc_RNA (1)...(19): siRNA sense strand
gaggcacaggcaucaauuu

SEQ ID NO: 693785 - RNA, 19 nt, Homo sapiens
  misc_RNA (1)...(19): siRNA sense strand
aaaugagaaugaagaagca

SEQ ID NO: 693786 - RNA, 19 nt, Homo sapiens
  misc_RNA (1)...(19): siRNA sense strand
gaaucgggagguaguaauc

SEQ ID NO: 693787 - RNA, 19 nt, Homo sapiens
  misc_RNA (1)...(19): siRNA sense strand
caaaggaugaggaugaaac

SEQ ID NO: 693788 - RNA, 19 nt, Homo sapiens
  misc_RNA (1)...(19): siRNA sense strand
guaauccuacaaccaguga

SEQ ID NO: 693789 - RNA, 19 nt, Homo sapiens
  misc_RNA (1)...(19): siRNA sense strand
ggcaucaauuucuggacaa

SEQ ID NO: 693790 - RNA, 19 nt, Homo sapiens
  misc_RNA (1)...(19): siRNA sense strand
ggaaucgggagguaguaau

SEQ ID NO: 693791 - RNA, 19 nt, Homo sapiens
  misc_RNA (1)...(19): siRNA sense strand
gagaaugaagaagcagauu

SEQ ID NO: 693792 - RNA, 19 nt, Homo sapiens
  misc_RNA (1)...(19): siRNA sense strand
agacagcaacagagauuau

SEQ ID NO: 693793 - RNA, 19 nt, Homo sapiens
  misc_RNA (1)...(19): siRNA sense strand
agagcuagcagauauaaag

SEQ ID NO: 693794 - RNA, 19 nt, Homo sapiens
  misc_RNA (1)...(19): siRNA sense strand
aagaagacagcaacagaga

SEQ ID NO: 693795 - RNA, 19 nt, Homo sapiens
  misc_RNA (1)...(19): siRNA sense strand
aaacguggcaugaaagacu

SEQ ID NO: 693796 - RNA, 19 nt, Homo sapiens
  misc_RNA (1)...(19): siRNA sense strand
aagaagcagauuuggauga

SEQ ID NO: 693797 - RNA, 19 nt, Homo sapiens
  misc_RNA (1)...(19): siRNA sense strand
acagcaacagagauuauaa

SEQ ID NO: 693798 - RNA, 19 nt, Homo sapiens
  misc_RNA (1)...(19): siRNA sense strand
aggaugaggaugaaacuga

SEQ ID NO: 693799 - RNA, 19 nt, Homo sapiens
  misc_RNA (1)...(19): siRNA sense strand
gagcuagcagauauaaagu

SEQ ID NO: 693800 - RNA, 19 nt, Homo sapiens
  misc_RNA (1)...(19): siRNA sense strand
gaagaggcacaggcaucaa

SEQ ID NO: 693801 - RNA, 19 nt, Homo sapiens
  misc_RNA (1)...(19): siRNA sense strand
cagaaauggaggaagaaau

SEQ ID NO: 693802 - RNA, 19 nt, Homo sapiens
  misc_RNA (1)...(19): siRNA sense strand
gaagaggucaaagaaacgu

SEQ ID NO: 693803 - RNA, 19 nt, Homo sapiens
  misc_RNA (1)...(19): siRNA sense strand
agaagcagauuuggaugag

SEQ ID NO: 693804 - RNA, 19 nt, Homo sapiens
  misc_RNA (1)...(19): siRNA sense strand
agaaacguggcaugaaaga

SEQ ID NO: 693805 - RNA, 19 nt, Homo sapiens
  misc_RNA (1)...(19): siRNA sense strand
gaaacugauggcucugaag

SEQ ID NO: 693806 - RNA, 19 nt, Homo sapiens
  misc_RNA (1)...(19): siRNA sense strand
aaauggaggaagaaaugaa

SEQ ID NO: 693807 - RNA, 19 nt, Homo sapiens
  misc_RNA (1)...(19): siRNA sense strand
auauaaaguccaagcuuga

SEQ ID NO: 693808 - RNA, 19 nt, Homo sapiens
  misc_RNA (1)...(19): siRNA sense strand
ucaggaagcccagcuagag

SEQ ID NO: 693809 - RNA, 19 nt, Homo sapiens
  misc_RNA (1)...(19): siRNA sense strand
ugaccagccguguagaaga

SEQ ID NO: 693810 - RNA, 19 nt, Homo sapiens
  misc_RNA (1)...(19): siRNA sense strand
ucagaaauggaggaagaaa

SEQ ID NO: 693811 - RNA, 19 nt, Homo sapiens
  misc_RNA (1)...(19): siRNA sense strand
gcccagcagaaacaagaaa

SEQ ID NO: 693812 - RNA, 19 nt, Homo sapiens
  misc_RNA (1)...(19): siRNA sense strand
ggacaaaggaugaggauga

SEQ ID NO: 693813 - RNA, 19 nt, Homo sapiens
  misc_RNA (1)...(19): siRNA sense strand
aaagaaacguggcaugaaa

SEQ ID NO: 693814 - RNA, 19 nt, Homo sapiens
  misc_RNA (1)...(19): siRNA sense strand
gcaggagucuggaugaaga

SEQ ID NO: 693815 - RNA, 19 nt, Homo sapiens
  misc_RNA (1)...(19): siRNA sense strand
gaagacagcaacagagauu

SEQ ID NO: 693816 - RNA, 19 nt, Homo sapiens
  misc_RNA (1)...(19): siRNA sense strand
gaugagcaguccucuaaga

SEQ ID NO: 693817 - RNA, 19 nt, Homo sapiens
  misc_RNA (1)...(19): siRNA sense strand
gcacaggcaucaauuucug

SEQ ID NO: 693818 - RNA, 19 nt, Homo sapiens
  misc_RNA (1)...(19): siRNA sense strand
gaaugaagaagcagauuug

SEQ ID NO: 693819 - RNA, 19 nt, Homo sapiens
  misc_RNA (1)...(19): siRNA sense strand
gaccagccguguagaagaa

SEQ ID NO: 693820 - RNA, 19 nt, Homo sapiens
  misc_RNA (1)...(19): siRNA sense strand
caccugcuauggacaaaua

SEQ ID NO: 693821 - RNA, 19 nt, Homo sapiens
  misc_RNA (1)...(19): siRNA sense strand
guucagagacuaccacaaa

SEQ ID NO: 693822 - RNA, 19 nt, Homo sapiens
  misc_RNA (1)...(19): siRNA sense strand
gaagguggcccagcagaaa

SEQ ID NO: 693823 - RNA, 19 nt, Homo sapiens
  misc_RNA (1)...(19): siRNA sense strand
gaucaucagugcuggagau

SEQ ID NO: 693824 - RNA, 19 nt, Homo sapiens
  misc_RNA (1)...(19): siRNA sense strand
gacaaaggaugaggaugaa

SEQ ID NO: 693825 - RNA, 19 nt, Homo sapiens
  misc_RNA (1)...(19): siRNA sense strand
cuacaaccagugauucuua

SEQ ID NO: 693826 - RNA, 19 nt, Homo sapiens
  misc_RNA (1)...(19): siRNA sense strand
ugaccgggcuucagcaaga

SEQ ID NO: 693827 - RNA, 19 nt, Homo sapiens
  misc_RNA (1)...(19): siRNA sense strand
ugucagaaauggaggaaga

SEQ ID NO: 693828 - RNA, 19 nt, Homo sapiens
  misc_RNA (1)...(19): siRNA sense strand
acacgaaggucuacucaag

SEQ ID NO: 693829 - RNA, 19 nt, Homo sapiens
  misc_RNA (1)...(19): siRNA sense strand
gagacuaccacaaacacua

SEQ ID NO: 693830 - RNA, 19 nt, Homo sapiens
  misc_RNA (1)...(19): siRNA sense strand
aaagaccucugaccgauca

SEQ ID NO: 693831 - RNA, 19 nt, Homo sapiens
  misc_RNA (1)...(19): siRNA sense strand
gaaagcacgcuccagacaa

SEQ ID NO: 693832 - RNA, 19 nt, Homo sapiens
  misc_RNA (1)...(19): siRNA sense strand
uagcagauauaaaguccaa

SEQ ID NO: 693833 - RNA, 19 nt, Homo sapiens
  misc_RNA (1)...(19): siRNA sense strand
ugaggaagcagagucuuua

SEQ ID NO: 693834 - RNA, 19 nt, Homo sapiens
  misc_RNA (1)...(19): siRNA sense strand
ggaaagcacgcuccagaca

SEQ ID NO: 693835 - RNA, 19 nt, Homo sapiens
  misc_RNA (1)...(19): siRNA sense strand
ggaugaggaugaaacugau

SEQ ID NO: 693836 - RNA, 19 nt, Homo sapiens
  misc_RNA (1)...(19): siRNA sense strand
gaaauggaggaagaaauga

SEQ ID NO: 693837 - RNA, 19 nt, Homo sapiens
  misc_RNA (1)...(19): siRNA sense strand
ugaagaagcagauuuggau

SEQ ID NO: 693838 - RNA, 19 nt, Homo sapiens
  misc_RNA (1)...(19): siRNA sense strand
caaagaaacguggcaugaa

SEQ ID NO: 693839 - RNA, 19 nt, Homo sapiens
  misc_RNA (1)...(19): siRNA sense strand
uggaugagcaguccucuaa

SEQ ID NO: 693840 - RNA, 19 nt, Homo sapiens
  misc_RNA (1)...(19): siRNA sense strand
ggagcagccucgugagaag

SEQ ID NO: 693841 - RNA, 19 nt, Homo sapiens
  misc_RNA (1)...(19): siRNA sense strand
agaaauggaggaagaaaug

SEQ ID NO: 693842 - RNA, 19 nt, Homo sapiens
  misc_RNA (1)...(19): siRNA sense strand
ucaaagaaacguggcauga

SEQ ID NO: 693843 - RNA, 19 nt, Homo sapiens
  misc_RNA (1)...(19): siRNA sense strand
ucaagacccucacucuaca

SEQ ID NO: 693844 - RNA, 19 nt, Homo sapiens
  misc_RNA (1)...(19): siRNA sense strand
gcaucaauuucuggacaaa

SEQ ID NO: 693845 - RNA, 19 nt, Homo sapiens
  misc_RNA (1)...(19): siRNA sense strand
ggaugaagagccuaucugu

SEQ ID NO: 693846 - RNA, 19 nt, Homo sapiens
  misc_RNA (1)...(19): siRNA sense strand
gacagcaacagagauuaua

SEQ ID NO: 693847 - RNA, 19 nt, Homo sapiens
  misc_RNA (1)...(19): siRNA sense strand
gggcaggagucuggaugaa

SEQ ID NO: 693848 - RNA, 19 nt, Homo sapiens
  misc_RNA (1)...(19): siRNA sense strand
cagcaacagagauuauaaa

SEQ ID NO: 693849 - RNA, 19 nt, Homo sapiens
  misc_RNA (1)...(19): siRNA sense strand
ugaaacugauggcucugaa

SEQ ID NO: 693850 - RNA, 19 nt, Homo sapiens
  misc_RNA (1)...(19): siRNA sense strand
cacuacaacugcaaaggaa

SEQ ID NO: 693851 - RNA, 19 nt, Homo sapiens
  misc_RNA (1)...(19): siRNA sense strand
cugaagaggucaaagaaac

SEQ ID NO: 693852 - RNA, 19 nt, Homo sapiens
  misc_RNA (1)...(19): siRNA sense strand
aaagcacgcuccagacaag

SEQ ID NO: 693853 - RNA, 19 nt, Homo sapiens
  misc_RNA (1)...(19): siRNA sense strand
gaaaacaaaacuucaggaa

SEQ ID NO: 693854 - RNA, 19 nt, Homo sapiens
  misc_RNA (1)...(19): siRNA sense strand
aaacugauggcucugaaga

SEQ ID NO: 693855 - RNA, 19 nt, Homo sapiens
  misc_RNA (1)...(19): siRNA sense strand
cagacaagcucggcagaca

SEQ ID NO: 693856 - RNA, 19 nt, Homo sapiens
  misc_RNA (1)...(19): siRNA sense strand
agaaugaagaagcagauuu

SEQ ID NO: 693857 - RNA, 19 nt, Homo sapiens
  misc_RNA (1)...(19): siRNA sense strand
agaagaagacagcaacaga

SEQ ID NO: 693858 - RNA, 19 nt, Homo sapiens
  misc_RNA (1)...(19): siRNA sense strand
uaaaguccaagcuugagaa

SEQ ID NO: 693859 - RNA, 19 nt, Homo sapiens
  misc_RNA (1)...(19): siRNA sense strand
augaagagccuaucuguca

SEQ ID NO: 693860 - RNA, 19 nt, Homo sapiens
  misc_RNA (1)...(19): siRNA sense strand
aguccaagcuugagaaggu

SEQ ID NO: 693861 - RNA, 19 nt, Homo sapiens
  misc_RNA (1)...(19): siRNA sense strand
gaggcacaggcaucaauuu

SEQ ID NO: 693862 - RNA, 19 nt, Homo sapiens
  misc_RNA (1)...(19): siRNA sense strand
gaagagccuaucugucauc

SEQ ID NO: 693863 - RNA, 19 nt, Homo sapiens
  misc_RNA (1)...(19): siRNA sense strand
aaaugagaaugaagaagca

SEQ ID NO: 693864 - RNA, 19 nt, Homo sapiens
  misc_RNA (1)...(19): siRNA sense strand
caacugcaaaggaaaugga

SEQ ID NO: 693865 - RNA, 19 nt, Homo sapiens
  misc_RNA (1)...(19): siRNA sense strand
cgucaagacccucacucua

SEQ ID NO: 693866 - RNA, 19 nt, Homo sapiens
  misc_RNA (1)...(19): siRNA sense strand
guaauccuacaaccaguga

SEQ ID NO: 693867 - RNA, 19 nt, Homo sapiens
  misc_RNA (1)...(19): siRNA sense strand
gaaucgggagguaguaauc

SEQ ID NO: 693868 - RNA, 19 nt, Homo sapiens
  misc_RNA (1)...(19): siRNA sense strand
caaaggaugaggaugaaac

SEQ ID NO: 693869 - RNA, 19 nt, Homo sapiens
  misc_RNA (1)...(19): siRNA sense strand
caaacacuacaacugcaaa

SEQ ID NO: 693870 - RNA, 19 nt, Homo sapiens
  misc_RNA (1)...(19): siRNA sense strand
ggcaucaauuucuggacaa

SEQ ID NO: 693871 - RNA, 19 nt, Homo sapiens
  misc_RNA (1)...(19): siRNA sense strand
ggaaucgggagguaguaau

SEQ ID NO: 693872 - RNA, 19 nt, Homo sapiens
  misc_RNA (1)...(19): siRNA sense strand
gagaaugaagaagcagauu

SEQ ID NO: 693873 - RNA, 19 nt, Homo sapiens
  misc_RNA (1)...(19): siRNA sense strand
agacagcaacagagauuau

SEQ ID NO: 693874 - RNA, 19 nt, Homo sapiens
  misc_RNA (1)...(19): siRNA sense strand
agcagagucuuuacggaaa

SEQ ID NO: 693875 - RNA, 19 nt, Homo sapiens
  misc_RNA (1)...(19): siRNA sense strand
gucaagacccucacucuac

SEQ ID NO: 693876 - RNA, 19 nt, Homo sapiens
  misc_RNA (1)...(19): siRNA sense strand
agagcuagcagauauaaag

SEQ ID NO: 693877 - RNA, 19 nt, Homo sapiens
  misc_RNA (1)...(19): siRNA sense strand
ugaagagccuaucugucau

SEQ ID NO: 693878 - RNA, 19 nt, Homo sapiens
  misc_RNA (1)...(19): siRNA sense strand
acacuacaacugcaaagga

SEQ ID NO: 693879 - RNA, 19 nt, Homo sapiens
  misc_RNA (1)...(19): siRNA sense strand
aagaagacagcaacagaga

SEQ ID NO: 693880 - RNA, 19 nt, Homo sapiens
  misc_RNA (1)...(19): siRNA sense strand
aagaagcagauuuggauga

SEQ ID NO: 693881 - RNA, 19 nt, Homo sapiens
  misc_RNA (1)...(19): siRNA sense strand
acagcaacagagauuauaa

SEQ ID NO: 693882 - RNA, 19 nt, Homo sapiens
  misc_RNA (1)...(19): siRNA sense strand
aaacguggcaugaaagacu

SEQ ID NO: 693883 - RNA, 19 nt, Homo sapiens
  misc_RNA (1)...(19): siRNA sense strand
aggaugaggaugaaacuga

SEQ ID NO: 693884 - RNA, 19 nt, Homo sapiens
  misc_RNA (1)...(19): siRNA sense strand
cuacaacugcaaaggaaau

SEQ ID NO: 693885 - RNA, 19 nt, Homo sapiens
  misc_RNA (1)...(19): siRNA sense strand
gagcuagcagauauaaagu

SEQ ID NO: 693886 - RNA, 19 nt, Homo sapiens
  misc_RNA (1)...(19): siRNA sense strand
gaagaggcacaggcaucaa

SEQ ID NO: 693887 - RNA, 19 nt, Homo sapiens
  misc_RNA (1)...(19): siRNA sense strand
gaagcccacagacacugaa

SEQ ID NO: 693888 - RNA, 19 nt, Homo sapiens
  misc_RNA (1)...(19): siRNA sense strand
cagaaauggaggaagaaau

SEQ ID NO: 693889 - RNA, 19 nt, Homo sapiens
  misc_RNA (1)...(19): siRNA sense strand
acgaaggucuacucaaggu

SEQ ID NO: 693890 - RNA, 19 nt, Homo sapiens
  misc_RNA (1)...(19): siRNA sense strand
agaaacguggcaugaaaga

SEQ ID NO: 693891 - RNA, 19 nt, Homo sapiens
  misc_RNA (1)...(19): siRNA sense strand
gaagaggucaaagaaacgu

SEQ ID NO: 693892 - RNA, 19 nt, Homo sapiens
  misc_RNA (1)...(19): siRNA sense strand
agaagcagauuuggaugag

SEQ ID NO: 693893 - RNA, 19 nt, Homo sapiens
  misc_RNA (1)...(19): siRNA sense strand
ucagagacuaccacaaaca

SEQ ID NO: 693894 - RNA, 19 nt, Homo sapiens
  misc_RNA (1)...(19): siRNA sense strand
aaauggaggaagaaaugaa

SEQ ID NO: 693895 - RNA, 19 nt, Homo sapiens
  misc_RNA (1)...(19): siRNA sense strand
auauaaaguccaagcuuga

SEQ ID NO: 693896 - RNA, 19 nt, Homo sapiens
  misc_RNA (1)...(19): siRNA sense strand
gcaguuccagcaacagaag

SEQ ID NO: 693897 - RNA, 19 nt, Homo sapiens
  misc_RNA (1)...(19): siRNA sense strand
gaaacugauggcucugaag

SEQ ID NO: 693898 - RNA, 19 nt, Homo sapiens
  misc_RNA (1)...(19): siRNA sense strand
caccaguucccaccugcua

SEQ ID NO: 693899 - RNA, 19 nt, Homo sapiens
  misc_RNA (1)...(19): siRNA sense strand
cagcaguuccagcaacaga

SEQ ID NO: 693900 - RNA, 19 nt, Homo sapiens
  misc_RNA (1)...(19): siRNA sense strand
ucaggaagcccagcuagag

SEQ ID NO: 693901 - RNA, 19 nt, Homo sapiens
  misc_RNA (1)...(19): siRNA sense strand
gcaucuccuucuacgucaa

SEQ ID NO: 693902 - RNA, 19 nt, Homo sapiens
  misc_RNA (1)...(19): siRNA sense strand
ucagaaauggaggaagaaa

SEQ ID NO: 693903 - RNA, 19 nt, Homo sapiens
  misc_RNA (1)...(19): siRNA sense strand
ugaccagccguguagaaga

SEQ ID NO: 693904 - RNA, 19 nt, Homo sapiens
  misc_RNA (1)...(19): siRNA sense strand
caagcucggcagacacgaa

SEQ ID NO: 693905 - RNA, 19 nt, Homo sapiens
  misc_RNA (1)...(19): siRNA sense strand
gcaaaggaaauggacaaaa

SEQ ID NO: 693906 - RNA, 19 nt, Homo sapiens
  misc_RNA (1)...(19): siRNA sense strand
gcccagcagaaacaagaaa

SEQ ID NO: 693907 - RNA, 19 nt, Homo sapiens
  misc_RNA (1)...(19): siRNA sense strand
ugacuccuguacgggauga

SEQ ID NO: 693908 - RNA, 19 nt, Homo sapiens
  misc_RNA (1)...(19): siRNA sense strand
ggacaaaggaugaggauga

SEQ ID NO: 693909 - RNA, 19 nt, Homo sapiens
  misc_RNA (1)...(19): siRNA sense strand
aaagaaacguggcaugaaa

SEQ ID NO: 693910 - RNA, 19 nt, Homo sapiens
  misc_RNA (1)...(19): siRNA sense strand
gcaggagucuggaugaaga

SEQ ID NO: 693911 - RNA, 19 nt, Homo sapiens
  misc_RNA (1)...(19): siRNA sense strand
ucagcaaacuguccaagua

SEQ ID NO: 693912 - RNA, 19 nt, Homo sapiens
  misc_RNA (1)...(19): siRNA sense strand
gaagacagcaacagagauu

SEQ ID NO: 693913 - RNA, 19 nt, Homo sapiens
  misc_RNA (1)...(19): siRNA sense strand
gaugagcaguccucuaaga

SEQ ID NO: 693914 - RNA, 19 nt, Homo sapiens
  misc_RNA (1)...(19): siRNA sense strand
gcacaggcaucaauuucug

SEQ ID NO: 693915 - RNA, 19 nt, Homo sapiens
  misc_RNA (1)...(19): siRNA sense strand
gaaugaagaagcagauuug

SEQ ID NO: 693916 - RNA, 19 nt, Homo sapiens
  misc_RNA (1)...(19): siRNA sense strand
gaccagccguguagaagaa

SEQ ID NO: 693917 - RNA, 19 nt, Homo sapiens
  misc_RNA (1)...(19): siRNA sense strand
caccugcuauggacaaaua

SEQ ID NO: 693918 - RNA, 19 nt, Homo sapiens
  misc_RNA (1)...(19): siRNA sense strand
guucagagacuaccacaaa

SEQ ID NO: 693919 - RNA, 19 nt, Homo sapiens
  misc_RNA (1)...(19): siRNA sense strand
gaagguggcccagcagaaa

SEQ ID NO: 693920 - RNA, 19 nt, Homo sapiens
  misc_RNA (1)...(19): siRNA sense strand
gaucaucagugcuggagau

SEQ ID NO: 693921 - RNA, 19 nt, Homo sapiens
  misc_RNA (1)...(19): siRNA sense strand
gacaaaggaugaggaugaa

SEQ ID NO: 693922 - RNA, 19 nt, Homo sapiens
  misc_RNA (1)...(19): siRNA sense strand
cuacaaccagugauucuua

SEQ ID NO: 693923 - RNA, 19 nt, Homo sapiens
  misc_RNA (1)...(19): siRNA sense strand
ugaccgggcuucagcaaga

SEQ ID NO: 693924 - RNA, 19 nt, Homo sapiens
  misc_RNA (1)...(19): siRNA sense strand
ugucagaaauggaggaaga

SEQ ID NO: 693925 - RNA, 19 nt, Homo sapiens
  misc_RNA (1)...(19): siRNA sense strand
acacgaaggucuacucaag

SEQ ID NO: 693926 - RNA, 19 nt, Homo sapiens
  misc_RNA (1)...(19): siRNA sense strand
gagacuaccacaaacacua

SEQ ID NO: 693927 - RNA, 19 nt, Homo sapiens
  misc_RNA (1)...(19): siRNA sense strand
gguguuaacagaacugaaa

SEQ ID NO: 693928 - RNA, 19 nt, Homo sapiens
  misc_RNA (1)...(19): siRNA sense strand
aaagaccucugaccgauca

SEQ ID NO: 693929 - RNA, 19 nt, Homo sapiens
  misc_RNA (1)...(19): siRNA sense strand
gaaagcacgcuccagacaa

SEQ ID NO: 693930 - RNA, 19 nt, Homo sapiens
  misc_RNA (1)...(19): siRNA sense strand
uagcagauauaaaguccaa

SEQ ID NO: 693931 - RNA, 19 nt, Homo sapiens
  misc_RNA (1)...(19): siRNA sense strand
ugaggaagcagagucuuua

SEQ ID NO: 693932 - RNA, 19 nt, Homo sapiens
  misc_RNA (1)...(19): siRNA sense strand
ggaaagcacgcuccagaca

SEQ ID NO: 693933 - RNA, 19 nt, Homo sapiens
  misc_RNA (1)...(19): siRNA sense strand
ggaugaggaugaaacugau

SEQ ID NO: 693934 - RNA, 19 nt, Homo sapiens
  misc_RNA (1)...(19): siRNA sense strand
gaaauggaggaagaaauga

SEQ ID NO: 693935 - RNA, 19 nt, Homo sapiens
  misc_RNA (1)...(19): siRNA sense strand
ugaagaagcagauuuggau

SEQ ID NO: 693936 - RNA, 19 nt, Homo sapiens
  misc_RNA (1)...(19): siRNA sense strand
caaagaaacguggcaugaa

SEQ ID NO: 693937 - RNA, 19 nt, Homo sapiens
  misc_RNA (1)...(19): siRNA sense strand
uggaugagcaguccucuaa

SEQ ID NO: 693938 - RNA, 19 nt, Homo sapiens
  misc_RNA (1)...(19): siRNA sense strand
ggagcagccucgugagaag

SEQ ID NO: 693939 - RNA, 19 nt, Homo sapiens
  misc_RNA (1)...(19): siRNA sense strand
agaaauggaggaagaaaug

SEQ ID NO: 693940 - RNA, 19 nt, Homo sapiens
  misc_RNA (1)...(19): siRNA sense strand
ucaaagaaacguggcauga

SEQ ID NO: 693941 - RNA, 19 nt, Homo sapiens
  misc_RNA (1)...(19): siRNA sense strand
ucaagacccucacucuaca

SEQ ID NO: 693942 - RNA, 19 nt, Homo sapiens
  misc_RNA (1)...(19): siRNA sense strand
gcaucaauuucuggacaaa

SEQ ID NO: 693943 - RNA, 19 nt, Homo sapiens
  misc_RNA (1)...(19): siRNA sense strand
accagaggcugaaagauga

SEQ ID NO: 693944 - RNA, 19 nt, Homo sapiens
  misc_RNA (1)...(19): siRNA sense strand
ggaugaagagccuaucugu

SEQ ID NO: 693945 - RNA, 19 nt, Homo sapiens
  misc_RNA (1)...(19): siRNA sense strand
gacagcaacagagauuaua

SEQ ID NO: 693946 - RNA, 19 nt, Homo sapiens
  misc_RNA (1)...(19): siRNA sense strand
gggcaggagucuggaugaa

SEQ ID NO: 693947 - RNA, 19 nt, Homo sapiens
  misc_RNA (1)...(19): siRNA sense strand
cagcaacagagauuauaaa

SEQ ID NO: 693948 - RNA, 19 nt, Homo sapiens
  misc_RNA (1)...(19): siRNA sense strand
ugaaacugauggcucugaa

SEQ ID NO: 693949 - RNA, 19 nt, Homo sapiens
  misc_RNA (1)...(19): siRNA sense strand
cacuacaacugcaaaggaa

SEQ ID NO: 693950 - RNA, 19 nt, Homo sapiens
  misc_RNA (1)...(19): siRNA sense strand
cugaagaggucaaagaaac

SEQ ID NO: 693951 - RNA, 19 nt, Homo sapiens
  misc_RNA (1)...(19): siRNA sense strand
aaagcacgcuccagacaag

SEQ ID NO: 693952 - RNA, 19 nt, Homo sapiens
  misc_RNA (1)...(19): siRNA sense strand
gaaaacaaaacuucaggaa

SEQ ID NO: 693953 - RNA, 19 nt, Homo sapiens
  misc_RNA (1)...(19): siRNA sense strand
caucagagucaucagcaaa

SEQ ID NO: 693954 - RNA, 19 nt, Homo sapiens
  misc_RNA (1)...(19): siRNA sense strand
cagacaagcucggcagaca

SEQ ID NO: 693955 - RNA, 19 nt, Homo sapiens
  misc_RNA (1)...(19): siRNA sense strand
aaacugauggcucugaaga

SEQ ID NO: 693956 - RNA, 19 nt, Homo sapiens
  misc_RNA (1)...(19): siRNA sense strand
agaaugaagaagcagauuu

SEQ ID NO: 693957 - RNA, 19 nt, Homo sapiens
  misc_RNA (1)...(19): siRNA sense strand
agaagaagacagcaacaga

SEQ ID NO: 693958 - RNA, 19 nt, Homo sapiens
  misc_RNA (1)...(19): siRNA sense strand
uaaaguccaagcuugagaa

SEQ ID NO: 693959 - RNA, 19 nt, Homo sapiens
  misc_RNA (1)...(19): siRNA sense strand
augaagagccuaucuguca

SEQ ID NO: 693960 - RNA, 19 nt, Homo sapiens
  misc_RNA (1)...(19): siRNA sense strand
aguccaagcuugagaaggu

SEQ ID NO: 693961 - RNA, 19 nt, Homo sapiens
  misc_RNA (1)...(19): siRNA sense strand
gaggcacaggcaucaauuu

SEQ ID NO: 693962 - RNA, 19 nt, Homo sapiens
  misc_RNA (1)...(19): siRNA sense strand
gaagagccuaucugucauc

SEQ ID NO: 693963 - RNA, 19 nt, Homo sapiens
  misc_RNA (1)...(19): siRNA sense strand
aaaugagaaugaagaagca

SEQ ID NO: 693964 - RNA, 19 nt, Homo sapiens
  misc_RNA (1)...(19): siRNA sense strand
caacugcaaaggaaaugga

SEQ ID NO: 693965 - RNA, 19 nt, Homo sapiens
  misc_RNA (1)...(19): siRNA sense strand
cgucaagacccucacucua

SEQ ID NO: 693966 - RNA, 19 nt, Homo sapiens
  misc_RNA (1)...(19): siRNA sense strand
guaauccuacaaccaguga

SEQ ID NO: 693967 - RNA, 19 nt, Homo sapiens
  misc_RNA (1)...(19): siRNA sense strand
gaaucgggagguaguaauc

SEQ ID NO: 693968 - RNA, 19 nt, Homo sapiens
  misc_RNA (1)...(19): siRNA sense strand
caaaggaugaggaugaaac

SEQ ID NO: 693969 - RNA, 19 nt, Homo sapiens
  misc_RNA (1)...(19): siRNA sense strand
caaacacuacaacugcaaa

SEQ ID NO: 693970 - RNA, 19 nt, Homo sapiens
  misc_RNA (1)...(19): siRNA sense strand
ggcaucaauuucuggacaa

SEQ ID NO: 693971 - RNA, 19 nt, Homo sapiens
  misc_RNA (1)...(19): siRNA sense strand
gcugaaagaugaaaauggu

SEQ ID NO: 693972 - RNA, 19 nt, Homo sapiens
  misc_RNA (1)...(19): siRNA sense strand
aaccagaggcugaaagaug

SEQ ID NO: 693973 - RNA, 19 nt, Homo sapiens
  misc_RNA (1)...(19): siRNA sense strand
ggaaucgggagguaguaau

SEQ ID NO: 693974 - RNA, 19 nt, Homo sapiens
  misc_RNA (1)...(19): siRNA sense strand
gagaaugaagaagcagauu

SEQ ID NO: 693975 - RNA, 19 nt, Homo sapiens
  misc_RNA (1)...(19): siRNA sense strand
agcagagucuuuacggaaa

SEQ ID NO: 693976 - RNA, 19 nt, Homo sapiens
  misc_RNA (1)...(19): siRNA sense strand
agacagcaacagagauuau

SEQ ID NO: 693977 - RNA, 19 nt, Homo sapiens
  misc_RNA (1)...(19): siRNA sense strand
gucaagacccucacucuac

SEQ ID NO: 693978 - RNA, 19 nt, Homo sapiens
  misc_RNA (1)...(19): siRNA sense strand
gaaaauggugcccucauca

SEQ ID NO: 693979 - RNA, 19 nt, Homo sapiens
  misc_RNA (1)...(19): siRNA sense strand
ugaagagccuaucugucau

SEQ ID NO: 693980 - RNA, 19 nt, Homo sapiens
  misc_RNA (1)...(19): siRNA sense strand
agagcuagcagauauaaag

SEQ ID NO: 693981 - RNA, 19 nt, Homo sapiens
  misc_RNA (1)...(19): siRNA sense strand
acacuacaacugcaaagga

SEQ ID NO: 693982 - RNA, 19 nt, Homo sapiens
  misc_RNA (1)...(19): siRNA sense strand
aagaagacagcaacagaga

SEQ ID NO: 693983 - RNA, 19 nt, Homo sapiens
  misc_RNA (1)...(19): siRNA sense strand
aagaagcagauuuggauga

SEQ ID NO: 693984 - RNA, 19 nt, Homo sapiens
  misc_RNA (1)...(19): siRNA sense strand
acagcaacagagauuauaa

SEQ ID NO: 693985 - RNA, 19 nt, Homo sapiens
  misc_RNA (1)...(19): siRNA sense strand
aaacguggcaugaaagacu

SEQ ID NO: 693986 - RNA, 19 nt, Homo sapiens
  misc_RNA (1)...(19): siRNA sense strand
aggaugaggaugaaacuga

SEQ ID NO: 693987 - RNA, 19 nt, Homo sapiens
  misc_RNA (1)...(19): siRNA sense strand
cuacaacugcaaaggaaau

SEQ ID NO: 693988 - RNA, 19 nt, Homo sapiens
  misc_RNA (1)...(19): siRNA sense strand
gagcuagcagauauaaagu

SEQ ID NO: 693989 - RNA, 19 nt, Homo sapiens
  misc_RNA (1)...(19): siRNA sense strand
gaagaggcacaggcaucaa

SEQ ID NO: 693990 - RNA, 19 nt, Homo sapiens
  misc_RNA (1)...(19): siRNA sense strand
gaagcccacagacacugaa

SEQ ID NO: 693991 - RNA, 19 nt, Homo sapiens
  misc_RNA (1)...(19): siRNA sense strand
cagcaaacuguccaaguag

SEQ ID NO: 693992 - RNA, 19 nt, Homo sapiens
  misc_RNA (1)...(19): siRNA sense strand
cagaaauggaggaagaaau

SEQ ID NO: 693993 - RNA, 19 nt, Homo sapiens
  misc_RNA (1)...(19): siRNA sense strand
agaagcagauuuggaugag

SEQ ID NO: 693994 - RNA, 19 nt, Homo sapiens
  misc_RNA (1)...(19): siRNA sense strand
acgaaggucuacucaaggu

SEQ ID NO: 693995 - RNA, 19 nt, Homo sapiens
  misc_RNA (1)...(19): siRNA sense strand
agaaacguggcaugaaaga

SEQ ID NO: 693996 - RNA, 19 nt, Homo sapiens
  misc_RNA (1)...(19): siRNA sense strand
gaagaggucaaagaaacgu

SEQ ID NO: 693997 - RNA, 19 nt, Homo sapiens
  misc_RNA (1)...(19): siRNA sense strand
ucagagacuaccacaaaca

SEQ ID NO: 693998 - RNA, 19 nt, Homo sapiens
  misc_RNA (1)...(19): siRNA sense strand
aaauggugcccucaucaga

SEQ ID NO: 693999 - RNA, 19 nt, Homo sapiens
  misc_RNA (1)...(19): siRNA sense strand
aaauggaggaagaaaugaa

SEQ ID NO: 694000 - RNA, 19 nt, Homo sapiens
  misc_RNA (1)...(19): siRNA sense strand
auauaaaguccaagcuuga

SEQ ID NO: 694001 - RNA, 19 nt, Homo sapiens
  misc_RNA (1)...(19): siRNA sense strand
gaaacugauggcucugaag

SEQ ID NO: 694002 - RNA, 19 nt, Homo sapiens
  misc_RNA (1)...(19): siRNA sense strand
gcaguuccagcaacagaag

SEQ ID NO: 694003 - RNA, 19 nt, Homo sapiens
  misc_RNA (1)...(19): siRNA sense strand
cagcaguuccagcaacaga

SEQ ID NO: 694004 - RNA, 19 nt, Homo sapiens
  misc_RNA (1)...(19): siRNA sense strand
caccaguucccaccugcua

SEQ ID NO: 694005 - RNA, 19 nt, Homo sapiens
  misc_RNA (1)...(19): siRNA sense strand
acaaccagaggcugaaaga

SEQ ID NO: 694006 - RNA, 19 nt, Homo sapiens
  misc_RNA (1)...(19): siRNA sense strand
ucaggaagcccagcuagag

SEQ ID NO: 694007 - RNA, 19 nt, Homo sapiens
  misc_RNA (1)...(19): siRNA sense strand
caagcucggcagacacgaa

SEQ ID NO: 694008 - RNA, 19 nt, Homo sapiens
  misc_RNA (1)...(19): siRNA sense strand
ggacaaaggaugaggauga

SEQ ID NO: 694009 - RNA, 19 nt, Homo sapiens
  misc_RNA (1)...(19): siRNA sense strand
aaagaaacguggcaugaaa

SEQ ID NO: 694010 - RNA, 19 nt, Homo sapiens
  misc_RNA (1)...(19): siRNA sense strand
ucagcaaacuguccaagua

SEQ ID NO: 694011 - RNA, 19 nt, Homo sapiens
  misc_RNA (1)...(19): siRNA sense strand
gaagacagcaacagagauu

SEQ ID NO: 694012 - RNA, 19 nt, Homo sapiens
  misc_RNA (1)...(19): siRNA sense strand
gaugagcaguccucuaaga

SEQ ID NO: 694013 - RNA, 19 nt, Homo sapiens
  misc_RNA (1)...(19): siRNA sense strand
gcacaggcaucaauuucug

SEQ ID NO: 694014 - RNA, 19 nt, Homo sapiens
  misc_RNA (1)...(19): siRNA sense strand
gaaugaagaagcagauuug

SEQ ID NO: 694015 - RNA, 19 nt, Homo sapiens
  misc_RNA (1)...(19): siRNA sense strand
gaccagccguguagaagaa

SEQ ID NO: 694016 - RNA, 19 nt, Homo sapiens
  misc_RNA (1)...(19): siRNA sense strand
gaagguggcccagcagaaa

SEQ ID NO: 694017 - RNA, 19 nt, Homo sapiens
  misc_RNA (1)...(19): siRNA sense strand
gaucaucagugcuggagau

SEQ ID NO: 694018 - RNA, 19 nt, Homo sapiens
  misc_RNA (1)...(19): siRNA sense strand
gacaaaggaugaggaugaa

SEQ ID NO: 694019 - RNA, 19 nt, Homo sapiens
  misc_RNA (1)...(19): siRNA sense strand
cuacaaccagugauucuua

SEQ ID NO: 694020 - RNA, 19 nt, Homo sapiens
  misc_RNA (1)...(19): siRNA sense strand
ugaccgggcuucagcaaga

SEQ ID NO: 694021 - RNA, 19 nt, Homo sapiens
  misc_RNA (1)...(19): siRNA sense strand
ugucagaaauggaggaaga

SEQ ID NO: 694022 - RNA, 19 nt, Homo sapiens
  misc_RNA (1)...(19): siRNA sense strand
aaagaccucugaccgauca

SEQ ID NO: 694023 - RNA, 19 nt, Homo sapiens
  misc_RNA (1)...(19): siRNA sense strand
gguguuaacagaacugaaa

SEQ ID NO: 694024 - RNA, 19 nt, Homo sapiens
  misc_RNA (1)...(19): siRNA sense strand
uagcagauauaaaguccaa

SEQ ID NO: 694025 - RNA, 19 nt, Homo sapiens
  misc_RNA (1)...(19): siRNA sense strand
ggaugaggaugaaacugau

SEQ ID NO: 694026 - RNA, 19 nt, Homo sapiens
  misc_RNA (1)...(19): siRNA sense strand
gaaauggaggaagaaauga

SEQ ID NO: 694027 - RNA, 19 nt, Homo sapiens
  misc_RNA (1)...(19): siRNA sense strand
caaagaaacguggcaugaa

SEQ ID NO: 694028 - RNA, 19 nt, Homo sapiens
  misc_RNA (1)...(19): siRNA sense strand
ugaagaagcagauuuggau

SEQ ID NO: 694029 - RNA, 19 nt, Homo sapiens
  misc_RNA (1)...(19): siRNA sense strand
uggaugagcaguccucuaa

SEQ ID NO: 694030 - RNA, 19 nt, Homo sapiens
  misc_RNA (1)...(19): siRNA sense strand
ucaaagaaacguggcauga

SEQ ID NO: 694031 - RNA, 19 nt, Homo sapiens
  misc_RNA (1)...(19): siRNA sense strand
agaaauggaggaagaaaug

SEQ ID NO: 694032 - RNA, 19 nt, Homo sapiens
  misc_RNA (1)...(19): siRNA sense strand
gcaucaauuucuggacaaa

SEQ ID NO: 694033 - RNA, 19 nt, Homo sapiens
  misc_RNA (1)...(19): siRNA sense strand
accagaggcugaaagauga

SEQ ID NO: 694034 - RNA, 19 nt, Homo sapiens
  misc_RNA (1)...(19): siRNA sense strand
gacagcaacagagauuaua

SEQ ID NO: 694035 - RNA, 19 nt, Homo sapiens
  misc_RNA (1)...(19): siRNA sense strand
ugaaacugauggcucugaa

SEQ ID NO: 694036 - RNA, 19 nt, Homo sapiens
  misc_RNA (1)...(19): siRNA sense strand
cagcaacagagauuauaaa

SEQ ID NO: 694037 - RNA, 19 nt, Homo sapiens
  misc_RNA (1)...(19): siRNA sense strand
cugaagaggucaaagaaac

SEQ ID NO: 694038 - RNA, 19 nt, Homo sapiens
  misc_RNA (1)...(19): siRNA sense strand
gaaaacaaaacuucaggaa

SEQ ID NO: 694039 - RNA, 19 nt, Homo sapiens
  misc_RNA (1)...(19): siRNA sense strand
caucagagucaucagcaaa

SEQ ID NO: 694040 - RNA, 19 nt, Homo sapiens
  misc_RNA (1)...(19): siRNA sense strand
aaacugauggcucugaaga

SEQ ID NO: 694041 - RNA, 19 nt, Homo sapiens
  misc_RNA (1)...(19): siRNA sense strand
agaagaagacagcaacaga

SEQ ID NO: 694042 - RNA, 19 nt, Homo sapiens
  misc_RNA (1)...(19): siRNA sense strand
agaaugaagaagcagauuu

SEQ ID NO: 694043 - RNA, 19 nt, Homo sapiens
  misc_RNA (1)...(19): siRNA sense strand
uaaaguccaagcuugagaa

SEQ ID NO: 694044 - RNA, 19 nt, Homo sapiens
  misc_RNA (1)...(19): siRNA sense strand
aguccaagcuugagaaggu

SEQ ID NO: 694045 - RNA, 19 nt, Homo sapiens
  misc_RNA (1)...(19): siRNA sense strand
gaggcacaggcaucaauuu

SEQ ID NO: 694046 - RNA, 19 nt, Homo sapiens
  misc_RNA (1)...(19): siRNA sense strand
aaaugagaaugaagaagca

SEQ ID NO: 694047 - RNA, 19 nt, Homo sapiens
  misc_RNA (1)...(19): siRNA sense strand
gaaucgggagguaguaauc

SEQ ID NO: 694048 - RNA, 19 nt, Homo sapiens
  misc_RNA (1)...(19): siRNA sense strand
caaaggaugaggaugaaac

SEQ ID NO: 694049 - RNA, 19 nt, Homo sapiens
  misc_RNA (1)...(19): siRNA sense strand
guaauccuacaaccaguga

SEQ ID NO: 694050 - RNA, 19 nt, Homo sapiens
  misc_RNA (1)...(19): siRNA sense strand
ggcaucaauuucuggacaa

SEQ ID NO: 694051 - RNA, 19 nt, Homo sapiens
  misc_RNA (1)...(19): siRNA sense strand
gcugaaagaugaaaauggu

SEQ ID NO: 694052 - RNA, 19 nt, Homo sapiens
  misc_RNA (1)...(19): siRNA sense strand
aaccagaggcugaaagaug

SEQ ID NO: 694053 - RNA, 19 nt, Homo sapiens
  misc_RNA (1)...(19): siRNA sense strand
ggaaucgggagguaguaau

SEQ ID NO: 694054 - RNA, 19 nt, Homo sapiens
  misc_RNA (1)...(19): siRNA sense strand
agacagcaacagagauuau

SEQ ID NO: 694055 - RNA, 19 nt, Homo sapiens
  misc_RNA (1)...(19): siRNA sense strand
gagaaugaagaagcagauu

SEQ ID NO: 694056 - RNA, 19 nt, Homo sapiens
  misc_RNA (1)...(19): siRNA sense strand
agagcuagcagauauaaag

SEQ ID NO: 694057 - RNA, 19 nt, Homo sapiens
  misc_RNA (1)...(19): siRNA sense strand
gaaaauggugcccucauca

SEQ ID NO: 694058 - RNA, 19 nt, Homo sapiens
  misc_RNA (1)...(19): siRNA sense strand
aagaagacagcaacagaga

SEQ ID NO: 694059 - RNA, 19 nt, Homo sapiens
  misc_RNA (1)...(19): siRNA sense strand
aaacguggcaugaaagacu

SEQ ID NO: 694060 - RNA, 19 nt, Homo sapiens
  misc_RNA (1)...(19): siRNA sense strand
aggaugaggaugaaacuga

SEQ ID NO: 694061 - RNA, 19 nt, Homo sapiens
  misc_RNA (1)...(19): siRNA sense strand
aagaagcagauuuggauga

SEQ ID NO: 694062 - RNA, 19 nt, Homo sapiens
  misc_RNA (1)...(19): siRNA sense strand
acagcaacagagauuauaa

SEQ ID NO: 694063 - RNA, 19 nt, Homo sapiens
  misc_RNA (1)...(19): siRNA sense strand
gagcuagcagauauaaagu

SEQ ID NO: 694064 - RNA, 19 nt, Homo sapiens
  misc_RNA (1)...(19): siRNA sense strand
gaagaggcacaggcaucaa

SEQ ID NO: 694065 - RNA, 19 nt, Homo sapiens
  misc_RNA (1)...(19): siRNA sense strand
cagaaauggaggaagaaau

SEQ ID NO: 694066 - RNA, 19 nt, Homo sapiens
  misc_RNA (1)...(19): siRNA sense strand
cagcaaacuguccaaguag

SEQ ID NO: 694067 - RNA, 19 nt, Homo sapiens
  misc_RNA (1)...(19): siRNA sense strand
agaagcagauuuggaugag

SEQ ID NO: 694068 - RNA, 19 nt, Homo sapiens
  misc_RNA (1)...(19): siRNA sense strand
gaagaggucaaagaaacgu

SEQ ID NO: 694069 - RNA, 19 nt, Homo sapiens
  misc_RNA (1)...(19): siRNA sense strand
agaaacguggcaugaaaga

SEQ ID NO: 694070 - RNA, 19 nt, Homo sapiens
  misc_RNA (1)...(19): siRNA sense strand
gaaacugauggcucugaag

SEQ ID NO: 694071 - RNA, 19 nt, Homo sapiens
  misc_RNA (1)...(19): siRNA sense strand
aaauggugcccucaucaga

SEQ ID NO: 694072 - RNA, 19 nt, Homo sapiens
  misc_RNA (1)...(19): siRNA sense strand
aaauggaggaagaaaugaa

SEQ ID NO: 694073 - RNA, 19 nt, Homo sapiens
  misc_RNA (1)...(19): siRNA sense strand
auauaaaguccaagcuuga

SEQ ID NO: 694074 - RNA, 19 nt, Homo sapiens
  misc_RNA (1)...(19): siRNA sense strand
ucaggaagcccagcuagag

SEQ ID NO: 694075 - RNA, 19 nt, Homo sapiens
  misc_RNA (1)...(19): siRNA sense strand
acaaccagaggcugaaaga

SEQ ID NO: 694076 - RNA, 19 nt, Homo sapiens
  misc_RNA (1)...(19): siRNA sense strand
ugaccagccguguagaaga

SEQ ID NO: 694077 - RNA, 19 nt, Homo sapiens
  misc_RNA (1)...(19): siRNA sense strand
ucagaaauggaggaagaaa

SEQ ID NO: 694078 - RNA, 19 nt, Homo sapiens
  misc_RNA (1)...(19): siRNA sense strand
gcccagcagaaacaagaaa

SEQ ID NO: 694079 - RNA, 19 nt, Homo sapiens
  misc_RNA (1)...(19): siRNA sense strand
ggacaaaggaugaggauga

SEQ ID NO: 694080 - RNA, 19 nt, Homo sapiens
  misc_RNA (1)...(19): siRNA sense strand
aaagaaacguggcaugaaa

SEQ ID NO: 694081 - RNA, 19 nt, Homo sapiens
  misc_RNA (1)...(19): siRNA sense strand
gaagacagcaacagagauu

SEQ ID NO: 694082 - RNA, 19 nt, Homo sapiens
  misc_RNA (1)...(19): siRNA sense strand
gaugagcaguccucuaaga

SEQ ID NO: 694083 - RNA, 19 nt, Homo sapiens
  misc_RNA (1)...(19): siRNA sense strand
gcacaggcaucaauuucug

SEQ ID NO: 694084 - RNA, 19 nt, Homo sapiens
  misc_RNA (1)...(19): siRNA sense strand
gaaugaagaagcagauuug

SEQ ID NO: 694085 - RNA, 19 nt, Homo sapiens
  misc_RNA (1)...(19): siRNA sense strand
gaccagccguguagaagaa

SEQ ID NO: 694086 - RNA, 19 nt, Homo sapiens
  misc_RNA (1)...(19): siRNA sense strand
gaagguggcccagcagaaa

SEQ ID NO: 694087 - RNA, 19 nt, Homo sapiens
  misc_RNA (1)...(19): siRNA sense strand
gaucaucagugcuggagau

SEQ ID NO: 694088 - RNA, 19 nt, Homo sapiens
  misc_RNA (1)...(19): siRNA sense strand
gacaaaggaugaggaugaa

SEQ ID NO: 694089 - RNA, 19 nt, Homo sapiens
  misc_RNA (1)...(19): siRNA sense strand
cuacaaccagugauucuua

SEQ ID NO: 694090 - RNA, 19 nt, Homo sapiens
  misc_RNA (1)...(19): siRNA sense strand
ugaccgggcuucagcaaga

SEQ ID NO: 694091 - RNA, 19 nt, Homo sapiens
  misc_RNA (1)...(19): siRNA sense strand
ugucagaaauggaggaaga

SEQ ID NO: 694092 - RNA, 19 nt, Homo sapiens
  misc_RNA (1)...(19): siRNA sense strand
aaagaccucugaccgauca

SEQ ID NO: 694093 - RNA, 19 nt, Homo sapiens
  misc_RNA (1)...(19): siRNA sense strand
uagcagauauaaaguccaa

SEQ ID NO: 694094 - RNA, 19 nt, Homo sapiens
  misc_RNA (1)...(19): siRNA sense strand
ggaugaggaugaaacugau

SEQ ID NO: 694095 - RNA, 19 nt, Homo sapiens
  misc_RNA (1)...(19): siRNA sense strand
gaaauggaggaagaaauga

SEQ ID NO: 694096 - RNA, 19 nt, Homo sapiens
  misc_RNA (1)...(19): siRNA sense strand
caaagaaacguggcaugaa

SEQ ID NO: 694097 - RNA, 19 nt, Homo sapiens
  misc_RNA (1)...(19): siRNA sense strand
ugaagaagcagauuuggau

SEQ ID NO: 694098 - RNA, 19 nt, Homo sapiens
  misc_RNA (1)...(19): siRNA sense strand
uggaugagcaguccucuaa

SEQ ID NO: 694099 - RNA, 19 nt, Homo sapiens
  misc_RNA (1)...(19): siRNA sense strand
ucaaagaaacguggcauga

SEQ ID NO: 694100 - RNA, 19 nt, Homo sapiens
  misc_RNA (1)...(19): siRNA sense strand
agaaauggaggaagaaaug

SEQ ID NO: 694101 - RNA, 19 nt, Homo sapiens
  misc_RNA (1)...(19): siRNA sense strand
gcaucaauuucuggacaaa

SEQ ID NO: 694102 - RNA, 19 nt, Homo sapiens
  misc_RNA (1)...(19): siRNA sense strand
gacagcaacagagauuaua

SEQ ID NO: 694103 - RNA, 19 nt, Homo sapiens
  misc_RNA (1)...(19): siRNA sense strand
ugaaacugauggcucugaa

SEQ ID NO: 694104 - RNA, 19 nt, Homo sapiens
  misc_RNA (1)...(19): siRNA sense strand
cagcaacagagauuauaaa

SEQ ID NO: 694105 - RNA, 19 nt, Homo sapiens
  misc_RNA (1)...(19): siRNA sense strand
cugaagaggucaaagaaac

SEQ ID NO: 694106 - RNA, 19 nt, Homo sapiens
  misc_RNA (1)...(19): siRNA sense strand
gaaaacaaaacuucaggaa

SEQ ID NO: 694107 - RNA, 19 nt, Homo sapiens
  misc_RNA (1)...(19): siRNA sense strand
aaacugauggcucugaaga

SEQ ID NO: 694108 - RNA, 19 nt, Homo sapiens
  misc_RNA (1)...(19): siRNA sense strand
agaagaagacagcaacaga

SEQ ID NO: 694109 - RNA, 19 nt, Homo sapiens
  misc_RNA (1)...(19): siRNA sense strand
agaaugaagaagcagauuu

SEQ ID NO: 694110 - RNA, 19 nt, Homo sapiens
  misc_RNA (1)...(19): siRNA sense strand
uaaaguccaagcuugagaa

SEQ ID NO: 694111 - RNA, 19 nt, Homo sapiens
  misc_RNA (1)...(19): siRNA sense strand
aguccaagcuugagaaggu

SEQ ID NO: 694112 - RNA, 19 nt, Homo sapiens
  misc_RNA (1)...(19): siRNA sense strand
gaggcacaggcaucaauuu

SEQ ID NO: 694113 - RNA, 19 nt, Homo sapiens
  misc_RNA (1)...(19): siRNA sense strand
aaaugagaaugaagaagca

SEQ ID NO: 694114 - RNA, 19 nt, Homo sapiens
  misc_RNA (1)...(19): siRNA sense strand
gaaucgggagguaguaauc

SEQ ID NO: 694115 - RNA, 19 nt, Homo sapiens
  misc_RNA (1)...(19): siRNA sense strand
caaaggaugaggaugaaac

SEQ ID NO: 694116 - RNA, 19 nt, Homo sapiens
  misc_RNA (1)...(19): siRNA sense strand
guaauccuacaaccaguga

SEQ ID NO: 694117 - RNA, 19 nt, Homo sapiens
  misc_RNA (1)...(19): siRNA sense strand
ggcaucaauuucuggacaa

SEQ ID NO: 694118 - RNA, 19 nt, Homo sapiens
  misc_RNA (1)...(19): siRNA sense strand
ggaaucgggagguaguaau

SEQ ID NO: 694119 - RNA, 19 nt, Homo sapiens
  misc_RNA (1)...(19): siRNA sense strand
gagaaugaagaagcagauu

SEQ ID NO: 694120 - RNA, 19 nt, Homo sapiens
  misc_RNA (1)...(19): siRNA sense strand
agacagcaacagagauuau

SEQ ID NO: 694121 - RNA, 19 nt, Homo sapiens
  misc_RNA (1)...(19): siRNA sense strand
agagcuagcagauauaaag

SEQ ID NO: 694122 - RNA, 19 nt, Homo sapiens
  misc_RNA (1)...(19): siRNA sense strand
aagaagacagcaacagaga

SEQ ID NO: 694123 - RNA, 19 nt, Homo sapiens
  misc_RNA (1)...(19): siRNA sense strand
aaacguggcaugaaagacu

SEQ ID NO: 694124 - RNA, 19 nt, Homo sapiens
  misc_RNA (1)...(19): siRNA sense strand
aagaagcagauuuggauga

SEQ ID NO: 694125 - RNA, 19 nt, Homo sapiens
  misc_RNA (1)...(19): siRNA sense strand
acagcaacagagauuauaa

SEQ ID NO: 694126 - RNA, 19 nt, Homo sapiens
  misc_RNA (1)...(19): siRNA sense strand
aggaugaggaugaaacuga

SEQ ID NO: 694127 - RNA, 19 nt, Homo sapiens
  misc_RNA (1)...(19): siRNA sense strand
gagcuagcagauauaaagu

SEQ ID NO: 694128 - RNA, 19 nt, Homo sapiens
  misc_RNA (1)...(19): siRNA sense strand
gaagaggcacaggcaucaa

SEQ ID NO: 694129 - RNA, 19 nt, Homo sapiens
  misc_RNA (1)...(19): siRNA sense strand
cagaaauggaggaagaaau

SEQ ID NO: 694130 - RNA, 19 nt, Homo sapiens
  misc_RNA (1)...(19): siRNA sense strand
gaagaggucaaagaaacgu

SEQ ID NO: 694131 - RNA, 19 nt, Homo sapiens
  misc_RNA (1)...(19): siRNA sense strand
agaagcagauuuggaugag

SEQ ID NO: 694132 - RNA, 19 nt, Homo sapiens
  misc_RNA (1)...(19): siRNA sense strand
agaaacguggcaugaaaga

SEQ ID NO: 694133 - RNA, 19 nt, Homo sapiens
  misc_RNA (1)...(19): siRNA sense strand
gaaacugauggcucugaag

SEQ ID NO: 694134 - RNA, 19 nt, Homo sapiens
  misc_RNA (1)...(19): siRNA sense strand
aaauggaggaagaaaugaa

SEQ ID NO: 694135 - RNA, 19 nt, Homo sapiens
  misc_RNA (1)...(19): siRNA sense strand
auauaaaguccaagcuuga

SEQ ID NO: 694136 - RNA, 19 nt, Homo sapiens
  misc_RNA (1)...(19): siRNA sense strand
ucaggaagcccagcuagag

SEQ ID NO: 694137 - RNA, 19 nt, Homo sapiens
  misc_RNA (1)...(19): siRNA sense strand
ugaccagccguguagaaga

SEQ ID NO: 694138 - RNA, 19 nt, Homo sapiens
  misc_RNA (1)...(19): siRNA sense strand
ucagaaauggaggaagaaa

SEQ ID NO: 694139 - RNA, 19 nt, Homo sapiens
  misc_RNA (1)...(19): siRNA sense strand
gcccagcagaaacaagaaa

SEQ ID NO: 694140 - RNA, 19 nt, Homo sapiens
  misc_RNA (1)...(19): siRNA sense strand
ggacaaaggaugaggauga

SEQ ID NO: 694141 - RNA, 19 nt, Homo sapiens
  misc_RNA (1)...(19): siRNA sense strand
aaagaaacguggcaugaaa

SEQ ID NO: 694142 - RNA, 19 nt, Homo sapiens
  misc_RNA (1)...(19): siRNA sense strand
gcaggagucuggaugaaga

SEQ ID NO: 694143 - RNA, 19 nt, Homo sapiens
  misc_RNA (1)...(19): siRNA sense strand
gaagacagcaacagagauu

SEQ ID NO: 694144 - RNA, 19 nt, Homo sapiens
  misc_RNA (1)...(19): siRNA sense strand
gaugagcaguccucuaaga

SEQ ID NO: 694145 - RNA, 19 nt, Homo sapiens
  misc_RNA (1)...(19): siRNA sense strand
gcacaggcaucaauuucug

SEQ ID NO: 694146 - RNA, 19 nt, Homo sapiens
  misc_RNA (1)...(19): siRNA sense strand
gaaugaagaagcagauuug

SEQ ID NO: 694147 - RNA, 19 nt, Homo sapiens
  misc_RNA (1)...(19): siRNA sense strand
gaccagccguguagaagaa

SEQ ID NO: 694148 - RNA, 19 nt, Homo sapiens
  misc_RNA (1)...(19): siRNA sense strand
caccugcuauggacaaaua

SEQ ID NO: 694149 - RNA, 19 nt, Homo sapiens
  misc_RNA (1)...(19): siRNA sense strand
guucagagacuaccacaaa

SEQ ID NO: 694150 - RNA, 19 nt, Homo sapiens
  misc_RNA (1)...(19): siRNA sense strand
gaagguggcccagcagaaa

SEQ ID NO: 694151 - RNA, 19 nt, Homo sapiens
  misc_RNA (1)...(19): siRNA sense strand
gaucaucagugcuggagau

SEQ ID NO: 694152 - RNA, 19 nt, Homo sapiens
  misc_RNA (1)...(19): siRNA sense strand
gacaaaggaugaggaugaa

SEQ ID NO: 694153 - RNA, 19 nt, Homo sapiens
  misc_RNA (1)...(19): siRNA sense strand
cuacaaccagugauucuua

SEQ ID NO: 694154 - RNA, 19 nt, Homo sapiens
  misc_RNA (1)...(19): siRNA sense strand
ugaccgggcuucagcaaga

SEQ ID NO: 694155 - RNA, 19 nt, Homo sapiens
  misc_RNA (1)...(19): siRNA sense strand
ugucagaaauggaggaaga

SEQ ID NO: 694156 - RNA, 19 nt, Homo sapiens
  misc_RNA (1)...(19): siRNA sense strand
acacgaaggucuacucaag

SEQ ID NO: 694157 - RNA, 19 nt, Homo sapiens
  misc_RNA (1)...(19): siRNA sense strand
gagacuaccacaaacacua

SEQ ID NO: 694158 - RNA, 19 nt, Homo sapiens
  misc_RNA (1)...(19): siRNA sense strand
aaagaccucugaccgauca

SEQ ID NO: 694159 - RNA, 19 nt, Homo sapiens
  misc_RNA (1)...(19): siRNA sense strand
gaaagcacgcuccagacaa

SEQ ID NO: 694160 - RNA, 19 nt, Homo sapiens
  misc_RNA (1)...(19): siRNA sense strand
uagcagauauaaaguccaa

SEQ ID NO: 694161 - RNA, 19 nt, Homo sapiens
  misc_RNA (1)...(19): siRNA sense strand
ugaggaagcagagucuuua

SEQ ID NO: 694162 - RNA, 19 nt, Homo sapiens
  misc_RNA (1)...(19): siRNA sense strand
ggaaagcacgcuccagaca

SEQ ID NO: 694163 - RNA, 19 nt, Homo sapiens
  misc_RNA (1)...(19): siRNA sense strand
ggaugaggaugaaacugau

SEQ ID NO: 694164 - RNA, 19 nt, Homo sapiens
  misc_RNA (1)...(19): siRNA sense strand
gaaauggaggaagaaauga

SEQ ID NO: 694165 - RNA, 19 nt, Homo sapiens
  misc_RNA (1)...(19): siRNA sense strand
ugaagaagcagauuuggau

SEQ ID NO: 694166 - RNA, 19 nt, Homo sapiens
  misc_RNA (1)...(19): siRNA sense strand
caaagaaacguggcaugaa

SEQ ID NO: 694167 - RNA, 19 nt, Homo sapiens
  misc_RNA (1)...(19): siRNA sense strand
uggaugagcaguccucuaa

SEQ ID NO: 694168 - RNA, 19 nt, Homo sapiens
  misc_RNA (1)...(19): siRNA sense strand
ggagcagccucgugagaag

SEQ ID NO: 694169 - RNA, 19 nt, Homo sapiens
  misc_RNA (1)...(19): siRNA sense strand
agaaauggaggaagaaaug

SEQ ID NO: 694170 - RNA, 19 nt, Homo sapiens
  misc_RNA (1)...(19): siRNA sense strand
ucaaagaaacguggcauga

SEQ ID NO: 694171 - RNA, 19 nt, Homo sapiens
  misc_RNA (1)...(19): siRNA sense strand
ucaagacccucacucuaca

SEQ ID NO: 694172 - RNA, 19 nt, Homo sapiens
  misc_RNA (1)...(19): siRNA sense strand
gcaucaauuucuggacaaa

SEQ ID NO: 694173 - RNA, 19 nt, Homo sapiens
  misc_RNA (1)...(19): siRNA sense strand
ggaugaagagccuaucugu

SEQ ID NO: 694174 - RNA, 19 nt, Homo sapiens
  misc_RNA (1)...(19): siRNA sense strand
gacagcaacagagauuaua

SEQ ID NO: 694175 - RNA, 19 nt, Homo sapiens
  misc_RNA (1)...(19): siRNA sense strand
gggcaggagucuggaugaa

SEQ ID NO: 694176 - RNA, 19 nt, Homo sapiens
  misc_RNA (1)...(19): siRNA sense strand
cagcaacagagauuauaaa

SEQ ID NO: 694177 - RNA, 19 nt, Homo sapiens
  misc_RNA (1)...(19): siRNA sense strand
ugaaacugauggcucugaa

SEQ ID NO: 694178 - RNA, 19 nt, Homo sapiens
  misc_RNA (1)...(19): siRNA sense strand
cacuacaacugcaaaggaa

SEQ ID NO: 694179 - RNA, 19 nt, Homo sapiens
  misc_RNA (1)...(19): siRNA sense strand
cugaagaggucaaagaaac

SEQ ID NO: 694180 - RNA, 19 nt, Homo sapiens
  misc_RNA (1)...(19): siRNA sense strand
aaagcacgcuccagacaag

SEQ ID NO: 694181 - RNA, 19 nt, Homo sapiens
  misc_RNA (1)...(19): siRNA sense strand
gaaaacaaaacuucaggaa

SEQ ID NO: 694182 - RNA, 19 nt, Homo sapiens
  misc_RNA (1)...(19): siRNA sense strand
aaacugauggcucugaaga

SEQ ID NO: 694183 - RNA, 19 nt, Homo sapiens
  misc_RNA (1)...(19): siRNA sense strand
cagacaagcucggcagaca

SEQ ID NO: 694184 - RNA, 19 nt, Homo sapiens
  misc_RNA (1)...(19): siRNA sense strand
agaaugaagaagcagauuu

SEQ ID NO: 694185 - RNA, 19 nt, Homo sapiens
  misc_RNA (1)...(19): siRNA sense strand
agaagaagacagcaacaga

SEQ ID NO: 694186 - RNA, 19 nt, Homo sapiens
  misc_RNA (1)...(19): siRNA sense strand
uaaaguccaagcuugagaa

SEQ ID NO: 694187 - RNA, 19 nt, Homo sapiens
  misc_RNA (1)...(19): siRNA sense strand
augaagagccuaucuguca

SEQ ID NO: 694188 - RNA, 19 nt, Homo sapiens
  misc_RNA (1)...(19): siRNA sense strand
aguccaagcuugagaaggu

SEQ ID NO: 694189 - RNA, 19 nt, Homo sapiens
  misc_RNA (1)...(19): siRNA sense strand
gaggcacaggcaucaauuu

SEQ ID NO: 694190 - RNA, 19 nt, Homo sapiens
  misc_RNA (1)...(19): siRNA sense strand
gaagagccuaucugucauc

SEQ ID NO: 694191 - RNA, 19 nt, Homo sapiens
  misc_RNA (1)...(19): siRNA sense strand
aaaugagaaugaagaagca

SEQ ID NO: 694192 - RNA, 19 nt, Homo sapiens
  misc_RNA (1)...(19): siRNA sense strand
caacugcaaaggaaaugga

SEQ ID NO: 694193 - RNA, 19 nt, Homo sapiens
  misc_RNA (1)...(19): siRNA sense strand
cgucaagacccucacucua

SEQ ID NO: 694194 - RNA, 19 nt, Homo sapiens
  misc_RNA (1)...(19): siRNA sense strand
guaauccuacaaccaguga

SEQ ID NO: 694195 - RNA, 19 nt, Homo sapiens
  misc_RNA (1)...(19): siRNA sense strand
gaaucgggagguaguaauc

SEQ ID NO: 694196 - RNA, 19 nt, Homo sapiens
  misc_RNA (1)...(19): siRNA sense strand
caaaggaugaggaugaaac

SEQ ID NO: 694197 - RNA, 19 nt, Homo sapiens
  misc_RNA (1)...(19): siRNA sense strand
caaacacuacaacugcaaa

SEQ ID NO: 694198 - RNA, 19 nt, Homo sapiens
  misc_RNA (1)...(19): siRNA sense strand
ggcaucaauuucuggacaa

SEQ ID NO: 694199 - RNA, 19 nt, Homo sapiens
  misc_RNA (1)...(19): siRNA sense strand
ggaaucgggagguaguaau

SEQ ID NO: 694200 - RNA, 19 nt, Homo sapiens
  misc_RNA (1)...(19): siRNA sense strand
gagaaugaagaagcagauu

SEQ ID NO: 694201 - RNA, 19 nt, Homo sapiens
  misc_RNA (1)...(19): siRNA sense strand
agacagcaacagagauuau

SEQ ID NO: 694202 - RNA, 19 nt, Homo sapiens
  misc_RNA (1)...(19): siRNA sense strand
agcagagucuuuacggaaa

SEQ ID NO: 694203 - RNA, 19 nt, Homo sapiens
  misc_RNA (1)...(19): siRNA sense strand
gucaagacccucacucuac

SEQ ID NO: 694204 - RNA, 19 nt, Homo sapiens
  misc_RNA (1)...(19): siRNA sense strand
agagcuagcagauauaaag

SEQ ID NO: 694205 - RNA, 19 nt, Homo sapiens
  misc_RNA (1)...(19): siRNA sense strand
ugaagagccuaucugucau

SEQ ID NO: 694206 - RNA, 19 nt, Homo sapiens
  misc_RNA (1)...(19): siRNA sense strand
acacuacaacugcaaagga

SEQ ID NO: 694207 - RNA, 19 nt, Homo sapiens
  misc_RNA (1)...(19): siRNA sense strand
aagaagacagcaacagaga

SEQ ID NO: 694208 - RNA, 19 nt, Homo sapiens
  misc_RNA (1)...(19): siRNA sense strand
aagaagcagauuuggauga

SEQ ID NO: 694209 - RNA, 19 nt, Homo sapiens
  misc_RNA (1)...(19): siRNA sense strand
acagcaacagagauuauaa

SEQ ID NO: 694210 - RNA, 19 nt, Homo sapiens
  misc_RNA (1)...(19): siRNA sense strand
aaacguggcaugaaagacu

SEQ ID NO: 694211 - RNA, 19 nt, Homo sapiens
  misc_RNA (1)...(19): siRNA sense strand
aggaugaggaugaaacuga

SEQ ID NO: 694212 - RNA, 19 nt, Homo sapiens
  misc_RNA (1)...(19): siRNA sense strand
cuacaacugcaaaggaaau

SEQ ID NO: 694213 - RNA, 19 nt, Homo sapiens
  misc_RNA (1)...(19): siRNA sense strand
gagcuagcagauauaaagu

SEQ ID NO: 694214 - RNA, 19 nt, Homo sapiens
  misc_RNA (1)...(19): siRNA sense strand
gaagaggcacaggcaucaa

SEQ ID NO: 694215 - RNA, 19 nt, Homo sapiens
  misc_RNA (1)...(19): siRNA sense strand
gaagcccacagacacugaa

SEQ ID NO: 694216 - RNA, 19 nt, Homo sapiens
  misc_RNA (1)...(19): siRNA sense strand
cagaaauggaggaagaaau

SEQ ID NO: 694217 - RNA, 19 nt, Homo sapiens
  misc_RNA (1)...(19): siRNA sense strand
acgaaggucuacucaaggu

SEQ ID NO: 694218 - RNA, 19 nt, Homo sapiens
  misc_RNA (1)...(19): siRNA sense strand
agaaacguggcaugaaaga

SEQ ID NO: 694219 - RNA, 19 nt, Homo sapiens
  misc_RNA (1)...(19): siRNA sense strand
gaagaggucaaagaaacgu

SEQ ID NO: 694220 - RNA, 19 nt, Homo sapiens
  misc_RNA (1)...(19): siRNA sense strand
agaagcagauuuggaugag

SEQ ID NO: 694221 - RNA, 19 nt, Homo sapiens
  misc_RNA (1)...(19): siRNA sense strand
ucagagacuaccacaaaca

SEQ ID NO: 694222 - RNA, 19 nt, Homo sapiens
  misc_RNA (1)...(19): siRNA sense strand
aaauggaggaagaaaugaa

SEQ ID NO: 694223 - RNA, 19 nt, Homo sapiens
  misc_RNA (1)...(19): siRNA sense strand
auauaaaguccaagcuuga

SEQ ID NO: 694224 - RNA, 19 nt, Homo sapiens
  misc_RNA (1)...(19): siRNA sense strand
gcaguuccagcaacagaag

SEQ ID NO: 694225 - RNA, 19 nt, Homo sapiens
  misc_RNA (1)...(19): siRNA sense strand
gaaacugauggcucugaag

SEQ ID NO: 694226 - RNA, 19 nt, Homo sapiens
  misc_RNA (1)...(19): siRNA sense strand
caccaguucccaccugcua

SEQ ID NO: 694227 - RNA, 19 nt, Homo sapiens
  misc_RNA (1)...(19): siRNA sense strand
cagcaguuccagcaacaga

SEQ ID NO: 694228 - RNA, 19 nt, Homo sapiens
  misc_RNA (1)...(19): siRNA sense strand
ucaggaagcccagcuagag

SEQ ID NO: 694229 - RNA, 19 nt, Homo sapiens
  misc_RNA (1)...(19): siRNA sense strand
gcaucuccuucuacgucaa

SEQ ID NO: 694230 - RNA, 19 nt, Homo sapiens
  misc_RNA (1)...(19): siRNA sense strand
ucagaaauggaggaagaaa

SEQ ID NO: 694231 - RNA, 19 nt, Homo sapiens
  misc_RNA (1)...(19): siRNA sense strand
ugaccagccguguagaaga

SEQ ID NO: 694232 - RNA, 19 nt, Homo sapiens
  misc_RNA (1)...(19): siRNA sense strand
caagcucggcagacacgaa

SEQ ID NO: 694233 - RNA, 19 nt, Homo sapiens
  misc_RNA (1)...(19): siRNA sense strand
gcaaaggaaauggacaaaa

SEQ ID NO: 694234 - RNA, 19 nt, Homo sapiens
  misc_RNA (1)...(19): siRNA sense strand
gcccagcagaaacaagaaa

SEQ ID NO: 694235 - RNA, 19 nt, Homo sapiens
  misc_RNA (1)...(19): siRNA sense strand
ugacuccuguacgggauga

SEQ ID NO: 694236 - RNA, 19 nt, Homo sapiens
  misc_RNA (1)...(19): siRNA sense strand
ggacaaaggaugaggauga

SEQ ID NO: 694237 - RNA, 19 nt, Homo sapiens
  misc_RNA (1)...(19): siRNA sense strand
aaagaaacguggcaugaaa

SEQ ID NO: 694238 - RNA, 19 nt, Homo sapiens
  misc_RNA (1)...(19): siRNA sense strand
gcaggagucuggaugaaga

SEQ ID NO: 694239 - RNA, 19 nt, Homo sapiens
  misc_RNA (1)...(19): siRNA sense strand
ucagcaaacuguccaagua

SEQ ID NO: 694240 - RNA, 19 nt, Homo sapiens
  misc_RNA (1)...(19): siRNA sense strand
gaagacagcaacagagauu

SEQ ID NO: 694241 - RNA, 19 nt, Homo sapiens
  misc_RNA (1)...(19): siRNA sense strand
gaugagcaguccucuaaga

SEQ ID NO: 694242 - RNA, 19 nt, Homo sapiens
  misc_RNA (1)...(19): siRNA sense strand
gcacaggcaucaauuucug

SEQ ID NO: 694243 - RNA, 19 nt, Homo sapiens
  misc_RNA (1)...(19): siRNA sense strand
gaaugaagaagcagauuug

SEQ ID NO: 694244 - RNA, 19 nt, Homo sapiens
  misc_RNA (1)...(19): siRNA sense strand
gaccagccguguagaagaa

SEQ ID NO: 694245 - RNA, 19 nt, Homo sapiens
  misc_RNA (1)...(19): siRNA sense strand
caccugcuauggacaaaua

SEQ ID NO: 694246 - RNA, 19 nt, Homo sapiens
  misc_RNA (1)...(19): siRNA sense strand
guucagagacuaccacaaa

SEQ ID NO: 694247 - RNA, 19 nt, Homo sapiens
  misc_RNA (1)...(19): siRNA sense strand
gaagguggcccagcagaaa

SEQ ID NO: 694248 - RNA, 19 nt, Homo sapiens
  misc_RNA (1)...(19): siRNA sense strand
gaucaucagugcuggagau

SEQ ID NO: 694249 - RNA, 19 nt, Homo sapiens
  misc_RNA (1)...(19): siRNA sense strand
gacaaaggaugaggaugaa

SEQ ID NO: 694250 - RNA, 19 nt, Homo sapiens
  misc_RNA (1)...(19): siRNA sense strand
cuacaaccagugauucuua

SEQ ID NO: 694251 - RNA, 19 nt, Homo sapiens
  misc_RNA (1)...(19): siRNA sense strand
ugaccgggcuucagcaaga

SEQ ID NO: 694252 - RNA, 19 nt, Homo sapiens
  misc_RNA (1)...(19): siRNA sense strand
ugucagaaauggaggaaga

SEQ ID NO: 694253 - RNA, 19 nt, Homo sapiens
  misc_RNA (1)...(19): siRNA sense strand
acacgaaggucuacucaag

SEQ ID NO: 694254 - RNA, 19 nt, Homo sapiens
  misc_RNA (1)...(19): siRNA sense strand
gagacuaccacaaacacua

SEQ ID NO: 694255 - RNA, 19 nt, Homo sapiens
  misc_RNA (1)...(19): siRNA sense strand
gguguuaacagaacugaaa

SEQ ID NO: 694256 - RNA, 19 nt, Homo sapiens
  misc_RNA (1)...(19): siRNA sense strand
aaagaccucugaccgauca

SEQ ID NO: 694257 - RNA, 19 nt, Homo sapiens
  misc_RNA (1)...(19): siRNA sense strand
gaaagcacgcuccagacaa

SEQ ID NO: 694258 - RNA, 19 nt, Homo sapiens
  misc_RNA (1)...(19): siRNA sense strand
uagcagauauaaaguccaa

SEQ ID NO: 694259 - RNA, 19 nt, Homo sapiens
  misc_RNA (1)...(19): siRNA sense strand
ugaggaagcagagucuuua

SEQ ID NO: 694260 - RNA, 19 nt, Homo sapiens
  misc_RNA (1)...(19): siRNA sense strand
ggaaagcacgcuccagaca

SEQ ID NO: 694261 - RNA, 19 nt, Homo sapiens
  misc_RNA (1)...(19): siRNA sense strand
ggaugaggaugaaacugau

SEQ ID NO: 694262 - RNA, 19 nt, Homo sapiens
  misc_RNA (1)...(19): siRNA sense strand
gaaauggaggaagaaauga

SEQ ID NO: 694263 - RNA, 19 nt, Homo sapiens
  misc_RNA (1)...(19): siRNA sense strand
ugaagaagcagauuuggau

SEQ ID NO: 694264 - RNA, 19 nt, Homo sapiens
  misc_RNA (1)...(19): siRNA sense strand
caaagaaacguggcaugaa

SEQ ID NO: 694265 - RNA, 19 nt, Homo sapiens
  misc_RNA (1)...(19): siRNA sense strand
uggaugagcaguccucuaa

SEQ ID NO: 694266 - RNA, 19 nt, Homo sapiens
  misc_RNA (1)...(19): siRNA sense strand
ggagcagccucgugagaag

SEQ ID NO: 694267 - RNA, 19 nt, Homo sapiens
  misc_RNA (1)...(19): siRNA sense strand
agaaauggaggaagaaaug

SEQ ID NO: 694268 - RNA, 19 nt, Homo sapiens
  misc_RNA (1)...(19): siRNA sense strand
ucaaagaaacguggcauga

SEQ ID NO: 694269 - RNA, 19 nt, Homo sapiens
  misc_RNA (1)...(19): siRNA sense strand
ucaagacccucacucuaca

SEQ ID NO: 694270 - RNA, 19 nt, Homo sapiens
  misc_RNA (1)...(19): siRNA sense strand
gcaucaauuucuggacaaa

SEQ ID NO: 694271 - RNA, 19 nt, Homo sapiens
  misc_RNA (1)...(19): siRNA sense strand
accagaggcugaaagauga

SEQ ID NO: 694272 - RNA, 19 nt, Homo sapiens
  misc_RNA (1)...(19): siRNA sense strand
ggaugaagagccuaucugu

SEQ ID NO: 694273 - RNA, 19 nt, Homo sapiens
  misc_RNA (1)...(19): siRNA sense strand
gacagcaacagagauuaua

SEQ ID NO: 694274 - RNA, 19 nt, Homo sapiens
  misc_RNA (1)...(19): siRNA sense strand
gggcaggagucuggaugaa

SEQ ID NO: 694275 - RNA, 19 nt, Homo sapiens
  misc_RNA (1)...(19): siRNA sense strand
cagcaacagagauuauaaa

SEQ ID NO: 694276 - RNA, 19 nt, Homo sapiens
  misc_RNA (1)...(19): siRNA sense strand
ugaaacugauggcucugaa

SEQ ID NO: 694277 - RNA, 19 nt, Homo sapiens
  misc_RNA (1)...(19): siRNA sense strand
cacuacaacugcaaaggaa

SEQ ID NO: 694278 - RNA, 19 nt, Homo sapiens
  misc_RNA (1)...(19): siRNA sense strand
cugaagaggucaaagaaac

SEQ ID NO: 694279 - RNA, 19 nt, Homo sapiens
  misc_RNA (1)...(19): siRNA sense strand
aaagcacgcuccagacaag

SEQ ID NO: 694280 - RNA, 19 nt, Homo sapiens
  misc_RNA (1)...(19): siRNA sense strand
gaaaacaaaacuucaggaa

SEQ ID NO: 694281 - RNA, 19 nt, Homo sapiens
  misc_RNA (1)...(19): siRNA sense strand
caucagagucaucagcaaa

SEQ ID NO: 694282 - RNA, 19 nt, Homo sapiens
  misc_RNA (1)...(19): siRNA sense strand
cagacaagcucggcagaca

SEQ ID NO: 694283 - RNA, 19 nt, Homo sapiens
  misc_RNA (1)...(19): siRNA sense strand
aaacugauggcucugaaga

SEQ ID NO: 694284 - RNA, 19 nt, Homo sapiens
  misc_RNA (1)...(19): siRNA sense strand
agaaugaagaagcagauuu

SEQ ID NO: 694285 - RNA, 19 nt, Homo sapiens
  misc_RNA (1)...(19): siRNA sense strand
agaagaagacagcaacaga

SEQ ID NO: 694286 - RNA, 19 nt, Homo sapiens
  misc_RNA (1)...(19): siRNA sense strand
uaaaguccaagcuugagaa

SEQ ID NO: 694287 - RNA, 19 nt, Homo sapiens
  misc_RNA (1)...(19): siRNA sense strand
augaagagccuaucuguca

SEQ ID NO: 694288 - RNA, 19 nt, Homo sapiens
  misc_RNA (1)...(19): siRNA sense strand
aguccaagcuugagaaggu

SEQ ID NO: 694289 - RNA, 19 nt, Homo sapiens
  misc_RNA (1)...(19): siRNA sense strand
gaggcacaggcaucaauuu

SEQ ID NO: 694290 - RNA, 19 nt, Homo sapiens
  misc_RNA (1)...(19): siRNA sense strand
gaagagccuaucugucauc

SEQ ID NO: 694291 - RNA, 19 nt, Homo sapiens
  misc_RNA (1)...(19): siRNA sense strand
aaaugagaaugaagaagca

SEQ ID NO: 694292 - RNA, 19 nt, Homo sapiens
  misc_RNA (1)...(19): siRNA sense strand
caacugcaaaggaaaugga

SEQ ID NO: 694293 - RNA, 19 nt, Homo sapiens
  misc_RNA (1)...(19): siRNA sense strand
cgucaagacccucacucua

SEQ ID NO: 694294 - RNA, 19 nt, Homo sapiens
  misc_RNA (1)...(19): siRNA sense strand
guaauccuacaaccaguga

SEQ ID NO: 694295 - RNA, 19 nt, Homo sapiens
  misc_RNA (1)...(19): siRNA sense strand
gaaucgggagguaguaauc

SEQ ID NO: 694296 - RNA, 19 nt, Homo sapiens
  misc_RNA (1)...(19): siRNA sense strand
caaaggaugaggaugaaac

SEQ ID NO: 694297 - RNA, 19 nt, Homo sapiens
  misc_RNA (1)...(19): siRNA sense strand
caaacacuacaacugcaaa

SEQ ID NO: 694298 - RNA, 19 nt, Homo sapiens
  misc_RNA (1)...(19): siRNA sense strand
ggcaucaauuucuggacaa

SEQ ID NO: 694299 - RNA, 19 nt, Homo sapiens
  misc_RNA (1)...(19): siRNA sense strand
gcugaaagaugaaaauggu

SEQ ID NO: 694300 - RNA, 19 nt, Homo sapiens
  misc_RNA (1)...(19): siRNA sense strand
aaccagaggcugaaagaug

SEQ ID NO: 694301 - RNA, 19 nt, Homo sapiens
  misc_RNA (1)...(19): siRNA sense strand
ggaaucgggagguaguaau

SEQ ID NO: 694302 - RNA, 19 nt, Homo sapiens
  misc_RNA (1)...(19): siRNA sense strand
gagaaugaagaagcagauu

SEQ ID NO: 694303 - RNA, 19 nt, Homo sapiens
  misc_RNA (1)...(19): siRNA sense strand
agcagagucuuuacggaaa

SEQ ID NO: 694304 - RNA, 19 nt, Homo sapiens
  misc_RNA (1)...(19): siRNA sense strand
agacagcaacagagauuau

SEQ ID NO: 694305 - RNA, 19 nt, Homo sapiens
  misc_RNA (1)...(19): siRNA sense strand
gucaagacccucacucuac

SEQ ID NO: 694306 - RNA, 19 nt, Homo sapiens
  misc_RNA (1)...(19): siRNA sense strand
gaaaauggugcccucauca

SEQ ID NO: 694307 - RNA, 19 nt, Homo sapiens
  misc_RNA (1)...(19): siRNA sense strand
ugaagagccuaucugucau

SEQ ID NO: 694308 - RNA, 19 nt, Homo sapiens
  misc_RNA (1)...(19): siRNA sense strand
agagcuagcagauauaaag

SEQ ID NO: 694309 - RNA, 19 nt, Homo sapiens
  misc_RNA (1)...(19): siRNA sense strand
acacuacaacugcaaagga

SEQ ID NO: 694310 - RNA, 19 nt, Homo sapiens
  misc_RNA (1)...(19): siRNA sense strand
aagaagacagcaacagaga

SEQ ID NO: 694311 - RNA, 19 nt, Homo sapiens
  misc_RNA (1)...(19): siRNA sense strand
aagaagcagauuuggauga

SEQ ID NO: 694312 - RNA, 19 nt, Homo sapiens
  misc_RNA (1)...(19): siRNA sense strand
acagcaacagagauuauaa

SEQ ID NO: 694313 - RNA, 19 nt, Homo sapiens
  misc_RNA (1)...(19): siRNA sense strand
aaacguggcaugaaagacu

SEQ ID NO: 694314 - RNA, 19 nt, Homo sapiens
  misc_RNA (1)...(19): siRNA sense strand
aggaugaggaugaaacuga

SEQ ID NO: 694315 - RNA, 19 nt, Homo sapiens
  misc_RNA (1)...(19): siRNA sense strand
cuacaacugcaaaggaaau

SEQ ID NO: 694316 - RNA, 19 nt, Homo sapiens
  misc_RNA (1)...(19): siRNA sense strand
gagcuagcagauauaaagu

SEQ ID NO: 694317 - RNA, 19 nt, Homo sapiens
  misc_RNA (1)...(19): siRNA sense strand
gaagaggcacaggcaucaa

SEQ ID NO: 694318 - RNA, 19 nt, Homo sapiens
  misc_RNA (1)...(19): siRNA sense strand
gaagcccacagacacugaa

SEQ ID NO: 694319 - RNA, 19 nt, Homo sapiens
  misc_RNA (1)...(19): siRNA sense strand
cagcaaacuguccaaguag

SEQ ID NO: 694320 - RNA, 19 nt, Homo sapiens
  misc_RNA (1)...(19): siRNA sense strand
cagaaauggaggaagaaau

SEQ ID NO: 694321 - RNA, 19 nt, Homo sapiens
  misc_RNA (1)...(19): siRNA sense strand
agaagcagauuuggaugag

SEQ ID NO: 694322 - RNA, 19 nt, Homo sapiens
  misc_RNA (1)...(19): siRNA sense strand
acgaaggucuacucaaggu

SEQ ID NO: 694323 - RNA, 19 nt, Homo sapiens
  misc_RNA (1)...(19): siRNA sense strand
agaaacguggcaugaaaga

SEQ ID NO: 694324 - RNA, 19 nt, Homo sapiens
  misc_RNA (1)...(19): siRNA sense strand
gaagaggucaaagaaacgu

SEQ ID NO: 694325 - RNA, 19 nt, Homo sapiens
  misc_RNA (1)...(19): siRNA sense strand
ucagagacuaccacaaaca

SEQ ID NO: 694326 - RNA, 19 nt, Homo sapiens
  misc_RNA (1)...(19): siRNA sense strand
aaauggugcccucaucaga

SEQ ID NO: 694327 - RNA, 19 nt, Homo sapiens
  misc_RNA (1)...(19): siRNA sense strand
aaauggaggaagaaaugaa

SEQ ID NO: 694328 - RNA, 19 nt, Homo sapiens
  misc_RNA (1)...(19): siRNA sense strand
auauaaaguccaagcuuga

SEQ ID NO: 694329 - RNA, 19 nt, Homo sapiens
  misc_RNA (1)...(19): siRNA sense strand
gaaacugauggcucugaag

SEQ ID NO: 694330 - RNA, 19 nt, Homo sapiens
  misc_RNA (1)...(19): siRNA sense strand
gcaguuccagcaacagaag

SEQ ID NO: 694331 - RNA, 19 nt, Homo sapiens
  misc_RNA (1)...(19): siRNA sense strand
cagcaguuccagcaacaga

SEQ ID NO: 694332 - RNA, 19 nt, Homo sapiens
  misc_RNA (1)...(19): siRNA sense strand
caccaguucccaccugcua

SEQ ID NO: 694333 - RNA, 19 nt, Homo sapiens
  misc_RNA (1)...(19): siRNA sense strand
acaaccagaggcugaaaga

SEQ ID NO: 694334 - RNA, 19 nt, Homo sapiens
  misc_RNA (1)...(19): siRNA sense strand
ucaggaagcccagcuagag

SEQ ID NO: 694335 - RNA, 19 nt, Homo sapiens
  misc_RNA (1)...(19): siRNA sense strand
caagcucggcagacacgaa

SEQ ID NO: 694336 - RNA, 19 nt, Homo sapiens
  misc_RNA (1)...(19): siRNA sense strand
ggacaaaggaugaggauga

SEQ ID NO: 694337 - RNA, 19 nt, Homo sapiens
  misc_RNA (1)...(19): siRNA sense strand
aaagaaacguggcaugaaa

SEQ ID NO: 694338 - RNA, 19 nt, Homo sapiens
  misc_RNA (1)...(19): siRNA sense strand
ucagcaaacuguccaagua

SEQ ID NO: 694339 - RNA, 19 nt, Homo sapiens
  misc_RNA (1)...(19): siRNA sense strand
gaagacagcaacagagauu

SEQ ID NO: 694340 - RNA, 19 nt, Homo sapiens
  misc_RNA (1)...(19): siRNA sense strand
gaugagcaguccucuaaga

SEQ ID NO: 694341 - RNA, 19 nt, Homo sapiens
  misc_RNA (1)...(19): siRNA sense strand
gcacaggcaucaauuucug

SEQ ID NO: 694342 - RNA, 19 nt, Homo sapiens
  misc_RNA (1)...(19): siRNA sense strand
gaaugaagaagcagauuug

SEQ ID NO: 694343 - RNA, 19 nt, Homo sapiens
  misc_RNA (1)...(19): siRNA sense strand
gaccagccguguagaagaa

SEQ ID NO: 694344 - RNA, 19 nt, Homo sapiens
  misc_RNA (1)...(19): siRNA sense strand
gaagguggcccagcagaaa

SEQ ID NO: 694345 - RNA, 19 nt, Homo sapiens
  misc_RNA (1)...(19): siRNA sense strand
gaucaucagugcuggagau

SEQ ID NO: 694346 - RNA, 19 nt, Homo sapiens
  misc_RNA (1)...(19): siRNA sense strand
gacaaaggaugaggaugaa

SEQ ID NO: 694347 - RNA, 19 nt, Homo sapiens
  misc_RNA (1)...(19): siRNA sense strand
cuacaaccagugauucuua

SEQ ID NO: 694348 - RNA, 19 nt, Homo sapiens
  misc_RNA (1)...(19): siRNA sense strand
ugaccgggcuucagcaaga

SEQ ID NO: 694349 - RNA, 19 nt, Homo sapiens
  misc_RNA (1)...(19): siRNA sense strand
ugucagaaauggaggaaga

SEQ ID NO: 694350 - RNA, 19 nt, Homo sapiens
  misc_RNA (1)...(19): siRNA sense strand
aaagaccucugaccgauca

SEQ ID NO: 694351 - RNA, 19 nt, Homo sapiens
  misc_RNA (1)...(19): siRNA sense strand
gguguuaacagaacugaaa

SEQ ID NO: 694352 - RNA, 19 nt, Homo sapiens
  misc_RNA (1)...(19): siRNA sense strand
uagcagauauaaaguccaa

SEQ ID NO: 694353 - RNA, 19 nt, Homo sapiens
  misc_RNA (1)...(19): siRNA sense strand
ggaugaggaugaaacugau

SEQ ID NO: 694354 - RNA, 19 nt, Homo sapiens
  misc_RNA (1)...(19): siRNA sense strand
gaaauggaggaagaaauga

SEQ ID NO: 694355 - RNA, 19 nt, Homo sapiens
  misc_RNA (1)...(19): siRNA sense strand
caaagaaacguggcaugaa

SEQ ID NO: 694356 - RNA, 19 nt, Homo sapiens
  misc_RNA (1)...(19): siRNA sense strand
ugaagaagcagauuuggau

SEQ ID NO: 694357 - RNA, 19 nt, Homo sapiens
  misc_RNA (1)...(19): siRNA sense strand
uggaugagcaguccucuaa

SEQ ID NO: 694358 - RNA, 19 nt, Homo sapiens
  misc_RNA (1)...(19): siRNA sense strand
ucaaagaaacguggcauga

SEQ ID NO: 694359 - RNA, 19 nt, Homo sapiens
  misc_RNA (1)...(19): siRNA sense strand
agaaauggaggaagaaaug

SEQ ID NO: 694360 - RNA, 19 nt, Homo sapiens
  misc_RNA (1)...(19): siRNA sense strand
gcaucaauuucuggacaaa

SEQ ID NO: 694361 - RNA, 19 nt, Homo sapiens
  misc_RNA (1)...(19): siRNA sense strand
accagaggcugaaagauga

SEQ ID NO: 694362 - RNA, 19 nt, Homo sapiens
  misc_RNA (1)...(19): siRNA sense strand
gacagcaacagagauuaua

SEQ ID NO: 694363 - RNA, 19 nt, Homo sapiens
  misc_RNA (1)...(19): siRNA sense strand
ugaaacugauggcucugaa

SEQ ID NO: 694364 - RNA, 19 nt, Homo sapiens
  misc_RNA (1)...(19): siRNA sense strand
cagcaacagagauuauaaa

SEQ ID NO: 694365 - RNA, 19 nt, Homo sapiens
  misc_RNA (1)...(19): siRNA sense strand
cugaagaggucaaagaaac

SEQ ID NO: 694366 - RNA, 19 nt, Homo sapiens
  misc_RNA (1)...(19): siRNA sense strand
gaaaacaaaacuucaggaa

SEQ ID NO: 694367 - RNA, 19 nt, Homo sapiens
  misc_RNA (1)...(19): siRNA sense strand
caucagagucaucagcaaa

SEQ ID NO: 694368 - RNA, 19 nt, Homo sapiens
  misc_RNA (1)...(19): siRNA sense strand
aaacugauggcucugaaga

SEQ ID NO: 694369 - RNA, 19 nt, Homo sapiens
  misc_RNA (1)...(19): siRNA sense strand
agaagaagacagcaacaga

SEQ ID NO: 694370 - RNA, 19 nt, Homo sapiens
  misc_RNA (1)...(19): siRNA sense strand
agaaugaagaagcagauuu

SEQ ID NO: 694371 - RNA, 19 nt, Homo sapiens
  misc_RNA (1)...(19): siRNA sense strand
uaaaguccaagcuugagaa

SEQ ID NO: 694372 - RNA, 19 nt, Homo sapiens
  misc_RNA (1)...(19): siRNA sense strand
aguccaagcuugagaaggu

SEQ ID NO: 694373 - RNA, 19 nt, Homo sapiens
  misc_RNA (1)...(19): siRNA sense strand
gaggcacaggcaucaauuu

SEQ ID NO: 694374 - RNA, 19 nt, Homo sapiens
  misc_RNA (1)...(19): siRNA sense strand
aaaugagaaugaagaagca

SEQ ID NO: 694375 - RNA, 19 nt, Homo sapiens
  misc_RNA (1)...(19): siRNA sense strand
gaaucgggagguaguaauc

SEQ ID NO: 694376 - RNA, 19 nt, Homo sapiens
  misc_RNA (1)...(19): siRNA sense strand
caaaggaugaggaugaaac

SEQ ID NO: 694377 - RNA, 19 nt, Homo sapiens
  misc_RNA (1)...(19): siRNA sense strand
guaauccuacaaccaguga

SEQ ID NO: 694378 - RNA, 19 nt, Homo sapiens
  misc_RNA (1)...(19): siRNA sense strand
ggcaucaauuucuggacaa

SEQ ID NO: 694379 - RNA, 19 nt, Homo sapiens
  misc_RNA (1)...(19): siRNA sense strand
gcugaaagaugaaaauggu

SEQ ID NO: 694380 - RNA, 19 nt, Homo sapiens
  misc_RNA (1)...(19): siRNA sense strand
aaccagaggcugaaagaug

SEQ ID NO: 694381 - RNA, 19 nt, Homo sapiens
  misc_RNA (1)...(19): siRNA sense strand
ggaaucgggagguaguaau

SEQ ID NO: 694382 - RNA, 19 nt, Homo sapiens
  misc_RNA (1)...(19): siRNA sense strand
agacagcaacagagauuau

SEQ ID NO: 694383 - RNA, 19 nt, Homo sapiens
  misc_RNA (1)...(19): siRNA sense strand
gagaaugaagaagcagauu

SEQ ID NO: 694384 - RNA, 19 nt, Homo sapiens
  misc_RNA (1)...(19): siRNA sense strand
agagcuagcagauauaaag

SEQ ID NO: 694385 - RNA, 19 nt, Homo sapiens
  misc_RNA (1)...(19): siRNA sense strand
gaaaauggugcccucauca

SEQ ID NO: 694386 - RNA, 19 nt, Homo sapiens
  misc_RNA (1)...(19): siRNA sense strand
aagaagacagcaacagaga

SEQ ID NO: 694387 - RNA, 19 nt, Homo sapiens
  misc_RNA (1)...(19): siRNA sense strand
aaacguggcaugaaagacu

SEQ ID NO: 694388 - RNA, 19 nt, Homo sapiens
  misc_RNA (1)...(19): siRNA sense strand
aggaugaggaugaaacuga

SEQ ID NO: 694389 - RNA, 19 nt, Homo sapiens
  misc_RNA (1)...(19): siRNA sense strand
aagaagcagauuuggauga

SEQ ID NO: 694390 - RNA, 19 nt, Homo sapiens
  misc_RNA (1)...(19): siRNA sense strand
acagcaacagagauuauaa

SEQ ID NO: 694391 - RNA, 19 nt, Homo sapiens
  misc_RNA (1)...(19): siRNA sense strand
gagcuagcagauauaaagu

SEQ ID NO: 694392 - RNA, 19 nt, Homo sapiens
  misc_RNA (1)...(19): siRNA sense strand
gaagaggcacaggcaucaa

SEQ ID NO: 694393 - RNA, 19 nt, Homo sapiens
  misc_RNA (1)...(19): siRNA sense strand
cagaaauggaggaagaaau

SEQ ID NO: 694394 - RNA, 19 nt, Homo sapiens
  misc_RNA (1)...(19): siRNA sense strand
cagcaaacuguccaaguag

SEQ ID NO: 694395 - RNA, 19 nt, Homo sapiens
  misc_RNA (1)...(19): siRNA sense strand
agaagcagauuuggaugag

SEQ ID NO: 694396 - RNA, 19 nt, Homo sapiens
  misc_RNA (1)...(19): siRNA sense strand
gaagaggucaaagaaacgu

SEQ ID NO: 694397 - RNA, 19 nt, Homo sapiens
  misc_RNA (1)...(19): siRNA sense strand
agaaacguggcaugaaaga

SEQ ID NO: 694398 - RNA, 19 nt, Homo sapiens
  misc_RNA (1)...(19): siRNA sense strand
gaaacugauggcucugaag

SEQ ID NO: 694399 - RNA, 19 nt, Homo sapiens
  misc_RNA (1)...(19): siRNA sense strand
aaauggugcccucaucaga

SEQ ID NO: 694400 - RNA, 19 nt, Homo sapiens
  misc_RNA (1)...(19): siRNA sense strand
aaauggaggaagaaaugaa

SEQ ID NO: 694401 - RNA, 19 nt, Homo sapiens
  misc_RNA (1)...(19): siRNA sense strand
auauaaaguccaagcuuga

SEQ ID NO: 694402 - RNA, 19 nt, Homo sapiens
  misc_RNA (1)...(19): siRNA sense strand
ucaggaagcccagcuagag

SEQ ID NO: 694403 - RNA, 19 nt, Homo sapiens
  misc_RNA (1)...(19): siRNA sense strand
acaaccagaggcugaaaga

SEQ ID NO: 694404 - RNA, 19 nt, Homo sapiens
  misc_RNA (1)...(19): siRNA sense strand
ugaccagccguguagaaga

SEQ ID NO: 694405 - RNA, 19 nt, Homo sapiens
  misc_RNA (1)...(19): siRNA sense strand
ucagaaauggaggaagaaa

SEQ ID NO: 694406 - RNA, 19 nt, Homo sapiens
  misc_RNA (1)...(19): siRNA sense strand
gcccagcagaaacaagaaa

SEQ ID NO: 694407 - RNA, 19 nt, Homo sapiens
  misc_RNA (1)...(19): siRNA sense strand
ggacaaaggaugaggauga

SEQ ID NO: 694408 - RNA, 19 nt, Homo sapiens
  misc_RNA (1)...(19): siRNA sense strand
aaagaaacguggcaugaaa

SEQ ID NO: 694409 - RNA, 19 nt, Homo sapiens
  misc_RNA (1)...(19): siRNA sense strand
gaagacagcaacagagauu

SEQ ID NO: 694410 - RNA, 19 nt, Homo sapiens
  misc_RNA (1)...(19): siRNA sense strand
gaugagcaguccucuaaga

SEQ ID NO: 694411 - RNA, 19 nt, Homo sapiens
  misc_RNA (1)...(19): siRNA sense strand
gcacaggcaucaauuucug

SEQ ID NO: 694412 - RNA, 19 nt, Homo sapiens
  misc_RNA (1)...(19): siRNA sense strand
gaaugaagaagcagauuug

SEQ ID NO: 694413 - RNA, 19 nt, Homo sapiens
  misc_RNA (1)...(19): siRNA sense strand
gaccagccguguagaagaa

SEQ ID NO: 694414 - RNA, 19 nt, Homo sapiens
  misc_RNA (1)...(19): siRNA sense strand
gaagguggcccagcagaaa

SEQ ID NO: 694415 - RNA, 19 nt, Homo sapiens
  misc_RNA (1)...(19): siRNA sense strand
gaucaucagugcuggagau

SEQ ID NO: 694416 - RNA, 19 nt, Homo sapiens
  misc_RNA (1)...(19): siRNA sense strand
gacaaaggaugaggaugaa

SEQ ID NO: 694417 - RNA, 19 nt, Homo sapiens
  misc_RNA (1)...(19): siRNA sense strand
cuacaaccagugauucuua

SEQ ID NO: 694418 - RNA, 19 nt, Homo sapiens
  misc_RNA (1)...(19): siRNA sense strand
ugaccgggcuucagcaaga

SEQ ID NO: 694419 - RNA, 19 nt, Homo sapiens
  misc_RNA (1)...(19): siRNA sense strand
ugucagaaauggaggaaga

SEQ ID NO: 694420 - RNA, 19 nt, Homo sapiens
  misc_RNA (1)...(19): siRNA sense strand
aaagaccucugaccgauca

SEQ ID NO: 694421 - RNA, 19 nt, Homo sapiens
  misc_RNA (1)...(19): siRNA sense strand
uagcagauauaaaguccaa

SEQ ID NO: 694422 - RNA, 19 nt, Homo sapiens
  misc_RNA (1)...(19): siRNA sense strand
ggaugaggaugaaacugau

SEQ ID NO: 694423 - RNA, 19 nt, Homo sapiens
  misc_RNA (1)...(19): siRNA sense strand
gaaauggaggaagaaauga

SEQ ID NO: 694424 - RNA, 19 nt, Homo sapiens
  misc_RNA (1)...(19): siRNA sense strand
caaagaaacguggcaugaa

SEQ ID NO: 694425 - RNA, 19 nt, Homo sapiens
  misc_RNA (1)...(19): siRNA sense strand
ugaagaagcagauuuggau

SEQ ID NO: 694426 - RNA, 19 nt, Homo sapiens
  misc_RNA (1)...(19): siRNA sense strand
uggaugagcaguccucuaa

SEQ ID NO: 694427 - RNA, 19 nt, Homo sapiens
  misc_RNA (1)...(19): siRNA sense strand
ucaaagaaacguggcauga

SEQ ID NO: 694428 - RNA, 19 nt, Homo sapiens
  misc_RNA (1)...(19): siRNA sense strand
agaaauggaggaagaaaug

SEQ ID NO: 694429 - RNA, 19 nt, Homo sapiens
  misc_RNA (1)...(19): siRNA sense strand
gcaucaauuucuggacaaa

SEQ ID NO: 694430 - RNA, 19 nt, Homo sapiens
  misc_RNA (1)...(19): siRNA sense strand
gacagcaacagagauuaua

SEQ ID NO: 694431 - RNA, 19 nt, Homo sapiens
  misc_RNA (1)...(19): siRNA sense strand
ugaaacugauggcucugaa

SEQ ID NO: 694432 - RNA, 19 nt, Homo sapiens
  misc_RNA (1)...(19): siRNA sense strand
cagcaacagagauuauaaa

SEQ ID NO: 694433 - RNA, 19 nt, Homo sapiens
  misc_RNA (1)...(19): siRNA sense strand
cugaagaggucaaagaaac

SEQ ID NO: 694434 - RNA, 19 nt, Homo sapiens
  misc_RNA (1)...(19): siRNA sense strand
gaaaacaaaacuucaggaa

SEQ ID NO: 694435 - RNA, 19 nt, Homo sapiens
  misc_RNA (1)...(19): siRNA sense strand
aaacugauggcucugaaga

SEQ ID NO: 694436 - RNA, 19 nt, Homo sapiens
  misc_RNA (1)...(19): siRNA sense strand
agaagaagacagcaacaga

SEQ ID NO: 694437 - RNA, 19 nt, Homo sapiens
  misc_RNA (1)...(19): siRNA sense strand
agaaugaagaagcagauuu

SEQ ID NO: 694438 - RNA, 19 nt, Homo sapiens
  misc_RNA (1)...(19): siRNA sense strand
uaaaguccaagcuugagaa

SEQ ID NO: 694439 - RNA, 19 nt, Homo sapiens
  misc_RNA (1)...(19): siRNA sense strand
aguccaagcuugagaaggu

SEQ ID NO: 694440 - RNA, 19 nt, Homo sapiens
  misc_RNA (1)...(19): siRNA sense strand
gaggcacaggcaucaauuu

SEQ ID NO: 694441 - RNA, 19 nt, Homo sapiens
  misc_RNA (1)...(19): siRNA sense strand
aaaugagaaugaagaagca

SEQ ID NO: 694442 - RNA, 19 nt, Homo sapiens
  misc_RNA (1)...(19): siRNA sense strand
gaaucgggagguaguaauc

SEQ ID NO: 694443 - RNA, 19 nt, Homo sapiens
  misc_RNA (1)...(19): siRNA sense strand
caaaggaugaggaugaaac

SEQ ID NO: 694444 - RNA, 19 nt, Homo sapiens
  misc_RNA (1)...(19): siRNA sense strand
guaauccuacaaccaguga

SEQ ID NO: 694445 - RNA, 19 nt, Homo sapiens
  misc_RNA (1)...(19): siRNA sense strand
ggcaucaauuucuggacaa

SEQ ID NO: 694446 - RNA, 19 nt, Homo sapiens
  misc_RNA (1)...(19): siRNA sense strand
ggaaucgggagguaguaau

SEQ ID NO: 694447 - RNA, 19 nt, Homo sapiens
  misc_RNA (1)...(19): siRNA sense strand
gagaaugaagaagcagauu

SEQ ID NO: 694448 - RNA, 19 nt, Homo sapiens
  misc_RNA (1)...(19): siRNA sense strand
agacagcaacagagauuau

SEQ ID NO: 694449 - RNA, 19 nt, Homo sapiens
  misc_RNA (1)...(19): siRNA sense strand
agagcuagcagauauaaag

SEQ ID NO: 694450 - RNA, 19 nt, Homo sapiens
  misc_RNA (1)...(19): siRNA sense strand
aagaagacagcaacagaga

SEQ ID NO: 694451 - RNA, 19 nt, Homo sapiens
  misc_RNA (1)...(19): siRNA sense strand
aaacguggcaugaaagacu

SEQ ID NO: 694452 - RNA, 19 nt, Homo sapiens
  misc_RNA (1)...(19): siRNA sense strand
aagaagcagauuuggauga

SEQ ID NO: 694453 - RNA, 19 nt, Homo sapiens
  misc_RNA (1)...(19): siRNA sense strand
acagcaacagagauuauaa

SEQ ID NO: 694454 - RNA, 19 nt, Homo sapiens
  misc_RNA (1)...(19): siRNA sense strand
aggaugaggaugaaacuga

SEQ ID NO: 694455 - RNA, 19 nt, Homo sapiens
  misc_RNA (1)...(19): siRNA sense strand
gagcuagcagauauaaagu

SEQ ID NO: 694456 - RNA, 19 nt, Homo sapiens
  misc_RNA (1)...(19): siRNA sense strand
gaagaggcacaggcaucaa

SEQ ID NO: 694457 - RNA, 19 nt, Homo sapiens
  misc_RNA (1)...(19): siRNA sense strand
cagaaauggaggaagaaau

SEQ ID NO: 694458 - RNA, 19 nt, Homo sapiens
  misc_RNA (1)...(19): siRNA sense strand
gaagaggucaaagaaacgu

SEQ ID NO: 694459 - RNA, 19 nt, Homo sapiens
  misc_RNA (1)...(19): siRNA sense strand
agaagcagauuuggaugag

SEQ ID NO: 694460 - RNA, 19 nt, Homo sapiens
  misc_RNA (1)...(19): siRNA sense strand
agaaacguggcaugaaaga

SEQ ID NO: 694461 - RNA, 19 nt, Homo sapiens
  misc_RNA (1)...(19): siRNA sense strand
gaaacugauggcucugaag

SEQ ID NO: 694462 - RNA, 19 nt, Homo sapiens
  misc_RNA (1)...(19): siRNA sense strand
aaauggaggaagaaaugaa

SEQ ID NO: 694463 - RNA, 19 nt, Homo sapiens
  misc_RNA (1)...(19): siRNA sense strand
auauaaaguccaagcuuga

SEQ ID NO: 694464 - RNA, 19 nt, Homo sapiens
  misc_RNA (1)...(19): siRNA sense strand
ucaggaagcccagcuagag

SEQ ID NO: 694465 - RNA, 19 nt, Homo sapiens
  misc_RNA (1)...(19): siRNA sense strand
ugaccagccguguagaaga

SEQ ID NO: 694466 - RNA, 19 nt, Homo sapiens
  misc_RNA (1)...(19): siRNA sense strand
ucagaaauggaggaagaaa

SEQ ID NO: 694467 - RNA, 19 nt, Homo sapiens
  misc_RNA (1)...(19): siRNA sense strand
gcccagcagaaacaagaaa

SEQ ID NO: 694468 - RNA, 19 nt, Homo sapiens
  misc_RNA (1)...(19): siRNA sense strand
ggacaaaggaugaggauga

SEQ ID NO: 694469 - RNA, 19 nt, Homo sapiens
  misc_RNA (1)...(19): siRNA sense strand
aaagaaacguggcaugaaa

SEQ ID NO: 694470 - RNA, 19 nt, Homo sapiens
  misc_RNA (1)...(19): siRNA sense strand
gcaggagucuggaugaaga

SEQ ID NO: 694471 - RNA, 19 nt, Homo sapiens
  misc_RNA (1)...(19): siRNA sense strand
gaagacagcaacagagauu

SEQ ID NO: 694472 - RNA, 19 nt, Homo sapiens
  misc_RNA (1)...(19): siRNA sense strand
gaugagcaguccucuaaga

SEQ ID NO: 694473 - RNA, 19 nt, Homo sapiens
  misc_RNA (1)...(19): siRNA sense strand
gcacaggcaucaauuucug

SEQ ID NO: 694474 - RNA, 19 nt, Homo sapiens
  misc_RNA (1)...(19): siRNA sense strand
gaaugaagaagcagauuug

SEQ ID NO: 694475 - RNA, 19 nt, Homo sapiens
  misc_RNA (1)...(19): siRNA sense strand
gaccagccguguagaagaa

SEQ ID NO: 694476 - RNA, 19 nt, Homo sapiens
  misc_RNA (1)...(19): siRNA sense strand
caccugcuauggacaaaua

SEQ ID NO: 694477 - RNA, 19 nt, Homo sapiens
  misc_RNA (1)...(19): siRNA sense strand
guucagagacuaccacaaa

SEQ ID NO: 694478 - RNA, 19 nt, Homo sapiens
  misc_RNA (1)...(19): siRNA sense strand
gaagguggcccagcagaaa

SEQ ID NO: 694479 - RNA, 19 nt, Homo sapiens
  misc_RNA (1)...(19): siRNA sense strand
gaucaucagugcuggagau

SEQ ID NO: 694480 - RNA, 19 nt, Homo sapiens
  misc_RNA (1)...(19): siRNA sense strand
gacaaaggaugaggaugaa

SEQ ID NO: 694481 - RNA, 19 nt, Homo sapiens
  misc_RNA (1)...(19): siRNA sense strand
cuacaaccagugauucuua

SEQ ID NO: 694482 - RNA, 19 nt, Homo sapiens
  misc_RNA (1)...(19): siRNA sense strand
ugaccgggcuucagcaaga

SEQ ID NO: 694483 - RNA, 19 nt, Homo sapiens
  misc_RNA (1)...(19): siRNA sense strand
ugucagaaauggaggaaga

SEQ ID NO: 694484 - RNA, 19 nt, Homo sapiens
  misc_RNA (1)...(19): siRNA sense strand
acacgaaggucuacucaag

SEQ ID NO: 694485 - RNA, 19 nt, Homo sapiens
  misc_RNA (1)...(19): siRNA sense strand
gagacuaccacaaacacua

SEQ ID NO: 694486 - RNA, 19 nt, Homo sapiens
  misc_RNA (1)...(19): siRNA sense strand
aaagaccucugaccgauca

SEQ ID NO: 694487 - RNA, 19 nt, Homo sapiens
  misc_RNA (1)...(19): siRNA sense strand
gaaagcacgcuccagacaa

SEQ ID NO: 694488 - RNA, 19 nt, Homo sapiens
  misc_RNA (1)...(19): siRNA sense strand
uagcagauauaaaguccaa

SEQ ID NO: 694489 - RNA, 19 nt, Homo sapiens
  misc_RNA (1)...(19): siRNA sense strand
ugaggaagcagagucuuua

SEQ ID NO: 694490 - RNA, 19 nt, Homo sapiens
  misc_RNA (1)...(19): siRNA sense strand
ggaaagcacgcuccagaca

SEQ ID NO: 694491 - RNA, 19 nt, Homo sapiens
  misc_RNA (1)...(19): siRNA sense strand
ggaugaggaugaaacugau

SEQ ID NO: 694492 - RNA, 19 nt, Homo sapiens
  misc_RNA (1)...(19): siRNA sense strand
gaaauggaggaagaaauga

SEQ ID NO: 694493 - RNA, 19 nt, Homo sapiens
  misc_RNA (1)...(19): siRNA sense strand
ugaagaagcagauuuggau

SEQ ID NO: 694494 - RNA, 19 nt, Homo sapiens
  misc_RNA (1)...(19): siRNA sense strand
caaagaaacguggcaugaa

SEQ ID NO: 694495 - RNA, 19 nt, Homo sapiens
  misc_RNA (1)...(19): siRNA sense strand
uggaugagcaguccucuaa

SEQ ID NO: 694496 - RNA, 19 nt, Homo sapiens
  misc_RNA (1)...(19): siRNA sense strand
ggagcagccucgugagaag

SEQ ID NO: 694497 - RNA, 19 nt, Homo sapiens
  misc_RNA (1)...(19): siRNA sense strand
agaaauggaggaagaaaug

SEQ ID NO: 694498 - RNA, 19 nt, Homo sapiens
  misc_RNA (1)...(19): siRNA sense strand
ucaaagaaacguggcauga

SEQ ID NO: 694499 - RNA, 19 nt, Homo sapiens
  misc_RNA (1)...(19): siRNA sense strand
ucaagacccucacucuaca

SEQ ID NO: 694500 - RNA, 19 nt, Homo sapiens
  misc_RNA (1)...(19): siRNA sense strand
gcaucaauuucuggacaaa

SEQ ID NO: 694501 - RNA, 19 nt, Homo sapiens
  misc_RNA (1)...(19): siRNA sense strand
ggaugaagagccuaucugu

SEQ ID NO: 694502 - RNA, 19 nt, Homo sapiens
  misc_RNA (1)...(19): siRNA sense strand
gacagcaacagagauuaua

SEQ ID NO: 694503 - RNA, 19 nt, Homo sapiens
  misc_RNA (1)...(19): siRNA sense strand
gggcaggagucuggaugaa

SEQ ID NO: 694504 - RNA, 19 nt, Homo sapiens
  misc_RNA (1)...(19): siRNA sense strand
cagcaacagagauuauaaa

SEQ ID NO: 694505 - RNA, 19 nt, Homo sapiens
  misc_RNA (1)...(19): siRNA sense strand
ugaaacugauggcucugaa

SEQ ID NO: 694506 - RNA, 19 nt, Homo sapiens
  misc_RNA (1)...(19): siRNA sense strand
cacuacaacugcaaaggaa

SEQ ID NO: 694507 - RNA, 19 nt, Homo sapiens
  misc_RNA (1)...(19): siRNA sense strand
cugaagaggucaaagaaac

SEQ ID NO: 694508 - RNA, 19 nt, Homo sapiens
  misc_RNA (1)...(19): siRNA sense strand
aaagcacgcuccagacaag

SEQ ID NO: 694509 - RNA, 19 nt, Homo sapiens
  misc_RNA (1)...(19): siRNA sense strand
gaaaacaaaacuucaggaa

SEQ ID NO: 694510 - RNA, 19 nt, Homo sapiens
  misc_RNA (1)...(19): siRNA sense strand
aaacugauggcucugaaga

SEQ ID NO: 694511 - RNA, 19 nt, Homo sapiens
  misc_RNA (1)...(19): siRNA sense strand
cagacaagcucggcagaca

SEQ ID NO: 694512 - RNA, 19 nt, Homo sapiens
  misc_RNA (1)...(19): siRNA sense strand
agaaugaagaagcagauuu

SEQ ID NO: 694513 - RNA, 19 nt, Homo sapiens
  misc_RNA (1)...(19): siRNA sense strand
agaagaagacagcaacaga

SEQ ID NO: 694514 - RNA, 19 nt, Homo sapiens
  misc_RNA (1)...(19): siRNA sense strand
uaaaguccaagcuugagaa

SEQ ID NO: 694515 - RNA, 19 nt, Homo sapiens
  misc_RNA (1)...(19): siRNA sense strand
augaagagccuaucuguca

SEQ ID NO: 694516 - RNA, 19 nt, Homo sapiens
  misc_RNA (1)...(19): siRNA sense strand
aguccaagcuugagaaggu

SEQ ID NO: 694517 - RNA, 19 nt, Homo sapiens
  misc_RNA (1)...(19): siRNA sense strand
gaggcacaggcaucaauuu

SEQ ID NO: 694518 - RNA, 19 nt, Homo sapiens
  misc_RNA (1)...(19): siRNA sense strand
gaagagccuaucugucauc

SEQ ID NO: 694519 - RNA, 19 nt, Homo sapiens
  misc_RNA (1)...(19): siRNA sense strand
aaaugagaaugaagaagca

SEQ ID NO: 694520 - RNA, 19 nt, Homo sapiens
  misc_RNA (1)...(19): siRNA sense strand
caacugcaaaggaaaugga

SEQ ID NO: 694521 - RNA, 19 nt, Homo sapiens
  misc_RNA (1)...(19): siRNA sense strand
cgucaagacccucacucua

SEQ ID NO: 694522 - RNA, 19 nt, Homo sapiens
  misc_RNA (1)...(19): siRNA sense strand
guaauccuacaaccaguga

SEQ ID NO: 694523 - RNA, 19 nt, Homo sapiens
  misc_RNA (1)...(19): siRNA sense strand
gaaucgggagguaguaauc

SEQ ID NO: 694524 - RNA, 19 nt, Homo sapiens
  misc_RNA (1)...(19): siRNA sense strand
caaaggaugaggaugaaac

SEQ ID NO: 694525 - RNA, 19 nt, Homo sapiens
  misc_RNA (1)...(19): siRNA sense strand
caaacacuacaacugcaaa

SEQ ID NO: 694526 - RNA, 19 nt, Homo sapiens
  misc_RNA (1)...(19): siRNA sense strand
ggcaucaauuucuggacaa

SEQ ID NO: 694527 - RNA, 19 nt, Homo sapiens
  misc_RNA (1)...(19): siRNA sense strand
ggaaucgggagguaguaau

SEQ ID NO: 694528 - RNA, 19 nt, Homo sapiens
  misc_RNA (1)...(19): siRNA sense strand
gagaaugaagaagcagauu

SEQ ID NO: 694529 - RNA, 19 nt, Homo sapiens
  misc_RNA (1)...(19): siRNA sense strand
agacagcaacagagauuau

SEQ ID NO: 694530 - RNA, 19 nt, Homo sapiens
  misc_RNA (1)...(19): siRNA sense strand
agcagagucuuuacggaaa

SEQ ID NO: 694531 - RNA, 19 nt, Homo sapiens
  misc_RNA (1)...(19): siRNA sense strand
gucaagacccucacucuac

SEQ ID NO: 694532 - RNA, 19 nt, Homo sapiens
  misc_RNA (1)...(19): siRNA sense strand
agagcuagcagauauaaag

SEQ ID NO: 694533 - RNA, 19 nt, Homo sapiens
  misc_RNA (1)...(19): siRNA sense strand
ugaagagccuaucugucau

SEQ ID NO: 694534 - RNA, 19 nt, Homo sapiens
  misc_RNA (1)...(19): siRNA sense strand
acacuacaacugcaaagga

SEQ ID NO: 694535 - RNA, 19 nt, Homo sapiens
  misc_RNA (1)...(19): siRNA sense strand
aagaagacagcaacagaga

SEQ ID NO: 694536 - RNA, 19 nt, Homo sapiens
  misc_RNA (1)...(19): siRNA sense strand
aagaagcagauuuggauga

SEQ ID NO: 694537 - RNA, 19 nt, Homo sapiens
  misc_RNA (1)...(19): siRNA sense strand
acagcaacagagauuauaa

SEQ ID NO: 694538 - RNA, 19 nt, Homo sapiens
  misc_RNA (1)...(19): siRNA sense strand
aaacguggcaugaaagacu

SEQ ID NO: 694539 - RNA, 19 nt, Homo sapiens
  misc_RNA (1)...(19): siRNA sense strand
aggaugaggaugaaacuga

SEQ ID NO: 694540 - RNA, 19 nt, Homo sapiens
  misc_RNA (1)...(19): siRNA sense strand
cuacaacugcaaaggaaau

SEQ ID NO: 694541 - RNA, 19 nt, Homo sapiens
  misc_RNA (1)...(19): siRNA sense strand
gagcuagcagauauaaagu

SEQ ID NO: 694542 - RNA, 19 nt, Homo sapiens
  misc_RNA (1)...(19): siRNA sense strand
gaagaggcacaggcaucaa

SEQ ID NO: 694543 - RNA, 19 nt, Homo sapiens
  misc_RNA (1)...(19): siRNA sense strand
gaagcccacagacacugaa

SEQ ID NO: 694544 - RNA, 19 nt, Homo sapiens
  misc_RNA (1)...(19): siRNA sense strand
cagaaauggaggaagaaau

SEQ ID NO: 694545 - RNA, 19 nt, Homo sapiens
  misc_RNA (1)...(19): siRNA sense strand
acgaaggucuacucaaggu

SEQ ID NO: 694546 - RNA, 19 nt, Homo sapiens
  misc_RNA (1)...(19): siRNA sense strand
agaaacguggcaugaaaga

SEQ ID NO: 694547 - RNA, 19 nt, Homo sapiens
  misc_RNA (1)...(19): siRNA sense strand
gaagaggucaaagaaacgu

SEQ ID NO: 694548 - RNA, 19 nt, Homo sapiens
  misc_RNA (1)...(19): siRNA sense strand
agaagcagauuuggaugag

SEQ ID NO: 694549 - RNA, 19 nt, Homo sapiens
  misc_RNA (1)...(19): siRNA sense strand
ucagagacuaccacaaaca

SEQ ID NO: 694550 - RNA, 19 nt, Homo sapiens
  misc_RNA (1)...(19): siRNA sense strand
aaauggaggaagaaaugaa

SEQ ID NO: 694551 - RNA, 19 nt, Homo sapiens
  misc_RNA (1)...(19): siRNA sense strand
auauaaaguccaagcuuga

SEQ ID NO: 694552 - RNA, 19 nt, Homo sapiens
  misc_RNA (1)...(19): siRNA sense strand
gcaguuccagcaacagaag

SEQ ID NO: 694553 - RNA, 19 nt, Homo sapiens
  misc_RNA (1)...(19): siRNA sense strand
gaaacugauggcucugaag

SEQ ID NO: 694554 - RNA, 19 nt, Homo sapiens
  misc_RNA (1)...(19): siRNA sense strand
caccaguucccaccugcua

SEQ ID NO: 694555 - RNA, 19 nt, Homo sapiens
  misc_RNA (1)...(19): siRNA sense strand
cagcaguuccagcaacaga

SEQ ID NO: 694556 - RNA, 19 nt, Homo sapiens
  misc_RNA (1)...(19): siRNA sense strand
ucaggaagcccagcuagag

SEQ ID NO: 694557 - RNA, 19 nt, Homo sapiens
  misc_RNA (1)...(19): siRNA sense strand
gcaucuccuucuacgucaa

SEQ ID NO: 694558 - RNA, 19 nt, Homo sapiens
  misc_RNA (1)...(19): siRNA sense strand
ucagaaauggaggaagaaa

SEQ ID NO: 694559 - RNA, 19 nt, Homo sapiens
  misc_RNA (1)...(19): siRNA sense strand
ugaccagccguguagaaga

SEQ ID NO: 694560 - RNA, 19 nt, Homo sapiens
  misc_RNA (1)...(19): siRNA sense strand
caagcucggcagacacgaa

SEQ ID NO: 694561 - RNA, 19 nt, Homo sapiens
  misc_RNA (1)...(19): siRNA sense strand
gcaaaggaaauggacaaaa

SEQ ID NO: 694562 - RNA, 19 nt, Homo sapiens
  misc_RNA (1)...(19): siRNA sense strand
gcccagcagaaacaagaaa

SEQ ID NO: 694563 - RNA, 19 nt, Homo sapiens
  misc_RNA (1)...(19): siRNA sense strand
ugacuccuguacgggauga

SEQ ID NO: 694564 - RNA, 19 nt, Homo sapiens
  misc_RNA (1)...(19): siRNA sense strand
caacaagaauggcuucaaa

SEQ ID NO: 694565 - RNA, 19 nt, Homo sapiens
  misc_RNA (1)...(19): siRNA sense strand
ggagaaauaucuggaagaa

SEQ ID NO: 694566 - RNA, 19 nt, Homo sapiens
  misc_RNA (1)...(19): siRNA sense strand
caacugggaugauacuuau

SEQ ID NO: 694567 - RNA, 19 nt, Homo sapiens
  misc_RNA (1)...(19): siRNA sense strand
gaucuugguuccucuaaug

SEQ ID NO: 694568 - RNA, 19 nt, Homo sapiens
  misc_RNA (1)...(19): siRNA sense strand
ccagugauagucaauauua

SEQ ID NO: 694569 - RNA, 19 nt, Homo sapiens
  misc_RNA (1)...(19): siRNA sense strand
gcaagaauagucagaguga

SEQ ID NO: 694570 - RNA, 19 nt, Homo sapiens
  misc_RNA (1)...(19): siRNA sense strand
agaaauaucuggaagaaac

SEQ ID NO: 694571 - RNA, 19 nt, Homo sapiens
  misc_RNA (1)...(19): siRNA sense strand
ggaagaagccucgccauca

SEQ ID NO: 694572 - RNA, 19 nt, Homo sapiens
  misc_RNA (1)...(19): siRNA sense strand
acacuaggaccuccaaaua

SEQ ID NO: 694573 - RNA, 19 nt, Homo sapiens
  misc_RNA (1)...(19): siRNA sense strand
gaugaggucuucggcuuug

SEQ ID NO: 694574 - RNA, 19 nt, Homo sapiens
  misc_RNA (1)...(19): siRNA sense strand
gggaugauacuuaugacua

SEQ ID NO: 694575 - RNA, 19 nt, Homo sapiens
  misc_RNA (1)...(19): siRNA sense strand
ggaccaagcacgccucuuc

SEQ ID NO: 694576 - RNA, 19 nt, Homo sapiens
  misc_RNA (1)...(19): siRNA sense strand
gaugauagcaccugucagu

SEQ ID NO: 694577 - RNA, 19 nt, Homo sapiens
  misc_RNA (1)...(19): siRNA sense strand
gaagaagccucgccaucac

SEQ ID NO: 694578 - RNA, 19 nt, Homo sapiens
  misc_RNA (1)...(19): siRNA sense strand
ccagaauccuccagaagau

SEQ ID NO: 694579 - RNA, 19 nt, Homo sapiens
  misc_RNA (1)...(19): siRNA sense strand
gcgcuccaguuccggauaa

SEQ ID NO: 694580 - RNA, 19 nt, Homo sapiens
  misc_RNA (1)...(19): siRNA sense strand
ccaaguggaccaucgauga

SEQ ID NO: 694581 - RNA, 19 nt, Homo sapiens
  misc_RNA (1)...(19): siRNA sense strand
guucacagcucaccauugc

SEQ ID NO: 694582 - RNA, 19 nt, Homo sapiens
  misc_RNA (1)...(19): siRNA sense strand
ggaugauacuuaugacuac

SEQ ID NO: 694583 - RNA, 19 nt, Homo sapiens
  misc_RNA (1)...(19): siRNA sense strand
aggaaggcgugaccgaaua

SEQ ID NO: 694584 - RNA, 19 nt, Homo sapiens
  misc_RNA (1)...(19): siRNA sense strand
ggagacaggaguccauuca

SEQ ID NO: 694585 - RNA, 19 nt, Homo sapiens
  misc_RNA (1)...(19): siRNA sense strand
gcaccagucccucuucaug

SEQ ID NO: 694586 - RNA, 19 nt, Homo sapiens
  misc_RNA (1)...(19): siRNA sense strand
gaagcaagaagaaggaaag

SEQ ID NO: 694587 - RNA, 19 nt, Homo sapiens
  misc_RNA (1)...(19): siRNA sense strand
caacaggugagaagaagga

SEQ ID NO: 694588 - RNA, 19 nt, Homo sapiens
  misc_RNA (1)...(19): siRNA sense strand
ggagaagcaagaagaagga

SEQ ID NO: 694589 - RNA, 19 nt, Homo sapiens
  misc_RNA (1)...(19): siRNA sense strand
acaacugggaugauacuua

SEQ ID NO: 694590 - RNA, 19 nt, Homo sapiens
  misc_RNA (1)...(19): siRNA sense strand
gcacuuugauggguauucu

SEQ ID NO: 694591 - RNA, 19 nt, Homo sapiens
  misc_RNA (1)...(19): siRNA sense strand
ugaaagcggagcugucuga

SEQ ID NO: 694592 - RNA, 19 nt, Homo sapiens
  misc_RNA (1)...(19): siRNA sense strand
gagcagaaggccauuacug

SEQ ID NO: 694593 - RNA, 19 nt, Homo sapiens
  misc_RNA (1)...(19): siRNA sense strand
ggaggaccaucggauaaag

SEQ ID NO: 694594 - RNA, 19 nt, Homo sapiens
  misc_RNA (1)...(19): siRNA sense strand
ggcagucacucacaacaag

SEQ ID NO: 694595 - RNA, 19 nt, Homo sapiens
  misc_RNA (1)...(19): siRNA sense strand
gaccuugugugcucagauc

SEQ ID NO: 694596 - RNA, 19 nt, Homo sapiens
  misc_RNA (1)...(19): siRNA sense strand
ccaagcacgccucuucaaa

SEQ ID NO: 694597 - RNA, 19 nt, Homo sapiens
  misc_RNA (1)...(19): siRNA sense strand
ggucagucauaguggagaa

SEQ ID NO: 694598 - RNA, 19 nt, Homo sapiens
  misc_RNA (1)...(19): siRNA sense strand
acuaggaccuccaaauaca

SEQ ID NO: 694599 - RNA, 19 nt, Homo sapiens
  misc_RNA (1)...(19): siRNA sense strand
uuugauggcuggagucaug

SEQ ID NO: 694600 - RNA, 19 nt, Homo sapiens
  misc_RNA (1)...(19): siRNA sense strand
uuugacaacugggaugaua

SEQ ID NO: 694601 - RNA, 19 nt, Homo sapiens
  misc_RNA (1)...(19): siRNA sense strand
ucaaacccaugaagaagag

SEQ ID NO: 694602 - RNA, 19 nt, Homo sapiens
  misc_RNA (1)...(19): siRNA sense strand
caccguggcugagguaugu

SEQ ID NO: 694603 - RNA, 19 nt, Homo sapiens
  misc_RNA (1)...(19): siRNA sense strand
gcaugaacccgucccuugu

SEQ ID NO: 694604 - RNA, 19 nt, Homo sapiens
  misc_RNA (1)...(19): siRNA sense strand
gagaacuccucaggcucua

SEQ ID NO: 694605 - RNA, 19 nt, Homo sapiens
  misc_RNA (1)...(19): siRNA sense strand
caagaauggcuucaaacug

SEQ ID NO: 694606 - RNA, 19 nt, Homo sapiens
  misc_RNA (1)...(19): siRNA sense strand
agaggaagcgcagggaaua

SEQ ID NO: 694607 - RNA, 19 nt, Homo sapiens
  misc_RNA (1)...(19): siRNA sense strand
gaaccagagccggcugaaa

SEQ ID NO: 694608 - RNA, 19 nt, Homo sapiens
  misc_RNA (1)...(19): siRNA sense strand
ucacuccucugcucucuac

SEQ ID NO: 694609 - RNA, 19 nt, Homo sapiens
  misc_RNA (1)...(19): siRNA sense strand
cccagacccugauaacuuc

SEQ ID NO: 694610 - RNA, 19 nt, Homo sapiens
  misc_RNA (1)...(19): siRNA sense strand
gcucucuacccacucauuu

SEQ ID NO: 694611 - RNA, 19 nt, Homo sapiens
  misc_RNA (1)...(19): siRNA sense strand
acagcuuccuggucaauau

SEQ ID NO: 694612 - RNA, 19 nt, Homo sapiens
  misc_RNA (1)...(19): siRNA sense strand
gccuacgccugcacuuuga

SEQ ID NO: 694613 - RNA, 19 nt, Homo sapiens
  misc_RNA (1)...(19): siRNA sense strand
ccuccgaaguaucgaaaga

SEQ ID NO: 694614 - RNA, 19 nt, Homo sapiens
  misc_RNA (1)...(19): siRNA sense strand
guggaggaccaucggauaa

SEQ ID NO: 694615 - RNA, 19 nt, Homo sapiens
  misc_RNA (1)...(19): siRNA sense strand
ggacaacccacugcuagca

SEQ ID NO: 694616 - RNA, 19 nt, Homo sapiens
  misc_RNA (1)...(19): siRNA sense strand
caagcacgccucuucaaag

SEQ ID NO: 694617 - RNA, 19 nt, Homo sapiens
  misc_RNA (1)...(19): siRNA sense strand
gaguauaagccgcugaaca

SEQ ID NO: 694618 - RNA, 19 nt, Homo sapiens
  misc_RNA (1)...(19): siRNA sense strand
caacacccguccauguacu

SEQ ID NO: 694619 - RNA, 19 nt, Homo sapiens
  misc_RNA (1)...(19): siRNA sense strand
uccgaaguaucgaaagauu

SEQ ID NO: 694620 - RNA, 19 nt, Homo sapiens
  misc_RNA (1)...(19): siRNA sense strand
cccaagcaccuguuuguga

SEQ ID NO: 694621 - RNA, 19 nt, Homo sapiens
  misc_RNA (1)...(19): siRNA sense strand
cagaggccauggagaagca

SEQ ID NO: 694622 - RNA, 19 nt, Homo sapiens
  misc_RNA (1)...(19): siRNA sense strand
agacaggaguccauucacu

SEQ ID NO: 694623 - RNA, 19 nt, Homo sapiens
  misc_RNA (1)...(19): siRNA sense strand
caggagcggucagucauag

SEQ ID NO: 694624 - RNA, 19 nt, Homo sapiens
  misc_RNA (1)...(19): siRNA sense strand
cagagugacccauguaucu

SEQ ID NO: 694625 - RNA, 19 nt, Homo sapiens
  misc_RNA (1)...(19): siRNA sense strand
ccaggagcggucagucaua

SEQ ID NO: 694626 - RNA, 19 nt, Homo sapiens
  misc_RNA (1)...(19): siRNA sense strand
gagggacaacccacugcua

SEQ ID NO: 694627 - RNA, 19 nt, Homo sapiens
  misc_RNA (1)...(19): siRNA sense strand
gagaaauaucuggaagaaa

SEQ ID NO: 694628 - RNA, 19 nt, Homo sapiens
  misc_RNA (1)...(19): siRNA sense strand
ugccagugauagucaauau

SEQ ID NO: 694629 - RNA, 19 nt, Homo sapiens
  misc_RNA (1)...(19): siRNA sense strand
ccucagcccgcaagaagaa

SEQ ID NO: 694630 - RNA, 19 nt, Homo sapiens
  misc_RNA (1)...(19): siRNA sense strand
ggaauaccagagcccauca

SEQ ID NO: 694631 - RNA, 19 nt, Homo sapiens
  misc_RNA (1)...(19): siRNA sense strand
ggagcggucagucauagug

SEQ ID NO: 694632 - RNA, 19 nt, Homo sapiens
  misc_RNA (1)...(19): siRNA sense strand
gggagucgcaauccucaga

SEQ ID NO: 694633 - RNA, 19 nt, Homo sapiens
  misc_RNA (1)...(19): siRNA sense strand
gcuaugauuucuggaucga

SEQ ID NO: 694634 - RNA, 19 nt, Homo sapiens
  misc_RNA (1)...(19): siRNA sense strand
gaggaccaucggauaaaga

SEQ ID NO: 694635 - RNA, 19 nt, Homo sapiens
  misc_RNA (1)...(19): siRNA sense strand
gggagaaauaucuggaaga

SEQ ID NO: 694636 - RNA, 19 nt, Homo sapiens
  misc_RNA (1)...(19): siRNA sense strand
gaggagcagaaggccauua

SEQ ID NO: 694637 - RNA, 19 nt, Homo sapiens
  misc_RNA (1)...(19): siRNA sense strand
ccauggagaagcaagaaga

SEQ ID NO: 694638 - RNA, 19 nt, Homo sapiens
  misc_RNA (1)...(19): siRNA sense strand
caggugagaagaaggaaug

SEQ ID NO: 694639 - RNA, 19 nt, Homo sapiens
  misc_RNA (1)...(19): siRNA sense strand
gagcuccucaaacccauga

SEQ ID NO: 694640 - RNA, 19 nt, Homo sapiens
  misc_RNA (1)...(19): siRNA sense strand
ccucaacacccguccaugu

SEQ ID NO: 694641 - RNA, 19 nt, Homo sapiens
  misc_RNA (1)...(19): siRNA sense strand
aguauaagccgcugaacau

SEQ ID NO: 694642 - RNA, 19 nt, Homo sapiens
  misc_RNA (1)...(19): siRNA sense strand
cccagaauccuccagaaga

SEQ ID NO: 694643 - RNA, 19 nt, Homo sapiens
  misc_RNA (1)...(19): siRNA sense strand
gcucuaccagcgcuucuga

SEQ ID NO: 694644 - RNA, 19 nt, Homo sapiens
  misc_RNA (1)...(19): siRNA sense strand
gaaguuggaaggcauugac

SEQ ID NO: 694645 - RNA, 19 nt, Homo sapiens
  misc_RNA (1)...(19): siRNA sense strand
gcugcagccucccaaaggu

SEQ ID NO: 694646 - RNA, 19 nt, Homo sapiens
  misc_RNA (1)...(19): siRNA sense strand
gaaauaucuggaagaaacu

SEQ ID NO: 694647 - RNA, 19 nt, Homo sapiens
  misc_RNA (1)...(19): siRNA sense strand
gcagucacucacaacaaga

SEQ ID NO: 694648 - RNA, 19 nt, Homo sapiens
  misc_RNA (1)...(19): siRNA sense strand
gcgaguauaagccgcugaa

SEQ ID NO: 694649 - RNA, 19 nt, Homo sapiens
  misc_RNA (1)...(19): siRNA sense strand
ccauguaucugggaagacu

SEQ ID NO: 694650 - RNA, 19 nt, Homo sapiens
  misc_RNA (1)...(19): siRNA sense strand
gaccaagcacgccucuuca

SEQ ID NO: 694651 - RNA, 19 nt, Homo sapiens
  misc_RNA (1)...(19): siRNA sense strand
gugcaccagucccucuuca

SEQ ID NO: 694652 - RNA, 19 nt, Homo sapiens
  misc_RNA (1)...(19): siRNA sense strand
aaccagagccggcugaaag

SEQ ID NO: 694653 - RNA, 19 nt, Homo sapiens
  misc_RNA (1)...(19): siRNA sense strand
uggcuggagucauggcuau

SEQ ID NO: 694654 - RNA, 19 nt, Homo sapiens
  misc_RNA (1)...(19): siRNA sense strand
ggaaggcgugaccgaauac

SEQ ID NO: 694655 - RNA, 19 nt, Homo sapiens
  misc_RNA (1)...(19): siRNA sense strand
cgccaucacggccgaauug

SEQ ID NO: 694656 - RNA, 19 nt, Homo sapiens
  misc_RNA (1)...(19): siRNA sense strand
gcugaaagcggagcugucu

SEQ ID NO: 694657 - RNA, 19 nt, Homo sapiens
  misc_RNA (1)...(19): siRNA sense strand
acccagacccugauaacuu

SEQ ID NO: 694658 - RNA, 19 nt, Homo sapiens
  misc_RNA (1)...(19): siRNA sense strand
uaugacuacuggugugauc

SEQ ID NO: 694659 - RNA, 19 nt, Homo sapiens
  misc_RNA (1)...(19): siRNA sense strand
cucaacacccguccaugua

SEQ ID NO: 694660 - RNA, 19 nt, Homo sapiens
  misc_RNA (1)...(19): siRNA sense strand
guuacaaggaggaggaguu

SEQ ID NO: 694661 - RNA, 19 nt, Homo sapiens
  misc_RNA (1)...(19): siRNA sense strand
cgaugaggucuucggcuuu

SEQ ID NO: 694662 - RNA, 19 nt, Homo sapiens
  misc_RNA (1)...(19): siRNA sense strand
gaccuccaaauacagcuuu

SEQ ID NO: 694663 - RNA, 19 nt, Homo sapiens
  misc_RNA (1)...(19): siRNA sense strand
caggaaggcgugaccgaau

SEQ ID NO: 694664 - RNA, 19 nt, Homo sapiens
  misc_RNA (1)...(19): siRNA sense strand
caacaagaauggcuucaaa

SEQ ID NO: 694665 - RNA, 19 nt, Homo sapiens
  misc_RNA (1)...(19): siRNA sense strand
ggagaaauaucuggaagaa

SEQ ID NO: 694666 - RNA, 19 nt, Homo sapiens
  misc_RNA (1)...(19): siRNA sense strand
caacugggaugauacuuau

SEQ ID NO: 694667 - RNA, 19 nt, Homo sapiens
  misc_RNA (1)...(19): siRNA sense strand
gaucuugguuccucuaaug

SEQ ID NO: 694668 - RNA, 19 nt, Homo sapiens
  misc_RNA (1)...(19): siRNA sense strand
agaaauaucuggaagaaac

SEQ ID NO: 694669 - RNA, 19 nt, Homo sapiens
  misc_RNA (1)...(19): siRNA sense strand
ggaagaagccucgccauca

SEQ ID NO: 694670 - RNA, 19 nt, Homo sapiens
  misc_RNA (1)...(19): siRNA sense strand
acacuaggaccuccaaaua

SEQ ID NO: 694671 - RNA, 19 nt, Homo sapiens
  misc_RNA (1)...(19): siRNA sense strand
gaugaggucuucggcuuug

SEQ ID NO: 694672 - RNA, 19 nt, Homo sapiens
  misc_RNA (1)...(19): siRNA sense strand
gggaugauacuuaugacua

SEQ ID NO: 694673 - RNA, 19 nt, Homo sapiens
  misc_RNA (1)...(19): siRNA sense strand
ggaccaagcacgccucuuc

SEQ ID NO: 694674 - RNA, 19 nt, Homo sapiens
  misc_RNA (1)...(19): siRNA sense strand
gaugauagcaccugucagu

SEQ ID NO: 694675 - RNA, 19 nt, Homo sapiens
  misc_RNA (1)...(19): siRNA sense strand
gaagaagccucgccaucac

SEQ ID NO: 694676 - RNA, 19 nt, Homo sapiens
  misc_RNA (1)...(19): siRNA sense strand
ccagaauccuccagaagau

SEQ ID NO: 694677 - RNA, 19 nt, Homo sapiens
  misc_RNA (1)...(19): siRNA sense strand
ccaaguggaccaucgauga

SEQ ID NO: 694678 - RNA, 19 nt, Homo sapiens
  misc_RNA (1)...(19): siRNA sense strand
gcgcuccaguuccggauaa

SEQ ID NO: 694679 - RNA, 19 nt, Homo sapiens
  misc_RNA (1)...(19): siRNA sense strand
guucacagcucaccauugc

SEQ ID NO: 694680 - RNA, 19 nt, Homo sapiens
  misc_RNA (1)...(19): siRNA sense strand
ggaugauacuuaugacuac

SEQ ID NO: 694681 - RNA, 19 nt, Homo sapiens
  misc_RNA (1)...(19): siRNA sense strand
aggaaggcgugaccgaaua

SEQ ID NO: 694682 - RNA, 19 nt, Homo sapiens
  misc_RNA (1)...(19): siRNA sense strand
gcaccagucccucuucaug

SEQ ID NO: 694683 - RNA, 19 nt, Homo sapiens
  misc_RNA (1)...(19): siRNA sense strand
gaagcaagaagaaggaaag

SEQ ID NO: 694684 - RNA, 19 nt, Homo sapiens
  misc_RNA (1)...(19): siRNA sense strand
caacaggugagaagaagga

SEQ ID NO: 694685 - RNA, 19 nt, Homo sapiens
  misc_RNA (1)...(19): siRNA sense strand
ggagaagcaagaagaagga

SEQ ID NO: 694686 - RNA, 19 nt, Homo sapiens
  misc_RNA (1)...(19): siRNA sense strand
acaacugggaugauacuua

SEQ ID NO: 694687 - RNA, 19 nt, Homo sapiens
  misc_RNA (1)...(19): siRNA sense strand
gcacuuugauggguauucu

SEQ ID NO: 694688 - RNA, 19 nt, Homo sapiens
  misc_RNA (1)...(19): siRNA sense strand
ugaaagcggagcugucuga

SEQ ID NO: 694689 - RNA, 19 nt, Homo sapiens
  misc_RNA (1)...(19): siRNA sense strand
gagcagaaggccauuacug

SEQ ID NO: 694690 - RNA, 19 nt, Homo sapiens
  misc_RNA (1)...(19): siRNA sense strand
ggaggaccaucggauaaag

SEQ ID NO: 694691 - RNA, 19 nt, Homo sapiens
  misc_RNA (1)...(19): siRNA sense strand
ggcagucacucacaacaag

SEQ ID NO: 694692 - RNA, 19 nt, Homo sapiens
  misc_RNA (1)...(19): siRNA sense strand
ccaagcacgccucuucaaa

SEQ ID NO: 694693 - RNA, 19 nt, Homo sapiens
  misc_RNA (1)...(19): siRNA sense strand
ggucagucauaguggagaa

SEQ ID NO: 694694 - RNA, 19 nt, Homo sapiens
  misc_RNA (1)...(19): siRNA sense strand
acuaggaccuccaaauaca

SEQ ID NO: 694695 - RNA, 19 nt, Homo sapiens
  misc_RNA (1)...(19): siRNA sense strand
uuugauggcuggagucaug

SEQ ID NO: 694696 - RNA, 19 nt, Homo sapiens
  misc_RNA (1)...(19): siRNA sense strand
uuugacaacugggaugaua

SEQ ID NO: 694697 - RNA, 19 nt, Homo sapiens
  misc_RNA (1)...(19): siRNA sense strand
ucaaacccaugaagaagag

SEQ ID NO: 694698 - RNA, 19 nt, Homo sapiens
  misc_RNA (1)...(19): siRNA sense strand
caccguggcugagguaugu

SEQ ID NO: 694699 - RNA, 19 nt, Homo sapiens
  misc_RNA (1)...(19): siRNA sense strand
gcaugaacccgucccuugu

SEQ ID NO: 694700 - RNA, 19 nt, Homo sapiens
  misc_RNA (1)...(19): siRNA sense strand
gagaacuccucaggcucua

SEQ ID NO: 694701 - RNA, 19 nt, Homo sapiens
  misc_RNA (1)...(19): siRNA sense strand
caagaauggcuucaaacug

SEQ ID NO: 694702 - RNA, 19 nt, Homo sapiens
  misc_RNA (1)...(19): siRNA sense strand
agaggaagcgcagggaaua

SEQ ID NO: 694703 - RNA, 19 nt, Homo sapiens
  misc_RNA (1)...(19): siRNA sense strand
gaaccagagccggcugaaa

SEQ ID NO: 694704 - RNA, 19 nt, Homo sapiens
  misc_RNA (1)...(19): siRNA sense strand
cccagacccugauaacuuc

SEQ ID NO: 694705 - RNA, 19 nt, Homo sapiens
  misc_RNA (1)...(19): siRNA sense strand
acagcuuccuggucaauau

SEQ ID NO: 694706 - RNA, 19 nt, Homo sapiens
  misc_RNA (1)...(19): siRNA sense strand
gccuacgccugcacuuuga

SEQ ID NO: 694707 - RNA, 19 nt, Homo sapiens
  misc_RNA (1)...(19): siRNA sense strand
ccuccgaaguaucgaaaga

SEQ ID NO: 694708 - RNA, 19 nt, Homo sapiens
  misc_RNA (1)...(19): siRNA sense strand
guggaggaccaucggauaa

SEQ ID NO: 694709 - RNA, 19 nt, Homo sapiens
  misc_RNA (1)...(19): siRNA sense strand
ggacaacccacugcuagca

SEQ ID NO: 694710 - RNA, 19 nt, Homo sapiens
  misc_RNA (1)...(19): siRNA sense strand
caagcacgccucuucaaag

SEQ ID NO: 694711 - RNA, 19 nt, Homo sapiens
  misc_RNA (1)...(19): siRNA sense strand
gaguauaagccgcugaaca

SEQ ID NO: 694712 - RNA, 19 nt, Homo sapiens
  misc_RNA (1)...(19): siRNA sense strand
caacacccguccauguacu

SEQ ID NO: 694713 - RNA, 19 nt, Homo sapiens
  misc_RNA (1)...(19): siRNA sense strand
uccgaaguaucgaaagauu

SEQ ID NO: 694714 - RNA, 19 nt, Homo sapiens
  misc_RNA (1)...(19): siRNA sense strand
cccaagcaccuguuuguga

SEQ ID NO: 694715 - RNA, 19 nt, Homo sapiens
  misc_RNA (1)...(19): siRNA sense strand
ccaggagcggucagucaua

SEQ ID NO: 694716 - RNA, 19 nt, Homo sapiens
  misc_RNA (1)...(19): siRNA sense strand
gagggacaacccacugcua

SEQ ID NO: 694717 - RNA, 19 nt, Homo sapiens
  misc_RNA (1)...(19): siRNA sense strand
cagaggccauggagaagca

SEQ ID NO: 694718 - RNA, 19 nt, Homo sapiens
  misc_RNA (1)...(19): siRNA sense strand
caggagcggucagucauag

SEQ ID NO: 694719 - RNA, 19 nt, Homo sapiens
  misc_RNA (1)...(19): siRNA sense strand
gagaaauaucuggaagaaa

SEQ ID NO: 694720 - RNA, 19 nt, Homo sapiens
  misc_RNA (1)...(19): siRNA sense strand
ccucagcccgcaagaagaa

SEQ ID NO: 694721 - RNA, 19 nt, Homo sapiens
  misc_RNA (1)...(19): siRNA sense strand
ggaauaccagagcccauca

SEQ ID NO: 694722 - RNA, 19 nt, Homo sapiens
  misc_RNA (1)...(19): siRNA sense strand
gggagucgcaauccucaga

SEQ ID NO: 694723 - RNA, 19 nt, Homo sapiens
  misc_RNA (1)...(19): siRNA sense strand
gcuaugauuucuggaucga

SEQ ID NO: 694724 - RNA, 19 nt, Homo sapiens
  misc_RNA (1)...(19): siRNA sense strand
gaggaccaucggauaaaga

SEQ ID NO: 694725 - RNA, 19 nt, Homo sapiens
  misc_RNA (1)...(19): siRNA sense strand
ggagcggucagucauagug

SEQ ID NO: 694726 - RNA, 19 nt, Homo sapiens
  misc_RNA (1)...(19): siRNA sense strand
gggagaaauaucuggaaga

SEQ ID NO: 694727 - RNA, 19 nt, Homo sapiens
  misc_RNA (1)...(19): siRNA sense strand
gaggagcagaaggccauua

SEQ ID NO: 694728 - RNA, 19 nt, Homo sapiens
  misc_RNA (1)...(19): siRNA sense strand
ccauggagaagcaagaaga

SEQ ID NO: 694729 - RNA, 19 nt, Homo sapiens
  misc_RNA (1)...(19): siRNA sense strand
gagcuccucaaacccauga

SEQ ID NO: 694730 - RNA, 19 nt, Homo sapiens
  misc_RNA (1)...(19): siRNA sense strand
ccucaacacccguccaugu

SEQ ID NO: 694731 - RNA, 19 nt, Homo sapiens
  misc_RNA (1)...(19): siRNA sense strand
caggugagaagaaggaaug

SEQ ID NO: 694732 - RNA, 19 nt, Homo sapiens
  misc_RNA (1)...(19): siRNA sense strand
gaaguuggaaggcauugac

SEQ ID NO: 694733 - RNA, 19 nt, Homo sapiens
  misc_RNA (1)...(19): siRNA sense strand
cccagaauccuccagaaga

SEQ ID NO: 694734 - RNA, 19 nt, Homo sapiens
  misc_RNA (1)...(19): siRNA sense strand
aguauaagccgcugaacau

SEQ ID NO: 694735 - RNA, 19 nt, Homo sapiens
  misc_RNA (1)...(19): siRNA sense strand
gcucuaccagcgcuucuga

SEQ ID NO: 694736 - RNA, 19 nt, Homo sapiens
  misc_RNA (1)...(19): siRNA sense strand
gcugcagccucccaaaggu

SEQ ID NO: 694737 - RNA, 19 nt, Homo sapiens
  misc_RNA (1)...(19): siRNA sense strand
gaaauaucuggaagaaacu

SEQ ID NO: 694738 - RNA, 19 nt, Homo sapiens
  misc_RNA (1)...(19): siRNA sense strand
gcgaguauaagccgcugaa

SEQ ID NO: 694739 - RNA, 19 nt, Homo sapiens
  misc_RNA (1)...(19): siRNA sense strand
gaccaagcacgccucuuca

SEQ ID NO: 694740 - RNA, 19 nt, Homo sapiens
  misc_RNA (1)...(19): siRNA sense strand
gugcaccagucccucuuca

SEQ ID NO: 694741 - RNA, 19 nt, Homo sapiens
  misc_RNA (1)...(19): siRNA sense strand
aaccagagccggcugaaag

SEQ ID NO: 694742 - RNA, 19 nt, Homo sapiens
  misc_RNA (1)...(19): siRNA sense strand
gcagucacucacaacaaga

SEQ ID NO: 694743 - RNA, 19 nt, Homo sapiens
  misc_RNA (1)...(19): siRNA sense strand
uggcuggagucauggcuau

SEQ ID NO: 694744 - RNA, 19 nt, Homo sapiens
  misc_RNA (1)...(19): siRNA sense strand
ggaaggcgugaccgaauac

SEQ ID NO: 694745 - RNA, 19 nt, Homo sapiens
  misc_RNA (1)...(19): siRNA sense strand
cgccaucacggccgaauug

SEQ ID NO: 694746 - RNA, 19 nt, Homo sapiens
  misc_RNA (1)...(19): siRNA sense strand
gcugaaagcggagcugucu

SEQ ID NO: 694747 - RNA, 19 nt, Homo sapiens
  misc_RNA (1)...(19): siRNA sense strand
acccagacccugauaacuu

SEQ ID NO: 694748 - RNA, 19 nt, Homo sapiens
  misc_RNA (1)...(19): siRNA sense strand
uaugacuacuggugugauc

SEQ ID NO: 694749 - RNA, 19 nt, Homo sapiens
  misc_RNA (1)...(19): siRNA sense strand
cucaacacccguccaugua

SEQ ID NO: 694750 - RNA, 19 nt, Homo sapiens
  misc_RNA (1)...(19): siRNA sense strand
guuacaaggaggaggaguu

SEQ ID NO: 694751 - RNA, 19 nt, Homo sapiens
  misc_RNA (1)...(19): siRNA sense strand
cgaugaggucuucggcuuu

SEQ ID NO: 694752 - RNA, 19 nt, Homo sapiens
  misc_RNA (1)...(19): siRNA sense strand
caggaaggcgugaccgaau

SEQ ID NO: 694753 - RNA, 19 nt, Homo sapiens
  misc_RNA (1)...(19): siRNA sense strand
gaccuccaaauacagcuuu

SEQ ID NO: 694754 - RNA, 19 nt, Homo sapiens
  misc_RNA (1)...(19): siRNA sense strand
gagaagcaagaagaaggaa

SEQ ID NO: 694755 - RNA, 19 nt, Homo sapiens
  misc_RNA (1)...(19): siRNA sense strand
caaguucacagcucaccau

SEQ ID NO: 694756 - RNA, 19 nt, Homo sapiens
  misc_RNA (1)...(19): siRNA sense strand
gcugagguauguggcuauc

SEQ ID NO: 694757 - RNA, 19 nt, Homo sapiens
  misc_RNA (1)...(19): siRNA sense strand
cgagaagacgggccacaag

SEQ ID NO: 694758 - RNA, 19 nt, Homo sapiens
  misc_RNA (1)...(19): siRNA sense strand
guacgggagucgcaauccu

SEQ ID NO: 694759 - RNA, 19 nt, Homo sapiens
  misc_RNA (1)...(19): siRNA sense strand
aggaguagcgggcaucuca

SEQ ID NO: 694760 - RNA, 19 nt, Homo sapiens
  misc_RNA (1)...(19): siRNA sense strand
uguggaggaccaucggaua

SEQ ID NO: 694761 - RNA, 19 nt, Homo sapiens
  misc_RNA (1)...(19): siRNA sense strand
cauggagaagcaagaagaa

SEQ ID NO: 694762 - RNA, 19 nt, Homo sapiens
  misc_RNA (1)...(19): siRNA sense strand
gaugauacuuaugacuacu

SEQ ID NO: 694763 - RNA, 19 nt, Homo sapiens
  misc_RNA (1)...(19): siRNA sense strand
cuugguuccucuaaugaug

SEQ ID NO: 694764 - RNA, 19 nt, Homo sapiens
  misc_RNA (1)...(19): siRNA sense strand
gaaacgacaucgagaagaa

SEQ ID NO: 694765 - RNA, 19 nt, Homo sapiens
  misc_RNA (1)...(19): siRNA sense strand
gcacgaacgucggaaacga

SEQ ID NO: 694766 - RNA, 19 nt, Homo sapiens
  misc_RNA (1)...(19): siRNA sense strand
gagaagaacaggauaaagc

SEQ ID NO: 694767 - RNA, 19 nt, Homo sapiens
  misc_RNA (1)...(19): siRNA sense strand
gagcauuccaggagagaaa

SEQ ID NO: 694768 - RNA, 19 nt, Homo sapiens
  misc_RNA (1)...(19): siRNA sense strand
gcuucgaccucaugaacaa

SEQ ID NO: 694769 - RNA, 19 nt, Homo sapiens
  misc_RNA (1)...(19): siRNA sense strand
ggaaacgacaucgagaaga

SEQ ID NO: 694770 - RNA, 19 nt, Homo sapiens
  misc_RNA (1)...(19): siRNA sense strand
gaaugggaaagacagaaga

SEQ ID NO: 694771 - RNA, 19 nt, Homo sapiens
  misc_RNA (1)...(19): siRNA sense strand
agacagaagagaagggaaa

SEQ ID NO: 694772 - RNA, 19 nt, Homo sapiens
  misc_RNA (1)...(19): siRNA sense strand
gggaaagacagaagagaag

SEQ ID NO: 694773 - RNA, 19 nt, Homo sapiens
  misc_RNA (1)...(19): siRNA sense strand
ggaaugggaaagacagaag

SEQ ID NO: 694774 - RNA, 19 nt, Homo sapiens
  misc_RNA (1)...(19): siRNA sense strand
ggaccgcuuggagcaguua

SEQ ID NO: 694775 - RNA, 19 nt, Homo sapiens
  misc_RNA (1)...(19): siRNA sense strand
cagaagagaagggaaaugg

SEQ ID NO: 694776 - RNA, 19 nt, Homo sapiens
  misc_RNA (1)...(19): siRNA sense strand
aggacggccucaagcauga

SEQ ID NO: 694777 - RNA, 19 nt, Homo sapiens
  misc_RNA (1)...(19): siRNA sense strand
ggaaauggcaagggagcau

SEQ ID NO: 694778 - RNA, 19 nt, Homo sapiens
  misc_RNA (1)...(19): siRNA sense strand
gcuuggagcaguuagaaag

SEQ ID NO: 694779 - RNA, 19 nt, Homo sapiens
  misc_RNA (1)...(19): siRNA sense strand
ugggaaagacagaagagaa

SEQ ID NO: 694780 - RNA, 19 nt, Homo sapiens
  misc_RNA (1)...(19): siRNA sense strand
uggagcaguuagaaaggaa

SEQ ID NO: 694781 - RNA, 19 nt, Homo sapiens
  misc_RNA (1)...(19): siRNA sense strand
caucgagaagaacaggaua

SEQ ID NO: 694782 - RNA, 19 nt, Homo sapiens
  misc_RNA (1)...(19): siRNA sense strand
ucgagaagaacaggauaaa

SEQ ID NO: 694783 - RNA, 19 nt, Homo sapiens
  misc_RNA (1)...(19): siRNA sense strand
gggcuucgaccucaugaac

SEQ ID NO: 694784 - RNA, 19 nt, Homo sapiens
  misc_RNA (1)...(19): siRNA sense strand
gcuucgaccucaugaacaa

SEQ ID NO: 694785 - RNA, 19 nt, Homo sapiens
  misc_RNA (1)...(19): siRNA sense strand
aggacggccucaagcauga

SEQ ID NO: 694786 - RNA, 19 nt, Homo sapiens
  misc_RNA (1)...(19): siRNA sense strand
gggcuucgaccucaugaac

SEQ ID NO: 694787 - RNA, 19 nt, Homo sapiens
  misc_RNA (1)...(19): siRNA sense strand
gaaacgacaucgagaagaa

SEQ ID NO: 694788 - RNA, 19 nt, Homo sapiens
  misc_RNA (1)...(19): siRNA sense strand
gcacgaacgucggaaacga

SEQ ID NO: 694789 - RNA, 19 nt, Homo sapiens
  misc_RNA (1)...(19): siRNA sense strand
gagaagaacaggauaaagc

SEQ ID NO: 694790 - RNA, 19 nt, Homo sapiens
  misc_RNA (1)...(19): siRNA sense strand
gagcauuccaggagagaaa

SEQ ID NO: 694791 - RNA, 19 nt, Homo sapiens
  misc_RNA (1)...(19): siRNA sense strand
gcuucgaccucaugaacaa

SEQ ID NO: 694792 - RNA, 19 nt, Homo sapiens
  misc_RNA (1)...(19): siRNA sense strand
ggaaacgacaucgagaaga

SEQ ID NO: 694793 - RNA, 19 nt, Homo sapiens
  misc_RNA (1)...(19): siRNA sense strand
gaaugggaaagacagaaga

SEQ ID NO: 694794 - RNA, 19 nt, Homo sapiens
  misc_RNA (1)...(19): siRNA sense strand
agacagaagagaagggaaa

SEQ ID NO: 694795 - RNA, 19 nt, Homo sapiens
  misc_RNA (1)...(19): siRNA sense strand
gggaaagacagaagagaag

SEQ ID NO: 694796 - RNA, 19 nt, Homo sapiens
  misc_RNA (1)...(19): siRNA sense strand
ggaaugggaaagacagaag

SEQ ID NO: 694797 - RNA, 19 nt, Homo sapiens
  misc_RNA (1)...(19): siRNA sense strand
ggaccgcuuggagcaguua

SEQ ID NO: 694798 - RNA, 19 nt, Homo sapiens
  misc_RNA (1)...(19): siRNA sense strand
cagaagagaagggaaaugg

SEQ ID NO: 694799 - RNA, 19 nt, Homo sapiens
  misc_RNA (1)...(19): siRNA sense strand
aggacggccucaagcauga

SEQ ID NO: 694800 - RNA, 19 nt, Homo sapiens
  misc_RNA (1)...(19): siRNA sense strand
ggaaauggcaagggagcau

SEQ ID NO: 694801 - RNA, 19 nt, Homo sapiens
  misc_RNA (1)...(19): siRNA sense strand
gcuuggagcaguuagaaag

SEQ ID NO: 694802 - RNA, 19 nt, Homo sapiens
  misc_RNA (1)...(19): siRNA sense strand
ugggaaagacagaagagaa

SEQ ID NO: 694803 - RNA, 19 nt, Homo sapiens
  misc_RNA (1)...(19): siRNA sense strand
uggagcaguuagaaaggaa

SEQ ID NO: 694804 - RNA, 19 nt, Homo sapiens
  misc_RNA (1)...(19): siRNA sense strand
caucgagaagaacaggaua

SEQ ID NO: 694805 - RNA, 19 nt, Homo sapiens
  misc_RNA (1)...(19): siRNA sense strand
ucgagaagaacaggauaaa

SEQ ID NO: 694806 - RNA, 19 nt, Homo sapiens
  misc_RNA (1)...(19): siRNA sense strand
gggcuucgaccucaugaac

SEQ ID NO: 694807 - RNA, 19 nt, Homo sapiens
  misc_RNA (1)...(19): siRNA sense strand
gaaacgacaucgagaagaa

SEQ ID NO: 694808 - RNA, 19 nt, Homo sapiens
  misc_RNA (1)...(19): siRNA sense strand
gcacgaacgucggaaacga

SEQ ID NO: 694809 - RNA, 19 nt, Homo sapiens
  misc_RNA (1)...(19): siRNA sense strand
gagaagaacaggauaaagc

SEQ ID NO: 694810 - RNA, 19 nt, Homo sapiens
  misc_RNA (1)...(19): siRNA sense strand
gagcauuccaggagagaaa

SEQ ID NO: 694811 - RNA, 19 nt, Homo sapiens
  misc_RNA (1)...(19): siRNA sense strand
gcuucgaccucaugaacaa

SEQ ID NO: 694812 - RNA, 19 nt, Homo sapiens
  misc_RNA (1)...(19): siRNA sense strand
ggaaacgacaucgagaaga

SEQ ID NO: 694813 - RNA, 19 nt, Homo sapiens
  misc_RNA (1)...(19): siRNA sense strand
gaaugggaaagacagaaga

SEQ ID NO: 694814 - RNA, 19 nt, Homo sapiens
  misc_RNA (1)...(19): siRNA sense strand
agacagaagagaagggaaa

SEQ ID NO: 694815 - RNA, 19 nt, Homo sapiens
  misc_RNA (1)...(19): siRNA sense strand
gggaaagacagaagagaag

SEQ ID NO: 694816 - RNA, 19 nt, Homo sapiens
  misc_RNA (1)...(19): siRNA sense strand
ggaaugggaaagacagaag

SEQ ID NO: 694817 - RNA, 19 nt, Homo sapiens
  misc_RNA (1)...(19): siRNA sense strand
ggaccgcuuggagcaguua

SEQ ID NO: 694818 - RNA, 19 nt, Homo sapiens
  misc_RNA (1)...(19): siRNA sense strand
cagaagagaagggaaaugg

SEQ ID NO: 694819 - RNA, 19 nt, Homo sapiens
  misc_RNA (1)...(19): siRNA sense strand
aggacggccucaagcauga

SEQ ID NO: 694820 - RNA, 19 nt, Homo sapiens
  misc_RNA (1)...(19): siRNA sense strand
ggaaauggcaagggagcau

SEQ ID NO: 694821 - RNA, 19 nt, Homo sapiens
  misc_RNA (1)...(19): siRNA sense strand
gcuuggagcaguuagaaag

SEQ ID NO: 694822 - RNA, 19 nt, Homo sapiens
  misc_RNA (1)...(19): siRNA sense strand
ugggaaagacagaagagaa

SEQ ID NO: 694823 - RNA, 19 nt, Homo sapiens
  misc_RNA (1)...(19): siRNA sense strand
uggagcaguuagaaaggaa

SEQ ID NO: 694824 - RNA, 19 nt, Homo sapiens
  misc_RNA (1)...(19): siRNA sense strand
caucgagaagaacaggaua

SEQ ID NO: 694825 - RNA, 19 nt, Homo sapiens
  misc_RNA (1)...(19): siRNA sense strand
ucgagaagaacaggauaaa

SEQ ID NO: 694826 - RNA, 19 nt, Homo sapiens
  misc_RNA (1)...(19): siRNA sense strand
gggcuucgaccucaugaac

SEQ ID NO: 694827 - RNA, 19 nt, Homo sapiens
  misc_RNA (1)...(19): siRNA sense strand
gaaacgacaucgagaagaa

SEQ ID NO: 694828 - RNA, 19 nt, Homo sapiens
  misc_RNA (1)...(19): siRNA sense strand
gcacgaacgucggaaacga

SEQ ID NO: 694829 - RNA, 19 nt, Homo sapiens
  misc_RNA (1)...(19): siRNA sense strand
gagaagaacaggauaaagc

SEQ ID NO: 694830 - RNA, 19 nt, Homo sapiens
  misc_RNA (1)...(19): siRNA sense strand
gagcauuccaggagagaaa

SEQ ID NO: 694831 - RNA, 19 nt, Homo sapiens
  misc_RNA (1)...(19): siRNA sense strand
gcuucgaccucaugaacaa

SEQ ID NO: 694832 - RNA, 19 nt, Homo sapiens
  misc_RNA (1)...(19): siRNA sense strand
ggaaacgacaucgagaaga

SEQ ID NO: 694833 - RNA, 19 nt, Homo sapiens
  misc_RNA (1)...(19): siRNA sense strand
gaaugggaaagacagaaga

SEQ ID NO: 694834 - RNA, 19 nt, Homo sapiens
  misc_RNA (1)...(19): siRNA sense strand
agacagaagagaagggaaa

SEQ ID NO: 694835 - RNA, 19 nt, Homo sapiens
  misc_RNA (1)...(19): siRNA sense strand
gggaaagacagaagagaag

SEQ ID NO: 694836 - RNA, 19 nt, Homo sapiens
  misc_RNA (1)...(19): siRNA sense strand
ggaaugggaaagacagaag

SEQ ID NO: 694837 - RNA, 19 nt, Homo sapiens
  misc_RNA (1)...(19): siRNA sense strand
ggaccgcuuggagcaguua

SEQ ID NO: 694838 - RNA, 19 nt, Homo sapiens
  misc_RNA (1)...(19): siRNA sense strand
cagaagagaagggaaaugg

SEQ ID NO: 694839 - RNA, 19 nt, Homo sapiens
  misc_RNA (1)...(19): siRNA sense strand
aggacggccucaagcauga

SEQ ID NO: 694840 - RNA, 19 nt, Homo sapiens
  misc_RNA (1)...(19): siRNA sense strand
ggaaauggcaagggagcau

SEQ ID NO: 694841 - RNA, 19 nt, Homo sapiens
  misc_RNA (1)...(19): siRNA sense strand
gcuuggagcaguuagaaag

SEQ ID NO: 694842 - RNA, 19 nt, Homo sapiens
  misc_RNA (1)...(19): siRNA sense strand
ugggaaagacagaagagaa

SEQ ID NO: 694843 - RNA, 19 nt, Homo sapiens
  misc_RNA (1)...(19): siRNA sense strand
uggagcaguuagaaaggaa

SEQ ID NO: 694844 - RNA, 19 nt, Homo sapiens
  misc_RNA (1)...(19): siRNA sense strand
caucgagaagaacaggaua

SEQ ID NO: 694845 - RNA, 19 nt, Homo sapiens
  misc_RNA (1)...(19): siRNA sense strand
ucgagaagaacaggauaaa

SEQ ID NO: 694846 - RNA, 19 nt, Homo sapiens
  misc_RNA (1)...(19): siRNA sense strand
gggcuucgaccucaugaac

SEQ ID NO: 694847 - RNA, 19 nt, Homo sapiens
  misc_RNA (1)...(19): siRNA sense strand
gcuucgaccucaugaacaa

SEQ ID NO: 694848 - RNA, 19 nt, Homo sapiens
  misc_RNA (1)...(19): siRNA sense strand
aggacggccucaagcauga

SEQ ID NO: 694849 - RNA, 19 nt, Homo sapiens
  misc_RNA (1)...(19): siRNA sense strand
gggcuucgaccucaugaac

SEQ ID NO: 694850 - RNA, 19 nt, Homo sapiens
  misc_RNA (1)...(19): siRNA sense strand
gagcauuccaggagagaaa

SEQ ID NO: 694851 - RNA, 19 nt, Homo sapiens
  misc_RNA (1)...(19): siRNA sense strand
gcuucgaccucaugaacaa

SEQ ID NO: 694852 - RNA, 19 nt, Homo sapiens
  misc_RNA (1)...(19): siRNA sense strand
agacagaagagaagggaaa

SEQ ID NO: 694853 - RNA, 19 nt, Homo sapiens
  misc_RNA (1)...(19): siRNA sense strand
gggaaagacagaagagaag

SEQ ID NO: 694854 - RNA, 19 nt, Homo sapiens
  misc_RNA (1)...(19): siRNA sense strand
ggaccgcuuggagcaguua

SEQ ID NO: 694855 - RNA, 19 nt, Homo sapiens
  misc_RNA (1)...(19): siRNA sense strand
cagaagagaagggaaaugg

SEQ ID NO: 694856 - RNA, 19 nt, Homo sapiens
  misc_RNA (1)...(19): siRNA sense strand
aggacggccucaagcauga

SEQ ID NO: 694857 - RNA, 19 nt, Homo sapiens
  misc_RNA (1)...(19): siRNA sense strand
gcuuggagcaguuagaaag

SEQ ID NO: 694858 - RNA, 19 nt, Homo sapiens
  misc_RNA (1)...(19): siRNA sense strand
ggaaauggcaagggagcau

SEQ ID NO: 694859 - RNA, 19 nt, Homo sapiens
  misc_RNA (1)...(19): siRNA sense strand
uggagcaguuagaaaggaa

SEQ ID NO: 694860 - RNA, 19 nt, Homo sapiens
  misc_RNA (1)...(19): siRNA sense strand
gggcuucgaccucaugaac

SEQ ID NO: 694861 - RNA, 19 nt, Homo sapiens
  misc_RNA (1)...(19): siRNA sense strand
gaaacgacaucgagaagaa

SEQ ID NO: 694862 - RNA, 19 nt, Homo sapiens
  misc_RNA (1)...(19): siRNA sense strand
gcacgaacgucggaaacga

SEQ ID NO: 694863 - RNA, 19 nt, Homo sapiens
  misc_RNA (1)...(19): siRNA sense strand
gagaagaacaggauaaagc

SEQ ID NO: 694864 - RNA, 19 nt, Homo sapiens
  misc_RNA (1)...(19): siRNA sense strand
gagcauuccaggagagaaa

SEQ ID NO: 694865 - RNA, 19 nt, Homo sapiens
  misc_RNA (1)...(19): siRNA sense strand
gcuucgaccucaugaacaa

SEQ ID NO: 694866 - RNA, 19 nt, Homo sapiens
  misc_RNA (1)...(19): siRNA sense strand
ggaaacgacaucgagaaga

SEQ ID NO: 694867 - RNA, 19 nt, Homo sapiens
  misc_RNA (1)...(19): siRNA sense strand
gaaugggaaagacagaaga

SEQ ID NO: 694868 - RNA, 19 nt, Homo sapiens
  misc_RNA (1)...(19): siRNA sense strand
agacagaagagaagggaaa

SEQ ID NO: 694869 - RNA, 19 nt, Homo sapiens
  misc_RNA (1)...(19): siRNA sense strand
gggaaagacagaagagaag

SEQ ID NO: 694870 - RNA, 19 nt, Homo sapiens
  misc_RNA (1)...(19): siRNA sense strand
ggaaugggaaagacagaag

SEQ ID NO: 694871 - RNA, 19 nt, Homo sapiens
  misc_RNA (1)...(19): siRNA sense strand
ggaccgcuuggagcaguua

SEQ ID NO: 694872 - RNA, 19 nt, Homo sapiens
  misc_RNA (1)...(19): siRNA sense strand
cagaagagaagggaaaugg

SEQ ID NO: 694873 - RNA, 19 nt, Homo sapiens
  misc_RNA (1)...(19): siRNA sense strand
aggacggccucaagcauga

SEQ ID NO: 694874 - RNA, 19 nt, Homo sapiens
  misc_RNA (1)...(19): siRNA sense strand
ggaaauggcaagggagcau

SEQ ID NO: 694875 - RNA, 19 nt, Homo sapiens
  misc_RNA (1)...(19): siRNA sense strand
gcuuggagcaguuagaaag

SEQ ID NO: 694876 - RNA, 19 nt, Homo sapiens
  misc_RNA (1)...(19): siRNA sense strand
ugggaaagacagaagagaa

SEQ ID NO: 694877 - RNA, 19 nt, Homo sapiens
  misc_RNA (1)...(19): siRNA sense strand
uggagcaguuagaaaggaa

SEQ ID NO: 694878 - RNA, 19 nt, Homo sapiens
  misc_RNA (1)...(19): siRNA sense strand
caucgagaagaacaggaua

SEQ ID NO: 694879 - RNA, 19 nt, Homo sapiens
  misc_RNA (1)...(19): siRNA sense strand
ucgagaagaacaggauaaa

SEQ ID NO: 694880 - RNA, 19 nt, Homo sapiens
  misc_RNA (1)...(19): siRNA sense strand
gggcuucgaccucaugaac

SEQ ID NO: 694881 - RNA, 19 nt, Homo sapiens
  misc_RNA (1)...(19): siRNA sense strand
gaaacgacaucgagaagaa

SEQ ID NO: 694882 - RNA, 19 nt, Homo sapiens
  misc_RNA (1)...(19): siRNA sense strand
gcacgaacgucggaaacga

SEQ ID NO: 694883 - RNA, 19 nt, Homo sapiens
  misc_RNA (1)...(19): siRNA sense strand
gagaagaacaggauaaagc

SEQ ID NO: 694884 - RNA, 19 nt, Homo sapiens
  misc_RNA (1)...(19): siRNA sense strand
gagcauuccaggagagaaa

SEQ ID NO: 694885 - RNA, 19 nt, Homo sapiens
  misc_RNA (1)...(19): siRNA sense strand
gcuucgaccucaugaacaa

SEQ ID NO: 694886 - RNA, 19 nt, Homo sapiens
  misc_RNA (1)...(19): siRNA sense strand
ggaaacgacaucgagaaga

SEQ ID NO: 694887 - RNA, 19 nt, Homo sapiens
  misc_RNA (1)...(19): siRNA sense strand
gaaugggaaagacagaaga

SEQ ID NO: 694888 - RNA, 19 nt, Homo sapiens
  misc_RNA (1)...(19): siRNA sense strand
agacagaagagaagggaaa

SEQ ID NO: 694889 - RNA, 19 nt, Homo sapiens
  misc_RNA (1)...(19): siRNA sense strand
gggaaagacagaagagaag

SEQ ID NO: 694890 - RNA, 19 nt, Homo sapiens
  misc_RNA (1)...(19): siRNA sense strand
ggaaugggaaagacagaag

SEQ ID NO: 694891 - RNA, 19 nt, Homo sapiens
  misc_RNA (1)...(19): siRNA sense strand
ggaccgcuuggagcaguua

SEQ ID NO: 694892 - RNA, 19 nt, Homo sapiens
  misc_RNA (1)...(19): siRNA sense strand
cagaagagaagggaaaugg

SEQ ID NO: 694893 - RNA, 19 nt, Homo sapiens
  misc_RNA (1)...(19): siRNA sense strand
aggacggccucaagcauga

SEQ ID NO: 694894 - RNA, 19 nt, Homo sapiens
  misc_RNA (1)...(19): siRNA sense strand
ggaaauggcaagggagcau

SEQ ID NO: 694895 - RNA, 19 nt, Homo sapiens
  misc_RNA (1)...(19): siRNA sense strand
gcuuggagcaguuagaaag

SEQ ID NO: 694896 - RNA, 19 nt, Homo sapiens
  misc_RNA (1)...(19): siRNA sense strand
ugggaaagacagaagagaa

SEQ ID NO: 694897 - RNA, 19 nt, Homo sapiens
  misc_RNA (1)...(19): siRNA sense strand
uggagcaguuagaaaggaa

SEQ ID NO: 694898 - RNA, 19 nt, Homo sapiens
  misc_RNA (1)...(19): siRNA sense strand
caucgagaagaacaggaua

SEQ ID NO: 694899 - RNA, 19 nt, Homo sapiens
  misc_RNA (1)...(19): siRNA sense strand
ucgagaagaacaggauaaa

SEQ ID NO: 694900 - RNA, 19 nt, Homo sapiens
  misc_RNA (1)...(19): siRNA sense strand
gggcuucgaccucaugaac

SEQ ID NO: 694901 - RNA, 19 nt, Homo sapiens
  misc_RNA (1)...(19): siRNA sense strand
gaagagcucuguuaucaau

SEQ ID NO: 694902 - RNA, 19 nt, Homo sapiens
  misc_RNA (1)...(19): siRNA sense strand
gcacagaugucacuacaga

SEQ ID NO: 694903 - RNA, 19 nt, Homo sapiens
  misc_RNA (1)...(19): siRNA sense strand
gauacuagcuacugugaaa

SEQ ID NO: 694904 - RNA, 19 nt, Homo sapiens
  misc_RNA (1)...(19): siRNA sense strand
gggaagagcucuguuauca

SEQ ID NO: 694905 - RNA, 19 nt, Homo sapiens
  misc_RNA (1)...(19): siRNA sense strand
cuggauagcuggauugaua

SEQ ID NO: 694906 - RNA, 19 nt, Homo sapiens
  misc_RNA (1)...(19): siRNA sense strand
gagaugaccugguguuagu

SEQ ID NO: 694907 - RNA, 19 nt, Homo sapiens
  misc_RNA (1)...(19): siRNA sense strand
caucagagccagaauauau

SEQ ID NO: 694908 - RNA, 19 nt, Homo sapiens
  misc_RNA (1)...(19): siRNA sense strand
gaaccuguuucuccacuga

SEQ ID NO: 694909 - RNA, 19 nt, Homo sapiens
  misc_RNA (1)...(19): siRNA sense strand
gcaaggauauaaagacaag

SEQ ID NO: 694910 - RNA, 19 nt, Homo sapiens
  misc_RNA (1)...(19): siRNA sense strand
gaagcaacauauaagaauc

SEQ ID NO: 694911 - RNA, 19 nt, Homo sapiens
  misc_RNA (1)...(19): siRNA sense strand
ugaaggaacugauggagau

SEQ ID NO: 694912 - RNA, 19 nt, Homo sapiens
  misc_RNA (1)...(19): siRNA sense strand
ccuagaugcugaugucuuu

SEQ ID NO: 694913 - RNA, 19 nt, Homo sapiens
  misc_RNA (1)...(19): siRNA sense strand
gaauagccacugaagauga

SEQ ID NO: 694914 - RNA, 19 nt, Homo sapiens
  misc_RNA (1)...(19): siRNA sense strand
cauaauggauucaguaaac

SEQ ID NO: 694915 - RNA, 19 nt, Homo sapiens
  misc_RNA (1)...(19): siRNA sense strand
gacaagcuuuccaucauug

SEQ ID NO: 694916 - RNA, 19 nt, Homo sapiens
  misc_RNA (1)...(19): siRNA sense strand
gaaaugcaaggauauaaag

SEQ ID NO: 694917 - RNA, 19 nt, Homo sapiens
  misc_RNA (1)...(19): siRNA sense strand
ggauaaaguucucccuagu

SEQ ID NO: 694918 - RNA, 19 nt, Homo sapiens
  misc_RNA (1)...(19): siRNA sense strand
ccuggcagcugaagauaaa

SEQ ID NO: 694919 - RNA, 19 nt, Homo sapiens
  misc_RNA (1)...(19): siRNA sense strand
gcaaaggaaguucuuagug

SEQ ID NO: 694920 - RNA, 19 nt, Homo sapiens
  misc_RNA (1)...(19): siRNA sense strand
agacaagcuuuccaucauu

SEQ ID NO: 694921 - RNA, 19 nt, Homo sapiens
  misc_RNA (1)...(19): siRNA sense strand
ggcacuugcugaaggauuu

SEQ ID NO: 694922 - RNA, 19 nt, Homo sapiens
  misc_RNA (1)...(19): siRNA sense strand
guagaaaugcaaggauaua

SEQ ID NO: 694923 - RNA, 19 nt, Homo sapiens
  misc_RNA (1)...(19): siRNA sense strand
uagcuggauugauaaguuu

SEQ ID NO: 694924 - RNA, 19 nt, Homo sapiens
  misc_RNA (1)...(19): siRNA sense strand
aagccuaucuuaugacaga

SEQ ID NO: 694925 - RNA, 19 nt, Homo sapiens
  misc_RNA (1)...(19): siRNA sense strand
gacagcacauggaaagaug

SEQ ID NO: 694926 - RNA, 19 nt, Homo sapiens
  misc_RNA (1)...(19): siRNA sense strand
acagaaggaucagaugaaa

SEQ ID NO: 694927 - RNA, 19 nt, Homo sapiens
  misc_RNA (1)...(19): siRNA sense strand
uauaaccaauugcuuccua

SEQ ID NO: 694928 - RNA, 19 nt, Homo sapiens
  misc_RNA (1)...(19): siRNA sense strand
gcagacagcacauggaaag

SEQ ID NO: 694929 - RNA, 19 nt, Homo sapiens
  misc_RNA (1)...(19): siRNA sense strand
gagagaugaccugguguua

SEQ ID NO: 694930 - RNA, 19 nt, Homo sapiens
  misc_RNA (1)...(19): siRNA sense strand
ugguagaaaugcaaggaua

SEQ ID NO: 694931 - RNA, 19 nt, Homo sapiens
  misc_RNA (1)...(19): siRNA sense strand
uaaagccuaucuuaugaca

SEQ ID NO: 694932 - RNA, 19 nt, Homo sapiens
  misc_RNA (1)...(19): siRNA sense strand
ccaauugcuuccuaagugu

SEQ ID NO: 694933 - RNA, 19 nt, Homo sapiens
  misc_RNA (1)...(19): siRNA sense strand
aggauuucaugcaagauua

SEQ ID NO: 694934 - RNA, 19 nt, Homo sapiens
  misc_RNA (1)...(19): siRNA sense strand
gacagaaggaucagaugaa

SEQ ID NO: 694935 - RNA, 19 nt, Homo sapiens
  misc_RNA (1)...(19): siRNA sense strand
ggaguuuguuacugaagga

SEQ ID NO: 694936 - RNA, 19 nt, Homo sapiens
  misc_RNA (1)...(19): siRNA sense strand
gcaauguugugggauaaag

SEQ ID NO: 694937 - RNA, 19 nt, Homo sapiens
  misc_RNA (1)...(19): siRNA sense strand
gauaaaguucucccuagug

SEQ ID NO: 694938 - RNA, 19 nt, Homo sapiens
  misc_RNA (1)...(19): siRNA sense strand
ugauggagauaaagccuau

SEQ ID NO: 694939 - RNA, 19 nt, Homo sapiens
  misc_RNA (1)...(19): siRNA sense strand
caugcaagauuacaggaau

SEQ ID NO: 694940 - RNA, 19 nt, Homo sapiens
  misc_RNA (1)...(19): siRNA sense strand
aaugcaauguugugggaua

SEQ ID NO: 694941 - RNA, 19 nt, Homo sapiens
  misc_RNA (1)...(19): siRNA sense strand
caagauuacaggaauuuca

SEQ ID NO: 694942 - RNA, 19 nt, Homo sapiens
  misc_RNA (1)...(19): siRNA sense strand
cgcaaacucugaaucaaca

SEQ ID NO: 694943 - RNA, 19 nt, Homo sapiens
  misc_RNA (1)...(19): siRNA sense strand
aagacaagcuuuccaucau

SEQ ID NO: 694944 - RNA, 19 nt, Homo sapiens
  misc_RNA (1)...(19): siRNA sense strand
ugacagaaggaucagauga

SEQ ID NO: 694945 - RNA, 19 nt, Homo sapiens
  misc_RNA (1)...(19): siRNA sense strand
gaaggaacugauggagaua

SEQ ID NO: 694946 - RNA, 19 nt, Homo sapiens
  misc_RNA (1)...(19): siRNA sense strand
auaagaauccggaacuuga

SEQ ID NO: 694947 - RNA, 19 nt, Homo sapiens
  misc_RNA (1)...(19): siRNA sense strand
caucauuggugaggugcua

SEQ ID NO: 694948 - RNA, 19 nt, Homo sapiens
  misc_RNA (1)...(19): siRNA sense strand
ucgaauagccacugaagau

SEQ ID NO: 694949 - RNA, 19 nt, Homo sapiens
  misc_RNA (1)...(19): siRNA sense strand
ggucgcaaacucugaauca

SEQ ID NO: 694950 - RNA, 19 nt, Homo sapiens
  misc_RNA (1)...(19): siRNA sense strand
ggaagagcucuguuaucaa

SEQ ID NO: 694951 - RNA, 19 nt, Homo sapiens
  misc_RNA (1)...(19): siRNA sense strand
gaacugauggagauaaagc

SEQ ID NO: 694952 - RNA, 19 nt, Homo sapiens
  misc_RNA (1)...(19): siRNA sense strand
auagcuggauugauaaguu

SEQ ID NO: 694953 - RNA, 19 nt, Homo sapiens
  misc_RNA (1)...(19): siRNA sense strand
gcucuguuaucaaugcaau

SEQ ID NO: 694954 - RNA, 19 nt, Homo sapiens
  misc_RNA (1)...(19): siRNA sense strand
ggaaguucuuagugcuaga

SEQ ID NO: 694955 - RNA, 19 nt, Homo sapiens
  misc_RNA (1)...(19): siRNA sense strand
uguuaucaaugcaauguug

SEQ ID NO: 694956 - RNA, 19 nt, Homo sapiens
  misc_RNA (1)...(19): siRNA sense strand
gguagaaaugcaaggauau

SEQ ID NO: 694957 - RNA, 19 nt, Homo sapiens
  misc_RNA (1)...(19): siRNA sense strand
uacuggaguuuguuacuga

SEQ ID NO: 694958 - RNA, 19 nt, Homo sapiens
  misc_RNA (1)...(19): siRNA sense strand
aaacagauacuagcuacug

SEQ ID NO: 694959 - RNA, 19 nt, Homo sapiens
  misc_RNA (1)...(19): siRNA sense strand
cuagugggauuggccauau

SEQ ID NO: 694960 - RNA, 19 nt, Homo sapiens
  misc_RNA (1)...(19): siRNA sense strand
accaauugcuuccuaagug

SEQ ID NO: 694961 - RNA, 19 nt, Homo sapiens
  misc_RNA (1)...(19): siRNA sense strand
gaucgaauagccacugaag

SEQ ID NO: 694962 - RNA, 19 nt, Homo sapiens
  misc_RNA (1)...(19): siRNA sense strand
uccggaacuugaucgaaua

SEQ ID NO: 694963 - RNA, 19 nt, Homo sapiens
  misc_RNA (1)...(19): siRNA sense strand
uuacugaaggaucacauuu

SEQ ID NO: 694964 - RNA, 19 nt, Homo sapiens
  misc_RNA (1)...(19): siRNA sense strand
uagaagcacagaaucguau

SEQ ID NO: 694965 - RNA, 19 nt, Homo sapiens
  misc_RNA (1)...(19): siRNA sense strand
aggaacugauggagauaaa

SEQ ID NO: 694966 - RNA, 19 nt, Homo sapiens
  misc_RNA (1)...(19): siRNA sense strand
gauuacaggaauuucagaa

SEQ ID NO: 694967 - RNA, 19 nt, Homo sapiens
  misc_RNA (1)...(19): siRNA sense strand
uagugggauuggccauaua

SEQ ID NO: 694968 - RNA, 19 nt, Homo sapiens
  misc_RNA (1)...(19): siRNA sense strand
gcacaggggaugccagaaa

SEQ ID NO: 694969 - RNA, 19 nt, Homo sapiens
  misc_RNA (1)...(19): siRNA sense strand
auaaccaauugcuuccuaa

SEQ ID NO: 694970 - RNA, 19 nt, Homo sapiens
  misc_RNA (1)...(19): siRNA sense strand
cagauacuagcuacuguga

SEQ ID NO: 694971 - RNA, 19 nt, Homo sapiens
  misc_RNA (1)...(19): siRNA sense strand
gguggaggagcucaaaguu

SEQ ID NO: 694972 - RNA, 19 nt, Homo sapiens
  misc_RNA (1)...(19): siRNA sense strand
aauagccacugaagaugau

SEQ ID NO: 694973 - RNA, 19 nt, Homo sapiens
  misc_RNA (1)...(19): siRNA sense strand
aaaccuggcagcugaagau

SEQ ID NO: 694974 - RNA, 19 nt, Homo sapiens
  misc_RNA (1)...(19): siRNA sense strand
gcaucagagccagaauaua

SEQ ID NO: 694975 - RNA, 19 nt, Homo sapiens
  misc_RNA (1)...(19): siRNA sense strand
gaccugguguuaguagaca

SEQ ID NO: 694976 - RNA, 19 nt, Homo sapiens
  misc_RNA (1)...(19): siRNA sense strand
gggauuggccauauaacca

SEQ ID NO: 694977 - RNA, 19 nt, Homo sapiens
  misc_RNA (1)...(19): siRNA sense strand
guuuguuacugaaggauca

SEQ ID NO: 694978 - RNA, 19 nt, Homo sapiens
  misc_RNA (1)...(19): siRNA sense strand
cagcaaaggaaguucuuag

SEQ ID NO: 694979 - RNA, 19 nt, Homo sapiens
  misc_RNA (1)...(19): siRNA sense strand
uauaagaauccggaacuug

SEQ ID NO: 694980 - RNA, 19 nt, Homo sapiens
  misc_RNA (1)...(19): siRNA sense strand
aggcacagaugucacuaca

SEQ ID NO: 694981 - RNA, 19 nt, Homo sapiens
  misc_RNA (1)...(19): siRNA sense strand
guggaggagcucaaaguug

SEQ ID NO: 694982 - RNA, 19 nt, Homo sapiens
  misc_RNA (1)...(19): siRNA sense strand
acacaugaagguggcauuu

SEQ ID NO: 694983 - RNA, 19 nt, Homo sapiens
  misc_RNA (1)...(19): siRNA sense strand
uuagaagcacagaaucgua

SEQ ID NO: 694984 - RNA, 19 nt, Homo sapiens
  misc_RNA (1)...(19): siRNA sense strand
gaugcugaugucuuuguuu

SEQ ID NO: 694985 - RNA, 19 nt, Homo sapiens
  misc_RNA (1)...(19): siRNA sense strand
acuuugugcuggcuaagaa

SEQ ID NO: 694986 - RNA, 19 nt, Homo sapiens
  misc_RNA (1)...(19): siRNA sense strand
acacuaaugaauacggaaa

SEQ ID NO: 694987 - RNA, 19 nt, Homo sapiens
  misc_RNA (1)...(19): siRNA sense strand
gugugaagacaguuaauca

SEQ ID NO: 694988 - RNA, 19 nt, Homo sapiens
  misc_RNA (1)...(19): siRNA sense strand
aagagugugaagacaguua

SEQ ID NO: 694989 - RNA, 19 nt, Homo sapiens
  misc_RNA (1)...(19): siRNA sense strand
cgaauagccacugaagaug

SEQ ID NO: 694990 - RNA, 19 nt, Homo sapiens
  misc_RNA (1)...(19): siRNA sense strand
cauauaagaauccggaacu

SEQ ID NO: 694991 - RNA, 19 nt, Homo sapiens
  misc_RNA (1)...(19): siRNA sense strand
cugcaucagagccagaaua

SEQ ID NO: 694992 - RNA, 19 nt, Homo sapiens
  misc_RNA (1)...(19): siRNA sense strand
gauaaguuuugccuagaug

SEQ ID NO: 694993 - RNA, 19 nt, Homo sapiens
  misc_RNA (1)...(19): siRNA sense strand
ugagagaugaccugguguu

SEQ ID NO: 694994 - RNA, 19 nt, Homo sapiens
  misc_RNA (1)...(19): siRNA sense strand
uaagaauccggaacuugau

SEQ ID NO: 694995 - RNA, 19 nt, Homo sapiens
  misc_RNA (1)...(19): siRNA sense strand
agugggaagagcucuguua

SEQ ID NO: 694996 - RNA, 19 nt, Homo sapiens
  misc_RNA (1)...(19): siRNA sense strand
uuacuggaguuuguuacug

SEQ ID NO: 694997 - RNA, 19 nt, Homo sapiens
  misc_RNA (1)...(19): siRNA sense strand
aaacucugaaucaacacua

SEQ ID NO: 694998 - RNA, 19 nt, Homo sapiens
  misc_RNA (1)...(19): siRNA sense strand
ggacaagcagugggaagag

SEQ ID NO: 694999 - RNA, 19 nt, Homo sapiens
  misc_RNA (1)...(19): siRNA sense strand
gcacacuaucagagcuaaa

SEQ ID NO: 695000 - RNA, 19 nt, Homo sapiens
  misc_RNA (1)...(19): siRNA sense strand
augcaaggauauaaagaca

SEQ ID NO: 695001 - RNA, 19 nt, Homo sapiens
  misc_RNA (1)...(19): siRNA sense strand
gaagagcucuguuaucaau

SEQ ID NO: 695002 - RNA, 19 nt, Homo sapiens
  misc_RNA (1)...(19): siRNA sense strand
gcacagaugucacuacaga

SEQ ID NO: 695003 - RNA, 19 nt, Homo sapiens
  misc_RNA (1)...(19): siRNA sense strand
gauacuagcuacugugaaa

SEQ ID NO: 695004 - RNA, 19 nt, Homo sapiens
  misc_RNA (1)...(19): siRNA sense strand
gggaagagcucuguuauca

SEQ ID NO: 695005 - RNA, 19 nt, Homo sapiens
  misc_RNA (1)...(19): siRNA sense strand
cuggauagcuggauugaua

SEQ ID NO: 695006 - RNA, 19 nt, Homo sapiens
  misc_RNA (1)...(19): siRNA sense strand
aaacugaggaugauuguua

SEQ ID NO: 695007 - RNA, 19 nt, Homo sapiens
  misc_RNA (1)...(19): siRNA sense strand
guucagaguuucauccuaa

SEQ ID NO: 695008 - RNA, 19 nt, Homo sapiens
  misc_RNA (1)...(19): siRNA sense strand
ccaaagaaauagaucaguu

SEQ ID NO: 695009 - RNA, 19 nt, Homo sapiens
  misc_RNA (1)...(19): siRNA sense strand
gagaugaccugguguuagu

SEQ ID NO: 695010 - RNA, 19 nt, Homo sapiens
  misc_RNA (1)...(19): siRNA sense strand
aaacugcagucaccaagua

SEQ ID NO: 695011 - RNA, 19 nt, Homo sapiens
  misc_RNA (1)...(19): siRNA sense strand
caucagagccagaauauau

SEQ ID NO: 695012 - RNA, 19 nt, Homo sapiens
  misc_RNA (1)...(19): siRNA sense strand
acuccuaucuguuucauua

SEQ ID NO: 695013 - RNA, 19 nt, Homo sapiens
  misc_RNA (1)...(19): siRNA sense strand
gaaccuguuucuccacuga

SEQ ID NO: 695014 - RNA, 19 nt, Homo sapiens
  misc_RNA (1)...(19): siRNA sense strand
gggcuggucuucccuugua

SEQ ID NO: 695015 - RNA, 19 nt, Homo sapiens
  misc_RNA (1)...(19): siRNA sense strand
gcaaggauauaaagacaag

SEQ ID NO: 695016 - RNA, 19 nt, Homo sapiens
  misc_RNA (1)...(19): siRNA sense strand
gaugaaauuugucgacugu

SEQ ID NO: 695017 - RNA, 19 nt, Homo sapiens
  misc_RNA (1)...(19): siRNA sense strand
caagaaauuugaucucagu

SEQ ID NO: 695018 - RNA, 19 nt, Homo sapiens
  misc_RNA (1)...(19): siRNA sense strand
gaagcaacauauaagaauc

SEQ ID NO: 695019 - RNA, 19 nt, Homo sapiens
  misc_RNA (1)...(19): siRNA sense strand
gcuggaaacuccuaucugu

SEQ ID NO: 695020 - RNA, 19 nt, Homo sapiens
  misc_RNA (1)...(19): siRNA sense strand
ugaaggaacugauggagau

SEQ ID NO: 695021 - RNA, 19 nt, Homo sapiens
  misc_RNA (1)...(19): siRNA sense strand
ccuagaugcugaugucuuu

SEQ ID NO: 695022 - RNA, 19 nt, Homo sapiens
  misc_RNA (1)...(19): siRNA sense strand
uaucagagccuaucuuuca

SEQ ID NO: 695023 - RNA, 19 nt, Homo sapiens
  misc_RNA (1)...(19): siRNA sense strand
gaauagccacugaagauga

SEQ ID NO: 695024 - RNA, 19 nt, Homo sapiens
  misc_RNA (1)...(19): siRNA sense strand
cauaauggauucaguaaac

SEQ ID NO: 695025 - RNA, 19 nt, Homo sapiens
  misc_RNA (1)...(19): siRNA sense strand
gacaagcuuuccaucauug

SEQ ID NO: 695026 - RNA, 19 nt, Homo sapiens
  misc_RNA (1)...(19): siRNA sense strand
gaaauaaagcuguucaacu

SEQ ID NO: 695027 - RNA, 19 nt, Homo sapiens
  misc_RNA (1)...(19): siRNA sense strand
gaagaacucaugauuacau

SEQ ID NO: 695028 - RNA, 19 nt, Homo sapiens
  misc_RNA (1)...(19): siRNA sense strand
gcaaugacagaugaaauuu

SEQ ID NO: 695029 - RNA, 19 nt, Homo sapiens
  misc_RNA (1)...(19): siRNA sense strand
gaaaugcaaggauauaaag

SEQ ID NO: 695030 - RNA, 19 nt, Homo sapiens
  misc_RNA (1)...(19): siRNA sense strand
caggaagaacucaugauua

SEQ ID NO: 695031 - RNA, 19 nt, Homo sapiens
  misc_RNA (1)...(19): siRNA sense strand
gauaaacuacauacacuga

SEQ ID NO: 695032 - RNA, 19 nt, Homo sapiens
  misc_RNA (1)...(19): siRNA sense strand
ggauaaaguucucccuagu

SEQ ID NO: 695033 - RNA, 19 nt, Homo sapiens
  misc_RNA (1)...(19): siRNA sense strand
ccuggcagcugaagauaaa

SEQ ID NO: 695034 - RNA, 19 nt, Homo sapiens
  misc_RNA (1)...(19): siRNA sense strand
acaaauagcuaccacuuuu

SEQ ID NO: 695035 - RNA, 19 nt, Homo sapiens
  misc_RNA (1)...(19): siRNA sense strand
guauggagcuuuguaucuu

SEQ ID NO: 695036 - RNA, 19 nt, Homo sapiens
  misc_RNA (1)...(19): siRNA sense strand
gaacucaugauuacauuag

SEQ ID NO: 695037 - RNA, 19 nt, Homo sapiens
  misc_RNA (1)...(19): siRNA sense strand
gcaaaggaaguucuuagug

SEQ ID NO: 695038 - RNA, 19 nt, Homo sapiens
  misc_RNA (1)...(19): siRNA sense strand
agacaagcuuuccaucauu

SEQ ID NO: 695039 - RNA, 19 nt, Homo sapiens
  misc_RNA (1)...(19): siRNA sense strand
caacaaauagcuaccacuu

SEQ ID NO: 695040 - RNA, 19 nt, Homo sapiens
  misc_RNA (1)...(19): siRNA sense strand
ggaagaaauuuggcugauc

SEQ ID NO: 695041 - RNA, 19 nt, Homo sapiens
  misc_RNA (1)...(19): siRNA sense strand
gaugguaugggaagaaauu

SEQ ID NO: 695042 - RNA, 19 nt, Homo sapiens
  misc_RNA (1)...(19): siRNA sense strand
ggcacuugcugaaggauuu

SEQ ID NO: 695043 - RNA, 19 nt, Homo sapiens
  misc_RNA (1)...(19): siRNA sense strand
cagcugguauacaggauaa

SEQ ID NO: 695044 - RNA, 19 nt, Homo sapiens
  misc_RNA (1)...(19): siRNA sense strand
caaagaaauagaucaguug

SEQ ID NO: 695045 - RNA, 19 nt, Homo sapiens
  misc_RNA (1)...(19): siRNA sense strand
guagaaaugcaaggauaua

SEQ ID NO: 695046 - RNA, 19 nt, Homo sapiens
  misc_RNA (1)...(19): siRNA sense strand
ggaagaagaaauugcuaga

SEQ ID NO: 695047 - RNA, 19 nt, Homo sapiens
  misc_RNA (1)...(19): siRNA sense strand
ucagcucccuagaucuuua

SEQ ID NO: 695048 - RNA, 19 nt, Homo sapiens
  misc_RNA (1)...(19): siRNA sense strand
uagcuggauugauaaguuu

SEQ ID NO: 695049 - RNA, 19 nt, Homo sapiens
  misc_RNA (1)...(19): siRNA sense strand
aagccuaucuuaugacaga

SEQ ID NO: 695050 - RNA, 19 nt, Homo sapiens
  misc_RNA (1)...(19): siRNA sense strand
gaagaaauugcuagauuac

SEQ ID NO: 695051 - RNA, 19 nt, Homo sapiens
  misc_RNA (1)...(19): siRNA sense strand
aaagggugcuccuaggauu

SEQ ID NO: 695052 - RNA, 19 nt, Homo sapiens
  misc_RNA (1)...(19): siRNA sense strand
gacagcacauggaaagaug

SEQ ID NO: 695053 - RNA, 19 nt, Homo sapiens
  misc_RNA (1)...(19): siRNA sense strand
acagaaggaucagaugaaa

SEQ ID NO: 695054 - RNA, 19 nt, Homo sapiens
  misc_RNA (1)...(19): siRNA sense strand
uauaaccaauugcuuccua

SEQ ID NO: 695055 - RNA, 19 nt, Homo sapiens
  misc_RNA (1)...(19): siRNA sense strand
ggagugauuuggaaaacua

SEQ ID NO: 695056 - RNA, 19 nt, Homo sapiens
  misc_RNA (1)...(19): siRNA sense strand
gaacuucuaugggcaucau

SEQ ID NO: 695057 - RNA, 19 nt, Homo sapiens
  misc_RNA (1)...(19): siRNA sense strand
gcagacagcacauggaaag

SEQ ID NO: 695058 - RNA, 19 nt, Homo sapiens
  misc_RNA (1)...(19): siRNA sense strand
gagagaugaccugguguua

SEQ ID NO: 695059 - RNA, 19 nt, Homo sapiens
  misc_RNA (1)...(19): siRNA sense strand
aggaagaacucaugauuac

SEQ ID NO: 695060 - RNA, 19 nt, Homo sapiens
  misc_RNA (1)...(19): siRNA sense strand
uaaacuacauacacugauc

SEQ ID NO: 695061 - RNA, 19 nt, Homo sapiens
  misc_RNA (1)...(19): siRNA sense strand
caugugcaaugacagauga

SEQ ID NO: 695062 - RNA, 19 nt, Homo sapiens
  misc_RNA (1)...(19): siRNA sense strand
ugguagaaaugcaaggaua

SEQ ID NO: 695063 - RNA, 19 nt, Homo sapiens
  misc_RNA (1)...(19): siRNA sense strand
uaaagccuaucuuaugaca

SEQ ID NO: 695064 - RNA, 19 nt, Homo sapiens
  misc_RNA (1)...(19): siRNA sense strand
ccaauugcuuccuaagugu

SEQ ID NO: 695065 - RNA, 19 nt, Homo sapiens
  misc_RNA (1)...(19): siRNA sense strand
cacaaguuauguucagauu

SEQ ID NO: 695066 - RNA, 19 nt, Homo sapiens
  misc_RNA (1)...(19): siRNA sense strand
aggauuucaugcaagauua

SEQ ID NO: 695067 - RNA, 19 nt, Homo sapiens
  misc_RNA (1)...(19): siRNA sense strand
acugaucccuugcaagaaa

SEQ ID NO: 695068 - RNA, 19 nt, Homo sapiens
  misc_RNA (1)...(19): siRNA sense strand
acacugaucccuugcaaga

SEQ ID NO: 695069 - RNA, 19 nt, Homo sapiens
  misc_RNA (1)...(19): siRNA sense strand
ggaguuuguuacugaagga

SEQ ID NO: 695070 - RNA, 19 nt, Homo sapiens
  misc_RNA (1)...(19): siRNA sense strand
gacagaaggaucagaugaa

SEQ ID NO: 695071 - RNA, 19 nt, Homo sapiens
  misc_RNA (1)...(19): siRNA sense strand
gcaauguugugggauaaag

SEQ ID NO: 695072 - RNA, 19 nt, Homo sapiens
  misc_RNA (1)...(19): siRNA sense strand
aaauagaucaguuggagaa

SEQ ID NO: 695073 - RNA, 19 nt, Homo sapiens
  misc_RNA (1)...(19): siRNA sense strand
ggagcgagccuuuaaacag

SEQ ID NO: 695074 - RNA, 19 nt, Homo sapiens
  misc_RNA (1)...(19): siRNA sense strand
gagcuuuguaucuuuauga

SEQ ID NO: 695075 - RNA, 19 nt, Homo sapiens
  misc_RNA (1)...(19): siRNA sense strand
uauggagcuuuguaucuuu

SEQ ID NO: 695076 - RNA, 19 nt, Homo sapiens
  misc_RNA (1)...(19): siRNA sense strand
gaggauauuguauuucguu

SEQ ID NO: 695077 - RNA, 19 nt, Homo sapiens
  misc_RNA (1)...(19): siRNA sense strand
gauaaaguucucccuagug

SEQ ID NO: 695078 - RNA, 19 nt, Homo sapiens
  misc_RNA (1)...(19): siRNA sense strand
ugauggagauaaagccuau

SEQ ID NO: 695079 - RNA, 19 nt, Homo sapiens
  misc_RNA (1)...(19): siRNA sense strand
ugaaguaaacgccuuagug

SEQ ID NO: 695080 - RNA, 19 nt, Homo sapiens
  misc_RNA (1)...(19): siRNA sense strand
gggaagaaauuuggcugau

SEQ ID NO: 695081 - RNA, 19 nt, Homo sapiens
  misc_RNA (1)...(19): siRNA sense strand
caugcaagauuacaggaau

SEQ ID NO: 695082 - RNA, 19 nt, Homo sapiens
  misc_RNA (1)...(19): siRNA sense strand
aaugcaauguugugggaua

SEQ ID NO: 695083 - RNA, 19 nt, Homo sapiens
  misc_RNA (1)...(19): siRNA sense strand
gaagaagaaauugcuagau

SEQ ID NO: 695084 - RNA, 19 nt, Homo sapiens
  misc_RNA (1)...(19): siRNA sense strand
uguaaacuaugcaacugaa

SEQ ID NO: 695085 - RNA, 19 nt, Homo sapiens
  misc_RNA (1)...(19): siRNA sense strand
ucuaugggcaucauuauug

SEQ ID NO: 695086 - RNA, 19 nt, Homo sapiens
  misc_RNA (1)...(19): siRNA sense strand
caagauuacaggaauuuca

SEQ ID NO: 695087 - RNA, 19 nt, Homo sapiens
  misc_RNA (1)...(19): siRNA sense strand
cgcaaacucugaaucaaca

SEQ ID NO: 695088 - RNA, 19 nt, Homo sapiens
  misc_RNA (1)...(19): siRNA sense strand
auaagaauccggaacuuga

SEQ ID NO: 695089 - RNA, 19 nt, Homo sapiens
  misc_RNA (1)...(19): siRNA sense strand
aagacaagcuuuccaucau

SEQ ID NO: 695090 - RNA, 19 nt, Homo sapiens
  misc_RNA (1)...(19): siRNA sense strand
caucauuggugaggugcua

SEQ ID NO: 695091 - RNA, 19 nt, Homo sapiens
  misc_RNA (1)...(19): siRNA sense strand
ugacagaaggaucagauga

SEQ ID NO: 695092 - RNA, 19 nt, Homo sapiens
  misc_RNA (1)...(19): siRNA sense strand
gaaggaacugauggagaua

SEQ ID NO: 695093 - RNA, 19 nt, Homo sapiens
  misc_RNA (1)...(19): siRNA sense strand
ucgaugcaccgaugaagua

SEQ ID NO: 695094 - RNA, 19 nt, Homo sapiens
  misc_RNA (1)...(19): siRNA sense strand
ggaagagcucuguuaucaa

SEQ ID NO: 695095 - RNA, 19 nt, Homo sapiens
  misc_RNA (1)...(19): siRNA sense strand
ucgaauagccacugaagau

SEQ ID NO: 695096 - RNA, 19 nt, Homo sapiens
  misc_RNA (1)...(19): siRNA sense strand
ugaaauuugucgacugucu

SEQ ID NO: 695097 - RNA, 19 nt, Homo sapiens
  misc_RNA (1)...(19): siRNA sense strand
ggucgcaaacucugaauca

SEQ ID NO: 695098 - RNA, 19 nt, Homo sapiens
  misc_RNA (1)...(19): siRNA sense strand
gaacugauggagauaaagc

SEQ ID NO: 695099 - RNA, 19 nt, Homo sapiens
  misc_RNA (1)...(19): siRNA sense strand
acaggaagaacucaugauu

SEQ ID NO: 695100 - RNA, 19 nt, Homo sapiens
  misc_RNA (1)...(19): siRNA sense strand
auagcuggauugauaaguu

SEQ ID NO: 695101 - RNA, 19 nt, Homo sapiens
  misc_RNA (1)...(19): siRNA sense strand
gaagacagaauguuccaua

SEQ ID NO: 695102 - RNA, 19 nt, Homo sapiens
  misc_RNA (1)...(19): siRNA sense strand
gacagaauguuccauauca

SEQ ID NO: 695103 - RNA, 19 nt, Homo sapiens
  misc_RNA (1)...(19): siRNA sense strand
gcaccguccucaucauaaa

SEQ ID NO: 695104 - RNA, 19 nt, Homo sapiens
  misc_RNA (1)...(19): siRNA sense strand
aagaugagauguucuaugu

SEQ ID NO: 695105 - RNA, 19 nt, Homo sapiens
  misc_RNA (1)...(19): siRNA sense strand
gauuacagcuuccacaagu

SEQ ID NO: 695106 - RNA, 19 nt, Homo sapiens
  misc_RNA (1)...(19): siRNA sense strand
gaccaugugucaacuuaug

SEQ ID NO: 695107 - RNA, 19 nt, Homo sapiens
  misc_RNA (1)...(19): siRNA sense strand
uggcuaacauugcuauauu

SEQ ID NO: 695108 - RNA, 19 nt, Homo sapiens
  misc_RNA (1)...(19): siRNA sense strand
caacuugaauaccuugauc

SEQ ID NO: 695109 - RNA, 19 nt, Homo sapiens
  misc_RNA (1)...(19): siRNA sense strand
cggaccaugugucaacuua

SEQ ID NO: 695110 - RNA, 19 nt, Homo sapiens
  misc_RNA (1)...(19): siRNA sense strand
gaagaugagauguucuaug

SEQ ID NO: 695111 - RNA, 19 nt, Homo sapiens
  misc_RNA (1)...(19): siRNA sense strand
ggcuaacauugcuauauug

SEQ ID NO: 695112 - RNA, 19 nt, Homo sapiens
  misc_RNA (1)...(19): siRNA sense strand
gggcaccguccucaucaua

SEQ ID NO: 695113 - RNA, 19 nt, Homo sapiens
  misc_RNA (1)...(19): siRNA sense strand
ugaugaagaugagauguuc

SEQ ID NO: 695114 - RNA, 19 nt, Homo sapiens
  misc_RNA (1)...(19): siRNA sense strand
gcuaacauugcuauauuga

SEQ ID NO: 695115 - RNA, 19 nt, Homo sapiens
  misc_RNA (1)...(19): siRNA sense strand
uccauuaccugaccuuugu

SEQ ID NO: 695116 - RNA, 19 nt, Homo sapiens
  misc_RNA (1)...(19): siRNA sense strand
ugaauuugaugaagaugag

SEQ ID NO: 695117 - RNA, 19 nt, Homo sapiens
  misc_RNA (1)...(19): siRNA sense strand
acaacaacuugaauaccuu

SEQ ID NO: 695118 - RNA, 19 nt, Homo sapiens
  misc_RNA (1)...(19): siRNA sense strand
aagacagaauguuccauau

SEQ ID NO: 695119 - RNA, 19 nt, Homo sapiens
  misc_RNA (1)...(19): siRNA sense strand
cauaaagucucugcguucu

SEQ ID NO: 695120 - RNA, 19 nt, Homo sapiens
  misc_RNA (1)...(19): siRNA sense strand
caucaaggcggaccaugug

SEQ ID NO: 695121 - RNA, 19 nt, Homo sapiens
  misc_RNA (1)...(19): siRNA sense strand
cagaauguuccauaucaga

SEQ ID NO: 695122 - RNA, 19 nt, Homo sapiens
  misc_RNA (1)...(19): siRNA sense strand
ucagagcugugaucuugag

SEQ ID NO: 695123 - RNA, 19 nt, Homo sapiens
  misc_RNA (1)...(19): siRNA sense strand
ucuggcaucuggaggaguu

SEQ ID NO: 695124 - RNA, 19 nt, Homo sapiens
  misc_RNA (1)...(19): siRNA sense strand
acccucaucugccacauug

SEQ ID NO: 695125 - RNA, 19 nt, Homo sapiens
  misc_RNA (1)...(19): siRNA sense strand
caaggcggaccauguguca

SEQ ID NO: 695126 - RNA, 19 nt, Homo sapiens
  misc_RNA (1)...(19): siRNA sense strand
gauguucuauguggaucug

SEQ ID NO: 695127 - RNA, 19 nt, Homo sapiens
  misc_RNA (1)...(19): siRNA sense strand
gaacaacaacuugaauacc

SEQ ID NO: 695128 - RNA, 19 nt, Homo sapiens
  misc_RNA (1)...(19): siRNA sense strand
gaacagauuacagcuucca

SEQ ID NO: 695129 - RNA, 19 nt, Homo sapiens
  misc_RNA (1)...(19): siRNA sense strand
ugaacaacaacuugaauac

SEQ ID NO: 695130 - RNA, 19 nt, Homo sapiens
  misc_RNA (1)...(19): siRNA sense strand
ggcaccguccucaucauaa

SEQ ID NO: 695131 - RNA, 19 nt, Homo sapiens
  misc_RNA (1)...(19): siRNA sense strand
ccaagagccaauccagaug

SEQ ID NO: 695132 - RNA, 19 nt, Homo sapiens
  misc_RNA (1)...(19): siRNA sense strand
cagauuacagcuuccacaa

SEQ ID NO: 695133 - RNA, 19 nt, Homo sapiens
  misc_RNA (1)...(19): siRNA sense strand
aacaacaacuugaauaccu

SEQ ID NO: 695134 - RNA, 19 nt, Homo sapiens
  misc_RNA (1)...(19): siRNA sense strand
ccagaacagauuacagcuu

SEQ ID NO: 695135 - RNA, 19 nt, Homo sapiens
  misc_RNA (1)...(19): siRNA sense strand
cccaagagccaauccagau

SEQ ID NO: 695136 - RNA, 19 nt, Homo sapiens
  misc_RNA (1)...(19): siRNA sense strand
gcuuccacaaguuccauua

SEQ ID NO: 695137 - RNA, 19 nt, Homo sapiens
  misc_RNA (1)...(19): siRNA sense strand
agacagaauguuccauauc

SEQ ID NO: 695138 - RNA, 19 nt, Homo sapiens
  misc_RNA (1)...(19): siRNA sense strand
ggaccaugugucaacuuau

SEQ ID NO: 695139 - RNA, 19 nt, Homo sapiens
  misc_RNA (1)...(19): siRNA sense strand
uuacagcuuccacaaguuc

SEQ ID NO: 695140 - RNA, 19 nt, Homo sapiens
  misc_RNA (1)...(19): siRNA sense strand
gaacugguguguauccuaa

SEQ ID NO: 695141 - RNA, 19 nt, Homo sapiens
  misc_RNA (1)...(19): siRNA sense strand
gcaugucucugcucuauuu

SEQ ID NO: 695142 - RNA, 19 nt, Homo sapiens
  misc_RNA (1)...(19): siRNA sense strand
gcaagcagcugacagugaa

SEQ ID NO: 695143 - RNA, 19 nt, Homo sapiens
  misc_RNA (1)...(19): siRNA sense strand
ugaaggugcuguauauauu

SEQ ID NO: 695144 - RNA, 19 nt, Homo sapiens
  misc_RNA (1)...(19): siRNA sense strand
ucaauugguuggaagagua

SEQ ID NO: 695145 - RNA, 19 nt, Homo sapiens
  misc_RNA (1)...(19): siRNA sense strand
gaaagaaugcgaguacuug

SEQ ID NO: 695146 - RNA, 19 nt, Homo sapiens
  misc_RNA (1)...(19): siRNA sense strand
ggacaucuuugacuacauc

SEQ ID NO: 695147 - RNA, 19 nt, Homo sapiens
  misc_RNA (1)...(19): siRNA sense strand
gaaacggugcagaauauuu

SEQ ID NO: 695148 - RNA, 19 nt, Homo sapiens
  misc_RNA (1)...(19): siRNA sense strand
gaacaggaaucccaaucag

SEQ ID NO: 695149 - RNA, 19 nt, Homo sapiens
  misc_RNA (1)...(19): siRNA sense strand
aaacggugcagaauauuua

SEQ ID NO: 695150 - RNA, 19 nt, Homo sapiens
  misc_RNA (1)...(19): siRNA sense strand
cagagcacguuccuuguaa

SEQ ID NO: 695151 - RNA, 19 nt, Homo sapiens
  misc_RNA (1)...(19): siRNA sense strand
agaaagagaacauagauga

SEQ ID NO: 695152 - RNA, 19 nt, Homo sapiens
  misc_RNA (1)...(19): siRNA sense strand
gagguggccuucccuuaug

SEQ ID NO: 695153 - RNA, 19 nt, Homo sapiens
  misc_RNA (1)...(19): siRNA sense strand
gacaauugcucggcaguug

SEQ ID NO: 695154 - RNA, 19 nt, Homo sapiens
  misc_RNA (1)...(19): siRNA sense strand
gcaaagaaagagaacauag

SEQ ID NO: 695155 - RNA, 19 nt, Homo sapiens
  misc_RNA (1)...(19): siRNA sense strand
caaagaaagagaacauaga

SEQ ID NO: 695156 - RNA, 19 nt, Homo sapiens
  misc_RNA (1)...(19): siRNA sense strand
uguaauggcuucagugaca

SEQ ID NO: 695157 - RNA, 19 nt, Homo sapiens
  misc_RNA (1)...(19): siRNA sense strand
cauaccagcuccugagaga

SEQ ID NO: 695158 - RNA, 19 nt, Homo sapiens
  misc_RNA (1)...(19): siRNA sense strand
cuauaaugcccucaacuua

SEQ ID NO: 695159 - RNA, 19 nt, Homo sapiens
  misc_RNA (1)...(19): siRNA sense strand
gaaggugcuguauauauug

SEQ ID NO: 695160 - RNA, 19 nt, Homo sapiens
  misc_RNA (1)...(19): siRNA sense strand
aagagaacauagaugagua

SEQ ID NO: 695161 - RNA, 19 nt, Homo sapiens
  misc_RNA (1)...(19): siRNA sense strand
aggaugaacugguguguau

SEQ ID NO: 695162 - RNA, 19 nt, Homo sapiens
  misc_RNA (1)...(19): siRNA sense strand
gcaauccucucuccgacau

SEQ ID NO: 695163 - RNA, 19 nt, Homo sapiens
  misc_RNA (1)...(19): siRNA sense strand
ggccuucccuuaugaaaca

SEQ ID NO: 695164 - RNA, 19 nt, Homo sapiens
  misc_RNA (1)...(19): siRNA sense strand
gaaaagcuuugaccuggaa

SEQ ID NO: 695165 - RNA, 19 nt, Homo sapiens
  misc_RNA (1)...(19): siRNA sense strand
cgggugaggugcuggagua

SEQ ID NO: 695166 - RNA, 19 nt, Homo sapiens
  misc_RNA (1)...(19): siRNA sense strand
gccaugaacuauguccuuu

SEQ ID NO: 695167 - RNA, 19 nt, Homo sapiens
  misc_RNA (1)...(19): siRNA sense strand
gaguggauccggaacauga

SEQ ID NO: 695168 - RNA, 19 nt, Homo sapiens
  misc_RNA (1)...(19): siRNA sense strand
ggaagauuguagccucguu

SEQ ID NO: 695169 - RNA, 19 nt, Homo sapiens
  misc_RNA (1)...(19): siRNA sense strand
ugaacuauguccuuuacga

SEQ ID NO: 695170 - RNA, 19 nt, Homo sapiens
  misc_RNA (1)...(19): siRNA sense strand
aagaagguguuacagagaa

SEQ ID NO: 695171 - RNA, 19 nt, Homo sapiens
  misc_RNA (1)...(19): siRNA sense strand
cagaauauuuacagugcaa

SEQ ID NO: 695172 - RNA, 19 nt, Homo sapiens
  misc_RNA (1)...(19): siRNA sense strand
ucuugaaggugcuguauau

SEQ ID NO: 695173 - RNA, 19 nt, Homo sapiens
  misc_RNA (1)...(19): siRNA sense strand
gauccgguauccagaagau

SEQ ID NO: 695174 - RNA, 19 nt, Homo sapiens
  misc_RNA (1)...(19): siRNA sense strand
gggcgacccuggacaucuu

SEQ ID NO: 695175 - RNA, 19 nt, Homo sapiens
  misc_RNA (1)...(19): siRNA sense strand
gcccucaacuuauauaugc

SEQ ID NO: 695176 - RNA, 19 nt, Homo sapiens
  misc_RNA (1)...(19): siRNA sense strand
cuguauauauugaccagua

SEQ ID NO: 695177 - RNA, 19 nt, Homo sapiens
  misc_RNA (1)...(19): siRNA sense strand
uaacguggagccucaagaa

SEQ ID NO: 695178 - RNA, 19 nt, Homo sapiens
  misc_RNA (1)...(19): siRNA sense strand
augaaacggugcagaauau

SEQ ID NO: 695179 - RNA, 19 nt, Homo sapiens
  misc_RNA (1)...(19): siRNA sense strand
uaagagguauggcuauaac

SEQ ID NO: 695180 - RNA, 19 nt, Homo sapiens
  misc_RNA (1)...(19): siRNA sense strand
uaugaaacggugcagaaua

SEQ ID NO: 695181 - RNA, 19 nt, Homo sapiens
  misc_RNA (1)...(19): siRNA sense strand
ggcaacagaagaucuuaaa

SEQ ID NO: 695182 - RNA, 19 nt, Homo sapiens
  misc_RNA (1)...(19): siRNA sense strand
ggacggcuccugucgauac

SEQ ID NO: 695183 - RNA, 19 nt, Homo sapiens
  misc_RNA (1)...(19): siRNA sense strand
gacaucagccucaaagaca

SEQ ID NO: 695184 - RNA, 19 nt, Homo sapiens
  misc_RNA (1)...(19): siRNA sense strand
ucagagcacguuccuugua

SEQ ID NO: 695185 - RNA, 19 nt, Homo sapiens
  misc_RNA (1)...(19): siRNA sense strand
gaucuggaguuugucuaug

SEQ ID NO: 695186 - RNA, 19 nt, Homo sapiens
  misc_RNA (1)...(19): siRNA sense strand
gcagccagaugacuaugag

SEQ ID NO: 695187 - RNA, 19 nt, Homo sapiens
  misc_RNA (1)...(19): siRNA sense strand
gcgggaagguguggaagga

SEQ ID NO: 695188 - RNA, 19 nt, Homo sapiens
  misc_RNA (1)...(19): siRNA sense strand
ggagauccgguauccagaa

SEQ ID NO: 695189 - RNA, 19 nt, Homo sapiens
  misc_RNA (1)...(19): siRNA sense strand
gaugagaagcacagagaug

SEQ ID NO: 695190 - RNA, 19 nt, Homo sapiens
  misc_RNA (1)...(19): siRNA sense strand
gaguauaaaguucggcaaa

SEQ ID NO: 695191 - RNA, 19 nt, Homo sapiens
  misc_RNA (1)...(19): siRNA sense strand
caagaagguguuacagaga

SEQ ID NO: 695192 - RNA, 19 nt, Homo sapiens
  misc_RNA (1)...(19): siRNA sense strand
guuggaagaguauaaaguu

SEQ ID NO: 695193 - RNA, 19 nt, Homo sapiens
  misc_RNA (1)...(19): siRNA sense strand
caugaacuauguccuuuac

SEQ ID NO: 695194 - RNA, 19 nt, Homo sapiens
  misc_RNA (1)...(19): siRNA sense strand
gauuguagccucguucuca

SEQ ID NO: 695195 - RNA, 19 nt, Homo sapiens
  misc_RNA (1)...(19): siRNA sense strand
gaaagagaacauagaugag

SEQ ID NO: 695196 - RNA, 19 nt, Homo sapiens
  misc_RNA (1)...(19): siRNA sense strand
ccaccagccuuucuauaac

SEQ ID NO: 695197 - RNA, 19 nt, Homo sapiens
  misc_RNA (1)...(19): siRNA sense strand
gcuuugaccuggaaauacu

SEQ ID NO: 695198 - RNA, 19 nt, Homo sapiens
  misc_RNA (1)...(19): siRNA sense strand
ccgacuacgucaauugguu

SEQ ID NO: 695199 - RNA, 19 nt, Homo sapiens
  misc_RNA (1)...(19): siRNA sense strand
gagcacguuccuuguaaug

SEQ ID NO: 695200 - RNA, 19 nt, Homo sapiens
  misc_RNA (1)...(19): siRNA sense strand
gagauccgguauccagaag

SEQ ID NO: 695201 - RNA, 19 nt, Homo sapiens
  misc_RNA (1)...(19): siRNA sense strand
gacgcuauuucucagaguu

SEQ ID NO: 695202 - RNA, 19 nt, Homo sapiens
  misc_RNA (1)...(19): siRNA sense strand
cguggagccucaagaaauc

SEQ ID NO: 695203 - RNA, 19 nt, Homo sapiens
  misc_RNA (1)...(19): siRNA sense strand
uggaugccaugaacuaugu

SEQ ID NO: 695204 - RNA, 19 nt, Homo sapiens
  misc_RNA (1)...(19): siRNA sense strand
ucguggagcuuguuugcaa

SEQ ID NO: 695205 - RNA, 19 nt, Homo sapiens
  misc_RNA (1)...(19): siRNA sense strand
guuagaagcgcggaagauu

SEQ ID NO: 695206 - RNA, 19 nt, Homo sapiens
  misc_RNA (1)...(19): siRNA sense strand
agacauccaggcccaaauu

SEQ ID NO: 695207 - RNA, 19 nt, Homo sapiens
  misc_RNA (1)...(19): siRNA sense strand
gugaggugcuggaguacau

SEQ ID NO: 695208 - RNA, 19 nt, Homo sapiens
  misc_RNA (1)...(19): siRNA sense strand
uagaagcgcggaagauugu

SEQ ID NO: 695209 - RNA, 19 nt, Homo sapiens
  misc_RNA (1)...(19): siRNA sense strand
gcuauaacugugugaucua

SEQ ID NO: 695210 - RNA, 19 nt, Homo sapiens
  misc_RNA (1)...(19): siRNA sense strand
ggaaggcaucgaccaguca

SEQ ID NO: 695211 - RNA, 19 nt, Homo sapiens
  misc_RNA (1)...(19): siRNA sense strand
ugaaagaaugcgaguacuu

SEQ ID NO: 695212 - RNA, 19 nt, Homo sapiens
  misc_RNA (1)...(19): siRNA sense strand
gcaacagaagaucuuaaau

SEQ ID NO: 695213 - RNA, 19 nt, Homo sapiens
  misc_RNA (1)...(19): siRNA sense strand
ugagguggccuucccuuau

SEQ ID NO: 695214 - RNA, 19 nt, Homo sapiens
  misc_RNA (1)...(19): siRNA sense strand
cuacgucaauugguuggaa

SEQ ID NO: 695215 - RNA, 19 nt, Homo sapiens
  misc_RNA (1)...(19): siRNA sense strand
gcacucacuacaucccaaa

SEQ ID NO: 695216 - RNA, 19 nt, Homo sapiens
  misc_RNA (1)...(19): siRNA sense strand
gguggucaaugucaagaag

SEQ ID NO: 695217 - RNA, 19 nt, Homo sapiens
  misc_RNA (1)...(19): siRNA sense strand
caacuuauauaugcaucag

SEQ ID NO: 695218 - RNA, 19 nt, Homo sapiens
  misc_RNA (1)...(19): siRNA sense strand
gauaauggaaauagaacuc

SEQ ID NO: 695219 - RNA, 19 nt, Homo sapiens
  misc_RNA (1)...(19): siRNA sense strand
ccaugaacuauguccuuua

SEQ ID NO: 695220 - RNA, 19 nt, Homo sapiens
  misc_RNA (1)...(19): siRNA sense strand
aagcugcgcuccgaugaga

SEQ ID NO: 695221 - RNA, 19 nt, Homo sapiens
  misc_RNA (1)...(19): siRNA sense strand
ggcaagcagcugacaguga

SEQ ID NO: 695222 - RNA, 19 nt, Homo sapiens
  misc_RNA (1)...(19): siRNA sense strand
uacagagaauggugggaaa

SEQ ID NO: 695223 - RNA, 19 nt, Homo sapiens
  misc_RNA (1)...(19): siRNA sense strand
gaagaucuggaguuugucu

SEQ ID NO: 695224 - RNA, 19 nt, Homo sapiens
  misc_RNA (1)...(19): siRNA sense strand
gaggaugaacuggugugua

SEQ ID NO: 695225 - RNA, 19 nt, Homo sapiens
  misc_RNA (1)...(19): siRNA sense strand
gugagguggccuucccuua

SEQ ID NO: 695226 - RNA, 19 nt, Homo sapiens
  misc_RNA (1)...(19): siRNA sense strand
ucucugcucuauuugacaa

SEQ ID NO: 695227 - RNA, 19 nt, Homo sapiens
  misc_RNA (1)...(19): siRNA sense strand
ugguguguauccuaaauau

SEQ ID NO: 695228 - RNA, 19 nt, Homo sapiens
  misc_RNA (1)...(19): siRNA sense strand
ggcuauaacugugugaucu

SEQ ID NO: 695229 - RNA, 19 nt, Homo sapiens
  misc_RNA (1)...(19): siRNA sense strand
gagguauggcuauaacugu

SEQ ID NO: 695230 - RNA, 19 nt, Homo sapiens
  misc_RNA (1)...(19): siRNA sense strand
cauagaugcuuuugggaaa

SEQ ID NO: 695231 - RNA, 19 nt, Homo sapiens
  misc_RNA (1)...(19): siRNA sense strand
aaggugcuguauauauuga

SEQ ID NO: 695232 - RNA, 19 nt, Homo sapiens
  misc_RNA (1)...(19): siRNA sense strand
ggaaucccaaucagcaugu

SEQ ID NO: 695233 - RNA, 19 nt, Homo sapiens
  misc_RNA (1)...(19): siRNA sense strand
ggacgcuauuucucagagu

SEQ ID NO: 695234 - RNA, 19 nt, Homo sapiens
  misc_RNA (1)...(19): siRNA sense strand
gcagcugacagugaaagaa

SEQ ID NO: 695235 - RNA, 19 nt, Homo sapiens
  misc_RNA (1)...(19): siRNA sense strand
agagaacauagaugaguaa

SEQ ID NO: 695236 - RNA, 19 nt, Homo sapiens
  misc_RNA (1)...(19): siRNA sense strand
aaagagaacauagaugagu

SEQ ID NO: 695237 - RNA, 19 nt, Homo sapiens
  misc_RNA (1)...(19): siRNA sense strand
accaccagccuuucuauaa

SEQ ID NO: 695238 - RNA, 19 nt, Homo sapiens
  misc_RNA (1)...(19): siRNA sense strand
ggaucucuaucuggcaaug

SEQ ID NO: 695239 - RNA, 19 nt, Homo sapiens
  misc_RNA (1)...(19): siRNA sense strand
aaagaaugcgaguacuuga

SEQ ID NO: 695240 - RNA, 19 nt, Homo sapiens
  misc_RNA (1)...(19): siRNA sense strand
gaacugguguguauccuaa

SEQ ID NO: 695241 - RNA, 19 nt, Homo sapiens
  misc_RNA (1)...(19): siRNA sense strand
gcaugucucugcucuauuu

SEQ ID NO: 695242 - RNA, 19 nt, Homo sapiens
  misc_RNA (1)...(19): siRNA sense strand
gcaagcagcugacagugaa

SEQ ID NO: 695243 - RNA, 19 nt, Homo sapiens
  misc_RNA (1)...(19): siRNA sense strand
ugaaggugcuguauauauu

SEQ ID NO: 695244 - RNA, 19 nt, Homo sapiens
  misc_RNA (1)...(19): siRNA sense strand
ucaauugguuggaagagua

SEQ ID NO: 695245 - RNA, 19 nt, Homo sapiens
  misc_RNA (1)...(19): siRNA sense strand
gaaagaaugcgaguacuug

SEQ ID NO: 695246 - RNA, 19 nt, Homo sapiens
  misc_RNA (1)...(19): siRNA sense strand
ggacaucuuugacuacauc

SEQ ID NO: 695247 - RNA, 19 nt, Homo sapiens
  misc_RNA (1)...(19): siRNA sense strand
gaaacggugcagaauauuu

SEQ ID NO: 695248 - RNA, 19 nt, Homo sapiens
  misc_RNA (1)...(19): siRNA sense strand
gaacaggaaucccaaucag

SEQ ID NO: 695249 - RNA, 19 nt, Homo sapiens
  misc_RNA (1)...(19): siRNA sense strand
aaacggugcagaauauuua

SEQ ID NO: 695250 - RNA, 19 nt, Homo sapiens
  misc_RNA (1)...(19): siRNA sense strand
cagagcacguuccuuguaa

SEQ ID NO: 695251 - RNA, 19 nt, Homo sapiens
  misc_RNA (1)...(19): siRNA sense strand
agaaagagaacauagauga

SEQ ID NO: 695252 - RNA, 19 nt, Homo sapiens
  misc_RNA (1)...(19): siRNA sense strand
gagguggccuucccuuaug

SEQ ID NO: 695253 - RNA, 19 nt, Homo sapiens
  misc_RNA (1)...(19): siRNA sense strand
gacaauugcucggcaguug

SEQ ID NO: 695254 - RNA, 19 nt, Homo sapiens
  misc_RNA (1)...(19): siRNA sense strand
gcaaagaaagagaacauag

SEQ ID NO: 695255 - RNA, 19 nt, Homo sapiens
  misc_RNA (1)...(19): siRNA sense strand
caaagaaagagaacauaga

SEQ ID NO: 695256 - RNA, 19 nt, Homo sapiens
  misc_RNA (1)...(19): siRNA sense strand
uguaauggcuucagugaca

SEQ ID NO: 695257 - RNA, 19 nt, Homo sapiens
  misc_RNA (1)...(19): siRNA sense strand
cauaccagcuccugagaga

SEQ ID NO: 695258 - RNA, 19 nt, Homo sapiens
  misc_RNA (1)...(19): siRNA sense strand
cuauaaugcccucaacuua

SEQ ID NO: 695259 - RNA, 19 nt, Homo sapiens
  misc_RNA (1)...(19): siRNA sense strand
gaaggugcuguauauauug

SEQ ID NO: 695260 - RNA, 19 nt, Homo sapiens
  misc_RNA (1)...(19): siRNA sense strand
aagagaacauagaugagua

SEQ ID NO: 695261 - RNA, 19 nt, Homo sapiens
  misc_RNA (1)...(19): siRNA sense strand
aggaugaacugguguguau

SEQ ID NO: 695262 - RNA, 19 nt, Homo sapiens
  misc_RNA (1)...(19): siRNA sense strand
gcaauccucucuccgacau

SEQ ID NO: 695263 - RNA, 19 nt, Homo sapiens
  misc_RNA (1)...(19): siRNA sense strand
ggccuucccuuaugaaaca

SEQ ID NO: 695264 - RNA, 19 nt, Homo sapiens
  misc_RNA (1)...(19): siRNA sense strand
gaaaagcuuugaccuggaa

SEQ ID NO: 695265 - RNA, 19 nt, Homo sapiens
  misc_RNA (1)...(19): siRNA sense strand
cgggugaggugcuggagua

SEQ ID NO: 695266 - RNA, 19 nt, Homo sapiens
  misc_RNA (1)...(19): siRNA sense strand
gccaugaacuauguccuuu

SEQ ID NO: 695267 - RNA, 19 nt, Homo sapiens
  misc_RNA (1)...(19): siRNA sense strand
gaguggauccggaacauga

SEQ ID NO: 695268 - RNA, 19 nt, Homo sapiens
  misc_RNA (1)...(19): siRNA sense strand
ggaagauuguagccucguu

SEQ ID NO: 695269 - RNA, 19 nt, Homo sapiens
  misc_RNA (1)...(19): siRNA sense strand
ugaacuauguccuuuacga

SEQ ID NO: 695270 - RNA, 19 nt, Homo sapiens
  misc_RNA (1)...(19): siRNA sense strand
aagaagguguuacagagaa

SEQ ID NO: 695271 - RNA, 19 nt, Homo sapiens
  misc_RNA (1)...(19): siRNA sense strand
cagaauauuuacagugcaa

SEQ ID NO: 695272 - RNA, 19 nt, Homo sapiens
  misc_RNA (1)...(19): siRNA sense strand
ucuugaaggugcuguauau

SEQ ID NO: 695273 - RNA, 19 nt, Homo sapiens
  misc_RNA (1)...(19): siRNA sense strand
gauccgguauccagaagau

SEQ ID NO: 695274 - RNA, 19 nt, Homo sapiens
  misc_RNA (1)...(19): siRNA sense strand
gggcgacccuggacaucuu

SEQ ID NO: 695275 - RNA, 19 nt, Homo sapiens
  misc_RNA (1)...(19): siRNA sense strand
gcccucaacuuauauaugc

SEQ ID NO: 695276 - RNA, 19 nt, Homo sapiens
  misc_RNA (1)...(19): siRNA sense strand
cuguauauauugaccagua

SEQ ID NO: 695277 - RNA, 19 nt, Homo sapiens
  misc_RNA (1)...(19): siRNA sense strand
uaacguggagccucaagaa

SEQ ID NO: 695278 - RNA, 19 nt, Homo sapiens
  misc_RNA (1)...(19): siRNA sense strand
augaaacggugcagaauau

SEQ ID NO: 695279 - RNA, 19 nt, Homo sapiens
  misc_RNA (1)...(19): siRNA sense strand
uaagagguauggcuauaac

SEQ ID NO: 695280 - RNA, 19 nt, Homo sapiens
  misc_RNA (1)...(19): siRNA sense strand
uaugaaacggugcagaaua

SEQ ID NO: 695281 - RNA, 19 nt, Homo sapiens
  misc_RNA (1)...(19): siRNA sense strand
ggcaacagaagaucuuaaa

SEQ ID NO: 695282 - RNA, 19 nt, Homo sapiens
  misc_RNA (1)...(19): siRNA sense strand
ggacggcuccugucgauac

SEQ ID NO: 695283 - RNA, 19 nt, Homo sapiens
  misc_RNA (1)...(19): siRNA sense strand
gacaucagccucaaagaca

SEQ ID NO: 695284 - RNA, 19 nt, Homo sapiens
  misc_RNA (1)...(19): siRNA sense strand
ucagagcacguuccuugua

SEQ ID NO: 695285 - RNA, 19 nt, Homo sapiens
  misc_RNA (1)...(19): siRNA sense strand
gaucuggaguuugucuaug

SEQ ID NO: 695286 - RNA, 19 nt, Homo sapiens
  misc_RNA (1)...(19): siRNA sense strand
gcagccagaugacuaugag

SEQ ID NO: 695287 - RNA, 19 nt, Homo sapiens
  misc_RNA (1)...(19): siRNA sense strand
gcgggaagguguggaagga

SEQ ID NO: 695288 - RNA, 19 nt, Homo sapiens
  misc_RNA (1)...(19): siRNA sense strand
ggagauccgguauccagaa

SEQ ID NO: 695289 - RNA, 19 nt, Homo sapiens
  misc_RNA (1)...(19): siRNA sense strand
gaugagaagcacagagaug

SEQ ID NO: 695290 - RNA, 19 nt, Homo sapiens
  misc_RNA (1)...(19): siRNA sense strand
gaguauaaaguucggcaaa

SEQ ID NO: 695291 - RNA, 19 nt, Homo sapiens
  misc_RNA (1)...(19): siRNA sense strand
caagaagguguuacagaga

SEQ ID NO: 695292 - RNA, 19 nt, Homo sapiens
  misc_RNA (1)...(19): siRNA sense strand
guuggaagaguauaaaguu

SEQ ID NO: 695293 - RNA, 19 nt, Homo sapiens
  misc_RNA (1)...(19): siRNA sense strand
caugaacuauguccuuuac

SEQ ID NO: 695294 - RNA, 19 nt, Homo sapiens
  misc_RNA (1)...(19): siRNA sense strand
gauuguagccucguucuca

SEQ ID NO: 695295 - RNA, 19 nt, Homo sapiens
  misc_RNA (1)...(19): siRNA sense strand
gaaagagaacauagaugag

SEQ ID NO: 695296 - RNA, 19 nt, Homo sapiens
  misc_RNA (1)...(19): siRNA sense strand
ccaccagccuuucuauaac

SEQ ID NO: 695297 - RNA, 19 nt, Homo sapiens
  misc_RNA (1)...(19): siRNA sense strand
gcuuugaccuggaaauacu

SEQ ID NO: 695298 - RNA, 19 nt, Homo sapiens
  misc_RNA (1)...(19): siRNA sense strand
ccgacuacgucaauugguu

SEQ ID NO: 695299 - RNA, 19 nt, Homo sapiens
  misc_RNA (1)...(19): siRNA sense strand
gagcacguuccuuguaaug

SEQ ID NO: 695300 - RNA, 19 nt, Homo sapiens
  misc_RNA (1)...(19): siRNA sense strand
gagauccgguauccagaag

SEQ ID NO: 695301 - RNA, 19 nt, Homo sapiens
  misc_RNA (1)...(19): siRNA sense strand
gacgcuauuucucagaguu

SEQ ID NO: 695302 - RNA, 19 nt, Homo sapiens
  misc_RNA (1)...(19): siRNA sense strand
cguggagccucaagaaauc

SEQ ID NO: 695303 - RNA, 19 nt, Homo sapiens
  misc_RNA (1)...(19): siRNA sense strand
uggaugccaugaacuaugu

SEQ ID NO: 695304 - RNA, 19 nt, Homo sapiens
  misc_RNA (1)...(19): siRNA sense strand
ucguggagcuuguuugcaa

SEQ ID NO: 695305 - RNA, 19 nt, Homo sapiens
  misc_RNA (1)...(19): siRNA sense strand
guuagaagcgcggaagauu

SEQ ID NO: 695306 - RNA, 19 nt, Homo sapiens
  misc_RNA (1)...(19): siRNA sense strand
agacauccaggcccaaauu

SEQ ID NO: 695307 - RNA, 19 nt, Homo sapiens
  misc_RNA (1)...(19): siRNA sense strand
gugaggugcuggaguacau

SEQ ID NO: 695308 - RNA, 19 nt, Homo sapiens
  misc_RNA (1)...(19): siRNA sense strand
uagaagcgcggaagauugu

SEQ ID NO: 695309 - RNA, 19 nt, Homo sapiens
  misc_RNA (1)...(19): siRNA sense strand
gcuauaacugugugaucua

SEQ ID NO: 695310 - RNA, 19 nt, Homo sapiens
  misc_RNA (1)...(19): siRNA sense strand
ggaaggcaucgaccaguca

SEQ ID NO: 695311 - RNA, 19 nt, Homo sapiens
  misc_RNA (1)...(19): siRNA sense strand
ugaaagaaugcgaguacuu

SEQ ID NO: 695312 - RNA, 19 nt, Homo sapiens
  misc_RNA (1)...(19): siRNA sense strand
gcaacagaagaucuuaaau

SEQ ID NO: 695313 - RNA, 19 nt, Homo sapiens
  misc_RNA (1)...(19): siRNA sense strand
ugagguggccuucccuuau

SEQ ID NO: 695314 - RNA, 19 nt, Homo sapiens
  misc_RNA (1)...(19): siRNA sense strand
cuacgucaauugguuggaa

SEQ ID NO: 695315 - RNA, 19 nt, Homo sapiens
  misc_RNA (1)...(19): siRNA sense strand
gcacucacuacaucccaaa

SEQ ID NO: 695316 - RNA, 19 nt, Homo sapiens
  misc_RNA (1)...(19): siRNA sense strand
gguggucaaugucaagaag

SEQ ID NO: 695317 - RNA, 19 nt, Homo sapiens
  misc_RNA (1)...(19): siRNA sense strand
caacuuauauaugcaucag

SEQ ID NO: 695318 - RNA, 19 nt, Homo sapiens
  misc_RNA (1)...(19): siRNA sense strand
gauaauggaaauagaacuc

SEQ ID NO: 695319 - RNA, 19 nt, Homo sapiens
  misc_RNA (1)...(19): siRNA sense strand
ccaugaacuauguccuuua

SEQ ID NO: 695320 - RNA, 19 nt, Homo sapiens
  misc_RNA (1)...(19): siRNA sense strand
aagcugcgcuccgaugaga

SEQ ID NO: 695321 - RNA, 19 nt, Homo sapiens
  misc_RNA (1)...(19): siRNA sense strand
ggcaagcagcugacaguga

SEQ ID NO: 695322 - RNA, 19 nt, Homo sapiens
  misc_RNA (1)...(19): siRNA sense strand
uacagagaauggugggaaa

SEQ ID NO: 695323 - RNA, 19 nt, Homo sapiens
  misc_RNA (1)...(19): siRNA sense strand
gaagaucuggaguuugucu

SEQ ID NO: 695324 - RNA, 19 nt, Homo sapiens
  misc_RNA (1)...(19): siRNA sense strand
gaggaugaacuggugugua

SEQ ID NO: 695325 - RNA, 19 nt, Homo sapiens
  misc_RNA (1)...(19): siRNA sense strand
gugagguggccuucccuua

SEQ ID NO: 695326 - RNA, 19 nt, Homo sapiens
  misc_RNA (1)...(19): siRNA sense strand
ucucugcucuauuugacaa

SEQ ID NO: 695327 - RNA, 19 nt, Homo sapiens
  misc_RNA (1)...(19): siRNA sense strand
ugguguguauccuaaauau

SEQ ID NO: 695328 - RNA, 19 nt, Homo sapiens
  misc_RNA (1)...(19): siRNA sense strand
ggcuauaacugugugaucu

SEQ ID NO: 695329 - RNA, 19 nt, Homo sapiens
  misc_RNA (1)...(19): siRNA sense strand
gagguauggcuauaacugu

SEQ ID NO: 695330 - RNA, 19 nt, Homo sapiens
  misc_RNA (1)...(19): siRNA sense strand
cauagaugcuuuugggaaa

SEQ ID NO: 695331 - RNA, 19 nt, Homo sapiens
  misc_RNA (1)...(19): siRNA sense strand
aaggugcuguauauauuga

SEQ ID NO: 695332 - RNA, 19 nt, Homo sapiens
  misc_RNA (1)...(19): siRNA sense strand
ggaaucccaaucagcaugu

SEQ ID NO: 695333 - RNA, 19 nt, Homo sapiens
  misc_RNA (1)...(19): siRNA sense strand
ggacgcuauuucucagagu

SEQ ID NO: 695334 - RNA, 19 nt, Homo sapiens
  misc_RNA (1)...(19): siRNA sense strand
gcagcugacagugaaagaa

SEQ ID NO: 695335 - RNA, 19 nt, Homo sapiens
  misc_RNA (1)...(19): siRNA sense strand
agagaacauagaugaguaa

SEQ ID NO: 695336 - RNA, 19 nt, Homo sapiens
  misc_RNA (1)...(19): siRNA sense strand
aaagagaacauagaugagu

SEQ ID NO: 695337 - RNA, 19 nt, Homo sapiens
  misc_RNA (1)...(19): siRNA sense strand
accaccagccuuucuauaa

SEQ ID NO: 695338 - RNA, 19 nt, Homo sapiens
  misc_RNA (1)...(19): siRNA sense strand
ggaucucuaucuggcaaug

SEQ ID NO: 695339 - RNA, 19 nt, Homo sapiens
  misc_RNA (1)...(19): siRNA sense strand
aaagaaugcgaguacuuga

SEQ ID NO: 695340 - RNA, 19 nt, Homo sapiens
  misc_RNA (1)...(19): siRNA sense strand
gugcaggucugguucagua

SEQ ID NO: 695341 - RNA, 19 nt, Homo sapiens
  misc_RNA (1)...(19): siRNA sense strand
gaaccugaccucccacuga

SEQ ID NO: 695342 - RNA, 19 nt, Homo sapiens
  misc_RNA (1)...(19): siRNA sense strand
ccacauccgccacaagaua

SEQ ID NO: 695343 - RNA, 19 nt, Homo sapiens
  misc_RNA (1)...(19): siRNA sense strand
gaaucaaguucgggaagaa

SEQ ID NO: 695344 - RNA, 19 nt, Homo sapiens
  misc_RNA (1)...(19): siRNA sense strand
gggacaggcugcugaagga

SEQ ID NO: 695345 - RNA, 19 nt, Homo sapiens
  misc_RNA (1)...(19): siRNA sense strand
agaaagaggaggaggauga

SEQ ID NO: 695346 - RNA, 19 nt, Homo sapiens
  misc_RNA (1)...(19): siRNA sense strand
gaagaaagaggaggaggau

SEQ ID NO: 695347 - RNA, 19 nt, Homo sapiens
  misc_RNA (1)...(19): siRNA sense strand
ucugacagcuucaugaauc

SEQ ID NO: 695348 - RNA, 19 nt, Homo sapiens
  misc_RNA (1)...(19): siRNA sense strand
gaaagaggaggaggaugaa

SEQ ID NO: 695349 - RNA, 19 nt, Homo sapiens
  misc_RNA (1)...(19): siRNA sense strand
ccagccagauggaacaguu

SEQ ID NO: 695350 - RNA, 19 nt, Homo sapiens
  misc_RNA (1)...(19): siRNA sense strand
ggaugaagcggacaagaag

SEQ ID NO: 695351 - RNA, 19 nt, Homo sapiens
  misc_RNA (1)...(19): siRNA sense strand
ggaggggucuucaucaaug

SEQ ID NO: 695352 - RNA, 19 nt, Homo sapiens
  misc_RNA (1)...(19): siRNA sense strand
ccaccaccaucucccaaga

SEQ ID NO: 695353 - RNA, 19 nt, Homo sapiens
  misc_RNA (1)...(19): siRNA sense strand
gcugaaggaugggcacugu

SEQ ID NO: 695354 - RNA, 19 nt, Homo sapiens
  misc_RNA (1)...(19): siRNA sense strand
ugaaggaugggcacuguga

SEQ ID NO: 695355 - RNA, 19 nt, Homo sapiens
  misc_RNA (1)...(19): siRNA sense strand
gacccacuacccagacaua

SEQ ID NO: 695356 - RNA, 19 nt, Homo sapiens
  misc_RNA (1)...(19): siRNA sense strand
gaaaagaaggccaaacaca

SEQ ID NO: 695357 - RNA, 19 nt, Homo sapiens
  misc_RNA (1)...(19): siRNA sense strand
ccacuacccagacauauac

SEQ ID NO: 695358 - RNA, 19 nt, Homo sapiens
  misc_RNA (1)...(19): siRNA sense strand
aaccugaccucccacugaa

SEQ ID NO: 695359 - RNA, 19 nt, Homo sapiens
  misc_RNA (1)...(19): siRNA sense strand
gguggcgacuccggaugua

SEQ ID NO: 695360 - RNA, 19 nt, Homo sapiens
  misc_RNA (1)...(19): siRNA sense strand
agaaucaaguucgggaaga

SEQ ID NO: 695361 - RNA, 19 nt, Homo sapiens
  misc_RNA (1)...(19): siRNA sense strand
gcuuguuuauggagagcua

SEQ ID NO: 695362 - RNA, 19 nt, Homo sapiens
  misc_RNA (1)...(19): siRNA sense strand
gacuccggauguagagaaa

SEQ ID NO: 695363 - RNA, 19 nt, Homo sapiens
  misc_RNA (1)...(19): siRNA sense strand
ggaaaacccaggcauguuc

SEQ ID NO: 695364 - RNA, 19 nt, Homo sapiens
  misc_RNA (1)...(19): siRNA sense strand
cccacuacccagacauaua

SEQ ID NO: 695365 - RNA, 19 nt, Homo sapiens
  misc_RNA (1)...(19): siRNA sense strand
cgacuccggauguagagaa

SEQ ID NO: 695366 - RNA, 19 nt, Homo sapiens
  misc_RNA (1)...(19): siRNA sense strand
gccaguacggccagaguga

SEQ ID NO: 695367 - RNA, 19 nt, Homo sapiens
  misc_RNA (1)...(19): siRNA sense strand
gcagaggaccaagcugaca

SEQ ID NO: 695368 - RNA, 19 nt, Homo sapiens
  misc_RNA (1)...(19): siRNA sense strand
caggcugacuucuccaucu

SEQ ID NO: 695369 - RNA, 19 nt, Homo sapiens
  misc_RNA (1)...(19): siRNA sense strand
gaggaguacaagagggaaa

SEQ ID NO: 695370 - RNA, 19 nt, Homo sapiens
  misc_RNA (1)...(19): siRNA sense strand
aggaugaagcggacaagaa

SEQ ID NO: 695371 - RNA, 19 nt, Homo sapiens
  misc_RNA (1)...(19): siRNA sense strand
gcacgguaccgagaaugau

SEQ ID NO: 695372 - RNA, 19 nt, Homo sapiens
  misc_RNA (1)...(19): siRNA sense strand
ggcacgguaccgagaauga

SEQ ID NO: 695373 - RNA, 19 nt, Homo sapiens
  misc_RNA (1)...(19): siRNA sense strand
aaccacauccgccacaaga

SEQ ID NO: 695374 - RNA, 19 nt, Homo sapiens
  misc_RNA (1)...(19): siRNA sense strand
ggucagcaacggccugucu

SEQ ID NO: 695375 - RNA, 19 nt, Homo sapiens
  misc_RNA (1)...(19): siRNA sense strand
ucaaguucgggaagaaaga

SEQ ID NO: 695376 - RNA, 19 nt, Homo sapiens
  misc_RNA (1)...(19): siRNA sense strand
gcgaaaagaaggccaaaca

SEQ ID NO: 695377 - RNA, 19 nt, Homo sapiens
  misc_RNA (1)...(19): siRNA sense strand
ggcugcgucuccaagauuc

SEQ ID NO: 695378 - RNA, 19 nt, Homo sapiens
  misc_RNA (1)...(19): siRNA sense strand
gugcaggucugguucagua

SEQ ID NO: 695379 - RNA, 19 nt, Homo sapiens
  misc_RNA (1)...(19): siRNA sense strand
gaaccugaccucccacuga

SEQ ID NO: 695380 - RNA, 19 nt, Homo sapiens
  misc_RNA (1)...(19): siRNA sense strand
ccacauccgccacaagaua

SEQ ID NO: 695381 - RNA, 19 nt, Homo sapiens
  misc_RNA (1)...(19): siRNA sense strand
gaaucaaguucgggaagaa

SEQ ID NO: 695382 - RNA, 19 nt, Homo sapiens
  misc_RNA (1)...(19): siRNA sense strand
gggacaggcugcugaagga

SEQ ID NO: 695383 - RNA, 19 nt, Homo sapiens
  misc_RNA (1)...(19): siRNA sense strand
agaaagaggaggaggauga

SEQ ID NO: 695384 - RNA, 19 nt, Homo sapiens
  misc_RNA (1)...(19): siRNA sense strand
gaagaaagaggaggaggau

SEQ ID NO: 695385 - RNA, 19 nt, Homo sapiens
  misc_RNA (1)...(19): siRNA sense strand
ucugacagcuucaugaauc

SEQ ID NO: 695386 - RNA, 19 nt, Homo sapiens
  misc_RNA (1)...(19): siRNA sense strand
gaaagaggaggaggaugaa

SEQ ID NO: 695387 - RNA, 19 nt, Homo sapiens
  misc_RNA (1)...(19): siRNA sense strand
ccagccagauggaacaguu

SEQ ID NO: 695388 - RNA, 19 nt, Homo sapiens
  misc_RNA (1)...(19): siRNA sense strand
ggaugaagcggacaagaag

SEQ ID NO: 695389 - RNA, 19 nt, Homo sapiens
  misc_RNA (1)...(19): siRNA sense strand
ggaggggucuucaucaaug

SEQ ID NO: 695390 - RNA, 19 nt, Homo sapiens
  misc_RNA (1)...(19): siRNA sense strand
ccaccaccaucucccaaga

SEQ ID NO: 695391 - RNA, 19 nt, Homo sapiens
  misc_RNA (1)...(19): siRNA sense strand
gcugaaggaugggcacugu

SEQ ID NO: 695392 - RNA, 19 nt, Homo sapiens
  misc_RNA (1)...(19): siRNA sense strand
ugaaggaugggcacuguga

SEQ ID NO: 695393 - RNA, 19 nt, Homo sapiens
  misc_RNA (1)...(19): siRNA sense strand
gacccacuacccagacaua

SEQ ID NO: 695394 - RNA, 19 nt, Homo sapiens
  misc_RNA (1)...(19): siRNA sense strand
gaaaagaaggccaaacaca

SEQ ID NO: 695395 - RNA, 19 nt, Homo sapiens
  misc_RNA (1)...(19): siRNA sense strand
ccacuacccagacauauac

SEQ ID NO: 695396 - RNA, 19 nt, Homo sapiens
  misc_RNA (1)...(19): siRNA sense strand
aaccugaccucccacugaa

SEQ ID NO: 695397 - RNA, 19 nt, Homo sapiens
  misc_RNA (1)...(19): siRNA sense strand
gguggcgacuccggaugua

SEQ ID NO: 695398 - RNA, 19 nt, Homo sapiens
  misc_RNA (1)...(19): siRNA sense strand
agaaucaaguucgggaaga

SEQ ID NO: 695399 - RNA, 19 nt, Homo sapiens
  misc_RNA (1)...(19): siRNA sense strand
gcuuguuuauggagagcua

SEQ ID NO: 695400 - RNA, 19 nt, Homo sapiens
  misc_RNA (1)...(19): siRNA sense strand
gacuccggauguagagaaa

SEQ ID NO: 695401 - RNA, 19 nt, Homo sapiens
  misc_RNA (1)...(19): siRNA sense strand
ggaaaacccaggcauguuc

SEQ ID NO: 695402 - RNA, 19 nt, Homo sapiens
  misc_RNA (1)...(19): siRNA sense strand
cccacuacccagacauaua

SEQ ID NO: 695403 - RNA, 19 nt, Homo sapiens
  misc_RNA (1)...(19): siRNA sense strand
cgacuccggauguagagaa

SEQ ID NO: 695404 - RNA, 19 nt, Homo sapiens
  misc_RNA (1)...(19): siRNA sense strand
gccaguacggccagaguga

SEQ ID NO: 695405 - RNA, 19 nt, Homo sapiens
  misc_RNA (1)...(19): siRNA sense strand
gcagaggaccaagcugaca

SEQ ID NO: 695406 - RNA, 19 nt, Homo sapiens
  misc_RNA (1)...(19): siRNA sense strand
caggcugacuucuccaucu

SEQ ID NO: 695407 - RNA, 19 nt, Homo sapiens
  misc_RNA (1)...(19): siRNA sense strand
gaggaguacaagagggaaa

SEQ ID NO: 695408 - RNA, 19 nt, Homo sapiens
  misc_RNA (1)...(19): siRNA sense strand
aggaugaagcggacaagaa

SEQ ID NO: 695409 - RNA, 19 nt, Homo sapiens
  misc_RNA (1)...(19): siRNA sense strand
gcacgguaccgagaaugau

SEQ ID NO: 695410 - RNA, 19 nt, Homo sapiens
  misc_RNA (1)...(19): siRNA sense strand
ggcacgguaccgagaauga

SEQ ID NO: 695411 - RNA, 19 nt, Homo sapiens
  misc_RNA (1)...(19): siRNA sense strand
aaccacauccgccacaaga

SEQ ID NO: 695412 - RNA, 19 nt, Homo sapiens
  misc_RNA (1)...(19): siRNA sense strand
ggucagcaacggccugucu

SEQ ID NO: 695413 - RNA, 19 nt, Homo sapiens
  misc_RNA (1)...(19): siRNA sense strand
ucaaguucgggaagaaaga

SEQ ID NO: 695414 - RNA, 19 nt, Homo sapiens
  misc_RNA (1)...(19): siRNA sense strand
gcgaaaagaaggccaaaca

SEQ ID NO: 695415 - RNA, 19 nt, Homo sapiens
  misc_RNA (1)...(19): siRNA sense strand
ggcugcgucuccaagauuc

SEQ ID NO: 695416 - RNA, 19 nt, Homo sapiens
  misc_RNA (1)...(19): siRNA sense strand
ucacggagcucacggaauu

SEQ ID NO: 695417 - RNA, 19 nt, Homo sapiens
  misc_RNA (1)...(19): siRNA sense strand
ggaaauggguuuauaacuc

SEQ ID NO: 695418 - RNA, 19 nt, Homo sapiens
  misc_RNA (1)...(19): siRNA sense strand
gaaguucaaugcacuggaa

SEQ ID NO: 695419 - RNA, 19 nt, Homo sapiens
  misc_RNA (1)...(19): siRNA sense strand
gaacaugacauagaagauu

SEQ ID NO: 695420 - RNA, 19 nt, Homo sapiens
  misc_RNA (1)...(19): siRNA sense strand
ggauaguucuggaagcuuu

SEQ ID NO: 695421 - RNA, 19 nt, Homo sapiens
  misc_RNA (1)...(19): siRNA sense strand
gaagaguuccugcaagaaa

SEQ ID NO: 695422 - RNA, 19 nt, Homo sapiens
  misc_RNA (1)...(19): siRNA sense strand
guuuauaacucgugaauuc

SEQ ID NO: 695423 - RNA, 19 nt, Homo sapiens
  misc_RNA (1)...(19): siRNA sense strand
gacucaagcugguguauga

SEQ ID NO: 695424 - RNA, 19 nt, Homo sapiens
  misc_RNA (1)...(19): siRNA sense strand
ggaaacauccaagagauuu

SEQ ID NO: 695425 - RNA, 19 nt, Homo sapiens
  misc_RNA (1)...(19): siRNA sense strand
guauggaaauggguuuaua

SEQ ID NO: 695426 - RNA, 19 nt, Homo sapiens
  misc_RNA (1)...(19): siRNA sense strand
gaaacaaaugccaguauug

SEQ ID NO: 695427 - RNA, 19 nt, Homo sapiens
  misc_RNA (1)...(19): siRNA sense strand
uaaggaaaccguucuguga

SEQ ID NO: 695428 - RNA, 19 nt, Homo sapiens
  misc_RNA (1)...(19): siRNA sense strand
ggaaaccguucugugauau

SEQ ID NO: 695429 - RNA, 19 nt, Homo sapiens
  misc_RNA (1)...(19): siRNA sense strand
agaaacaaaugccaguauu

SEQ ID NO: 695430 - RNA, 19 nt, Homo sapiens
  misc_RNA (1)...(19): siRNA sense strand
ccaauggcauccagaacaa

SEQ ID NO: 695431 - RNA, 19 nt, Homo sapiens
  misc_RNA (1)...(19): siRNA sense strand
ggaaaggccaguaacaauc

SEQ ID NO: 695432 - RNA, 19 nt, Homo sapiens
  misc_RNA (1)...(19): siRNA sense strand
aggaaaccguucugugaua

SEQ ID NO: 695433 - RNA, 19 nt, Homo sapiens
  misc_RNA (1)...(19): siRNA sense strand
gcaggaggguauuguacau

SEQ ID NO: 695434 - RNA, 19 nt, Homo sapiens
  misc_RNA (1)...(19): siRNA sense strand
gccaagaucugagaaagca

SEQ ID NO: 695435 - RNA, 19 nt, Homo sapiens
  misc_RNA (1)...(19): siRNA sense strand
gcaaccacccggacgauau

SEQ ID NO: 695436 - RNA, 19 nt, Homo sapiens
  misc_RNA (1)...(19): siRNA sense strand
gccaugcugucuucuguga

SEQ ID NO: 695437 - RNA, 19 nt, Homo sapiens
  misc_RNA (1)...(19): siRNA sense strand
caagugacauugcuaaaau

SEQ ID NO: 695438 - RNA, 19 nt, Homo sapiens
  misc_RNA (1)...(19): siRNA sense strand
gugcagaucaucaagaaga

SEQ ID NO: 695439 - RNA, 19 nt, Homo sapiens
  misc_RNA (1)...(19): siRNA sense strand
uaucauggaacccaaguuu

SEQ ID NO: 695440 - RNA, 19 nt, Homo sapiens
  misc_RNA (1)...(19): siRNA sense strand
gcuuuggcuuuacggaaua

SEQ ID NO: 695441 - RNA, 19 nt, Homo sapiens
  misc_RNA (1)...(19): siRNA sense strand
cugaagaguuccugcaaga

SEQ ID NO: 695442 - RNA, 19 nt, Homo sapiens
  misc_RNA (1)...(19): siRNA sense strand
ggacgaaugccaagaucug

SEQ ID NO: 695443 - RNA, 19 nt, Homo sapiens
  misc_RNA (1)...(19): siRNA sense strand
gcugguagcguauggaaau

SEQ ID NO: 695444 - RNA, 19 nt, Homo sapiens
  misc_RNA (1)...(19): siRNA sense strand
caagaucugagaaagcaaa

SEQ ID NO: 695445 - RNA, 19 nt, Homo sapiens
  misc_RNA (1)...(19): siRNA sense strand
ucauggaacccaaguuuga

SEQ ID NO: 695446 - RNA, 19 nt, Homo sapiens
  misc_RNA (1)...(19): siRNA sense strand
gggaaacauccaagagauu

SEQ ID NO: 695447 - RNA, 19 nt, Homo sapiens
  misc_RNA (1)...(19): siRNA sense strand
caacaugaacaaggucaaa

SEQ ID NO: 695448 - RNA, 19 nt, Homo sapiens
  misc_RNA (1)...(19): siRNA sense strand
cccguuaucugaagaguuc

SEQ ID NO: 695449 - RNA, 19 nt, Homo sapiens
  misc_RNA (1)...(19): siRNA sense strand
gcaagaaaugggaaacauc

SEQ ID NO: 695450 - RNA, 19 nt, Homo sapiens
  misc_RNA (1)...(19): siRNA sense strand
ugaaacugcagaucucaaa

SEQ ID NO: 695451 - RNA, 19 nt, Homo sapiens
  misc_RNA (1)...(19): siRNA sense strand
caauccaccuuuugucaua

SEQ ID NO: 695452 - RNA, 19 nt, Homo sapiens
  misc_RNA (1)...(19): siRNA sense strand
ccaguaacaauccaccuuu

SEQ ID NO: 695453 - RNA, 19 nt, Homo sapiens
  misc_RNA (1)...(19): siRNA sense strand
caugcugucuucugugaug

SEQ ID NO: 695454 - RNA, 19 nt, Homo sapiens
  misc_RNA (1)...(19): siRNA sense strand
cuagagagcccguuaucug

SEQ ID NO: 695455 - RNA, 19 nt, Homo sapiens
  misc_RNA (1)...(19): siRNA sense strand
uagagagcccguuaucuga

SEQ ID NO: 695456 - RNA, 19 nt, Homo sapiens
  misc_RNA (1)...(19): siRNA sense strand
gaggauaguucuggaagcu

SEQ ID NO: 695457 - RNA, 19 nt, Homo sapiens
  misc_RNA (1)...(19): siRNA sense strand
uauaacucgugaauuccua

SEQ ID NO: 695458 - RNA, 19 nt, Homo sapiens
  misc_RNA (1)...(19): siRNA sense strand
gagagcccguuaucugaag

SEQ ID NO: 695459 - RNA, 19 nt, Homo sapiens
  misc_RNA (1)...(19): siRNA sense strand
ugucuucugugaugaacaa

SEQ ID NO: 695460 - RNA, 19 nt, Homo sapiens
  misc_RNA (1)...(19): siRNA sense strand
gaacccaaguuugauuuug

SEQ ID NO: 695461 - RNA, 19 nt, Homo sapiens
  misc_RNA (1)...(19): siRNA sense strand
aaaccguucugugauauca

SEQ ID NO: 695462 - RNA, 19 nt, Homo sapiens
  misc_RNA (1)...(19): siRNA sense strand
cuucugugaugaacaaaga

SEQ ID NO: 695463 - RNA, 19 nt, Homo sapiens
  misc_RNA (1)...(19): siRNA sense strand
guucugugauaucauggaa

SEQ ID NO: 695464 - RNA, 19 nt, Homo sapiens
  misc_RNA (1)...(19): siRNA sense strand
ucccaaaacuucuucaaaa

SEQ ID NO: 695465 - RNA, 19 nt, Homo sapiens
  misc_RNA (1)...(19): siRNA sense strand
ccacccggacgauaucuuu

SEQ ID NO: 695466 - RNA, 19 nt, Homo sapiens
  misc_RNA (1)...(19): siRNA sense strand
gaucguccuggccuucuaa

SEQ ID NO: 695467 - RNA, 19 nt, Homo sapiens
  misc_RNA (1)...(19): siRNA sense strand
cagaaacaaaugccaguau

SEQ ID NO: 695468 - RNA, 19 nt, Homo sapiens
  misc_RNA (1)...(19): siRNA sense strand
ggaggguauuguacaugug

SEQ ID NO: 695469 - RNA, 19 nt, Homo sapiens
  misc_RNA (1)...(19): siRNA sense strand
aaacugaaagcagaaauuc

SEQ ID NO: 695470 - RNA, 19 nt, Homo sapiens
  misc_RNA (1)...(19): siRNA sense strand
ugggaaacauccaagagau

SEQ ID NO: 695471 - RNA, 19 nt, Homo sapiens
  misc_RNA (1)...(19): siRNA sense strand
ggacgauaucuuucucuuc

SEQ ID NO: 695472 - RNA, 19 nt, Homo sapiens
  misc_RNA (1)...(19): siRNA sense strand
gaagcuguccuggcucaga

SEQ ID NO: 695473 - RNA, 19 nt, Homo sapiens
  misc_RNA (1)...(19): siRNA sense strand
gaaacugcagaucucaaau

SEQ ID NO: 695474 - RNA, 19 nt, Homo sapiens
  misc_RNA (1)...(19): siRNA sense strand
aagaguuccugcaagaaau

SEQ ID NO: 695475 - RNA, 19 nt, Homo sapiens
  misc_RNA (1)...(19): siRNA sense strand
ucaagcugguguaugacaa

SEQ ID NO: 695476 - RNA, 19 nt, Homo sapiens
  misc_RNA (1)...(19): siRNA sense strand
gaaaggccaguaacaaucc

SEQ ID NO: 695477 - RNA, 19 nt, Homo sapiens
  misc_RNA (1)...(19): siRNA sense strand
cuacgaggccuacuugaag

SEQ ID NO: 695478 - RNA, 19 nt, Homo sapiens
  misc_RNA (1)...(19): siRNA sense strand
cugugaacaugacauagaa

SEQ ID NO: 695479 - RNA, 19 nt, Homo sapiens
  misc_RNA (1)...(19): siRNA sense strand
uggugcagaucaucaagaa

SEQ ID NO: 695480 - RNA, 19 nt, Homo sapiens
  misc_RNA (1)...(19): siRNA sense strand
caggaaaggccaguaacaa

SEQ ID NO: 695481 - RNA, 19 nt, Homo sapiens
  misc_RNA (1)...(19): siRNA sense strand
gaaucuacgaggccuacuu

SEQ ID NO: 695482 - RNA, 19 nt, Homo sapiens
  misc_RNA (1)...(19): siRNA sense strand
aacaugacauagaagauuc

SEQ ID NO: 695483 - RNA, 19 nt, Homo sapiens
  misc_RNA (1)...(19): siRNA sense strand
gaaauucuuaccugugaac

SEQ ID NO: 695484 - RNA, 19 nt, Homo sapiens
  misc_RNA (1)...(19): siRNA sense strand
ccaagcugguggccaaugg

SEQ ID NO: 695485 - RNA, 19 nt, Homo sapiens
  misc_RNA (1)...(19): siRNA sense strand
uacgaggccuacuugaaga

SEQ ID NO: 695486 - RNA, 19 nt, Homo sapiens
  misc_RNA (1)...(19): siRNA sense strand
caaagacgggaugcuggua

SEQ ID NO: 695487 - RNA, 19 nt, Homo sapiens
  misc_RNA (1)...(19): siRNA sense strand
cgaaugccaagaucugaga

SEQ ID NO: 695488 - RNA, 19 nt, Homo sapiens
  misc_RNA (1)...(19): siRNA sense strand
gaucuagagagcccguuau

SEQ ID NO: 695489 - RNA, 19 nt, Homo sapiens
  misc_RNA (1)...(19): siRNA sense strand
gugaacaugacauagaaga

SEQ ID NO: 695490 - RNA, 19 nt, Homo sapiens
  misc_RNA (1)...(19): siRNA sense strand
aaacugcagaucucaaauc

SEQ ID NO: 695491 - RNA, 19 nt, Homo sapiens
  misc_RNA (1)...(19): siRNA sense strand
ugagaaagcaaaacugaaa

SEQ ID NO: 695492 - RNA, 19 nt, Homo sapiens
  misc_RNA (1)...(19): siRNA sense strand
cggacgauaucuuucucuu

SEQ ID NO: 695493 - RNA, 19 nt, Homo sapiens
  misc_RNA (1)...(19): siRNA sense strand
acagugauaucucccuuuu

SEQ ID NO: 695494 - RNA, 19 nt, Homo sapiens
  misc_RNA (1)...(19): siRNA sense strand
gcacuggaacuggaugaca

SEQ ID NO: 695495 - RNA, 19 nt, Homo sapiens
  misc_RNA (1)...(19): siRNA sense strand
auucuuaccugugaacaug

SEQ ID NO: 695496 - RNA, 19 nt, Homo sapiens
  misc_RNA (1)...(19): siRNA sense strand
ccugugaacaugacauaga

SEQ ID NO: 695497 - RNA, 19 nt, Homo sapiens
  misc_RNA (1)...(19): siRNA sense strand
gaaaccguucugugauauc

SEQ ID NO: 695498 - RNA, 19 nt, Homo sapiens
  misc_RNA (1)...(19): siRNA sense strand
uacaugauauggagacacu

SEQ ID NO: 695499 - RNA, 19 nt, Homo sapiens
  misc_RNA (1)...(19): siRNA sense strand
ucucaggaaaggccaguaa

SEQ ID NO: 695500 - RNA, 19 nt, Homo sapiens
  misc_RNA (1)...(19): siRNA sense strand
ggagaucuacagggacaug

SEQ ID NO: 695501 - RNA, 19 nt, Homo sapiens
  misc_RNA (1)...(19): siRNA sense strand
aggaggguauuguacaugu

SEQ ID NO: 695502 - RNA, 19 nt, Homo sapiens
  misc_RNA (1)...(19): siRNA sense strand
cgaucuagagagcccguua

SEQ ID NO: 695503 - RNA, 19 nt, Homo sapiens
  misc_RNA (1)...(19): siRNA sense strand
gaugucacacaacgcgauu

SEQ ID NO: 695504 - RNA, 19 nt, Homo sapiens
  misc_RNA (1)...(19): siRNA sense strand
gcgcagcuggugcagauca

SEQ ID NO: 695505 - RNA, 19 nt, Homo sapiens
  misc_RNA (1)...(19): siRNA sense strand
caaccacccggacgauauc

SEQ ID NO: 695506 - RNA, 19 nt, Homo sapiens
  misc_RNA (1)...(19): siRNA sense strand
gacagugauaucucccuuu

SEQ ID NO: 695507 - RNA, 19 nt, Homo sapiens
  misc_RNA (1)...(19): siRNA sense strand
gacgaaugccaagaucuga

SEQ ID NO: 695508 - RNA, 19 nt, Homo sapiens
  misc_RNA (1)...(19): siRNA sense strand
gcagcugcaagauccagaa

SEQ ID NO: 695509 - RNA, 19 nt, Homo sapiens
  misc_RNA (1)...(19): siRNA sense strand
guccuggccuucuaaacgu

SEQ ID NO: 695510 - RNA, 19 nt, Homo sapiens
  misc_RNA (1)...(19): siRNA sense strand
ucgccaugcugucuucugu

SEQ ID NO: 695511 - RNA, 19 nt, Homo sapiens
  misc_RNA (1)...(19): siRNA sense strand
aggaaaggccaguaacaau

SEQ ID NO: 695512 - RNA, 19 nt, Homo sapiens
  misc_RNA (1)...(19): siRNA sense strand
augccaguauugucgauuu

SEQ ID NO: 695513 - RNA, 19 nt, Homo sapiens
  misc_RNA (1)...(19): siRNA sense strand
agaaaugggaaacauccaa

SEQ ID NO: 695514 - RNA, 19 nt, Homo sapiens
  misc_RNA (1)...(19): siRNA sense strand
gacacgcuuucaccagcuu

SEQ ID NO: 695515 - RNA, 19 nt, Homo sapiens
  misc_RNA (1)...(19): siRNA sense strand
gaacgauucgacucaagcu

SEQ ID NO: 695516 - RNA, 19 nt, Homo sapiens
  misc_RNA (1)...(19): siRNA sense strand
gaggauagcaggaauauga

SEQ ID NO: 695517 - RNA, 19 nt, Homo sapiens
  misc_RNA (1)...(19): siRNA sense strand
gcagaggccuucaagcaaa

SEQ ID NO: 695518 - RNA, 19 nt, Homo sapiens
  misc_RNA (1)...(19): siRNA sense strand
gaagacgaaauccguauua

SEQ ID NO: 695519 - RNA, 19 nt, Homo sapiens
  misc_RNA (1)...(19): siRNA sense strand
ugaaggaugucaguuauaa

SEQ ID NO: 695520 - RNA, 19 nt, Homo sapiens
  misc_RNA (1)...(19): siRNA sense strand
gacaaggcauggcuaauga

SEQ ID NO: 695521 - RNA, 19 nt, Homo sapiens
  misc_RNA (1)...(19): siRNA sense strand
gauauaauccugaaucgaa

SEQ ID NO: 695522 - RNA, 19 nt, Homo sapiens
  misc_RNA (1)...(19): siRNA sense strand
gcaaguacuuugaggauag

SEQ ID NO: 695523 - RNA, 19 nt, Homo sapiens
  misc_RNA (1)...(19): siRNA sense strand
gaagagcuauggcuagaag

SEQ ID NO: 695524 - RNA, 19 nt, Homo sapiens
  misc_RNA (1)...(19): siRNA sense strand
ggaugucaguuauaagauu

SEQ ID NO: 695525 - RNA, 19 nt, Homo sapiens
  misc_RNA (1)...(19): siRNA sense strand
aagaggagcugucauuaug

SEQ ID NO: 695526 - RNA, 19 nt, Homo sapiens
  misc_RNA (1)...(19): siRNA sense strand
ccacaaggaccaacaacua

SEQ ID NO: 695527 - RNA, 19 nt, Homo sapiens
  misc_RNA (1)...(19): siRNA sense strand
ucccugagcuguugucuuu

SEQ ID NO: 695528 - RNA, 19 nt, Homo sapiens
  misc_RNA (1)...(19): siRNA sense strand
agaaugaaauggcauagug

SEQ ID NO: 695529 - RNA, 19 nt, Homo sapiens
  misc_RNA (1)...(19): siRNA sense strand
gaacaaacgguacaauguc

SEQ ID NO: 695530 - RNA, 19 nt, Homo sapiens
  misc_RNA (1)...(19): siRNA sense strand
gaugagggauguccacaag

SEQ ID NO: 695531 - RNA, 19 nt, Homo sapiens
  misc_RNA (1)...(19): siRNA sense strand
cacaauuccuuacgggaua

SEQ ID NO: 695532 - RNA, 19 nt, Homo sapiens
  misc_RNA (1)...(19): siRNA sense strand
acaaggaacugguuuaagg

SEQ ID NO: 695533 - RNA, 19 nt, Homo sapiens
  misc_RNA (1)...(19): siRNA sense strand
gcucuacucuaaagaagug

SEQ ID NO: 695534 - RNA, 19 nt, Homo sapiens
  misc_RNA (1)...(19): siRNA sense strand
gaaauggcauagugaagac

SEQ ID NO: 695535 - RNA, 19 nt, Homo sapiens
  misc_RNA (1)...(19): siRNA sense strand
gaaauuucccugagcuguu

SEQ ID NO: 695536 - RNA, 19 nt, Homo sapiens
  misc_RNA (1)...(19): siRNA sense strand
ggaguucuuuccgggauaa

SEQ ID NO: 695537 - RNA, 19 nt, Homo sapiens
  misc_RNA (1)...(19): siRNA sense strand
ugacagcucugagacaaug

SEQ ID NO: 695538 - RNA, 19 nt, Homo sapiens
  misc_RNA (1)...(19): siRNA sense strand
ccuacucugugaagaauaa

SEQ ID NO: 695539 - RNA, 19 nt, Homo sapiens
  misc_RNA (1)...(19): siRNA sense strand
agagaaggcucccaaaguc

SEQ ID NO: 695540 - RNA, 19 nt, Homo sapiens
  misc_RNA (1)...(19): siRNA sense strand
gaucugagacccuaaagca

SEQ ID NO: 695541 - RNA, 19 nt, Homo sapiens
  misc_RNA (1)...(19): siRNA sense strand
aggcauggcuaaugaauuc

SEQ ID NO: 695542 - RNA, 19 nt, Homo sapiens
  misc_RNA (1)...(19): siRNA sense strand
aaacuggaguggucucaga

SEQ ID NO: 695543 - RNA, 19 nt, Homo sapiens
  misc_RNA (1)...(19): siRNA sense strand
gcuguugucuuugaacuug

SEQ ID NO: 695544 - RNA, 19 nt, Homo sapiens
  misc_RNA (1)...(19): siRNA sense strand
caagaggagcugucauuau

SEQ ID NO: 695545 - RNA, 19 nt, Homo sapiens
  misc_RNA (1)...(19): siRNA sense strand
ggauggccuuucugacauu

SEQ ID NO: 695546 - RNA, 19 nt, Homo sapiens
  misc_RNA (1)...(19): siRNA sense strand
gaacacacaggauggauac

SEQ ID NO: 695547 - RNA, 19 nt, Homo sapiens
  misc_RNA (1)...(19): siRNA sense strand
caacuaagacacacuccuu

SEQ ID NO: 695548 - RNA, 19 nt, Homo sapiens
  misc_RNA (1)...(19): siRNA sense strand
ugagggauguccacaagga

SEQ ID NO: 695549 - RNA, 19 nt, Homo sapiens
  misc_RNA (1)...(19): siRNA sense strand
cauugaaggaugucaguua

SEQ ID NO: 695550 - RNA, 19 nt, Homo sapiens
  misc_RNA (1)...(19): siRNA sense strand
uaaagaagugugggacaua

SEQ ID NO: 695551 - RNA, 19 nt, Homo sapiens
  misc_RNA (1)...(19): siRNA sense strand
gaaugaaauggcauaguga

SEQ ID NO: 695552 - RNA, 19 nt, Homo sapiens
  misc_RNA (1)...(19): siRNA sense strand
gaaagaaaggugggaguuc

SEQ ID NO: 695553 - RNA, 19 nt, Homo sapiens
  misc_RNA (1)...(19): siRNA sense strand
gauggaagcguggagauga

SEQ ID NO: 695554 - RNA, 19 nt, Homo sapiens
  misc_RNA (1)...(19): siRNA sense strand
gacaaugaguggaacuaca

SEQ ID NO: 695555 - RNA, 19 nt, Homo sapiens
  misc_RNA (1)...(19): siRNA sense strand
gauggccuuucugacauua

SEQ ID NO: 695556 - RNA, 19 nt, Homo sapiens
  misc_RNA (1)...(19): siRNA sense strand
gaaaaccuccggagagaaa

SEQ ID NO: 695557 - RNA, 19 nt, Homo sapiens
  misc_RNA (1)...(19): siRNA sense strand
gccgugacauugauauaau

SEQ ID NO: 695558 - RNA, 19 nt, Homo sapiens
  misc_RNA (1)...(19): siRNA sense strand
caggauggauacacaagga

SEQ ID NO: 695559 - RNA, 19 nt, Homo sapiens
  misc_RNA (1)...(19): siRNA sense strand
ggacauacagaacugaagu

SEQ ID NO: 695560 - RNA, 19 nt, Homo sapiens
  misc_RNA (1)...(19): siRNA sense strand
cggaaaggaugcucugcuu

SEQ ID NO: 695561 - RNA, 19 nt, Homo sapiens
  misc_RNA (1)...(19): siRNA sense strand
ccugagcuguugucuuuga

SEQ ID NO: 695562 - RNA, 19 nt, Homo sapiens
  misc_RNA (1)...(19): siRNA sense strand
ugcuaaagcugaccaugaa

SEQ ID NO: 695563 - RNA, 19 nt, Homo sapiens
  misc_RNA (1)...(19): siRNA sense strand
cugagacccuaaagcauuu

SEQ ID NO: 695564 - RNA, 19 nt, Homo sapiens
  misc_RNA (1)...(19): siRNA sense strand
cacaaggaccaacaacuaa

SEQ ID NO: 695565 - RNA, 19 nt, Homo sapiens
  misc_RNA (1)...(19): siRNA sense strand
ugaaauggcauagugaaga

SEQ ID NO: 695566 - RNA, 19 nt, Homo sapiens
  misc_RNA (1)...(19): siRNA sense strand
gaccaguccgccuauguaa

SEQ ID NO: 695567 - RNA, 19 nt, Homo sapiens
  misc_RNA (1)...(19): siRNA sense strand
gacccugaaucucuccaaa

SEQ ID NO: 695568 - RNA, 19 nt, Homo sapiens
  misc_RNA (1)...(19): siRNA sense strand
ugaacaaacgguacaaugu

SEQ ID NO: 695569 - RNA, 19 nt, Homo sapiens
  misc_RNA (1)...(19): siRNA sense strand
gacgaaauccguauuacca

SEQ ID NO: 695570 - RNA, 19 nt, Homo sapiens
  misc_RNA (1)...(19): siRNA sense strand
ugacaaggcauggcuaaug

SEQ ID NO: 695571 - RNA, 19 nt, Homo sapiens
  misc_RNA (1)...(19): siRNA sense strand
gaacugguuuaaggucaca

SEQ ID NO: 695572 - RNA, 19 nt, Homo sapiens
  misc_RNA (1)...(19): siRNA sense strand
gggaguucuuuccgggaua

SEQ ID NO: 695573 - RNA, 19 nt, Homo sapiens
  misc_RNA (1)...(19): siRNA sense strand
aaauuucccugagcuguug

SEQ ID NO: 695574 - RNA, 19 nt, Homo sapiens
  misc_RNA (1)...(19): siRNA sense strand
guucuuuccgggauaauuu

SEQ ID NO: 695575 - RNA, 19 nt, Homo sapiens
  misc_RNA (1)...(19): siRNA sense strand
gaacugcugaggcgcacaa

SEQ ID NO: 695576 - RNA, 19 nt, Homo sapiens
  misc_RNA (1)...(19): siRNA sense strand
gcauuuaguccugcaauuc

SEQ ID NO: 695577 - RNA, 19 nt, Homo sapiens
  misc_RNA (1)...(19): siRNA sense strand
aaugaaacccugcaaggaa

SEQ ID NO: 695578 - RNA, 19 nt, Homo sapiens
  misc_RNA (1)...(19): siRNA sense strand
ucgaagagcuauggcuaga

SEQ ID NO: 695579 - RNA, 19 nt, Homo sapiens
  misc_RNA (1)...(19): siRNA sense strand
cagagaaggcucccaaagu

SEQ ID NO: 695580 - RNA, 19 nt, Homo sapiens
  misc_RNA (1)...(19): siRNA sense strand
gaugggccgugacauugau

SEQ ID NO: 695581 - RNA, 19 nt, Homo sapiens
  misc_RNA (1)...(19): siRNA sense strand
aaauggagaugcuaaagcu

SEQ ID NO: 695582 - RNA, 19 nt, Homo sapiens
  misc_RNA (1)...(19): siRNA sense strand
caaggaccaacaacuaaga

SEQ ID NO: 695583 - RNA, 19 nt, Homo sapiens
  misc_RNA (1)...(19): siRNA sense strand
acaagaggagcugucauua

SEQ ID NO: 695584 - RNA, 19 nt, Homo sapiens
  misc_RNA (1)...(19): siRNA sense strand
ccacguggagaaauagaaa

SEQ ID NO: 695585 - RNA, 19 nt, Homo sapiens
  misc_RNA (1)...(19): siRNA sense strand
acacaaggaacugguuuaa

SEQ ID NO: 695586 - RNA, 19 nt, Homo sapiens
  misc_RNA (1)...(19): siRNA sense strand
aggaaauggugcaggcuuu

SEQ ID NO: 695587 - RNA, 19 nt, Homo sapiens
  misc_RNA (1)...(19): siRNA sense strand
acccggaccuucauugcua

SEQ ID NO: 695588 - RNA, 19 nt, Homo sapiens
  misc_RNA (1)...(19): siRNA sense strand
ggaaguggaaggacagucu

SEQ ID NO: 695589 - RNA, 19 nt, Homo sapiens
  misc_RNA (1)...(19): siRNA sense strand
ggauagcaggaauaugaaa

SEQ ID NO: 695590 - RNA, 19 nt, Homo sapiens
  misc_RNA (1)...(19): siRNA sense strand
augaaacccugcaaggaaa

SEQ ID NO: 695591 - RNA, 19 nt, Homo sapiens
  misc_RNA (1)...(19): siRNA sense strand
gagaaggcucccaaaguca

SEQ ID NO: 695592 - RNA, 19 nt, Homo sapiens
  misc_RNA (1)...(19): siRNA sense strand
cuacugcgcccuacucugu

SEQ ID NO: 695593 - RNA, 19 nt, Homo sapiens
  misc_RNA (1)...(19): siRNA sense strand
gcgaaagaagaaugaaaug

SEQ ID NO: 695594 - RNA, 19 nt, Homo sapiens
  misc_RNA (1)...(19): siRNA sense strand
ucugagacccuaaagcauu

SEQ ID NO: 695595 - RNA, 19 nt, Homo sapiens
  misc_RNA (1)...(19): siRNA sense strand
gcccuacucugugaagaau

SEQ ID NO: 695596 - RNA, 19 nt, Homo sapiens
  misc_RNA (1)...(19): siRNA sense strand
cuuacgggauaaaguauga

SEQ ID NO: 695597 - RNA, 19 nt, Homo sapiens
  misc_RNA (1)...(19): siRNA sense strand
gaccaacaacuaagacaca

SEQ ID NO: 695598 - RNA, 19 nt, Homo sapiens
  misc_RNA (1)...(19): siRNA sense strand
caaugaaacccugcaagga

SEQ ID NO: 695599 - RNA, 19 nt, Homo sapiens
  misc_RNA (1)...(19): siRNA sense strand
gacauugacagcucugaga

SEQ ID NO: 695600 - RNA, 19 nt, Homo sapiens
  misc_RNA (1)...(19): siRNA sense strand
ccuggacggccgagaguua

SEQ ID NO: 695601 - RNA, 19 nt, Homo sapiens
  misc_RNA (1)...(19): siRNA sense strand
cuaaagaagugugggacau

SEQ ID NO: 695602 - RNA, 19 nt, Homo sapiens
  misc_RNA (1)...(19): siRNA sense strand
ggccgugacauugauauaa

SEQ ID NO: 695603 - RNA, 19 nt, Homo sapiens
  misc_RNA (1)...(19): siRNA sense strand
uccagaaucuccgcuuuga

SEQ ID NO: 695604 - RNA, 19 nt, Homo sapiens
  misc_RNA (1)...(19): siRNA sense strand
gaugagaaccaaaagauau

SEQ ID NO: 695605 - RNA, 19 nt, Homo sapiens
  misc_RNA (1)...(19): siRNA sense strand
agaagaaugaaauggcaua

SEQ ID NO: 695606 - RNA, 19 nt, Homo sapiens
  misc_RNA (1)...(19): siRNA sense strand
ccgcaccagugauuguuga

SEQ ID NO: 695607 - RNA, 19 nt, Homo sapiens
  misc_RNA (1)...(19): siRNA sense strand
ggcagcaguuccagucugu

SEQ ID NO: 695608 - RNA, 19 nt, Homo sapiens
  misc_RNA (1)...(19): siRNA sense strand
uuaugaacaugguggguau

SEQ ID NO: 695609 - RNA, 19 nt, Homo sapiens
  misc_RNA (1)...(19): siRNA sense strand
cagaggccuucaagcaaau

SEQ ID NO: 695610 - RNA, 19 nt, Homo sapiens
  misc_RNA (1)...(19): siRNA sense strand
ggaguugggcaaggugaaa

SEQ ID NO: 695611 - RNA, 19 nt, Homo sapiens
  misc_RNA (1)...(19): siRNA sense strand
gagcuguugucuuugaacu

SEQ ID NO: 695612 - RNA, 19 nt, Homo sapiens
  misc_RNA (1)...(19): siRNA sense strand
aaucgggcaugcuucuuug

SEQ ID NO: 695613 - RNA, 19 nt, Homo sapiens
  misc_RNA (1)...(19): siRNA sense strand
auuaccacguggagaaaua

SEQ ID NO: 695614 - RNA, 19 nt, Homo sapiens
  misc_RNA (1)...(19): siRNA sense strand
ccaguccgccuauguaagu

SEQ ID NO: 695615 - RNA, 19 nt, Homo sapiens
  misc_RNA (1)...(19): siRNA sense strand
ucaaugggguuuucaagga

SEQ ID NO: 695616 - RNA, 19 nt, Homo sapiens
  misc_RNA (1)...(19): siRNA sense strand
gaggauagcaggaauauga

SEQ ID NO: 695617 - RNA, 19 nt, Homo sapiens
  misc_RNA (1)...(19): siRNA sense strand
gcagaggccuucaagcaaa

SEQ ID NO: 695618 - RNA, 19 nt, Homo sapiens
  misc_RNA (1)...(19): siRNA sense strand
gaagacgaaauccguauua

SEQ ID NO: 695619 - RNA, 19 nt, Homo sapiens
  misc_RNA (1)...(19): siRNA sense strand
ugaaggaugucaguuauaa

SEQ ID NO: 695620 - RNA, 19 nt, Homo sapiens
  misc_RNA (1)...(19): siRNA sense strand
gacaaggcauggcuaauga

SEQ ID NO: 695621 - RNA, 19 nt, Homo sapiens
  misc_RNA (1)...(19): siRNA sense strand
gauauaauccugaaucgaa

SEQ ID NO: 695622 - RNA, 19 nt, Homo sapiens
  misc_RNA (1)...(19): siRNA sense strand
gcaaguacuuugaggauag

SEQ ID NO: 695623 - RNA, 19 nt, Homo sapiens
  misc_RNA (1)...(19): siRNA sense strand
gaagagcuauggcuagaag

SEQ ID NO: 695624 - RNA, 19 nt, Homo sapiens
  misc_RNA (1)...(19): siRNA sense strand
ggaugucaguuauaagauu

SEQ ID NO: 695625 - RNA, 19 nt, Homo sapiens
  misc_RNA (1)...(19): siRNA sense strand
aagaggagcugucauuaug

SEQ ID NO: 695626 - RNA, 19 nt, Homo sapiens
  misc_RNA (1)...(19): siRNA sense strand
ccacaaggaccaacaacua

SEQ ID NO: 695627 - RNA, 19 nt, Homo sapiens
  misc_RNA (1)...(19): siRNA sense strand
ucccugagcuguugucuuu

SEQ ID NO: 695628 - RNA, 19 nt, Homo sapiens
  misc_RNA (1)...(19): siRNA sense strand
agaaugaaauggcauagug

SEQ ID NO: 695629 - RNA, 19 nt, Homo sapiens
  misc_RNA (1)...(19): siRNA sense strand
gaacaaacgguacaauguc

SEQ ID NO: 695630 - RNA, 19 nt, Homo sapiens
  misc_RNA (1)...(19): siRNA sense strand
gaugagggauguccacaag

SEQ ID NO: 695631 - RNA, 19 nt, Homo sapiens
  misc_RNA (1)...(19): siRNA sense strand
cacaauuccuuacgggaua

SEQ ID NO: 695632 - RNA, 19 nt, Homo sapiens
  misc_RNA (1)...(19): siRNA sense strand
acaaggaacugguuuaagg

SEQ ID NO: 695633 - RNA, 19 nt, Homo sapiens
  misc_RNA (1)...(19): siRNA sense strand
gcucuacucuaaagaagug

SEQ ID NO: 695634 - RNA, 19 nt, Homo sapiens
  misc_RNA (1)...(19): siRNA sense strand
gaaauggcauagugaagac

SEQ ID NO: 695635 - RNA, 19 nt, Homo sapiens
  misc_RNA (1)...(19): siRNA sense strand
gaaauuucccugagcuguu

SEQ ID NO: 695636 - RNA, 19 nt, Homo sapiens
  misc_RNA (1)...(19): siRNA sense strand
ggaguucuuuccgggauaa

SEQ ID NO: 695637 - RNA, 19 nt, Homo sapiens
  misc_RNA (1)...(19): siRNA sense strand
ugacagcucugagacaaug

SEQ ID NO: 695638 - RNA, 19 nt, Homo sapiens
  misc_RNA (1)...(19): siRNA sense strand
ccuacucugugaagaauaa

SEQ ID NO: 695639 - RNA, 19 nt, Homo sapiens
  misc_RNA (1)...(19): siRNA sense strand
agagaaggcucccaaaguc

SEQ ID NO: 695640 - RNA, 19 nt, Homo sapiens
  misc_RNA (1)...(19): siRNA sense strand
gaucugagacccuaaagca

SEQ ID NO: 695641 - RNA, 19 nt, Homo sapiens
  misc_RNA (1)...(19): siRNA sense strand
aggcauggcuaaugaauuc

SEQ ID NO: 695642 - RNA, 19 nt, Homo sapiens
  misc_RNA (1)...(19): siRNA sense strand
aaacuggaguggucucaga

SEQ ID NO: 695643 - RNA, 19 nt, Homo sapiens
  misc_RNA (1)...(19): siRNA sense strand
gcuguugucuuugaacuug

SEQ ID NO: 695644 - RNA, 19 nt, Homo sapiens
  misc_RNA (1)...(19): siRNA sense strand
caagaggagcugucauuau

SEQ ID NO: 695645 - RNA, 19 nt, Homo sapiens
  misc_RNA (1)...(19): siRNA sense strand
ggauggccuuucugacauu

SEQ ID NO: 695646 - RNA, 19 nt, Homo sapiens
  misc_RNA (1)...(19): siRNA sense strand
gaacacacaggauggauac

SEQ ID NO: 695647 - RNA, 19 nt, Homo sapiens
  misc_RNA (1)...(19): siRNA sense strand
caacuaagacacacuccuu

SEQ ID NO: 695648 - RNA, 19 nt, Homo sapiens
  misc_RNA (1)...(19): siRNA sense strand
ugagggauguccacaagga

SEQ ID NO: 695649 - RNA, 19 nt, Homo sapiens
  misc_RNA (1)...(19): siRNA sense strand
cauugaaggaugucaguua

SEQ ID NO: 695650 - RNA, 19 nt, Homo sapiens
  misc_RNA (1)...(19): siRNA sense strand
uaaagaagugugggacaua

SEQ ID NO: 695651 - RNA, 19 nt, Homo sapiens
  misc_RNA (1)...(19): siRNA sense strand
gaaugaaauggcauaguga

SEQ ID NO: 695652 - RNA, 19 nt, Homo sapiens
  misc_RNA (1)...(19): siRNA sense strand
gaaagaaaggugggaguuc

SEQ ID NO: 695653 - RNA, 19 nt, Homo sapiens
  misc_RNA (1)...(19): siRNA sense strand
gauggaagcguggagauga

SEQ ID NO: 695654 - RNA, 19 nt, Homo sapiens
  misc_RNA (1)...(19): siRNA sense strand
gacaaugaguggaacuaca

SEQ ID NO: 695655 - RNA, 19 nt, Homo sapiens
  misc_RNA (1)...(19): siRNA sense strand
gauggccuuucugacauua

SEQ ID NO: 695656 - RNA, 19 nt, Homo sapiens
  misc_RNA (1)...(19): siRNA sense strand
gaaaaccuccggagagaaa

SEQ ID NO: 695657 - RNA, 19 nt, Homo sapiens
  misc_RNA (1)...(19): siRNA sense strand
gccgugacauugauauaau

SEQ ID NO: 695658 - RNA, 19 nt, Homo sapiens
  misc_RNA (1)...(19): siRNA sense strand
caggauggauacacaagga

SEQ ID NO: 695659 - RNA, 19 nt, Homo sapiens
  misc_RNA (1)...(19): siRNA sense strand
ggacauacagaacugaagu

SEQ ID NO: 695660 - RNA, 19 nt, Homo sapiens
  misc_RNA (1)...(19): siRNA sense strand
cggaaaggaugcucugcuu

SEQ ID NO: 695661 - RNA, 19 nt, Homo sapiens
  misc_RNA (1)...(19): siRNA sense strand
ccugagcuguugucuuuga

SEQ ID NO: 695662 - RNA, 19 nt, Homo sapiens
  misc_RNA (1)...(19): siRNA sense strand
ugcuaaagcugaccaugaa

SEQ ID NO: 695663 - RNA, 19 nt, Homo sapiens
  misc_RNA (1)...(19): siRNA sense strand
cugagacccuaaagcauuu

SEQ ID NO: 695664 - RNA, 19 nt, Homo sapiens
  misc_RNA (1)...(19): siRNA sense strand
cacaaggaccaacaacuaa

SEQ ID NO: 695665 - RNA, 19 nt, Homo sapiens
  misc_RNA (1)...(19): siRNA sense strand
ugaaauggcauagugaaga

SEQ ID NO: 695666 - RNA, 19 nt, Homo sapiens
  misc_RNA (1)...(19): siRNA sense strand
gaccaguccgccuauguaa

SEQ ID NO: 695667 - RNA, 19 nt, Homo sapiens
  misc_RNA (1)...(19): siRNA sense strand
gacccugaaucucuccaaa

SEQ ID NO: 695668 - RNA, 19 nt, Homo sapiens
  misc_RNA (1)...(19): siRNA sense strand
ugaacaaacgguacaaugu

SEQ ID NO: 695669 - RNA, 19 nt, Homo sapiens
  misc_RNA (1)...(19): siRNA sense strand
gacgaaauccguauuacca

SEQ ID NO: 695670 - RNA, 19 nt, Homo sapiens
  misc_RNA (1)...(19): siRNA sense strand
ugacaaggcauggcuaaug

SEQ ID NO: 695671 - RNA, 19 nt, Homo sapiens
  misc_RNA (1)...(19): siRNA sense strand
gaacugguuuaaggucaca

SEQ ID NO: 695672 - RNA, 19 nt, Homo sapiens
  misc_RNA (1)...(19): siRNA sense strand
gggaguucuuuccgggaua

SEQ ID NO: 695673 - RNA, 19 nt, Homo sapiens
  misc_RNA (1)...(19): siRNA sense strand
aaauuucccugagcuguug

SEQ ID NO: 695674 - RNA, 19 nt, Homo sapiens
  misc_RNA (1)...(19): siRNA sense strand
guucuuuccgggauaauuu

SEQ ID NO: 695675 - RNA, 19 nt, Homo sapiens
  misc_RNA (1)...(19): siRNA sense strand
gaacugcugaggcgcacaa

SEQ ID NO: 695676 - RNA, 19 nt, Homo sapiens
  misc_RNA (1)...(19): siRNA sense strand
gcauuuaguccugcaauuc

SEQ ID NO: 695677 - RNA, 19 nt, Homo sapiens
  misc_RNA (1)...(19): siRNA sense strand
aaugaaacccugcaaggaa

SEQ ID NO: 695678 - RNA, 19 nt, Homo sapiens
  misc_RNA (1)...(19): siRNA sense strand
ucgaagagcuauggcuaga

SEQ ID NO: 695679 - RNA, 19 nt, Homo sapiens
  misc_RNA (1)...(19): siRNA sense strand
cagagaaggcucccaaagu

SEQ ID NO: 695680 - RNA, 19 nt, Homo sapiens
  misc_RNA (1)...(19): siRNA sense strand
gaugggccgugacauugau

SEQ ID NO: 695681 - RNA, 19 nt, Homo sapiens
  misc_RNA (1)...(19): siRNA sense strand
aaauggagaugcuaaagcu

SEQ ID NO: 695682 - RNA, 19 nt, Homo sapiens
  misc_RNA (1)...(19): siRNA sense strand
caaggaccaacaacuaaga

SEQ ID NO: 695683 - RNA, 19 nt, Homo sapiens
  misc_RNA (1)...(19): siRNA sense strand
acaagaggagcugucauua

SEQ ID NO: 695684 - RNA, 19 nt, Homo sapiens
  misc_RNA (1)...(19): siRNA sense strand
ccacguggagaaauagaaa

SEQ ID NO: 695685 - RNA, 19 nt, Homo sapiens
  misc_RNA (1)...(19): siRNA sense strand
acacaaggaacugguuuaa

SEQ ID NO: 695686 - RNA, 19 nt, Homo sapiens
  misc_RNA (1)...(19): siRNA sense strand
aggaaauggugcaggcuuu

SEQ ID NO: 695687 - RNA, 19 nt, Homo sapiens
  misc_RNA (1)...(19): siRNA sense strand
acccggaccuucauugcua

SEQ ID NO: 695688 - RNA, 19 nt, Homo sapiens
  misc_RNA (1)...(19): siRNA sense strand
ggaaguggaaggacagucu

SEQ ID NO: 695689 - RNA, 19 nt, Homo sapiens
  misc_RNA (1)...(19): siRNA sense strand
ggauagcaggaauaugaaa

SEQ ID NO: 695690 - RNA, 19 nt, Homo sapiens
  misc_RNA (1)...(19): siRNA sense strand
augaaacccugcaaggaaa

SEQ ID NO: 695691 - RNA, 19 nt, Homo sapiens
  misc_RNA (1)...(19): siRNA sense strand
gagaaggcucccaaaguca

SEQ ID NO: 695692 - RNA, 19 nt, Homo sapiens
  misc_RNA (1)...(19): siRNA sense strand
cuacugcgcccuacucugu

SEQ ID NO: 695693 - RNA, 19 nt, Homo sapiens
  misc_RNA (1)...(19): siRNA sense strand
gcgaaagaagaaugaaaug

SEQ ID NO: 695694 - RNA, 19 nt, Homo sapiens
  misc_RNA (1)...(19): siRNA sense strand
ucugagacccuaaagcauu

SEQ ID NO: 695695 - RNA, 19 nt, Homo sapiens
  misc_RNA (1)...(19): siRNA sense strand
gcccuacucugugaagaau

SEQ ID NO: 695696 - RNA, 19 nt, Homo sapiens
  misc_RNA (1)...(19): siRNA sense strand
cuuacgggauaaaguauga

SEQ ID NO: 695697 - RNA, 19 nt, Homo sapiens
  misc_RNA (1)...(19): siRNA sense strand
gaccaacaacuaagacaca

SEQ ID NO: 695698 - RNA, 19 nt, Homo sapiens
  misc_RNA (1)...(19): siRNA sense strand
caaugaaacccugcaagga

SEQ ID NO: 695699 - RNA, 19 nt, Homo sapiens
  misc_RNA (1)...(19): siRNA sense strand
gacauugacagcucugaga

SEQ ID NO: 695700 - RNA, 19 nt, Homo sapiens
  misc_RNA (1)...(19): siRNA sense strand
ccuggacggccgagaguua

SEQ ID NO: 695701 - RNA, 19 nt, Homo sapiens
  misc_RNA (1)...(19): siRNA sense strand
cuaaagaagugugggacau

SEQ ID NO: 695702 - RNA, 19 nt, Homo sapiens
  misc_RNA (1)...(19): siRNA sense strand
ggccgugacauugauauaa

SEQ ID NO: 695703 - RNA, 19 nt, Homo sapiens
  misc_RNA (1)...(19): siRNA sense strand
uccagaaucuccgcuuuga

SEQ ID NO: 695704 - RNA, 19 nt, Homo sapiens
  misc_RNA (1)...(19): siRNA sense strand
gaugagaaccaaaagauau

SEQ ID NO: 695705 - RNA, 19 nt, Homo sapiens
  misc_RNA (1)...(19): siRNA sense strand
agaagaaugaaauggcaua

SEQ ID NO: 695706 - RNA, 19 nt, Homo sapiens
  misc_RNA (1)...(19): siRNA sense strand
ccgcaccagugauuguuga

SEQ ID NO: 695707 - RNA, 19 nt, Homo sapiens
  misc_RNA (1)...(19): siRNA sense strand
ggcagcaguuccagucugu

SEQ ID NO: 695708 - RNA, 19 nt, Homo sapiens
  misc_RNA (1)...(19): siRNA sense strand
uuaugaacaugguggguau

SEQ ID NO: 695709 - RNA, 19 nt, Homo sapiens
  misc_RNA (1)...(19): siRNA sense strand
cagaggccuucaagcaaau

SEQ ID NO: 695710 - RNA, 19 nt, Homo sapiens
  misc_RNA (1)...(19): siRNA sense strand
ggaguugggcaaggugaaa

SEQ ID NO: 695711 - RNA, 19 nt, Homo sapiens
  misc_RNA (1)...(19): siRNA sense strand
gagcuguugucuuugaacu

SEQ ID NO: 695712 - RNA, 19 nt, Homo sapiens
  misc_RNA (1)...(19): siRNA sense strand
aaucgggcaugcuucuuug

SEQ ID NO: 695713 - RNA, 19 nt, Homo sapiens
  misc_RNA (1)...(19): siRNA sense strand
auuaccacguggagaaaua

SEQ ID NO: 695714 - RNA, 19 nt, Homo sapiens
  misc_RNA (1)...(19): siRNA sense strand
ccaguccgccuauguaagu

SEQ ID NO: 695715 - RNA, 19 nt, Homo sapiens
  misc_RNA (1)...(19): siRNA sense strand
ucaaugggguuuucaagga

SEQ ID NO: 695716 - RNA, 19 nt, Homo sapiens
  misc_RNA (1)...(19): siRNA sense strand
gaaccacuaucccguguuu

SEQ ID NO: 695717 - RNA, 19 nt, Homo sapiens
  misc_RNA (1)...(19): siRNA sense strand
gggacuaccugaaccacua

SEQ ID NO: 695718 - RNA, 19 nt, Homo sapiens
  misc_RNA (1)...(19): siRNA sense strand
gggaugcucuucacagcua

SEQ ID NO: 695719 - RNA, 19 nt, Homo sapiens
  misc_RNA (1)...(19): siRNA sense strand
aagcugaccuggagaucua

SEQ ID NO: 695720 - RNA, 19 nt, Homo sapiens
  misc_RNA (1)...(19): siRNA sense strand
gggcagccaugucuacuuc

SEQ ID NO: 695721 - RNA, 19 nt, Homo sapiens
  misc_RNA (1)...(19): siRNA sense strand
agauugcgauggaguuuaa

SEQ ID NO: 695722 - RNA, 19 nt, Homo sapiens
  misc_RNA (1)...(19): siRNA sense strand
gguggcagcuguguuugaa

SEQ ID NO: 695723 - RNA, 19 nt, Homo sapiens
  misc_RNA (1)...(19): siRNA sense strand
gggcgagugucgaaacuuc

SEQ ID NO: 695724 - RNA, 19 nt, Homo sapiens
  misc_RNA (1)...(19): siRNA sense strand
gcagccaugucuacuucuu

SEQ ID NO: 695725 - RNA, 19 nt, Homo sapiens
  misc_RNA (1)...(19): siRNA sense strand
gagacaacaucagcgguau

SEQ ID NO: 695726 - RNA, 19 nt, Homo sapiens
  misc_RNA (1)...(19): siRNA sense strand
ggacagggacaaccucuac

SEQ ID NO: 695727 - RNA, 19 nt, Homo sapiens
  misc_RNA (1)...(19): siRNA sense strand
auaaacgugugucggauga

SEQ ID NO: 695728 - RNA, 19 nt, Homo sapiens
  misc_RNA (1)...(19): siRNA sense strand
ggagauugcgauggaguuu

SEQ ID NO: 695729 - RNA, 19 nt, Homo sapiens
  misc_RNA (1)...(19): siRNA sense strand
cagcuacuguuaccgacuu

SEQ ID NO: 695730 - RNA, 19 nt, Homo sapiens
  misc_RNA (1)...(19): siRNA sense strand
gagauugcgauggaguuua

SEQ ID NO: 695731 - RNA, 19 nt, Homo sapiens
  misc_RNA (1)...(19): siRNA sense strand
gagacucccauuucuacuu

SEQ ID NO: 695732 - RNA, 19 nt, Homo sapiens
  misc_RNA (1)...(19): siRNA sense strand
agacucccauuucuacuuc

SEQ ID NO: 695733 - RNA, 19 nt, Homo sapiens
  misc_RNA (1)...(19): siRNA sense strand
gucaagacccacccucuga

SEQ ID NO: 695734 - RNA, 19 nt, Homo sapiens
  misc_RNA (1)...(19): siRNA sense strand
cggcucaacugcucuguac

SEQ ID NO: 695735 - RNA, 19 nt, Homo sapiens
  misc_RNA (1)...(19): siRNA sense strand
ugaaacaugacuccaagug

SEQ ID NO: 695736 - RNA, 19 nt, Homo sapiens
  misc_RNA (1)...(19): siRNA sense strand
caagacccacccucugaug

SEQ ID NO: 695737 - RNA, 19 nt, Homo sapiens
  misc_RNA (1)...(19): siRNA sense strand
ggacuaccugaaccacuau

SEQ ID NO: 695738 - RNA, 19 nt, Homo sapiens
  misc_RNA (1)...(19): siRNA sense strand
aaacgugugucggaugaag

SEQ ID NO: 695739 - RNA, 19 nt, Homo sapiens
  misc_RNA (1)...(19): siRNA sense strand
caaacaggagggcgagugu

SEQ ID NO: 695740 - RNA, 19 nt, Homo sapiens
  misc_RNA (1)...(19): siRNA sense strand
gaagcugaccuggagaucu

SEQ ID NO: 695741 - RNA, 19 nt, Homo sapiens
  misc_RNA (1)...(19): siRNA sense strand
gagggcgagugucgaaacu

SEQ ID NO: 695742 - RNA, 19 nt, Homo sapiens
  misc_RNA (1)...(19): siRNA sense strand
caauguugcccucuucucu

SEQ ID NO: 695743 - RNA, 19 nt, Homo sapiens
  misc_RNA (1)...(19): siRNA sense strand
gacaacaucagcgguaugg

SEQ ID NO: 695744 - RNA, 19 nt, Homo sapiens
  misc_RNA (1)...(19): siRNA sense strand
ccaugucuacuucuucuuc

SEQ ID NO: 695745 - RNA, 19 nt, Homo sapiens
  misc_RNA (1)...(19): siRNA sense strand
caggagggcgagugucgaa

SEQ ID NO: 695746 - RNA, 19 nt, Homo sapiens
  misc_RNA (1)...(19): siRNA sense strand
ucuccgaggugccgguuag

SEQ ID NO: 695747 - RNA, 19 nt, Homo sapiens
  misc_RNA (1)...(19): siRNA sense strand
ccgacuuccuagccauuga

SEQ ID NO: 695748 - RNA, 19 nt, Homo sapiens
  misc_RNA (1)...(19): siRNA sense strand
cccaagcacgccaauguug

SEQ ID NO: 695749 - RNA, 19 nt, Homo sapiens
  misc_RNA (1)...(19): siRNA sense strand
gugcgccaacuacagcaua

SEQ ID NO: 695750 - RNA, 19 nt, Homo sapiens
  misc_RNA (1)...(19): siRNA sense strand
uccgggagauugcgaugga

SEQ ID NO: 695751 - RNA, 19 nt, Homo sapiens
  misc_RNA (1)...(19): siRNA sense strand
gaggugccgguuaggaguu

SEQ ID NO: 695752 - RNA, 19 nt, Homo sapiens
  misc_RNA (1)...(19): siRNA sense strand
gaaccacuaucccguguuu

SEQ ID NO: 695753 - RNA, 19 nt, Homo sapiens
  misc_RNA (1)...(19): siRNA sense strand
gggacuaccugaaccacua

SEQ ID NO: 695754 - RNA, 19 nt, Homo sapiens
  misc_RNA (1)...(19): siRNA sense strand
gggaugcucuucacagcua

SEQ ID NO: 695755 - RNA, 19 nt, Homo sapiens
  misc_RNA (1)...(19): siRNA sense strand
aagcugaccuggagaucua

SEQ ID NO: 695756 - RNA, 19 nt, Homo sapiens
  misc_RNA (1)...(19): siRNA sense strand
gggcagccaugucuacuuc

SEQ ID NO: 695757 - RNA, 19 nt, Homo sapiens
  misc_RNA (1)...(19): siRNA sense strand
agauugcgauggaguuuaa

SEQ ID NO: 695758 - RNA, 19 nt, Homo sapiens
  misc_RNA (1)...(19): siRNA sense strand
gguggcagcuguguuugaa

SEQ ID NO: 695759 - RNA, 19 nt, Homo sapiens
  misc_RNA (1)...(19): siRNA sense strand
gggcgagugucgaaacuuc

SEQ ID NO: 695760 - RNA, 19 nt, Homo sapiens
  misc_RNA (1)...(19): siRNA sense strand
gcagccaugucuacuucuu

SEQ ID NO: 695761 - RNA, 19 nt, Homo sapiens
  misc_RNA (1)...(19): siRNA sense strand
gagacaacaucagcgguau

SEQ ID NO: 695762 - RNA, 19 nt, Homo sapiens
  misc_RNA (1)...(19): siRNA sense strand
ggacagggacaaccucuac

SEQ ID NO: 695763 - RNA, 19 nt, Homo sapiens
  misc_RNA (1)...(19): siRNA sense strand
auaaacgugugucggauga

SEQ ID NO: 695764 - RNA, 19 nt, Homo sapiens
  misc_RNA (1)...(19): siRNA sense strand
ggagauugcgauggaguuu

SEQ ID NO: 695765 - RNA, 19 nt, Homo sapiens
  misc_RNA (1)...(19): siRNA sense strand
cagcuacuguuaccgacuu

SEQ ID NO: 695766 - RNA, 19 nt, Homo sapiens
  misc_RNA (1)...(19): siRNA sense strand
gagauugcgauggaguuua

SEQ ID NO: 695767 - RNA, 19 nt, Homo sapiens
  misc_RNA (1)...(19): siRNA sense strand
gagacucccauuucuacuu

SEQ ID NO: 695768 - RNA, 19 nt, Homo sapiens
  misc_RNA (1)...(19): siRNA sense strand
agacucccauuucuacuuc

SEQ ID NO: 695769 - RNA, 19 nt, Homo sapiens
  misc_RNA (1)...(19): siRNA sense strand
gucaagacccacccucuga

SEQ ID NO: 695770 - RNA, 19 nt, Homo sapiens
  misc_RNA (1)...(19): siRNA sense strand
cggcucaacugcucuguac

SEQ ID NO: 695771 - RNA, 19 nt, Homo sapiens
  misc_RNA (1)...(19): siRNA sense strand
ugaaacaugacuccaagug

SEQ ID NO: 695772 - RNA, 19 nt, Homo sapiens
  misc_RNA (1)...(19): siRNA sense strand
caagacccacccucugaug

SEQ ID NO: 695773 - RNA, 19 nt, Homo sapiens
  misc_RNA (1)...(19): siRNA sense strand
ggacuaccugaaccacuau

SEQ ID NO: 695774 - RNA, 19 nt, Homo sapiens
  misc_RNA (1)...(19): siRNA sense strand
aaacgugugucggaugaag

SEQ ID NO: 695775 - RNA, 19 nt, Homo sapiens
  misc_RNA (1)...(19): siRNA sense strand
caaacaggagggcgagugu

SEQ ID NO: 695776 - RNA, 19 nt, Homo sapiens
  misc_RNA (1)...(19): siRNA sense strand
gaagcugaccuggagaucu

SEQ ID NO: 695777 - RNA, 19 nt, Homo sapiens
  misc_RNA (1)...(19): siRNA sense strand
gagggcgagugucgaaacu

SEQ ID NO: 695778 - RNA, 19 nt, Homo sapiens
  misc_RNA (1)...(19): siRNA sense strand
caauguugcccucuucucu

SEQ ID NO: 695779 - RNA, 19 nt, Homo sapiens
  misc_RNA (1)...(19): siRNA sense strand
gacaacaucagcgguaugg

SEQ ID NO: 695780 - RNA, 19 nt, Homo sapiens
  misc_RNA (1)...(19): siRNA sense strand
ccaugucuacuucuucuuc

SEQ ID NO: 695781 - RNA, 19 nt, Homo sapiens
  misc_RNA (1)...(19): siRNA sense strand
caggagggcgagugucgaa

SEQ ID NO: 695782 - RNA, 19 nt, Homo sapiens
  misc_RNA (1)...(19): siRNA sense strand
ccgacuuccuagccauuga

SEQ ID NO: 695783 - RNA, 19 nt, Homo sapiens
  misc_RNA (1)...(19): siRNA sense strand
cccaagcacgccaauguug

SEQ ID NO: 695784 - RNA, 19 nt, Homo sapiens
  misc_RNA (1)...(19): siRNA sense strand
gugcgccaacuacagcaua

SEQ ID NO: 695785 - RNA, 19 nt, Homo sapiens
  misc_RNA (1)...(19): siRNA sense strand
uccgggagauugcgaugga

SEQ ID NO: 695786 - RNA, 19 nt, Homo sapiens
  misc_RNA (1)...(19): siRNA sense strand
gaaccacuaucccguguuu

SEQ ID NO: 695787 - RNA, 19 nt, Homo sapiens
  misc_RNA (1)...(19): siRNA sense strand
gggacuaccugaaccacua

SEQ ID NO: 695788 - RNA, 19 nt, Homo sapiens
  misc_RNA (1)...(19): siRNA sense strand
gggaugcucuucacagcua

SEQ ID NO: 695789 - RNA, 19 nt, Homo sapiens
  misc_RNA (1)...(19): siRNA sense strand
aagcugaccuggagaucua

SEQ ID NO: 695790 - RNA, 19 nt, Homo sapiens
  misc_RNA (1)...(19): siRNA sense strand
gggcagccaugucuacuuc

SEQ ID NO: 695791 - RNA, 19 nt, Homo sapiens
  misc_RNA (1)...(19): siRNA sense strand
agauugcgauggaguuuaa

SEQ ID NO: 695792 - RNA, 19 nt, Homo sapiens
  misc_RNA (1)...(19): siRNA sense strand
gguggcagcuguguuugaa

SEQ ID NO: 695793 - RNA, 19 nt, Homo sapiens
  misc_RNA (1)...(19): siRNA sense strand
gggcgagugucgaaacuuc

SEQ ID NO: 695794 - RNA, 19 nt, Homo sapiens
  misc_RNA (1)...(19): siRNA sense strand
gcagccaugucuacuucuu

SEQ ID NO: 695795 - RNA, 19 nt, Homo sapiens
  misc_RNA (1)...(19): siRNA sense strand
gagacaacaucagcgguau

SEQ ID NO: 695796 - RNA, 19 nt, Homo sapiens
  misc_RNA (1)...(19): siRNA sense strand
ggacagggacaaccucuac

SEQ ID NO: 695797 - RNA, 19 nt, Homo sapiens
  misc_RNA (1)...(19): siRNA sense strand
auaaacgugugucggauga

SEQ ID NO: 695798 - RNA, 19 nt, Homo sapiens
  misc_RNA (1)...(19): siRNA sense strand
ggagauugcgauggaguuu

SEQ ID NO: 695799 - RNA, 19 nt, Homo sapiens
  misc_RNA (1)...(19): siRNA sense strand
cagcuacuguuaccgacuu

SEQ ID NO: 695800 - RNA, 19 nt, Homo sapiens
  misc_RNA (1)...(19): siRNA sense strand
gagauugcgauggaguuua

SEQ ID NO: 695801 - RNA, 19 nt, Homo sapiens
  misc_RNA (1)...(19): siRNA sense strand
gagacucccauuucuacuu

SEQ ID NO: 695802 - RNA, 19 nt, Homo sapiens
  misc_RNA (1)...(19): siRNA sense strand
agacucccauuucuacuuc

SEQ ID NO: 695803 - RNA, 19 nt, Homo sapiens
  misc_RNA (1)...(19): siRNA sense strand
gucaagacccacccucuga

SEQ ID NO: 695804 - RNA, 19 nt, Homo sapiens
  misc_RNA (1)...(19): siRNA sense strand
cggcucaacugcucuguac

SEQ ID NO: 695805 - RNA, 19 nt, Homo sapiens
  misc_RNA (1)...(19): siRNA sense strand
ugaaacaugacuccaagug

SEQ ID NO: 695806 - RNA, 19 nt, Homo sapiens
  misc_RNA (1)...(19): siRNA sense strand
caagacccacccucugaug

SEQ ID NO: 695807 - RNA, 19 nt, Homo sapiens
  misc_RNA (1)...(19): siRNA sense strand
ggacuaccugaaccacuau

SEQ ID NO: 695808 - RNA, 19 nt, Homo sapiens
  misc_RNA (1)...(19): siRNA sense strand
aaacgugugucggaugaag

SEQ ID NO: 695809 - RNA, 19 nt, Homo sapiens
  misc_RNA (1)...(19): siRNA sense strand
caaacaggagggcgagugu

SEQ ID NO: 695810 - RNA, 19 nt, Homo sapiens
  misc_RNA (1)...(19): siRNA sense strand
gaagcugaccuggagaucu

SEQ ID NO: 695811 - RNA, 19 nt, Homo sapiens
  misc_RNA (1)...(19): siRNA sense strand
gagggcgagugucgaaacu

SEQ ID NO: 695812 - RNA, 19 nt, Homo sapiens
  misc_RNA (1)...(19): siRNA sense strand
caauguugcccucuucucu

SEQ ID NO: 695813 - RNA, 19 nt, Homo sapiens
  misc_RNA (1)...(19): siRNA sense strand
gacaacaucagcgguaugg

SEQ ID NO: 695814 - RNA, 19 nt, Homo sapiens
  misc_RNA (1)...(19): siRNA sense strand
ccaugucuacuucuucuuc

SEQ ID NO: 695815 - RNA, 19 nt, Homo sapiens
  misc_RNA (1)...(19): siRNA sense strand
caggagggcgagugucgaa

SEQ ID NO: 695816 - RNA, 19 nt, Homo sapiens
  misc_RNA (1)...(19): siRNA sense strand
ucuccgaggugccgguuag

SEQ ID NO: 695817 - RNA, 19 nt, Homo sapiens
  misc_RNA (1)...(19): siRNA sense strand
ccgacuuccuagccauuga

SEQ ID NO: 695818 - RNA, 19 nt, Homo sapiens
  misc_RNA (1)...(19): siRNA sense strand
cccaagcacgccaauguug

SEQ ID NO: 695819 - RNA, 19 nt, Homo sapiens
  misc_RNA (1)...(19): siRNA sense strand
gugcgccaacuacagcaua

SEQ ID NO: 695820 - RNA, 19 nt, Homo sapiens
  misc_RNA (1)...(19): siRNA sense strand
uccgggagauugcgaugga

SEQ ID NO: 695821 - RNA, 19 nt, Homo sapiens
  misc_RNA (1)...(19): siRNA sense strand
gaggugccgguuaggaguu

SEQ ID NO: 695822 - RNA, 19 nt, Homo sapiens
  misc_RNA (1)...(19): siRNA sense strand
gagaggagcuucgccaaga

SEQ ID NO: 695823 - RNA, 19 nt, Homo sapiens
  misc_RNA (1)...(19): siRNA sense strand
ccgcacagcucaacgaguu

SEQ ID NO: 695824 - RNA, 19 nt, Homo sapiens
  misc_RNA (1)...(19): siRNA sense strand
gagcacacagucucuauga

SEQ ID NO: 695825 - RNA, 19 nt, Homo sapiens
  misc_RNA (1)...(19): siRNA sense strand
ccaaagacccggacaagca

SEQ ID NO: 695826 - RNA, 19 nt, Homo sapiens
  misc_RNA (1)...(19): siRNA sense strand
gggaggcggugaaguguag

SEQ ID NO: 695827 - RNA, 19 nt, Homo sapiens
  misc_RNA (1)...(19): siRNA sense strand
gggaggacaucaccacagu

SEQ ID NO: 695828 - RNA, 19 nt, Homo sapiens
  misc_RNA (1)...(19): siRNA sense strand
ucucuaugagcuucacuua

SEQ ID NO: 695829 - RNA, 19 nt, Homo sapiens
  misc_RNA (1)...(19): siRNA sense strand
gcagcagggccaacagaag

SEQ ID NO: 695830 - RNA, 19 nt, Homo sapiens
  misc_RNA (1)...(19): siRNA sense strand
ucacuaccccgacaucuuu

SEQ ID NO: 695831 - RNA, 19 nt, Homo sapiens
  misc_RNA (1)...(19): siRNA sense strand
aaagacgaccaacguguuc

SEQ ID NO: 695832 - RNA, 19 nt, Homo sapiens
  misc_RNA (1)...(19): siRNA sense strand
caggcuagguaugaaagau

SEQ ID NO: 695833 - RNA, 19 nt, Homo sapiens
  misc_RNA (1)...(19): siRNA sense strand
gagcuggcacugcguaucg

SEQ ID NO: 695834 - RNA, 19 nt, Homo sapiens
  misc_RNA (1)...(19): siRNA sense strand
gcagagugcugagccauca

SEQ ID NO: 695835 - RNA, 19 nt, Homo sapiens
  misc_RNA (1)...(19): siRNA sense strand
ggccauugcucagaacuuu

SEQ ID NO: 695836 - RNA, 19 nt, Homo sapiens
  misc_RNA (1)...(19): siRNA sense strand
caaggugggcgaccagaua

SEQ ID NO: 695837 - RNA, 19 nt, Homo sapiens
  misc_RNA (1)...(19): siRNA sense strand
gcauccaugucuauaagaa

SEQ ID NO: 695838 - RNA, 19 nt, Homo sapiens
  misc_RNA (1)...(19): siRNA sense strand
caacaacgugguccucauu

SEQ ID NO: 695839 - RNA, 19 nt, Homo sapiens
  misc_RNA (1)...(19): siRNA sense strand
gcugagccaucacuguuug

SEQ ID NO: 695840 - RNA, 19 nt, Homo sapiens
  misc_RNA (1)...(19): siRNA sense strand
ugagugcgauucagaagau

SEQ ID NO: 695841 - RNA, 19 nt, Homo sapiens
  misc_RNA (1)...(19): siRNA sense strand
ccaaggugcuggccauugc

SEQ ID NO: 695842 - RNA, 19 nt, Homo sapiens
  misc_RNA (1)...(19): siRNA sense strand
gaagaugacgcggguacga

SEQ ID NO: 695843 - RNA, 19 nt, Homo sapiens
  misc_RNA (1)...(19): siRNA sense strand
acaacgugguccucauuga

SEQ ID NO: 695844 - RNA, 19 nt, Homo sapiens
  misc_RNA (1)...(19): siRNA sense strand
gugcugagccaucacuguu

SEQ ID NO: 695845 - RNA, 19 nt, Homo sapiens
  misc_RNA (1)...(19): siRNA sense strand
caucaagggacagaagaaa

SEQ ID NO: 695846 - RNA, 19 nt, Homo sapiens
  misc_RNA (1)...(19): siRNA sense strand
gcugcauccaugucuauaa

SEQ ID NO: 695847 - RNA, 19 nt, Homo sapiens
  misc_RNA (1)...(19): siRNA sense strand
ccaacaacgugguccucau

SEQ ID NO: 695848 - RNA, 19 nt, Homo sapiens
  misc_RNA (1)...(19): siRNA sense strand
cugcauccaugucuauaag

SEQ ID NO: 695849 - RNA, 19 nt, Homo sapiens
  misc_RNA (1)...(19): siRNA sense strand
ggugggcgaccagauacua

SEQ ID NO: 695850 - RNA, 19 nt, Homo sapiens
  misc_RNA (1)...(19): siRNA sense strand
caagcgggaaggcgaguau

SEQ ID NO: 695851 - RNA, 19 nt, Homo sapiens
  misc_RNA (1)...(19): siRNA sense strand
auccaugucuauaagaaga

SEQ ID NO: 695852 - RNA, 19 nt, Homo sapiens
  misc_RNA (1)...(19): siRNA sense strand
gcaaggugggcgaccagau

SEQ ID NO: 695853 - RNA, 19 nt, Homo sapiens
  misc_RNA (1)...(19): siRNA sense strand
ggguacgagugguggacaa

SEQ ID NO: 695854 - RNA, 19 nt, Homo sapiens
  misc_RNA (1)...(19): siRNA sense strand
gcaagcgggaaggcgagua

SEQ ID NO: 695855 - RNA, 19 nt, Homo sapiens
  misc_RNA (1)...(19): siRNA sense strand
ccauugcucagaacuuugu

SEQ ID NO: 695856 - RNA, 19 nt, Homo sapiens
  misc_RNA (1)...(19): siRNA sense strand
ggucuucugugucuucuau

SEQ ID NO: 695857 - RNA, 19 nt, Homo sapiens
  misc_RNA (1)...(19): siRNA sense strand
cagcaagcauuauaucuca

SEQ ID NO: 695858 - RNA, 19 nt, Homo sapiens
  misc_RNA (1)...(19): siRNA sense strand
ggucaggucuucugugucu

SEQ ID NO: 695859 - RNA, 19 nt, Homo sapiens
  misc_RNA (1)...(19): siRNA sense strand
uggcagcaguuucuucuuu

SEQ ID NO: 695860 - RNA, 19 nt, Homo sapiens
  misc_RNA (1)...(19): siRNA sense strand
gcacaguugucacuaccau

SEQ ID NO: 695861 - RNA, 19 nt, Homo sapiens
  misc_RNA (1)...(19): siRNA sense strand
gcaagaggaguccaaguca

SEQ ID NO: 695862 - RNA, 19 nt, Homo sapiens
  misc_RNA (1)...(19): siRNA sense strand
cagcgagggcuucuacuuu

SEQ ID NO: 695863 - RNA, 19 nt, Homo sapiens
  misc_RNA (1)...(19): siRNA sense strand
guggagggcuggagcuuca

SEQ ID NO: 695864 - RNA, 19 nt, Homo sapiens
  misc_RNA (1)...(19): siRNA sense strand
ggcagcaguuucuucuuug

SEQ ID NO: 695865 - RNA, 19 nt, Homo sapiens
  misc_RNA (1)...(19): siRNA sense strand
caggucaggucuucugugu

SEQ ID NO: 695866 - RNA, 19 nt, Homo sapiens
  misc_RNA (1)...(19): siRNA sense strand
cuacuuugcuuucaucacu

SEQ ID NO: 695867 - RNA, 19 nt, Homo sapiens
  misc_RNA (1)...(19): siRNA sense strand
cauggaagccugggugaaa

SEQ ID NO: 695868 - RNA, 19 nt, Homo sapiens
  misc_RNA (1)...(19): siRNA sense strand
ccagggaccaguuucaguu

SEQ ID NO: 695869 - RNA, 19 nt, Homo sapiens
  misc_RNA (1)...(19): siRNA sense strand
cauuauaucucaguguauc

SEQ ID NO: 695870 - RNA, 19 nt, Homo sapiens
  misc_RNA (1)...(19): siRNA sense strand
agcauuauaucucagugua

SEQ ID NO: 695871 - RNA, 19 nt, Homo sapiens
  misc_RNA (1)...(19): siRNA sense strand
ugucuucuaugcccuguug

SEQ ID NO: 695872 - RNA, 19 nt, Homo sapiens
  misc_RNA (1)...(19): siRNA sense strand
gcuggucauucucaucuuc

SEQ ID NO: 695873 - RNA, 19 nt, Homo sapiens
  misc_RNA (1)...(19): siRNA sense strand
gggaccaguuucaguugga

SEQ ID NO: 695874 - RNA, 19 nt, Homo sapiens
  misc_RNA (1)...(19): siRNA sense strand
gcaucccgcuuaacgugau

SEQ ID NO: 695875 - RNA, 19 nt, Homo sapiens
  misc_RNA (1)...(19): siRNA sense strand
agcgagggcuucuacuuug

SEQ ID NO: 695876 - RNA, 19 nt, Homo sapiens
  misc_RNA (1)...(19): siRNA sense strand
ggacgcuggucauucucau

SEQ ID NO: 695877 - RNA, 19 nt, Homo sapiens
  misc_RNA (1)...(19): siRNA sense strand
ccaaaggcaacucuaccaa

SEQ ID NO: 695878 - RNA, 19 nt, Homo sapiens
  misc_RNA (1)...(19): siRNA sense strand
gcaagcauuauaucucagu

SEQ ID NO: 695879 - RNA, 19 nt, Homo sapiens
  misc_RNA (1)...(19): siRNA sense strand
ggacuuuggcagcaguuuc

SEQ ID NO: 695880 - RNA, 19 nt, Homo sapiens
  misc_RNA (1)...(19): siRNA sense strand
ucucagcaccauuggcuuu

SEQ ID NO: 695881 - RNA, 19 nt, Homo sapiens
  misc_RNA (1)...(19): siRNA sense strand
gcagcaguuucuucuuugc

SEQ ID NO: 695882 - RNA, 19 nt, Homo sapiens
  misc_RNA (1)...(19): siRNA sense strand
gggcuucuacuuugcuuuc

SEQ ID NO: 695883 - RNA, 19 nt, Homo sapiens
  misc_RNA (1)...(19): siRNA sense strand
gcucccagguacugcaagu

SEQ ID NO: 695884 - RNA, 19 nt, Homo sapiens
  misc_RNA (1)...(19): siRNA sense strand
gcucggugccacuaucuuc

SEQ ID NO: 695885 - RNA, 19 nt, Homo sapiens
  misc_RNA (1)...(19): siRNA sense strand
gagggcuucuacuuugcuu

SEQ ID NO: 695886 - RNA, 19 nt, Homo sapiens
  misc_RNA (1)...(19): siRNA sense strand
gcauuauaucucaguguau

SEQ ID NO: 695887 - RNA, 19 nt, Homo sapiens
  misc_RNA (1)...(19): siRNA sense strand
agaggcaggucaggucuuc

SEQ ID NO: 695888 - RNA, 19 nt, Homo sapiens
  misc_RNA (1)...(19): siRNA sense strand
gcaggcacaguugucacua

SEQ ID NO: 695889 - RNA, 19 nt, Homo sapiens
  misc_RNA (1)...(19): siRNA sense strand
ccagcaagcauuauaucuc

SEQ ID NO: 695890 - RNA, 19 nt, Homo sapiens
  misc_RNA (1)...(19): siRNA sense strand
gcugcucggugccacuauc

SEQ ID NO: 695891 - RNA, 19 nt, Homo sapiens
  misc_RNA (1)...(19): siRNA sense strand
gcgagggcuucuacuuugc

SEQ ID NO: 695892 - RNA, 19 nt, Homo sapiens
  misc_RNA (1)...(19): siRNA sense strand
gcacagaccccagcaagca

SEQ ID NO: 695893 - RNA, 19 nt, Homo sapiens
  misc_RNA (1)...(19): siRNA sense strand
agacagaucugcaugaaca

SEQ ID NO: 695894 - RNA, 19 nt, Homo sapiens
  misc_RNA (1)...(19): siRNA sense strand
gcacaccgccuugcacaua

SEQ ID NO: 695895 - RNA, 19 nt, Homo sapiens
  misc_RNA (1)...(19): siRNA sense strand
ggaagaucuuugccuuuga

SEQ ID NO: 695896 - RNA, 19 nt, Homo sapiens
  misc_RNA (1)...(19): siRNA sense strand
ucacuuggcugcucuucug

SEQ ID NO: 695897 - RNA, 19 nt, Homo sapiens
  misc_RNA (1)...(19): siRNA sense strand
gaagaucuuugccuuugac

SEQ ID NO: 695898 - RNA, 19 nt, Homo sapiens
  misc_RNA (1)...(19): siRNA sense strand
caaagcaucagcaccagaa

SEQ ID NO: 695899 - RNA, 19 nt, Homo sapiens
  misc_RNA (1)...(19): siRNA sense strand
cuucuucguugcuguaauu

SEQ ID NO: 695900 - RNA, 19 nt, Homo sapiens
  misc_RNA (1)...(19): siRNA sense strand
cuucguugcuguaauugaa

SEQ ID NO: 695901 - RNA, 19 nt, Homo sapiens
  misc_RNA (1)...(19): siRNA sense strand
caauaaagaccagucacuu

SEQ ID NO: 695902 - RNA, 19 nt, Homo sapiens
  misc_RNA (1)...(19): siRNA sense strand
gcaauaaagaccagucacu

SEQ ID NO: 695903 - RNA, 19 nt, Homo sapiens
  misc_RNA (1)...(19): siRNA sense strand
aauaaagaccagucacuug

SEQ ID NO: 695904 - RNA, 19 nt, Homo sapiens
  misc_RNA (1)...(19): siRNA sense strand
gccaggaggagaaugaaga

SEQ ID NO: 695905 - RNA, 19 nt, Homo sapiens
  misc_RNA (1)...(19): siRNA sense strand
gcaugaacacccacuguac

SEQ ID NO: 695906 - RNA, 19 nt, Homo sapiens
  misc_RNA (1)...(19): siRNA sense strand
agagaaagaagagagcaaa

SEQ ID NO: 695907 - RNA, 19 nt, Homo sapiens
  misc_RNA (1)...(19): siRNA sense strand
uaauugaacgggucgagau

SEQ ID NO: 695908 - RNA, 19 nt, Homo sapiens
  misc_RNA (1)...(19): siRNA sense strand
agacagaucugcaugaaca

SEQ ID NO: 695909 - RNA, 19 nt, Homo sapiens
  misc_RNA (1)...(19): siRNA sense strand
gcacaccgccuugcacaua

SEQ ID NO: 695910 - RNA, 19 nt, Homo sapiens
  misc_RNA (1)...(19): siRNA sense strand
ggaagaucuuugccuuuga

SEQ ID NO: 695911 - RNA, 19 nt, Homo sapiens
  misc_RNA (1)...(19): siRNA sense strand
ucacuuggcugcucuucug

SEQ ID NO: 695912 - RNA, 19 nt, Homo sapiens
  misc_RNA (1)...(19): siRNA sense strand
gaagaucuuugccuuugac

SEQ ID NO: 695913 - RNA, 19 nt, Homo sapiens
  misc_RNA (1)...(19): siRNA sense strand
caaagcaucagcaccagaa

SEQ ID NO: 695914 - RNA, 19 nt, Homo sapiens
  misc_RNA (1)...(19): siRNA sense strand
cuucuucguugcuguaauu

SEQ ID NO: 695915 - RNA, 19 nt, Homo sapiens
  misc_RNA (1)...(19): siRNA sense strand
cuucguugcuguaauugaa

SEQ ID NO: 695916 - RNA, 19 nt, Homo sapiens
  misc_RNA (1)...(19): siRNA sense strand
caauaaagaccagucacuu

SEQ ID NO: 695917 - RNA, 19 nt, Homo sapiens
  misc_RNA (1)...(19): siRNA sense strand
gcaauaaagaccagucacu

SEQ ID NO: 695918 - RNA, 19 nt, Homo sapiens
  misc_RNA (1)...(19): siRNA sense strand
aauaaagaccagucacuug

SEQ ID NO: 695919 - RNA, 19 nt, Homo sapiens
  misc_RNA (1)...(19): siRNA sense strand
gccaggaggagaaugaaga

SEQ ID NO: 695920 - RNA, 19 nt, Homo sapiens
  misc_RNA (1)...(19): siRNA sense strand
gcaugaacacccacuguac

SEQ ID NO: 695921 - RNA, 19 nt, Homo sapiens
  misc_RNA (1)...(19): siRNA sense strand
agagaaagaagagagcaaa

SEQ ID NO: 695922 - RNA, 19 nt, Homo sapiens
  misc_RNA (1)...(19): siRNA sense strand
uaauugaacgggucgagau

SEQ ID NO: 695923 - RNA, 19 nt, Homo sapiens
  misc_RNA (1)...(19): siRNA sense strand
cggcucgucuacuccaugu

SEQ ID NO: 695924 - RNA, 19 nt, Homo sapiens
  misc_RNA (1)...(19): siRNA sense strand
agacagaucugcaugaaca

SEQ ID NO: 695925 - RNA, 19 nt, Homo sapiens
  misc_RNA (1)...(19): siRNA sense strand
ggaagaucuuugccuuuga

SEQ ID NO: 695926 - RNA, 19 nt, Homo sapiens
  misc_RNA (1)...(19): siRNA sense strand
ucacuuggcugcucuucug

SEQ ID NO: 695927 - RNA, 19 nt, Homo sapiens
  misc_RNA (1)...(19): siRNA sense strand
gaagaucuuugccuuugac

SEQ ID NO: 695928 - RNA, 19 nt, Homo sapiens
  misc_RNA (1)...(19): siRNA sense strand
caauaaagaccagucacuu

SEQ ID NO: 695929 - RNA, 19 nt, Homo sapiens
  misc_RNA (1)...(19): siRNA sense strand
gcaauaaagaccagucacu

SEQ ID NO: 695930 - RNA, 19 nt, Homo sapiens
  misc_RNA (1)...(19): siRNA sense strand
aauaaagaccagucacuug

SEQ ID NO: 695931 - RNA, 19 nt, Homo sapiens
  misc_RNA (1)...(19): siRNA sense strand
gccaggaggagaaugaaga

SEQ ID NO: 695932 - RNA, 19 nt, Homo sapiens
  misc_RNA (1)...(19): siRNA sense strand
gcaugaacacccacuguac

SEQ ID NO: 695933 - RNA, 19 nt, Homo sapiens
  misc_RNA (1)...(19): siRNA sense strand
cuucuucguugcuguaauu

SEQ ID NO: 695934 - RNA, 19 nt, Homo sapiens
  misc_RNA (1)...(19): siRNA sense strand
cuucguugcuguaauugaa

SEQ ID NO: 695935 - RNA, 19 nt, Homo sapiens
  misc_RNA (1)...(19): siRNA sense strand
gccaggaggagaaugaaga

SEQ ID NO: 695936 - RNA, 19 nt, Homo sapiens
  misc_RNA (1)...(19): siRNA sense strand
ggaaaccgauguggaagac

SEQ ID NO: 695937 - RNA, 19 nt, Homo sapiens
  misc_RNA (1)...(19): siRNA sense strand
uccgagggcuuccugaugu

SEQ ID NO: 695938 - RNA, 19 nt, Homo sapiens
  misc_RNA (1)...(19): siRNA sense strand
ugaagaggcagcccuggau

SEQ ID NO: 695939 - RNA, 19 nt, Homo sapiens
  misc_RNA (1)...(19): siRNA sense strand
ggaaaccgauguggaagac

SEQ ID NO: 695940 - RNA, 19 nt, Homo sapiens
  misc_RNA (1)...(19): siRNA sense strand
uccgagggcuuccugaugu

SEQ ID NO: 695941 - RNA, 19 nt, Homo sapiens
  misc_RNA (1)...(19): siRNA sense strand
ugaagaggcagcccuggau

SEQ ID NO: 695942 - RNA, 19 nt, Homo sapiens
  misc_RNA (1)...(19): siRNA sense strand
cuaaagagauggaacauaa

SEQ ID NO: 695943 - RNA, 19 nt, Homo sapiens
  misc_RNA (1)...(19): siRNA sense strand
agaaggagcuuuagcauuu

SEQ ID NO: 695944 - RNA, 19 nt, Homo sapiens
  misc_RNA (1)...(19): siRNA sense strand
gcuagaaccuccuguagua

SEQ ID NO: 695945 - RNA, 19 nt, Homo sapiens
  misc_RNA (1)...(19): siRNA sense strand
ggaaauuggugaagagaaa

SEQ ID NO: 695946 - RNA, 19 nt, Homo sapiens
  misc_RNA (1)...(19): siRNA sense strand
gagccagaaucuucaauua

SEQ ID NO: 695947 - RNA, 19 nt, Homo sapiens
  misc_RNA (1)...(19): siRNA sense strand
ggauaaggcucaauuacuu

SEQ ID NO: 695948 - RNA, 19 nt, Homo sapiens
  misc_RNA (1)...(19): siRNA sense strand
caacugagguggcuauaga

SEQ ID NO: 695949 - RNA, 19 nt, Homo sapiens
  misc_RNA (1)...(19): siRNA sense strand
ugacaaagauucuggauuc

SEQ ID NO: 695950 - RNA, 19 nt, Homo sapiens
  misc_RNA (1)...(19): siRNA sense strand
cgacagcgcuggaauccua

SEQ ID NO: 695951 - RNA, 19 nt, Homo sapiens
  misc_RNA (1)...(19): siRNA sense strand
gcgcuggaauccuauaaua

SEQ ID NO: 695952 - RNA, 19 nt, Homo sapiens
  misc_RNA (1)...(19): siRNA sense strand
ggucuuagauacagaacua

SEQ ID NO: 695953 - RNA, 19 nt, Homo sapiens
  misc_RNA (1)...(19): siRNA sense strand
gaagauagaggaaguacuu

SEQ ID NO: 695954 - RNA, 19 nt, Homo sapiens
  misc_RNA (1)...(19): siRNA sense strand
gaaguaagcguuccaaauc

SEQ ID NO: 695955 - RNA, 19 nt, Homo sapiens
  misc_RNA (1)...(19): siRNA sense strand
ucauuaagaucucgaagua

SEQ ID NO: 695956 - RNA, 19 nt, Homo sapiens
  misc_RNA (1)...(19): siRNA sense strand
aaacagauccuacugauga

SEQ ID NO: 695957 - RNA, 19 nt, Homo sapiens
  misc_RNA (1)...(19): siRNA sense strand
ggaagaagaucuguaucaa

SEQ ID NO: 695958 - RNA, 19 nt, Homo sapiens
  misc_RNA (1)...(19): siRNA sense strand
ggauacagaagaaccauua

SEQ ID NO: 695959 - RNA, 19 nt, Homo sapiens
  misc_RNA (1)...(19): siRNA sense strand
agaaagagcuucagagucu

SEQ ID NO: 695960 - RNA, 19 nt, Homo sapiens
  misc_RNA (1)...(19): siRNA sense strand
gcucuaugaugucagcuua

SEQ ID NO: 695961 - RNA, 19 nt, Homo sapiens
  misc_RNA (1)...(19): siRNA sense strand
ggagaucucuguucagucu

SEQ ID NO: 695962 - RNA, 19 nt, Homo sapiens
  misc_RNA (1)...(19): siRNA sense strand
caucaucccuuuaaacuca

SEQ ID NO: 695963 - RNA, 19 nt, Homo sapiens
  misc_RNA (1)...(19): siRNA sense strand
agacgaagcuucaguaucu

SEQ ID NO: 695964 - RNA, 19 nt, Homo sapiens
  misc_RNA (1)...(19): siRNA sense strand
gcugaacgcucuaugaugu

SEQ ID NO: 695965 - RNA, 19 nt, Homo sapiens
  misc_RNA (1)...(19): siRNA sense strand
gcucuaugaugucuuauga

SEQ ID NO: 695966 - RNA, 19 nt, Homo sapiens
  misc_RNA (1)...(19): siRNA sense strand
gaagaaauagugcagaaga

SEQ ID NO: 695967 - RNA, 19 nt, Homo sapiens
  misc_RNA (1)...(19): siRNA sense strand
caaaucuucugaacacaaa

SEQ ID NO: 695968 - RNA, 19 nt, Homo sapiens
  misc_RNA (1)...(19): siRNA sense strand
gauauaagccagacuugaa

SEQ ID NO: 695969 - RNA, 19 nt, Homo sapiens
  misc_RNA (1)...(19): siRNA sense strand
gaaacucuaucuucuacug

SEQ ID NO: 695970 - RNA, 19 nt, Homo sapiens
  misc_RNA (1)...(19): siRNA sense strand
gaugaagucugugcugaaa

SEQ ID NO: 695971 - RNA, 19 nt, Homo sapiens
  misc_RNA (1)...(19): siRNA sense strand
gaagucaucugagccaguu

SEQ ID NO: 695972 - RNA, 19 nt, Homo sapiens
  misc_RNA (1)...(19): siRNA sense strand
gcugagcgcucuaugaugu

SEQ ID NO: 695973 - RNA, 19 nt, Homo sapiens
  misc_RNA (1)...(19): siRNA sense strand
aaacagaucgcacagagua

SEQ ID NO: 695974 - RNA, 19 nt, Homo sapiens
  misc_RNA (1)...(19): siRNA sense strand
gaagaagaucuguaucaaa

SEQ ID NO: 695975 - RNA, 19 nt, Homo sapiens
  misc_RNA (1)...(19): siRNA sense strand
caucggagauugcagauuc

SEQ ID NO: 695976 - RNA, 19 nt, Homo sapiens
  misc_RNA (1)...(19): siRNA sense strand
ugaagcagauuuagugaga

SEQ ID NO: 695977 - RNA, 19 nt, Homo sapiens
  misc_RNA (1)...(19): siRNA sense strand
gaaagugaacaugguauaa

SEQ ID NO: 695978 - RNA, 19 nt, Homo sapiens
  misc_RNA (1)...(19): siRNA sense strand
agagcagacucaaguaaua

SEQ ID NO: 695979 - RNA, 19 nt, Homo sapiens
  misc_RNA (1)...(19): siRNA sense strand
gguagaagaaggagcuuua

SEQ ID NO: 695980 - RNA, 19 nt, Homo sapiens
  misc_RNA (1)...(19): siRNA sense strand
ccaggagucuaccaaauga

SEQ ID NO: 695981 - RNA, 19 nt, Homo sapiens
  misc_RNA (1)...(19): siRNA sense strand
gaacgucuuacaagccuua

SEQ ID NO: 695982 - RNA, 19 nt, Homo sapiens
  misc_RNA (1)...(19): siRNA sense strand
ugacuuguaugguaucuga

SEQ ID NO: 695983 - RNA, 19 nt, Homo sapiens
  misc_RNA (1)...(19): siRNA sense strand
caaagauucuggauuccuu

SEQ ID NO: 695984 - RNA, 19 nt, Homo sapiens
  misc_RNA (1)...(19): siRNA sense strand
uguagagucugcaguagua

SEQ ID NO: 695985 - RNA, 19 nt, Homo sapiens
  misc_RNA (1)...(19): siRNA sense strand
gcugaucgaucuaugaugu

SEQ ID NO: 695986 - RNA, 19 nt, Homo sapiens
  misc_RNA (1)...(19): siRNA sense strand
caucaaagaucauguuggu

SEQ ID NO: 695987 - RNA, 19 nt, Homo sapiens
  misc_RNA (1)...(19): siRNA sense strand
caucagagccuccuguuau

SEQ ID NO: 695988 - RNA, 19 nt, Homo sapiens
  misc_RNA (1)...(19): siRNA sense strand
gaagaagguuuagcagauc

SEQ ID NO: 695989 - RNA, 19 nt, Homo sapiens
  misc_RNA (1)...(19): siRNA sense strand
gaaaggaauuaaucuaucc

SEQ ID NO: 695990 - RNA, 19 nt, Homo sapiens
  misc_RNA (1)...(19): siRNA sense strand
ccaagcacaucaacaacaa

SEQ ID NO: 695991 - RNA, 19 nt, Homo sapiens
  misc_RNA (1)...(19): siRNA sense strand
uaugaacgcuccaugaugu

SEQ ID NO: 695992 - RNA, 19 nt, Homo sapiens
  misc_RNA (1)...(19): siRNA sense strand
uaugaacgcuccaugaugu

SEQ ID NO: 695993 - RNA, 19 nt, Homo sapiens
  misc_RNA (1)...(19): siRNA sense strand
cgacagcagugccugaguu

SEQ ID NO: 695994 - RNA, 19 nt, Homo sapiens
  misc_RNA (1)...(19): siRNA sense strand
agaagaagguuuagcagau

SEQ ID NO: 695995 - RNA, 19 nt, Homo sapiens
  misc_RNA (1)...(19): siRNA sense strand
cgacgaaggucuagaucug

SEQ ID NO: 695996 - RNA, 19 nt, Homo sapiens
  misc_RNA (1)...(19): siRNA sense strand
ccuuagagcuggcauugaa

SEQ ID NO: 695997 - RNA, 19 nt, Homo sapiens
  misc_RNA (1)...(19): siRNA sense strand
gaaaguaguggaggagaaa

SEQ ID NO: 695998 - RNA, 19 nt, Homo sapiens
  misc_RNA (1)...(19): siRNA sense strand
gcucagcccuaaagaaagu

SEQ ID NO: 695999 - RNA, 19 nt, Homo sapiens
  misc_RNA (1)...(19): siRNA sense strand
gcuccaugaugucagcuua

SEQ ID NO: 696000 - RNA, 19 nt, Homo sapiens
  misc_RNA (1)...(19): siRNA sense strand
caacgauggugcuggaguu

SEQ ID NO: 696001 - RNA, 19 nt, Homo sapiens
  misc_RNA (1)...(19): siRNA sense strand
gauacagaacuacgauaua

SEQ ID NO: 696002 - RNA, 19 nt, Homo sapiens
  misc_RNA (1)...(19): siRNA sense strand
agaacacccuuaagaagaa

SEQ ID NO: 696003 - RNA, 19 nt, Homo sapiens
  misc_RNA (1)...(19): siRNA sense strand
uagugaagcugacauugaa

SEQ ID NO: 696004 - RNA, 19 nt, Homo sapiens
  misc_RNA (1)...(19): siRNA sense strand
cugaugaaauucccacuaa

SEQ ID NO: 696005 - RNA, 19 nt, Homo sapiens
  misc_RNA (1)...(19): siRNA sense strand
ugaaagagggcuccagaaa

SEQ ID NO: 696006 - RNA, 19 nt, Homo sapiens
  misc_RNA (1)...(19): siRNA sense strand
ggauaguguuuauggagaa

SEQ ID NO: 696007 - RNA, 19 nt, Homo sapiens
  misc_RNA (1)...(19): siRNA sense strand
guaaagaagaugaugaugu

SEQ ID NO: 696008 - RNA, 19 nt, Homo sapiens
  misc_RNA (1)...(19): siRNA sense strand
uaaugcagcugccaugugu

SEQ ID NO: 696009 - RNA, 19 nt, Homo sapiens
  misc_RNA (1)...(19): siRNA sense strand
agaucaagcuccagggaua

SEQ ID NO: 696010 - RNA, 19 nt, Homo sapiens
  misc_RNA (1)...(19): siRNA sense strand
ugaaacaaauacacccauu

SEQ ID NO: 696011 - RNA, 19 nt, Homo sapiens
  misc_RNA (1)...(19): siRNA sense strand
aaacaaauacacccauuga

SEQ ID NO: 696012 - RNA, 19 nt, Homo sapiens
  misc_RNA (1)...(19): siRNA sense strand
gcagcugaccgaucuauga

SEQ ID NO: 696013 - RNA, 19 nt, Homo sapiens
  misc_RNA (1)...(19): siRNA sense strand
ccagagccaucaaagauca

SEQ ID NO: 696014 - RNA, 19 nt, Homo sapiens
  misc_RNA (1)...(19): siRNA sense strand
ggaugaagaggaagaagaa

SEQ ID NO: 696015 - RNA, 19 nt, Homo sapiens
  misc_RNA (1)...(19): siRNA sense strand
aggaggagcuacuauagaa

SEQ ID NO: 696016 - RNA, 19 nt, Homo sapiens
  misc_RNA (1)...(19): siRNA sense strand
gaagaucuguaucaaaaga

SEQ ID NO: 696017 - RNA, 19 nt, Homo sapiens
  misc_RNA (1)...(19): siRNA sense strand
guaaguaguaugccagaaa

SEQ ID NO: 696018 - RNA, 19 nt, Homo sapiens
  misc_RNA (1)...(19): siRNA sense strand
gaaacaaauacacccauug

SEQ ID NO: 696019 - RNA, 19 nt, Homo sapiens
  misc_RNA (1)...(19): siRNA sense strand
ggucuuucguggucaguaa

SEQ ID NO: 696020 - RNA, 19 nt, Homo sapiens
  misc_RNA (1)...(19): siRNA sense strand
caaugucaguggaguauca

SEQ ID NO: 696021 - RNA, 19 nt, Homo sapiens
  misc_RNA (1)...(19): siRNA sense strand
agagacagcagaaacauuu

SEQ ID NO: 696022 - RNA, 19 nt, Homo sapiens
  misc_RNA (1)...(19): siRNA sense strand
gagccaagcacaucaacaa

SEQ ID NO: 696023 - RNA, 19 nt, Homo sapiens
  misc_RNA (1)...(19): siRNA sense strand
ucaagaacacccuuaagaa

SEQ ID NO: 696024 - RNA, 19 nt, Homo sapiens
  misc_RNA (1)...(19): siRNA sense strand
guagugaagcugacauuga

SEQ ID NO: 696025 - RNA, 19 nt, Homo sapiens
  misc_RNA (1)...(19): siRNA sense strand
gcugaucguucaaugaugu

SEQ ID NO: 696026 - RNA, 19 nt, Homo sapiens
  misc_RNA (1)...(19): siRNA sense strand
gaaauagugcagaagauag

SEQ ID NO: 696027 - RNA, 19 nt, Homo sapiens
  misc_RNA (1)...(19): siRNA sense strand
gcauuuggcccaucugaga

SEQ ID NO: 696028 - RNA, 19 nt, Homo sapiens
  misc_RNA (1)...(19): siRNA sense strand
guuaacaccuguagagucu

SEQ ID NO: 696029 - RNA, 19 nt, Homo sapiens
  misc_RNA (1)...(19): siRNA sense strand
caaagaucauguugguaga

SEQ ID NO: 696030 - RNA, 19 nt, Homo sapiens
  misc_RNA (1)...(19): siRNA sense strand
gcugaauggugaaacaaau

SEQ ID NO: 696031 - RNA, 19 nt, Homo sapiens
  misc_RNA (1)...(19): siRNA sense strand
ugaagucugugcugaaauc

SEQ ID NO: 696032 - RNA, 19 nt, Homo sapiens
  misc_RNA (1)...(19): siRNA sense strand
ggacauggaacgucuuaca

SEQ ID NO: 696033 - RNA, 19 nt, Homo sapiens
  misc_RNA (1)...(19): siRNA sense strand
aaagagacacugccugauu

SEQ ID NO: 696034 - RNA, 19 nt, Homo sapiens
  misc_RNA (1)...(19): siRNA sense strand
cagcaucuacucucaguuu

SEQ ID NO: 696035 - RNA, 19 nt, Homo sapiens
  misc_RNA (1)...(19): siRNA sense strand
gcagaaacauuugauucca

SEQ ID NO: 696036 - RNA, 19 nt, Homo sapiens
  misc_RNA (1)...(19): siRNA sense strand
cagaaacccuugugguauc

SEQ ID NO: 696037 - RNA, 19 nt, Homo sapiens
  misc_RNA (1)...(19): siRNA sense strand
caucacauguuaugaaagg

SEQ ID NO: 696038 - RNA, 19 nt, Homo sapiens
  misc_RNA (1)...(19): siRNA sense strand
gaaggagcuuuagcauuuc

SEQ ID NO: 696039 - RNA, 19 nt, Homo sapiens
  misc_RNA (1)...(19): siRNA sense strand
aagcacagauccaagucua

SEQ ID NO: 696040 - RNA, 19 nt, Homo sapiens
  misc_RNA (1)...(19): siRNA sense strand
uaaugaagcagauuuagug

SEQ ID NO: 696041 - RNA, 19 nt, Homo sapiens
  misc_RNA (1)...(19): siRNA sense strand
gaacuaguaaggguauuga

SEQ ID NO: 696042 - RNA, 19 nt, Homo sapiens
  misc_RNA (1)...(19): siRNA sense strand
cuaaagagauggaacauaa

SEQ ID NO: 696043 - RNA, 19 nt, Homo sapiens
  misc_RNA (1)...(19): siRNA sense strand
agaaggagcuuuagcauuu

SEQ ID NO: 696044 - RNA, 19 nt, Homo sapiens
  misc_RNA (1)...(19): siRNA sense strand
gcuagaaccuccuguagua

SEQ ID NO: 696045 - RNA, 19 nt, Homo sapiens
  misc_RNA (1)...(19): siRNA sense strand
ggaaauuggugaagagaaa

SEQ ID NO: 696046 - RNA, 19 nt, Homo sapiens
  misc_RNA (1)...(19): siRNA sense strand
gagccagaaucuucaauua

SEQ ID NO: 696047 - RNA, 19 nt, Homo sapiens
  misc_RNA (1)...(19): siRNA sense strand
ggauaaggcucaauuacuu

SEQ ID NO: 696048 - RNA, 19 nt, Homo sapiens
  misc_RNA (1)...(19): siRNA sense strand
caacugagguggcuauaga

SEQ ID NO: 696049 - RNA, 19 nt, Homo sapiens
  misc_RNA (1)...(19): siRNA sense strand
ugacaaagauucuggauuc

SEQ ID NO: 696050 - RNA, 19 nt, Homo sapiens
  misc_RNA (1)...(19): siRNA sense strand
cgacagcgcuggaauccua

SEQ ID NO: 696051 - RNA, 19 nt, Homo sapiens
  misc_RNA (1)...(19): siRNA sense strand
gcgcuggaauccuauaaua

SEQ ID NO: 696052 - RNA, 19 nt, Homo sapiens
  misc_RNA (1)...(19): siRNA sense strand
ggucuuagauacagaacua

SEQ ID NO: 696053 - RNA, 19 nt, Homo sapiens
  misc_RNA (1)...(19): siRNA sense strand
gaagauagaggaaguacuu

SEQ ID NO: 696054 - RNA, 19 nt, Homo sapiens
  misc_RNA (1)...(19): siRNA sense strand
gaaguaagcguuccaaauc

SEQ ID NO: 696055 - RNA, 19 nt, Homo sapiens
  misc_RNA (1)...(19): siRNA sense strand
ucauuaagaucucgaagua

SEQ ID NO: 696056 - RNA, 19 nt, Homo sapiens
  misc_RNA (1)...(19): siRNA sense strand
aaacagauccuacugauga

SEQ ID NO: 696057 - RNA, 19 nt, Homo sapiens
  misc_RNA (1)...(19): siRNA sense strand
ggaagaagaucuguaucaa

SEQ ID NO: 696058 - RNA, 19 nt, Homo sapiens
  misc_RNA (1)...(19): siRNA sense strand
ggauacagaagaaccauua

SEQ ID NO: 696059 - RNA, 19 nt, Homo sapiens
  misc_RNA (1)...(19): siRNA sense strand
agaaagagcuucagagucu

SEQ ID NO: 696060 - RNA, 19 nt, Homo sapiens
  misc_RNA (1)...(19): siRNA sense strand
gcucuaugaugucagcuua

SEQ ID NO: 696061 - RNA, 19 nt, Homo sapiens
  misc_RNA (1)...(19): siRNA sense strand
ggagaucucuguucagucu

SEQ ID NO: 696062 - RNA, 19 nt, Homo sapiens
  misc_RNA (1)...(19): siRNA sense strand
caucaucccuuuaaacuca

SEQ ID NO: 696063 - RNA, 19 nt, Homo sapiens
  misc_RNA (1)...(19): siRNA sense strand
agacgaagcuucaguaucu

SEQ ID NO: 696064 - RNA, 19 nt, Homo sapiens
  misc_RNA (1)...(19): siRNA sense strand
gcugaacgcucuaugaugu

SEQ ID NO: 696065 - RNA, 19 nt, Homo sapiens
  misc_RNA (1)...(19): siRNA sense strand
gcucuaugaugucuuauga

SEQ ID NO: 696066 - RNA, 19 nt, Homo sapiens
  misc_RNA (1)...(19): siRNA sense strand
gaagaaauagugcagaaga

SEQ ID NO: 696067 - RNA, 19 nt, Homo sapiens
  misc_RNA (1)...(19): siRNA sense strand
caaaucuucugaacacaaa

SEQ ID NO: 696068 - RNA, 19 nt, Homo sapiens
  misc_RNA (1)...(19): siRNA sense strand
gauauaagccagacuugaa

SEQ ID NO: 696069 - RNA, 19 nt, Homo sapiens
  misc_RNA (1)...(19): siRNA sense strand
gaaacucuaucuucuacug

SEQ ID NO: 696070 - RNA, 19 nt, Homo sapiens
  misc_RNA (1)...(19): siRNA sense strand
gaugaagucugugcugaaa

SEQ ID NO: 696071 - RNA, 19 nt, Homo sapiens
  misc_RNA (1)...(19): siRNA sense strand
gaagucaucugagccaguu

SEQ ID NO: 696072 - RNA, 19 nt, Homo sapiens
  misc_RNA (1)...(19): siRNA sense strand
gcugagcgcucuaugaugu

SEQ ID NO: 696073 - RNA, 19 nt, Homo sapiens
  misc_RNA (1)...(19): siRNA sense strand
aaacagaucgcacagagua

SEQ ID NO: 696074 - RNA, 19 nt, Homo sapiens
  misc_RNA (1)...(19): siRNA sense strand
gaagaagaucuguaucaaa

SEQ ID NO: 696075 - RNA, 19 nt, Homo sapiens
  misc_RNA (1)...(19): siRNA sense strand
caucggagauugcagauuc

SEQ ID NO: 696076 - RNA, 19 nt, Homo sapiens
  misc_RNA (1)...(19): siRNA sense strand
ugaagcagauuuagugaga

SEQ ID NO: 696077 - RNA, 19 nt, Homo sapiens
  misc_RNA (1)...(19): siRNA sense strand
gaaagugaacaugguauaa

SEQ ID NO: 696078 - RNA, 19 nt, Homo sapiens
  misc_RNA (1)...(19): siRNA sense strand
agagcagacucaaguaaua

SEQ ID NO: 696079 - RNA, 19 nt, Homo sapiens
  misc_RNA (1)...(19): siRNA sense strand
gguagaagaaggagcuuua

SEQ ID NO: 696080 - RNA, 19 nt, Homo sapiens
  misc_RNA (1)...(19): siRNA sense strand
ccaggagucuaccaaauga

SEQ ID NO: 696081 - RNA, 19 nt, Homo sapiens
  misc_RNA (1)...(19): siRNA sense strand
gaacgucuuacaagccuua

SEQ ID NO: 696082 - RNA, 19 nt, Homo sapiens
  misc_RNA (1)...(19): siRNA sense strand
ugacuuguaugguaucuga

SEQ ID NO: 696083 - RNA, 19 nt, Homo sapiens
  misc_RNA (1)...(19): siRNA sense strand
caaagauucuggauuccuu

SEQ ID NO: 696084 - RNA, 19 nt, Homo sapiens
  misc_RNA (1)...(19): siRNA sense strand
uguagagucugcaguagua

SEQ ID NO: 696085 - RNA, 19 nt, Homo sapiens
  misc_RNA (1)...(19): siRNA sense strand
gcugaucgaucuaugaugu

SEQ ID NO: 696086 - RNA, 19 nt, Homo sapiens
  misc_RNA (1)...(19): siRNA sense strand
caucaaagaucauguuggu

SEQ ID NO: 696087 - RNA, 19 nt, Homo sapiens
  misc_RNA (1)...(19): siRNA sense strand
caucagagccuccuguuau

SEQ ID NO: 696088 - RNA, 19 nt, Homo sapiens
  misc_RNA (1)...(19): siRNA sense strand
gaagaagguuuagcagauc

SEQ ID NO: 696089 - RNA, 19 nt, Homo sapiens
  misc_RNA (1)...(19): siRNA sense strand
gaaaggaauuaaucuaucc

SEQ ID NO: 696090 - RNA, 19 nt, Homo sapiens
  misc_RNA (1)...(19): siRNA sense strand
ccaagcacaucaacaacaa

SEQ ID NO: 696091 - RNA, 19 nt, Homo sapiens
  misc_RNA (1)...(19): siRNA sense strand
uaugaacgcuccaugaugu

SEQ ID NO: 696092 - RNA, 19 nt, Homo sapiens
  misc_RNA (1)...(19): siRNA sense strand
uaugaacgcuccaugaugu

SEQ ID NO: 696093 - RNA, 19 nt, Homo sapiens
  misc_RNA (1)...(19): siRNA sense strand
cgacagcagugccugaguu

SEQ ID NO: 696094 - RNA, 19 nt, Homo sapiens
  misc_RNA (1)...(19): siRNA sense strand
agaagaagguuuagcagau

SEQ ID NO: 696095 - RNA, 19 nt, Homo sapiens
  misc_RNA (1)...(19): siRNA sense strand
cgacgaaggucuagaucug

SEQ ID NO: 696096 - RNA, 19 nt, Homo sapiens
  misc_RNA (1)...(19): siRNA sense strand
ccuuagagcuggcauugaa

SEQ ID NO: 696097 - RNA, 19 nt, Homo sapiens
  misc_RNA (1)...(19): siRNA sense strand
gaaaguaguggaggagaaa

SEQ ID NO: 696098 - RNA, 19 nt, Homo sapiens
  misc_RNA (1)...(19): siRNA sense strand
gcucagcccuaaagaaagu

SEQ ID NO: 696099 - RNA, 19 nt, Homo sapiens
  misc_RNA (1)...(19): siRNA sense strand
gcuccaugaugucagcuua

SEQ ID NO: 696100 - RNA, 19 nt, Homo sapiens
  misc_RNA (1)...(19): siRNA sense strand
caacgauggugcuggaguu

SEQ ID NO: 696101 - RNA, 19 nt, Homo sapiens
  misc_RNA (1)...(19): siRNA sense strand
gauacagaacuacgauaua

SEQ ID NO: 696102 - RNA, 19 nt, Homo sapiens
  misc_RNA (1)...(19): siRNA sense strand
agaacacccuuaagaagaa

SEQ ID NO: 696103 - RNA, 19 nt, Homo sapiens
  misc_RNA (1)...(19): siRNA sense strand
uagugaagcugacauugaa

SEQ ID NO: 696104 - RNA, 19 nt, Homo sapiens
  misc_RNA (1)...(19): siRNA sense strand
cugaugaaauucccacuaa

SEQ ID NO: 696105 - RNA, 19 nt, Homo sapiens
  misc_RNA (1)...(19): siRNA sense strand
ugaaagagggcuccagaaa

SEQ ID NO: 696106 - RNA, 19 nt, Homo sapiens
  misc_RNA (1)...(19): siRNA sense strand
ggauaguguuuauggagaa

SEQ ID NO: 696107 - RNA, 19 nt, Homo sapiens
  misc_RNA (1)...(19): siRNA sense strand
uaaugcagcugccaugugu

SEQ ID NO: 696108 - RNA, 19 nt, Homo sapiens
  misc_RNA (1)...(19): siRNA sense strand
agaucaagcuccagggaua

SEQ ID NO: 696109 - RNA, 19 nt, Homo sapiens
  misc_RNA (1)...(19): siRNA sense strand
ugaaacaaauacacccauu

SEQ ID NO: 696110 - RNA, 19 nt, Homo sapiens
  misc_RNA (1)...(19): siRNA sense strand
aaacaaauacacccauuga

SEQ ID NO: 696111 - RNA, 19 nt, Homo sapiens
  misc_RNA (1)...(19): siRNA sense strand
gcagcugaccgaucuauga

SEQ ID NO: 696112 - RNA, 19 nt, Homo sapiens
  misc_RNA (1)...(19): siRNA sense strand
ccagagccaucaaagauca

SEQ ID NO: 696113 - RNA, 19 nt, Homo sapiens
  misc_RNA (1)...(19): siRNA sense strand
ggaugaagaggaagaagaa

SEQ ID NO: 696114 - RNA, 19 nt, Homo sapiens
  misc_RNA (1)...(19): siRNA sense strand
aggaggagcuacuauagaa

SEQ ID NO: 696115 - RNA, 19 nt, Homo sapiens
  misc_RNA (1)...(19): siRNA sense strand
gaagaucuguaucaaaaga

SEQ ID NO: 696116 - RNA, 19 nt, Homo sapiens
  misc_RNA (1)...(19): siRNA sense strand
guaaguaguaugccagaaa

SEQ ID NO: 696117 - RNA, 19 nt, Homo sapiens
  misc_RNA (1)...(19): siRNA sense strand
gaaacaaauacacccauug

SEQ ID NO: 696118 - RNA, 19 nt, Homo sapiens
  misc_RNA (1)...(19): siRNA sense strand
ggucuuucguggucaguaa

SEQ ID NO: 696119 - RNA, 19 nt, Homo sapiens
  misc_RNA (1)...(19): siRNA sense strand
caaugucaguggaguauca

SEQ ID NO: 696120 - RNA, 19 nt, Homo sapiens
  misc_RNA (1)...(19): siRNA sense strand
agagacagcagaaacauuu

SEQ ID NO: 696121 - RNA, 19 nt, Homo sapiens
  misc_RNA (1)...(19): siRNA sense strand
gaaauagugcagaagauag

SEQ ID NO: 696122 - RNA, 19 nt, Homo sapiens
  misc_RNA (1)...(19): siRNA sense strand
ucaagaacacccuuaagaa

SEQ ID NO: 696123 - RNA, 19 nt, Homo sapiens
  misc_RNA (1)...(19): siRNA sense strand
guagugaagcugacauuga

SEQ ID NO: 696124 - RNA, 19 nt, Homo sapiens
  misc_RNA (1)...(19): siRNA sense strand
gcugaucguucaaugaugu

SEQ ID NO: 696125 - RNA, 19 nt, Homo sapiens
  misc_RNA (1)...(19): siRNA sense strand
gagccaagcacaucaacaa

SEQ ID NO: 696126 - RNA, 19 nt, Homo sapiens
  misc_RNA (1)...(19): siRNA sense strand
gcauuuggcccaucugaga

SEQ ID NO: 696127 - RNA, 19 nt, Homo sapiens
  misc_RNA (1)...(19): siRNA sense strand
guuaacaccuguagagucu

SEQ ID NO: 696128 - RNA, 19 nt, Homo sapiens
  misc_RNA (1)...(19): siRNA sense strand
caaagaucauguugguaga

SEQ ID NO: 696129 - RNA, 19 nt, Homo sapiens
  misc_RNA (1)...(19): siRNA sense strand
gcugaauggugaaacaaau

SEQ ID NO: 696130 - RNA, 19 nt, Homo sapiens
  misc_RNA (1)...(19): siRNA sense strand
ugaagucugugcugaaauc

SEQ ID NO: 696131 - RNA, 19 nt, Homo sapiens
  misc_RNA (1)...(19): siRNA sense strand
ggacauggaacgucuuaca

SEQ ID NO: 696132 - RNA, 19 nt, Homo sapiens
  misc_RNA (1)...(19): siRNA sense strand
aaagagacacugccugauu

SEQ ID NO: 696133 - RNA, 19 nt, Homo sapiens
  misc_RNA (1)...(19): siRNA sense strand
cagcaucuacucucaguuu

SEQ ID NO: 696134 - RNA, 19 nt, Homo sapiens
  misc_RNA (1)...(19): siRNA sense strand
gcagaaacauuugauucca

SEQ ID NO: 696135 - RNA, 19 nt, Homo sapiens
  misc_RNA (1)...(19): siRNA sense strand
cagaaacccuugugguauc

SEQ ID NO: 696136 - RNA, 19 nt, Homo sapiens
  misc_RNA (1)...(19): siRNA sense strand
gaaccauccaugacaaaga

SEQ ID NO: 696137 - RNA, 19 nt, Homo sapiens
  misc_RNA (1)...(19): siRNA sense strand
gaaggagcuuuagcauuuc

SEQ ID NO: 696138 - RNA, 19 nt, Homo sapiens
  misc_RNA (1)...(19): siRNA sense strand
aagcacagauccaagucua

SEQ ID NO: 696139 - RNA, 19 nt, Homo sapiens
  misc_RNA (1)...(19): siRNA sense strand
uaaugaagcagauuuagug

SEQ ID NO: 696140 - RNA, 19 nt, Homo sapiens
  misc_RNA (1)...(19): siRNA sense strand
gaacuaguaaggguauuga

SEQ ID NO: 696141 - RNA, 19 nt, Homo sapiens
  misc_RNA (1)...(19): siRNA sense strand
caucacauguuaugaaagg

SEQ ID NO: 696142 - RNA, 19 nt, Homo sapiens
  misc_RNA (1)...(19): siRNA sense strand
cuaaagagauggaacauaa

SEQ ID NO: 696143 - RNA, 19 nt, Homo sapiens
  misc_RNA (1)...(19): siRNA sense strand
agaaggagcuuuagcauuu

SEQ ID NO: 696144 - RNA, 19 nt, Homo sapiens
  misc_RNA (1)...(19): siRNA sense strand
gcuagaaccuccuguagua

SEQ ID NO: 696145 - RNA, 19 nt, Homo sapiens
  misc_RNA (1)...(19): siRNA sense strand
ggaaauuggugaagagaaa

SEQ ID NO: 696146 - RNA, 19 nt, Homo sapiens
  misc_RNA (1)...(19): siRNA sense strand
gagccagaaucuucaauua

SEQ ID NO: 696147 - RNA, 19 nt, Homo sapiens
  misc_RNA (1)...(19): siRNA sense strand
ggauaaggcucaauuacuu

SEQ ID NO: 696148 - RNA, 19 nt, Homo sapiens
  misc_RNA (1)...(19): siRNA sense strand
caacugagguggcuauaga

SEQ ID NO: 696149 - RNA, 19 nt, Homo sapiens
  misc_RNA (1)...(19): siRNA sense strand
ugacaaagauucuggauuc

SEQ ID NO: 696150 - RNA, 19 nt, Homo sapiens
  misc_RNA (1)...(19): siRNA sense strand
cgacagcgcuggaauccua

SEQ ID NO: 696151 - RNA, 19 nt, Homo sapiens
  misc_RNA (1)...(19): siRNA sense strand
gcgcuggaauccuauaaua

SEQ ID NO: 696152 - RNA, 19 nt, Homo sapiens
  misc_RNA (1)...(19): siRNA sense strand
ggucuuagauacagaacua

SEQ ID NO: 696153 - RNA, 19 nt, Homo sapiens
  misc_RNA (1)...(19): siRNA sense strand
gaagauagaggaaguacuu

SEQ ID NO: 696154 - RNA, 19 nt, Homo sapiens
  misc_RNA (1)...(19): siRNA sense strand
gaaguaagcguuccaaauc

SEQ ID NO: 696155 - RNA, 19 nt, Homo sapiens
  misc_RNA (1)...(19): siRNA sense strand
ucauuaagaucucgaagua

SEQ ID NO: 696156 - RNA, 19 nt, Homo sapiens
  misc_RNA (1)...(19): siRNA sense strand
aaacagauccuacugauga

SEQ ID NO: 696157 - RNA, 19 nt, Homo sapiens
  misc_RNA (1)...(19): siRNA sense strand
ggaagaagaucuguaucaa

SEQ ID NO: 696158 - RNA, 19 nt, Homo sapiens
  misc_RNA (1)...(19): siRNA sense strand
ggauacagaagaaccauua

SEQ ID NO: 696159 - RNA, 19 nt, Homo sapiens
  misc_RNA (1)...(19): siRNA sense strand
agaaagagcuucagagucu

SEQ ID NO: 696160 - RNA, 19 nt, Homo sapiens
  misc_RNA (1)...(19): siRNA sense strand
gcucuaugaugucagcuua

SEQ ID NO: 696161 - RNA, 19 nt, Homo sapiens
  misc_RNA (1)...(19): siRNA sense strand
ggagaucucuguucagucu

SEQ ID NO: 696162 - RNA, 19 nt, Homo sapiens
  misc_RNA (1)...(19): siRNA sense strand
agacgaagcuucaguaucu

SEQ ID NO: 696163 - RNA, 19 nt, Homo sapiens
  misc_RNA (1)...(19): siRNA sense strand
gcugaacgcucuaugaugu

SEQ ID NO: 696164 - RNA, 19 nt, Homo sapiens
  misc_RNA (1)...(19): siRNA sense strand
gcucuaugaugucuuauga

SEQ ID NO: 696165 - RNA, 19 nt, Homo sapiens
  misc_RNA (1)...(19): siRNA sense strand
gaagaaauagugcagaaga

SEQ ID NO: 696166 - RNA, 19 nt, Homo sapiens
  misc_RNA (1)...(19): siRNA sense strand
caaaucuucugaacacaaa

SEQ ID NO: 696167 - RNA, 19 nt, Homo sapiens
  misc_RNA (1)...(19): siRNA sense strand
gauauaagccagacuugaa

SEQ ID NO: 696168 - RNA, 19 nt, Homo sapiens
  misc_RNA (1)...(19): siRNA sense strand
gaaacucuaucuucuacug

SEQ ID NO: 696169 - RNA, 19 nt, Homo sapiens
  misc_RNA (1)...(19): siRNA sense strand
gaugaagucugugcugaaa

SEQ ID NO: 696170 - RNA, 19 nt, Homo sapiens
  misc_RNA (1)...(19): siRNA sense strand
gaagucaucugagccaguu

SEQ ID NO: 696171 - RNA, 19 nt, Homo sapiens
  misc_RNA (1)...(19): siRNA sense strand
gcugagcgcucuaugaugu

SEQ ID NO: 696172 - RNA, 19 nt, Homo sapiens
  misc_RNA (1)...(19): siRNA sense strand
gaagaagaucuguaucaaa

SEQ ID NO: 696173 - RNA, 19 nt, Homo sapiens
  misc_RNA (1)...(19): siRNA sense strand
caucggagauugcagauuc

SEQ ID NO: 696174 - RNA, 19 nt, Homo sapiens
  misc_RNA (1)...(19): siRNA sense strand
ugaagcagauuuagugaga

SEQ ID NO: 696175 - RNA, 19 nt, Homo sapiens
  misc_RNA (1)...(19): siRNA sense strand
gaaagugaacaugguauaa

SEQ ID NO: 696176 - RNA, 19 nt, Homo sapiens
  misc_RNA (1)...(19): siRNA sense strand
agagcagacucaaguaaua

SEQ ID NO: 696177 - RNA, 19 nt, Homo sapiens
  misc_RNA (1)...(19): siRNA sense strand
gguagaagaaggagcuuua

SEQ ID NO: 696178 - RNA, 19 nt, Homo sapiens
  misc_RNA (1)...(19): siRNA sense strand
ccaggagucuaccaaauga

SEQ ID NO: 696179 - RNA, 19 nt, Homo sapiens
  misc_RNA (1)...(19): siRNA sense strand
gaacgucuuacaagccuua

SEQ ID NO: 696180 - RNA, 19 nt, Homo sapiens
  misc_RNA (1)...(19): siRNA sense strand
ugacuuguaugguaucuga

SEQ ID NO: 696181 - RNA, 19 nt, Homo sapiens
  misc_RNA (1)...(19): siRNA sense strand
caaagauucuggauuccuu

SEQ ID NO: 696182 - RNA, 19 nt, Homo sapiens
  misc_RNA (1)...(19): siRNA sense strand
uguagagucugcaguagua

SEQ ID NO: 696183 - RNA, 19 nt, Homo sapiens
  misc_RNA (1)...(19): siRNA sense strand
gcugaucgaucuaugaugu

SEQ ID NO: 696184 - RNA, 19 nt, Homo sapiens
  misc_RNA (1)...(19): siRNA sense strand
caucaaagaucauguuggu

SEQ ID NO: 696185 - RNA, 19 nt, Homo sapiens
  misc_RNA (1)...(19): siRNA sense strand
caucagagccuccuguuau

SEQ ID NO: 696186 - RNA, 19 nt, Homo sapiens
  misc_RNA (1)...(19): siRNA sense strand
gaagaagguuuagcagauc

SEQ ID NO: 696187 - RNA, 19 nt, Homo sapiens
  misc_RNA (1)...(19): siRNA sense strand
gaaaggaauuaaucuaucc

SEQ ID NO: 696188 - RNA, 19 nt, Homo sapiens
  misc_RNA (1)...(19): siRNA sense strand
ccaagcacaucaacaacaa

SEQ ID NO: 696189 - RNA, 19 nt, Homo sapiens
  misc_RNA (1)...(19): siRNA sense strand
uaugaacgcuccaugaugu

SEQ ID NO: 696190 - RNA, 19 nt, Homo sapiens
  misc_RNA (1)...(19): siRNA sense strand
uaugaacgcuccaugaugu

SEQ ID NO: 696191 - RNA, 19 nt, Homo sapiens
  misc_RNA (1)...(19): siRNA sense strand
cgacagcagugccugaguu

SEQ ID NO: 696192 - RNA, 19 nt, Homo sapiens
  misc_RNA (1)...(19): siRNA sense strand
agaagaagguuuagcagau

SEQ ID NO: 696193 - RNA, 19 nt, Homo sapiens
  misc_RNA (1)...(19): siRNA sense strand
cgacgaaggucuagaucug

SEQ ID NO: 696194 - RNA, 19 nt, Homo sapiens
  misc_RNA (1)...(19): siRNA sense strand
ccuuagagcuggcauugaa

SEQ ID NO: 696195 - RNA, 19 nt, Homo sapiens
  misc_RNA (1)...(19): siRNA sense strand
gaaaguaguggaggagaaa

SEQ ID NO: 696196 - RNA, 19 nt, Homo sapiens
  misc_RNA (1)...(19): siRNA sense strand
gcucagcccuaaagaaagu

SEQ ID NO: 696197 - RNA, 19 nt, Homo sapiens
  misc_RNA (1)...(19): siRNA sense strand
gcuccaugaugucagcuua

SEQ ID NO: 696198 - RNA, 19 nt, Homo sapiens
  misc_RNA (1)...(19): siRNA sense strand
caacgauggugcuggaguu

SEQ ID NO: 696199 - RNA, 19 nt, Homo sapiens
  misc_RNA (1)...(19): siRNA sense strand
gauacagaacuacgauaua

SEQ ID NO: 696200 - RNA, 19 nt, Homo sapiens
  misc_RNA (1)...(19): siRNA sense strand
agaacacccuuaagaagaa

SEQ ID NO: 696201 - RNA, 19 nt, Homo sapiens
  misc_RNA (1)...(19): siRNA sense strand
uagugaagcugacauugaa

SEQ ID NO: 696202 - RNA, 19 nt, Homo sapiens
  misc_RNA (1)...(19): siRNA sense strand
cugaugaaauucccacuaa

SEQ ID NO: 696203 - RNA, 19 nt, Homo sapiens
  misc_RNA (1)...(19): siRNA sense strand
ugaaagagggcuccagaaa

SEQ ID NO: 696204 - RNA, 19 nt, Homo sapiens
  misc_RNA (1)...(19): siRNA sense strand
uaaugcagcugccaugugu

SEQ ID NO: 696205 - RNA, 19 nt, Homo sapiens
  misc_RNA (1)...(19): siRNA sense strand
aaacaaauacacccauuga

SEQ ID NO: 696206 - RNA, 19 nt, Homo sapiens
  misc_RNA (1)...(19): siRNA sense strand
agaucaagcuccagggaua

SEQ ID NO: 696207 - RNA, 19 nt, Homo sapiens
  misc_RNA (1)...(19): siRNA sense strand
ugaaacaaauacacccauu

SEQ ID NO: 696208 - RNA, 19 nt, Homo sapiens
  misc_RNA (1)...(19): siRNA sense strand
gcagcugaccgaucuauga

SEQ ID NO: 696209 - RNA, 19 nt, Homo sapiens
  misc_RNA (1)...(19): siRNA sense strand
ccagagccaucaaagauca

SEQ ID NO: 696210 - RNA, 19 nt, Homo sapiens
  misc_RNA (1)...(19): siRNA sense strand
aggaggagcuacuauagaa

SEQ ID NO: 696211 - RNA, 19 nt, Homo sapiens
  misc_RNA (1)...(19): siRNA sense strand
gaagaucuguaucaaaaga

SEQ ID NO: 696212 - RNA, 19 nt, Homo sapiens
  misc_RNA (1)...(19): siRNA sense strand
guaaguaguaugccagaaa

SEQ ID NO: 696213 - RNA, 19 nt, Homo sapiens
  misc_RNA (1)...(19): siRNA sense strand
ggucuuucguggucaguaa

SEQ ID NO: 696214 - RNA, 19 nt, Homo sapiens
  misc_RNA (1)...(19): siRNA sense strand
gaaacaaauacacccauug

SEQ ID NO: 696215 - RNA, 19 nt, Homo sapiens
  misc_RNA (1)...(19): siRNA sense strand
caaugucaguggaguauca

SEQ ID NO: 696216 - RNA, 19 nt, Homo sapiens
  misc_RNA (1)...(19): siRNA sense strand
agagacagcagaaacauuu

SEQ ID NO: 696217 - RNA, 19 nt, Homo sapiens
  misc_RNA (1)...(19): siRNA sense strand
gagccaagcacaucaacaa

SEQ ID NO: 696218 - RNA, 19 nt, Homo sapiens
  misc_RNA (1)...(19): siRNA sense strand
ucaagaacacccuuaagaa

SEQ ID NO: 696219 - RNA, 19 nt, Homo sapiens
  misc_RNA (1)...(19): siRNA sense strand
gaaauagugcagaagauag

SEQ ID NO: 696220 - RNA, 19 nt, Homo sapiens
  misc_RNA (1)...(19): siRNA sense strand
guagugaagcugacauuga

SEQ ID NO: 696221 - RNA, 19 nt, Homo sapiens
  misc_RNA (1)...(19): siRNA sense strand
gcugaucguucaaugaugu

SEQ ID NO: 696222 - RNA, 19 nt, Homo sapiens
  misc_RNA (1)...(19): siRNA sense strand
gcugaauggugaaacaaau

SEQ ID NO: 696223 - RNA, 19 nt, Homo sapiens
  misc_RNA (1)...(19): siRNA sense strand
guuaacaccuguagagucu

SEQ ID NO: 696224 - RNA, 19 nt, Homo sapiens
  misc_RNA (1)...(19): siRNA sense strand
caaagaucauguugguaga

SEQ ID NO: 696225 - RNA, 19 nt, Homo sapiens
  misc_RNA (1)...(19): siRNA sense strand
gcauuuggcccaucugaga

SEQ ID NO: 696226 - RNA, 19 nt, Homo sapiens
  misc_RNA (1)...(19): siRNA sense strand
ugaagucugugcugaaauc

SEQ ID NO: 696227 - RNA, 19 nt, Homo sapiens
  misc_RNA (1)...(19): siRNA sense strand
ggacauggaacgucuuaca

SEQ ID NO: 696228 - RNA, 19 nt, Homo sapiens
  misc_RNA (1)...(19): siRNA sense strand
aaagagacacugccugauu

SEQ ID NO: 696229 - RNA, 19 nt, Homo sapiens
  misc_RNA (1)...(19): siRNA sense strand
cagcaucuacucucaguuu

SEQ ID NO: 696230 - RNA, 19 nt, Homo sapiens
  misc_RNA (1)...(19): siRNA sense strand
gcagaaacauuugauucca

SEQ ID NO: 696231 - RNA, 19 nt, Homo sapiens
  misc_RNA (1)...(19): siRNA sense strand
cagaaacccuugugguauc

SEQ ID NO: 696232 - RNA, 19 nt, Homo sapiens
  misc_RNA (1)...(19): siRNA sense strand
ccacacaucuuagaaacuc

SEQ ID NO: 696233 - RNA, 19 nt, Homo sapiens
  misc_RNA (1)...(19): siRNA sense strand
gaaggagcuuuagcauuuc

SEQ ID NO: 696234 - RNA, 19 nt, Homo sapiens
  misc_RNA (1)...(19): siRNA sense strand
aagcacagauccaagucua

SEQ ID NO: 696235 - RNA, 19 nt, Homo sapiens
  misc_RNA (1)...(19): siRNA sense strand
uaaugaagcagauuuagug

SEQ ID NO: 696236 - RNA, 19 nt, Homo sapiens
  misc_RNA (1)...(19): siRNA sense strand
gaacuaguaaggguauuga

SEQ ID NO: 696237 - RNA, 19 nt, Homo sapiens
  misc_RNA (1)...(19): siRNA sense strand
caucacauguuaugaaagg

SEQ ID NO: 696238 - RNA, 19 nt, Homo sapiens
  misc_RNA (1)...(19): siRNA sense strand
gaaccauccaugacaaaga

SEQ ID NO: 696239 - RNA, 19 nt, Homo sapiens
  misc_RNA (1)...(19): siRNA sense strand
ccagaaccauccaugacaa

SEQ ID NO: 696240 - RNA, 19 nt, Homo sapiens
  misc_RNA (1)...(19): siRNA sense strand
cuacaucaguaaucucaga

SEQ ID NO: 696241 - RNA, 19 nt, Homo sapiens
  misc_RNA (1)...(19): siRNA sense strand
caagaacacccuuaagaag

SEQ ID NO: 696242 - RNA, 19 nt, Homo sapiens
  misc_RNA (1)...(19): siRNA sense strand
cuaaagagauggaacauaa

SEQ ID NO: 696243 - RNA, 19 nt, Homo sapiens
  misc_RNA (1)...(19): siRNA sense strand
agaaggagcuuuagcauuu

SEQ ID NO: 696244 - RNA, 19 nt, Homo sapiens
  misc_RNA (1)...(19): siRNA sense strand
gcuagaaccuccuguagua

SEQ ID NO: 696245 - RNA, 19 nt, Homo sapiens
  misc_RNA (1)...(19): siRNA sense strand
ggaaauuggugaagagaaa

SEQ ID NO: 696246 - RNA, 19 nt, Homo sapiens
  misc_RNA (1)...(19): siRNA sense strand
gagccagaaucuucaauua

SEQ ID NO: 696247 - RNA, 19 nt, Homo sapiens
  misc_RNA (1)...(19): siRNA sense strand
ggauaaggcucaauuacuu

SEQ ID NO: 696248 - RNA, 19 nt, Homo sapiens
  misc_RNA (1)...(19): siRNA sense strand
caacugagguggcuauaga

SEQ ID NO: 696249 - RNA, 19 nt, Homo sapiens
  misc_RNA (1)...(19): siRNA sense strand
ugacaaagauucuggauuc

SEQ ID NO: 696250 - RNA, 19 nt, Homo sapiens
  misc_RNA (1)...(19): siRNA sense strand
cgacagcgcuggaauccua

SEQ ID NO: 696251 - RNA, 19 nt, Homo sapiens
  misc_RNA (1)...(19): siRNA sense strand
gcgcuggaauccuauaaua

SEQ ID NO: 696252 - RNA, 19 nt, Homo sapiens
  misc_RNA (1)...(19): siRNA sense strand
ggucuuagauacagaacua

SEQ ID NO: 696253 - RNA, 19 nt, Homo sapiens
  misc_RNA (1)...(19): siRNA sense strand
gaagauagaggaaguacuu

SEQ ID NO: 696254 - RNA, 19 nt, Homo sapiens
  misc_RNA (1)...(19): siRNA sense strand
gaaguaagcguuccaaauc

SEQ ID NO: 696255 - RNA, 19 nt, Homo sapiens
  misc_RNA (1)...(19): siRNA sense strand
ucauuaagaucucgaagua

SEQ ID NO: 696256 - RNA, 19 nt, Homo sapiens
  misc_RNA (1)...(19): siRNA sense strand
aaacagauccuacugauga

SEQ ID NO: 696257 - RNA, 19 nt, Homo sapiens
  misc_RNA (1)...(19): siRNA sense strand
ggaagaagaucuguaucaa

SEQ ID NO: 696258 - RNA, 19 nt, Homo sapiens
  misc_RNA (1)...(19): siRNA sense strand
ggauacagaagaaccauua

SEQ ID NO: 696259 - RNA, 19 nt, Homo sapiens
  misc_RNA (1)...(19): siRNA sense strand
agaaagagcuucagagucu

SEQ ID NO: 696260 - RNA, 19 nt, Homo sapiens
  misc_RNA (1)...(19): siRNA sense strand
gcucuaugaugucagcuua

SEQ ID NO: 696261 - RNA, 19 nt, Homo sapiens
  misc_RNA (1)...(19): siRNA sense strand
ggagaucucuguucagucu

SEQ ID NO: 696262 - RNA, 19 nt, Homo sapiens
  misc_RNA (1)...(19): siRNA sense strand
caucaucccuuuaaacuca

SEQ ID NO: 696263 - RNA, 19 nt, Homo sapiens
  misc_RNA (1)...(19): siRNA sense strand
agacgaagcuucaguaucu

SEQ ID NO: 696264 - RNA, 19 nt, Homo sapiens
  misc_RNA (1)...(19): siRNA sense strand
gcugaacgcucuaugaugu

SEQ ID NO: 696265 - RNA, 19 nt, Homo sapiens
  misc_RNA (1)...(19): siRNA sense strand
gcucuaugaugucuuauga

SEQ ID NO: 696266 - RNA, 19 nt, Homo sapiens
  misc_RNA (1)...(19): siRNA sense strand
gaagaaauagugcagaaga

SEQ ID NO: 696267 - RNA, 19 nt, Homo sapiens
  misc_RNA (1)...(19): siRNA sense strand
caaaucuucugaacacaaa

SEQ ID NO: 696268 - RNA, 19 nt, Homo sapiens
  misc_RNA (1)...(19): siRNA sense strand
gauauaagccagacuugaa

SEQ ID NO: 696269 - RNA, 19 nt, Homo sapiens
  misc_RNA (1)...(19): siRNA sense strand
gaaacucuaucuucuacug

SEQ ID NO: 696270 - RNA, 19 nt, Homo sapiens
  misc_RNA (1)...(19): siRNA sense strand
gaugaagucugugcugaaa

SEQ ID NO: 696271 - RNA, 19 nt, Homo sapiens
  misc_RNA (1)...(19): siRNA sense strand
gaagucaucugagccaguu

SEQ ID NO: 696272 - RNA, 19 nt, Homo sapiens
  misc_RNA (1)...(19): siRNA sense strand
gcugagcgcucuaugaugu

SEQ ID NO: 696273 - RNA, 19 nt, Homo sapiens
  misc_RNA (1)...(19): siRNA sense strand
aaacagaucgcacagagua

SEQ ID NO: 696274 - RNA, 19 nt, Homo sapiens
  misc_RNA (1)...(19): siRNA sense strand
gaagaagaucuguaucaaa

SEQ ID NO: 696275 - RNA, 19 nt, Homo sapiens
  misc_RNA (1)...(19): siRNA sense strand
caucggagauugcagauuc

SEQ ID NO: 696276 - RNA, 19 nt, Homo sapiens
  misc_RNA (1)...(19): siRNA sense strand
ugaagcagauuuagugaga

SEQ ID NO: 696277 - RNA, 19 nt, Homo sapiens
  misc_RNA (1)...(19): siRNA sense strand
gaaagugaacaugguauaa

SEQ ID NO: 696278 - RNA, 19 nt, Homo sapiens
  misc_RNA (1)...(19): siRNA sense strand
agagcagacucaaguaaua

SEQ ID NO: 696279 - RNA, 19 nt, Homo sapiens
  misc_RNA (1)...(19): siRNA sense strand
gguagaagaaggagcuuua

SEQ ID NO: 696280 - RNA, 19 nt, Homo sapiens
  misc_RNA (1)...(19): siRNA sense strand
ccaggagucuaccaaauga

SEQ ID NO: 696281 - RNA, 19 nt, Homo sapiens
  misc_RNA (1)...(19): siRNA sense strand
gaacgucuuacaagccuua

SEQ ID NO: 696282 - RNA, 19 nt, Homo sapiens
  misc_RNA (1)...(19): siRNA sense strand
ugacuuguaugguaucuga

SEQ ID NO: 696283 - RNA, 19 nt, Homo sapiens
  misc_RNA (1)...(19): siRNA sense strand
caaagauucuggauuccuu

SEQ ID NO: 696284 - RNA, 19 nt, Homo sapiens
  misc_RNA (1)...(19): siRNA sense strand
uguagagucugcaguagua

SEQ ID NO: 696285 - RNA, 19 nt, Homo sapiens
  misc_RNA (1)...(19): siRNA sense strand
gcugaucgaucuaugaugu

SEQ ID NO: 696286 - RNA, 19 nt, Homo sapiens
  misc_RNA (1)...(19): siRNA sense strand
caucaaagaucauguuggu

SEQ ID NO: 696287 - RNA, 19 nt, Homo sapiens
  misc_RNA (1)...(19): siRNA sense strand
caucagagccuccuguuau

SEQ ID NO: 696288 - RNA, 19 nt, Homo sapiens
  misc_RNA (1)...(19): siRNA sense strand
gaagaagguuuagcagauc

SEQ ID NO: 696289 - RNA, 19 nt, Homo sapiens
  misc_RNA (1)...(19): siRNA sense strand
gaaaggaauuaaucuaucc

SEQ ID NO: 696290 - RNA, 19 nt, Homo sapiens
  misc_RNA (1)...(19): siRNA sense strand
ccaagcacaucaacaacaa

SEQ ID NO: 696291 - RNA, 19 nt, Homo sapiens
  misc_RNA (1)...(19): siRNA sense strand
uaugaacgcuccaugaugu

SEQ ID NO: 696292 - RNA, 19 nt, Homo sapiens
  misc_RNA (1)...(19): siRNA sense strand
uaugaacgcuccaugaugu

SEQ ID NO: 696293 - RNA, 19 nt, Homo sapiens
  misc_RNA (1)...(19): siRNA sense strand
cgacagcagugccugaguu

SEQ ID NO: 696294 - RNA, 19 nt, Homo sapiens
  misc_RNA (1)...(19): siRNA sense strand
agaagaagguuuagcagau

SEQ ID NO: 696295 - RNA, 19 nt, Homo sapiens
  misc_RNA (1)...(19): siRNA sense strand
cgacgaaggucuagaucug

SEQ ID NO: 696296 - RNA, 19 nt, Homo sapiens
  misc_RNA (1)...(19): siRNA sense strand
ccuuagagcuggcauugaa

SEQ ID NO: 696297 - RNA, 19 nt, Homo sapiens
  misc_RNA (1)...(19): siRNA sense strand
gaaaguaguggaggagaaa

SEQ ID NO: 696298 - RNA, 19 nt, Homo sapiens
  misc_RNA (1)...(19): siRNA sense strand
gcucagcccuaaagaaagu

SEQ ID NO: 696299 - RNA, 19 nt, Homo sapiens
  misc_RNA (1)...(19): siRNA sense strand
gcuccaugaugucagcuua

SEQ ID NO: 696300 - RNA, 19 nt, Homo sapiens
  misc_RNA (1)...(19): siRNA sense strand
caacgauggugcuggaguu

SEQ ID NO: 696301 - RNA, 19 nt, Homo sapiens
  misc_RNA (1)...(19): siRNA sense strand
gauacagaacuacgauaua

SEQ ID NO: 696302 - RNA, 19 nt, Homo sapiens
  misc_RNA (1)...(19): siRNA sense strand
agaacacccuuaagaagaa

SEQ ID NO: 696303 - RNA, 19 nt, Homo sapiens
  misc_RNA (1)...(19): siRNA sense strand
uagugaagcugacauugaa

SEQ ID NO: 696304 - RNA, 19 nt, Homo sapiens
  misc_RNA (1)...(19): siRNA sense strand
cugaugaaauucccacuaa

SEQ ID NO: 696305 - RNA, 19 nt, Homo sapiens
  misc_RNA (1)...(19): siRNA sense strand
ugaaagagggcuccagaaa

SEQ ID NO: 696306 - RNA, 19 nt, Homo sapiens
  misc_RNA (1)...(19): siRNA sense strand
ggauaguguuuauggagaa

SEQ ID NO: 696307 - RNA, 19 nt, Homo sapiens
  misc_RNA (1)...(19): siRNA sense strand
uaaugcagcugccaugugu

SEQ ID NO: 696308 - RNA, 19 nt, Homo sapiens
  misc_RNA (1)...(19): siRNA sense strand
agaucaagcuccagggaua

SEQ ID NO: 696309 - RNA, 19 nt, Homo sapiens
  misc_RNA (1)...(19): siRNA sense strand
ugaaacaaauacacccauu

SEQ ID NO: 696310 - RNA, 19 nt, Homo sapiens
  misc_RNA (1)...(19): siRNA sense strand
aaacaaauacacccauuga

SEQ ID NO: 696311 - RNA, 19 nt, Homo sapiens
  misc_RNA (1)...(19): siRNA sense strand
gcagcugaccgaucuauga

SEQ ID NO: 696312 - RNA, 19 nt, Homo sapiens
  misc_RNA (1)...(19): siRNA sense strand
ccagagccaucaaagauca

SEQ ID NO: 696313 - RNA, 19 nt, Homo sapiens
  misc_RNA (1)...(19): siRNA sense strand
ggaugaagaggaagaagaa

SEQ ID NO: 696314 - RNA, 19 nt, Homo sapiens
  misc_RNA (1)...(19): siRNA sense strand
aggaggagcuacuauagaa

SEQ ID NO: 696315 - RNA, 19 nt, Homo sapiens
  misc_RNA (1)...(19): siRNA sense strand
gaagaucuguaucaaaaga

SEQ ID NO: 696316 - RNA, 19 nt, Homo sapiens
  misc_RNA (1)...(19): siRNA sense strand
guaaguaguaugccagaaa

SEQ ID NO: 696317 - RNA, 19 nt, Homo sapiens
  misc_RNA (1)...(19): siRNA sense strand
gaaacaaauacacccauug

SEQ ID NO: 696318 - RNA, 19 nt, Homo sapiens
  misc_RNA (1)...(19): siRNA sense strand
ggucuuucguggucaguaa

SEQ ID NO: 696319 - RNA, 19 nt, Homo sapiens
  misc_RNA (1)...(19): siRNA sense strand
caaugucaguggaguauca

SEQ ID NO: 696320 - RNA, 19 nt, Homo sapiens
  misc_RNA (1)...(19): siRNA sense strand
agagacagcagaaacauuu

SEQ ID NO: 696321 - RNA, 19 nt, Homo sapiens
  misc_RNA (1)...(19): siRNA sense strand
gaaauagugcagaagauag

SEQ ID NO: 696322 - RNA, 19 nt, Homo sapiens
  misc_RNA (1)...(19): siRNA sense strand
ucaagaacacccuuaagaa

SEQ ID NO: 696323 - RNA, 19 nt, Homo sapiens
  misc_RNA (1)...(19): siRNA sense strand
guagugaagcugacauuga

SEQ ID NO: 696324 - RNA, 19 nt, Homo sapiens
  misc_RNA (1)...(19): siRNA sense strand
gcugaucguucaaugaugu

SEQ ID NO: 696325 - RNA, 19 nt, Homo sapiens
  misc_RNA (1)...(19): siRNA sense strand
gagccaagcacaucaacaa

SEQ ID NO: 696326 - RNA, 19 nt, Homo sapiens
  misc_RNA (1)...(19): siRNA sense strand
gcauuuggcccaucugaga

SEQ ID NO: 696327 - RNA, 19 nt, Homo sapiens
  misc_RNA (1)...(19): siRNA sense strand
guuaacaccuguagagucu

SEQ ID NO: 696328 - RNA, 19 nt, Homo sapiens
  misc_RNA (1)...(19): siRNA sense strand
caaagaucauguugguaga

SEQ ID NO: 696329 - RNA, 19 nt, Homo sapiens
  misc_RNA (1)...(19): siRNA sense strand
gcugaauggugaaacaaau

SEQ ID NO: 696330 - RNA, 19 nt, Homo sapiens
  misc_RNA (1)...(19): siRNA sense strand
ugaagucugugcugaaauc

SEQ ID NO: 696331 - RNA, 19 nt, Homo sapiens
  misc_RNA (1)...(19): siRNA sense strand
ggacauggaacgucuuaca

SEQ ID NO: 696332 - RNA, 19 nt, Homo sapiens
  misc_RNA (1)...(19): siRNA sense strand
aaagagacacugccugauu

SEQ ID NO: 696333 - RNA, 19 nt, Homo sapiens
  misc_RNA (1)...(19): siRNA sense strand
cagcaucuacucucaguuu

SEQ ID NO: 696334 - RNA, 19 nt, Homo sapiens
  misc_RNA (1)...(19): siRNA sense strand
gcagaaacauuugauucca

SEQ ID NO: 696335 - RNA, 19 nt, Homo sapiens
  misc_RNA (1)...(19): siRNA sense strand
cagaaacccuugugguauc

SEQ ID NO: 696336 - RNA, 19 nt, Homo sapiens
  misc_RNA (1)...(19): siRNA sense strand
gaaccauccaugacaaaga

SEQ ID NO: 696337 - RNA, 19 nt, Homo sapiens
  misc_RNA (1)...(19): siRNA sense strand
gaaggagcuuuagcauuuc

SEQ ID NO: 696338 - RNA, 19 nt, Homo sapiens
  misc_RNA (1)...(19): siRNA sense strand
aagcacagauccaagucua

SEQ ID NO: 696339 - RNA, 19 nt, Homo sapiens
  misc_RNA (1)...(19): siRNA sense strand
uaaugaagcagauuuagug

SEQ ID NO: 696340 - RNA, 19 nt, Homo sapiens
  misc_RNA (1)...(19): siRNA sense strand
gaacuaguaaggguauuga

SEQ ID NO: 696341 - RNA, 19 nt, Homo sapiens
  misc_RNA (1)...(19): siRNA sense strand
caucacauguuaugaaagg

SEQ ID NO: 696342 - RNA, 19 nt, Homo sapiens
  misc_RNA (1)...(19): siRNA sense strand
cuaaagagauggaacauaa

SEQ ID NO: 696343 - RNA, 19 nt, Homo sapiens
  misc_RNA (1)...(19): siRNA sense strand
agaaggagcuuuagcauuu

SEQ ID NO: 696344 - RNA, 19 nt, Homo sapiens
  misc_RNA (1)...(19): siRNA sense strand
gcuagaaccuccuguagua

SEQ ID NO: 696345 - RNA, 19 nt, Homo sapiens
  misc_RNA (1)...(19): siRNA sense strand
ggaaauuggugaagagaaa

SEQ ID NO: 696346 - RNA, 19 nt, Homo sapiens
  misc_RNA (1)...(19): siRNA sense strand
gagccagaaucuucaauua

SEQ ID NO: 696347 - RNA, 19 nt, Homo sapiens
  misc_RNA (1)...(19): siRNA sense strand
ggauaaggcucaauuacuu

SEQ ID NO: 696348 - RNA, 19 nt, Homo sapiens
  misc_RNA (1)...(19): siRNA sense strand
caacugagguggcuauaga

SEQ ID NO: 696349 - RNA, 19 nt, Homo sapiens
  misc_RNA (1)...(19): siRNA sense strand
ugacaaagauucuggauuc

SEQ ID NO: 696350 - RNA, 19 nt, Homo sapiens
  misc_RNA (1)...(19): siRNA sense strand
cgacagcgcuggaauccua

SEQ ID NO: 696351 - RNA, 19 nt, Homo sapiens
  misc_RNA (1)...(19): siRNA sense strand
gcgcuggaauccuauaaua

SEQ ID NO: 696352 - RNA, 19 nt, Homo sapiens
  misc_RNA (1)...(19): siRNA sense strand
ggucuuagauacagaacua

SEQ ID NO: 696353 - RNA, 19 nt, Homo sapiens
  misc_RNA (1)...(19): siRNA sense strand
gaagauagaggaaguacuu

SEQ ID NO: 696354 - RNA, 19 nt, Homo sapiens
  misc_RNA (1)...(19): siRNA sense strand
gaaguaagcguuccaaauc

SEQ ID NO: 696355 - RNA, 19 nt, Homo sapiens
  misc_RNA (1)...(19): siRNA sense strand
ucauuaagaucucgaagua

SEQ ID NO: 696356 - RNA, 19 nt, Homo sapiens
  misc_RNA (1)...(19): siRNA sense strand
aaacagauccuacugauga

SEQ ID NO: 696357 - RNA, 19 nt, Homo sapiens
  misc_RNA (1)...(19): siRNA sense strand
ggaagaagaucuguaucaa

SEQ ID NO: 696358 - RNA, 19 nt, Homo sapiens
  misc_RNA (1)...(19): siRNA sense strand
ggauacagaagaaccauua

SEQ ID NO: 696359 - RNA, 19 nt, Homo sapiens
  misc_RNA (1)...(19): siRNA sense strand
agaaagagcuucagagucu

SEQ ID NO: 696360 - RNA, 19 nt, Homo sapiens
  misc_RNA (1)...(19): siRNA sense strand
gcucuaugaugucagcuua

SEQ ID NO: 696361 - RNA, 19 nt, Homo sapiens
  misc_RNA (1)...(19): siRNA sense strand
ggagaucucuguucagucu

SEQ ID NO: 696362 - RNA, 19 nt, Homo sapiens
  misc_RNA (1)...(19): siRNA sense strand
caucaucccuuuaaacuca

SEQ ID NO: 696363 - RNA, 19 nt, Homo sapiens
  misc_RNA (1)...(19): siRNA sense strand
agacgaagcuucaguaucu

SEQ ID NO: 696364 - RNA, 19 nt, Homo sapiens
  misc_RNA (1)...(19): siRNA sense strand
gcugaacgcucuaugaugu

SEQ ID NO: 696365 - RNA, 19 nt, Homo sapiens
  misc_RNA (1)...(19): siRNA sense strand
gcucuaugaugucuuauga

SEQ ID NO: 696366 - RNA, 19 nt, Homo sapiens
  misc_RNA (1)...(19): siRNA sense strand
gaagaaauagugcagaaga

SEQ ID NO: 696367 - RNA, 19 nt, Homo sapiens
  misc_RNA (1)...(19): siRNA sense strand
caaaucuucugaacacaaa

SEQ ID NO: 696368 - RNA, 19 nt, Homo sapiens
  misc_RNA (1)...(19): siRNA sense strand
gauauaagccagacuugaa

SEQ ID NO: 696369 - RNA, 19 nt, Homo sapiens
  misc_RNA (1)...(19): siRNA sense strand
gaaacucuaucuucuacug

SEQ ID NO: 696370 - RNA, 19 nt, Homo sapiens
  misc_RNA (1)...(19): siRNA sense strand
gaugaagucugugcugaaa

SEQ ID NO: 696371 - RNA, 19 nt, Homo sapiens
  misc_RNA (1)...(19): siRNA sense strand
gaagucaucugagccaguu

SEQ ID NO: 696372 - RNA, 19 nt, Homo sapiens
  misc_RNA (1)...(19): siRNA sense strand
gcugagcgcucuaugaugu

SEQ ID NO: 696373 - RNA, 19 nt, Homo sapiens
  misc_RNA (1)...(19): siRNA sense strand
aaacagaucgcacagagua

SEQ ID NO: 696374 - RNA, 19 nt, Homo sapiens
  misc_RNA (1)...(19): siRNA sense strand
gaagaagaucuguaucaaa

SEQ ID NO: 696375 - RNA, 19 nt, Homo sapiens
  misc_RNA (1)...(19): siRNA sense strand
caucggagauugcagauuc

SEQ ID NO: 696376 - RNA, 19 nt, Homo sapiens
  misc_RNA (1)...(19): siRNA sense strand
ugaagcagauuuagugaga

SEQ ID NO: 696377 - RNA, 19 nt, Homo sapiens
  misc_RNA (1)...(19): siRNA sense strand
gaaagugaacaugguauaa

SEQ ID NO: 696378 - RNA, 19 nt, Homo sapiens
  misc_RNA (1)...(19): siRNA sense strand
agagcagacucaaguaaua

SEQ ID NO: 696379 - RNA, 19 nt, Homo sapiens
  misc_RNA (1)...(19): siRNA sense strand
gguagaagaaggagcuuua

SEQ ID NO: 696380 - RNA, 19 nt, Homo sapiens
  misc_RNA (1)...(19): siRNA sense strand
ccaggagucuaccaaauga

SEQ ID NO: 696381 - RNA, 19 nt, Homo sapiens
  misc_RNA (1)...(19): siRNA sense strand
gaacgucuuacaagccuua

SEQ ID NO: 696382 - RNA, 19 nt, Homo sapiens
  misc_RNA (1)...(19): siRNA sense strand
ugacuuguaugguaucuga

SEQ ID NO: 696383 - RNA, 19 nt, Homo sapiens
  misc_RNA (1)...(19): siRNA sense strand
caaagauucuggauuccuu

SEQ ID NO: 696384 - RNA, 19 nt, Homo sapiens
  misc_RNA (1)...(19): siRNA sense strand
uguagagucugcaguagua

SEQ ID NO: 696385 - RNA, 19 nt, Homo sapiens
  misc_RNA (1)...(19): siRNA sense strand
gcugaucgaucuaugaugu

SEQ ID NO: 696386 - RNA, 19 nt, Homo sapiens
  misc_RNA (1)...(19): siRNA sense strand
caucaaagaucauguuggu

SEQ ID NO: 696387 - RNA, 19 nt, Homo sapiens
  misc_RNA (1)...(19): siRNA sense strand
caucagagccuccuguuau

SEQ ID NO: 696388 - RNA, 19 nt, Homo sapiens
  misc_RNA (1)...(19): siRNA sense strand
gaagaagguuuagcagauc

SEQ ID NO: 696389 - RNA, 19 nt, Homo sapiens
  misc_RNA (1)...(19): siRNA sense strand
gaaaggaauuaaucuaucc

SEQ ID NO: 696390 - RNA, 19 nt, Homo sapiens
  misc_RNA (1)...(19): siRNA sense strand
ccaagcacaucaacaacaa

SEQ ID NO: 696391 - RNA, 19 nt, Homo sapiens
  misc_RNA (1)...(19): siRNA sense strand
uaugaacgcuccaugaugu

SEQ ID NO: 696392 - RNA, 19 nt, Homo sapiens
  misc_RNA (1)...(19): siRNA sense strand
uaugaacgcuccaugaugu

SEQ ID NO: 696393 - RNA, 19 nt, Homo sapiens
  misc_RNA (1)...(19): siRNA sense strand
cgacagcagugccugaguu

SEQ ID NO: 696394 - RNA, 19 nt, Homo sapiens
  misc_RNA (1)...(19): siRNA sense strand
agaagaagguuuagcagau

SEQ ID NO: 696395 - RNA, 19 nt, Homo sapiens
  misc_RNA (1)...(19): siRNA sense strand
cgacgaaggucuagaucug

SEQ ID NO: 696396 - RNA, 19 nt, Homo sapiens
  misc_RNA (1)...(19): siRNA sense strand
ccuuagagcuggcauugaa

SEQ ID NO: 696397 - RNA, 19 nt, Homo sapiens
  misc_RNA (1)...(19): siRNA sense strand
gaaaguaguggaggagaaa

SEQ ID NO: 696398 - RNA, 19 nt, Homo sapiens
  misc_RNA (1)...(19): siRNA sense strand
gcucagcccuaaagaaagu

SEQ ID NO: 696399 - RNA, 19 nt, Homo sapiens
  misc_RNA (1)...(19): siRNA sense strand
gcuccaugaugucagcuua

SEQ ID NO: 696400 - RNA, 19 nt, Homo sapiens
  misc_RNA (1)...(19): siRNA sense strand
caacgauggugcuggaguu

SEQ ID NO: 696401 - RNA, 19 nt, Homo sapiens
  misc_RNA (1)...(19): siRNA sense strand
gauacagaacuacgauaua

SEQ ID NO: 696402 - RNA, 19 nt, Homo sapiens
  misc_RNA (1)...(19): siRNA sense strand
agaacacccuuaagaagaa

SEQ ID NO: 696403 - RNA, 19 nt, Homo sapiens
  misc_RNA (1)...(19): siRNA sense strand
uagugaagcugacauugaa

SEQ ID NO: 696404 - RNA, 19 nt, Homo sapiens
  misc_RNA (1)...(19): siRNA sense strand
cugaugaaauucccacuaa

SEQ ID NO: 696405 - RNA, 19 nt, Homo sapiens
  misc_RNA (1)...(19): siRNA sense strand
ugaaagagggcuccagaaa

SEQ ID NO: 696406 - RNA, 19 nt, Homo sapiens
  misc_RNA (1)...(19): siRNA sense strand
ggauaguguuuauggagaa

SEQ ID NO: 696407 - RNA, 19 nt, Homo sapiens
  misc_RNA (1)...(19): siRNA sense strand
uaaugcagcugccaugugu

SEQ ID NO: 696408 - RNA, 19 nt, Homo sapiens
  misc_RNA (1)...(19): siRNA sense strand
agaucaagcuccagggaua

SEQ ID NO: 696409 - RNA, 19 nt, Homo sapiens
  misc_RNA (1)...(19): siRNA sense strand
ugaaacaaauacacccauu

SEQ ID NO: 696410 - RNA, 19 nt, Homo sapiens
  misc_RNA (1)...(19): siRNA sense strand
aaacaaauacacccauuga

SEQ ID NO: 696411 - RNA, 19 nt, Homo sapiens
  misc_RNA (1)...(19): siRNA sense strand
gcagcugaccgaucuauga

SEQ ID NO: 696412 - RNA, 19 nt, Homo sapiens
  misc_RNA (1)...(19): siRNA sense strand
ccagagccaucaaagauca

SEQ ID NO: 696413 - RNA, 19 nt, Homo sapiens
  misc_RNA (1)...(19): siRNA sense strand
ggaugaagaggaagaagaa

SEQ ID NO: 696414 - RNA, 19 nt, Homo sapiens
  misc_RNA (1)...(19): siRNA sense strand
aggaggagcuacuauagaa

SEQ ID NO: 696415 - RNA, 19 nt, Homo sapiens
  misc_RNA (1)...(19): siRNA sense strand
gaagaucuguaucaaaaga

SEQ ID NO: 696416 - RNA, 19 nt, Homo sapiens
  misc_RNA (1)...(19): siRNA sense strand
guaaguaguaugccagaaa

SEQ ID NO: 696417 - RNA, 19 nt, Homo sapiens
  misc_RNA (1)...(19): siRNA sense strand
gaaacaaauacacccauug

SEQ ID NO: 696418 - RNA, 19 nt, Homo sapiens
  misc_RNA (1)...(19): siRNA sense strand
ggucuuucguggucaguaa

SEQ ID NO: 696419 - RNA, 19 nt, Homo sapiens
  misc_RNA (1)...(19): siRNA sense strand
caaugucaguggaguauca

SEQ ID NO: 696420 - RNA, 19 nt, Homo sapiens
  misc_RNA (1)...(19): siRNA sense strand
agagacagcagaaacauuu

SEQ ID NO: 696421 - RNA, 19 nt, Homo sapiens
  misc_RNA (1)...(19): siRNA sense strand
gaaauagugcagaagauag

SEQ ID NO: 696422 - RNA, 19 nt, Homo sapiens
  misc_RNA (1)...(19): siRNA sense strand
ucaagaacacccuuaagaa

SEQ ID NO: 696423 - RNA, 19 nt, Homo sapiens
  misc_RNA (1)...(19): siRNA sense strand
guagugaagcugacauuga

SEQ ID NO: 696424 - RNA, 19 nt, Homo sapiens
  misc_RNA (1)...(19): siRNA sense strand
gcugaucguucaaugaugu

SEQ ID NO: 696425 - RNA, 19 nt, Homo sapiens
  misc_RNA (1)...(19): siRNA sense strand
gagccaagcacaucaacaa

SEQ ID NO: 696426 - RNA, 19 nt, Homo sapiens
  misc_RNA (1)...(19): siRNA sense strand
gcauuuggcccaucugaga

SEQ ID NO: 696427 - RNA, 19 nt, Homo sapiens
  misc_RNA (1)...(19): siRNA sense strand
guuaacaccuguagagucu

SEQ ID NO: 696428 - RNA, 19 nt, Homo sapiens
  misc_RNA (1)...(19): siRNA sense strand
caaagaucauguugguaga

SEQ ID NO: 696429 - RNA, 19 nt, Homo sapiens
  misc_RNA (1)...(19): siRNA sense strand
gcugaauggugaaacaaau

SEQ ID NO: 696430 - RNA, 19 nt, Homo sapiens
  misc_RNA (1)...(19): siRNA sense strand
ugaagucugugcugaaauc

SEQ ID NO: 696431 - RNA, 19 nt, Homo sapiens
  misc_RNA (1)...(19): siRNA sense strand
ggacauggaacgucuuaca

SEQ ID NO: 696432 - RNA, 19 nt, Homo sapiens
  misc_RNA (1)...(19): siRNA sense strand
aaagagacacugccugauu

SEQ ID NO: 696433 - RNA, 19 nt, Homo sapiens
  misc_RNA (1)...(19): siRNA sense strand
cagcaucuacucucaguuu

SEQ ID NO: 696434 - RNA, 19 nt, Homo sapiens
  misc_RNA (1)...(19): siRNA sense strand
gcagaaacauuugauucca

SEQ ID NO: 696435 - RNA, 19 nt, Homo sapiens
  misc_RNA (1)...(19): siRNA sense strand
cagaaacccuugugguauc

SEQ ID NO: 696436 - RNA, 19 nt, Homo sapiens
  misc_RNA (1)...(19): siRNA sense strand
gaaccauccaugacaaaga

SEQ ID NO: 696437 - RNA, 19 nt, Homo sapiens
  misc_RNA (1)...(19): siRNA sense strand
gaaggagcuuuagcauuuc

SEQ ID NO: 696438 - RNA, 19 nt, Homo sapiens
  misc_RNA (1)...(19): siRNA sense strand
aagcacagauccaagucua

SEQ ID NO: 696439 - RNA, 19 nt, Homo sapiens
  misc_RNA (1)...(19): siRNA sense strand
uaaugaagcagauuuagug

SEQ ID NO: 696440 - RNA, 19 nt, Homo sapiens
  misc_RNA (1)...(19): siRNA sense strand
gaacuaguaaggguauuga

SEQ ID NO: 696441 - RNA, 19 nt, Homo sapiens
  misc_RNA (1)...(19): siRNA sense strand
caucacauguuaugaaagg

SEQ ID NO: 696442 - RNA, 19 nt, Homo sapiens
  misc_RNA (1)...(19): siRNA sense strand
cuaaagagauggaacauaa

SEQ ID NO: 696443 - RNA, 19 nt, Homo sapiens
  misc_RNA (1)...(19): siRNA sense strand
agaaggagcuuuagcauuu

SEQ ID NO: 696444 - RNA, 19 nt, Homo sapiens
  misc_RNA (1)...(19): siRNA sense strand
gcuagaaccuccuguagua

SEQ ID NO: 696445 - RNA, 19 nt, Homo sapiens
  misc_RNA (1)...(19): siRNA sense strand
ggaaauuggugaagagaaa

SEQ ID NO: 696446 - RNA, 19 nt, Homo sapiens
  misc_RNA (1)...(19): siRNA sense strand
gagccagaaucuucaauua

SEQ ID NO: 696447 - RNA, 19 nt, Homo sapiens
  misc_RNA (1)...(19): siRNA sense strand
ggauaaggcucaauuacuu

SEQ ID NO: 696448 - RNA, 19 nt, Homo sapiens
  misc_RNA (1)...(19): siRNA sense strand
caacugagguggcuauaga

SEQ ID NO: 696449 - RNA, 19 nt, Homo sapiens
  misc_RNA (1)...(19): siRNA sense strand
ugacaaagauucuggauuc

SEQ ID NO: 696450 - RNA, 19 nt, Homo sapiens
  misc_RNA (1)...(19): siRNA sense strand
cgacagcgcuggaauccua

SEQ ID NO: 696451 - RNA, 19 nt, Homo sapiens
  misc_RNA (1)...(19): siRNA sense strand
gcgcuggaauccuauaaua

SEQ ID NO: 696452 - RNA, 19 nt, Homo sapiens
  misc_RNA (1)...(19): siRNA sense strand
ggucuuagauacagaacua

SEQ ID NO: 696453 - RNA, 19 nt, Homo sapiens
  misc_RNA (1)...(19): siRNA sense strand
gaagauagaggaaguacuu

SEQ ID NO: 696454 - RNA, 19 nt, Homo sapiens
  misc_RNA (1)...(19): siRNA sense strand
gaaguaagcguuccaaauc

SEQ ID NO: 696455 - RNA, 19 nt, Homo sapiens
  misc_RNA (1)...(19): siRNA sense strand
ucauuaagaucucgaagua

SEQ ID NO: 696456 - RNA, 19 nt, Homo sapiens
  misc_RNA (1)...(19): siRNA sense strand
aaacagauccuacugauga

SEQ ID NO: 696457 - RNA, 19 nt, Homo sapiens
  misc_RNA (1)...(19): siRNA sense strand
ggaagaagaucuguaucaa

SEQ ID NO: 696458 - RNA, 19 nt, Homo sapiens
  misc_RNA (1)...(19): siRNA sense strand
ggauacagaagaaccauua

SEQ ID NO: 696459 - RNA, 19 nt, Homo sapiens
  misc_RNA (1)...(19): siRNA sense strand
agaaagagcuucagagucu

SEQ ID NO: 696460 - RNA, 19 nt, Homo sapiens
  misc_RNA (1)...(19): siRNA sense strand
gcucuaugaugucagcuua

SEQ ID NO: 696461 - RNA, 19 nt, Homo sapiens
  misc_RNA (1)...(19): siRNA sense strand
ggagaucucuguucagucu

SEQ ID NO: 696462 - RNA, 19 nt, Homo sapiens
  misc_RNA (1)...(19): siRNA sense strand
caucaucccuuuaaacuca

SEQ ID NO: 696463 - RNA, 19 nt, Homo sapiens
  misc_RNA (1)...(19): siRNA sense strand
agacgaagcuucaguaucu

SEQ ID NO: 696464 - RNA, 19 nt, Homo sapiens
  misc_RNA (1)...(19): siRNA sense strand
gcugaacgcucuaugaugu

SEQ ID NO: 696465 - RNA, 19 nt, Homo sapiens
  misc_RNA (1)...(19): siRNA sense strand
gcucuaugaugucuuauga

SEQ ID NO: 696466 - RNA, 19 nt, Homo sapiens
  misc_RNA (1)...(19): siRNA sense strand
gaagaaauagugcagaaga

SEQ ID NO: 696467 - RNA, 19 nt, Homo sapiens
  misc_RNA (1)...(19): siRNA sense strand
caaaucuucugaacacaaa

SEQ ID NO: 696468 - RNA, 19 nt, Homo sapiens
  misc_RNA (1)...(19): siRNA sense strand
gauauaagccagacuugaa

SEQ ID NO: 696469 - RNA, 19 nt, Homo sapiens
  misc_RNA (1)...(19): siRNA sense strand
gaaacucuaucuucuacug

SEQ ID NO: 696470 - RNA, 19 nt, Homo sapiens
  misc_RNA (1)...(19): siRNA sense strand
gaugaagucugugcugaaa

SEQ ID NO: 696471 - RNA, 19 nt, Homo sapiens
  misc_RNA (1)...(19): siRNA sense strand
gaagucaucugagccaguu

SEQ ID NO: 696472 - RNA, 19 nt, Homo sapiens
  misc_RNA (1)...(19): siRNA sense strand
gcugagcgcucuaugaugu

SEQ ID NO: 696473 - RNA, 19 nt, Homo sapiens
  misc_RNA (1)...(19): siRNA sense strand
aaacagaucgcacagagua

SEQ ID NO: 696474 - RNA, 19 nt, Homo sapiens
  misc_RNA (1)...(19): siRNA sense strand
gaagaagaucuguaucaaa

SEQ ID NO: 696475 - RNA, 19 nt, Homo sapiens
  misc_RNA (1)...(19): siRNA sense strand
caucggagauugcagauuc

SEQ ID NO: 696476 - RNA, 19 nt, Homo sapiens
  misc_RNA (1)...(19): siRNA sense strand
ugaagcagauuuagugaga

SEQ ID NO: 696477 - RNA, 19 nt, Homo sapiens
  misc_RNA (1)...(19): siRNA sense strand
gaaagugaacaugguauaa

SEQ ID NO: 696478 - RNA, 19 nt, Homo sapiens
  misc_RNA (1)...(19): siRNA sense strand
agagcagacucaaguaaua

SEQ ID NO: 696479 - RNA, 19 nt, Homo sapiens
  misc_RNA (1)...(19): siRNA sense strand
gguagaagaaggagcuuua

SEQ ID NO: 696480 - RNA, 19 nt, Homo sapiens
  misc_RNA (1)...(19): siRNA sense strand
ccaggagucuaccaaauga

SEQ ID NO: 696481 - RNA, 19 nt, Homo sapiens
  misc_RNA (1)...(19): siRNA sense strand
gaacgucuuacaagccuua

SEQ ID NO: 696482 - RNA, 19 nt, Homo sapiens
  misc_RNA (1)...(19): siRNA sense strand
ugacuuguaugguaucuga

SEQ ID NO: 696483 - RNA, 19 nt, Homo sapiens
  misc_RNA (1)...(19): siRNA sense strand
caaagauucuggauuccuu

SEQ ID NO: 696484 - RNA, 19 nt, Homo sapiens
  misc_RNA (1)...(19): siRNA sense strand
uguagagucugcaguagua

SEQ ID NO: 696485 - RNA, 19 nt, Homo sapiens
  misc_RNA (1)...(19): siRNA sense strand
gcugaucgaucuaugaugu

SEQ ID NO: 696486 - RNA, 19 nt, Homo sapiens
  misc_RNA (1)...(19): siRNA sense strand
caucaaagaucauguuggu

SEQ ID NO: 696487 - RNA, 19 nt, Homo sapiens
  misc_RNA (1)...(19): siRNA sense strand
caucagagccuccuguuau

SEQ ID NO: 696488 - RNA, 19 nt, Homo sapiens
  misc_RNA (1)...(19): siRNA sense strand
gaagaagguuuagcagauc

SEQ ID NO: 696489 - RNA, 19 nt, Homo sapiens
  misc_RNA (1)...(19): siRNA sense strand
gaaaggaauuaaucuaucc

SEQ ID NO: 696490 - RNA, 19 nt, Homo sapiens
  misc_RNA (1)...(19): siRNA sense strand
ccaagcacaucaacaacaa

SEQ ID NO: 696491 - RNA, 19 nt, Homo sapiens
  misc_RNA (1)...(19): siRNA sense strand
uaugaacgcuccaugaugu

SEQ ID NO: 696492 - RNA, 19 nt, Homo sapiens
  misc_RNA (1)...(19): siRNA sense strand
uaugaacgcuccaugaugu

SEQ ID NO: 696493 - RNA, 19 nt, Homo sapiens
  misc_RNA (1)...(19): siRNA sense strand
cgacagcagugccugaguu

SEQ ID NO: 696494 - RNA, 19 nt, Homo sapiens
  misc_RNA (1)...(19): siRNA sense strand
agaagaagguuuagcagau

SEQ ID NO: 696495 - RNA, 19 nt, Homo sapiens
  misc_RNA (1)...(19): siRNA sense strand
cgacgaaggucuagaucug

SEQ ID NO: 696496 - RNA, 19 nt, Homo sapiens
  misc_RNA (1)...(19): siRNA sense strand
ccuuagagcuggcauugaa

SEQ ID NO: 696497 - RNA, 19 nt, Homo sapiens
  misc_RNA (1)...(19): siRNA sense strand
gaaaguaguggaggagaaa

SEQ ID NO: 696498 - RNA, 19 nt, Homo sapiens
  misc_RNA (1)...(19): siRNA sense strand
gcucagcccuaaagaaagu

SEQ ID NO: 696499 - RNA, 19 nt, Homo sapiens
  misc_RNA (1)...(19): siRNA sense strand
gcuccaugaugucagcuua

SEQ ID NO: 696500 - RNA, 19 nt, Homo sapiens
  misc_RNA (1)...(19): siRNA sense strand
caacgauggugcuggaguu

SEQ ID NO: 696501 - RNA, 19 nt, Homo sapiens
  misc_RNA (1)...(19): siRNA sense strand
gauacagaacuacgauaua

SEQ ID NO: 696502 - RNA, 19 nt, Homo sapiens
  misc_RNA (1)...(19): siRNA sense strand
agaacacccuuaagaagaa

SEQ ID NO: 696503 - RNA, 19 nt, Homo sapiens
  misc_RNA (1)...(19): siRNA sense strand
uagugaagcugacauugaa

SEQ ID NO: 696504 - RNA, 19 nt, Homo sapiens
  misc_RNA (1)...(19): siRNA sense strand
cugaugaaauucccacuaa

SEQ ID NO: 696505 - RNA, 19 nt, Homo sapiens
  misc_RNA (1)...(19): siRNA sense strand
ugaaagagggcuccagaaa

SEQ ID NO: 696506 - RNA, 19 nt, Homo sapiens
  misc_RNA (1)...(19): siRNA sense strand
ggauaguguuuauggagaa

SEQ ID NO: 696507 - RNA, 19 nt, Homo sapiens
  misc_RNA (1)...(19): siRNA sense strand
uaaugcagcugccaugugu

SEQ ID NO: 696508 - RNA, 19 nt, Homo sapiens
  misc_RNA (1)...(19): siRNA sense strand
agaucaagcuccagggaua

SEQ ID NO: 696509 - RNA, 19 nt, Homo sapiens
  misc_RNA (1)...(19): siRNA sense strand
ugaaacaaauacacccauu

SEQ ID NO: 696510 - RNA, 19 nt, Homo sapiens
  misc_RNA (1)...(19): siRNA sense strand
aaacaaauacacccauuga

SEQ ID NO: 696511 - RNA, 19 nt, Homo sapiens
  misc_RNA (1)...(19): siRNA sense strand
gcagcugaccgaucuauga

SEQ ID NO: 696512 - RNA, 19 nt, Homo sapiens
  misc_RNA (1)...(19): siRNA sense strand
ccagagccaucaaagauca

SEQ ID NO: 696513 - RNA, 19 nt, Homo sapiens
  misc_RNA (1)...(19): siRNA sense strand
ggaugaagaggaagaagaa

SEQ ID NO: 696514 - RNA, 19 nt, Homo sapiens
  misc_RNA (1)...(19): siRNA sense strand
aggaggagcuacuauagaa

SEQ ID NO: 696515 - RNA, 19 nt, Homo sapiens
  misc_RNA (1)...(19): siRNA sense strand
gaagaucuguaucaaaaga

SEQ ID NO: 696516 - RNA, 19 nt, Homo sapiens
  misc_RNA (1)...(19): siRNA sense strand
guaaguaguaugccagaaa

SEQ ID NO: 696517 - RNA, 19 nt, Homo sapiens
  misc_RNA (1)...(19): siRNA sense strand
gaaacaaauacacccauug

SEQ ID NO: 696518 - RNA, 19 nt, Homo sapiens
  misc_RNA (1)...(19): siRNA sense strand
ggucuuucguggucaguaa

SEQ ID NO: 696519 - RNA, 19 nt, Homo sapiens
  misc_RNA (1)...(19): siRNA sense strand
caaugucaguggaguauca

SEQ ID NO: 696520 - RNA, 19 nt, Homo sapiens
  misc_RNA (1)...(19): siRNA sense strand
agagacagcagaaacauuu

SEQ ID NO: 696521 - RNA, 19 nt, Homo sapiens
  misc_RNA (1)...(19): siRNA sense strand
gaaauagugcagaagauag

SEQ ID NO: 696522 - RNA, 19 nt, Homo sapiens
  misc_RNA (1)...(19): siRNA sense strand
ucaagaacacccuuaagaa

SEQ ID NO: 696523 - RNA, 19 nt, Homo sapiens
  misc_RNA (1)...(19): siRNA sense strand
guagugaagcugacauuga

SEQ ID NO: 696524 - RNA, 19 nt, Homo sapiens
  misc_RNA (1)...(19): siRNA sense strand
gcugaucguucaaugaugu

SEQ ID NO: 696525 - RNA, 19 nt, Homo sapiens
  misc_RNA (1)...(19): siRNA sense strand
gagccaagcacaucaacaa

SEQ ID NO: 696526 - RNA, 19 nt, Homo sapiens
  misc_RNA (1)...(19): siRNA sense strand
gcauuuggcccaucugaga

SEQ ID NO: 696527 - RNA, 19 nt, Homo sapiens
  misc_RNA (1)...(19): siRNA sense strand
guuaacaccuguagagucu

SEQ ID NO: 696528 - RNA, 19 nt, Homo sapiens
  misc_RNA (1)...(19): siRNA sense strand
caaagaucauguugguaga

SEQ ID NO: 696529 - RNA, 19 nt, Homo sapiens
  misc_RNA (1)...(19): siRNA sense strand
gcugaauggugaaacaaau

SEQ ID NO: 696530 - RNA, 19 nt, Homo sapiens
  misc_RNA (1)...(19): siRNA sense strand
ugaagucugugcugaaauc

SEQ ID NO: 696531 - RNA, 19 nt, Homo sapiens
  misc_RNA (1)...(19): siRNA sense strand
ggacauggaacgucuuaca

SEQ ID NO: 696532 - RNA, 19 nt, Homo sapiens
  misc_RNA (1)...(19): siRNA sense strand
aaagagacacugccugauu

SEQ ID NO: 696533 - RNA, 19 nt, Homo sapiens
  misc_RNA (1)...(19): siRNA sense strand
cagcaucuacucucaguuu

SEQ ID NO: 696534 - RNA, 19 nt, Homo sapiens
  misc_RNA (1)...(19): siRNA sense strand
gcagaaacauuugauucca

SEQ ID NO: 696535 - RNA, 19 nt, Homo sapiens
  misc_RNA (1)...(19): siRNA sense strand
cagaaacccuugugguauc

SEQ ID NO: 696536 - RNA, 19 nt, Homo sapiens
  misc_RNA (1)...(19): siRNA sense strand
gaaccauccaugacaaaga

SEQ ID NO: 696537 - RNA, 19 nt, Homo sapiens
  misc_RNA (1)...(19): siRNA sense strand
gaaggagcuuuagcauuuc

SEQ ID NO: 696538 - RNA, 19 nt, Homo sapiens
  misc_RNA (1)...(19): siRNA sense strand
aagcacagauccaagucua

SEQ ID NO: 696539 - RNA, 19 nt, Homo sapiens
  misc_RNA (1)...(19): siRNA sense strand
uaaugaagcagauuuagug

SEQ ID NO: 696540 - RNA, 19 nt, Homo sapiens
  misc_RNA (1)...(19): siRNA sense strand
gaacuaguaaggguauuga

SEQ ID NO: 696541 - RNA, 19 nt, Homo sapiens
  misc_RNA (1)...(19): siRNA sense strand
caucacauguuaugaaagg

SEQ ID NO: 696542 - RNA, 19 nt, Homo sapiens
  misc_RNA (1)...(19): siRNA sense strand
gaaacgacaucgagaagaa

SEQ ID NO: 696543 - RNA, 19 nt, Homo sapiens
  misc_RNA (1)...(19): siRNA sense strand
gcacgaacgucggaaacga

SEQ ID NO: 696544 - RNA, 19 nt, Homo sapiens
  misc_RNA (1)...(19): siRNA sense strand
gagaagaacaggauaaagc

SEQ ID NO: 696545 - RNA, 19 nt, Homo sapiens
  misc_RNA (1)...(19): siRNA sense strand
gagcauuccaggagagaaa

SEQ ID NO: 696546 - RNA, 19 nt, Homo sapiens
  misc_RNA (1)...(19): siRNA sense strand
gcuucgaccucaugaacaa

SEQ ID NO: 696547 - RNA, 19 nt, Homo sapiens
  misc_RNA (1)...(19): siRNA sense strand
ggaaacgacaucgagaaga

SEQ ID NO: 696548 - RNA, 19 nt, Homo sapiens
  misc_RNA (1)...(19): siRNA sense strand
gaaugggaaagacagaaga

SEQ ID NO: 696549 - RNA, 19 nt, Homo sapiens
  misc_RNA (1)...(19): siRNA sense strand
agacagaagagaagggaaa

SEQ ID NO: 696550 - RNA, 19 nt, Homo sapiens
  misc_RNA (1)...(19): siRNA sense strand
gggaaagacagaagagaag

SEQ ID NO: 696551 - RNA, 19 nt, Homo sapiens
  misc_RNA (1)...(19): siRNA sense strand
ggaaugggaaagacagaag

SEQ ID NO: 696552 - RNA, 19 nt, Homo sapiens
  misc_RNA (1)...(19): siRNA sense strand
ggaccgcuuggagcaguua

SEQ ID NO: 696553 - RNA, 19 nt, Homo sapiens
  misc_RNA (1)...(19): siRNA sense strand
cagaagagaagggaaaugg

SEQ ID NO: 696554 - RNA, 19 nt, Homo sapiens
  misc_RNA (1)...(19): siRNA sense strand
aggacggccucaagcauga

SEQ ID NO: 696555 - RNA, 19 nt, Homo sapiens
  misc_RNA (1)...(19): siRNA sense strand
ggaaauggcaagggagcau

SEQ ID NO: 696556 - RNA, 19 nt, Homo sapiens
  misc_RNA (1)...(19): siRNA sense strand
gcuuggagcaguuagaaag

SEQ ID NO: 696557 - RNA, 19 nt, Homo sapiens
  misc_RNA (1)...(19): siRNA sense strand
ugggaaagacagaagagaa

SEQ ID NO: 696558 - RNA, 19 nt, Homo sapiens
  misc_RNA (1)...(19): siRNA sense strand
uggagcaguuagaaaggaa

SEQ ID NO: 696559 - RNA, 19 nt, Homo sapiens
  misc_RNA (1)...(19): siRNA sense strand
caucgagaagaacaggaua

SEQ ID NO: 696560 - RNA, 19 nt, Homo sapiens
  misc_RNA (1)...(19): siRNA sense strand
ucgagaagaacaggauaaa

SEQ ID NO: 696561 - RNA, 19 nt, Homo sapiens
  misc_RNA (1)...(19): siRNA sense strand
gggcuucgaccucaugaac

SEQ ID NO: 696562 - RNA, 19 nt, Homo sapiens
  misc_RNA (1)...(19): siRNA sense strand
gcuucgaccucaugaacaa

SEQ ID NO: 696563 - RNA, 19 nt, Homo sapiens
  misc_RNA (1)...(19): siRNA sense strand
aggacggccucaagcauga

SEQ ID NO: 696564 - RNA, 19 nt, Homo sapiens
  misc_RNA (1)...(19): siRNA sense strand
gggcuucgaccucaugaac

SEQ ID NO: 696565 - RNA, 19 nt, Homo sapiens
  misc_RNA (1)...(19): siRNA sense strand
gaaacgacaucgagaagaa

SEQ ID NO: 696566 - RNA, 19 nt, Homo sapiens
  misc_RNA (1)...(19): siRNA sense strand
gcacgaacgucggaaacga

SEQ ID NO: 696567 - RNA, 19 nt, Homo sapiens
  misc_RNA (1)...(19): siRNA sense strand
gagaagaacaggauaaagc

SEQ ID NO: 696568 - RNA, 19 nt, Homo sapiens
  misc_RNA (1)...(19): siRNA sense strand
gagcauuccaggagagaaa

SEQ ID NO: 696569 - RNA, 19 nt, Homo sapiens
  misc_RNA (1)...(19): siRNA sense strand
gcuucgaccucaugaacaa

SEQ ID NO: 696570 - RNA, 19 nt, Homo sapiens
  misc_RNA (1)...(19): siRNA sense strand
ggaaacgacaucgagaaga

SEQ ID NO: 696571 - RNA, 19 nt, Homo sapiens
  misc_RNA (1)...(19): siRNA sense strand
gaaugggaaagacagaaga

SEQ ID NO: 696572 - RNA, 19 nt, Homo sapiens
  misc_RNA (1)...(19): siRNA sense strand
agacagaagagaagggaaa

SEQ ID NO: 696573 - RNA, 19 nt, Homo sapiens
  misc_RNA (1)...(19): siRNA sense strand
gggaaagacagaagagaag

SEQ ID NO: 696574 - RNA, 19 nt, Homo sapiens
  misc_RNA (1)...(19): siRNA sense strand
ggaaugggaaagacagaag

SEQ ID NO: 696575 - RNA, 19 nt, Homo sapiens
  misc_RNA (1)...(19): siRNA sense strand
ggaccgcuuggagcaguua

SEQ ID NO: 696576 - RNA, 19 nt, Homo sapiens
  misc_RNA (1)...(19): siRNA sense strand
cagaagagaagggaaaugg

SEQ ID NO: 696577 - RNA, 19 nt, Homo sapiens
  misc_RNA (1)...(19): siRNA sense strand
aggacggccucaagcauga

SEQ ID NO: 696578 - RNA, 19 nt, Homo sapiens
  misc_RNA (1)...(19): siRNA sense strand
ggaaauggcaagggagcau

SEQ ID NO: 696579 - RNA, 19 nt, Homo sapiens
  misc_RNA (1)...(19): siRNA sense strand
gcuuggagcaguuagaaag

SEQ ID NO: 696580 - RNA, 19 nt, Homo sapiens
  misc_RNA (1)...(19): siRNA sense strand
ugggaaagacagaagagaa

SEQ ID NO: 696581 - RNA, 19 nt, Homo sapiens
  misc_RNA (1)...(19): siRNA sense strand
uggagcaguuagaaaggaa

SEQ ID NO: 696582 - RNA, 19 nt, Homo sapiens
  misc_RNA (1)...(19): siRNA sense strand
caucgagaagaacaggaua

SEQ ID NO: 696583 - RNA, 19 nt, Homo sapiens
  misc_RNA (1)...(19): siRNA sense strand
ucgagaagaacaggauaaa

SEQ ID NO: 696584 - RNA, 19 nt, Homo sapiens
  misc_RNA (1)...(19): siRNA sense strand
gggcuucgaccucaugaac

SEQ ID NO: 696585 - RNA, 19 nt, Homo sapiens
  misc_RNA (1)...(19): siRNA sense strand
gaaacgacaucgagaagaa

SEQ ID NO: 696586 - RNA, 19 nt, Homo sapiens
  misc_RNA (1)...(19): siRNA sense strand
gcacgaacgucggaaacga

SEQ ID NO: 696587 - RNA, 19 nt, Homo sapiens
  misc_RNA (1)...(19): siRNA sense strand
gagaagaacaggauaaagc

SEQ ID NO: 696588 - RNA, 19 nt, Homo sapiens
  misc_RNA (1)...(19): siRNA sense strand
gagcauuccaggagagaaa

SEQ ID NO: 696589 - RNA, 19 nt, Homo sapiens
  misc_RNA (1)...(19): siRNA sense strand
gcuucgaccucaugaacaa

SEQ ID NO: 696590 - RNA, 19 nt, Homo sapiens
  misc_RNA (1)...(19): siRNA sense strand
ggaaacgacaucgagaaga

SEQ ID NO: 696591 - RNA, 19 nt, Homo sapiens
  misc_RNA (1)...(19): siRNA sense strand
gaaugggaaagacagaaga

SEQ ID NO: 696592 - RNA, 19 nt, Homo sapiens
  misc_RNA (1)...(19): siRNA sense strand
agacagaagagaagggaaa

SEQ ID NO: 696593 - RNA, 19 nt, Homo sapiens
  misc_RNA (1)...(19): siRNA sense strand
gggaaagacagaagagaag

SEQ ID NO: 696594 - RNA, 19 nt, Homo sapiens
  misc_RNA (1)...(19): siRNA sense strand
ggaaugggaaagacagaag

SEQ ID NO: 696595 - RNA, 19 nt, Homo sapiens
  misc_RNA (1)...(19): siRNA sense strand
ggaccgcuuggagcaguua

SEQ ID NO: 696596 - RNA, 19 nt, Homo sapiens
  misc_RNA (1)...(19): siRNA sense strand
cagaagagaagggaaaugg

SEQ ID NO: 696597 - RNA, 19 nt, Homo sapiens
  misc_RNA (1)...(19): siRNA sense strand
aggacggccucaagcauga

SEQ ID NO: 696598 - RNA, 19 nt, Homo sapiens
  misc_RNA (1)...(19): siRNA sense strand
ggaaauggcaagggagcau

SEQ ID NO: 696599 - RNA, 19 nt, Homo sapiens
  misc_RNA (1)...(19): siRNA sense strand
gcuuggagcaguuagaaag

SEQ ID NO: 696600 - RNA, 19 nt, Homo sapiens
  misc_RNA (1)...(19): siRNA sense strand
ugggaaagacagaagagaa

SEQ ID NO: 696601 - RNA, 19 nt, Homo sapiens
  misc_RNA (1)...(19): siRNA sense strand
uggagcaguuagaaaggaa

SEQ ID NO: 696602 - RNA, 19 nt, Homo sapiens
  misc_RNA (1)...(19): siRNA sense strand
caucgagaagaacaggaua

SEQ ID NO: 696603 - RNA, 19 nt, Homo sapiens
  misc_RNA (1)...(19): siRNA sense strand
ucgagaagaacaggauaaa

SEQ ID NO: 696604 - RNA, 19 nt, Homo sapiens
  misc_RNA (1)...(19): siRNA sense strand
gggcuucgaccucaugaac

SEQ ID NO: 696605 - RNA, 19 nt, Homo sapiens
  misc_RNA (1)...(19): siRNA sense strand
gaaacgacaucgagaagaa

SEQ ID NO: 696606 - RNA, 19 nt, Homo sapiens
  misc_RNA (1)...(19): siRNA sense strand
gcacgaacgucggaaacga

SEQ ID NO: 696607 - RNA, 19 nt, Homo sapiens
  misc_RNA (1)...(19): siRNA sense strand
gagaagaacaggauaaagc

SEQ ID NO: 696608 - RNA, 19 nt, Homo sapiens
  misc_RNA (1)...(19): siRNA sense strand
gagcauuccaggagagaaa

SEQ ID NO: 696609 - RNA, 19 nt, Homo sapiens
  misc_RNA (1)...(19): siRNA sense strand
gcuucgaccucaugaacaa

SEQ ID NO: 696610 - RNA, 19 nt, Homo sapiens
  misc_RNA (1)...(19): siRNA sense strand
ggaaacgacaucgagaaga

SEQ ID NO: 696611 - RNA, 19 nt, Homo sapiens
  misc_RNA (1)...(19): siRNA sense strand
gaaugggaaagacagaaga

SEQ ID NO: 696612 - RNA, 19 nt, Homo sapiens
  misc_RNA (1)...(19): siRNA sense strand
agacagaagagaagggaaa

SEQ ID NO: 696613 - RNA, 19 nt, Homo sapiens
  misc_RNA (1)...(19): siRNA sense strand
gggaaagacagaagagaag

SEQ ID NO: 696614 - RNA, 19 nt, Homo sapiens
  misc_RNA (1)...(19): siRNA sense strand
ggaaugggaaagacagaag

SEQ ID NO: 696615 - RNA, 19 nt, Homo sapiens
  misc_RNA (1)...(19): siRNA sense strand
ggaccgcuuggagcaguua

SEQ ID NO: 696616 - RNA, 19 nt, Homo sapiens
  misc_RNA (1)...(19): siRNA sense strand
cagaagagaagggaaaugg

SEQ ID NO: 696617 - RNA, 19 nt, Homo sapiens
  misc_RNA (1)...(19): siRNA sense strand
aggacggccucaagcauga

SEQ ID NO: 696618 - RNA, 19 nt, Homo sapiens
  misc_RNA (1)...(19): siRNA sense strand
ggaaauggcaagggagcau

SEQ ID NO: 696619 - RNA, 19 nt, Homo sapiens
  misc_RNA (1)...(19): siRNA sense strand
gcuuggagcaguuagaaag

SEQ ID NO: 696620 - RNA, 19 nt, Homo sapiens
  misc_RNA (1)...(19): siRNA sense strand
ugggaaagacagaagagaa

SEQ ID NO: 696621 - RNA, 19 nt, Homo sapiens
  misc_RNA (1)...(19): siRNA sense strand
uggagcaguuagaaaggaa

SEQ ID NO: 696622 - RNA, 19 nt, Homo sapiens
  misc_RNA (1)...(19): siRNA sense strand
caucgagaagaacaggaua

SEQ ID NO: 696623 - RNA, 19 nt, Homo sapiens
  misc_RNA (1)...(19): siRNA sense strand
ucgagaagaacaggauaaa

SEQ ID NO: 696624 - RNA, 19 nt, Homo sapiens
  misc_RNA (1)...(19): siRNA sense strand
gggcuucgaccucaugaac

SEQ ID NO: 696625 - RNA, 19 nt, Homo sapiens
  misc_RNA (1)...(19): siRNA sense strand
gcuucgaccucaugaacaa

SEQ ID NO: 696626 - RNA, 19 nt, Homo sapiens
  misc_RNA (1)...(19): siRNA sense strand
aggacggccucaagcauga

SEQ ID NO: 696627 - RNA, 19 nt, Homo sapiens
  misc_RNA (1)...(19): siRNA sense strand
gggcuucgaccucaugaac

SEQ ID NO: 696628 - RNA, 19 nt, Homo sapiens
  misc_RNA (1)...(19): siRNA sense strand
gagcauuccaggagagaaa

SEQ ID NO: 696629 - RNA, 19 nt, Homo sapiens
  misc_RNA (1)...(19): siRNA sense strand
gcuucgaccucaugaacaa

SEQ ID NO: 696630 - RNA, 19 nt, Homo sapiens
  misc_RNA (1)...(19): siRNA sense strand
agacagaagagaagggaaa

SEQ ID NO: 696631 - RNA, 19 nt, Homo sapiens
  misc_RNA (1)...(19): siRNA sense strand
gggaaagacagaagagaag

SEQ ID NO: 696632 - RNA, 19 nt, Homo sapiens
  misc_RNA (1)...(19): siRNA sense strand
ggaccgcuuggagcaguua

SEQ ID NO: 696633 - RNA, 19 nt, Homo sapiens
  misc_RNA (1)...(19): siRNA sense strand
cagaagagaagggaaaugg

SEQ ID NO: 696634 - RNA, 19 nt, Homo sapiens
  misc_RNA (1)...(19): siRNA sense strand
aggacggccucaagcauga

SEQ ID NO: 696635 - RNA, 19 nt, Homo sapiens
  misc_RNA (1)...(19): siRNA sense strand
gcuuggagcaguuagaaag

SEQ ID NO: 696636 - RNA, 19 nt, Homo sapiens
  misc_RNA (1)...(19): siRNA sense strand
ggaaauggcaagggagcau

SEQ ID NO: 696637 - RNA, 19 nt, Homo sapiens
  misc_RNA (1)...(19): siRNA sense strand
uggagcaguuagaaaggaa

SEQ ID NO: 696638 - RNA, 19 nt, Homo sapiens
  misc_RNA (1)...(19): siRNA sense strand
gggcuucgaccucaugaac

SEQ ID NO: 696639 - RNA, 19 nt, Homo sapiens
  misc_RNA (1)...(19): siRNA sense strand
gaaacgacaucgagaagaa

SEQ ID NO: 696640 - RNA, 19 nt, Homo sapiens
  misc_RNA (1)...(19): siRNA sense strand
gcacgaacgucggaaacga

SEQ ID NO: 696641 - RNA, 19 nt, Homo sapiens
  misc_RNA (1)...(19): siRNA sense strand
gagaagaacaggauaaagc

SEQ ID NO: 696642 - RNA, 19 nt, Homo sapiens
  misc_RNA (1)...(19): siRNA sense strand
gagcauuccaggagagaaa

SEQ ID NO: 696643 - RNA, 19 nt, Homo sapiens
  misc_RNA (1)...(19): siRNA sense strand
gcuucgaccucaugaacaa

SEQ ID NO: 696644 - RNA, 19 nt, Homo sapiens
  misc_RNA (1)...(19): siRNA sense strand
ggaaacgacaucgagaaga

SEQ ID NO: 696645 - RNA, 19 nt, Homo sapiens
  misc_RNA (1)...(19): siRNA sense strand
gaaugggaaagacagaaga

SEQ ID NO: 696646 - RNA, 19 nt, Homo sapiens
  misc_RNA (1)...(19): siRNA sense strand
agacagaagagaagggaaa

SEQ ID NO: 696647 - RNA, 19 nt, Homo sapiens
  misc_RNA (1)...(19): siRNA sense strand
gggaaagacagaagagaag

SEQ ID NO: 696648 - RNA, 19 nt, Homo sapiens
  misc_RNA (1)...(19): siRNA sense strand
ggaaugggaaagacagaag

SEQ ID NO: 696649 - RNA, 19 nt, Homo sapiens
  misc_RNA (1)...(19): siRNA sense strand
ggaccgcuuggagcaguua

SEQ ID NO: 696650 - RNA, 19 nt, Homo sapiens
  misc_RNA (1)...(19): siRNA sense strand
cagaagagaagggaaaugg

SEQ ID NO: 696651 - RNA, 19 nt, Homo sapiens
  misc_RNA (1)...(19): siRNA sense strand
aggacggccucaagcauga

SEQ ID NO: 696652 - RNA, 19 nt, Homo sapiens
  misc_RNA (1)...(19): siRNA sense strand
ggaaauggcaagggagcau

SEQ ID NO: 696653 - RNA, 19 nt, Homo sapiens
  misc_RNA (1)...(19): siRNA sense strand
gcuuggagcaguuagaaag

SEQ ID NO: 696654 - RNA, 19 nt, Homo sapiens
  misc_RNA (1)...(19): siRNA sense strand
ugggaaagacagaagagaa

SEQ ID NO: 696655 - RNA, 19 nt, Homo sapiens
  misc_RNA (1)...(19): siRNA sense strand
uggagcaguuagaaaggaa

SEQ ID NO: 696656 - RNA, 19 nt, Homo sapiens
  misc_RNA (1)...(19): siRNA sense strand
caucgagaagaacaggaua

SEQ ID NO: 696657 - RNA, 19 nt, Homo sapiens
  misc_RNA (1)...(19): siRNA sense strand
ucgagaagaacaggauaaa

SEQ ID NO: 696658 - RNA, 19 nt, Homo sapiens
  misc_RNA (1)...(19): siRNA sense strand
gggcuucgaccucaugaac

SEQ ID NO: 696659 - RNA, 19 nt, Homo sapiens
  misc_RNA (1)...(19): siRNA sense strand
gaaacgacaucgagaagaa

SEQ ID NO: 696660 - RNA, 19 nt, Homo sapiens
  misc_RNA (1)...(19): siRNA sense strand
gcacgaacgucggaaacga

SEQ ID NO: 696661 - RNA, 19 nt, Homo sapiens
  misc_RNA (1)...(19): siRNA sense strand
gagaagaacaggauaaagc

SEQ ID NO: 696662 - RNA, 19 nt, Homo sapiens
  misc_RNA (1)...(19): siRNA sense strand
gagcauuccaggagagaaa

SEQ ID NO: 696663 - RNA, 19 nt, Homo sapiens
  misc_RNA (1)...(19): siRNA sense strand
gcuucgaccucaugaacaa

SEQ ID NO: 696664 - RNA, 19 nt, Homo sapiens
  misc_RNA (1)...(19): siRNA sense strand
ggaaacgacaucgagaaga

SEQ ID NO: 696665 - RNA, 19 nt, Homo sapiens
  misc_RNA (1)...(19): siRNA sense strand
gaaugggaaagacagaaga

SEQ ID NO: 696666 - RNA, 19 nt, Homo sapiens
  misc_RNA (1)...(19): siRNA sense strand
agacagaagagaagggaaa

SEQ ID NO: 696667 - RNA, 19 nt, Homo sapiens
  misc_RNA (1)...(19): siRNA sense strand
gggaaagacagaagagaag

SEQ ID NO: 696668 - RNA, 19 nt, Homo sapiens
  misc_RNA (1)...(19): siRNA sense strand
ggaaugggaaagacagaag

SEQ ID NO: 696669 - RNA, 19 nt, Homo sapiens
  misc_RNA (1)...(19): siRNA sense strand
ggaccgcuuggagcaguua

SEQ ID NO: 696670 - RNA, 19 nt, Homo sapiens
  misc_RNA (1)...(19): siRNA sense strand
cagaagagaagggaaaugg

SEQ ID NO: 696671 - RNA, 19 nt, Homo sapiens
  misc_RNA (1)...(19): siRNA sense strand
aggacggccucaagcauga

SEQ ID NO: 696672 - RNA, 19 nt, Homo sapiens
  misc_RNA (1)...(19): siRNA sense strand
ggaaauggcaagggagcau

SEQ ID NO: 696673 - RNA, 19 nt, Homo sapiens
  misc_RNA (1)...(19): siRNA sense strand
gcuuggagcaguuagaaag

SEQ ID NO: 696674 - RNA, 19 nt, Homo sapiens
  misc_RNA (1)...(19): siRNA sense strand
ugggaaagacagaagagaa

SEQ ID NO: 696675 - RNA, 19 nt, Homo sapiens
  misc_RNA (1)...(19): siRNA sense strand
uggagcaguuagaaaggaa

SEQ ID NO: 696676 - RNA, 19 nt, Homo sapiens
  misc_RNA (1)...(19): siRNA sense strand
caucgagaagaacaggaua

SEQ ID NO: 696677 - RNA, 19 nt, Homo sapiens
  misc_RNA (1)...(19): siRNA sense strand
ucgagaagaacaggauaaa

SEQ ID NO: 696678 - RNA, 19 nt, Homo sapiens
  misc_RNA (1)...(19): siRNA sense strand
gggcuucgaccucaugaac

SEQ ID NO: 696679 - RNA, 19 nt, Homo sapiens
  misc_RNA (1)...(19): siRNA sense strand
gaaacgacaucgagaagaa

SEQ ID NO: 696680 - RNA, 19 nt, Homo sapiens
  misc_RNA (1)...(19): siRNA sense strand
gcacgaacgucggaaacga

SEQ ID NO: 696681 - RNA, 19 nt, Homo sapiens
  misc_RNA (1)...(19): siRNA sense strand
gagaagaacaggauaaagc

SEQ ID NO: 696682 - RNA, 19 nt, Homo sapiens
  misc_RNA (1)...(19): siRNA sense strand
gagcauuccaggagagaaa

SEQ ID NO: 696683 - RNA, 19 nt, Homo sapiens
  misc_RNA (1)...(19): siRNA sense strand
gcuucgaccucaugaacaa

SEQ ID NO: 696684 - RNA, 19 nt, Homo sapiens
  misc_RNA (1)...(19): siRNA sense strand
ggaaacgacaucgagaaga

SEQ ID NO: 696685 - RNA, 19 nt, Homo sapiens
  misc_RNA (1)...(19): siRNA sense strand
gaaugggaaagacagaaga

SEQ ID NO: 696686 - RNA, 19 nt, Homo sapiens
  misc_RNA (1)...(19): siRNA sense strand
agacagaagagaagggaaa

SEQ ID NO: 696687 - RNA, 19 nt, Homo sapiens
  misc_RNA (1)...(19): siRNA sense strand
gggaaagacagaagagaag

SEQ ID NO: 696688 - RNA, 19 nt, Homo sapiens
  misc_RNA (1)...(19): siRNA sense strand
ggaaugggaaagacagaag

SEQ ID NO: 696689 - RNA, 19 nt, Homo sapiens
  misc_RNA (1)...(19): siRNA sense strand
ggaccgcuuggagcaguua

SEQ ID NO: 696690 - RNA, 19 nt, Homo sapiens
  misc_RNA (1)...(19): siRNA sense strand
cagaagagaagggaaaugg

SEQ ID NO: 696691 - RNA, 19 nt, Homo sapiens
  misc_RNA (1)...(19): siRNA sense strand
aggacggccucaagcauga

SEQ ID NO: 696692 - RNA, 19 nt, Homo sapiens
  misc_RNA (1)...(19): siRNA sense strand
ggaaauggcaagggagcau

SEQ ID NO: 696693 - RNA, 19 nt, Homo sapiens
  misc_RNA (1)...(19): siRNA sense strand
gcuuggagcaguuagaaag

SEQ ID NO: 696694 - RNA, 19 nt, Homo sapiens
  misc_RNA (1)...(19): siRNA sense strand
ugggaaagacagaagagaa

SEQ ID NO: 696695 - RNA, 19 nt, Homo sapiens
  misc_RNA (1)...(19): siRNA sense strand
uggagcaguuagaaaggaa

SEQ ID NO: 696696 - RNA, 19 nt, Homo sapiens
  misc_RNA (1)...(19): siRNA sense strand
caucgagaagaacaggaua

SEQ ID NO: 696697 - RNA, 19 nt, Homo sapiens
  misc_RNA (1)...(19): siRNA sense strand
ucgagaagaacaggauaaa

SEQ ID NO: 696698 - RNA, 19 nt, Homo sapiens
  misc_RNA (1)...(19): siRNA sense strand
gggcuucgaccucaugaac

SEQ ID NO: 696699 - RNA, 19 nt, Homo sapiens
  misc_RNA (1)...(19): siRNA sense strand
gcuucgaccucaugaacaa

SEQ ID NO: 696700 - RNA, 19 nt, Homo sapiens
  misc_RNA (1)...(19): siRNA sense strand
aggacggccucaagcauga

SEQ ID NO: 696701 - RNA, 19 nt, Homo sapiens
  misc_RNA (1)...(19): siRNA sense strand
gggcuucgaccucaugaac

SEQ ID NO: 696702 - RNA, 19 nt, Homo sapiens
  misc_RNA (1)...(19): siRNA sense strand
gaaacgacaucgagaagaa

SEQ ID NO: 696703 - RNA, 19 nt, Homo sapiens
  misc_RNA (1)...(19): siRNA sense strand
gcacgaacgucggaaacga

SEQ ID NO: 696704 - RNA, 19 nt, Homo sapiens
  misc_RNA (1)...(19): siRNA sense strand
gagaagaacaggauaaagc

SEQ ID NO: 696705 - RNA, 19 nt, Homo sapiens
  misc_RNA (1)...(19): siRNA sense strand
gagcauuccaggagagaaa

SEQ ID NO: 696706 - RNA, 19 nt, Homo sapiens
  misc_RNA (1)...(19): siRNA sense strand
gcuucgaccucaugaacaa

SEQ ID NO: 696707 - RNA, 19 nt, Homo sapiens
  misc_RNA (1)...(19): siRNA sense strand
ggaaacgacaucgagaaga

SEQ ID NO: 696708 - RNA, 19 nt, Homo sapiens
  misc_RNA (1)...(19): siRNA sense strand
gaaugggaaagacagaaga

SEQ ID NO: 696709 - RNA, 19 nt, Homo sapiens
  misc_RNA (1)...(19): siRNA sense strand
agacagaagagaagggaaa

SEQ ID NO: 696710 - RNA, 19 nt, Homo sapiens
  misc_RNA (1)...(19): siRNA sense strand
gggaaagacagaagagaag

SEQ ID NO: 696711 - RNA, 19 nt, Homo sapiens
  misc_RNA (1)...(19): siRNA sense strand
ggaaugggaaagacagaag

SEQ ID NO: 696712 - RNA, 19 nt, Homo sapiens
  misc_RNA (1)...(19): siRNA sense strand
ggaccgcuuggagcaguua

SEQ ID NO: 696713 - RNA, 19 nt, Homo sapiens
  misc_RNA (1)...(19): siRNA sense strand
cagaagagaagggaaaugg

SEQ ID NO: 696714 - RNA, 19 nt, Homo sapiens
  misc_RNA (1)...(19): siRNA sense strand
aggacggccucaagcauga

SEQ ID NO: 696715 - RNA, 19 nt, Homo sapiens
  misc_RNA (1)...(19): siRNA sense strand
ggaaauggcaagggagcau

SEQ ID NO: 696716 - RNA, 19 nt, Homo sapiens
  misc_RNA (1)...(19): siRNA sense strand
gcuuggagcaguuagaaag

SEQ ID NO: 696717 - RNA, 19 nt, Homo sapiens
  misc_RNA (1)...(19): siRNA sense strand
ugggaaagacagaagagaa

SEQ ID NO: 696718 - RNA, 19 nt, Homo sapiens
  misc_RNA (1)...(19): siRNA sense strand
uggagcaguuagaaaggaa

SEQ ID NO: 696719 - RNA, 19 nt, Homo sapiens
  misc_RNA (1)...(19): siRNA sense strand
caucgagaagaacaggaua

SEQ ID NO: 696720 - RNA, 19 nt, Homo sapiens
  misc_RNA (1)...(19): siRNA sense strand
ucgagaagaacaggauaaa

SEQ ID NO: 696721 - RNA, 19 nt, Homo sapiens
  misc_RNA (1)...(19): siRNA sense strand
gggcuucgaccucaugaac

SEQ ID NO: 696722 - RNA, 19 nt, Homo sapiens
  misc_RNA (1)...(19): siRNA sense strand
gaaacgacaucgagaagaa

SEQ ID NO: 696723 - RNA, 19 nt, Homo sapiens
  misc_RNA (1)...(19): siRNA sense strand
gcacgaacgucggaaacga

SEQ ID NO: 696724 - RNA, 19 nt, Homo sapiens
  misc_RNA (1)...(19): siRNA sense strand
gagaagaacaggauaaagc

SEQ ID NO: 696725 - RNA, 19 nt, Homo sapiens
  misc_RNA (1)...(19): siRNA sense strand
gagcauuccaggagagaaa

SEQ ID NO: 696726 - RNA, 19 nt, Homo sapiens
  misc_RNA (1)...(19): siRNA sense strand
gcuucgaccucaugaacaa

SEQ ID NO: 696727 - RNA, 19 nt, Homo sapiens
  misc_RNA (1)...(19): siRNA sense strand
ggaaacgacaucgagaaga

SEQ ID NO: 696728 - RNA, 19 nt, Homo sapiens
  misc_RNA (1)...(19): siRNA sense strand
gaaugggaaagacagaaga

SEQ ID NO: 696729 - RNA, 19 nt, Homo sapiens
  misc_RNA (1)...(19): siRNA sense strand
agacagaagagaagggaaa

SEQ ID NO: 696730 - RNA, 19 nt, Homo sapiens
  misc_RNA (1)...(19): siRNA sense strand
gggaaagacagaagagaag

SEQ ID NO: 696731 - RNA, 19 nt, Homo sapiens
  misc_RNA (1)...(19): siRNA sense strand
ggaaugggaaagacagaag

SEQ ID NO: 696732 - RNA, 19 nt, Homo sapiens
  misc_RNA (1)...(19): siRNA sense strand
ggaccgcuuggagcaguua

SEQ ID NO: 696733 - RNA, 19 nt, Homo sapiens
  misc_RNA (1)...(19): siRNA sense strand
cagaagagaagggaaaugg

SEQ ID NO: 696734 - RNA, 19 nt, Homo sapiens
  misc_RNA (1)...(19): siRNA sense strand
aggacggccucaagcauga

SEQ ID NO: 696735 - RNA, 19 nt, Homo sapiens
  misc_RNA (1)...(19): siRNA sense strand
ggaaauggcaagggagcau

SEQ ID NO: 696736 - RNA, 19 nt, Homo sapiens
  misc_RNA (1)...(19): siRNA sense strand
gcuuggagcaguuagaaag

SEQ ID NO: 696737 - RNA, 19 nt, Homo sapiens
  misc_RNA (1)...(19): siRNA sense strand
ugggaaagacagaagagaa

SEQ ID NO: 696738 - RNA, 19 nt, Homo sapiens
  misc_RNA (1)...(19): siRNA sense strand
uggagcaguuagaaaggaa

SEQ ID NO: 696739 - RNA, 19 nt, Homo sapiens
  misc_RNA (1)...(19): siRNA sense strand
caucgagaagaacaggaua

SEQ ID NO: 696740 - RNA, 19 nt, Homo sapiens
  misc_RNA (1)...(19): siRNA sense strand
ucgagaagaacaggauaaa

SEQ ID NO: 696741 - RNA, 19 nt, Homo sapiens
  misc_RNA (1)...(19): siRNA sense strand
gggcuucgaccucaugaac

SEQ ID NO: 696742 - RNA, 19 nt, Homo sapiens
  misc_RNA (1)...(19): siRNA sense strand
gaaacgacaucgagaagaa

SEQ ID NO: 696743 - RNA, 19 nt, Homo sapiens
  misc_RNA (1)...(19): siRNA sense strand
gcacgaacgucggaaacga

SEQ ID NO: 696744 - RNA, 19 nt, Homo sapiens
  misc_RNA (1)...(19): siRNA sense strand
gagaagaacaggauaaagc

SEQ ID NO: 696745 - RNA, 19 nt, Homo sapiens
  misc_RNA (1)...(19): siRNA sense strand
gagcauuccaggagagaaa

SEQ ID NO: 696746 - RNA, 19 nt, Homo sapiens
  misc_RNA (1)...(19): siRNA sense strand
gcuucgaccucaugaacaa

SEQ ID NO: 696747 - RNA, 19 nt, Homo sapiens
  misc_RNA (1)...(19): siRNA sense strand
ggaaacgacaucgagaaga

SEQ ID NO: 696748 - RNA, 19 nt, Homo sapiens
  misc_RNA (1)...(19): siRNA sense strand
gaaugggaaagacagaaga

SEQ ID NO: 696749 - RNA, 19 nt, Homo sapiens
  misc_RNA (1)...(19): siRNA sense strand
agacagaagagaagggaaa

SEQ ID NO: 696750 - RNA, 19 nt, Homo sapiens
  misc_RNA (1)...(19): siRNA sense strand
gggaaagacagaagagaag

SEQ ID NO: 696751 - RNA, 19 nt, Homo sapiens
  misc_RNA (1)...(19): siRNA sense strand
ggaaugggaaagacagaag

SEQ ID NO: 696752 - RNA, 19 nt, Homo sapiens
  misc_RNA (1)...(19): siRNA sense strand
ggaccgcuuggagcaguua

SEQ ID NO: 696753 - RNA, 19 nt, Homo sapiens
  misc_RNA (1)...(19): siRNA sense strand
cagaagagaagggaaaugg

SEQ ID NO: 696754 - RNA, 19 nt, Homo sapiens
  misc_RNA (1)...(19): siRNA sense strand
aggacggccucaagcauga

SEQ ID NO: 696755 - RNA, 19 nt, Homo sapiens
  misc_RNA (1)...(19): siRNA sense strand
ggaaauggcaagggagcau

SEQ ID NO: 696756 - RNA, 19 nt, Homo sapiens
  misc_RNA (1)...(19): siRNA sense strand
gcuuggagcaguuagaaag

SEQ ID NO: 696757 - RNA, 19 nt, Homo sapiens
  misc_RNA (1)...(19): siRNA sense strand
ugggaaagacagaagagaa

SEQ ID NO: 696758 - RNA, 19 nt, Homo sapiens
  misc_RNA (1)...(19): siRNA sense strand
uggagcaguuagaaaggaa

SEQ ID NO: 696759 - RNA, 19 nt, Homo sapiens
  misc_RNA (1)...(19): siRNA sense strand
caucgagaagaacaggaua

SEQ ID NO: 696760 - RNA, 19 nt, Homo sapiens
  misc_RNA (1)...(19): siRNA sense strand
ucgagaagaacaggauaaa

SEQ ID NO: 696761 - RNA, 19 nt, Homo sapiens
  misc_RNA (1)...(19): siRNA sense strand
gggcuucgaccucaugaac

SEQ ID NO: 696762 - RNA, 19 nt, Homo sapiens
  misc_RNA (1)...(19): siRNA sense strand
gcuucgaccucaugaacaa

SEQ ID NO: 696763 - RNA, 19 nt, Homo sapiens
  misc_RNA (1)...(19): siRNA sense strand
aggacggccucaagcauga

SEQ ID NO: 696764 - RNA, 19 nt, Homo sapiens
  misc_RNA (1)...(19): siRNA sense strand
gggcuucgaccucaugaac

SEQ ID NO: 696765 - RNA, 19 nt, Homo sapiens
  misc_RNA (1)...(19): siRNA sense strand
gagcauuccaggagagaaa

SEQ ID NO: 696766 - RNA, 19 nt, Homo sapiens
  misc_RNA (1)...(19): siRNA sense strand
gcuucgaccucaugaacaa

SEQ ID NO: 696767 - RNA, 19 nt, Homo sapiens
  misc_RNA (1)...(19): siRNA sense strand
agacagaagagaagggaaa

SEQ ID NO: 696768 - RNA, 19 nt, Homo sapiens
  misc_RNA (1)...(19): siRNA sense strand
gggaaagacagaagagaag

SEQ ID NO: 696769 - RNA, 19 nt, Homo sapiens
  misc_RNA (1)...(19): siRNA sense strand
ggaccgcuuggagcaguua

SEQ ID NO: 696770 - RNA, 19 nt, Homo sapiens
  misc_RNA (1)...(19): siRNA sense strand
cagaagagaagggaaaugg

SEQ ID NO: 696771 - RNA, 19 nt, Homo sapiens
  misc_RNA (1)...(19): siRNA sense strand
aggacggccucaagcauga

SEQ ID NO: 696772 - RNA, 19 nt, Homo sapiens
  misc_RNA (1)...(19): siRNA sense strand
gcuuggagcaguuagaaag

SEQ ID NO: 696773 - RNA, 19 nt, Homo sapiens
  misc_RNA (1)...(19): siRNA sense strand
ggaaauggcaagggagcau

SEQ ID NO: 696774 - RNA, 19 nt, Homo sapiens
  misc_RNA (1)...(19): siRNA sense strand
uggagcaguuagaaaggaa

SEQ ID NO: 696775 - RNA, 19 nt, Homo sapiens
  misc_RNA (1)...(19): siRNA sense strand
gggcuucgaccucaugaac

SEQ ID NO: 696776 - RNA, 19 nt, Homo sapiens
  misc_RNA (1)...(19): siRNA sense strand
gaaacgacaucgagaagaa

SEQ ID NO: 696777 - RNA, 19 nt, Homo sapiens
  misc_RNA (1)...(19): siRNA sense strand
gcacgaacgucggaaacga

SEQ ID NO: 696778 - RNA, 19 nt, Homo sapiens
  misc_RNA (1)...(19): siRNA sense strand
gagaagaacaggauaaagc

SEQ ID NO: 696779 - RNA, 19 nt, Homo sapiens
  misc_RNA (1)...(19): siRNA sense strand
gagcauuccaggagagaaa

SEQ ID NO: 696780 - RNA, 19 nt, Homo sapiens
  misc_RNA (1)...(19): siRNA sense strand
gcuucgaccucaugaacaa

SEQ ID NO: 696781 - RNA, 19 nt, Homo sapiens
  misc_RNA (1)...(19): siRNA sense strand
ggaaacgacaucgagaaga

SEQ ID NO: 696782 - RNA, 19 nt, Homo sapiens
  misc_RNA (1)...(19): siRNA sense strand
gaaugggaaagacagaaga

SEQ ID NO: 696783 - RNA, 19 nt, Homo sapiens
  misc_RNA (1)...(19): siRNA sense strand
agacagaagagaagggaaa

SEQ ID NO: 696784 - RNA, 19 nt, Homo sapiens
  misc_RNA (1)...(19): siRNA sense strand
gggaaagacagaagagaag

SEQ ID NO: 696785 - RNA, 19 nt, Homo sapiens
  misc_RNA (1)...(19): siRNA sense strand
ggaaugggaaagacagaag

SEQ ID NO: 696786 - RNA, 19 nt, Homo sapiens
  misc_RNA (1)...(19): siRNA sense strand
ggaccgcuuggagcaguua

SEQ ID NO: 696787 - RNA, 19 nt, Homo sapiens
  misc_RNA (1)...(19): siRNA sense strand
cagaagagaagggaaaugg

SEQ ID NO: 696788 - RNA, 19 nt, Homo sapiens
  misc_RNA (1)...(19): siRNA sense strand
aggacggccucaagcauga

SEQ ID NO: 696789 - RNA, 19 nt, Homo sapiens
  misc_RNA (1)...(19): siRNA sense strand
ggaaauggcaagggagcau

SEQ ID NO: 696790 - RNA, 19 nt, Homo sapiens
  misc_RNA (1)...(19): siRNA sense strand
gcuuggagcaguuagaaag

SEQ ID NO: 696791 - RNA, 19 nt, Homo sapiens
  misc_RNA (1)...(19): siRNA sense strand
ugggaaagacagaagagaa

SEQ ID NO: 696792 - RNA, 19 nt, Homo sapiens
  misc_RNA (1)...(19): siRNA sense strand
uggagcaguuagaaaggaa

SEQ ID NO: 696793 - RNA, 19 nt, Homo sapiens
  misc_RNA (1)...(19): siRNA sense strand
caucgagaagaacaggaua

SEQ ID NO: 696794 - RNA, 19 nt, Homo sapiens
  misc_RNA (1)...(19): siRNA sense strand
ucgagaagaacaggauaaa

SEQ ID NO: 696795 - RNA, 19 nt, Homo sapiens
  misc_RNA (1)...(19): siRNA sense strand
gggcuucgaccucaugaac

SEQ ID NO: 696796 - RNA, 19 nt, Homo sapiens
  misc_RNA (1)...(19): siRNA sense strand
gaaacgacaucgagaagaa

SEQ ID NO: 696797 - RNA, 19 nt, Homo sapiens
  misc_RNA (1)...(19): siRNA sense strand
gcacgaacgucggaaacga

SEQ ID NO: 696798 - RNA, 19 nt, Homo sapiens
  misc_RNA (1)...(19): siRNA sense strand
gagaagaacaggauaaagc

SEQ ID NO: 696799 - RNA, 19 nt, Homo sapiens
  misc_RNA (1)...(19): siRNA sense strand
gagcauuccaggagagaaa

SEQ ID NO: 696800 - RNA, 19 nt, Homo sapiens
  misc_RNA (1)...(19): siRNA sense strand
gcuucgaccucaugaacaa

SEQ ID NO: 696801 - RNA, 19 nt, Homo sapiens
  misc_RNA (1)...(19): siRNA sense strand
ggaaacgacaucgagaaga

SEQ ID NO: 696802 - RNA, 19 nt, Homo sapiens
  misc_RNA (1)...(19): siRNA sense strand
gaaugggaaagacagaaga

SEQ ID NO: 696803 - RNA, 19 nt, Homo sapiens
  misc_RNA (1)...(19): siRNA sense strand
agacagaagagaagggaaa

SEQ ID NO: 696804 - RNA, 19 nt, Homo sapiens
  misc_RNA (1)...(19): siRNA sense strand
gggaaagacagaagagaag

SEQ ID NO: 696805 - RNA, 19 nt, Homo sapiens
  misc_RNA (1)...(19): siRNA sense strand
ggaaugggaaagacagaag

SEQ ID NO: 696806 - RNA, 19 nt, Homo sapiens
  misc_RNA (1)...(19): siRNA sense strand
ggaccgcuuggagcaguua

SEQ ID NO: 696807 - RNA, 19 nt, Homo sapiens
  misc_RNA (1)...(19): siRNA sense strand
cagaagagaagggaaaugg

SEQ ID NO: 696808 - RNA, 19 nt, Homo sapiens
  misc_RNA (1)...(19): siRNA sense strand
aggacggccucaagcauga

SEQ ID NO: 696809 - RNA, 19 nt, Homo sapiens
  misc_RNA (1)...(19): siRNA sense strand
ggaaauggcaagggagcau

SEQ ID NO: 696810 - RNA, 19 nt, Homo sapiens
  misc_RNA (1)...(19): siRNA sense strand
gcuuggagcaguuagaaag

SEQ ID NO: 696811 - RNA, 19 nt, Homo sapiens
  misc_RNA (1)...(19): siRNA sense strand
ugggaaagacagaagagaa

SEQ ID NO: 696812 - RNA, 19 nt, Homo sapiens
  misc_RNA (1)...(19): siRNA sense strand
uggagcaguuagaaaggaa

SEQ ID NO: 696813 - RNA, 19 nt, Homo sapiens
  misc_RNA (1)...(19): siRNA sense strand
caucgagaagaacaggaua

SEQ ID NO: 696814 - RNA, 19 nt, Homo sapiens
  misc_RNA (1)...(19): siRNA sense strand
ucgagaagaacaggauaaa

SEQ ID NO: 696815 - RNA, 19 nt, Homo sapiens
  misc_RNA (1)...(19): siRNA sense strand
gggcuucgaccucaugaac

SEQ ID NO: 696816 - RNA, 19 nt, Homo sapiens
  misc_RNA (1)...(19): siRNA sense strand
ggaaaugcacuuuauaaug

SEQ ID NO: 696817 - RNA, 19 nt, Homo sapiens
  misc_RNA (1)...(19): siRNA sense strand
ccaagucuguggcuucuga

SEQ ID NO: 696818 - RNA, 19 nt, Homo sapiens
  misc_RNA (1)...(19): siRNA sense strand
ggaacacccugcggacuga

SEQ ID NO: 696819 - RNA, 19 nt, Homo sapiens
  misc_RNA (1)...(19): siRNA sense strand
gagauggaaaugcacuuua

SEQ ID NO: 696820 - RNA, 19 nt, Homo sapiens
  misc_RNA (1)...(19): siRNA sense strand
gaagugaacagaucuuguc

SEQ ID NO: 696821 - RNA, 19 nt, Homo sapiens
  misc_RNA (1)...(19): siRNA sense strand
gauggaaaugcacuuuaua

SEQ ID NO: 696822 - RNA, 19 nt, Homo sapiens
  misc_RNA (1)...(19): siRNA sense strand
acgaugaugugcugacuaa

SEQ ID NO: 696823 - RNA, 19 nt, Homo sapiens
  misc_RNA (1)...(19): siRNA sense strand
gcaaaccucgccucuccua

SEQ ID NO: 696824 - RNA, 19 nt, Homo sapiens
  misc_RNA (1)...(19): siRNA sense strand
agauggaaaugcacuuuau

SEQ ID NO: 696825 - RNA, 19 nt, Homo sapiens
  misc_RNA (1)...(19): siRNA sense strand
uaaagacgcgggugagugu

SEQ ID NO: 696826 - RNA, 19 nt, Homo sapiens
  misc_RNA (1)...(19): siRNA sense strand
gaugaugugcugacuaaag

SEQ ID NO: 696827 - RNA, 19 nt, Homo sapiens
  misc_RNA (1)...(19): siRNA sense strand
gguuugaagugaacagauc

SEQ ID NO: 696828 - RNA, 19 nt, Homo sapiens
  misc_RNA (1)...(19): siRNA sense strand
gcauagacucgugguuuga

SEQ ID NO: 696829 - RNA, 19 nt, Homo sapiens
  misc_RNA (1)...(19): siRNA sense strand
augaugugcugacuaaaga

SEQ ID NO: 696830 - RNA, 19 nt, Homo sapiens
  misc_RNA (1)...(19): siRNA sense strand
ugcauagacucgugguuug

SEQ ID NO: 696831 - RNA, 19 nt, Homo sapiens
  misc_RNA (1)...(19): siRNA sense strand
ugguucagcucgcauagug

SEQ ID NO: 696832 - RNA, 19 nt, Homo sapiens
  misc_RNA (1)...(19): siRNA sense strand
cgagauggaaaugcacuuu

SEQ ID NO: 696833 - RNA, 19 nt, Homo sapiens
  misc_RNA (1)...(19): siRNA sense strand
caacgaugaugugcugacu

SEQ ID NO: 696834 - RNA, 19 nt, Homo sapiens
  misc_RNA (1)...(19): siRNA sense strand
gagacgggaugcuguaccu

SEQ ID NO: 696835 - RNA, 19 nt, Homo sapiens
  misc_RNA (1)...(19): siRNA sense strand
cugcauagacucgugguuu

SEQ ID NO: 696836 - RNA, 19 nt, Homo sapiens
  misc_RNA (1)...(19): siRNA sense strand
cacaaaagcugcauagacu

SEQ ID NO: 696837 - RNA, 19 nt, Homo sapiens
  misc_RNA (1)...(19): siRNA sense strand
aaaccucgccucuccuaca

SEQ ID NO: 696838 - RNA, 19 nt, Homo sapiens
  misc_RNA (1)...(19): siRNA sense strand
acucgugguuugaagugaa

SEQ ID NO: 696839 - RNA, 19 nt, Homo sapiens
  misc_RNA (1)...(19): siRNA sense strand
cugacgagauggaaaugca

SEQ ID NO: 696840 - RNA, 19 nt, Homo sapiens
  misc_RNA (1)...(19): siRNA sense strand
aaccucgccucuccuacaa

SEQ ID NO: 696841 - RNA, 19 nt, Homo sapiens
  misc_RNA (1)...(19): siRNA sense strand
caacugaacuugauacuga

SEQ ID NO: 696842 - RNA, 19 nt, Homo sapiens
  misc_RNA (1)...(19): siRNA sense strand
gaggagggcugccuuauuu

SEQ ID NO: 696843 - RNA, 19 nt, Homo sapiens
  misc_RNA (1)...(19): siRNA sense strand
gaaacagcauccaacuuua

SEQ ID NO: 696844 - RNA, 19 nt, Homo sapiens
  misc_RNA (1)...(19): siRNA sense strand
gcacaacacugcucucaga

SEQ ID NO: 696845 - RNA, 19 nt, Homo sapiens
  misc_RNA (1)...(19): siRNA sense strand
ggaaacagcauccaacuuu

SEQ ID NO: 696846 - RNA, 19 nt, Homo sapiens
  misc_RNA (1)...(19): siRNA sense strand
ggacuaagccuguuucuuc

SEQ ID NO: 696847 - RNA, 19 nt, Homo sapiens
  misc_RNA (1)...(19): siRNA sense strand
ggaugaagaugcugacauu

SEQ ID NO: 696848 - RNA, 19 nt, Homo sapiens
  misc_RNA (1)...(19): siRNA sense strand
gcauacagcucugcaguuu

SEQ ID NO: 696849 - RNA, 19 nt, Homo sapiens
  misc_RNA (1)...(19): siRNA sense strand
gaauuucacuucuccuuau

SEQ ID NO: 696850 - RNA, 19 nt, Homo sapiens
  misc_RNA (1)...(19): siRNA sense strand
gauguuagaugcugaagau

SEQ ID NO: 696851 - RNA, 19 nt, Homo sapiens
  misc_RNA (1)...(19): siRNA sense strand
ucagaacacuccacaggua

SEQ ID NO: 696852 - RNA, 19 nt, Homo sapiens
  misc_RNA (1)...(19): siRNA sense strand
gagguaaugcugucaauuu

SEQ ID NO: 696853 - RNA, 19 nt, Homo sapiens
  misc_RNA (1)...(19): siRNA sense strand
gaaauggucucagcugaca

SEQ ID NO: 696854 - RNA, 19 nt, Homo sapiens
  misc_RNA (1)...(19): siRNA sense strand
ggaacagcuuuaagaacua

SEQ ID NO: 696855 - RNA, 19 nt, Homo sapiens
  misc_RNA (1)...(19): siRNA sense strand
gaaaacaucuacaagcaaa

SEQ ID NO: 696856 - RNA, 19 nt, Homo sapiens
  misc_RNA (1)...(19): siRNA sense strand
cuccauggcuuaauucaua

SEQ ID NO: 696857 - RNA, 19 nt, Homo sapiens
  misc_RNA (1)...(19): siRNA sense strand
gcagccagaccauuuauaa

SEQ ID NO: 696858 - RNA, 19 nt, Homo sapiens
  misc_RNA (1)...(19): siRNA sense strand
guacuucuguuucucaguu

SEQ ID NO: 696859 - RNA, 19 nt, Homo sapiens
  misc_RNA (1)...(19): siRNA sense strand
gaacagcuuuaagaacuau

SEQ ID NO: 696860 - RNA, 19 nt, Homo sapiens
  misc_RNA (1)...(19): siRNA sense strand
caacgcagccagaccauuu

SEQ ID NO: 696861 - RNA, 19 nt, Homo sapiens
  misc_RNA (1)...(19): siRNA sense strand
augaagagcuuaaggauau

SEQ ID NO: 696862 - RNA, 19 nt, Homo sapiens
  misc_RNA (1)...(19): siRNA sense strand
ucaagagacuggacgugua

SEQ ID NO: 696863 - RNA, 19 nt, Homo sapiens
  misc_RNA (1)...(19): siRNA sense strand
uaaagaagcagaaguguca

SEQ ID NO: 696864 - RNA, 19 nt, Homo sapiens
  misc_RNA (1)...(19): siRNA sense strand
gaauggagacauagaaaug

SEQ ID NO: 696865 - RNA, 19 nt, Homo sapiens
  misc_RNA (1)...(19): siRNA sense strand
guuagaugcugaagauuug

SEQ ID NO: 696866 - RNA, 19 nt, Homo sapiens
  misc_RNA (1)...(19): siRNA sense strand
guauuguggucacucauuu

SEQ ID NO: 696867 - RNA, 19 nt, Homo sapiens
  misc_RNA (1)...(19): siRNA sense strand
gaagagcuuaaggauauua

SEQ ID NO: 696868 - RNA, 19 nt, Homo sapiens
  misc_RNA (1)...(19): siRNA sense strand
ggacauuguuggacuaagg

SEQ ID NO: 696869 - RNA, 19 nt, Homo sapiens
  misc_RNA (1)...(19): siRNA sense strand
gcggaggaaucaauugcua

SEQ ID NO: 696870 - RNA, 19 nt, Homo sapiens
  misc_RNA (1)...(19): siRNA sense strand
ugacauugaugaaucugaa

SEQ ID NO: 696871 - RNA, 19 nt, Homo sapiens
  misc_RNA (1)...(19): siRNA sense strand
gaacacuccacagguauaa

SEQ ID NO: 696872 - RNA, 19 nt, Homo sapiens
  misc_RNA (1)...(19): siRNA sense strand
ggucuuagccuauggaauc

SEQ ID NO: 696873 - RNA, 19 nt, Homo sapiens
  misc_RNA (1)...(19): siRNA sense strand
gaaggauacugcagaacuc

SEQ ID NO: 696874 - RNA, 19 nt, Homo sapiens
  misc_RNA (1)...(19): siRNA sense strand
gggcauuggagaagaaaua

SEQ ID NO: 696875 - RNA, 19 nt, Homo sapiens
  misc_RNA (1)...(19): siRNA sense strand
gccaguggaugccagaauu

SEQ ID NO: 696876 - RNA, 19 nt, Homo sapiens
  misc_RNA (1)...(19): siRNA sense strand
caagggcauuggagaagaa

SEQ ID NO: 696877 - RNA, 19 nt, Homo sapiens
  misc_RNA (1)...(19): siRNA sense strand
guccuucucugaaugauga

SEQ ID NO: 696878 - RNA, 19 nt, Homo sapiens
  misc_RNA (1)...(19): siRNA sense strand
caguuuaucuggauguuau

SEQ ID NO: 696879 - RNA, 19 nt, Homo sapiens
  misc_RNA (1)...(19): siRNA sense strand
agauuuggcugauauugaa

SEQ ID NO: 696880 - RNA, 19 nt, Homo sapiens
  misc_RNA (1)...(19): siRNA sense strand
gauguuaucagaucacaga

SEQ ID NO: 696881 - RNA, 19 nt, Homo sapiens
  misc_RNA (1)...(19): siRNA sense strand
uuacuacugugacaacauu

SEQ ID NO: 696882 - RNA, 19 nt, Homo sapiens
  misc_RNA (1)...(19): siRNA sense strand
ggauuugguuucagcaugu

SEQ ID NO: 696883 - RNA, 19 nt, Homo sapiens
  misc_RNA (1)...(19): siRNA sense strand
ucagaaggauacugcagaa

SEQ ID NO: 696884 - RNA, 19 nt, Homo sapiens
  misc_RNA (1)...(19): siRNA sense strand
ggaggagggcugccuuauu

SEQ ID NO: 696885 - RNA, 19 nt, Homo sapiens
  misc_RNA (1)...(19): siRNA sense strand
ugaagaugcugacauugau

SEQ ID NO: 696886 - RNA, 19 nt, Homo sapiens
  misc_RNA (1)...(19): siRNA sense strand
ucauaacguucuaccauau

SEQ ID NO: 696887 - RNA, 19 nt, Homo sapiens
  misc_RNA (1)...(19): siRNA sense strand
cgagaugcuuagccucuuu

SEQ ID NO: 696888 - RNA, 19 nt, Homo sapiens
  misc_RNA (1)...(19): siRNA sense strand
uaaggacauuguuggacua

SEQ ID NO: 696889 - RNA, 19 nt, Homo sapiens
  misc_RNA (1)...(19): siRNA sense strand
gcugaagauuuggcugaua

SEQ ID NO: 696890 - RNA, 19 nt, Homo sapiens
  misc_RNA (1)...(19): siRNA sense strand
gaaaagggacugaagaaug

SEQ ID NO: 696891 - RNA, 19 nt, Homo sapiens
  misc_RNA (1)...(19): siRNA sense strand
gaaagugauugcacaacac

SEQ ID NO: 696892 - RNA, 19 nt, Homo sapiens
  misc_RNA (1)...(19): siRNA sense strand
uaacaagggcauuggagaa

SEQ ID NO: 696893 - RNA, 19 nt, Homo sapiens
  misc_RNA (1)...(19): siRNA sense strand
auacugaaccugaugauga

SEQ ID NO: 696894 - RNA, 19 nt, Homo sapiens
  misc_RNA (1)...(19): siRNA sense strand
caaguaagcaugaaauggu

SEQ ID NO: 696895 - RNA, 19 nt, Homo sapiens
  misc_RNA (1)...(19): siRNA sense strand
uaagaacuaugucaucacu

SEQ ID NO: 696896 - RNA, 19 nt, Homo sapiens
  misc_RNA (1)...(19): siRNA sense strand
gaaagaggaagaggagguu

SEQ ID NO: 696897 - RNA, 19 nt, Homo sapiens
  misc_RNA (1)...(19): siRNA sense strand
cuaagccuguuucuucuga

SEQ ID NO: 696898 - RNA, 19 nt, Homo sapiens
  misc_RNA (1)...(19): siRNA sense strand
caagcaguaugccuguuug

SEQ ID NO: 696899 - RNA, 19 nt, Homo sapiens
  misc_RNA (1)...(19): siRNA sense strand
ugaugaaucugaagagucu

SEQ ID NO: 696900 - RNA, 19 nt, Homo sapiens
  misc_RNA (1)...(19): siRNA sense strand
agaggugacugguauagug

SEQ ID NO: 696901 - RNA, 19 nt, Homo sapiens
  misc_RNA (1)...(19): siRNA sense strand
aagcagaagugucagaaca

SEQ ID NO: 696902 - RNA, 19 nt, Homo sapiens
  misc_RNA (1)...(19): siRNA sense strand
agaaagugauugcacaaca

SEQ ID NO: 696903 - RNA, 19 nt, Homo sapiens
  misc_RNA (1)...(19): siRNA sense strand
gaacuccuuagaggucuua

SEQ ID NO: 696904 - RNA, 19 nt, Homo sapiens
  misc_RNA (1)...(19): siRNA sense strand
ggacguguacuucuguuuc

SEQ ID NO: 696905 - RNA, 19 nt, Homo sapiens
  misc_RNA (1)...(19): siRNA sense strand
ggaauggagacauagaaau

SEQ ID NO: 696906 - RNA, 19 nt, Homo sapiens
  misc_RNA (1)...(19): siRNA sense strand
gaagauuuggcugauauug

SEQ ID NO: 696907 - RNA, 19 nt, Homo sapiens
  misc_RNA (1)...(19): siRNA sense strand
cugaagauuuggcugauau

SEQ ID NO: 696908 - RNA, 19 nt, Homo sapiens
  misc_RNA (1)...(19): siRNA sense strand
gaucuuacccagacugaca

SEQ ID NO: 696909 - RNA, 19 nt, Homo sapiens
  misc_RNA (1)...(19): siRNA sense strand
uuaaauauuccguggauga

SEQ ID NO: 696910 - RNA, 19 nt, Homo sapiens
  misc_RNA (1)...(19): siRNA sense strand
ugaagagucugcggaggaa

SEQ ID NO: 696911 - RNA, 19 nt, Homo sapiens
  misc_RNA (1)...(19): siRNA sense strand
gcauguccuucucugaaug

SEQ ID NO: 696912 - RNA, 19 nt, Homo sapiens
  misc_RNA (1)...(19): siRNA sense strand
ggagaagaaauagauaaug

SEQ ID NO: 696913 - RNA, 19 nt, Homo sapiens
  misc_RNA (1)...(19): siRNA sense strand
gugcucuucugcagucuuu

SEQ ID NO: 696914 - RNA, 19 nt, Homo sapiens
  misc_RNA (1)...(19): siRNA sense strand
auaaagacauuaccaugca

SEQ ID NO: 696915 - RNA, 19 nt, Homo sapiens
  misc_RNA (1)...(19): siRNA sense strand
ucugacaucucaucaaagu

SEQ ID NO: 696916 - RNA, 19 nt, Homo sapiens
  misc_RNA (1)...(19): siRNA sense strand
gcucugcaguuuccagcaa

SEQ ID NO: 696917 - RNA, 19 nt, Homo sapiens
  misc_RNA (1)...(19): siRNA sense strand
aaagucagauaaagaagca

SEQ ID NO: 696918 - RNA, 19 nt, Homo sapiens
  misc_RNA (1)...(19): siRNA sense strand
uaauuuacuuugggaguga

SEQ ID NO: 696919 - RNA, 19 nt, Homo sapiens
  misc_RNA (1)...(19): siRNA sense strand
ugucaucacucccagaauc

SEQ ID NO: 696920 - RNA, 19 nt, Homo sapiens
  misc_RNA (1)...(19): siRNA sense strand
ccacagguauaacccaucu

SEQ ID NO: 696921 - RNA, 19 nt, Homo sapiens
  misc_RNA (1)...(19): siRNA sense strand
gcagucaaguaagcaugaa

SEQ ID NO: 696922 - RNA, 19 nt, Homo sapiens
  misc_RNA (1)...(19): siRNA sense strand
aaaagggacugaagaaugu

SEQ ID NO: 696923 - RNA, 19 nt, Homo sapiens
  misc_RNA (1)...(19): siRNA sense strand
ccaagcaguaugccuguuu

SEQ ID NO: 696924 - RNA, 19 nt, Homo sapiens
  misc_RNA (1)...(19): siRNA sense strand
uggcuuaauucauaacguu

SEQ ID NO: 696925 - RNA, 19 nt, Homo sapiens
  misc_RNA (1)...(19): siRNA sense strand
gcuaucagcauugcacaaa

SEQ ID NO: 696926 - RNA, 19 nt, Homo sapiens
  misc_RNA (1)...(19): siRNA sense strand
uaugaagagcuuaaggaua

SEQ ID NO: 696927 - RNA, 19 nt, Homo sapiens
  misc_RNA (1)...(19): siRNA sense strand
cagcauguccuucucugaa

SEQ ID NO: 696928 - RNA, 19 nt, Homo sapiens
  misc_RNA (1)...(19): siRNA sense strand
aggaacagcuuuaagaacu

SEQ ID NO: 696929 - RNA, 19 nt, Homo sapiens
  misc_RNA (1)...(19): siRNA sense strand
caaaaugcaugagcagauu

SEQ ID NO: 696930 - RNA, 19 nt, Homo sapiens
  misc_RNA (1)...(19): siRNA sense strand
uauugaagauacuguggaa

SEQ ID NO: 696931 - RNA, 19 nt, Homo sapiens
  misc_RNA (1)...(19): siRNA sense strand
auucugacaucucaucaaa

SEQ ID NO: 696932 - RNA, 19 nt, Homo sapiens
  misc_RNA (1)...(19): siRNA sense strand
ccagagcucuuggaauucu

SEQ ID NO: 696933 - RNA, 19 nt, Homo sapiens
  misc_RNA (1)...(19): siRNA sense strand
uucauaacguucuaccaua

SEQ ID NO: 696934 - RNA, 19 nt, Homo sapiens
  misc_RNA (1)...(19): siRNA sense strand
caagaguuaugucgaugca

SEQ ID NO: 696935 - RNA, 19 nt, Homo sapiens
  misc_RNA (1)...(19): siRNA sense strand
ccucaagaguuaugucgau

SEQ ID NO: 696936 - RNA, 19 nt, Homo sapiens
  misc_RNA (1)...(19): siRNA sense strand
uaacgguccucaugcugau

SEQ ID NO: 696937 - RNA, 19 nt, Homo sapiens
  misc_RNA (1)...(19): siRNA sense strand
ggaauucugacaucucauc

SEQ ID NO: 696938 - RNA, 19 nt, Homo sapiens
  misc_RNA (1)...(19): siRNA sense strand
cgggaucgcuuuggaaaca

SEQ ID NO: 696939 - RNA, 19 nt, Homo sapiens
  misc_RNA (1)...(19): siRNA sense strand
uacugaaccugaugaugaa

SEQ ID NO: 696940 - RNA, 19 nt, Homo sapiens
  misc_RNA (1)...(19): siRNA sense strand
guccuaaccuggagcaucu

SEQ ID NO: 696941 - RNA, 19 nt, Homo sapiens
  misc_RNA (1)...(19): siRNA sense strand
caacugaacuugauacuga

SEQ ID NO: 696942 - RNA, 19 nt, Homo sapiens
  misc_RNA (1)...(19): siRNA sense strand
gaggagggcugccuuauuu

SEQ ID NO: 696943 - RNA, 19 nt, Homo sapiens
  misc_RNA (1)...(19): siRNA sense strand
gaaacagcauccaacuuua

SEQ ID NO: 696944 - RNA, 19 nt, Homo sapiens
  misc_RNA (1)...(19): siRNA sense strand
gcacaacacugcucucaga

SEQ ID NO: 696945 - RNA, 19 nt, Homo sapiens
  misc_RNA (1)...(19): siRNA sense strand
ggaaacagcauccaacuuu

SEQ ID NO: 696946 - RNA, 19 nt, Homo sapiens
  misc_RNA (1)...(19): siRNA sense strand
ggacuaagccuguuucuuc

SEQ ID NO: 696947 - RNA, 19 nt, Homo sapiens
  misc_RNA (1)...(19): siRNA sense strand
ggaugaagaugcugacauu

SEQ ID NO: 696948 - RNA, 19 nt, Homo sapiens
  misc_RNA (1)...(19): siRNA sense strand
gcauacagcucugcaguuu

SEQ ID NO: 696949 - RNA, 19 nt, Homo sapiens
  misc_RNA (1)...(19): siRNA sense strand
gaauuucacuucuccuuau

SEQ ID NO: 696950 - RNA, 19 nt, Homo sapiens
  misc_RNA (1)...(19): siRNA sense strand
gauguuagaugcugaagau

SEQ ID NO: 696951 - RNA, 19 nt, Homo sapiens
  misc_RNA (1)...(19): siRNA sense strand
ucagaacacuccacaggua

SEQ ID NO: 696952 - RNA, 19 nt, Homo sapiens
  misc_RNA (1)...(19): siRNA sense strand
gagguaaugcugucaauuu

SEQ ID NO: 696953 - RNA, 19 nt, Homo sapiens
  misc_RNA (1)...(19): siRNA sense strand
gaaauggucucagcugaca

SEQ ID NO: 696954 - RNA, 19 nt, Homo sapiens
  misc_RNA (1)...(19): siRNA sense strand
ggaacagcuuuaagaacua

SEQ ID NO: 696955 - RNA, 19 nt, Homo sapiens
  misc_RNA (1)...(19): siRNA sense strand
gaaaacaucuacaagcaaa

SEQ ID NO: 696956 - RNA, 19 nt, Homo sapiens
  misc_RNA (1)...(19): siRNA sense strand
cuccauggcuuaauucaua

SEQ ID NO: 696957 - RNA, 19 nt, Homo sapiens
  misc_RNA (1)...(19): siRNA sense strand
gaacagcuuuaagaacuau

SEQ ID NO: 696958 - RNA, 19 nt, Homo sapiens
  misc_RNA (1)...(19): siRNA sense strand
guacuucuguuucucaguu

SEQ ID NO: 696959 - RNA, 19 nt, Homo sapiens
  misc_RNA (1)...(19): siRNA sense strand
uaaagaagcagaaguguca

SEQ ID NO: 696960 - RNA, 19 nt, Homo sapiens
  misc_RNA (1)...(19): siRNA sense strand
ucaagagacuggacgugua

SEQ ID NO: 696961 - RNA, 19 nt, Homo sapiens
  misc_RNA (1)...(19): siRNA sense strand
augaagagcuuaaggauau

SEQ ID NO: 696962 - RNA, 19 nt, Homo sapiens
  misc_RNA (1)...(19): siRNA sense strand
gaauggagacauagaaaug

SEQ ID NO: 696963 - RNA, 19 nt, Homo sapiens
  misc_RNA (1)...(19): siRNA sense strand
guuagaugcugaagauuug

SEQ ID NO: 696964 - RNA, 19 nt, Homo sapiens
  misc_RNA (1)...(19): siRNA sense strand
guauuguggucacucauuu

SEQ ID NO: 696965 - RNA, 19 nt, Homo sapiens
  misc_RNA (1)...(19): siRNA sense strand
ggucuuagccuauggaauc

SEQ ID NO: 696966 - RNA, 19 nt, Homo sapiens
  misc_RNA (1)...(19): siRNA sense strand
ggacauuguuggacuaagg

SEQ ID NO: 696967 - RNA, 19 nt, Homo sapiens
  misc_RNA (1)...(19): siRNA sense strand
gaagagcuuaaggauauua

SEQ ID NO: 696968 - RNA, 19 nt, Homo sapiens
  misc_RNA (1)...(19): siRNA sense strand
gcggaggaaucaauugcua

SEQ ID NO: 696969 - RNA, 19 nt, Homo sapiens
  misc_RNA (1)...(19): siRNA sense strand
ugacauugaugaaucugaa

SEQ ID NO: 696970 - RNA, 19 nt, Homo sapiens
  misc_RNA (1)...(19): siRNA sense strand
gaacacuccacagguauaa

SEQ ID NO: 696971 - RNA, 19 nt, Homo sapiens
  misc_RNA (1)...(19): siRNA sense strand
gaaggauacugcagaacuc

SEQ ID NO: 696972 - RNA, 19 nt, Homo sapiens
  misc_RNA (1)...(19): siRNA sense strand
gggcauuggagaagaaaua

SEQ ID NO: 696973 - RNA, 19 nt, Homo sapiens
  misc_RNA (1)...(19): siRNA sense strand
gccaguggaugccagaauu

SEQ ID NO: 696974 - RNA, 19 nt, Homo sapiens
  misc_RNA (1)...(19): siRNA sense strand
caagggcauuggagaagaa

SEQ ID NO: 696975 - RNA, 19 nt, Homo sapiens
  misc_RNA (1)...(19): siRNA sense strand
guccuucucugaaugauga

SEQ ID NO: 696976 - RNA, 19 nt, Homo sapiens
  misc_RNA (1)...(19): siRNA sense strand
caguuuaucuggauguuau

SEQ ID NO: 696977 - RNA, 19 nt, Homo sapiens
  misc_RNA (1)...(19): siRNA sense strand
agauuuggcugauauugaa

SEQ ID NO: 696978 - RNA, 19 nt, Homo sapiens
  misc_RNA (1)...(19): siRNA sense strand
gauguuaucagaucacaga

SEQ ID NO: 696979 - RNA, 19 nt, Homo sapiens
  misc_RNA (1)...(19): siRNA sense strand
uuacuacugugacaacauu

SEQ ID NO: 696980 - RNA, 19 nt, Homo sapiens
  misc_RNA (1)...(19): siRNA sense strand
ggauuugguuucagcaugu

SEQ ID NO: 696981 - RNA, 19 nt, Homo sapiens
  misc_RNA (1)...(19): siRNA sense strand
ucagaaggauacugcagaa

SEQ ID NO: 696982 - RNA, 19 nt, Homo sapiens
  misc_RNA (1)...(19): siRNA sense strand
ggaggagggcugccuuauu

SEQ ID NO: 696983 - RNA, 19 nt, Homo sapiens
  misc_RNA (1)...(19): siRNA sense strand
ugaagaugcugacauugau

SEQ ID NO: 696984 - RNA, 19 nt, Homo sapiens
  misc_RNA (1)...(19): siRNA sense strand
ucauaacguucuaccauau

SEQ ID NO: 696985 - RNA, 19 nt, Homo sapiens
  misc_RNA (1)...(19): siRNA sense strand
gcugaagauuuggcugaua

SEQ ID NO: 696986 - RNA, 19 nt, Homo sapiens
  misc_RNA (1)...(19): siRNA sense strand
uaaggacauuguuggacua

SEQ ID NO: 696987 - RNA, 19 nt, Homo sapiens
  misc_RNA (1)...(19): siRNA sense strand
uaacaagggcauuggagaa

SEQ ID NO: 696988 - RNA, 19 nt, Homo sapiens
  misc_RNA (1)...(19): siRNA sense strand
gaaagugauugcacaacac

SEQ ID NO: 696989 - RNA, 19 nt, Homo sapiens
  misc_RNA (1)...(19): siRNA sense strand
auacugaaccugaugauga

SEQ ID NO: 696990 - RNA, 19 nt, Homo sapiens
  misc_RNA (1)...(19): siRNA sense strand
caaguaagcaugaaauggu

SEQ ID NO: 696991 - RNA, 19 nt, Homo sapiens
  misc_RNA (1)...(19): siRNA sense strand
uaagaacuaugucaucacu

SEQ ID NO: 696992 - RNA, 19 nt, Homo sapiens
  misc_RNA (1)...(19): siRNA sense strand
aagcagaagugucagaaca

SEQ ID NO: 696993 - RNA, 19 nt, Homo sapiens
  misc_RNA (1)...(19): siRNA sense strand
agaaagugauugcacaaca

SEQ ID NO: 696994 - RNA, 19 nt, Homo sapiens
  misc_RNA (1)...(19): siRNA sense strand
cuaagccuguuucuucuga

SEQ ID NO: 696995 - RNA, 19 nt, Homo sapiens
  misc_RNA (1)...(19): siRNA sense strand
caagcaguaugccuguuug

SEQ ID NO: 696996 - RNA, 19 nt, Homo sapiens
  misc_RNA (1)...(19): siRNA sense strand
ugaugaaucugaagagucu

SEQ ID NO: 696997 - RNA, 19 nt, Homo sapiens
  misc_RNA (1)...(19): siRNA sense strand
gaaagaggaagaggagguu

SEQ ID NO: 696998 - RNA, 19 nt, Homo sapiens
  misc_RNA (1)...(19): siRNA sense strand
agaggugacugguauagug

SEQ ID NO: 696999 - RNA, 19 nt, Homo sapiens
  misc_RNA (1)...(19): siRNA sense strand
gaucuuacccagacugaca

SEQ ID NO: 697000 - RNA, 19 nt, Homo sapiens
  misc_RNA (1)...(19): siRNA sense strand
gaacuccuuagaggucuua

SEQ ID NO: 697001 - RNA, 19 nt, Homo sapiens
  misc_RNA (1)...(19): siRNA sense strand
ggacguguacuucuguuuc

SEQ ID NO: 697002 - RNA, 19 nt, Homo sapiens
  misc_RNA (1)...(19): siRNA sense strand
uuaaauauuccguggauga

SEQ ID NO: 697003 - RNA, 19 nt, Homo sapiens
  misc_RNA (1)...(19): siRNA sense strand
ggaauggagacauagaaau

SEQ ID NO: 697004 - RNA, 19 nt, Homo sapiens
  misc_RNA (1)...(19): siRNA sense strand
gaagauuuggcugauauug

SEQ ID NO: 697005 - RNA, 19 nt, Homo sapiens
  misc_RNA (1)...(19): siRNA sense strand
cugaagauuuggcugauau

SEQ ID NO: 697006 - RNA, 19 nt, Homo sapiens
  misc_RNA (1)...(19): siRNA sense strand
ugaagagucugcggaggaa

SEQ ID NO: 697007 - RNA, 19 nt, Homo sapiens
  misc_RNA (1)...(19): siRNA sense strand
gcauguccuucucugaaug

SEQ ID NO: 697008 - RNA, 19 nt, Homo sapiens
  misc_RNA (1)...(19): siRNA sense strand
ggagaagaaauagauaaug

SEQ ID NO: 697009 - RNA, 19 nt, Homo sapiens
  misc_RNA (1)...(19): siRNA sense strand
auaaagacauuaccaugca

SEQ ID NO: 697010 - RNA, 19 nt, Homo sapiens
  misc_RNA (1)...(19): siRNA sense strand
ucugacaucucaucaaagu

SEQ ID NO: 697011 - RNA, 19 nt, Homo sapiens
  misc_RNA (1)...(19): siRNA sense strand
gcucugcaguuuccagcaa

SEQ ID NO: 697012 - RNA, 19 nt, Homo sapiens
  misc_RNA (1)...(19): siRNA sense strand
aaagucagauaaagaagca

SEQ ID NO: 697013 - RNA, 19 nt, Homo sapiens
  misc_RNA (1)...(19): siRNA sense strand
uaauuuacuuugggaguga

SEQ ID NO: 697014 - RNA, 19 nt, Homo sapiens
  misc_RNA (1)...(19): siRNA sense strand
ugucaucacucccagaauc

SEQ ID NO: 697015 - RNA, 19 nt, Homo sapiens
  misc_RNA (1)...(19): siRNA sense strand
ccacagguauaacccaucu

SEQ ID NO: 697016 - RNA, 19 nt, Homo sapiens
  misc_RNA (1)...(19): siRNA sense strand
gcagucaaguaagcaugaa

SEQ ID NO: 697017 - RNA, 19 nt, Homo sapiens
  misc_RNA (1)...(19): siRNA sense strand
gcuaucagcauugcacaaa

SEQ ID NO: 697018 - RNA, 19 nt, Homo sapiens
  misc_RNA (1)...(19): siRNA sense strand
ccaagcaguaugccuguuu

SEQ ID NO: 697019 - RNA, 19 nt, Homo sapiens
  misc_RNA (1)...(19): siRNA sense strand
uggcuuaauucauaacguu

SEQ ID NO: 697020 - RNA, 19 nt, Homo sapiens
  misc_RNA (1)...(19): siRNA sense strand
uaugaagagcuuaaggaua

SEQ ID NO: 697021 - RNA, 19 nt, Homo sapiens
  misc_RNA (1)...(19): siRNA sense strand
cagcauguccuucucugaa

SEQ ID NO: 697022 - RNA, 19 nt, Homo sapiens
  misc_RNA (1)...(19): siRNA sense strand
aggaacagcuuuaagaacu

SEQ ID NO: 697023 - RNA, 19 nt, Homo sapiens
  misc_RNA (1)...(19): siRNA sense strand
uauugaagauacuguggaa

SEQ ID NO: 697024 - RNA, 19 nt, Homo sapiens
  misc_RNA (1)...(19): siRNA sense strand
auucugacaucucaucaaa

SEQ ID NO: 697025 - RNA, 19 nt, Homo sapiens
  misc_RNA (1)...(19): siRNA sense strand
ccagagcucuuggaauucu

SEQ ID NO: 697026 - RNA, 19 nt, Homo sapiens
  misc_RNA (1)...(19): siRNA sense strand
uucauaacguucuaccaua

SEQ ID NO: 697027 - RNA, 19 nt, Homo sapiens
  misc_RNA (1)...(19): siRNA sense strand
caagaguuaugucgaugca

SEQ ID NO: 697028 - RNA, 19 nt, Homo sapiens
  misc_RNA (1)...(19): siRNA sense strand
ccucaagaguuaugucgau

SEQ ID NO: 697029 - RNA, 19 nt, Homo sapiens
  misc_RNA (1)...(19): siRNA sense strand
uaacgguccucaugcugau

SEQ ID NO: 697030 - RNA, 19 nt, Homo sapiens
  misc_RNA (1)...(19): siRNA sense strand
ggaauucugacaucucauc

SEQ ID NO: 697031 - RNA, 19 nt, Homo sapiens
  misc_RNA (1)...(19): siRNA sense strand
cgggaucgcuuuggaaaca

SEQ ID NO: 697032 - RNA, 19 nt, Homo sapiens
  misc_RNA (1)...(19): siRNA sense strand
uacugaaccugaugaugaa

SEQ ID NO: 697033 - RNA, 19 nt, Homo sapiens
  misc_RNA (1)...(19): siRNA sense strand
guccuaaccuggagcaucu

SEQ ID NO: 697034 - RNA, 19 nt, Homo sapiens
  misc_RNA (1)...(19): siRNA sense strand
guaaugcugucaauuuuca

SEQ ID NO: 697035 - RNA, 19 nt, Homo sapiens
  misc_RNA (1)...(19): siRNA sense strand
ggggaaaagacuuaauuua

SEQ ID NO: 697036 - RNA, 19 nt, Homo sapiens
  misc_RNA (1)...(19): siRNA sense strand
acuguggaauggagacaua

SEQ ID NO: 697037 - RNA, 19 nt, Homo sapiens
  misc_RNA (1)...(19): siRNA sense strand
uggcugauauugaagauac

SEQ ID NO: 697038 - RNA, 19 nt, Homo sapiens
  misc_RNA (1)...(19): siRNA sense strand
gaagaugcugacauugaug

SEQ ID NO: 697039 - RNA, 19 nt, Homo sapiens
  misc_RNA (1)...(19): siRNA sense strand
gaagauacuguggaaugga

SEQ ID NO: 697040 - RNA, 19 nt, Homo sapiens
  misc_RNA (1)...(19): siRNA sense strand
gacuaagccuguuucuucu

SEQ ID NO: 697041 - RNA, 19 nt, Homo sapiens
  misc_RNA (1)...(19): siRNA sense strand
gaaacgacaucgagaagaa

SEQ ID NO: 697042 - RNA, 19 nt, Homo sapiens
  misc_RNA (1)...(19): siRNA sense strand
gcacgaacgucggaaacga

SEQ ID NO: 697043 - RNA, 19 nt, Homo sapiens
  misc_RNA (1)...(19): siRNA sense strand
gagaagaacaggauaaagc

SEQ ID NO: 697044 - RNA, 19 nt, Homo sapiens
  misc_RNA (1)...(19): siRNA sense strand
gagcauuccaggagagaaa

SEQ ID NO: 697045 - RNA, 19 nt, Homo sapiens
  misc_RNA (1)...(19): siRNA sense strand
gcuucgaccucaugaacaa

SEQ ID NO: 697046 - RNA, 19 nt, Homo sapiens
  misc_RNA (1)...(19): siRNA sense strand
ggaaacgacaucgagaaga

SEQ ID NO: 697047 - RNA, 19 nt, Homo sapiens
  misc_RNA (1)...(19): siRNA sense strand
gaaugggaaagacagaaga

SEQ ID NO: 697048 - RNA, 19 nt, Homo sapiens
  misc_RNA (1)...(19): siRNA sense strand
agacagaagagaagggaaa

SEQ ID NO: 697049 - RNA, 19 nt, Homo sapiens
  misc_RNA (1)...(19): siRNA sense strand
gggaaagacagaagagaag

SEQ ID NO: 697050 - RNA, 19 nt, Homo sapiens
  misc_RNA (1)...(19): siRNA sense strand
ggaaugggaaagacagaag

SEQ ID NO: 697051 - RNA, 19 nt, Homo sapiens
  misc_RNA (1)...(19): siRNA sense strand
ggaccgcuuggagcaguua

SEQ ID NO: 697052 - RNA, 19 nt, Homo sapiens
  misc_RNA (1)...(19): siRNA sense strand
cagaagagaagggaaaugg

SEQ ID NO: 697053 - RNA, 19 nt, Homo sapiens
  misc_RNA (1)...(19): siRNA sense strand
aggacggccucaagcauga

SEQ ID NO: 697054 - RNA, 19 nt, Homo sapiens
  misc_RNA (1)...(19): siRNA sense strand
ggaaauggcaagggagcau

SEQ ID NO: 697055 - RNA, 19 nt, Homo sapiens
  misc_RNA (1)...(19): siRNA sense strand
gcuuggagcaguuagaaag

SEQ ID NO: 697056 - RNA, 19 nt, Homo sapiens
  misc_RNA (1)...(19): siRNA sense strand
ugggaaagacagaagagaa

SEQ ID NO: 697057 - RNA, 19 nt, Homo sapiens
  misc_RNA (1)...(19): siRNA sense strand
uggagcaguuagaaaggaa

SEQ ID NO: 697058 - RNA, 19 nt, Homo sapiens
  misc_RNA (1)...(19): siRNA sense strand
caucgagaagaacaggaua

SEQ ID NO: 697059 - RNA, 19 nt, Homo sapiens
  misc_RNA (1)...(19): siRNA sense strand
ucgagaagaacaggauaaa

SEQ ID NO: 697060 - RNA, 19 nt, Homo sapiens
  misc_RNA (1)...(19): siRNA sense strand
gggcuucgaccucaugaac

SEQ ID NO: 697061 - RNA, 19 nt, Homo sapiens
  misc_RNA (1)...(19): siRNA sense strand
gcuucgaccucaugaacaa

SEQ ID NO: 697062 - RNA, 19 nt, Homo sapiens
  misc_RNA (1)...(19): siRNA sense strand
aggacggccucaagcauga

SEQ ID NO: 697063 - RNA, 19 nt, Homo sapiens
  misc_RNA (1)...(19): siRNA sense strand
gggcuucgaccucaugaac

SEQ ID NO: 697064 - RNA, 19 nt, Homo sapiens
  misc_RNA (1)...(19): siRNA sense strand
gaaacgacaucgagaagaa

SEQ ID NO: 697065 - RNA, 19 nt, Homo sapiens
  misc_RNA (1)...(19): siRNA sense strand
gcacgaacgucggaaacga

SEQ ID NO: 697066 - RNA, 19 nt, Homo sapiens
  misc_RNA (1)...(19): siRNA sense strand
gagaagaacaggauaaagc

SEQ ID NO: 697067 - RNA, 19 nt, Homo sapiens
  misc_RNA (1)...(19): siRNA sense strand
gagcauuccaggagagaaa

SEQ ID NO: 697068 - RNA, 19 nt, Homo sapiens
  misc_RNA (1)...(19): siRNA sense strand
gcuucgaccucaugaacaa

SEQ ID NO: 697069 - RNA, 19 nt, Homo sapiens
  misc_RNA (1)...(19): siRNA sense strand
ggaaacgacaucgagaaga

SEQ ID NO: 697070 - RNA, 19 nt, Homo sapiens
  misc_RNA (1)...(19): siRNA sense strand
gaaugggaaagacagaaga

SEQ ID NO: 697071 - RNA, 19 nt, Homo sapiens
  misc_RNA (1)...(19): siRNA sense strand
agacagaagagaagggaaa

SEQ ID NO: 697072 - RNA, 19 nt, Homo sapiens
  misc_RNA (1)...(19): siRNA sense strand
gggaaagacagaagagaag

SEQ ID NO: 697073 - RNA, 19 nt, Homo sapiens
  misc_RNA (1)...(19): siRNA sense strand
ggaaugggaaagacagaag

SEQ ID NO: 697074 - RNA, 19 nt, Homo sapiens
  misc_RNA (1)...(19): siRNA sense strand
ggaccgcuuggagcaguua

SEQ ID NO: 697075 - RNA, 19 nt, Homo sapiens
  misc_RNA (1)...(19): siRNA sense strand
cagaagagaagggaaaugg

SEQ ID NO: 697076 - RNA, 19 nt, Homo sapiens
  misc_RNA (1)...(19): siRNA sense strand
aggacggccucaagcauga

SEQ ID NO: 697077 - RNA, 19 nt, Homo sapiens
  misc_RNA (1)...(19): siRNA sense strand
ggaaauggcaagggagcau

SEQ ID NO: 697078 - RNA, 19 nt, Homo sapiens
  misc_RNA (1)...(19): siRNA sense strand
gcuuggagcaguuagaaag

SEQ ID NO: 697079 - RNA, 19 nt, Homo sapiens
  misc_RNA (1)...(19): siRNA sense strand
ugggaaagacagaagagaa

SEQ ID NO: 697080 - RNA, 19 nt, Homo sapiens
  misc_RNA (1)...(19): siRNA sense strand
uggagcaguuagaaaggaa

SEQ ID NO: 697081 - RNA, 19 nt, Homo sapiens
  misc_RNA (1)...(19): siRNA sense strand
caucgagaagaacaggaua

SEQ ID NO: 697082 - RNA, 19 nt, Homo sapiens
  misc_RNA (1)...(19): siRNA sense strand
ucgagaagaacaggauaaa

SEQ ID NO: 697083 - RNA, 19 nt, Homo sapiens
  misc_RNA (1)...(19): siRNA sense strand
gggcuucgaccucaugaac

SEQ ID NO: 697084 - RNA, 19 nt, Homo sapiens
  misc_RNA (1)...(19): siRNA sense strand
gaaacgacaucgagaagaa

SEQ ID NO: 697085 - RNA, 19 nt, Homo sapiens
  misc_RNA (1)...(19): siRNA sense strand
gcacgaacgucggaaacga

SEQ ID NO: 697086 - RNA, 19 nt, Homo sapiens
  misc_RNA (1)...(19): siRNA sense strand
gagaagaacaggauaaagc

SEQ ID NO: 697087 - RNA, 19 nt, Homo sapiens
  misc_RNA (1)...(19): siRNA sense strand
gagcauuccaggagagaaa

SEQ ID NO: 697088 - RNA, 19 nt, Homo sapiens
  misc_RNA (1)...(19): siRNA sense strand
gcuucgaccucaugaacaa

SEQ ID NO: 697089 - RNA, 19 nt, Homo sapiens
  misc_RNA (1)...(19): siRNA sense strand
ggaaacgacaucgagaaga

SEQ ID NO: 697090 - RNA, 19 nt, Homo sapiens
  misc_RNA (1)...(19): siRNA sense strand
gaaugggaaagacagaaga

SEQ ID NO: 697091 - RNA, 19 nt, Homo sapiens
  misc_RNA (1)...(19): siRNA sense strand
agacagaagagaagggaaa

SEQ ID NO: 697092 - RNA, 19 nt, Homo sapiens
  misc_RNA (1)...(19): siRNA sense strand
gggaaagacagaagagaag

SEQ ID NO: 697093 - RNA, 19 nt, Homo sapiens
  misc_RNA (1)...(19): siRNA sense strand
ggaaugggaaagacagaag

SEQ ID NO: 697094 - RNA, 19 nt, Homo sapiens
  misc_RNA (1)...(19): siRNA sense strand
ggaccgcuuggagcaguua

SEQ ID NO: 697095 - RNA, 19 nt, Homo sapiens
  misc_RNA (1)...(19): siRNA sense strand
cagaagagaagggaaaugg

SEQ ID NO: 697096 - RNA, 19 nt, Homo sapiens
  misc_RNA (1)...(19): siRNA sense strand
aggacggccucaagcauga

SEQ ID NO: 697097 - RNA, 19 nt, Homo sapiens
  misc_RNA (1)...(19): siRNA sense strand
ggaaauggcaagggagcau

SEQ ID NO: 697098 - RNA, 19 nt, Homo sapiens
  misc_RNA (1)...(19): siRNA sense strand
gcuuggagcaguuagaaag

SEQ ID NO: 697099 - RNA, 19 nt, Homo sapiens
  misc_RNA (1)...(19): siRNA sense strand
ugggaaagacagaagagaa

SEQ ID NO: 697100 - RNA, 19 nt, Homo sapiens
  misc_RNA (1)...(19): siRNA sense strand
uggagcaguuagaaaggaa

SEQ ID NO: 697101 - RNA, 19 nt, Homo sapiens
  misc_RNA (1)...(19): siRNA sense strand
caucgagaagaacaggaua

SEQ ID NO: 697102 - RNA, 19 nt, Homo sapiens
  misc_RNA (1)...(19): siRNA sense strand
ucgagaagaacaggauaaa

SEQ ID NO: 697103 - RNA, 19 nt, Homo sapiens
  misc_RNA (1)...(19): siRNA sense strand
gggcuucgaccucaugaac

SEQ ID NO: 697104 - RNA, 19 nt, Homo sapiens
  misc_RNA (1)...(19): siRNA sense strand
gaaacgacaucgagaagaa

SEQ ID NO: 697105 - RNA, 19 nt, Homo sapiens
  misc_RNA (1)...(19): siRNA sense strand
gcacgaacgucggaaacga

SEQ ID NO: 697106 - RNA, 19 nt, Homo sapiens
  misc_RNA (1)...(19): siRNA sense strand
gagaagaacaggauaaagc

SEQ ID NO: 697107 - RNA, 19 nt, Homo sapiens
  misc_RNA (1)...(19): siRNA sense strand
gagcauuccaggagagaaa

SEQ ID NO: 697108 - RNA, 19 nt, Homo sapiens
  misc_RNA (1)...(19): siRNA sense strand
gcuucgaccucaugaacaa

SEQ ID NO: 697109 - RNA, 19 nt, Homo sapiens
  misc_RNA (1)...(19): siRNA sense strand
ggaaacgacaucgagaaga

SEQ ID NO: 697110 - RNA, 19 nt, Homo sapiens
  misc_RNA (1)...(19): siRNA sense strand
gaaugggaaagacagaaga

SEQ ID NO: 697111 - RNA, 19 nt, Homo sapiens
  misc_RNA (1)...(19): siRNA sense strand
agacagaagagaagggaaa

SEQ ID NO: 697112 - RNA, 19 nt, Homo sapiens
  misc_RNA (1)...(19): siRNA sense strand
gggaaagacagaagagaag

SEQ ID NO: 697113 - RNA, 19 nt, Homo sapiens
  misc_RNA (1)...(19): siRNA sense strand
ggaaugggaaagacagaag

SEQ ID NO: 697114 - RNA, 19 nt, Homo sapiens
  misc_RNA (1)...(19): siRNA sense strand
ggaccgcuuggagcaguua

SEQ ID NO: 697115 - RNA, 19 nt, Homo sapiens
  misc_RNA (1)...(19): siRNA sense strand
cagaagagaagggaaaugg

SEQ ID NO: 697116 - RNA, 19 nt, Homo sapiens
  misc_RNA (1)...(19): siRNA sense strand
aggacggccucaagcauga

SEQ ID NO: 697117 - RNA, 19 nt, Homo sapiens
  misc_RNA (1)...(19): siRNA sense strand
ggaaauggcaagggagcau

SEQ ID NO: 697118 - RNA, 19 nt, Homo sapiens
  misc_RNA (1)...(19): siRNA sense strand
gcuuggagcaguuagaaag

SEQ ID NO: 697119 - RNA, 19 nt, Homo sapiens
  misc_RNA (1)...(19): siRNA sense strand
ugggaaagacagaagagaa

SEQ ID NO: 697120 - RNA, 19 nt, Homo sapiens
  misc_RNA (1)...(19): siRNA sense strand
uggagcaguuagaaaggaa

SEQ ID NO: 697121 - RNA, 19 nt, Homo sapiens
  misc_RNA (1)...(19): siRNA sense strand
caucgagaagaacaggaua

SEQ ID NO: 697122 - RNA, 19 nt, Homo sapiens
  misc_RNA (1)...(19): siRNA sense strand
ucgagaagaacaggauaaa

SEQ ID NO: 697123 - RNA, 19 nt, Homo sapiens
  misc_RNA (1)...(19): siRNA sense strand
gggcuucgaccucaugaac

SEQ ID NO: 697124 - RNA, 19 nt, Homo sapiens
  misc_RNA (1)...(19): siRNA sense strand
gcuucgaccucaugaacaa

SEQ ID NO: 697125 - RNA, 19 nt, Homo sapiens
  misc_RNA (1)...(19): siRNA sense strand
aggacggccucaagcauga

SEQ ID NO: 697126 - RNA, 19 nt, Homo sapiens
  misc_RNA (1)...(19): siRNA sense strand
gggcuucgaccucaugaac

SEQ ID NO: 697127 - RNA, 19 nt, Homo sapiens
  misc_RNA (1)...(19): siRNA sense strand
gagcauuccaggagagaaa

SEQ ID NO: 697128 - RNA, 19 nt, Homo sapiens
  misc_RNA (1)...(19): siRNA sense strand
gcuucgaccucaugaacaa

SEQ ID NO: 697129 - RNA, 19 nt, Homo sapiens
  misc_RNA (1)...(19): siRNA sense strand
agacagaagagaagggaaa

SEQ ID NO: 697130 - RNA, 19 nt, Homo sapiens
  misc_RNA (1)...(19): siRNA sense strand
gggaaagacagaagagaag

SEQ ID NO: 697131 - RNA, 19 nt, Homo sapiens
  misc_RNA (1)...(19): siRNA sense strand
ggaccgcuuggagcaguua

SEQ ID NO: 697132 - RNA, 19 nt, Homo sapiens
  misc_RNA (1)...(19): siRNA sense strand
cagaagagaagggaaaugg

SEQ ID NO: 697133 - RNA, 19 nt, Homo sapiens
  misc_RNA (1)...(19): siRNA sense strand
aggacggccucaagcauga

SEQ ID NO: 697134 - RNA, 19 nt, Homo sapiens
  misc_RNA (1)...(19): siRNA sense strand
gcuuggagcaguuagaaag

SEQ ID NO: 697135 - RNA, 19 nt, Homo sapiens
  misc_RNA (1)...(19): siRNA sense strand
ggaaauggcaagggagcau

SEQ ID NO: 697136 - RNA, 19 nt, Homo sapiens
  misc_RNA (1)...(19): siRNA sense strand
uggagcaguuagaaaggaa

SEQ ID NO: 697137 - RNA, 19 nt, Homo sapiens
  misc_RNA (1)...(19): siRNA sense strand
gggcuucgaccucaugaac

SEQ ID NO: 697138 - RNA, 19 nt, Homo sapiens
  misc_RNA (1)...(19): siRNA sense strand
gaaacgacaucgagaagaa

SEQ ID NO: 697139 - RNA, 19 nt, Homo sapiens
  misc_RNA (1)...(19): siRNA sense strand
gcacgaacgucggaaacga

SEQ ID NO: 697140 - RNA, 19 nt, Homo sapiens
  misc_RNA (1)...(19): siRNA sense strand
gagaagaacaggauaaagc

SEQ ID NO: 697141 - RNA, 19 nt, Homo sapiens
  misc_RNA (1)...(19): siRNA sense strand
gagcauuccaggagagaaa

SEQ ID NO: 697142 - RNA, 19 nt, Homo sapiens
  misc_RNA (1)...(19): siRNA sense strand
gcuucgaccucaugaacaa

SEQ ID NO: 697143 - RNA, 19 nt, Homo sapiens
  misc_RNA (1)...(19): siRNA sense strand
ggaaacgacaucgagaaga

SEQ ID NO: 697144 - RNA, 19 nt, Homo sapiens
  misc_RNA (1)...(19): siRNA sense strand
gaaugggaaagacagaaga

SEQ ID NO: 697145 - RNA, 19 nt, Homo sapiens
  misc_RNA (1)...(19): siRNA sense strand
agacagaagagaagggaaa

SEQ ID NO: 697146 - RNA, 19 nt, Homo sapiens
  misc_RNA (1)...(19): siRNA sense strand
gggaaagacagaagagaag

SEQ ID NO: 697147 - RNA, 19 nt, Homo sapiens
  misc_RNA (1)...(19): siRNA sense strand
ggaaugggaaagacagaag

SEQ ID NO: 697148 - RNA, 19 nt, Homo sapiens
  misc_RNA (1)...(19): siRNA sense strand
ggaccgcuuggagcaguua

SEQ ID NO: 697149 - RNA, 19 nt, Homo sapiens
  misc_RNA (1)...(19): siRNA sense strand
cagaagagaagggaaaugg

SEQ ID NO: 697150 - RNA, 19 nt, Homo sapiens
  misc_RNA (1)...(19): siRNA sense strand
aggacggccucaagcauga

SEQ ID NO: 697151 - RNA, 19 nt, Homo sapiens
  misc_RNA (1)...(19): siRNA sense strand
ggaaauggcaagggagcau

SEQ ID NO: 697152 - RNA, 19 nt, Homo sapiens
  misc_RNA (1)...(19): siRNA sense strand
gcuuggagcaguuagaaag

SEQ ID NO: 697153 - RNA, 19 nt, Homo sapiens
  misc_RNA (1)...(19): siRNA sense strand
ugggaaagacagaagagaa

SEQ ID NO: 697154 - RNA, 19 nt, Homo sapiens
  misc_RNA (1)...(19): siRNA sense strand
uggagcaguuagaaaggaa

SEQ ID NO: 697155 - RNA, 19 nt, Homo sapiens
  misc_RNA (1)...(19): siRNA sense strand
caucgagaagaacaggaua

SEQ ID NO: 697156 - RNA, 19 nt, Homo sapiens
  misc_RNA (1)...(19): siRNA sense strand
ucgagaagaacaggauaaa

SEQ ID NO: 697157 - RNA, 19 nt, Homo sapiens
  misc_RNA (1)...(19): siRNA sense strand
gggcuucgaccucaugaac

SEQ ID NO: 697158 - RNA, 19 nt, Homo sapiens
  misc_RNA (1)...(19): siRNA sense strand
gaaacgacaucgagaagaa

SEQ ID NO: 697159 - RNA, 19 nt, Homo sapiens
  misc_RNA (1)...(19): siRNA sense strand
gcacgaacgucggaaacga

SEQ ID NO: 697160 - RNA, 19 nt, Homo sapiens
  misc_RNA (1)...(19): siRNA sense strand
gagaagaacaggauaaagc

SEQ ID NO: 697161 - RNA, 19 nt, Homo sapiens
  misc_RNA (1)...(19): siRNA sense strand
gagcauuccaggagagaaa

SEQ ID NO: 697162 - RNA, 19 nt, Homo sapiens
  misc_RNA (1)...(19): siRNA sense strand
gcuucgaccucaugaacaa

SEQ ID NO: 697163 - RNA, 19 nt, Homo sapiens
  misc_RNA (1)...(19): siRNA sense strand
ggaaacgacaucgagaaga

SEQ ID NO: 697164 - RNA, 19 nt, Homo sapiens
  misc_RNA (1)...(19): siRNA sense strand
gaaugggaaagacagaaga

SEQ ID NO: 697165 - RNA, 19 nt, Homo sapiens
  misc_RNA (1)...(19): siRNA sense strand
agacagaagagaagggaaa

SEQ ID NO: 697166 - RNA, 19 nt, Homo sapiens
  misc_RNA (1)...(19): siRNA sense strand
gggaaagacagaagagaag

SEQ ID NO: 697167 - RNA, 19 nt, Homo sapiens
  misc_RNA (1)...(19): siRNA sense strand
ggaaugggaaagacagaag

SEQ ID NO: 697168 - RNA, 19 nt, Homo sapiens
  misc_RNA (1)...(19): siRNA sense strand
ggaccgcuuggagcaguua

SEQ ID NO: 697169 - RNA, 19 nt, Homo sapiens
  misc_RNA (1)...(19): siRNA sense strand
cagaagagaagggaaaugg

SEQ ID NO: 697170 - RNA, 19 nt, Homo sapiens
  misc_RNA (1)...(19): siRNA sense strand
aggacggccucaagcauga

SEQ ID NO: 697171 - RNA, 19 nt, Homo sapiens
  misc_RNA (1)...(19): siRNA sense strand
ggaaauggcaagggagcau

SEQ ID NO: 697172 - RNA, 19 nt, Homo sapiens
  misc_RNA (1)...(19): siRNA sense strand
gcuuggagcaguuagaaag

SEQ ID NO: 697173 - RNA, 19 nt, Homo sapiens
  misc_RNA (1)...(19): siRNA sense strand
ugggaaagacagaagagaa

SEQ ID NO: 697174 - RNA, 19 nt, Homo sapiens
  misc_RNA (1)...(19): siRNA sense strand
uggagcaguuagaaaggaa

SEQ ID NO: 697175 - RNA, 19 nt, Homo sapiens
  misc_RNA (1)...(19): siRNA sense strand
caucgagaagaacaggaua

SEQ ID NO: 697176 - RNA, 19 nt, Homo sapiens
  misc_RNA (1)...(19): siRNA sense strand
ucgagaagaacaggauaaa

SEQ ID NO: 697177 - RNA, 19 nt, Homo sapiens
  misc_RNA (1)...(19): siRNA sense strand
gggcuucgaccucaugaac

SEQ ID NO: 697178 - RNA, 19 nt, Homo sapiens
  misc_RNA (1)...(19): siRNA sense strand
ggaaauccgagacaaauua

SEQ ID NO: 697179 - RNA, 19 nt, Homo sapiens
  misc_RNA (1)...(19): siRNA sense strand
gaaacaccgugccgucagu

SEQ ID NO: 697180 - RNA, 19 nt, Homo sapiens
  misc_RNA (1)...(19): siRNA sense strand
gaaguaaauucgggaaagg

SEQ ID NO: 697181 - RNA, 19 nt, Homo sapiens
  misc_RNA (1)...(19): siRNA sense strand
gagacaaauuacucaagga

SEQ ID NO: 697182 - RNA, 19 nt, Homo sapiens
  misc_RNA (1)...(19): siRNA sense strand
ggaaggaggcagaggaaag

SEQ ID NO: 697183 - RNA, 19 nt, Homo sapiens
  misc_RNA (1)...(19): siRNA sense strand
gagaagaaggccaaacaca

SEQ ID NO: 697184 - RNA, 19 nt, Homo sapiens
  misc_RNA (1)...(19): siRNA sense strand
ucaaggacgcggucuguga

SEQ ID NO: 697185 - RNA, 19 nt, Homo sapiens
  misc_RNA (1)...(19): siRNA sense strand
gaagaaaauugaggaauac

SEQ ID NO: 697186 - RNA, 19 nt, Homo sapiens
  misc_RNA (1)...(19): siRNA sense strand
cgccugacguggagaagaa

SEQ ID NO: 697187 - RNA, 19 nt, Homo sapiens
  misc_RNA (1)...(19): siRNA sense strand
gcgagaagaaggccaaaca

SEQ ID NO: 697188 - RNA, 19 nt, Homo sapiens
  misc_RNA (1)...(19): siRNA sense strand
gggaaauccgagacaaauu

SEQ ID NO: 697189 - RNA, 19 nt, Homo sapiens
  misc_RNA (1)...(19): siRNA sense strand
gaggaaggaggcagaggaa

SEQ ID NO: 697190 - RNA, 19 nt, Homo sapiens
  misc_RNA (1)...(19): siRNA sense strand
gaaauccgagacaaauuac

SEQ ID NO: 697191 - RNA, 19 nt, Homo sapiens
  misc_RNA (1)...(19): siRNA sense strand
cagaggaaagcgagaagaa

SEQ ID NO: 697192 - RNA, 19 nt, Homo sapiens
  misc_RNA (1)...(19): siRNA sense strand
gagaaguaaauucgggaaa

SEQ ID NO: 697193 - RNA, 19 nt, Homo sapiens
  misc_RNA (1)...(19): siRNA sense strand
agaaguaaauucgggaaag

SEQ ID NO: 697194 - RNA, 19 nt, Homo sapiens
  misc_RNA (1)...(19): siRNA sense strand
gcugggaaauccgagacaa

SEQ ID NO: 697195 - RNA, 19 nt, Homo sapiens
  misc_RNA (1)...(19): siRNA sense strand
ccacauccgccacaagauc

SEQ ID NO: 697196 - RNA, 19 nt, Homo sapiens
  misc_RNA (1)...(19): siRNA sense strand
uaaauucgggaaaggugaa

SEQ ID NO: 697197 - RNA, 19 nt, Homo sapiens
  misc_RNA (1)...(19): siRNA sense strand
gcagaggaaagcgagaaga

SEQ ID NO: 697198 - RNA, 19 nt, Homo sapiens
  misc_RNA (1)...(19): siRNA sense strand
caaggacgcggucugugau

SEQ ID NO: 697199 - RNA, 19 nt, Homo sapiens
  misc_RNA (1)...(19): siRNA sense strand
gaaggaggcagaggaaagc

SEQ ID NO: 697200 - RNA, 19 nt, Homo sapiens
  misc_RNA (1)...(19): siRNA sense strand
gacgcggucugugaucgaa

SEQ ID NO: 697201 - RNA, 19 nt, Homo sapiens
  misc_RNA (1)...(19): siRNA sense strand
caacgccugacguggagaa

SEQ ID NO: 697202 - RNA, 19 nt, Homo sapiens
  misc_RNA (1)...(19): siRNA sense strand
aaccacauccgccacaaga

SEQ ID NO: 697203 - RNA, 19 nt, Homo sapiens
  misc_RNA (1)...(19): siRNA sense strand
gccgcauccugagaaguaa

SEQ ID NO: 697204 - RNA, 19 nt, Homo sapiens
  misc_RNA (1)...(19): siRNA sense strand
agccgcauccugagaagua

SEQ ID NO: 697205 - RNA, 19 nt, Homo sapiens
  misc_RNA (1)...(19): siRNA sense strand
ggacgcggucugugaucga

SEQ ID NO: 697206 - RNA, 19 nt, Homo sapiens
  misc_RNA (1)...(19): siRNA sense strand
ccaaccacauccgccacaa

SEQ ID NO: 697207 - RNA, 19 nt, Homo sapiens
  misc_RNA (1)...(19): siRNA sense strand
ggaaauccgagacaaauua

SEQ ID NO: 697208 - RNA, 19 nt, Homo sapiens
  misc_RNA (1)...(19): siRNA sense strand
gaaacaccgugccgucagu

SEQ ID NO: 697209 - RNA, 19 nt, Homo sapiens
  misc_RNA (1)...(19): siRNA sense strand
gaaguaaauucgggaaagg

SEQ ID NO: 697210 - RNA, 19 nt, Homo sapiens
  misc_RNA (1)...(19): siRNA sense strand
gagacaaauuacucaagga

SEQ ID NO: 697211 - RNA, 19 nt, Homo sapiens
  misc_RNA (1)...(19): siRNA sense strand
ggaaggaggcagaggaaag

SEQ ID NO: 697212 - RNA, 19 nt, Homo sapiens
  misc_RNA (1)...(19): siRNA sense strand
gagaagaaggccaaacaca

SEQ ID NO: 697213 - RNA, 19 nt, Homo sapiens
  misc_RNA (1)...(19): siRNA sense strand
ucaaggacgcggucuguga

SEQ ID NO: 697214 - RNA, 19 nt, Homo sapiens
  misc_RNA (1)...(19): siRNA sense strand
gaagaaaauugaggaauac

SEQ ID NO: 697215 - RNA, 19 nt, Homo sapiens
  misc_RNA (1)...(19): siRNA sense strand
cgccugacguggagaagaa

SEQ ID NO: 697216 - RNA, 19 nt, Homo sapiens
  misc_RNA (1)...(19): siRNA sense strand
gcgagaagaaggccaaaca

SEQ ID NO: 697217 - RNA, 19 nt, Homo sapiens
  misc_RNA (1)...(19): siRNA sense strand
gggaaauccgagacaaauu

SEQ ID NO: 697218 - RNA, 19 nt, Homo sapiens
  misc_RNA (1)...(19): siRNA sense strand
gaggaaggaggcagaggaa

SEQ ID NO: 697219 - RNA, 19 nt, Homo sapiens
  misc_RNA (1)...(19): siRNA sense strand
gaaauccgagacaaauuac

SEQ ID NO: 697220 - RNA, 19 nt, Homo sapiens
  misc_RNA (1)...(19): siRNA sense strand
cagaggaaagcgagaagaa

SEQ ID NO: 697221 - RNA, 19 nt, Homo sapiens
  misc_RNA (1)...(19): siRNA sense strand
gagaaguaaauucgggaaa

SEQ ID NO: 697222 - RNA, 19 nt, Homo sapiens
  misc_RNA (1)...(19): siRNA sense strand
agaaguaaauucgggaaag

SEQ ID NO: 697223 - RNA, 19 nt, Homo sapiens
  misc_RNA (1)...(19): siRNA sense strand
gcugggaaauccgagacaa

SEQ ID NO: 697224 - RNA, 19 nt, Homo sapiens
  misc_RNA (1)...(19): siRNA sense strand
ccacauccgccacaagauc

SEQ ID NO: 697225 - RNA, 19 nt, Homo sapiens
  misc_RNA (1)...(19): siRNA sense strand
uaaauucgggaaaggugaa

SEQ ID NO: 697226 - RNA, 19 nt, Homo sapiens
  misc_RNA (1)...(19): siRNA sense strand
gcagaggaaagcgagaaga

SEQ ID NO: 697227 - RNA, 19 nt, Homo sapiens
  misc_RNA (1)...(19): siRNA sense strand
caaggacgcggucugugau

SEQ ID NO: 697228 - RNA, 19 nt, Homo sapiens
  misc_RNA (1)...(19): siRNA sense strand
gaaggaggcagaggaaagc

SEQ ID NO: 697229 - RNA, 19 nt, Homo sapiens
  misc_RNA (1)...(19): siRNA sense strand
gacgcggucugugaucgaa

SEQ ID NO: 697230 - RNA, 19 nt, Homo sapiens
  misc_RNA (1)...(19): siRNA sense strand
caacgccugacguggagaa

SEQ ID NO: 697231 - RNA, 19 nt, Homo sapiens
  misc_RNA (1)...(19): siRNA sense strand
aaccacauccgccacaaga

SEQ ID NO: 697232 - RNA, 19 nt, Homo sapiens
  misc_RNA (1)...(19): siRNA sense strand
gccgcauccugagaaguaa

SEQ ID NO: 697233 - RNA, 19 nt, Homo sapiens
  misc_RNA (1)...(19): siRNA sense strand
agccgcauccugagaagua

SEQ ID NO: 697234 - RNA, 19 nt, Homo sapiens
  misc_RNA (1)...(19): siRNA sense strand
ggacgcggucugugaucga

SEQ ID NO: 697235 - RNA, 19 nt, Homo sapiens
  misc_RNA (1)...(19): siRNA sense strand
ccaaccacauccgccacaa

SEQ ID NO: 697236 - RNA, 19 nt, Homo sapiens
  misc_RNA (1)...(19): siRNA sense strand
ggaaauccgagacaaauua

SEQ ID NO: 697237 - RNA, 19 nt, Homo sapiens
  misc_RNA (1)...(19): siRNA sense strand
gaaacaccgugccgucagu

SEQ ID NO: 697238 - RNA, 19 nt, Homo sapiens
  misc_RNA (1)...(19): siRNA sense strand
gaaguaaauucgggaaagg

SEQ ID NO: 697239 - RNA, 19 nt, Homo sapiens
  misc_RNA (1)...(19): siRNA sense strand
gagacaaauuacucaagga

SEQ ID NO: 697240 - RNA, 19 nt, Homo sapiens
  misc_RNA (1)...(19): siRNA sense strand
ggaaggaggcagaggaaag

SEQ ID NO: 697241 - RNA, 19 nt, Homo sapiens
  misc_RNA (1)...(19): siRNA sense strand
gagaagaaggccaaacaca

SEQ ID NO: 697242 - RNA, 19 nt, Homo sapiens
  misc_RNA (1)...(19): siRNA sense strand
ucaaggacgcggucuguga

SEQ ID NO: 697243 - RNA, 19 nt, Homo sapiens
  misc_RNA (1)...(19): siRNA sense strand
gaagaaaauugaggaauac

SEQ ID NO: 697244 - RNA, 19 nt, Homo sapiens
  misc_RNA (1)...(19): siRNA sense strand
cgccugacguggagaagaa

SEQ ID NO: 697245 - RNA, 19 nt, Homo sapiens
  misc_RNA (1)...(19): siRNA sense strand
gcgagaagaaggccaaaca

SEQ ID NO: 697246 - RNA, 19 nt, Homo sapiens
  misc_RNA (1)...(19): siRNA sense strand
gggaaauccgagacaaauu

SEQ ID NO: 697247 - RNA, 19 nt, Homo sapiens
  misc_RNA (1)...(19): siRNA sense strand
gaggaaggaggcagaggaa

SEQ ID NO: 697248 - RNA, 19 nt, Homo sapiens
  misc_RNA (1)...(19): siRNA sense strand
gaaauccgagacaaauuac

SEQ ID NO: 697249 - RNA, 19 nt, Homo sapiens
  misc_RNA (1)...(19): siRNA sense strand
cagaggaaagcgagaagaa

SEQ ID NO: 697250 - RNA, 19 nt, Homo sapiens
  misc_RNA (1)...(19): siRNA sense strand
gagaaguaaauucgggaaa

SEQ ID NO: 697251 - RNA, 19 nt, Homo sapiens
  misc_RNA (1)...(19): siRNA sense strand
agaaguaaauucgggaaag

SEQ ID NO: 697252 - RNA, 19 nt, Homo sapiens
  misc_RNA (1)...(19): siRNA sense strand
gcugggaaauccgagacaa

SEQ ID NO: 697253 - RNA, 19 nt, Homo sapiens
  misc_RNA (1)...(19): siRNA sense strand
ccacauccgccacaagauc

SEQ ID NO: 697254 - RNA, 19 nt, Homo sapiens
  misc_RNA (1)...(19): siRNA sense strand
uaaauucgggaaaggugaa

SEQ ID NO: 697255 - RNA, 19 nt, Homo sapiens
  misc_RNA (1)...(19): siRNA sense strand
gcagaggaaagcgagaaga

SEQ ID NO: 697256 - RNA, 19 nt, Homo sapiens
  misc_RNA (1)...(19): siRNA sense strand
caaggacgcggucugugau

SEQ ID NO: 697257 - RNA, 19 nt, Homo sapiens
  misc_RNA (1)...(19): siRNA sense strand
gaaggaggcagaggaaagc

SEQ ID NO: 697258 - RNA, 19 nt, Homo sapiens
  misc_RNA (1)...(19): siRNA sense strand
gacgcggucugugaucgaa

SEQ ID NO: 697259 - RNA, 19 nt, Homo sapiens
  misc_RNA (1)...(19): siRNA sense strand
caacgccugacguggagaa

SEQ ID NO: 697260 - RNA, 19 nt, Homo sapiens
  misc_RNA (1)...(19): siRNA sense strand
aaccacauccgccacaaga

SEQ ID NO: 697261 - RNA, 19 nt, Homo sapiens
  misc_RNA (1)...(19): siRNA sense strand
gccgcauccugagaaguaa

SEQ ID NO: 697262 - RNA, 19 nt, Homo sapiens
  misc_RNA (1)...(19): siRNA sense strand
agccgcauccugagaagua

SEQ ID NO: 697263 - RNA, 19 nt, Homo sapiens
  misc_RNA (1)...(19): siRNA sense strand
ggacgcggucugugaucga

SEQ ID NO: 697264 - RNA, 19 nt, Homo sapiens
  misc_RNA (1)...(19): siRNA sense strand
ccaaccacauccgccacaa

SEQ ID NO: 697265 - RNA, 19 nt, Homo sapiens
  misc_RNA (1)...(19): siRNA sense strand
ggaaauccgagacaaauua

SEQ ID NO: 697266 - RNA, 19 nt, Homo sapiens
  misc_RNA (1)...(19): siRNA sense strand
gaaacaccgugccgucagu

SEQ ID NO: 697267 - RNA, 19 nt, Homo sapiens
  misc_RNA (1)...(19): siRNA sense strand
gaaguaaauucgggaaagg

SEQ ID NO: 697268 - RNA, 19 nt, Homo sapiens
  misc_RNA (1)...(19): siRNA sense strand
gagacaaauuacucaagga

SEQ ID NO: 697269 - RNA, 19 nt, Homo sapiens
  misc_RNA (1)...(19): siRNA sense strand
ggaaggaggcagaggaaag

SEQ ID NO: 697270 - RNA, 19 nt, Homo sapiens
  misc_RNA (1)...(19): siRNA sense strand
gagaagaaggccaaacaca

SEQ ID NO: 697271 - RNA, 19 nt, Homo sapiens
  misc_RNA (1)...(19): siRNA sense strand
ucaaggacgcggucuguga

SEQ ID NO: 697272 - RNA, 19 nt, Homo sapiens
  misc_RNA (1)...(19): siRNA sense strand
gaagaaaauugaggaauac

SEQ ID NO: 697273 - RNA, 19 nt, Homo sapiens
  misc_RNA (1)...(19): siRNA sense strand
cgccugacguggagaagaa

SEQ ID NO: 697274 - RNA, 19 nt, Homo sapiens
  misc_RNA (1)...(19): siRNA sense strand
gcgagaagaaggccaaaca

SEQ ID NO: 697275 - RNA, 19 nt, Homo sapiens
  misc_RNA (1)...(19): siRNA sense strand
gggaaauccgagacaaauu

SEQ ID NO: 697276 - RNA, 19 nt, Homo sapiens
  misc_RNA (1)...(19): siRNA sense strand
gaggaaggaggcagaggaa

SEQ ID NO: 697277 - RNA, 19 nt, Homo sapiens
  misc_RNA (1)...(19): siRNA sense strand
gaaauccgagacaaauuac

SEQ ID NO: 697278 - RNA, 19 nt, Homo sapiens
  misc_RNA (1)...(19): siRNA sense strand
cagaggaaagcgagaagaa

SEQ ID NO: 697279 - RNA, 19 nt, Homo sapiens
  misc_RNA (1)...(19): siRNA sense strand
gagaaguaaauucgggaaa

SEQ ID NO: 697280 - RNA, 19 nt, Homo sapiens
  misc_RNA (1)...(19): siRNA sense strand
agaaguaaauucgggaaag

SEQ ID NO: 697281 - RNA, 19 nt, Homo sapiens
  misc_RNA (1)...(19): siRNA sense strand
gcugggaaauccgagacaa

SEQ ID NO: 697282 - RNA, 19 nt, Homo sapiens
  misc_RNA (1)...(19): siRNA sense strand
ccacauccgccacaagauc

SEQ ID NO: 697283 - RNA, 19 nt, Homo sapiens
  misc_RNA (1)...(19): siRNA sense strand
uaaauucgggaaaggugaa

SEQ ID NO: 697284 - RNA, 19 nt, Homo sapiens
  misc_RNA (1)...(19): siRNA sense strand
gcagaggaaagcgagaaga

SEQ ID NO: 697285 - RNA, 19 nt, Homo sapiens
  misc_RNA (1)...(19): siRNA sense strand
caaggacgcggucugugau

SEQ ID NO: 697286 - RNA, 19 nt, Homo sapiens
  misc_RNA (1)...(19): siRNA sense strand
gaaggaggcagaggaaagc

SEQ ID NO: 697287 - RNA, 19 nt, Homo sapiens
  misc_RNA (1)...(19): siRNA sense strand
gacgcggucugugaucgaa

SEQ ID NO: 697288 - RNA, 19 nt, Homo sapiens
  misc_RNA (1)...(19): siRNA sense strand
caacgccugacguggagaa

SEQ ID NO: 697289 - RNA, 19 nt, Homo sapiens
  misc_RNA (1)...(19): siRNA sense strand
aaccacauccgccacaaga

SEQ ID NO: 697290 - RNA, 19 nt, Homo sapiens
  misc_RNA (1)...(19): siRNA sense strand
gccgcauccugagaaguaa

SEQ ID NO: 697291 - RNA, 19 nt, Homo sapiens
  misc_RNA (1)...(19): siRNA sense strand
agccgcauccugagaagua

SEQ ID NO: 697292 - RNA, 19 nt, Homo sapiens
  misc_RNA (1)...(19): siRNA sense strand
ggacgcggucugugaucga

SEQ ID NO: 697293 - RNA, 19 nt, Homo sapiens
  misc_RNA (1)...(19): siRNA sense strand
ccaaccacauccgccacaa

SEQ ID NO: 697294 - RNA, 19 nt, Homo sapiens
  misc_RNA (1)...(19): siRNA sense strand
ggaaauccgagacaaauua

SEQ ID NO: 697295 - RNA, 19 nt, Homo sapiens
  misc_RNA (1)...(19): siRNA sense strand
gaaacaccgugccgucagu

SEQ ID NO: 697296 - RNA, 19 nt, Homo sapiens
  misc_RNA (1)...(19): siRNA sense strand
gaaguaaauucgggaaagg

SEQ ID NO: 697297 - RNA, 19 nt, Homo sapiens
  misc_RNA (1)...(19): siRNA sense strand
gagacaaauuacucaagga

SEQ ID NO: 697298 - RNA, 19 nt, Homo sapiens
  misc_RNA (1)...(19): siRNA sense strand
ggaaggaggcagaggaaag

SEQ ID NO: 697299 - RNA, 19 nt, Homo sapiens
  misc_RNA (1)...(19): siRNA sense strand
gagaagaaggccaaacaca

SEQ ID NO: 697300 - RNA, 19 nt, Homo sapiens
  misc_RNA (1)...(19): siRNA sense strand
ucaaggacgcggucuguga

SEQ ID NO: 697301 - RNA, 19 nt, Homo sapiens
  misc_RNA (1)...(19): siRNA sense strand
gaagaaaauugaggaauac

SEQ ID NO: 697302 - RNA, 19 nt, Homo sapiens
  misc_RNA (1)...(19): siRNA sense strand
cgccugacguggagaagaa

SEQ ID NO: 697303 - RNA, 19 nt, Homo sapiens
  misc_RNA (1)...(19): siRNA sense strand
gcgagaagaaggccaaaca

SEQ ID NO: 697304 - RNA, 19 nt, Homo sapiens
  misc_RNA (1)...(19): siRNA sense strand
gggaaauccgagacaaauu

SEQ ID NO: 697305 - RNA, 19 nt, Homo sapiens
  misc_RNA (1)...(19): siRNA sense strand
gaggaaggaggcagaggaa

SEQ ID NO: 697306 - RNA, 19 nt, Homo sapiens
  misc_RNA (1)...(19): siRNA sense strand
gaaauccgagacaaauuac

SEQ ID NO: 697307 - RNA, 19 nt, Homo sapiens
  misc_RNA (1)...(19): siRNA sense strand
cagaggaaagcgagaagaa

SEQ ID NO: 697308 - RNA, 19 nt, Homo sapiens
  misc_RNA (1)...(19): siRNA sense strand
gagaaguaaauucgggaaa

SEQ ID NO: 697309 - RNA, 19 nt, Homo sapiens
  misc_RNA (1)...(19): siRNA sense strand
agaaguaaauucgggaaag

SEQ ID NO: 697310 - RNA, 19 nt, Homo sapiens
  misc_RNA (1)...(19): siRNA sense strand
gcugggaaauccgagacaa

SEQ ID NO: 697311 - RNA, 19 nt, Homo sapiens
  misc_RNA (1)...(19): siRNA sense strand
ccacauccgccacaagauc

SEQ ID NO: 697312 - RNA, 19 nt, Homo sapiens
  misc_RNA (1)...(19): siRNA sense strand
uaaauucgggaaaggugaa

SEQ ID NO: 697313 - RNA, 19 nt, Homo sapiens
  misc_RNA (1)...(19): siRNA sense strand
gcagaggaaagcgagaaga

SEQ ID NO: 697314 - RNA, 19 nt, Homo sapiens
  misc_RNA (1)...(19): siRNA sense strand
caaggacgcggucugugau

SEQ ID NO: 697315 - RNA, 19 nt, Homo sapiens
  misc_RNA (1)...(19): siRNA sense strand
gaaggaggcagaggaaagc

SEQ ID NO: 697316 - RNA, 19 nt, Homo sapiens
  misc_RNA (1)...(19): siRNA sense strand
gacgcggucugugaucgaa

SEQ ID NO: 697317 - RNA, 19 nt, Homo sapiens
  misc_RNA (1)...(19): siRNA sense strand
caacgccugacguggagaa

SEQ ID NO: 697318 - RNA, 19 nt, Homo sapiens
  misc_RNA (1)...(19): siRNA sense strand
aaccacauccgccacaaga

SEQ ID NO: 697319 - RNA, 19 nt, Homo sapiens
  misc_RNA (1)...(19): siRNA sense strand
gccgcauccugagaaguaa

SEQ ID NO: 697320 - RNA, 19 nt, Homo sapiens
  misc_RNA (1)...(19): siRNA sense strand
agccgcauccugagaagua

SEQ ID NO: 697321 - RNA, 19 nt, Homo sapiens
  misc_RNA (1)...(19): siRNA sense strand
ggacgcggucugugaucga

SEQ ID NO: 697322 - RNA, 19 nt, Homo sapiens
  misc_RNA (1)...(19): siRNA sense strand
ccaaccacauccgccacaa

SEQ ID NO: 697323 - RNA, 19 nt, Homo sapiens
  misc_RNA (1)...(19): siRNA sense strand
ggaaauccgagacaaauua

SEQ ID NO: 697324 - RNA, 19 nt, Homo sapiens
  misc_RNA (1)...(19): siRNA sense strand
gaaacaccgugccgucagu

SEQ ID NO: 697325 - RNA, 19 nt, Homo sapiens
  misc_RNA (1)...(19): siRNA sense strand
gaaguaaauucgggaaagg

SEQ ID NO: 697326 - RNA, 19 nt, Homo sapiens
  misc_RNA (1)...(19): siRNA sense strand
gagacaaauuacucaagga

SEQ ID NO: 697327 - RNA, 19 nt, Homo sapiens
  misc_RNA (1)...(19): siRNA sense strand
ggaaggaggcagaggaaag

SEQ ID NO: 697328 - RNA, 19 nt, Homo sapiens
  misc_RNA (1)...(19): siRNA sense strand
gagaagaaggccaaacaca

SEQ ID NO: 697329 - RNA, 19 nt, Homo sapiens
  misc_RNA (1)...(19): siRNA sense strand
ucaaggacgcggucuguga

SEQ ID NO: 697330 - RNA, 19 nt, Homo sapiens
  misc_RNA (1)...(19): siRNA sense strand
gaagaaaauugaggaauac

SEQ ID NO: 697331 - RNA, 19 nt, Homo sapiens
  misc_RNA (1)...(19): siRNA sense strand
cgccugacguggagaagaa

SEQ ID NO: 697332 - RNA, 19 nt, Homo sapiens
  misc_RNA (1)...(19): siRNA sense strand
gcgagaagaaggccaaaca

SEQ ID NO: 697333 - RNA, 19 nt, Homo sapiens
  misc_RNA (1)...(19): siRNA sense strand
gggaaauccgagacaaauu

SEQ ID NO: 697334 - RNA, 19 nt, Homo sapiens
  misc_RNA (1)...(19): siRNA sense strand
gaggaaggaggcagaggaa

SEQ ID NO: 697335 - RNA, 19 nt, Homo sapiens
  misc_RNA (1)...(19): siRNA sense strand
gaaauccgagacaaauuac

SEQ ID NO: 697336 - RNA, 19 nt, Homo sapiens
  misc_RNA (1)...(19): siRNA sense strand
cagaggaaagcgagaagaa

SEQ ID NO: 697337 - RNA, 19 nt, Homo sapiens
  misc_RNA (1)...(19): siRNA sense strand
gagaaguaaauucgggaaa

SEQ ID NO: 697338 - RNA, 19 nt, Homo sapiens
  misc_RNA (1)...(19): siRNA sense strand
agaaguaaauucgggaaag

SEQ ID NO: 697339 - RNA, 19 nt, Homo sapiens
  misc_RNA (1)...(19): siRNA sense strand
gcugggaaauccgagacaa

SEQ ID NO: 697340 - RNA, 19 nt, Homo sapiens
  misc_RNA (1)...(19): siRNA sense strand
ccacauccgccacaagauc

SEQ ID NO: 697341 - RNA, 19 nt, Homo sapiens
  misc_RNA (1)...(19): siRNA sense strand
uaaauucgggaaaggugaa

SEQ ID NO: 697342 - RNA, 19 nt, Homo sapiens
  misc_RNA (1)...(19): siRNA sense strand
gcagaggaaagcgagaaga

SEQ ID NO: 697343 - RNA, 19 nt, Homo sapiens
  misc_RNA (1)...(19): siRNA sense strand
caaggacgcggucugugau

SEQ ID NO: 697344 - RNA, 19 nt, Homo sapiens
  misc_RNA (1)...(19): siRNA sense strand
gaaggaggcagaggaaagc

SEQ ID NO: 697345 - RNA, 19 nt, Homo sapiens
  misc_RNA (1)...(19): siRNA sense strand
gacgcggucugugaucgaa

SEQ ID NO: 697346 - RNA, 19 nt, Homo sapiens
  misc_RNA (1)...(19): siRNA sense strand
caacgccugacguggagaa

SEQ ID NO: 697347 - RNA, 19 nt, Homo sapiens
  misc_RNA (1)...(19): siRNA sense strand
aaccacauccgccacaaga

SEQ ID NO: 697348 - RNA, 19 nt, Homo sapiens
  misc_RNA (1)...(19): siRNA sense strand
gccgcauccugagaaguaa

SEQ ID NO: 697349 - RNA, 19 nt, Homo sapiens
  misc_RNA (1)...(19): siRNA sense strand
agccgcauccugagaagua

SEQ ID NO: 697350 - RNA, 19 nt, Homo sapiens
  misc_RNA (1)...(19): siRNA sense strand
ggacgcggucugugaucga

SEQ ID NO: 697351 - RNA, 19 nt, Homo sapiens
  misc_RNA (1)...(19): siRNA sense strand
ccaaccacauccgccacaa

SEQ ID NO: 697352 - RNA, 19 nt, Homo sapiens
  misc_RNA (1)...(19): siRNA sense strand
ggaaauccgagacaaauua

SEQ ID NO: 697353 - RNA, 19 nt, Homo sapiens
  misc_RNA (1)...(19): siRNA sense strand
gaaacaccgugccgucagu

SEQ ID NO: 697354 - RNA, 19 nt, Homo sapiens
  misc_RNA (1)...(19): siRNA sense strand
gaaguaaauucgggaaagg

SEQ ID NO: 697355 - RNA, 19 nt, Homo sapiens
  misc_RNA (1)...(19): siRNA sense strand
gagacaaauuacucaagga

SEQ ID NO: 697356 - RNA, 19 nt, Homo sapiens
  misc_RNA (1)...(19): siRNA sense strand
ggaaggaggcagaggaaag

SEQ ID NO: 697357 - RNA, 19 nt, Homo sapiens
  misc_RNA (1)...(19): siRNA sense strand
gagaagaaggccaaacaca

SEQ ID NO: 697358 - RNA, 19 nt, Homo sapiens
  misc_RNA (1)...(19): siRNA sense strand
ucaaggacgcggucuguga

SEQ ID NO: 697359 - RNA, 19 nt, Homo sapiens
  misc_RNA (1)...(19): siRNA sense strand
gaagaaaauugaggaauac

SEQ ID NO: 697360 - RNA, 19 nt, Homo sapiens
  misc_RNA (1)...(19): siRNA sense strand
cgccugacguggagaagaa

SEQ ID NO: 697361 - RNA, 19 nt, Homo sapiens
  misc_RNA (1)...(19): siRNA sense strand
gcgagaagaaggccaaaca

SEQ ID NO: 697362 - RNA, 19 nt, Homo sapiens
  misc_RNA (1)...(19): siRNA sense strand
gggaaauccgagacaaauu

SEQ ID NO: 697363 - RNA, 19 nt, Homo sapiens
  misc_RNA (1)...(19): siRNA sense strand
gaggaaggaggcagaggaa

SEQ ID NO: 697364 - RNA, 19 nt, Homo sapiens
  misc_RNA (1)...(19): siRNA sense strand
gaaauccgagacaaauuac

SEQ ID NO: 697365 - RNA, 19 nt, Homo sapiens
  misc_RNA (1)...(19): siRNA sense strand
cagaggaaagcgagaagaa

SEQ ID NO: 697366 - RNA, 19 nt, Homo sapiens
  misc_RNA (1)...(19): siRNA sense strand
gagaaguaaauucgggaaa

SEQ ID NO: 697367 - RNA, 19 nt, Homo sapiens
  misc_RNA (1)...(19): siRNA sense strand
agaaguaaauucgggaaag

SEQ ID NO: 697368 - RNA, 19 nt, Homo sapiens
  misc_RNA (1)...(19): siRNA sense strand
gcugggaaauccgagacaa

SEQ ID NO: 697369 - RNA, 19 nt, Homo sapiens
  misc_RNA (1)...(19): siRNA sense strand
ccacauccgccacaagauc

SEQ ID NO: 697370 - RNA, 19 nt, Homo sapiens
  misc_RNA (1)...(19): siRNA sense strand
uaaauucgggaaaggugaa

SEQ ID NO: 697371 - RNA, 19 nt, Homo sapiens
  misc_RNA (1)...(19): siRNA sense strand
gcagaggaaagcgagaaga

SEQ ID NO: 697372 - RNA, 19 nt, Homo sapiens
  misc_RNA (1)...(19): siRNA sense strand
caaggacgcggucugugau

SEQ ID NO: 697373 - RNA, 19 nt, Homo sapiens
  misc_RNA (1)...(19): siRNA sense strand
gaaggaggcagaggaaagc

SEQ ID NO: 697374 - RNA, 19 nt, Homo sapiens
  misc_RNA (1)...(19): siRNA sense strand
gacgcggucugugaucgaa

SEQ ID NO: 697375 - RNA, 19 nt, Homo sapiens
  misc_RNA (1)...(19): siRNA sense strand
caacgccugacguggagaa

SEQ ID NO: 697376 - RNA, 19 nt, Homo sapiens
  misc_RNA (1)...(19): siRNA sense strand
aaccacauccgccacaaga

SEQ ID NO: 697377 - RNA, 19 nt, Homo sapiens
  misc_RNA (1)...(19): siRNA sense strand
gccgcauccugagaaguaa

SEQ ID NO: 697378 - RNA, 19 nt, Homo sapiens
  misc_RNA (1)...(19): siRNA sense strand
agccgcauccugagaagua

SEQ ID NO: 697379 - RNA, 19 nt, Homo sapiens
  misc_RNA (1)...(19): siRNA sense strand
ggacgcggucugugaucga

SEQ ID NO: 697380 - RNA, 19 nt, Homo sapiens
  misc_RNA (1)...(19): siRNA sense strand
ccaaccacauccgccacaa

SEQ ID NO: 697381 - RNA, 19 nt, Homo sapiens
  misc_RNA (1)...(19): siRNA sense strand
gaaauagcauauagugaug

SEQ ID NO: 697382 - RNA, 19 nt, Homo sapiens
  misc_RNA (1)...(19): siRNA sense strand
gcucaaaggaguuguauuu

SEQ ID NO: 697383 - RNA, 19 nt, Homo sapiens
  misc_RNA (1)...(19): siRNA sense strand
ggaguuguauuuaguguga

SEQ ID NO: 697384 - RNA, 19 nt, Homo sapiens
  misc_RNA (1)...(19): siRNA sense strand
caaauucucugcauauauc

SEQ ID NO: 697385 - RNA, 19 nt, Homo sapiens
  misc_RNA (1)...(19): siRNA sense strand
ggagauaccuaacuaaugc

SEQ ID NO: 697386 - RNA, 19 nt, Homo sapiens
  misc_RNA (1)...(19): siRNA sense strand
caaaggaguuguauuuagu

SEQ ID NO: 697387 - RNA, 19 nt, Homo sapiens
  misc_RNA (1)...(19): siRNA sense strand
gaaacuggaugaauaucug

SEQ ID NO: 697388 - RNA, 19 nt, Homo sapiens
  misc_RNA (1)...(19): siRNA sense strand
ugcagaaacuggaugaaua

SEQ ID NO: 697389 - RNA, 19 nt, Homo sapiens
  misc_RNA (1)...(19): siRNA sense strand
ccaaaagacucaccaagua

SEQ ID NO: 697390 - RNA, 19 nt, Homo sapiens
  misc_RNA (1)...(19): siRNA sense strand
ucaaaggaguuguauuuag

SEQ ID NO: 697391 - RNA, 19 nt, Homo sapiens
  misc_RNA (1)...(19): siRNA sense strand
cugcauauaucaagaauuc

SEQ ID NO: 697392 - RNA, 19 nt, Homo sapiens
  misc_RNA (1)...(19): siRNA sense strand
gcagaaacuggaugaauau

SEQ ID NO: 697393 - RNA, 19 nt, Homo sapiens
  misc_RNA (1)...(19): siRNA sense strand
gccaaauucucugcauaua

SEQ ID NO: 697394 - RNA, 19 nt, Homo sapiens
  misc_RNA (1)...(19): siRNA sense strand
acuuaaagcuuucaccaaa

SEQ ID NO: 697395 - RNA, 19 nt, Homo sapiens
  misc_RNA (1)...(19): siRNA sense strand
ugauaaggagguugaaaua

SEQ ID NO: 697396 - RNA, 19 nt, Homo sapiens
  misc_RNA (1)...(19): siRNA sense strand
cccaaguacuuaaagcuuu

SEQ ID NO: 697397 - RNA, 19 nt, Homo sapiens
  misc_RNA (1)...(19): siRNA sense strand
ggauggcaaugaaaugaca

SEQ ID NO: 697398 - RNA, 19 nt, Homo sapiens
  misc_RNA (1)...(19): siRNA sense strand
ugaaggaggaggacaaaga

SEQ ID NO: 697399 - RNA, 19 nt, Homo sapiens
  misc_RNA (1)...(19): siRNA sense strand
uaaggagguugaaauagca

SEQ ID NO: 697400 - RNA, 19 nt, Homo sapiens
  misc_RNA (1)...(19): siRNA sense strand
ccaaguacuuaaagcuuuc

SEQ ID NO: 697401 - RNA, 19 nt, Homo sapiens
  misc_RNA (1)...(19): siRNA sense strand
gggacgaguucaccaauac

SEQ ID NO: 697402 - RNA, 19 nt, Homo sapiens
  misc_RNA (1)...(19): siRNA sense strand
aaacacccagaaucaaaua

SEQ ID NO: 697403 - RNA, 19 nt, Homo sapiens
  misc_RNA (1)...(19): siRNA sense strand
uaacuaaugcauacaguag

SEQ ID NO: 697404 - RNA, 19 nt, Homo sapiens
  misc_RNA (1)...(19): siRNA sense strand
ugacgacuguugaccugaa

SEQ ID NO: 697405 - RNA, 19 nt, Homo sapiens
  misc_RNA (1)...(19): siRNA sense strand
cgucaaggcuggcagugau

SEQ ID NO: 697406 - RNA, 19 nt, Homo sapiens
  misc_RNA (1)...(19): siRNA sense strand
gggacccacccaccauuua

SEQ ID NO: 697407 - RNA, 19 nt, Homo sapiens
  misc_RNA (1)...(19): siRNA sense strand
gccagaggcuaaugaagca

SEQ ID NO: 697408 - RNA, 19 nt, Homo sapiens
  misc_RNA (1)...(19): siRNA sense strand
ccaaauucucugcauauau

SEQ ID NO: 697409 - RNA, 19 nt, Homo sapiens
  misc_RNA (1)...(19): siRNA sense strand
ggacccacccaccauuuau

SEQ ID NO: 697410 - RNA, 19 nt, Homo sapiens
  misc_RNA (1)...(19): siRNA sense strand
gacccacccaccauuuaua

SEQ ID NO: 697411 - RNA, 19 nt, Homo sapiens
  misc_RNA (1)...(19): siRNA sense strand
caaacugcauauugucaag

SEQ ID NO: 697412 - RNA, 19 nt, Homo sapiens
  misc_RNA (1)...(19): siRNA sense strand
gcaaccugcugcccaaacu

SEQ ID NO: 697413 - RNA, 19 nt, Homo sapiens
  misc_RNA (1)...(19): siRNA sense strand
gaaggaggaggacaaagag

SEQ ID NO: 697414 - RNA, 19 nt, Homo sapiens
  misc_RNA (1)...(19): siRNA sense strand
caaaacggauguaaauaag

SEQ ID NO: 697415 - RNA, 19 nt, Homo sapiens
  misc_RNA (1)...(19): siRNA sense strand
cagugauggugaaagcaua

SEQ ID NO: 697416 - RNA, 19 nt, Homo sapiens
  misc_RNA (1)...(19): siRNA sense strand
ucaucgagcucuucgucaa

SEQ ID NO: 697417 - RNA, 19 nt, Homo sapiens
  misc_RNA (1)...(19): siRNA sense strand
caaaacacccagaaucaaa

SEQ ID NO: 697418 - RNA, 19 nt, Homo sapiens
  misc_RNA (1)...(19): siRNA sense strand
gauaaggagguugaaauag

SEQ ID NO: 697419 - RNA, 19 nt, Homo sapiens
  misc_RNA (1)...(19): siRNA sense strand
gacgacuguugaccugaaa

SEQ ID NO: 697420 - RNA, 19 nt, Homo sapiens
  misc_RNA (1)...(19): siRNA sense strand
gagguugaaauagcauaua

SEQ ID NO: 697421 - RNA, 19 nt, Homo sapiens
  misc_RNA (1)...(19): siRNA sense strand
gugauaaggagguugaaau

SEQ ID NO: 697422 - RNA, 19 nt, Homo sapiens
  misc_RNA (1)...(19): siRNA sense strand
guugaaauagcauauagug

SEQ ID NO: 697423 - RNA, 19 nt, Homo sapiens
  misc_RNA (1)...(19): siRNA sense strand
caaaagacucaccaaguaa

SEQ ID NO: 697424 - RNA, 19 nt, Homo sapiens
  misc_RNA (1)...(19): siRNA sense strand
gauugaggaauuucuugaa

SEQ ID NO: 697425 - RNA, 19 nt, Homo sapiens
  misc_RNA (1)...(19): siRNA sense strand
auaaggagguugaaauagc

SEQ ID NO: 697426 - RNA, 19 nt, Homo sapiens
  misc_RNA (1)...(19): siRNA sense strand
gaauucuccucucccugau

SEQ ID NO: 697427 - RNA, 19 nt, Homo sapiens
  misc_RNA (1)...(19): siRNA sense strand
cuggaugaauaucugaauu

SEQ ID NO: 697428 - RNA, 19 nt, Homo sapiens
  misc_RNA (1)...(19): siRNA sense strand
agggacgaguucaccaaua

SEQ ID NO: 697429 - RNA, 19 nt, Homo sapiens
  misc_RNA (1)...(19): siRNA sense strand
auaccuaacuaaugcauac

SEQ ID NO: 697430 - RNA, 19 nt, Homo sapiens
  misc_RNA (1)...(19): siRNA sense strand
cacccaccauuuauaacuu

SEQ ID NO: 697431 - RNA, 19 nt, Homo sapiens
  misc_RNA (1)...(19): siRNA sense strand
ggagguugaaauagcauau

SEQ ID NO: 697432 - RNA, 19 nt, Homo sapiens
  misc_RNA (1)...(19): siRNA sense strand
ccagugauaaggagguuga

SEQ ID NO: 697433 - RNA, 19 nt, Homo sapiens
  misc_RNA (1)...(19): siRNA sense strand
ugcccaaacugcauauugu

SEQ ID NO: 697434 - RNA, 19 nt, Homo sapiens
  misc_RNA (1)...(19): siRNA sense strand
aaucaaauacugcuggaau

SEQ ID NO: 697435 - RNA, 19 nt, Homo sapiens
  misc_RNA (1)...(19): siRNA sense strand
ggugaaagcauaggaaacu

SEQ ID NO: 697436 - RNA, 19 nt, Homo sapiens
  misc_RNA (1)...(19): siRNA sense strand
ggauguaaauaagauugag

SEQ ID NO: 697437 - RNA, 19 nt, Homo sapiens
  misc_RNA (1)...(19): siRNA sense strand
ucuuaugcccucccaagua

SEQ ID NO: 697438 - RNA, 19 nt, Homo sapiens
  misc_RNA (1)...(19): siRNA sense strand
gauaccuaacuaaugcaua

SEQ ID NO: 697439 - RNA, 19 nt, Homo sapiens
  misc_RNA (1)...(19): siRNA sense strand
gauggugaaagcauaggaa

SEQ ID NO: 697440 - RNA, 19 nt, Homo sapiens
  misc_RNA (1)...(19): siRNA sense strand
auauagugauguagccaaa

SEQ ID NO: 697441 - RNA, 19 nt, Homo sapiens
  misc_RNA (1)...(19): siRNA sense strand
cuaacuaaugcauacagua

SEQ ID NO: 697442 - RNA, 19 nt, Homo sapiens
  misc_RNA (1)...(19): siRNA sense strand
gcagugauggugaaagcau

SEQ ID NO: 697443 - RNA, 19 nt, Homo sapiens
  misc_RNA (1)...(19): siRNA sense strand
caaggccagaggcuaauga

SEQ ID NO: 697444 - RNA, 19 nt, Homo sapiens
  misc_RNA (1)...(19): siRNA sense strand
ggacaaagagccccucauc

SEQ ID NO: 697445 - RNA, 19 nt, Homo sapiens
  misc_RNA (1)...(19): siRNA sense strand
ugaaaacccugcagaaacu

SEQ ID NO: 697446 - RNA, 19 nt, Homo sapiens
  misc_RNA (1)...(19): siRNA sense strand
uugccaaauucucugcaua

SEQ ID NO: 697447 - RNA, 19 nt, Homo sapiens
  misc_RNA (1)...(19): siRNA sense strand
caaauacugcuggaaugga

SEQ ID NO: 697448 - RNA, 19 nt, Homo sapiens
  misc_RNA (1)...(19): siRNA sense strand
ccaaacugcauauugucaa

SEQ ID NO: 697449 - RNA, 19 nt, Homo sapiens
  misc_RNA (1)...(19): siRNA sense strand
caauaccugucccagugau

SEQ ID NO: 697450 - RNA, 19 nt, Homo sapiens
  misc_RNA (1)...(19): siRNA sense strand
acccaccauuuauaacuuu

SEQ ID NO: 697451 - RNA, 19 nt, Homo sapiens
  misc_RNA (1)...(19): siRNA sense strand
ugacauuagcugauugcaa

SEQ ID NO: 697452 - RNA, 19 nt, Homo sapiens
  misc_RNA (1)...(19): siRNA sense strand
ggacauaaaguuuucuaca

SEQ ID NO: 697453 - RNA, 19 nt, Homo sapiens
  misc_RNA (1)...(19): siRNA sense strand
cuuaugcccucccaaguac

SEQ ID NO: 697454 - RNA, 19 nt, Homo sapiens
  misc_RNA (1)...(19): siRNA sense strand
cucaaaggaguuguauuua

SEQ ID NO: 697455 - RNA, 19 nt, Homo sapiens
  misc_RNA (1)...(19): siRNA sense strand
ccaauaccugucccaguga

SEQ ID NO: 697456 - RNA, 19 nt, Homo sapiens
  misc_RNA (1)...(19): siRNA sense strand
guagggacgaguucaccaa

SEQ ID NO: 697457 - RNA, 19 nt, Homo sapiens
  misc_RNA (1)...(19): siRNA sense strand
gcugaaggaggaggacaaa

SEQ ID NO: 697458 - RNA, 19 nt, Homo sapiens
  misc_RNA (1)...(19): siRNA sense strand
uauuuagugugacgacugu

SEQ ID NO: 697459 - RNA, 19 nt, Homo sapiens
  misc_RNA (1)...(19): siRNA sense strand
auaggaaacugccccuuuu

SEQ ID NO: 697460 - RNA, 19 nt, Homo sapiens
  misc_RNA (1)...(19): siRNA sense strand
auucuccucucccugauga

SEQ ID NO: 697461 - RNA, 19 nt, Homo sapiens
  misc_RNA (1)...(19): siRNA sense strand
uggagauaccuaacuaaug

SEQ ID NO: 697462 - RNA, 19 nt, Homo sapiens
  misc_RNA (1)...(19): siRNA sense strand
cacccagaaucaaauacug

SEQ ID NO: 697463 - RNA, 19 nt, Homo sapiens
  misc_RNA (1)...(19): siRNA sense strand
gugaaagcauaggaaacug

SEQ ID NO: 697464 - RNA, 19 nt, Homo sapiens
  misc_RNA (1)...(19): siRNA sense strand
aaacuggaugaauaucuga

SEQ ID NO: 697465 - RNA, 19 nt, Homo sapiens
  misc_RNA (1)...(19): siRNA sense strand
auucaaggccagaggcuaa

SEQ ID NO: 697466 - RNA, 19 nt, Homo sapiens
  misc_RNA (1)...(19): siRNA sense strand
ugccaaauucucugcauau

SEQ ID NO: 697467 - RNA, 19 nt, Homo sapiens
  misc_RNA (1)...(19): siRNA sense strand
ccuaacuaaugcauacagu

SEQ ID NO: 697468 - RNA, 19 nt, Homo sapiens
  misc_RNA (1)...(19): siRNA sense strand
ccagugagcagauuuauua

SEQ ID NO: 697469 - RNA, 19 nt, Homo sapiens
  misc_RNA (1)...(19): siRNA sense strand
gugagcagauuuauuauga

SEQ ID NO: 697470 - RNA, 19 nt, Homo sapiens
  misc_RNA (1)...(19): siRNA sense strand
gcuaauaggucucgagauc

SEQ ID NO: 697471 - RNA, 19 nt, Homo sapiens
  misc_RNA (1)...(19): siRNA sense strand
gaagaaguccugcaucgaa

SEQ ID NO: 697472 - RNA, 19 nt, Homo sapiens
  misc_RNA (1)...(19): siRNA sense strand
ggaacaaccuuaaugaaac

SEQ ID NO: 697473 - RNA, 19 nt, Homo sapiens
  misc_RNA (1)...(19): siRNA sense strand
uaaugaaacugacagaaga

SEQ ID NO: 697474 - RNA, 19 nt, Homo sapiens
  misc_RNA (1)...(19): siRNA sense strand
uagaagaacuccagaaagu

SEQ ID NO: 697475 - RNA, 19 nt, Homo sapiens
  misc_RNA (1)...(19): siRNA sense strand
gagaauguccuuuauuguu

SEQ ID NO: 697476 - RNA, 19 nt, Homo sapiens
  misc_RNA (1)...(19): siRNA sense strand
ggagagucauuucaaguug

SEQ ID NO: 697477 - RNA, 19 nt, Homo sapiens
  misc_RNA (1)...(19): siRNA sense strand
uuacaugcaugaaggauuu

SEQ ID NO: 697478 - RNA, 19 nt, Homo sapiens
  misc_RNA (1)...(19): siRNA sense strand
ccacuggaaugaaaucuau

SEQ ID NO: 697479 - RNA, 19 nt, Homo sapiens
  misc_RNA (1)...(19): siRNA sense strand
gcaauuguuuacuguguug

SEQ ID NO: 697480 - RNA, 19 nt, Homo sapiens
  misc_RNA (1)...(19): siRNA sense strand
acaguuggcucacaaauuc

SEQ ID NO: 697481 - RNA, 19 nt, Homo sapiens
  misc_RNA (1)...(19): siRNA sense strand
caguaaggaucauguguuu

SEQ ID NO: 697482 - RNA, 19 nt, Homo sapiens
  misc_RNA (1)...(19): siRNA sense strand
gaacaaccuuaaugaaacu

SEQ ID NO: 697483 - RNA, 19 nt, Homo sapiens
  misc_RNA (1)...(19): siRNA sense strand
gaaacugacagaagacaga

SEQ ID NO: 697484 - RNA, 19 nt, Homo sapiens
  misc_RNA (1)...(19): siRNA sense strand
gcugaaccauccaccauau

SEQ ID NO: 697485 - RNA, 19 nt, Homo sapiens
  misc_RNA (1)...(19): siRNA sense strand
uaauaggucucgagaucuu

SEQ ID NO: 697486 - RNA, 19 nt, Homo sapiens
  misc_RNA (1)...(19): siRNA sense strand
gaucuuggugcaauuguuu

SEQ ID NO: 697487 - RNA, 19 nt, Homo sapiens
  misc_RNA (1)...(19): siRNA sense strand
gcaggagagucauuucaag

SEQ ID NO: 697488 - RNA, 19 nt, Homo sapiens
  misc_RNA (1)...(19): siRNA sense strand
gauuugaccuguacuucau

SEQ ID NO: 697489 - RNA, 19 nt, Homo sapiens
  misc_RNA (1)...(19): siRNA sense strand
uugagaauguccuuuauug

SEQ ID NO: 697490 - RNA, 19 nt, Homo sapiens
  misc_RNA (1)...(19): siRNA sense strand
gaggaacaaccuuaaugaa

SEQ ID NO: 697491 - RNA, 19 nt, Homo sapiens
  misc_RNA (1)...(19): siRNA sense strand
gagagucauuucaaguugu

SEQ ID NO: 697492 - RNA, 19 nt, Homo sapiens
  misc_RNA (1)...(19): siRNA sense strand
gaacaguuggcucacaaau

SEQ ID NO: 697493 - RNA, 19 nt, Homo sapiens
  misc_RNA (1)...(19): siRNA sense strand
aaaagaaguuggcaugaaa

SEQ ID NO: 697494 - RNA, 19 nt, Homo sapiens
  misc_RNA (1)...(19): siRNA sense strand
guccagcgccuaucuuaaa

SEQ ID NO: 697495 - RNA, 19 nt, Homo sapiens
  misc_RNA (1)...(19): siRNA sense strand
gaaguccugcaucgaaauu

SEQ ID NO: 697496 - RNA, 19 nt, Homo sapiens
  misc_RNA (1)...(19): siRNA sense strand
ggcaucauccacucaauuu

SEQ ID NO: 697497 - RNA, 19 nt, Homo sapiens
  misc_RNA (1)...(19): siRNA sense strand
cgaggaacaaccuuaauga

SEQ ID NO: 697498 - RNA, 19 nt, Homo sapiens
  misc_RNA (1)...(19): siRNA sense strand
gacagaagacagagaacaa

SEQ ID NO: 697499 - RNA, 19 nt, Homo sapiens
  misc_RNA (1)...(19): siRNA sense strand
aagaaguccugcaucgaaa

SEQ ID NO: 697500 - RNA, 19 nt, Homo sapiens
  misc_RNA (1)...(19): siRNA sense strand
cugcaccacuggaaugaaa

SEQ ID NO: 697501 - RNA, 19 nt, Homo sapiens
  misc_RNA (1)...(19): siRNA sense strand
guguuggugugaaagauuu

SEQ ID NO: 697502 - RNA, 19 nt, Homo sapiens
  misc_RNA (1)...(19): siRNA sense strand
caguugagaauguccuuua

SEQ ID NO: 697503 - RNA, 19 nt, Homo sapiens
  misc_RNA (1)...(19): siRNA sense strand
aggaacaaccuuaaugaaa

SEQ ID NO: 697504 - RNA, 19 nt, Homo sapiens
  misc_RNA (1)...(19): siRNA sense strand
caaguugucgugagaggaa

SEQ ID NO: 697505 - RNA, 19 nt, Homo sapiens
  misc_RNA (1)...(19): siRNA sense strand
gugcaauuguuuacugugu

SEQ ID NO: 697506 - RNA, 19 nt, Homo sapiens
  misc_RNA (1)...(19): siRNA sense strand
ggauuugaccuguacuuca

SEQ ID NO: 697507 - RNA, 19 nt, Homo sapiens
  misc_RNA (1)...(19): siRNA sense strand
caugaacgauggccucucu

SEQ ID NO: 697508 - RNA, 19 nt, Homo sapiens
  misc_RNA (1)...(19): siRNA sense strand
uaaaagaaguuggcaugaa

SEQ ID NO: 697509 - RNA, 19 nt, Homo sapiens
  misc_RNA (1)...(19): siRNA sense strand
ucagagagggaggcuaaua

SEQ ID NO: 697510 - RNA, 19 nt, Homo sapiens
  misc_RNA (1)...(19): siRNA sense strand
ccuagaagaacuccagaaa

SEQ ID NO: 697511 - RNA, 19 nt, Homo sapiens
  misc_RNA (1)...(19): siRNA sense strand
uuacuguguuggugugaaa

SEQ ID NO: 697512 - RNA, 19 nt, Homo sapiens
  misc_RNA (1)...(19): siRNA sense strand
gaggagacacuuacaugca

SEQ ID NO: 697513 - RNA, 19 nt, Homo sapiens
  misc_RNA (1)...(19): siRNA sense strand
gcaugaaggauuugaaagg

SEQ ID NO: 697514 - RNA, 19 nt, Homo sapiens
  misc_RNA (1)...(19): siRNA sense strand
gcacuccaggucagcauga

SEQ ID NO: 697515 - RNA, 19 nt, Homo sapiens
  misc_RNA (1)...(19): siRNA sense strand
gaagacagagaacaaaucc

SEQ ID NO: 697516 - RNA, 19 nt, Homo sapiens
  misc_RNA (1)...(19): siRNA sense strand
ugaacgauggccucucuuu

SEQ ID NO: 697517 - RNA, 19 nt, Homo sapiens
  misc_RNA (1)...(19): siRNA sense strand
gggccagugagcagauuua

SEQ ID NO: 697518 - RNA, 19 nt, Homo sapiens
  misc_RNA (1)...(19): siRNA sense strand
gauuugaaagggccaguga

SEQ ID NO: 697519 - RNA, 19 nt, Homo sapiens
  misc_RNA (1)...(19): siRNA sense strand
ucuauuacuuuguggaaca

SEQ ID NO: 697520 - RNA, 19 nt, Homo sapiens
  misc_RNA (1)...(19): siRNA sense strand
gaacgauggccucucuuuu

SEQ ID NO: 697521 - RNA, 19 nt, Homo sapiens
  misc_RNA (1)...(19): siRNA sense strand
uggaacaguuggcucacaa

SEQ ID NO: 697522 - RNA, 19 nt, Homo sapiens
  misc_RNA (1)...(19): siRNA sense strand
gaaccauccaccauaugug

SEQ ID NO: 697523 - RNA, 19 nt, Homo sapiens
  misc_RNA (1)...(19): siRNA sense strand
ggacaguaaggaucaugug

SEQ ID NO: 697524 - RNA, 19 nt, Homo sapiens
  misc_RNA (1)...(19): siRNA sense strand
ccagcgucaucauugcuuu

SEQ ID NO: 697525 - RNA, 19 nt, Homo sapiens
  misc_RNA (1)...(19): siRNA sense strand
ggaacaguuggcucacaaa

SEQ ID NO: 697526 - RNA, 19 nt, Homo sapiens
  misc_RNA (1)...(19): siRNA sense strand
guugagaauguccuuuauu

SEQ ID NO: 697527 - RNA, 19 nt, Homo sapiens
  misc_RNA (1)...(19): siRNA sense strand
gcagcuucaagaucaauga

SEQ ID NO: 697528 - RNA, 19 nt, Homo sapiens
  misc_RNA (1)...(19): siRNA sense strand
guaaggaucauguguuucc

SEQ ID NO: 697529 - RNA, 19 nt, Homo sapiens
  misc_RNA (1)...(19): siRNA sense strand
cagaagacagagaacaaau

SEQ ID NO: 697530 - RNA, 19 nt, Homo sapiens
  misc_RNA (1)...(19): siRNA sense strand
gcaaggcaucauccacuca

SEQ ID NO: 697531 - RNA, 19 nt, Homo sapiens
  misc_RNA (1)...(19): siRNA sense strand
uuaaugaaacugacagaag

SEQ ID NO: 697532 - RNA, 19 nt, Homo sapiens
  misc_RNA (1)...(19): siRNA sense strand
guguccagcgccuaucuua

SEQ ID NO: 697533 - RNA, 19 nt, Homo sapiens
  misc_RNA (1)...(19): siRNA sense strand
ggacagccagcgucaucau

SEQ ID NO: 697534 - RNA, 19 nt, Homo sapiens
  misc_RNA (1)...(19): siRNA sense strand
ccgaggaacaaccuuaaug

SEQ ID NO: 697535 - RNA, 19 nt, Homo sapiens
  misc_RNA (1)...(19): siRNA sense strand
ugaaccauccaccauaugu

SEQ ID NO: 697536 - RNA, 19 nt, Homo sapiens
  misc_RNA (1)...(19): siRNA sense strand
cagagagggaggcuaauag

SEQ ID NO: 697537 - RNA, 19 nt, Homo sapiens
  misc_RNA (1)...(19): siRNA sense strand
caaggcaucauccacucaa

SEQ ID NO: 697538 - RNA, 19 nt, Homo sapiens
  misc_RNA (1)...(19): siRNA sense strand
acagaagacagagaacaaa

SEQ ID NO: 697539 - RNA, 19 nt, Homo sapiens
  misc_RNA (1)...(19): siRNA sense strand
uaucuccaguucugucauc

SEQ ID NO: 697540 - RNA, 19 nt, Homo sapiens
  misc_RNA (1)...(19): siRNA sense strand
cauaugugcaggagaguca

SEQ ID NO: 697541 - RNA, 19 nt, Homo sapiens
  misc_RNA (1)...(19): siRNA sense strand
acaguaaggaucauguguu

SEQ ID NO: 697542 - RNA, 19 nt, Homo sapiens
  misc_RNA (1)...(19): siRNA sense strand
gacagccagcgucaucauu

SEQ ID NO: 697543 - RNA, 19 nt, Homo sapiens
  misc_RNA (1)...(19): siRNA sense strand
gagacacuuacaugcauga

SEQ ID NO: 697544 - RNA, 19 nt, Homo sapiens
  misc_RNA (1)...(19): siRNA sense strand
gacaguaaggaucaugugu

SEQ ID NO: 697545 - RNA, 19 nt, Homo sapiens
  misc_RNA (1)...(19): siRNA sense strand
gaaauucuagcagcugaac

SEQ ID NO: 697546 - RNA, 19 nt, Homo sapiens
  misc_RNA (1)...(19): siRNA sense strand
ugagaauguccuuuauugu

SEQ ID NO: 697547 - RNA, 19 nt, Homo sapiens
  misc_RNA (1)...(19): siRNA sense strand
gcaccacuggaaugaaauc

SEQ ID NO: 697548 - RNA, 19 nt, Homo sapiens
  misc_RNA (1)...(19): siRNA sense strand
cggcggauuugaccuguac

SEQ ID NO: 697549 - RNA, 19 nt, Homo sapiens
  misc_RNA (1)...(19): siRNA sense strand
ccacucuggugcucaucug

SEQ ID NO: 697550 - RNA, 19 nt, Homo sapiens
  misc_RNA (1)...(19): siRNA sense strand
uuugaccuguacuucauuu

SEQ ID NO: 697551 - RNA, 19 nt, Homo sapiens
  misc_RNA (1)...(19): siRNA sense strand
auucagagagggaggcuaa

SEQ ID NO: 697552 - RNA, 19 nt, Homo sapiens
  misc_RNA (1)...(19): siRNA sense strand
acagccagcgucaucauug

SEQ ID NO: 697553 - RNA, 19 nt, Homo sapiens
  misc_RNA (1)...(19): siRNA sense strand
cacccgaggaacaaccuua

SEQ ID NO: 697554 - RNA, 19 nt, Homo sapiens
  misc_RNA (1)...(19): siRNA sense strand
gccagugagcagauuuauu

SEQ ID NO: 697555 - RNA, 19 nt, Homo sapiens
  misc_RNA (1)...(19): siRNA sense strand
aggagacacuuacaugcau

SEQ ID NO: 697556 - RNA, 19 nt, Homo sapiens
  misc_RNA (1)...(19): siRNA sense strand
gucaaggccuagaagaacu

SEQ ID NO: 697557 - RNA, 19 nt, Homo sapiens
  misc_RNA (1)...(19): siRNA sense strand
caucagcccacaguugaga

SEQ ID NO: 697558 - RNA, 19 nt, Homo sapiens
  misc_RNA (1)...(19): siRNA sense strand
gauggccucucuuuuaucu

SEQ ID NO: 697559 - RNA, 19 nt, Homo sapiens
  misc_RNA (1)...(19): siRNA sense strand
ucauguguuucccgugaau

SEQ ID NO: 697560 - RNA, 19 nt, Homo sapiens
  misc_RNA (1)...(19): siRNA sense strand
gagagggaggcuaauaggu

SEQ ID NO: 697561 - RNA, 19 nt, Homo sapiens
  misc_RNA (1)...(19): siRNA sense strand
gagaacuccaugaagaucu

SEQ ID NO: 697562 - RNA, 19 nt, Homo sapiens
  misc_RNA (1)...(19): siRNA sense strand
caggacagccagcgucauc

SEQ ID NO: 697563 - RNA, 19 nt, Homo sapiens
  misc_RNA (1)...(19): siRNA sense strand
gugcaggagagucauuuca

SEQ ID NO: 697564 - RNA, 19 nt, Homo sapiens
  misc_RNA (1)...(19): siRNA sense strand
caucaccaccacacacugu

SEQ ID NO: 697565 - RNA, 19 nt, Homo sapiens
  misc_RNA (1)...(19): siRNA sense strand
aacgauggccucucuuuua

SEQ ID NO: 697566 - RNA, 19 nt, Homo sapiens
  misc_RNA (1)...(19): siRNA sense strand
aggagagucauuucaaguu

SEQ ID NO: 697567 - RNA, 19 nt, Homo sapiens
  misc_RNA (1)...(19): siRNA sense strand
caggagagucauuucaagu

SEQ ID NO: 697568 - RNA, 19 nt, Homo sapiens
  misc_RNA (1)...(19): siRNA sense strand
ccagugagcagauuuauua

SEQ ID NO: 697569 - RNA, 19 nt, Homo sapiens
  misc_RNA (1)...(19): siRNA sense strand
gugagcagauuuauuauga

SEQ ID NO: 697570 - RNA, 19 nt, Homo sapiens
  misc_RNA (1)...(19): siRNA sense strand
gcuaauaggucucgagauc

SEQ ID NO: 697571 - RNA, 19 nt, Homo sapiens
  misc_RNA (1)...(19): siRNA sense strand
gaagaaguccugcaucgaa

SEQ ID NO: 697572 - RNA, 19 nt, Homo sapiens
  misc_RNA (1)...(19): siRNA sense strand
ggaacaaccuuaaugaaac

SEQ ID NO: 697573 - RNA, 19 nt, Homo sapiens
  misc_RNA (1)...(19): siRNA sense strand
uaaugaaacugacagaaga

SEQ ID NO: 697574 - RNA, 19 nt, Homo sapiens
  misc_RNA (1)...(19): siRNA sense strand
uagaagaacuccagaaagu

SEQ ID NO: 697575 - RNA, 19 nt, Homo sapiens
  misc_RNA (1)...(19): siRNA sense strand
gagaauguccuuuauuguu

SEQ ID NO: 697576 - RNA, 19 nt, Homo sapiens
  misc_RNA (1)...(19): siRNA sense strand
ggagagucauuucaaguug

SEQ ID NO: 697577 - RNA, 19 nt, Homo sapiens
  misc_RNA (1)...(19): siRNA sense strand
uuacaugcaugaaggauuu

SEQ ID NO: 697578 - RNA, 19 nt, Homo sapiens
  misc_RNA (1)...(19): siRNA sense strand
ccacuggaaugaaaucuau

SEQ ID NO: 697579 - RNA, 19 nt, Homo sapiens
  misc_RNA (1)...(19): siRNA sense strand
gcaauuguuuacuguguug

SEQ ID NO: 697580 - RNA, 19 nt, Homo sapiens
  misc_RNA (1)...(19): siRNA sense strand
acaguuggcucacaaauuc

SEQ ID NO: 697581 - RNA, 19 nt, Homo sapiens
  misc_RNA (1)...(19): siRNA sense strand
caguaaggaucauguguuu

SEQ ID NO: 697582 - RNA, 19 nt, Homo sapiens
  misc_RNA (1)...(19): siRNA sense strand
gaacaaccuuaaugaaacu

SEQ ID NO: 697583 - RNA, 19 nt, Homo sapiens
  misc_RNA (1)...(19): siRNA sense strand
gaaacugacagaagacaga

SEQ ID NO: 697584 - RNA, 19 nt, Homo sapiens
  misc_RNA (1)...(19): siRNA sense strand
gcugaaccauccaccauau

SEQ ID NO: 697585 - RNA, 19 nt, Homo sapiens
  misc_RNA (1)...(19): siRNA sense strand
uaauaggucucgagaucuu

SEQ ID NO: 697586 - RNA, 19 nt, Homo sapiens
  misc_RNA (1)...(19): siRNA sense strand
gaucuuggugcaauuguuu

SEQ ID NO: 697587 - RNA, 19 nt, Homo sapiens
  misc_RNA (1)...(19): siRNA sense strand
gcaggagagucauuucaag

SEQ ID NO: 697588 - RNA, 19 nt, Homo sapiens
  misc_RNA (1)...(19): siRNA sense strand
gauuugaccuguacuucau

SEQ ID NO: 697589 - RNA, 19 nt, Homo sapiens
  misc_RNA (1)...(19): siRNA sense strand
uugagaauguccuuuauug

SEQ ID NO: 697590 - RNA, 19 nt, Homo sapiens
  misc_RNA (1)...(19): siRNA sense strand
gaggaacaaccuuaaugaa

SEQ ID NO: 697591 - RNA, 19 nt, Homo sapiens
  misc_RNA (1)...(19): siRNA sense strand
gagagucauuucaaguugu

SEQ ID NO: 697592 - RNA, 19 nt, Homo sapiens
  misc_RNA (1)...(19): siRNA sense strand
gaacaguuggcucacaaau

SEQ ID NO: 697593 - RNA, 19 nt, Homo sapiens
  misc_RNA (1)...(19): siRNA sense strand
aaaagaaguuggcaugaaa

SEQ ID NO: 697594 - RNA, 19 nt, Homo sapiens
  misc_RNA (1)...(19): siRNA sense strand
guccagcgccuaucuuaaa

SEQ ID NO: 697595 - RNA, 19 nt, Homo sapiens
  misc_RNA (1)...(19): siRNA sense strand
gaaguccugcaucgaaauu

SEQ ID NO: 697596 - RNA, 19 nt, Homo sapiens
  misc_RNA (1)...(19): siRNA sense strand
ggcaucauccacucaauuu

SEQ ID NO: 697597 - RNA, 19 nt, Homo sapiens
  misc_RNA (1)...(19): siRNA sense strand
cgaggaacaaccuuaauga

SEQ ID NO: 697598 - RNA, 19 nt, Homo sapiens
  misc_RNA (1)...(19): siRNA sense strand
gacagaagacagagaacaa

SEQ ID NO: 697599 - RNA, 19 nt, Homo sapiens
  misc_RNA (1)...(19): siRNA sense strand
aagaaguccugcaucgaaa

SEQ ID NO: 697600 - RNA, 19 nt, Homo sapiens
  misc_RNA (1)...(19): siRNA sense strand
cugcaccacuggaaugaaa

SEQ ID NO: 697601 - RNA, 19 nt, Homo sapiens
  misc_RNA (1)...(19): siRNA sense strand
guguuggugugaaagauuu

SEQ ID NO: 697602 - RNA, 19 nt, Homo sapiens
  misc_RNA (1)...(19): siRNA sense strand
caguugagaauguccuuua

SEQ ID NO: 697603 - RNA, 19 nt, Homo sapiens
  misc_RNA (1)...(19): siRNA sense strand
aggaacaaccuuaaugaaa

SEQ ID NO: 697604 - RNA, 19 nt, Homo sapiens
  misc_RNA (1)...(19): siRNA sense strand
caaguugucgugagaggaa

SEQ ID NO: 697605 - RNA, 19 nt, Homo sapiens
  misc_RNA (1)...(19): siRNA sense strand
gugcaauuguuuacugugu

SEQ ID NO: 697606 - RNA, 19 nt, Homo sapiens
  misc_RNA (1)...(19): siRNA sense strand
ggauuugaccuguacuuca

SEQ ID NO: 697607 - RNA, 19 nt, Homo sapiens
  misc_RNA (1)...(19): siRNA sense strand
caugaacgauggccucucu

SEQ ID NO: 697608 - RNA, 19 nt, Homo sapiens
  misc_RNA (1)...(19): siRNA sense strand
uaaaagaaguuggcaugaa

SEQ ID NO: 697609 - RNA, 19 nt, Homo sapiens
  misc_RNA (1)...(19): siRNA sense strand
ucagagagggaggcuaaua

SEQ ID NO: 697610 - RNA, 19 nt, Homo sapiens
  misc_RNA (1)...(19): siRNA sense strand
ccuagaagaacuccagaaa

SEQ ID NO: 697611 - RNA, 19 nt, Homo sapiens
  misc_RNA (1)...(19): siRNA sense strand
uuacuguguuggugugaaa

SEQ ID NO: 697612 - RNA, 19 nt, Homo sapiens
  misc_RNA (1)...(19): siRNA sense strand
gaggagacacuuacaugca

SEQ ID NO: 697613 - RNA, 19 nt, Homo sapiens
  misc_RNA (1)...(19): siRNA sense strand
gcaugaaggauuugaaagg

SEQ ID NO: 697614 - RNA, 19 nt, Homo sapiens
  misc_RNA (1)...(19): siRNA sense strand
gcacuccaggucagcauga

SEQ ID NO: 697615 - RNA, 19 nt, Homo sapiens
  misc_RNA (1)...(19): siRNA sense strand
gaagacagagaacaaaucc

SEQ ID NO: 697616 - RNA, 19 nt, Homo sapiens
  misc_RNA (1)...(19): siRNA sense strand
ugaacgauggccucucuuu

SEQ ID NO: 697617 - RNA, 19 nt, Homo sapiens
  misc_RNA (1)...(19): siRNA sense strand
gggccagugagcagauuua

SEQ ID NO: 697618 - RNA, 19 nt, Homo sapiens
  misc_RNA (1)...(19): siRNA sense strand
gauuugaaagggccaguga

SEQ ID NO: 697619 - RNA, 19 nt, Homo sapiens
  misc_RNA (1)...(19): siRNA sense strand
ucuauuacuuuguggaaca

SEQ ID NO: 697620 - RNA, 19 nt, Homo sapiens
  misc_RNA (1)...(19): siRNA sense strand
gaacgauggccucucuuuu

SEQ ID NO: 697621 - RNA, 19 nt, Homo sapiens
  misc_RNA (1)...(19): siRNA sense strand
uggaacaguuggcucacaa

SEQ ID NO: 697622 - RNA, 19 nt, Homo sapiens
  misc_RNA (1)...(19): siRNA sense strand
gaaccauccaccauaugug

SEQ ID NO: 697623 - RNA, 19 nt, Homo sapiens
  misc_RNA (1)...(19): siRNA sense strand
ggacaguaaggaucaugug

SEQ ID NO: 697624 - RNA, 19 nt, Homo sapiens
  misc_RNA (1)...(19): siRNA sense strand
ccagcgucaucauugcuuu

SEQ ID NO: 697625 - RNA, 19 nt, Homo sapiens
  misc_RNA (1)...(19): siRNA sense strand
ggaacaguuggcucacaaa

SEQ ID NO: 697626 - RNA, 19 nt, Homo sapiens
  misc_RNA (1)...(19): siRNA sense strand
guugagaauguccuuuauu

SEQ ID NO: 697627 - RNA, 19 nt, Homo sapiens
  misc_RNA (1)...(19): siRNA sense strand
gcagcuucaagaucaauga

SEQ ID NO: 697628 - RNA, 19 nt, Homo sapiens
  misc_RNA (1)...(19): siRNA sense strand
guaaggaucauguguuucc

SEQ ID NO: 697629 - RNA, 19 nt, Homo sapiens
  misc_RNA (1)...(19): siRNA sense strand
cagaagacagagaacaaau

SEQ ID NO: 697630 - RNA, 19 nt, Homo sapiens
  misc_RNA (1)...(19): siRNA sense strand
gcaaggcaucauccacuca

SEQ ID NO: 697631 - RNA, 19 nt, Homo sapiens
  misc_RNA (1)...(19): siRNA sense strand
uuaaugaaacugacagaag

SEQ ID NO: 697632 - RNA, 19 nt, Homo sapiens
  misc_RNA (1)...(19): siRNA sense strand
guguccagcgccuaucuua

SEQ ID NO: 697633 - RNA, 19 nt, Homo sapiens
  misc_RNA (1)...(19): siRNA sense strand
ggacagccagcgucaucau

SEQ ID NO: 697634 - RNA, 19 nt, Homo sapiens
  misc_RNA (1)...(19): siRNA sense strand
ccgaggaacaaccuuaaug

SEQ ID NO: 697635 - RNA, 19 nt, Homo sapiens
  misc_RNA (1)...(19): siRNA sense strand
ugaaccauccaccauaugu

SEQ ID NO: 697636 - RNA, 19 nt, Homo sapiens
  misc_RNA (1)...(19): siRNA sense strand
cagagagggaggcuaauag

SEQ ID NO: 697637 - RNA, 19 nt, Homo sapiens
  misc_RNA (1)...(19): siRNA sense strand
caaggcaucauccacucaa

SEQ ID NO: 697638 - RNA, 19 nt, Homo sapiens
  misc_RNA (1)...(19): siRNA sense strand
acagaagacagagaacaaa

SEQ ID NO: 697639 - RNA, 19 nt, Homo sapiens
  misc_RNA (1)...(19): siRNA sense strand
uaucuccaguucugucauc

SEQ ID NO: 697640 - RNA, 19 nt, Homo sapiens
  misc_RNA (1)...(19): siRNA sense strand
cauaugugcaggagaguca

SEQ ID NO: 697641 - RNA, 19 nt, Homo sapiens
  misc_RNA (1)...(19): siRNA sense strand
acaguaaggaucauguguu

SEQ ID NO: 697642 - RNA, 19 nt, Homo sapiens
  misc_RNA (1)...(19): siRNA sense strand
gacagccagcgucaucauu

SEQ ID NO: 697643 - RNA, 19 nt, Homo sapiens
  misc_RNA (1)...(19): siRNA sense strand
gagacacuuacaugcauga

SEQ ID NO: 697644 - RNA, 19 nt, Homo sapiens
  misc_RNA (1)...(19): siRNA sense strand
gacaguaaggaucaugugu

SEQ ID NO: 697645 - RNA, 19 nt, Homo sapiens
  misc_RNA (1)...(19): siRNA sense strand
gaaauucuagcagcugaac

SEQ ID NO: 697646 - RNA, 19 nt, Homo sapiens
  misc_RNA (1)...(19): siRNA sense strand
ugagaauguccuuuauugu

SEQ ID NO: 697647 - RNA, 19 nt, Homo sapiens
  misc_RNA (1)...(19): siRNA sense strand
gcaccacuggaaugaaauc

SEQ ID NO: 697648 - RNA, 19 nt, Homo sapiens
  misc_RNA (1)...(19): siRNA sense strand
cggcggauuugaccuguac

SEQ ID NO: 697649 - RNA, 19 nt, Homo sapiens
  misc_RNA (1)...(19): siRNA sense strand
ccacucuggugcucaucug

SEQ ID NO: 697650 - RNA, 19 nt, Homo sapiens
  misc_RNA (1)...(19): siRNA sense strand
uuugaccuguacuucauuu

SEQ ID NO: 697651 - RNA, 19 nt, Homo sapiens
  misc_RNA (1)...(19): siRNA sense strand
auucagagagggaggcuaa

SEQ ID NO: 697652 - RNA, 19 nt, Homo sapiens
  misc_RNA (1)...(19): siRNA sense strand
acagccagcgucaucauug

SEQ ID NO: 697653 - RNA, 19 nt, Homo sapiens
  misc_RNA (1)...(19): siRNA sense strand
cacccgaggaacaaccuua

SEQ ID NO: 697654 - RNA, 19 nt, Homo sapiens
  misc_RNA (1)...(19): siRNA sense strand
gccagugagcagauuuauu

SEQ ID NO: 697655 - RNA, 19 nt, Homo sapiens
  misc_RNA (1)...(19): siRNA sense strand
aggagacacuuacaugcau

SEQ ID NO: 697656 - RNA, 19 nt, Homo sapiens
  misc_RNA (1)...(19): siRNA sense strand
gucaaggccuagaagaacu

SEQ ID NO: 697657 - RNA, 19 nt, Homo sapiens
  misc_RNA (1)...(19): siRNA sense strand
caucagcccacaguugaga

SEQ ID NO: 697658 - RNA, 19 nt, Homo sapiens
  misc_RNA (1)...(19): siRNA sense strand
gauggccucucuuuuaucu

SEQ ID NO: 697659 - RNA, 19 nt, Homo sapiens
  misc_RNA (1)...(19): siRNA sense strand
ucauguguuucccgugaau

SEQ ID NO: 697660 - RNA, 19 nt, Homo sapiens
  misc_RNA (1)...(19): siRNA sense strand
gagagggaggcuaauaggu

SEQ ID NO: 697661 - RNA, 19 nt, Homo sapiens
  misc_RNA (1)...(19): siRNA sense strand
gagaacuccaugaagaucu

SEQ ID NO: 697662 - RNA, 19 nt, Homo sapiens
  misc_RNA (1)...(19): siRNA sense strand
caggacagccagcgucauc

SEQ ID NO: 697663 - RNA, 19 nt, Homo sapiens
  misc_RNA (1)...(19): siRNA sense strand
gugcaggagagucauuuca

SEQ ID NO: 697664 - RNA, 19 nt, Homo sapiens
  misc_RNA (1)...(19): siRNA sense strand
caucaccaccacacacugu

SEQ ID NO: 697665 - RNA, 19 nt, Homo sapiens
  misc_RNA (1)...(19): siRNA sense strand
aacgauggccucucuuuua

SEQ ID NO: 697666 - RNA, 19 nt, Homo sapiens
  misc_RNA (1)...(19): siRNA sense strand
aggagagucauuucaaguu

SEQ ID NO: 697667 - RNA, 19 nt, Homo sapiens
  misc_RNA (1)...(19): siRNA sense strand
caggagagucauuucaagu

SEQ ID NO: 697668 - RNA, 19 nt, Homo sapiens
  misc_RNA (1)...(19): siRNA sense strand
ccagugagcagauuuauua

SEQ ID NO: 697669 - RNA, 19 nt, Homo sapiens
  misc_RNA (1)...(19): siRNA sense strand
gugagcagauuuauuauga

SEQ ID NO: 697670 - RNA, 19 nt, Homo sapiens
  misc_RNA (1)...(19): siRNA sense strand
gcuaauaggucucgagauc

SEQ ID NO: 697671 - RNA, 19 nt, Homo sapiens
  misc_RNA (1)...(19): siRNA sense strand
gaagaaguccugcaucgaa

SEQ ID NO: 697672 - RNA, 19 nt, Homo sapiens
  misc_RNA (1)...(19): siRNA sense strand
ggaacaaccuuaaugaaac

SEQ ID NO: 697673 - RNA, 19 nt, Homo sapiens
  misc_RNA (1)...(19): siRNA sense strand
uaaugaaacugacagaaga

SEQ ID NO: 697674 - RNA, 19 nt, Homo sapiens
  misc_RNA (1)...(19): siRNA sense strand
uagaagaacuccagaaagu

SEQ ID NO: 697675 - RNA, 19 nt, Homo sapiens
  misc_RNA (1)...(19): siRNA sense strand
gagaauguccuuuauuguu

SEQ ID NO: 697676 - RNA, 19 nt, Homo sapiens
  misc_RNA (1)...(19): siRNA sense strand
ggagagucauuucaaguug

SEQ ID NO: 697677 - RNA, 19 nt, Homo sapiens
  misc_RNA (1)...(19): siRNA sense strand
uuacaugcaugaaggauuu

SEQ ID NO: 697678 - RNA, 19 nt, Homo sapiens
  misc_RNA (1)...(19): siRNA sense strand
ccacuggaaugaaaucuau

SEQ ID NO: 697679 - RNA, 19 nt, Homo sapiens
  misc_RNA (1)...(19): siRNA sense strand
gcaauuguuuacuguguug

SEQ ID NO: 697680 - RNA, 19 nt, Homo sapiens
  misc_RNA (1)...(19): siRNA sense strand
acaguuggcucacaaauuc

SEQ ID NO: 697681 - RNA, 19 nt, Homo sapiens
  misc_RNA (1)...(19): siRNA sense strand
caguaaggaucauguguuu

SEQ ID NO: 697682 - RNA, 19 nt, Homo sapiens
  misc_RNA (1)...(19): siRNA sense strand
gaacaaccuuaaugaaacu

SEQ ID NO: 697683 - RNA, 19 nt, Homo sapiens
  misc_RNA (1)...(19): siRNA sense strand
gaaacugacagaagacaga

SEQ ID NO: 697684 - RNA, 19 nt, Homo sapiens
  misc_RNA (1)...(19): siRNA sense strand
gcugaaccauccaccauau

SEQ ID NO: 697685 - RNA, 19 nt, Homo sapiens
  misc_RNA (1)...(19): siRNA sense strand
uaauaggucucgagaucuu

SEQ ID NO: 697686 - RNA, 19 nt, Homo sapiens
  misc_RNA (1)...(19): siRNA sense strand
gaucuuggugcaauuguuu

SEQ ID NO: 697687 - RNA, 19 nt, Homo sapiens
  misc_RNA (1)...(19): siRNA sense strand
gcaggagagucauuucaag

SEQ ID NO: 697688 - RNA, 19 nt, Homo sapiens
  misc_RNA (1)...(19): siRNA sense strand
gauuugaccuguacuucau

SEQ ID NO: 697689 - RNA, 19 nt, Homo sapiens
  misc_RNA (1)...(19): siRNA sense strand
uugagaauguccuuuauug

SEQ ID NO: 697690 - RNA, 19 nt, Homo sapiens
  misc_RNA (1)...(19): siRNA sense strand
gaggaacaaccuuaaugaa

SEQ ID NO: 697691 - RNA, 19 nt, Homo sapiens
  misc_RNA (1)...(19): siRNA sense strand
gagagucauuucaaguugu

SEQ ID NO: 697692 - RNA, 19 nt, Homo sapiens
  misc_RNA (1)...(19): siRNA sense strand
gaacaguuggcucacaaau

SEQ ID NO: 697693 - RNA, 19 nt, Homo sapiens
  misc_RNA (1)...(19): siRNA sense strand
aaaagaaguuggcaugaaa

SEQ ID NO: 697694 - RNA, 19 nt, Homo sapiens
  misc_RNA (1)...(19): siRNA sense strand
guccagcgccuaucuuaaa

SEQ ID NO: 697695 - RNA, 19 nt, Homo sapiens
  misc_RNA (1)...(19): siRNA sense strand
gaaguccugcaucgaaauu

SEQ ID NO: 697696 - RNA, 19 nt, Homo sapiens
  misc_RNA (1)...(19): siRNA sense strand
ggcaucauccacucaauuu

SEQ ID NO: 697697 - RNA, 19 nt, Homo sapiens
  misc_RNA (1)...(19): siRNA sense strand
cgaggaacaaccuuaauga

SEQ ID NO: 697698 - RNA, 19 nt, Homo sapiens
  misc_RNA (1)...(19): siRNA sense strand
gacagaagacagagaacaa

SEQ ID NO: 697699 - RNA, 19 nt, Homo sapiens
  misc_RNA (1)...(19): siRNA sense strand
aagaaguccugcaucgaaa

SEQ ID NO: 697700 - RNA, 19 nt, Homo sapiens
  misc_RNA (1)...(19): siRNA sense strand
cugcaccacuggaaugaaa

SEQ ID NO: 697701 - RNA, 19 nt, Homo sapiens
  misc_RNA (1)...(19): siRNA sense strand
guguuggugugaaagauuu

SEQ ID NO: 697702 - RNA, 19 nt, Homo sapiens
  misc_RNA (1)...(19): siRNA sense strand
caguugagaauguccuuua

SEQ ID NO: 697703 - RNA, 19 nt, Homo sapiens
  misc_RNA (1)...(19): siRNA sense strand
aggaacaaccuuaaugaaa

SEQ ID NO: 697704 - RNA, 19 nt, Homo sapiens
  misc_RNA (1)...(19): siRNA sense strand
caaguugucgugagaggaa

SEQ ID NO: 697705 - RNA, 19 nt, Homo sapiens
  misc_RNA (1)...(19): siRNA sense strand
gugcaauuguuuacugugu

SEQ ID NO: 697706 - RNA, 19 nt, Homo sapiens
  misc_RNA (1)...(19): siRNA sense strand
ggauuugaccuguacuuca

SEQ ID NO: 697707 - RNA, 19 nt, Homo sapiens
  misc_RNA (1)...(19): siRNA sense strand
caugaacgauggccucucu

SEQ ID NO: 697708 - RNA, 19 nt, Homo sapiens
  misc_RNA (1)...(19): siRNA sense strand
uaaaagaaguuggcaugaa

SEQ ID NO: 697709 - RNA, 19 nt, Homo sapiens
  misc_RNA (1)...(19): siRNA sense strand
ucagagagggaggcuaaua

SEQ ID NO: 697710 - RNA, 19 nt, Homo sapiens
  misc_RNA (1)...(19): siRNA sense strand
ccuagaagaacuccagaaa

SEQ ID NO: 697711 - RNA, 19 nt, Homo sapiens
  misc_RNA (1)...(19): siRNA sense strand
uuacuguguuggugugaaa

SEQ ID NO: 697712 - RNA, 19 nt, Homo sapiens
  misc_RNA (1)...(19): siRNA sense strand
gaggagacacuuacaugca

SEQ ID NO: 697713 - RNA, 19 nt, Homo sapiens
  misc_RNA (1)...(19): siRNA sense strand
gcaugaaggauuugaaagg

SEQ ID NO: 697714 - RNA, 19 nt, Homo sapiens
  misc_RNA (1)...(19): siRNA sense strand
gcacuccaggucagcauga

SEQ ID NO: 697715 - RNA, 19 nt, Homo sapiens
  misc_RNA (1)...(19): siRNA sense strand
gaagacagagaacaaaucc

SEQ ID NO: 697716 - RNA, 19 nt, Homo sapiens
  misc_RNA (1)...(19): siRNA sense strand
ugaacgauggccucucuuu

SEQ ID NO: 697717 - RNA, 19 nt, Homo sapiens
  misc_RNA (1)...(19): siRNA sense strand
gggccagugagcagauuua

SEQ ID NO: 697718 - RNA, 19 nt, Homo sapiens
  misc_RNA (1)...(19): siRNA sense strand
gauuugaaagggccaguga

SEQ ID NO: 697719 - RNA, 19 nt, Homo sapiens
  misc_RNA (1)...(19): siRNA sense strand
ucuauuacuuuguggaaca

SEQ ID NO: 697720 - RNA, 19 nt, Homo sapiens
  misc_RNA (1)...(19): siRNA sense strand
gaacgauggccucucuuuu

SEQ ID NO: 697721 - RNA, 19 nt, Homo sapiens
  misc_RNA (1)...(19): siRNA sense strand
uggaacaguuggcucacaa

SEQ ID NO: 697722 - RNA, 19 nt, Homo sapiens
  misc_RNA (1)...(19): siRNA sense strand
gaaccauccaccauaugug

SEQ ID NO: 697723 - RNA, 19 nt, Homo sapiens
  misc_RNA (1)...(19): siRNA sense strand
ggacaguaaggaucaugug

SEQ ID NO: 697724 - RNA, 19 nt, Homo sapiens
  misc_RNA (1)...(19): siRNA sense strand
ccagcgucaucauugcuuu

SEQ ID NO: 697725 - RNA, 19 nt, Homo sapiens
  misc_RNA (1)...(19): siRNA sense strand
ggaacaguuggcucacaaa

SEQ ID NO: 697726 - RNA, 19 nt, Homo sapiens
  misc_RNA (1)...(19): siRNA sense strand
guugagaauguccuuuauu

SEQ ID NO: 697727 - RNA, 19 nt, Homo sapiens
  misc_RNA (1)...(19): siRNA sense strand
gcagcuucaagaucaauga

SEQ ID NO: 697728 - RNA, 19 nt, Homo sapiens
  misc_RNA (1)...(19): siRNA sense strand
guaaggaucauguguuucc

SEQ ID NO: 697729 - RNA, 19 nt, Homo sapiens
  misc_RNA (1)...(19): siRNA sense strand
cagaagacagagaacaaau

SEQ ID NO: 697730 - RNA, 19 nt, Homo sapiens
  misc_RNA (1)...(19): siRNA sense strand
gcaaggcaucauccacuca

SEQ ID NO: 697731 - RNA, 19 nt, Homo sapiens
  misc_RNA (1)...(19): siRNA sense strand
uuaaugaaacugacagaag

SEQ ID NO: 697732 - RNA, 19 nt, Homo sapiens
  misc_RNA (1)...(19): siRNA sense strand
guguccagcgccuaucuua

SEQ ID NO: 697733 - RNA, 19 nt, Homo sapiens
  misc_RNA (1)...(19): siRNA sense strand
ggacagccagcgucaucau

SEQ ID NO: 697734 - RNA, 19 nt, Homo sapiens
  misc_RNA (1)...(19): siRNA sense strand
ccgaggaacaaccuuaaug

SEQ ID NO: 697735 - RNA, 19 nt, Homo sapiens
  misc_RNA (1)...(19): siRNA sense strand
ugaaccauccaccauaugu

SEQ ID NO: 697736 - RNA, 19 nt, Homo sapiens
  misc_RNA (1)...(19): siRNA sense strand
cagagagggaggcuaauag

SEQ ID NO: 697737 - RNA, 19 nt, Homo sapiens
  misc_RNA (1)...(19): siRNA sense strand
caaggcaucauccacucaa

SEQ ID NO: 697738 - RNA, 19 nt, Homo sapiens
  misc_RNA (1)...(19): siRNA sense strand
acagaagacagagaacaaa

SEQ ID NO: 697739 - RNA, 19 nt, Homo sapiens
  misc_RNA (1)...(19): siRNA sense strand
uaucuccaguucugucauc

SEQ ID NO: 697740 - RNA, 19 nt, Homo sapiens
  misc_RNA (1)...(19): siRNA sense strand
cauaugugcaggagaguca

SEQ ID NO: 697741 - RNA, 19 nt, Homo sapiens
  misc_RNA (1)...(19): siRNA sense strand
acaguaaggaucauguguu

SEQ ID NO: 697742 - RNA, 19 nt, Homo sapiens
  misc_RNA (1)...(19): siRNA sense strand
gacagccagcgucaucauu

SEQ ID NO: 697743 - RNA, 19 nt, Homo sapiens
  misc_RNA (1)...(19): siRNA sense strand
gagacacuuacaugcauga

SEQ ID NO: 697744 - RNA, 19 nt, Homo sapiens
  misc_RNA (1)...(19): siRNA sense strand
gacaguaaggaucaugugu

SEQ ID NO: 697745 - RNA, 19 nt, Homo sapiens
  misc_RNA (1)...(19): siRNA sense strand
gaaauucuagcagcugaac

SEQ ID NO: 697746 - RNA, 19 nt, Homo sapiens
  misc_RNA (1)...(19): siRNA sense strand
ugagaauguccuuuauugu

SEQ ID NO: 697747 - RNA, 19 nt, Homo sapiens
  misc_RNA (1)...(19): siRNA sense strand
gcaccacuggaaugaaauc

SEQ ID NO: 697748 - RNA, 19 nt, Homo sapiens
  misc_RNA (1)...(19): siRNA sense strand
cggcggauuugaccuguac

SEQ ID NO: 697749 - RNA, 19 nt, Homo sapiens
  misc_RNA (1)...(19): siRNA sense strand
ccacucuggugcucaucug

SEQ ID NO: 697750 - RNA, 19 nt, Homo sapiens
  misc_RNA (1)...(19): siRNA sense strand
uuugaccuguacuucauuu

SEQ ID NO: 697751 - RNA, 19 nt, Homo sapiens
  misc_RNA (1)...(19): siRNA sense strand
auucagagagggaggcuaa

SEQ ID NO: 697752 - RNA, 19 nt, Homo sapiens
  misc_RNA (1)...(19): siRNA sense strand
acagccagcgucaucauug

SEQ ID NO: 697753 - RNA, 19 nt, Homo sapiens
  misc_RNA (1)...(19): siRNA sense strand
cacccgaggaacaaccuua

SEQ ID NO: 697754 - RNA, 19 nt, Homo sapiens
  misc_RNA (1)...(19): siRNA sense strand
gccagugagcagauuuauu

SEQ ID NO: 697755 - RNA, 19 nt, Homo sapiens
  misc_RNA (1)...(19): siRNA sense strand
aggagacacuuacaugcau

SEQ ID NO: 697756 - RNA, 19 nt, Homo sapiens
  misc_RNA (1)...(19): siRNA sense strand
gucaaggccuagaagaacu

SEQ ID NO: 697757 - RNA, 19 nt, Homo sapiens
  misc_RNA (1)...(19): siRNA sense strand
caucagcccacaguugaga

SEQ ID NO: 697758 - RNA, 19 nt, Homo sapiens
  misc_RNA (1)...(19): siRNA sense strand
gauggccucucuuuuaucu

SEQ ID NO: 697759 - RNA, 19 nt, Homo sapiens
  misc_RNA (1)...(19): siRNA sense strand
ucauguguuucccgugaau

SEQ ID NO: 697760 - RNA, 19 nt, Homo sapiens
  misc_RNA (1)...(19): siRNA sense strand
gagagggaggcuaauaggu

SEQ ID NO: 697761 - RNA, 19 nt, Homo sapiens
  misc_RNA (1)...(19): siRNA sense strand
gagaacuccaugaagaucu

SEQ ID NO: 697762 - RNA, 19 nt, Homo sapiens
  misc_RNA (1)...(19): siRNA sense strand
caggacagccagcgucauc

SEQ ID NO: 697763 - RNA, 19 nt, Homo sapiens
  misc_RNA (1)...(19): siRNA sense strand
gugcaggagagucauuuca

SEQ ID NO: 697764 - RNA, 19 nt, Homo sapiens
  misc_RNA (1)...(19): siRNA sense strand
caucaccaccacacacugu

SEQ ID NO: 697765 - RNA, 19 nt, Homo sapiens
  misc_RNA (1)...(19): siRNA sense strand
aacgauggccucucuuuua

SEQ ID NO: 697766 - RNA, 19 nt, Homo sapiens
  misc_RNA (1)...(19): siRNA sense strand
aggagagucauuucaaguu

SEQ ID NO: 697767 - RNA, 19 nt, Homo sapiens
  misc_RNA (1)...(19): siRNA sense strand
caggagagucauuucaagu

SEQ ID NO: 697768 - RNA, 19 nt, Homo sapiens
  misc_RNA (1)...(19): siRNA sense strand
gaaaguaucuguuccauca

SEQ ID NO: 697769 - RNA, 19 nt, Homo sapiens
  misc_RNA (1)...(19): siRNA sense strand
gaacaugccugcugauuca

SEQ ID NO: 697770 - RNA, 19 nt, Homo sapiens
  misc_RNA (1)...(19): siRNA sense strand
ugacauaaaugcucagaua

SEQ ID NO: 697771 - RNA, 19 nt, Homo sapiens
  misc_RNA (1)...(19): siRNA sense strand
gcagauaaccgcaagauaa

SEQ ID NO: 697772 - RNA, 19 nt, Homo sapiens
  misc_RNA (1)...(19): siRNA sense strand
gcgcagaucuggaacauga

SEQ ID NO: 697773 - RNA, 19 nt, Homo sapiens
  misc_RNA (1)...(19): siRNA sense strand
gaaggaaacuagaagaaau

SEQ ID NO: 697774 - RNA, 19 nt, Homo sapiens
  misc_RNA (1)...(19): siRNA sense strand
ggaagcagcucgagaagga

SEQ ID NO: 697775 - RNA, 19 nt, Homo sapiens
  misc_RNA (1)...(19): siRNA sense strand
gaacacugcccuuacuuua

SEQ ID NO: 697776 - RNA, 19 nt, Homo sapiens
  misc_RNA (1)...(19): siRNA sense strand
ggaaagaaguuguaagaag

SEQ ID NO: 697777 - RNA, 19 nt, Homo sapiens
  misc_RNA (1)...(19): siRNA sense strand
ggauaaaggugcugauguu

SEQ ID NO: 697778 - RNA, 19 nt, Homo sapiens
  misc_RNA (1)...(19): siRNA sense strand
gagauuaacucuagaacug

SEQ ID NO: 697779 - RNA, 19 nt, Homo sapiens
  misc_RNA (1)...(19): siRNA sense strand
gaagaaggauggaaagaag

SEQ ID NO: 697780 - RNA, 19 nt, Homo sapiens
  misc_RNA (1)...(19): siRNA sense strand
gaacaaagaaggaaacuag

SEQ ID NO: 697781 - RNA, 19 nt, Homo sapiens
  misc_RNA (1)...(19): siRNA sense strand
gaagaacuccuuuaaugaa

SEQ ID NO: 697782 - RNA, 19 nt, Homo sapiens
  misc_RNA (1)...(19): siRNA sense strand
caaauaaaguggcaucuuc

SEQ ID NO: 697783 - RNA, 19 nt, Homo sapiens
  misc_RNA (1)...(19): siRNA sense strand
gaacugaagugguuagucu

SEQ ID NO: 697784 - RNA, 19 nt, Homo sapiens
  misc_RNA (1)...(19): siRNA sense strand
gagcugagauuaacucuag

SEQ ID NO: 697785 - RNA, 19 nt, Homo sapiens
  misc_RNA (1)...(19): siRNA sense strand
aaagauggcucaacuaugu

SEQ ID NO: 697786 - RNA, 19 nt, Homo sapiens
  misc_RNA (1)...(19): siRNA sense strand
gaacuugcggcuuuacuua

SEQ ID NO: 697787 - RNA, 19 nt, Homo sapiens
  misc_RNA (1)...(19): siRNA sense strand
acaggaauguuucugauua

SEQ ID NO: 697788 - RNA, 19 nt, Homo sapiens
  misc_RNA (1)...(19): siRNA sense strand
gaauucagcuucagugcaa

SEQ ID NO: 697789 - RNA, 19 nt, Homo sapiens
  misc_RNA (1)...(19): siRNA sense strand
guaauucucuaucuacuug

SEQ ID NO: 697790 - RNA, 19 nt, Homo sapiens
  misc_RNA (1)...(19): siRNA sense strand
ucaaagaagucaaucaguu

SEQ ID NO: 697791 - RNA, 19 nt, Homo sapiens
  misc_RNA (1)...(19): siRNA sense strand
gaauucagcagguucuuua

SEQ ID NO: 697792 - RNA, 19 nt, Homo sapiens
  misc_RNA (1)...(19): siRNA sense strand
gcaacucaauugauuaaug

SEQ ID NO: 697793 - RNA, 19 nt, Homo sapiens
  misc_RNA (1)...(19): siRNA sense strand
ggaagaggaggcuguaaua

SEQ ID NO: 697794 - RNA, 19 nt, Homo sapiens
  misc_RNA (1)...(19): siRNA sense strand
acuagaagcugcaggaaua

SEQ ID NO: 697795 - RNA, 19 nt, Homo sapiens
  misc_RNA (1)...(19): siRNA sense strand
guaagaaggucaaagaaag

SEQ ID NO: 697796 - RNA, 19 nt, Homo sapiens
  misc_RNA (1)...(19): siRNA sense strand
ggaacucacugauaaagau

SEQ ID NO: 697797 - RNA, 19 nt, Homo sapiens
  misc_RNA (1)...(19): siRNA sense strand
ggaagaacuccuuuaauga

SEQ ID NO: 697798 - RNA, 19 nt, Homo sapiens
  misc_RNA (1)...(19): siRNA sense strand
agauacagcuuuaaccaua

SEQ ID NO: 697799 - RNA, 19 nt, Homo sapiens
  misc_RNA (1)...(19): siRNA sense strand
uggaagaacuccuuuaaug

SEQ ID NO: 697800 - RNA, 19 nt, Homo sapiens
  misc_RNA (1)...(19): siRNA sense strand
gggaggaucuguuguuuca

SEQ ID NO: 697801 - RNA, 19 nt, Homo sapiens
  misc_RNA (1)...(19): siRNA sense strand
caaagaacacuauccagua

SEQ ID NO: 697802 - RNA, 19 nt, Homo sapiens
  misc_RNA (1)...(19): siRNA sense strand
uaaagggcauuacaaauuc

SEQ ID NO: 697803 - RNA, 19 nt, Homo sapiens
  misc_RNA (1)...(19): siRNA sense strand
gacaguagauccagaaaca

SEQ ID NO: 697804 - RNA, 19 nt, Homo sapiens
  misc_RNA (1)...(19): siRNA sense strand
gaaugacuguuccuccuuu

SEQ ID NO: 697805 - RNA, 19 nt, Homo sapiens
  misc_RNA (1)...(19): siRNA sense strand
gacaugggcucugacauaa

SEQ ID NO: 697806 - RNA, 19 nt, Homo sapiens
  misc_RNA (1)...(19): siRNA sense strand
gagaggagcuaguauagag

SEQ ID NO: 697807 - RNA, 19 nt, Homo sapiens
  misc_RNA (1)...(19): siRNA sense strand
guggcagacuuucuaauua

SEQ ID NO: 697808 - RNA, 19 nt, Homo sapiens
  misc_RNA (1)...(19): siRNA sense strand
guagcuagguuacuucuug

SEQ ID NO: 697809 - RNA, 19 nt, Homo sapiens
  misc_RNA (1)...(19): siRNA sense strand
ggauggccauguugaagua

SEQ ID NO: 697810 - RNA, 19 nt, Homo sapiens
  misc_RNA (1)...(19): siRNA sense strand
gaaccacagcuaauaauga

SEQ ID NO: 697811 - RNA, 19 nt, Homo sapiens
  misc_RNA (1)...(19): siRNA sense strand
gagguggagucuuucauuu

SEQ ID NO: 697812 - RNA, 19 nt, Homo sapiens
  misc_RNA (1)...(19): siRNA sense strand
ggaucagcaucuccaaaua

SEQ ID NO: 697813 - RNA, 19 nt, Homo sapiens
  misc_RNA (1)...(19): siRNA sense strand
acaagcaacucaauugauu

SEQ ID NO: 697814 - RNA, 19 nt, Homo sapiens
  misc_RNA (1)...(19): siRNA sense strand
uaaaggugcugauguuaau

SEQ ID NO: 697815 - RNA, 19 nt, Homo sapiens
  misc_RNA (1)...(19): siRNA sense strand
uggaagaggucaaugauga

SEQ ID NO: 697816 - RNA, 19 nt, Homo sapiens
  misc_RNA (1)...(19): siRNA sense strand
ggaauccggugcuaguauu

SEQ ID NO: 697817 - RNA, 19 nt, Homo sapiens
  misc_RNA (1)...(19): siRNA sense strand
gcagaagccuguucagaag

SEQ ID NO: 697818 - RNA, 19 nt, Homo sapiens
  misc_RNA (1)...(19): siRNA sense strand
caucaguucuuguuacauu

SEQ ID NO: 697819 - RNA, 19 nt, Homo sapiens
  misc_RNA (1)...(19): siRNA sense strand
gaaguuagaaugacuguuc

SEQ ID NO: 697820 - RNA, 19 nt, Homo sapiens
  misc_RNA (1)...(19): siRNA sense strand
gaaacagcccuuuggauug

SEQ ID NO: 697821 - RNA, 19 nt, Homo sapiens
  misc_RNA (1)...(19): siRNA sense strand
gcacacauagauauugaua

SEQ ID NO: 697822 - RNA, 19 nt, Homo sapiens
  misc_RNA (1)...(19): siRNA sense strand
gcauuaauacgcauucuaa

SEQ ID NO: 697823 - RNA, 19 nt, Homo sapiens
  misc_RNA (1)...(19): siRNA sense strand
caauuugucuacaucagua

SEQ ID NO: 697824 - RNA, 19 nt, Homo sapiens
  misc_RNA (1)...(19): siRNA sense strand
caaagugcuugucagaauu

SEQ ID NO: 697825 - RNA, 19 nt, Homo sapiens
  misc_RNA (1)...(19): siRNA sense strand
gaucagcaucuccaaauaa

SEQ ID NO: 697826 - RNA, 19 nt, Homo sapiens
  misc_RNA (1)...(19): siRNA sense strand
ccaccaagguugcccauga

SEQ ID NO: 697827 - RNA, 19 nt, Homo sapiens
  misc_RNA (1)...(19): siRNA sense strand
gaugauccacuaccaauuu

SEQ ID NO: 697828 - RNA, 19 nt, Homo sapiens
  misc_RNA (1)...(19): siRNA sense strand
caaagaagucaaucaguuu

SEQ ID NO: 697829 - RNA, 19 nt, Homo sapiens
  misc_RNA (1)...(19): siRNA sense strand
gcaagcaggugcagaugug

SEQ ID NO: 697830 - RNA, 19 nt, Homo sapiens
  misc_RNA (1)...(19): siRNA sense strand
gcaauacagcacuuacaua

SEQ ID NO: 697831 - RNA, 19 nt, Homo sapiens
  misc_RNA (1)...(19): siRNA sense strand
gaagguggugcgcuacuua

SEQ ID NO: 697832 - RNA, 19 nt, Homo sapiens
  misc_RNA (1)...(19): siRNA sense strand
gcacaggaauguuucugau

SEQ ID NO: 697833 - RNA, 19 nt, Homo sapiens
  misc_RNA (1)...(19): siRNA sense strand
aaauagggcuccucgugua

SEQ ID NO: 697834 - RNA, 19 nt, Homo sapiens
  misc_RNA (1)...(19): siRNA sense strand
agaaggacaugaagaaaug

SEQ ID NO: 697835 - RNA, 19 nt, Homo sapiens
  misc_RNA (1)...(19): siRNA sense strand
caaaccaccugccaauguu

SEQ ID NO: 697836 - RNA, 19 nt, Homo sapiens
  misc_RNA (1)...(19): siRNA sense strand
aaagaacacuauccaguau

SEQ ID NO: 697837 - RNA, 19 nt, Homo sapiens
  misc_RNA (1)...(19): siRNA sense strand
auaaggagaugcugaagaa

SEQ ID NO: 697838 - RNA, 19 nt, Homo sapiens
  misc_RNA (1)...(19): siRNA sense strand
cauaaaugcucagauagaa

SEQ ID NO: 697839 - RNA, 19 nt, Homo sapiens
  misc_RNA (1)...(19): siRNA sense strand
ugauguagcagaugucuua

SEQ ID NO: 697840 - RNA, 19 nt, Homo sapiens
  misc_RNA (1)...(19): siRNA sense strand
ccaagucccucagguauug

SEQ ID NO: 697841 - RNA, 19 nt, Homo sapiens
  misc_RNA (1)...(19): siRNA sense strand
agaggaggcuguaauauca

SEQ ID NO: 697842 - RNA, 19 nt, Homo sapiens
  misc_RNA (1)...(19): siRNA sense strand
guacaaacacugcuagaga

SEQ ID NO: 697843 - RNA, 19 nt, Homo sapiens
  misc_RNA (1)...(19): siRNA sense strand
gugcgaaaguuacucauug

SEQ ID NO: 697844 - RNA, 19 nt, Homo sapiens
  misc_RNA (1)...(19): siRNA sense strand
caacagcagucguaagagu

SEQ ID NO: 697845 - RNA, 19 nt, Homo sapiens
  misc_RNA (1)...(19): siRNA sense strand
ggauacagcacuaacauau

SEQ ID NO: 697846 - RNA, 19 nt, Homo sapiens
  misc_RNA (1)...(19): siRNA sense strand
uggcagacuuucuaauuaa

SEQ ID NO: 697847 - RNA, 19 nt, Homo sapiens
  misc_RNA (1)...(19): siRNA sense strand
uaaaggugcucuuggaauc

SEQ ID NO: 697848 - RNA, 19 nt, Homo sapiens
  misc_RNA (1)...(19): siRNA sense strand
gcuguaauaucaaugcuau

SEQ ID NO: 697849 - RNA, 19 nt, Homo sapiens
  misc_RNA (1)...(19): siRNA sense strand
gaauguuucugauuacaca

SEQ ID NO: 697850 - RNA, 19 nt, Homo sapiens
  misc_RNA (1)...(19): siRNA sense strand
acuggaagcuuuacuagaa

SEQ ID NO: 697851 - RNA, 19 nt, Homo sapiens
  misc_RNA (1)...(19): siRNA sense strand
ccagcuaccuucgaccuua

SEQ ID NO: 697852 - RNA, 19 nt, Homo sapiens
  misc_RNA (1)...(19): siRNA sense strand
gaaguuaacaguagcaagu

SEQ ID NO: 697853 - RNA, 19 nt, Homo sapiens
  misc_RNA (1)...(19): siRNA sense strand
ggaagagcaucugcaaugu

SEQ ID NO: 697854 - RNA, 19 nt, Homo sapiens
  misc_RNA (1)...(19): siRNA sense strand
agaagaaacucaagaaacu

SEQ ID NO: 697855 - RNA, 19 nt, Homo sapiens
  misc_RNA (1)...(19): siRNA sense strand
ggucaaugaugaagguuau

SEQ ID NO: 697856 - RNA, 19 nt, Homo sapiens
  misc_RNA (1)...(19): siRNA sense strand
gauggaggcuugcauggau

SEQ ID NO: 697857 - RNA, 19 nt, Homo sapiens
  misc_RNA (1)...(19): siRNA sense strand
uaaagcagauguuaaugca

SEQ ID NO: 697858 - RNA, 19 nt, Homo sapiens
  misc_RNA (1)...(19): siRNA sense strand
gcucauaaagcagauguua

SEQ ID NO: 697859 - RNA, 19 nt, Homo sapiens
  misc_RNA (1)...(19): siRNA sense strand
aaucaaaggugacauuaca

SEQ ID NO: 697860 - RNA, 19 nt, Homo sapiens
  misc_RNA (1)...(19): siRNA sense strand
ggaaucaaaggugacauua

SEQ ID NO: 697861 - RNA, 19 nt, Homo sapiens
  misc_RNA (1)...(19): siRNA sense strand
ccagaaaacguucaaauua

SEQ ID NO: 697862 - RNA, 19 nt, Homo sapiens
  misc_RNA (1)...(19): siRNA sense strand
gaugggaaauccuaugauc

SEQ ID NO: 697863 - RNA, 19 nt, Homo sapiens
  misc_RNA (1)...(19): siRNA sense strand
uuaagaacccagugaauaa

SEQ ID NO: 697864 - RNA, 19 nt, Homo sapiens
  misc_RNA (1)...(19): siRNA sense strand
gaccggauaaucacuauaa

SEQ ID NO: 697865 - RNA, 19 nt, Homo sapiens
  misc_RNA (1)...(19): siRNA sense strand
gaagugucaucuuuguaug

SEQ ID NO: 697866 - RNA, 19 nt, Homo sapiens
  misc_RNA (1)...(19): siRNA sense strand
gcuggaggacccauauuua

SEQ ID NO: 697867 - RNA, 19 nt, Homo sapiens
  misc_RNA (1)...(19): siRNA sense strand
ggaagaaggauggaaagaa

SEQ ID NO: 697868 - RNA, 19 nt, Homo sapiens
  misc_RNA (1)...(19): siRNA sense strand
gaaaguaucuguuccauca

SEQ ID NO: 697869 - RNA, 19 nt, Homo sapiens
  misc_RNA (1)...(19): siRNA sense strand
gaacaugccugcugauuca

SEQ ID NO: 697870 - RNA, 19 nt, Homo sapiens
  misc_RNA (1)...(19): siRNA sense strand
ugacauaaaugcucagaua

SEQ ID NO: 697871 - RNA, 19 nt, Homo sapiens
  misc_RNA (1)...(19): siRNA sense strand
gcagauaaccgcaagauaa

SEQ ID NO: 697872 - RNA, 19 nt, Homo sapiens
  misc_RNA (1)...(19): siRNA sense strand
gcgcagaucuggaacauga

SEQ ID NO: 697873 - RNA, 19 nt, Homo sapiens
  misc_RNA (1)...(19): siRNA sense strand
gaaggaaacuagaagaaau

SEQ ID NO: 697874 - RNA, 19 nt, Homo sapiens
  misc_RNA (1)...(19): siRNA sense strand
ggaagcagcucgagaagga

SEQ ID NO: 697875 - RNA, 19 nt, Homo sapiens
  misc_RNA (1)...(19): siRNA sense strand
gaacacugcccuuacuuua

SEQ ID NO: 697876 - RNA, 19 nt, Homo sapiens
  misc_RNA (1)...(19): siRNA sense strand
ggaaagaaguuguaagaag

SEQ ID NO: 697877 - RNA, 19 nt, Homo sapiens
  misc_RNA (1)...(19): siRNA sense strand
ggauaaaggugcugauguu

SEQ ID NO: 697878 - RNA, 19 nt, Homo sapiens
  misc_RNA (1)...(19): siRNA sense strand
gagauuaacucuagaacug

SEQ ID NO: 697879 - RNA, 19 nt, Homo sapiens
  misc_RNA (1)...(19): siRNA sense strand
gaagaaggauggaaagaag

SEQ ID NO: 697880 - RNA, 19 nt, Homo sapiens
  misc_RNA (1)...(19): siRNA sense strand
gaacaaagaaggaaacuag

SEQ ID NO: 697881 - RNA, 19 nt, Homo sapiens
  misc_RNA (1)...(19): siRNA sense strand
gaagaacuccuuuaaugaa

SEQ ID NO: 697882 - RNA, 19 nt, Homo sapiens
  misc_RNA (1)...(19): siRNA sense strand
caaauaaaguggcaucuuc

SEQ ID NO: 697883 - RNA, 19 nt, Homo sapiens
  misc_RNA (1)...(19): siRNA sense strand
gaacugaagugguuagucu

SEQ ID NO: 697884 - RNA, 19 nt, Homo sapiens
  misc_RNA (1)...(19): siRNA sense strand
gagcugagauuaacucuag

SEQ ID NO: 697885 - RNA, 19 nt, Homo sapiens
  misc_RNA (1)...(19): siRNA sense strand
aaagauggcucaacuaugu

SEQ ID NO: 697886 - RNA, 19 nt, Homo sapiens
  misc_RNA (1)...(19): siRNA sense strand
gaacuugcggcuuuacuua

SEQ ID NO: 697887 - RNA, 19 nt, Homo sapiens
  misc_RNA (1)...(19): siRNA sense strand
acaggaauguuucugauua

SEQ ID NO: 697888 - RNA, 19 nt, Homo sapiens
  misc_RNA (1)...(19): siRNA sense strand
gaauucagcuucagugcaa

SEQ ID NO: 697889 - RNA, 19 nt, Homo sapiens
  misc_RNA (1)...(19): siRNA sense strand
guaauucucuaucuacuug

SEQ ID NO: 697890 - RNA, 19 nt, Homo sapiens
  misc_RNA (1)...(19): siRNA sense strand
ucaaagaagucaaucaguu

SEQ ID NO: 697891 - RNA, 19 nt, Homo sapiens
  misc_RNA (1)...(19): siRNA sense strand
gaauucagcagguucuuua

SEQ ID NO: 697892 - RNA, 19 nt, Homo sapiens
  misc_RNA (1)...(19): siRNA sense strand
gcaacucaauugauuaaug

SEQ ID NO: 697893 - RNA, 19 nt, Homo sapiens
  misc_RNA (1)...(19): siRNA sense strand
ggaagaggaggcuguaaua

SEQ ID NO: 697894 - RNA, 19 nt, Homo sapiens
  misc_RNA (1)...(19): siRNA sense strand
acuagaagcugcaggaaua

SEQ ID NO: 697895 - RNA, 19 nt, Homo sapiens
  misc_RNA (1)...(19): siRNA sense strand
guaagaaggucaaagaaag

SEQ ID NO: 697896 - RNA, 19 nt, Homo sapiens
  misc_RNA (1)...(19): siRNA sense strand
ggaacucacugauaaagau

SEQ ID NO: 697897 - RNA, 19 nt, Homo sapiens
  misc_RNA (1)...(19): siRNA sense strand
ggaagaacuccuuuaauga

SEQ ID NO: 697898 - RNA, 19 nt, Homo sapiens
  misc_RNA (1)...(19): siRNA sense strand
agauacagcuuuaaccaua

SEQ ID NO: 697899 - RNA, 19 nt, Homo sapiens
  misc_RNA (1)...(19): siRNA sense strand
uggaagaacuccuuuaaug

SEQ ID NO: 697900 - RNA, 19 nt, Homo sapiens
  misc_RNA (1)...(19): siRNA sense strand
gggaggaucuguuguuuca

SEQ ID NO: 697901 - RNA, 19 nt, Homo sapiens
  misc_RNA (1)...(19): siRNA sense strand
caaagaacacuauccagua

SEQ ID NO: 697902 - RNA, 19 nt, Homo sapiens
  misc_RNA (1)...(19): siRNA sense strand
uaaagggcauuacaaauuc

SEQ ID NO: 697903 - RNA, 19 nt, Homo sapiens
  misc_RNA (1)...(19): siRNA sense strand
gacaguagauccagaaaca

SEQ ID NO: 697904 - RNA, 19 nt, Homo sapiens
  misc_RNA (1)...(19): siRNA sense strand
gaaugacuguuccuccuuu

SEQ ID NO: 697905 - RNA, 19 nt, Homo sapiens
  misc_RNA (1)...(19): siRNA sense strand
gacaugggcucugacauaa

SEQ ID NO: 697906 - RNA, 19 nt, Homo sapiens
  misc_RNA (1)...(19): siRNA sense strand
gagaggagcuaguauagag

SEQ ID NO: 697907 - RNA, 19 nt, Homo sapiens
  misc_RNA (1)...(19): siRNA sense strand
guggcagacuuucuaauua

SEQ ID NO: 697908 - RNA, 19 nt, Homo sapiens
  misc_RNA (1)...(19): siRNA sense strand
guagcuagguuacuucuug

SEQ ID NO: 697909 - RNA, 19 nt, Homo sapiens
  misc_RNA (1)...(19): siRNA sense strand
ggauggccauguugaagua

SEQ ID NO: 697910 - RNA, 19 nt, Homo sapiens
  misc_RNA (1)...(19): siRNA sense strand
gaaccacagcuaauaauga

SEQ ID NO: 697911 - RNA, 19 nt, Homo sapiens
  misc_RNA (1)...(19): siRNA sense strand
gagguggagucuuucauuu

SEQ ID NO: 697912 - RNA, 19 nt, Homo sapiens
  misc_RNA (1)...(19): siRNA sense strand
ggaucagcaucuccaaaua

SEQ ID NO: 697913 - RNA, 19 nt, Homo sapiens
  misc_RNA (1)...(19): siRNA sense strand
acaagcaacucaauugauu

SEQ ID NO: 697914 - RNA, 19 nt, Homo sapiens
  misc_RNA (1)...(19): siRNA sense strand
uaaaggugcugauguuaau

SEQ ID NO: 697915 - RNA, 19 nt, Homo sapiens
  misc_RNA (1)...(19): siRNA sense strand
uggaagaggucaaugauga

SEQ ID NO: 697916 - RNA, 19 nt, Homo sapiens
  misc_RNA (1)...(19): siRNA sense strand
ggaauccggugcuaguauu

SEQ ID NO: 697917 - RNA, 19 nt, Homo sapiens
  misc_RNA (1)...(19): siRNA sense strand
gcagaagccuguucagaag

SEQ ID NO: 697918 - RNA, 19 nt, Homo sapiens
  misc_RNA (1)...(19): siRNA sense strand
caucaguucuuguuacauu

SEQ ID NO: 697919 - RNA, 19 nt, Homo sapiens
  misc_RNA (1)...(19): siRNA sense strand
gaaguuagaaugacuguuc

SEQ ID NO: 697920 - RNA, 19 nt, Homo sapiens
  misc_RNA (1)...(19): siRNA sense strand
gaaacagcccuuuggauug

SEQ ID NO: 697921 - RNA, 19 nt, Homo sapiens
  misc_RNA (1)...(19): siRNA sense strand
gcacacauagauauugaua

SEQ ID NO: 697922 - RNA, 19 nt, Homo sapiens
  misc_RNA (1)...(19): siRNA sense strand
gcauuaauacgcauucuaa

SEQ ID NO: 697923 - RNA, 19 nt, Homo sapiens
  misc_RNA (1)...(19): siRNA sense strand
caauuugucuacaucagua

SEQ ID NO: 697924 - RNA, 19 nt, Homo sapiens
  misc_RNA (1)...(19): siRNA sense strand
caaagugcuugucagaauu

SEQ ID NO: 697925 - RNA, 19 nt, Homo sapiens
  misc_RNA (1)...(19): siRNA sense strand
gaucagcaucuccaaauaa

SEQ ID NO: 697926 - RNA, 19 nt, Homo sapiens
  misc_RNA (1)...(19): siRNA sense strand
ccaccaagguugcccauga

SEQ ID NO: 697927 - RNA, 19 nt, Homo sapiens
  misc_RNA (1)...(19): siRNA sense strand
gaugauccacuaccaauuu

SEQ ID NO: 697928 - RNA, 19 nt, Homo sapiens
  misc_RNA (1)...(19): siRNA sense strand
caaagaagucaaucaguuu

SEQ ID NO: 697929 - RNA, 19 nt, Homo sapiens
  misc_RNA (1)...(19): siRNA sense strand
gcaagcaggugcagaugug

SEQ ID NO: 697930 - RNA, 19 nt, Homo sapiens
  misc_RNA (1)...(19): siRNA sense strand
gcaauacagcacuuacaua

SEQ ID NO: 697931 - RNA, 19 nt, Homo sapiens
  misc_RNA (1)...(19): siRNA sense strand
gaagguggugcgcuacuua

SEQ ID NO: 697932 - RNA, 19 nt, Homo sapiens
  misc_RNA (1)...(19): siRNA sense strand
gcacaggaauguuucugau

SEQ ID NO: 697933 - RNA, 19 nt, Homo sapiens
  misc_RNA (1)...(19): siRNA sense strand
aaauagggcuccucgugua

SEQ ID NO: 697934 - RNA, 19 nt, Homo sapiens
  misc_RNA (1)...(19): siRNA sense strand
agaaggacaugaagaaaug

SEQ ID NO: 697935 - RNA, 19 nt, Homo sapiens
  misc_RNA (1)...(19): siRNA sense strand
caaaccaccugccaauguu

SEQ ID NO: 697936 - RNA, 19 nt, Homo sapiens
  misc_RNA (1)...(19): siRNA sense strand
aaagaacacuauccaguau

SEQ ID NO: 697937 - RNA, 19 nt, Homo sapiens
  misc_RNA (1)...(19): siRNA sense strand
auaaggagaugcugaagaa

SEQ ID NO: 697938 - RNA, 19 nt, Homo sapiens
  misc_RNA (1)...(19): siRNA sense strand
cauaaaugcucagauagaa

SEQ ID NO: 697939 - RNA, 19 nt, Homo sapiens
  misc_RNA (1)...(19): siRNA sense strand
ugauguagcagaugucuua

SEQ ID NO: 697940 - RNA, 19 nt, Homo sapiens
  misc_RNA (1)...(19): siRNA sense strand
ccaagucccucagguauug

SEQ ID NO: 697941 - RNA, 19 nt, Homo sapiens
  misc_RNA (1)...(19): siRNA sense strand
agaggaggcuguaauauca

SEQ ID NO: 697942 - RNA, 19 nt, Homo sapiens
  misc_RNA (1)...(19): siRNA sense strand
guacaaacacugcuagaga

SEQ ID NO: 697943 - RNA, 19 nt, Homo sapiens
  misc_RNA (1)...(19): siRNA sense strand
gugcgaaaguuacucauug

SEQ ID NO: 697944 - RNA, 19 nt, Homo sapiens
  misc_RNA (1)...(19): siRNA sense strand
caacagcagucguaagagu

SEQ ID NO: 697945 - RNA, 19 nt, Homo sapiens
  misc_RNA (1)...(19): siRNA sense strand
ggauacagcacuaacauau

SEQ ID NO: 697946 - RNA, 19 nt, Homo sapiens
  misc_RNA (1)...(19): siRNA sense strand
uggcagacuuucuaauuaa

SEQ ID NO: 697947 - RNA, 19 nt, Homo sapiens
  misc_RNA (1)...(19): siRNA sense strand
uaaaggugcucuuggaauc

SEQ ID NO: 697948 - RNA, 19 nt, Homo sapiens
  misc_RNA (1)...(19): siRNA sense strand
gcuguaauaucaaugcuau

SEQ ID NO: 697949 - RNA, 19 nt, Homo sapiens
  misc_RNA (1)...(19): siRNA sense strand
gaauguuucugauuacaca

SEQ ID NO: 697950 - RNA, 19 nt, Homo sapiens
  misc_RNA (1)...(19): siRNA sense strand
acuggaagcuuuacuagaa

SEQ ID NO: 697951 - RNA, 19 nt, Homo sapiens
  misc_RNA (1)...(19): siRNA sense strand
ccagcuaccuucgaccuua

SEQ ID NO: 697952 - RNA, 19 nt, Homo sapiens
  misc_RNA (1)...(19): siRNA sense strand
gaaguuaacaguagcaagu

SEQ ID NO: 697953 - RNA, 19 nt, Homo sapiens
  misc_RNA (1)...(19): siRNA sense strand
ggaagagcaucugcaaugu

SEQ ID NO: 697954 - RNA, 19 nt, Homo sapiens
  misc_RNA (1)...(19): siRNA sense strand
agaagaaacucaagaaacu

SEQ ID NO: 697955 - RNA, 19 nt, Homo sapiens
  misc_RNA (1)...(19): siRNA sense strand
ggucaaugaugaagguuau

SEQ ID NO: 697956 - RNA, 19 nt, Homo sapiens
  misc_RNA (1)...(19): siRNA sense strand
gauggaggcuugcauggau

SEQ ID NO: 697957 - RNA, 19 nt, Homo sapiens
  misc_RNA (1)...(19): siRNA sense strand
uaaagcagauguuaaugca

SEQ ID NO: 697958 - RNA, 19 nt, Homo sapiens
  misc_RNA (1)...(19): siRNA sense strand
gcucauaaagcagauguua

SEQ ID NO: 697959 - RNA, 19 nt, Homo sapiens
  misc_RNA (1)...(19): siRNA sense strand
aaucaaaggugacauuaca

SEQ ID NO: 697960 - RNA, 19 nt, Homo sapiens
  misc_RNA (1)...(19): siRNA sense strand
ggaaucaaaggugacauua

SEQ ID NO: 697961 - RNA, 19 nt, Homo sapiens
  misc_RNA (1)...(19): siRNA sense strand
ccagaaaacguucaaauua

SEQ ID NO: 697962 - RNA, 19 nt, Homo sapiens
  misc_RNA (1)...(19): siRNA sense strand
gaugggaaauccuaugauc

SEQ ID NO: 697963 - RNA, 19 nt, Homo sapiens
  misc_RNA (1)...(19): siRNA sense strand
uuaagaacccagugaauaa

SEQ ID NO: 697964 - RNA, 19 nt, Homo sapiens
  misc_RNA (1)...(19): siRNA sense strand
gaccggauaaucacuauaa

SEQ ID NO: 697965 - RNA, 19 nt, Homo sapiens
  misc_RNA (1)...(19): siRNA sense strand
gaagugucaucuuuguaug

SEQ ID NO: 697966 - RNA, 19 nt, Homo sapiens
  misc_RNA (1)...(19): siRNA sense strand
gcuggaggacccauauuua

SEQ ID NO: 697967 - RNA, 19 nt, Homo sapiens
  misc_RNA (1)...(19): siRNA sense strand
ggaagaaggauggaaagaa

SEQ ID NO: 697968 - RNA, 19 nt, Homo sapiens
  misc_RNA (1)...(19): siRNA sense strand
gcaaauaaaccaacacaua

SEQ ID NO: 697969 - RNA, 19 nt, Homo sapiens
  misc_RNA (1)...(19): siRNA sense strand
gaacgagacuucuuucuuc

SEQ ID NO: 697970 - RNA, 19 nt, Homo sapiens
  misc_RNA (1)...(19): siRNA sense strand
gcacagaaguagaaauugu

SEQ ID NO: 697971 - RNA, 19 nt, Homo sapiens
  misc_RNA (1)...(19): siRNA sense strand
gaauauuacuucaguguag

SEQ ID NO: 697972 - RNA, 19 nt, Homo sapiens
  misc_RNA (1)...(19): siRNA sense strand
agacuucucucaacugauu

SEQ ID NO: 697973 - RNA, 19 nt, Homo sapiens
  misc_RNA (1)...(19): siRNA sense strand
caacguaagagagcuaaua

SEQ ID NO: 697974 - RNA, 19 nt, Homo sapiens
  misc_RNA (1)...(19): siRNA sense strand
gaagugagggugguaauau

SEQ ID NO: 697975 - RNA, 19 nt, Homo sapiens
  misc_RNA (1)...(19): siRNA sense strand
gaaaugauacacgaaguug

SEQ ID NO: 697976 - RNA, 19 nt, Homo sapiens
  misc_RNA (1)...(19): siRNA sense strand
cuacaaaccuuaaucucau

SEQ ID NO: 697977 - RNA, 19 nt, Homo sapiens
  misc_RNA (1)...(19): siRNA sense strand
gaucaaccauuucaaacag

SEQ ID NO: 697978 - RNA, 19 nt, Homo sapiens
  misc_RNA (1)...(19): siRNA sense strand
gccaacaccaagugaauua

SEQ ID NO: 697979 - RNA, 19 nt, Homo sapiens
  misc_RNA (1)...(19): siRNA sense strand
caacagacuucucucaacu

SEQ ID NO: 697980 - RNA, 19 nt, Homo sapiens
  misc_RNA (1)...(19): siRNA sense strand
ugaaaggacugaucaacca

SEQ ID NO: 697981 - RNA, 19 nt, Homo sapiens
  misc_RNA (1)...(19): siRNA sense strand
aaagauggaugaacaaggu

SEQ ID NO: 697982 - RNA, 19 nt, Homo sapiens
  misc_RNA (1)...(19): siRNA sense strand
ggaacgagacuucuuucuu

SEQ ID NO: 697983 - RNA, 19 nt, Homo sapiens
  misc_RNA (1)...(19): siRNA sense strand
ggacugaucaaccauuuca

SEQ ID NO: 697984 - RNA, 19 nt, Homo sapiens
  misc_RNA (1)...(19): siRNA sense strand
gaucagagagucaagaaag

SEQ ID NO: 697985 - RNA, 19 nt, Homo sapiens
  misc_RNA (1)...(19): siRNA sense strand
ggauagcacagaaguagaa

SEQ ID NO: 697986 - RNA, 19 nt, Homo sapiens
  misc_RNA (1)...(19): siRNA sense strand
gagaaaugauacacgaagu

SEQ ID NO: 697987 - RNA, 19 nt, Homo sapiens
  misc_RNA (1)...(19): siRNA sense strand
ucaagaacauggugaaagg

SEQ ID NO: 697988 - RNA, 19 nt, Homo sapiens
  misc_RNA (1)...(19): siRNA sense strand
gaaguaacagugacagcaa

SEQ ID NO: 697989 - RNA, 19 nt, Homo sapiens
  misc_RNA (1)...(19): siRNA sense strand
uauccgagguuccuuuaga

SEQ ID NO: 697990 - RNA, 19 nt, Homo sapiens
  misc_RNA (1)...(19): siRNA sense strand
ccacuccacuuagauguug

SEQ ID NO: 697991 - RNA, 19 nt, Homo sapiens
  misc_RNA (1)...(19): siRNA sense strand
gauugauuguccagaguuu

SEQ ID NO: 697992 - RNA, 19 nt, Homo sapiens
  misc_RNA (1)...(19): siRNA sense strand
aaguagaaauuguggauga

SEQ ID NO: 697993 - RNA, 19 nt, Homo sapiens
  misc_RNA (1)...(19): siRNA sense strand
gaaggauagcacagaagua

SEQ ID NO: 697994 - RNA, 19 nt, Homo sapiens
  misc_RNA (1)...(19): siRNA sense strand
gaugacguuuccaguguga

SEQ ID NO: 697995 - RNA, 19 nt, Homo sapiens
  misc_RNA (1)...(19): siRNA sense strand
gaacagcucaagaugucaa

SEQ ID NO: 697996 - RNA, 19 nt, Homo sapiens
  misc_RNA (1)...(19): siRNA sense strand
cggaacagcucaagauguc

SEQ ID NO: 697997 - RNA, 19 nt, Homo sapiens
  misc_RNA (1)...(19): siRNA sense strand
uagcacagaaguagaaauu

SEQ ID NO: 697998 - RNA, 19 nt, Homo sapiens
  misc_RNA (1)...(19): siRNA sense strand
gaugucaaccugaagcaaa

SEQ ID NO: 697999 - RNA, 19 nt, Homo sapiens
  misc_RNA (1)...(19): siRNA sense strand
uagaggcacugaaggauag

SEQ ID NO: 698000 - RNA, 19 nt, Homo sapiens
  misc_RNA (1)...(19): siRNA sense strand
uaacagugacagcaaagaa

SEQ ID NO: 698001 - RNA, 19 nt, Homo sapiens
  misc_RNA (1)...(19): siRNA sense strand
gagcuaauaagcacaagug

SEQ ID NO: 698002 - RNA, 19 nt, Homo sapiens
  misc_RNA (1)...(19): siRNA sense strand
uagaaauuguggaugagaa

SEQ ID NO: 698003 - RNA, 19 nt, Homo sapiens
  misc_RNA (1)...(19): siRNA sense strand
acacauaacaauaggagaa

SEQ ID NO: 698004 - RNA, 19 nt, Homo sapiens
  misc_RNA (1)...(19): siRNA sense strand
aagaugacguuuccagugu

SEQ ID NO: 698005 - RNA, 19 nt, Homo sapiens
  misc_RNA (1)...(19): siRNA sense strand
acagacuucucucaacuga

SEQ ID NO: 698006 - RNA, 19 nt, Homo sapiens
  misc_RNA (1)...(19): siRNA sense strand
gaggcucagucaaguaauc

SEQ ID NO: 698007 - RNA, 19 nt, Homo sapiens
  misc_RNA (1)...(19): siRNA sense strand
ggacgaggcagaggaaauc

SEQ ID NO: 698008 - RNA, 19 nt, Homo sapiens
  misc_RNA (1)...(19): siRNA sense strand
ggguaccacuccacuuaga

SEQ ID NO: 698009 - RNA, 19 nt, Homo sapiens
  misc_RNA (1)...(19): siRNA sense strand
ugaagcaaauaaaccaaca

SEQ ID NO: 698010 - RNA, 19 nt, Homo sapiens
  misc_RNA (1)...(19): siRNA sense strand
ccaacagacuucucucaac

SEQ ID NO: 698011 - RNA, 19 nt, Homo sapiens
  misc_RNA (1)...(19): siRNA sense strand
ucaaccauuucaaacagaa

SEQ ID NO: 698012 - RNA, 19 nt, Homo sapiens
  misc_RNA (1)...(19): siRNA sense strand
ccaagugaauuagugaaca

SEQ ID NO: 698013 - RNA, 19 nt, Homo sapiens
  misc_RNA (1)...(19): siRNA sense strand
guaagagagcuaauaagca

SEQ ID NO: 698014 - RNA, 19 nt, Homo sapiens
  misc_RNA (1)...(19): siRNA sense strand
aaggacugaucaaccauuu

SEQ ID NO: 698015 - RNA, 19 nt, Homo sapiens
  misc_RNA (1)...(19): siRNA sense strand
aaagggaugaucaagauga

SEQ ID NO: 698016 - RNA, 19 nt, Homo sapiens
  misc_RNA (1)...(19): siRNA sense strand
ucaaguaaucaacguaaga

SEQ ID NO: 698017 - RNA, 19 nt, Homo sapiens
  misc_RNA (1)...(19): siRNA sense strand
gcagugugccaccaacaga

SEQ ID NO: 698018 - RNA, 19 nt, Homo sapiens
  misc_RNA (1)...(19): siRNA sense strand
gcucucacuacaaaccuua

SEQ ID NO: 698019 - RNA, 19 nt, Homo sapiens
  misc_RNA (1)...(19): siRNA sense strand
gguguauccuguggaagaa

SEQ ID NO: 698020 - RNA, 19 nt, Homo sapiens
  misc_RNA (1)...(19): siRNA sense strand
cuuuagaggucgaggaaga

SEQ ID NO: 698021 - RNA, 19 nt, Homo sapiens
  misc_RNA (1)...(19): siRNA sense strand
gaaguuggaagcgagauag

SEQ ID NO: 698022 - RNA, 19 nt, Homo sapiens
  misc_RNA (1)...(19): siRNA sense strand
guauuacuaugaugauggu

SEQ ID NO: 698023 - RNA, 19 nt, Homo sapiens
  misc_RNA (1)...(19): siRNA sense strand
ggggaaagauggaugaaca

SEQ ID NO: 698024 - RNA, 19 nt, Homo sapiens
  misc_RNA (1)...(19): siRNA sense strand
uuagaggcacugaaggaua

SEQ ID NO: 698025 - RNA, 19 nt, Homo sapiens
  misc_RNA (1)...(19): siRNA sense strand
guaccacuccacuuagaug

SEQ ID NO: 698026 - RNA, 19 nt, Homo sapiens
  misc_RNA (1)...(19): siRNA sense strand
uaauauccgagguuccuuu

SEQ ID NO: 698027 - RNA, 19 nt, Homo sapiens
  misc_RNA (1)...(19): siRNA sense strand
cgaaguuggaagcgagaua

SEQ ID NO: 698028 - RNA, 19 nt, Homo sapiens
  misc_RNA (1)...(19): siRNA sense strand
cauaacaauaggagaaaug

SEQ ID NO: 698029 - RNA, 19 nt, Homo sapiens
  misc_RNA (1)...(19): siRNA sense strand
cucaagaugucaaccugaa

SEQ ID NO: 698030 - RNA, 19 nt, Homo sapiens
  misc_RNA (1)...(19): siRNA sense strand
gauguuguaagaucagaga

SEQ ID NO: 698031 - RNA, 19 nt, Homo sapiens
  misc_RNA (1)...(19): siRNA sense strand
gaagagaagguugaaaaga

SEQ ID NO: 698032 - RNA, 19 nt, Homo sapiens
  misc_RNA (1)...(19): siRNA sense strand
uucaggcucucacuacaaa

SEQ ID NO: 698033 - RNA, 19 nt, Homo sapiens
  misc_RNA (1)...(19): siRNA sense strand
ggaaagauggaugaacaag

SEQ ID NO: 698034 - RNA, 19 nt, Homo sapiens
  misc_RNA (1)...(19): siRNA sense strand
aaguaacagugacagcaaa

SEQ ID NO: 698035 - RNA, 19 nt, Homo sapiens
  misc_RNA (1)...(19): siRNA sense strand
caacaccaagugaauuagu

SEQ ID NO: 698036 - RNA, 19 nt, Homo sapiens
  misc_RNA (1)...(19): siRNA sense strand
gaguauauuaagcgucaaa

SEQ ID NO: 698037 - RNA, 19 nt, Homo sapiens
  misc_RNA (1)...(19): siRNA sense strand
agaaaugauacacgaaguu

SEQ ID NO: 698038 - RNA, 19 nt, Homo sapiens
  misc_RNA (1)...(19): siRNA sense strand
caagugaauuagugaacac

SEQ ID NO: 698039 - RNA, 19 nt, Homo sapiens
  misc_RNA (1)...(19): siRNA sense strand
uuacuaugaugaugguaca

SEQ ID NO: 698040 - RNA, 19 nt, Homo sapiens
  misc_RNA (1)...(19): siRNA sense strand
caaacagaacuuaauacca

SEQ ID NO: 698041 - RNA, 19 nt, Homo sapiens
  misc_RNA (1)...(19): siRNA sense strand
ccauuucaaacagaacuua

SEQ ID NO: 698042 - RNA, 19 nt, Homo sapiens
  misc_RNA (1)...(19): siRNA sense strand
gaaaggacugaucaaccau

SEQ ID NO: 698043 - RNA, 19 nt, Homo sapiens
  misc_RNA (1)...(19): siRNA sense strand
agaccuggaucccggaaca

SEQ ID NO: 698044 - RNA, 19 nt, Homo sapiens
  misc_RNA (1)...(19): siRNA sense strand
agaaauuguggaugagaaa

SEQ ID NO: 698045 - RNA, 19 nt, Homo sapiens
  misc_RNA (1)...(19): siRNA sense strand
acugaaggauagcacagaa

SEQ ID NO: 698046 - RNA, 19 nt, Homo sapiens
  misc_RNA (1)...(19): siRNA sense strand
caucuuagaggcacugaag

SEQ ID NO: 698047 - RNA, 19 nt, Homo sapiens
  misc_RNA (1)...(19): siRNA sense strand
gggaaagauggaugaacaa

SEQ ID NO: 698048 - RNA, 19 nt, Homo sapiens
  misc_RNA (1)...(19): siRNA sense strand
aauauccgagguuccuuua

SEQ ID NO: 698049 - RNA, 19 nt, Homo sapiens
  misc_RNA (1)...(19): siRNA sense strand
agaagugagggugguaaua

SEQ ID NO: 698050 - RNA, 19 nt, Homo sapiens
  misc_RNA (1)...(19): siRNA sense strand
gagaagugagggugguaau

SEQ ID NO: 698051 - RNA, 19 nt, Homo sapiens
  misc_RNA (1)...(19): siRNA sense strand
guuggaagcgagauagaga

SEQ ID NO: 698052 - RNA, 19 nt, Homo sapiens
  misc_RNA (1)...(19): siRNA sense strand
gaaaaccgggaaacaaaau

SEQ ID NO: 698053 - RNA, 19 nt, Homo sapiens
  misc_RNA (1)...(19): siRNA sense strand
guagaaauuguggaugaga

SEQ ID NO: 698054 - RNA, 19 nt, Homo sapiens
  misc_RNA (1)...(19): siRNA sense strand
ccucagccaaggaaauaaa

SEQ ID NO: 698055 - RNA, 19 nt, Homo sapiens
  misc_RNA (1)...(19): siRNA sense strand
accuuaaucucaucuuaga

SEQ ID NO: 698056 - RNA, 19 nt, Homo sapiens
  misc_RNA (1)...(19): siRNA sense strand
aacguaagagagcuaauaa

SEQ ID NO: 698057 - RNA, 19 nt, Homo sapiens
  misc_RNA (1)...(19): siRNA sense strand
uuaaaugguccuggugaaa

SEQ ID NO: 698058 - RNA, 19 nt, Homo sapiens
  misc_RNA (1)...(19): siRNA sense strand
aaccaacacauaacaauag

SEQ ID NO: 698059 - RNA, 19 nt, Homo sapiens
  misc_RNA (1)...(19): siRNA sense strand
ggccaacaccaagugaauu

SEQ ID NO: 698060 - RNA, 19 nt, Homo sapiens
  misc_RNA (1)...(19): siRNA sense strand
ugaaggauagcacagaagu

SEQ ID NO: 698061 - RNA, 19 nt, Homo sapiens
  misc_RNA (1)...(19): siRNA sense strand
acuacaaaccuuaaucuca

SEQ ID NO: 698062 - RNA, 19 nt, Homo sapiens
  misc_RNA (1)...(19): siRNA sense strand
aaugauacacgaaguugga

SEQ ID NO: 698063 - RNA, 19 nt, Homo sapiens
  misc_RNA (1)...(19): siRNA sense strand
cguaagagagcuaauaagc

SEQ ID NO: 698064 - RNA, 19 nt, Homo sapiens
  misc_RNA (1)...(19): siRNA sense strand
ucacuacaaaccuuaaucu

SEQ ID NO: 698065 - RNA, 19 nt, Homo sapiens
  misc_RNA (1)...(19): siRNA sense strand
gaugaucaagaugacguuu

SEQ ID NO: 698066 - RNA, 19 nt, Homo sapiens
  misc_RNA (1)...(19): siRNA sense strand
agaaguagaaauuguggau

SEQ ID NO: 698067 - RNA, 19 nt, Homo sapiens
  misc_RNA (1)...(19): siRNA sense strand
gauagcacagaaguagaaa

SEQ ID NO: 698068 - RNA, 19 nt, Homo sapiens
  misc_RNA (1)...(19): siRNA sense strand
gcaaauaaaccaacacaua

SEQ ID NO: 698069 - RNA, 19 nt, Homo sapiens
  misc_RNA (1)...(19): siRNA sense strand
gaacgagacuucuuucuuc

SEQ ID NO: 698070 - RNA, 19 nt, Homo sapiens
  misc_RNA (1)...(19): siRNA sense strand
gcacagaaguagaaauugu

SEQ ID NO: 698071 - RNA, 19 nt, Homo sapiens
  misc_RNA (1)...(19): siRNA sense strand
gaauauuacuucaguguag

SEQ ID NO: 698072 - RNA, 19 nt, Homo sapiens
  misc_RNA (1)...(19): siRNA sense strand
agacuucucucaacugauu

SEQ ID NO: 698073 - RNA, 19 nt, Homo sapiens
  misc_RNA (1)...(19): siRNA sense strand
caacguaagagagcuaaua

SEQ ID NO: 698074 - RNA, 19 nt, Homo sapiens
  misc_RNA (1)...(19): siRNA sense strand
gaagugagggugguaauau

SEQ ID NO: 698075 - RNA, 19 nt, Homo sapiens
  misc_RNA (1)...(19): siRNA sense strand
gaaaugauacacgaaguug

SEQ ID NO: 698076 - RNA, 19 nt, Homo sapiens
  misc_RNA (1)...(19): siRNA sense strand
cuacaaaccuuaaucucau

SEQ ID NO: 698077 - RNA, 19 nt, Homo sapiens
  misc_RNA (1)...(19): siRNA sense strand
gaucaaccauuucaaacag

SEQ ID NO: 698078 - RNA, 19 nt, Homo sapiens
  misc_RNA (1)...(19): siRNA sense strand
gccaacaccaagugaauua

SEQ ID NO: 698079 - RNA, 19 nt, Homo sapiens
  misc_RNA (1)...(19): siRNA sense strand
caacagacuucucucaacu

SEQ ID NO: 698080 - RNA, 19 nt, Homo sapiens
  misc_RNA (1)...(19): siRNA sense strand
ugaaaggacugaucaacca

SEQ ID NO: 698081 - RNA, 19 nt, Homo sapiens
  misc_RNA (1)...(19): siRNA sense strand
aaagauggaugaacaaggu

SEQ ID NO: 698082 - RNA, 19 nt, Homo sapiens
  misc_RNA (1)...(19): siRNA sense strand
ggaacgagacuucuuucuu

SEQ ID NO: 698083 - RNA, 19 nt, Homo sapiens
  misc_RNA (1)...(19): siRNA sense strand
ggacugaucaaccauuuca

SEQ ID NO: 698084 - RNA, 19 nt, Homo sapiens
  misc_RNA (1)...(19): siRNA sense strand
gaucagagagucaagaaag

SEQ ID NO: 698085 - RNA, 19 nt, Homo sapiens
  misc_RNA (1)...(19): siRNA sense strand
ggauagcacagaaguagaa

SEQ ID NO: 698086 - RNA, 19 nt, Homo sapiens
  misc_RNA (1)...(19): siRNA sense strand
gagaaaugauacacgaagu

SEQ ID NO: 698087 - RNA, 19 nt, Homo sapiens
  misc_RNA (1)...(19): siRNA sense strand
ucaagaacauggugaaagg

SEQ ID NO: 698088 - RNA, 19 nt, Homo sapiens
  misc_RNA (1)...(19): siRNA sense strand
gaaguaacagugacagcaa

SEQ ID NO: 698089 - RNA, 19 nt, Homo sapiens
  misc_RNA (1)...(19): siRNA sense strand
uauccgagguuccuuuaga

SEQ ID NO: 698090 - RNA, 19 nt, Homo sapiens
  misc_RNA (1)...(19): siRNA sense strand
ccacuccacuuagauguug

SEQ ID NO: 698091 - RNA, 19 nt, Homo sapiens
  misc_RNA (1)...(19): siRNA sense strand
gauugauuguccagaguuu

SEQ ID NO: 698092 - RNA, 19 nt, Homo sapiens
  misc_RNA (1)...(19): siRNA sense strand
aaguagaaauuguggauga

SEQ ID NO: 698093 - RNA, 19 nt, Homo sapiens
  misc_RNA (1)...(19): siRNA sense strand
gaaggauagcacagaagua

SEQ ID NO: 698094 - RNA, 19 nt, Homo sapiens
  misc_RNA (1)...(19): siRNA sense strand
gaugacguuuccaguguga

SEQ ID NO: 698095 - RNA, 19 nt, Homo sapiens
  misc_RNA (1)...(19): siRNA sense strand
gaacagcucaagaugucaa

SEQ ID NO: 698096 - RNA, 19 nt, Homo sapiens
  misc_RNA (1)...(19): siRNA sense strand
cggaacagcucaagauguc

SEQ ID NO: 698097 - RNA, 19 nt, Homo sapiens
  misc_RNA (1)...(19): siRNA sense strand
uagcacagaaguagaaauu

SEQ ID NO: 698098 - RNA, 19 nt, Homo sapiens
  misc_RNA (1)...(19): siRNA sense strand
gaugucaaccugaagcaaa

SEQ ID NO: 698099 - RNA, 19 nt, Homo sapiens
  misc_RNA (1)...(19): siRNA sense strand
uagaggcacugaaggauag

SEQ ID NO: 698100 - RNA, 19 nt, Homo sapiens
  misc_RNA (1)...(19): siRNA sense strand
uaacagugacagcaaagaa

SEQ ID NO: 698101 - RNA, 19 nt, Homo sapiens
  misc_RNA (1)...(19): siRNA sense strand
gagcuaauaagcacaagug

SEQ ID NO: 698102 - RNA, 19 nt, Homo sapiens
  misc_RNA (1)...(19): siRNA sense strand
uagaaauuguggaugagaa

SEQ ID NO: 698103 - RNA, 19 nt, Homo sapiens
  misc_RNA (1)...(19): siRNA sense strand
acacauaacaauaggagaa

SEQ ID NO: 698104 - RNA, 19 nt, Homo sapiens
  misc_RNA (1)...(19): siRNA sense strand
aagaugacguuuccagugu

SEQ ID NO: 698105 - RNA, 19 nt, Homo sapiens
  misc_RNA (1)...(19): siRNA sense strand
acagacuucucucaacuga

SEQ ID NO: 698106 - RNA, 19 nt, Homo sapiens
  misc_RNA (1)...(19): siRNA sense strand
gaggcucagucaaguaauc

SEQ ID NO: 698107 - RNA, 19 nt, Homo sapiens
  misc_RNA (1)...(19): siRNA sense strand
ggacgaggcagaggaaauc

SEQ ID NO: 698108 - RNA, 19 nt, Homo sapiens
  misc_RNA (1)...(19): siRNA sense strand
ggguaccacuccacuuaga

SEQ ID NO: 698109 - RNA, 19 nt, Homo sapiens
  misc_RNA (1)...(19): siRNA sense strand
ugaagcaaauaaaccaaca

SEQ ID NO: 698110 - RNA, 19 nt, Homo sapiens
  misc_RNA (1)...(19): siRNA sense strand
ccaacagacuucucucaac

SEQ ID NO: 698111 - RNA, 19 nt, Homo sapiens
  misc_RNA (1)...(19): siRNA sense strand
ucaaccauuucaaacagaa

SEQ ID NO: 698112 - RNA, 19 nt, Homo sapiens
  misc_RNA (1)...(19): siRNA sense strand
ccaagugaauuagugaaca

SEQ ID NO: 698113 - RNA, 19 nt, Homo sapiens
  misc_RNA (1)...(19): siRNA sense strand
guaagagagcuaauaagca

SEQ ID NO: 698114 - RNA, 19 nt, Homo sapiens
  misc_RNA (1)...(19): siRNA sense strand
aaggacugaucaaccauuu

SEQ ID NO: 698115 - RNA, 19 nt, Homo sapiens
  misc_RNA (1)...(19): siRNA sense strand
aaagggaugaucaagauga

SEQ ID NO: 698116 - RNA, 19 nt, Homo sapiens
  misc_RNA (1)...(19): siRNA sense strand
ucaaguaaucaacguaaga

SEQ ID NO: 698117 - RNA, 19 nt, Homo sapiens
  misc_RNA (1)...(19): siRNA sense strand
gcagugugccaccaacaga

SEQ ID NO: 698118 - RNA, 19 nt, Homo sapiens
  misc_RNA (1)...(19): siRNA sense strand
gcucucacuacaaaccuua

SEQ ID NO: 698119 - RNA, 19 nt, Homo sapiens
  misc_RNA (1)...(19): siRNA sense strand
gguguauccuguggaagaa

SEQ ID NO: 698120 - RNA, 19 nt, Homo sapiens
  misc_RNA (1)...(19): siRNA sense strand
cuuuagaggucgaggaaga

SEQ ID NO: 698121 - RNA, 19 nt, Homo sapiens
  misc_RNA (1)...(19): siRNA sense strand
gaaguuggaagcgagauag

SEQ ID NO: 698122 - RNA, 19 nt, Homo sapiens
  misc_RNA (1)...(19): siRNA sense strand
guauuacuaugaugauggu

SEQ ID NO: 698123 - RNA, 19 nt, Homo sapiens
  misc_RNA (1)...(19): siRNA sense strand
ggggaaagauggaugaaca

SEQ ID NO: 698124 - RNA, 19 nt, Homo sapiens
  misc_RNA (1)...(19): siRNA sense strand
uuagaggcacugaaggaua

SEQ ID NO: 698125 - RNA, 19 nt, Homo sapiens
  misc_RNA (1)...(19): siRNA sense strand
guaccacuccacuuagaug

SEQ ID NO: 698126 - RNA, 19 nt, Homo sapiens
  misc_RNA (1)...(19): siRNA sense strand
uaauauccgagguuccuuu

SEQ ID NO: 698127 - RNA, 19 nt, Homo sapiens
  misc_RNA (1)...(19): siRNA sense strand
cgaaguuggaagcgagaua

SEQ ID NO: 698128 - RNA, 19 nt, Homo sapiens
  misc_RNA (1)...(19): siRNA sense strand
cauaacaauaggagaaaug

SEQ ID NO: 698129 - RNA, 19 nt, Homo sapiens
  misc_RNA (1)...(19): siRNA sense strand
cucaagaugucaaccugaa

SEQ ID NO: 698130 - RNA, 19 nt, Homo sapiens
  misc_RNA (1)...(19): siRNA sense strand
gauguuguaagaucagaga

SEQ ID NO: 698131 - RNA, 19 nt, Homo sapiens
  misc_RNA (1)...(19): siRNA sense strand
gaagagaagguugaaaaga

SEQ ID NO: 698132 - RNA, 19 nt, Homo sapiens
  misc_RNA (1)...(19): siRNA sense strand
uucaggcucucacuacaaa

SEQ ID NO: 698133 - RNA, 19 nt, Homo sapiens
  misc_RNA (1)...(19): siRNA sense strand
ggaaagauggaugaacaag

SEQ ID NO: 698134 - RNA, 19 nt, Homo sapiens
  misc_RNA (1)...(19): siRNA sense strand
aaguaacagugacagcaaa

SEQ ID NO: 698135 - RNA, 19 nt, Homo sapiens
  misc_RNA (1)...(19): siRNA sense strand
caacaccaagugaauuagu

SEQ ID NO: 698136 - RNA, 19 nt, Homo sapiens
  misc_RNA (1)...(19): siRNA sense strand
gaguauauuaagcgucaaa

SEQ ID NO: 698137 - RNA, 19 nt, Homo sapiens
  misc_RNA (1)...(19): siRNA sense strand
agaaaugauacacgaaguu

SEQ ID NO: 698138 - RNA, 19 nt, Homo sapiens
  misc_RNA (1)...(19): siRNA sense strand
caagugaauuagugaacac

SEQ ID NO: 698139 - RNA, 19 nt, Homo sapiens
  misc_RNA (1)...(19): siRNA sense strand
uuacuaugaugaugguaca

SEQ ID NO: 698140 - RNA, 19 nt, Homo sapiens
  misc_RNA (1)...(19): siRNA sense strand
caaacagaacuuaauacca

SEQ ID NO: 698141 - RNA, 19 nt, Homo sapiens
  misc_RNA (1)...(19): siRNA sense strand
ccauuucaaacagaacuua

SEQ ID NO: 698142 - RNA, 19 nt, Homo sapiens
  misc_RNA (1)...(19): siRNA sense strand
gaaaggacugaucaaccau

SEQ ID NO: 698143 - RNA, 19 nt, Homo sapiens
  misc_RNA (1)...(19): siRNA sense strand
agaccuggaucccggaaca

SEQ ID NO: 698144 - RNA, 19 nt, Homo sapiens
  misc_RNA (1)...(19): siRNA sense strand
agaaauuguggaugagaaa

SEQ ID NO: 698145 - RNA, 19 nt, Homo sapiens
  misc_RNA (1)...(19): siRNA sense strand
acugaaggauagcacagaa

SEQ ID NO: 698146 - RNA, 19 nt, Homo sapiens
  misc_RNA (1)...(19): siRNA sense strand
caucuuagaggcacugaag

SEQ ID NO: 698147 - RNA, 19 nt, Homo sapiens
  misc_RNA (1)...(19): siRNA sense strand
gggaaagauggaugaacaa

SEQ ID NO: 698148 - RNA, 19 nt, Homo sapiens
  misc_RNA (1)...(19): siRNA sense strand
aauauccgagguuccuuua

SEQ ID NO: 698149 - RNA, 19 nt, Homo sapiens
  misc_RNA (1)...(19): siRNA sense strand
agaagugagggugguaaua

SEQ ID NO: 698150 - RNA, 19 nt, Homo sapiens
  misc_RNA (1)...(19): siRNA sense strand
gagaagugagggugguaau

SEQ ID NO: 698151 - RNA, 19 nt, Homo sapiens
  misc_RNA (1)...(19): siRNA sense strand
guuggaagcgagauagaga

SEQ ID NO: 698152 - RNA, 19 nt, Homo sapiens
  misc_RNA (1)...(19): siRNA sense strand
gaaaaccgggaaacaaaau

SEQ ID NO: 698153 - RNA, 19 nt, Homo sapiens
  misc_RNA (1)...(19): siRNA sense strand
guagaaauuguggaugaga

SEQ ID NO: 698154 - RNA, 19 nt, Homo sapiens
  misc_RNA (1)...(19): siRNA sense strand
ccucagccaaggaaauaaa

SEQ ID NO: 698155 - RNA, 19 nt, Homo sapiens
  misc_RNA (1)...(19): siRNA sense strand
accuuaaucucaucuuaga

SEQ ID NO: 698156 - RNA, 19 nt, Homo sapiens
  misc_RNA (1)...(19): siRNA sense strand
aacguaagagagcuaauaa

SEQ ID NO: 698157 - RNA, 19 nt, Homo sapiens
  misc_RNA (1)...(19): siRNA sense strand
uuaaaugguccuggugaaa

SEQ ID NO: 698158 - RNA, 19 nt, Homo sapiens
  misc_RNA (1)...(19): siRNA sense strand
aaccaacacauaacaauag

SEQ ID NO: 698159 - RNA, 19 nt, Homo sapiens
  misc_RNA (1)...(19): siRNA sense strand
ggccaacaccaagugaauu

SEQ ID NO: 698160 - RNA, 19 nt, Homo sapiens
  misc_RNA (1)...(19): siRNA sense strand
ugaaggauagcacagaagu

SEQ ID NO: 698161 - RNA, 19 nt, Homo sapiens
  misc_RNA (1)...(19): siRNA sense strand
acuacaaaccuuaaucuca

SEQ ID NO: 698162 - RNA, 19 nt, Homo sapiens
  misc_RNA (1)...(19): siRNA sense strand
aaugauacacgaaguugga

SEQ ID NO: 698163 - RNA, 19 nt, Homo sapiens
  misc_RNA (1)...(19): siRNA sense strand
cguaagagagcuaauaagc

SEQ ID NO: 698164 - RNA, 19 nt, Homo sapiens
  misc_RNA (1)...(19): siRNA sense strand
ucacuacaaaccuuaaucu

SEQ ID NO: 698165 - RNA, 19 nt, Homo sapiens
  misc_RNA (1)...(19): siRNA sense strand
gaugaucaagaugacguuu

SEQ ID NO: 698166 - RNA, 19 nt, Homo sapiens
  misc_RNA (1)...(19): siRNA sense strand
agaaguagaaauuguggau

SEQ ID NO: 698167 - RNA, 19 nt, Homo sapiens
  misc_RNA (1)...(19): siRNA sense strand
gauagcacagaaguagaaa

SEQ ID NO: 698168 - RNA, 19 nt, Homo sapiens
  misc_RNA (1)...(19): siRNA sense strand
gcaaauaaaccaacacaua

SEQ ID NO: 698169 - RNA, 19 nt, Homo sapiens
  misc_RNA (1)...(19): siRNA sense strand
gaacgagacuucuuucuuc

SEQ ID NO: 698170 - RNA, 19 nt, Homo sapiens
  misc_RNA (1)...(19): siRNA sense strand
gcacagaaguagaaauugu

SEQ ID NO: 698171 - RNA, 19 nt, Homo sapiens
  misc_RNA (1)...(19): siRNA sense strand
gaauauuacuucaguguag

SEQ ID NO: 698172 - RNA, 19 nt, Homo sapiens
  misc_RNA (1)...(19): siRNA sense strand
agacuucucucaacugauu

SEQ ID NO: 698173 - RNA, 19 nt, Homo sapiens
  misc_RNA (1)...(19): siRNA sense strand
caacguaagagagcuaaua

SEQ ID NO: 698174 - RNA, 19 nt, Homo sapiens
  misc_RNA (1)...(19): siRNA sense strand
gaagugagggugguaauau

SEQ ID NO: 698175 - RNA, 19 nt, Homo sapiens
  misc_RNA (1)...(19): siRNA sense strand
gaaaugauacacgaaguug

SEQ ID NO: 698176 - RNA, 19 nt, Homo sapiens
  misc_RNA (1)...(19): siRNA sense strand
cuacaaaccuuaaucucau

SEQ ID NO: 698177 - RNA, 19 nt, Homo sapiens
  misc_RNA (1)...(19): siRNA sense strand
gaucaaccauuucaaacag

SEQ ID NO: 698178 - RNA, 19 nt, Homo sapiens
  misc_RNA (1)...(19): siRNA sense strand
gccaacaccaagugaauua

SEQ ID NO: 698179 - RNA, 19 nt, Homo sapiens
  misc_RNA (1)...(19): siRNA sense strand
caacagacuucucucaacu

SEQ ID NO: 698180 - RNA, 19 nt, Homo sapiens
  misc_RNA (1)...(19): siRNA sense strand
ugaaaggacugaucaacca

SEQ ID NO: 698181 - RNA, 19 nt, Homo sapiens
  misc_RNA (1)...(19): siRNA sense strand
aaagauggaugaacaaggu

SEQ ID NO: 698182 - RNA, 19 nt, Homo sapiens
  misc_RNA (1)...(19): siRNA sense strand
ggaacgagacuucuuucuu

SEQ ID NO: 698183 - RNA, 19 nt, Homo sapiens
  misc_RNA (1)...(19): siRNA sense strand
ggacugaucaaccauuuca

SEQ ID NO: 698184 - RNA, 19 nt, Homo sapiens
  misc_RNA (1)...(19): siRNA sense strand
gaucagagagucaagaaag

SEQ ID NO: 698185 - RNA, 19 nt, Homo sapiens
  misc_RNA (1)...(19): siRNA sense strand
ggauagcacagaaguagaa

SEQ ID NO: 698186 - RNA, 19 nt, Homo sapiens
  misc_RNA (1)...(19): siRNA sense strand
gagaaaugauacacgaagu

SEQ ID NO: 698187 - RNA, 19 nt, Homo sapiens
  misc_RNA (1)...(19): siRNA sense strand
ucaagaacauggugaaagg

SEQ ID NO: 698188 - RNA, 19 nt, Homo sapiens
  misc_RNA (1)...(19): siRNA sense strand
gaaguaacagugacagcaa

SEQ ID NO: 698189 - RNA, 19 nt, Homo sapiens
  misc_RNA (1)...(19): siRNA sense strand
uauccgagguuccuuuaga

SEQ ID NO: 698190 - RNA, 19 nt, Homo sapiens
  misc_RNA (1)...(19): siRNA sense strand
ccacuccacuuagauguug

SEQ ID NO: 698191 - RNA, 19 nt, Homo sapiens
  misc_RNA (1)...(19): siRNA sense strand
gauugauuguccagaguuu

SEQ ID NO: 698192 - RNA, 19 nt, Homo sapiens
  misc_RNA (1)...(19): siRNA sense strand
aaguagaaauuguggauga

SEQ ID NO: 698193 - RNA, 19 nt, Homo sapiens
  misc_RNA (1)...(19): siRNA sense strand
gaaggauagcacagaagua

SEQ ID NO: 698194 - RNA, 19 nt, Homo sapiens
  misc_RNA (1)...(19): siRNA sense strand
gaugacguuuccaguguga

SEQ ID NO: 698195 - RNA, 19 nt, Homo sapiens
  misc_RNA (1)...(19): siRNA sense strand
gaacagcucaagaugucaa

SEQ ID NO: 698196 - RNA, 19 nt, Homo sapiens
  misc_RNA (1)...(19): siRNA sense strand
cggaacagcucaagauguc

SEQ ID NO: 698197 - RNA, 19 nt, Homo sapiens
  misc_RNA (1)...(19): siRNA sense strand
uagcacagaaguagaaauu

SEQ ID NO: 698198 - RNA, 19 nt, Homo sapiens
  misc_RNA (1)...(19): siRNA sense strand
gaugucaaccugaagcaaa

SEQ ID NO: 698199 - RNA, 19 nt, Homo sapiens
  misc_RNA (1)...(19): siRNA sense strand
uagaggcacugaaggauag

SEQ ID NO: 698200 - RNA, 19 nt, Homo sapiens
  misc_RNA (1)...(19): siRNA sense strand
uaacagugacagcaaagaa

SEQ ID NO: 698201 - RNA, 19 nt, Homo sapiens
  misc_RNA (1)...(19): siRNA sense strand
gagcuaauaagcacaagug

SEQ ID NO: 698202 - RNA, 19 nt, Homo sapiens
  misc_RNA (1)...(19): siRNA sense strand
uagaaauuguggaugagaa

SEQ ID NO: 698203 - RNA, 19 nt, Homo sapiens
  misc_RNA (1)...(19): siRNA sense strand
acacauaacaauaggagaa

SEQ ID NO: 698204 - RNA, 19 nt, Homo sapiens
  misc_RNA (1)...(19): siRNA sense strand
aagaugacguuuccagugu

SEQ ID NO: 698205 - RNA, 19 nt, Homo sapiens
  misc_RNA (1)...(19): siRNA sense strand
acagacuucucucaacuga

SEQ ID NO: 698206 - RNA, 19 nt, Homo sapiens
  misc_RNA (1)...(19): siRNA sense strand
gaggcucagucaaguaauc

SEQ ID NO: 698207 - RNA, 19 nt, Homo sapiens
  misc_RNA (1)...(19): siRNA sense strand
ggacgaggcagaggaaauc

SEQ ID NO: 698208 - RNA, 19 nt, Homo sapiens
  misc_RNA (1)...(19): siRNA sense strand
ggguaccacuccacuuaga

SEQ ID NO: 698209 - RNA, 19 nt, Homo sapiens
  misc_RNA (1)...(19): siRNA sense strand
ugaagcaaauaaaccaaca

SEQ ID NO: 698210 - RNA, 19 nt, Homo sapiens
  misc_RNA (1)...(19): siRNA sense strand
ccaacagacuucucucaac

SEQ ID NO: 698211 - RNA, 19 nt, Homo sapiens
  misc_RNA (1)...(19): siRNA sense strand
ucaaccauuucaaacagaa

SEQ ID NO: 698212 - RNA, 19 nt, Homo sapiens
  misc_RNA (1)...(19): siRNA sense strand
ccaagugaauuagugaaca

SEQ ID NO: 698213 - RNA, 19 nt, Homo sapiens
  misc_RNA (1)...(19): siRNA sense strand
guaagagagcuaauaagca

SEQ ID NO: 698214 - RNA, 19 nt, Homo sapiens
  misc_RNA (1)...(19): siRNA sense strand
aaggacugaucaaccauuu

SEQ ID NO: 698215 - RNA, 19 nt, Homo sapiens
  misc_RNA (1)...(19): siRNA sense strand
aaagggaugaucaagauga

SEQ ID NO: 698216 - RNA, 19 nt, Homo sapiens
  misc_RNA (1)...(19): siRNA sense strand
ucaaguaaucaacguaaga

SEQ ID NO: 698217 - RNA, 19 nt, Homo sapiens
  misc_RNA (1)...(19): siRNA sense strand
gcagugugccaccaacaga

SEQ ID NO: 698218 - RNA, 19 nt, Homo sapiens
  misc_RNA (1)...(19): siRNA sense strand
gcucucacuacaaaccuua

SEQ ID NO: 698219 - RNA, 19 nt, Homo sapiens
  misc_RNA (1)...(19): siRNA sense strand
gguguauccuguggaagaa

SEQ ID NO: 698220 - RNA, 19 nt, Homo sapiens
  misc_RNA (1)...(19): siRNA sense strand
cuuuagaggucgaggaaga

SEQ ID NO: 698221 - RNA, 19 nt, Homo sapiens
  misc_RNA (1)...(19): siRNA sense strand
gaaguuggaagcgagauag

SEQ ID NO: 698222 - RNA, 19 nt, Homo sapiens
  misc_RNA (1)...(19): siRNA sense strand
guauuacuaugaugauggu

SEQ ID NO: 698223 - RNA, 19 nt, Homo sapiens
  misc_RNA (1)...(19): siRNA sense strand
ggggaaagauggaugaaca

SEQ ID NO: 698224 - RNA, 19 nt, Homo sapiens
  misc_RNA (1)...(19): siRNA sense strand
uuagaggcacugaaggaua

SEQ ID NO: 698225 - RNA, 19 nt, Homo sapiens
  misc_RNA (1)...(19): siRNA sense strand
guaccacuccacuuagaug

SEQ ID NO: 698226 - RNA, 19 nt, Homo sapiens
  misc_RNA (1)...(19): siRNA sense strand
uaauauccgagguuccuuu

SEQ ID NO: 698227 - RNA, 19 nt, Homo sapiens
  misc_RNA (1)...(19): siRNA sense strand
cgaaguuggaagcgagaua

SEQ ID NO: 698228 - RNA, 19 nt, Homo sapiens
  misc_RNA (1)...(19): siRNA sense strand
cauaacaauaggagaaaug

SEQ ID NO: 698229 - RNA, 19 nt, Homo sapiens
  misc_RNA (1)...(19): siRNA sense strand
cucaagaugucaaccugaa

SEQ ID NO: 698230 - RNA, 19 nt, Homo sapiens
  misc_RNA (1)...(19): siRNA sense strand
gauguuguaagaucagaga

SEQ ID NO: 698231 - RNA, 19 nt, Homo sapiens
  misc_RNA (1)...(19): siRNA sense strand
gaagagaagguugaaaaga

SEQ ID NO: 698232 - RNA, 19 nt, Homo sapiens
  misc_RNA (1)...(19): siRNA sense strand
uucaggcucucacuacaaa

SEQ ID NO: 698233 - RNA, 19 nt, Homo sapiens
  misc_RNA (1)...(19): siRNA sense strand
ggaaagauggaugaacaag

SEQ ID NO: 698234 - RNA, 19 nt, Homo sapiens
  misc_RNA (1)...(19): siRNA sense strand
aaguaacagugacagcaaa

SEQ ID NO: 698235 - RNA, 19 nt, Homo sapiens
  misc_RNA (1)...(19): siRNA sense strand
caacaccaagugaauuagu

SEQ ID NO: 698236 - RNA, 19 nt, Homo sapiens
  misc_RNA (1)...(19): siRNA sense strand
gaguauauuaagcgucaaa

SEQ ID NO: 698237 - RNA, 19 nt, Homo sapiens
  misc_RNA (1)...(19): siRNA sense strand
agaaaugauacacgaaguu

SEQ ID NO: 698238 - RNA, 19 nt, Homo sapiens
  misc_RNA (1)...(19): siRNA sense strand
caagugaauuagugaacac

SEQ ID NO: 698239 - RNA, 19 nt, Homo sapiens
  misc_RNA (1)...(19): siRNA sense strand
uuacuaugaugaugguaca

SEQ ID NO: 698240 - RNA, 19 nt, Homo sapiens
  misc_RNA (1)...(19): siRNA sense strand
caaacagaacuuaauacca

SEQ ID NO: 698241 - RNA, 19 nt, Homo sapiens
  misc_RNA (1)...(19): siRNA sense strand
ccauuucaaacagaacuua

SEQ ID NO: 698242 - RNA, 19 nt, Homo sapiens
  misc_RNA (1)...(19): siRNA sense strand
gaaaggacugaucaaccau

SEQ ID NO: 698243 - RNA, 19 nt, Homo sapiens
  misc_RNA (1)...(19): siRNA sense strand
agaccuggaucccggaaca

SEQ ID NO: 698244 - RNA, 19 nt, Homo sapiens
  misc_RNA (1)...(19): siRNA sense strand
agaaauuguggaugagaaa

SEQ ID NO: 698245 - RNA, 19 nt, Homo sapiens
  misc_RNA (1)...(19): siRNA sense strand
acugaaggauagcacagaa

SEQ ID NO: 698246 - RNA, 19 nt, Homo sapiens
  misc_RNA (1)...(19): siRNA sense strand
caucuuagaggcacugaag

SEQ ID NO: 698247 - RNA, 19 nt, Homo sapiens
  misc_RNA (1)...(19): siRNA sense strand
gggaaagauggaugaacaa

SEQ ID NO: 698248 - RNA, 19 nt, Homo sapiens
  misc_RNA (1)...(19): siRNA sense strand
aauauccgagguuccuuua

SEQ ID NO: 698249 - RNA, 19 nt, Homo sapiens
  misc_RNA (1)...(19): siRNA sense strand
agaagugagggugguaaua

SEQ ID NO: 698250 - RNA, 19 nt, Homo sapiens
  misc_RNA (1)...(19): siRNA sense strand
gagaagugagggugguaau

SEQ ID NO: 698251 - RNA, 19 nt, Homo sapiens
  misc_RNA (1)...(19): siRNA sense strand
guuggaagcgagauagaga

SEQ ID NO: 698252 - RNA, 19 nt, Homo sapiens
  misc_RNA (1)...(19): siRNA sense strand
gaaaaccgggaaacaaaau

SEQ ID NO: 698253 - RNA, 19 nt, Homo sapiens
  misc_RNA (1)...(19): siRNA sense strand
guagaaauuguggaugaga

SEQ ID NO: 698254 - RNA, 19 nt, Homo sapiens
  misc_RNA (1)...(19): siRNA sense strand
ccucagccaaggaaauaaa

SEQ ID NO: 698255 - RNA, 19 nt, Homo sapiens
  misc_RNA (1)...(19): siRNA sense strand
accuuaaucucaucuuaga

SEQ ID NO: 698256 - RNA, 19 nt, Homo sapiens
  misc_RNA (1)...(19): siRNA sense strand
aacguaagagagcuaauaa

SEQ ID NO: 698257 - RNA, 19 nt, Homo sapiens
  misc_RNA (1)...(19): siRNA sense strand
uuaaaugguccuggugaaa

SEQ ID NO: 698258 - RNA, 19 nt, Homo sapiens
  misc_RNA (1)...(19): siRNA sense strand
aaccaacacauaacaauag

SEQ ID NO: 698259 - RNA, 19 nt, Homo sapiens
  misc_RNA (1)...(19): siRNA sense strand
ggccaacaccaagugaauu

SEQ ID NO: 698260 - RNA, 19 nt, Homo sapiens
  misc_RNA (1)...(19): siRNA sense strand
ugaaggauagcacagaagu

SEQ ID NO: 698261 - RNA, 19 nt, Homo sapiens
  misc_RNA (1)...(19): siRNA sense strand
acuacaaaccuuaaucuca

SEQ ID NO: 698262 - RNA, 19 nt, Homo sapiens
  misc_RNA (1)...(19): siRNA sense strand
aaugauacacgaaguugga

SEQ ID NO: 698263 - RNA, 19 nt, Homo sapiens
  misc_RNA (1)...(19): siRNA sense strand
cguaagagagcuaauaagc

SEQ ID NO: 698264 - RNA, 19 nt, Homo sapiens
  misc_RNA (1)...(19): siRNA sense strand
ucacuacaaaccuuaaucu

SEQ ID NO: 698265 - RNA, 19 nt, Homo sapiens
  misc_RNA (1)...(19): siRNA sense strand
gaugaucaagaugacguuu

SEQ ID NO: 698266 - RNA, 19 nt, Homo sapiens
  misc_RNA (1)...(19): siRNA sense strand
agaaguagaaauuguggau

SEQ ID NO: 698267 - RNA, 19 nt, Homo sapiens
  misc_RNA (1)...(19): siRNA sense strand
gauagcacagaaguagaaa

SEQ ID NO: 698268 - RNA, 19 nt, Homo sapiens
  misc_RNA (1)...(19): siRNA sense strand
gaaauuaucugacaaagac

SEQ ID NO: 698269 - RNA, 19 nt, Homo sapiens
  misc_RNA (1)...(19): siRNA sense strand
gagaauuacuggaaaguuu

SEQ ID NO: 698270 - RNA, 19 nt, Homo sapiens
  misc_RNA (1)...(19): siRNA sense strand
ggagaaguguucauuauug

SEQ ID NO: 698271 - RNA, 19 nt, Homo sapiens
  misc_RNA (1)...(19): siRNA sense strand
caagaagaaugcagaaauu

SEQ ID NO: 698272 - RNA, 19 nt, Homo sapiens
  misc_RNA (1)...(19): siRNA sense strand
gaagauggauggaauaaac

SEQ ID NO: 698273 - RNA, 19 nt, Homo sapiens
  misc_RNA (1)...(19): siRNA sense strand
uugcaaagcuguauuauga

SEQ ID NO: 698274 - RNA, 19 nt, Homo sapiens
  misc_RNA (1)...(19): siRNA sense strand
guaaacagcuuuguacaga

SEQ ID NO: 698275 - RNA, 19 nt, Homo sapiens
  misc_RNA (1)...(19): siRNA sense strand
agaaagccguugaauguua

SEQ ID NO: 698276 - RNA, 19 nt, Homo sapiens
  misc_RNA (1)...(19): siRNA sense strand
aaccagagcuugaagauuu

SEQ ID NO: 698277 - RNA, 19 nt, Homo sapiens
  misc_RNA (1)...(19): siRNA sense strand
gaagaagacgcacacauaa

SEQ ID NO: 698278 - RNA, 19 nt, Homo sapiens
  misc_RNA (1)...(19): siRNA sense strand
gcagcggucuuaauucuuu

SEQ ID NO: 698279 - RNA, 19 nt, Homo sapiens
  misc_RNA (1)...(19): siRNA sense strand
gaauuaaacccaacacaaa

SEQ ID NO: 698280 - RNA, 19 nt, Homo sapiens
  misc_RNA (1)...(19): siRNA sense strand
gaucggaauucuuuacuga

SEQ ID NO: 698281 - RNA, 19 nt, Homo sapiens
  misc_RNA (1)...(19): siRNA sense strand
ucccaaagcucacagauuu

SEQ ID NO: 698282 - RNA, 19 nt, Homo sapiens
  misc_RNA (1)...(19): siRNA sense strand
aggaauaucuggagucuuu

SEQ ID NO: 698283 - RNA, 19 nt, Homo sapiens
  misc_RNA (1)...(19): siRNA sense strand
gcaggaaaauagagaauua

SEQ ID NO: 698284 - RNA, 19 nt, Homo sapiens
  misc_RNA (1)...(19): siRNA sense strand
gaccagggacuaccuaaua

SEQ ID NO: 698285 - RNA, 19 nt, Homo sapiens
  misc_RNA (1)...(19): siRNA sense strand
ggaauucauugccugcuuu

SEQ ID NO: 698286 - RNA, 19 nt, Homo sapiens
  misc_RNA (1)...(19): siRNA sense strand
gaagaacaguauuccugaa

SEQ ID NO: 698287 - RNA, 19 nt, Homo sapiens
  misc_RNA (1)...(19): siRNA sense strand
gaauaugauuugccaacaa

SEQ ID NO: 698288 - RNA, 19 nt, Homo sapiens
  misc_RNA (1)...(19): siRNA sense strand
ugaagaagacgcacacaua

SEQ ID NO: 698289 - RNA, 19 nt, Homo sapiens
  misc_RNA (1)...(19): siRNA sense strand
cgacagaagucaaugaaag

SEQ ID NO: 698290 - RNA, 19 nt, Homo sapiens
  misc_RNA (1)...(19): siRNA sense strand
agaaagaaaugcaggaguu

SEQ ID NO: 698291 - RNA, 19 nt, Homo sapiens
  misc_RNA (1)...(19): siRNA sense strand
aaacagcuuuguacagaaa

SEQ ID NO: 698292 - RNA, 19 nt, Homo sapiens
  misc_RNA (1)...(19): siRNA sense strand
gcaaagcuguauuaugaag

SEQ ID NO: 698293 - RNA, 19 nt, Homo sapiens
  misc_RNA (1)...(19): siRNA sense strand
gcacauguugcuaagcuua

SEQ ID NO: 698294 - RNA, 19 nt, Homo sapiens
  misc_RNA (1)...(19): siRNA sense strand
caaaugcgccugaaucaau

SEQ ID NO: 698295 - RNA, 19 nt, Homo sapiens
  misc_RNA (1)...(19): siRNA sense strand
aggaacagcuucuagauug

SEQ ID NO: 698296 - RNA, 19 nt, Homo sapiens
  misc_RNA (1)...(19): siRNA sense strand
uacagacccuuaaggaaua

SEQ ID NO: 698297 - RNA, 19 nt, Homo sapiens
  misc_RNA (1)...(19): siRNA sense strand
guacagacccuuaaggaau

SEQ ID NO: 698298 - RNA, 19 nt, Homo sapiens
  misc_RNA (1)...(19): siRNA sense strand
ggaauuaaacccaacacaa

SEQ ID NO: 698299 - RNA, 19 nt, Homo sapiens
  misc_RNA (1)...(19): siRNA sense strand
guuccaagaccaaagauua

SEQ ID NO: 698300 - RNA, 19 nt, Homo sapiens
  misc_RNA (1)...(19): siRNA sense strand
gaaguccugcaauuuauaa

SEQ ID NO: 698301 - RNA, 19 nt, Homo sapiens
  misc_RNA (1)...(19): siRNA sense strand
gaaacuaaauagcaguaag

SEQ ID NO: 698302 - RNA, 19 nt, Homo sapiens
  misc_RNA (1)...(19): siRNA sense strand
caaaauaccuucagaaaac

SEQ ID NO: 698303 - RNA, 19 nt, Homo sapiens
  misc_RNA (1)...(19): siRNA sense strand
guuauaugaugcucuguuu

SEQ ID NO: 698304 - RNA, 19 nt, Homo sapiens
  misc_RNA (1)...(19): siRNA sense strand
agagaaagccguugaaugu

SEQ ID NO: 698305 - RNA, 19 nt, Homo sapiens
  misc_RNA (1)...(19): siRNA sense strand
gaagaaugcagaaauuauc

SEQ ID NO: 698306 - RNA, 19 nt, Homo sapiens
  misc_RNA (1)...(19): siRNA sense strand
gaaauguaauucucaccau

SEQ ID NO: 698307 - RNA, 19 nt, Homo sapiens
  misc_RNA (1)...(19): siRNA sense strand
gauuauagaugacggugau

SEQ ID NO: 698308 - RNA, 19 nt, Homo sapiens
  misc_RNA (1)...(19): siRNA sense strand
gaagauugcagaauugcuu

SEQ ID NO: 698309 - RNA, 19 nt, Homo sapiens
  misc_RNA (1)...(19): siRNA sense strand
gaagaaaguuuugccauug

SEQ ID NO: 698310 - RNA, 19 nt, Homo sapiens
  misc_RNA (1)...(19): siRNA sense strand
ggaaguccugcaauuuaua

SEQ ID NO: 698311 - RNA, 19 nt, Homo sapiens
  misc_RNA (1)...(19): siRNA sense strand
gaacaagaagaaugcagaa

SEQ ID NO: 698312 - RNA, 19 nt, Homo sapiens
  misc_RNA (1)...(19): siRNA sense strand
ggaagaaaguuuugccauu

SEQ ID NO: 698313 - RNA, 19 nt, Homo sapiens
  misc_RNA (1)...(19): siRNA sense strand
aaaugcgccugaaucaaua

SEQ ID NO: 698314 - RNA, 19 nt, Homo sapiens
  misc_RNA (1)...(19): siRNA sense strand
acugucagcuacuuucuua

SEQ ID NO: 698315 - RNA, 19 nt, Homo sapiens
  misc_RNA (1)...(19): siRNA sense strand
gcuaaucuuaugcuucuua

SEQ ID NO: 698316 - RNA, 19 nt, Homo sapiens
  misc_RNA (1)...(19): siRNA sense strand
gcacauaaugguagucuuc

SEQ ID NO: 698317 - RNA, 19 nt, Homo sapiens
  misc_RNA (1)...(19): siRNA sense strand
caaguauucucccgaaaca

SEQ ID NO: 698318 - RNA, 19 nt, Homo sapiens
  misc_RNA (1)...(19): siRNA sense strand
gaaaugcagauucagaaau

SEQ ID NO: 698319 - RNA, 19 nt, Homo sapiens
  misc_RNA (1)...(19): siRNA sense strand
gggacuaccuaauaaagau

SEQ ID NO: 698320 - RNA, 19 nt, Homo sapiens
  misc_RNA (1)...(19): siRNA sense strand
gcgccugaaucaauaugua

SEQ ID NO: 698321 - RNA, 19 nt, Homo sapiens
  misc_RNA (1)...(19): siRNA sense strand
gaaagccguugaauguuac

SEQ ID NO: 698322 - RNA, 19 nt, Homo sapiens
  misc_RNA (1)...(19): siRNA sense strand
gaaggcagaagacauugaa

SEQ ID NO: 698323 - RNA, 19 nt, Homo sapiens
  misc_RNA (1)...(19): siRNA sense strand
uugaagauuuggcuagaua

SEQ ID NO: 698324 - RNA, 19 nt, Homo sapiens
  misc_RNA (1)...(19): siRNA sense strand
gaagaugggucagcauggu

SEQ ID NO: 698325 - RNA, 19 nt, Homo sapiens
  misc_RNA (1)...(19): siRNA sense strand
gggcagcggucuuaauucu

SEQ ID NO: 698326 - RNA, 19 nt, Homo sapiens
  misc_RNA (1)...(19): siRNA sense strand
uaccagccacuuacaauua

SEQ ID NO: 698327 - RNA, 19 nt, Homo sapiens
  misc_RNA (1)...(19): siRNA sense strand
gagaaguguucauuauugg

SEQ ID NO: 698328 - RNA, 19 nt, Homo sapiens
  misc_RNA (1)...(19): siRNA sense strand
ggacagaagaucggaauuc

SEQ ID NO: 698329 - RNA, 19 nt, Homo sapiens
  misc_RNA (1)...(19): siRNA sense strand
agaagucaaugaaaggauu

SEQ ID NO: 698330 - RNA, 19 nt, Homo sapiens
  misc_RNA (1)...(19): siRNA sense strand
uagaggccauuaagaaaga

SEQ ID NO: 698331 - RNA, 19 nt, Homo sapiens
  misc_RNA (1)...(19): siRNA sense strand
gaaguguucauuauuggaa

SEQ ID NO: 698332 - RNA, 19 nt, Homo sapiens
  misc_RNA (1)...(19): siRNA sense strand
gacaaaaucugcuggaaau

SEQ ID NO: 698333 - RNA, 19 nt, Homo sapiens
  misc_RNA (1)...(19): siRNA sense strand
uugcagaauugcuuuguaa

SEQ ID NO: 698334 - RNA, 19 nt, Homo sapiens
  misc_RNA (1)...(19): siRNA sense strand
guugaagauugcagaauug

SEQ ID NO: 698335 - RNA, 19 nt, Homo sapiens
  misc_RNA (1)...(19): siRNA sense strand
ggaacagcuucuagauugu

SEQ ID NO: 698336 - RNA, 19 nt, Homo sapiens
  misc_RNA (1)...(19): siRNA sense strand
caccgucuccuaccaaaua

SEQ ID NO: 698337 - RNA, 19 nt, Homo sapiens
  misc_RNA (1)...(19): siRNA sense strand
uauguuggaugcaguaaau

SEQ ID NO: 698338 - RNA, 19 nt, Homo sapiens
  misc_RNA (1)...(19): siRNA sense strand
cuauugauccucuguuuaa

SEQ ID NO: 698339 - RNA, 19 nt, Homo sapiens
  misc_RNA (1)...(19): siRNA sense strand
gaaaagcaguaccuggaaa

SEQ ID NO: 698340 - RNA, 19 nt, Homo sapiens
  misc_RNA (1)...(19): siRNA sense strand
gaguggaauucguguguug

SEQ ID NO: 698341 - RNA, 19 nt, Homo sapiens
  misc_RNA (1)...(19): siRNA sense strand
uaaaggaacagcuucuaga

SEQ ID NO: 698342 - RNA, 19 nt, Homo sapiens
  misc_RNA (1)...(19): siRNA sense strand
cgaagacuauagugaagga

SEQ ID NO: 698343 - RNA, 19 nt, Homo sapiens
  misc_RNA (1)...(19): siRNA sense strand
ugaaguauuucuccuugga

SEQ ID NO: 698344 - RNA, 19 nt, Homo sapiens
  misc_RNA (1)...(19): siRNA sense strand
gaagguaaagcuggacaaa

SEQ ID NO: 698345 - RNA, 19 nt, Homo sapiens
  misc_RNA (1)...(19): siRNA sense strand
uuucugagcuggcugcauu

SEQ ID NO: 698346 - RNA, 19 nt, Homo sapiens
  misc_RNA (1)...(19): siRNA sense strand
gucagaacuuuauguaaga

SEQ ID NO: 698347 - RNA, 19 nt, Homo sapiens
  misc_RNA (1)...(19): siRNA sense strand
gaaagaaaugcaggaguug

SEQ ID NO: 698348 - RNA, 19 nt, Homo sapiens
  misc_RNA (1)...(19): siRNA sense strand
gcaguaaauggaaauauag

SEQ ID NO: 698349 - RNA, 19 nt, Homo sapiens
  misc_RNA (1)...(19): siRNA sense strand
gaugaacugucagcuacuu

SEQ ID NO: 698350 - RNA, 19 nt, Homo sapiens
  misc_RNA (1)...(19): siRNA sense strand
gaauucauugccugcuuua

SEQ ID NO: 698351 - RNA, 19 nt, Homo sapiens
  misc_RNA (1)...(19): siRNA sense strand
caacaaguagaggccauua

SEQ ID NO: 698352 - RNA, 19 nt, Homo sapiens
  misc_RNA (1)...(19): siRNA sense strand
gcaggaacucgaagacuau

SEQ ID NO: 698353 - RNA, 19 nt, Homo sapiens
  misc_RNA (1)...(19): siRNA sense strand
uaaacagcuuuguacagaa

SEQ ID NO: 698354 - RNA, 19 nt, Homo sapiens
  misc_RNA (1)...(19): siRNA sense strand
uuacaggcguucaguggaa

SEQ ID NO: 698355 - RNA, 19 nt, Homo sapiens
  misc_RNA (1)...(19): siRNA sense strand
ugacaaagaccagggacua

SEQ ID NO: 698356 - RNA, 19 nt, Homo sapiens
  misc_RNA (1)...(19): siRNA sense strand
gggagaaguguucauuauu

SEQ ID NO: 698357 - RNA, 19 nt, Homo sapiens
  misc_RNA (1)...(19): siRNA sense strand
gauacgauguuggugcuau

SEQ ID NO: 698358 - RNA, 19 nt, Homo sapiens
  misc_RNA (1)...(19): siRNA sense strand
uguugaagauugcagaauu

SEQ ID NO: 698359 - RNA, 19 nt, Homo sapiens
  misc_RNA (1)...(19): siRNA sense strand
ucucauagcauuucagguu

SEQ ID NO: 698360 - RNA, 19 nt, Homo sapiens
  misc_RNA (1)...(19): siRNA sense strand
agucagaacuuuauguaag

SEQ ID NO: 698361 - RNA, 19 nt, Homo sapiens
  misc_RNA (1)...(19): siRNA sense strand
ugcaggaacucgaagacua

SEQ ID NO: 698362 - RNA, 19 nt, Homo sapiens
  misc_RNA (1)...(19): siRNA sense strand
aaacaaaugcgccugaauc

SEQ ID NO: 698363 - RNA, 19 nt, Homo sapiens
  misc_RNA (1)...(19): siRNA sense strand
caccuaaggauacaucuuu

SEQ ID NO: 698364 - RNA, 19 nt, Homo sapiens
  misc_RNA (1)...(19): siRNA sense strand
uaaaagagguuguugaaac

SEQ ID NO: 698365 - RNA, 19 nt, Homo sapiens
  misc_RNA (1)...(19): siRNA sense strand
gaauacauagggagaagug

SEQ ID NO: 698366 - RNA, 19 nt, Homo sapiens
  misc_RNA (1)...(19): siRNA sense strand
gcgaaaugcagauucagaa

SEQ ID NO: 698367 - RNA, 19 nt, Homo sapiens
  misc_RNA (1)...(19): siRNA sense strand
uauagaagaugcugugacu

SEQ ID NO: 698368 - RNA, 19 nt, Homo sapiens
  misc_RNA (1)...(19): siRNA sense strand
gaaauuaucugacaaagac

SEQ ID NO: 698369 - RNA, 19 nt, Homo sapiens
  misc_RNA (1)...(19): siRNA sense strand
gagaauuacuggaaaguuu

SEQ ID NO: 698370 - RNA, 19 nt, Homo sapiens
  misc_RNA (1)...(19): siRNA sense strand
ggagaaguguucauuauug

SEQ ID NO: 698371 - RNA, 19 nt, Homo sapiens
  misc_RNA (1)...(19): siRNA sense strand
caagaagaaugcagaaauu

SEQ ID NO: 698372 - RNA, 19 nt, Homo sapiens
  misc_RNA (1)...(19): siRNA sense strand
gaagauggauggaauaaac

SEQ ID NO: 698373 - RNA, 19 nt, Homo sapiens
  misc_RNA (1)...(19): siRNA sense strand
uugcaaagcuguauuauga

SEQ ID NO: 698374 - RNA, 19 nt, Homo sapiens
  misc_RNA (1)...(19): siRNA sense strand
guaaacagcuuuguacaga

SEQ ID NO: 698375 - RNA, 19 nt, Homo sapiens
  misc_RNA (1)...(19): siRNA sense strand
agaaagccguugaauguua

SEQ ID NO: 698376 - RNA, 19 nt, Homo sapiens
  misc_RNA (1)...(19): siRNA sense strand
aaccagagcuugaagauuu

SEQ ID NO: 698377 - RNA, 19 nt, Homo sapiens
  misc_RNA (1)...(19): siRNA sense strand
gaagaagacgcacacauaa

SEQ ID NO: 698378 - RNA, 19 nt, Homo sapiens
  misc_RNA (1)...(19): siRNA sense strand
gcagcggucuuaauucuuu

SEQ ID NO: 698379 - RNA, 19 nt, Homo sapiens
  misc_RNA (1)...(19): siRNA sense strand
gaauuaaacccaacacaaa

SEQ ID NO: 698380 - RNA, 19 nt, Homo sapiens
  misc_RNA (1)...(19): siRNA sense strand
gaucggaauucuuuacuga

SEQ ID NO: 698381 - RNA, 19 nt, Homo sapiens
  misc_RNA (1)...(19): siRNA sense strand
ucccaaagcucacagauuu

SEQ ID NO: 698382 - RNA, 19 nt, Homo sapiens
  misc_RNA (1)...(19): siRNA sense strand
aggaauaucuggagucuuu

SEQ ID NO: 698383 - RNA, 19 nt, Homo sapiens
  misc_RNA (1)...(19): siRNA sense strand
gcaggaaaauagagaauua

SEQ ID NO: 698384 - RNA, 19 nt, Homo sapiens
  misc_RNA (1)...(19): siRNA sense strand
gaccagggacuaccuaaua

SEQ ID NO: 698385 - RNA, 19 nt, Homo sapiens
  misc_RNA (1)...(19): siRNA sense strand
ggaauucauugccugcuuu

SEQ ID NO: 698386 - RNA, 19 nt, Homo sapiens
  misc_RNA (1)...(19): siRNA sense strand
gaagaacaguauuccugaa

SEQ ID NO: 698387 - RNA, 19 nt, Homo sapiens
  misc_RNA (1)...(19): siRNA sense strand
gaauaugauuugccaacaa

SEQ ID NO: 698388 - RNA, 19 nt, Homo sapiens
  misc_RNA (1)...(19): siRNA sense strand
ugaagaagacgcacacaua

SEQ ID NO: 698389 - RNA, 19 nt, Homo sapiens
  misc_RNA (1)...(19): siRNA sense strand
cgacagaagucaaugaaag

SEQ ID NO: 698390 - RNA, 19 nt, Homo sapiens
  misc_RNA (1)...(19): siRNA sense strand
agaaagaaaugcaggaguu

SEQ ID NO: 698391 - RNA, 19 nt, Homo sapiens
  misc_RNA (1)...(19): siRNA sense strand
aaacagcuuuguacagaaa

SEQ ID NO: 698392 - RNA, 19 nt, Homo sapiens
  misc_RNA (1)...(19): siRNA sense strand
gcaaagcuguauuaugaag

SEQ ID NO: 698393 - RNA, 19 nt, Homo sapiens
  misc_RNA (1)...(19): siRNA sense strand
gcacauguugcuaagcuua

SEQ ID NO: 698394 - RNA, 19 nt, Homo sapiens
  misc_RNA (1)...(19): siRNA sense strand
caaaugcgccugaaucaau

SEQ ID NO: 698395 - RNA, 19 nt, Homo sapiens
  misc_RNA (1)...(19): siRNA sense strand
aggaacagcuucuagauug

SEQ ID NO: 698396 - RNA, 19 nt, Homo sapiens
  misc_RNA (1)...(19): siRNA sense strand
uacagacccuuaaggaaua

SEQ ID NO: 698397 - RNA, 19 nt, Homo sapiens
  misc_RNA (1)...(19): siRNA sense strand
guacagacccuuaaggaau

SEQ ID NO: 698398 - RNA, 19 nt, Homo sapiens
  misc_RNA (1)...(19): siRNA sense strand
ggaauuaaacccaacacaa

SEQ ID NO: 698399 - RNA, 19 nt, Homo sapiens
  misc_RNA (1)...(19): siRNA sense strand
guuccaagaccaaagauua

SEQ ID NO: 698400 - RNA, 19 nt, Homo sapiens
  misc_RNA (1)...(19): siRNA sense strand
gaaguccugcaauuuauaa

SEQ ID NO: 698401 - RNA, 19 nt, Homo sapiens
  misc_RNA (1)...(19): siRNA sense strand
gaaacuaaauagcaguaag

SEQ ID NO: 698402 - RNA, 19 nt, Homo sapiens
  misc_RNA (1)...(19): siRNA sense strand
caaaauaccuucagaaaac

SEQ ID NO: 698403 - RNA, 19 nt, Homo sapiens
  misc_RNA (1)...(19): siRNA sense strand
guuauaugaugcucuguuu

SEQ ID NO: 698404 - RNA, 19 nt, Homo sapiens
  misc_RNA (1)...(19): siRNA sense strand
agagaaagccguugaaugu

SEQ ID NO: 698405 - RNA, 19 nt, Homo sapiens
  misc_RNA (1)...(19): siRNA sense strand
gaagaaugcagaaauuauc

SEQ ID NO: 698406 - RNA, 19 nt, Homo sapiens
  misc_RNA (1)...(19): siRNA sense strand
gaaauguaauucucaccau

SEQ ID NO: 698407 - RNA, 19 nt, Homo sapiens
  misc_RNA (1)...(19): siRNA sense strand
gauuauagaugacggugau

SEQ ID NO: 698408 - RNA, 19 nt, Homo sapiens
  misc_RNA (1)...(19): siRNA sense strand
gaagauugcagaauugcuu

SEQ ID NO: 698409 - RNA, 19 nt, Homo sapiens
  misc_RNA (1)...(19): siRNA sense strand
gaagaaaguuuugccauug

SEQ ID NO: 698410 - RNA, 19 nt, Homo sapiens
  misc_RNA (1)...(19): siRNA sense strand
ggaaguccugcaauuuaua

SEQ ID NO: 698411 - RNA, 19 nt, Homo sapiens
  misc_RNA (1)...(19): siRNA sense strand
gaacaagaagaaugcagaa

SEQ ID NO: 698412 - RNA, 19 nt, Homo sapiens
  misc_RNA (1)...(19): siRNA sense strand
ggaagaaaguuuugccauu

SEQ ID NO: 698413 - RNA, 19 nt, Homo sapiens
  misc_RNA (1)...(19): siRNA sense strand
aaaugcgccugaaucaaua

SEQ ID NO: 698414 - RNA, 19 nt, Homo sapiens
  misc_RNA (1)...(19): siRNA sense strand
acugucagcuacuuucuua

SEQ ID NO: 698415 - RNA, 19 nt, Homo sapiens
  misc_RNA (1)...(19): siRNA sense strand
gcuaaucuuaugcuucuua

SEQ ID NO: 698416 - RNA, 19 nt, Homo sapiens
  misc_RNA (1)...(19): siRNA sense strand
gcacauaaugguagucuuc

SEQ ID NO: 698417 - RNA, 19 nt, Homo sapiens
  misc_RNA (1)...(19): siRNA sense strand
caaguauucucccgaaaca

SEQ ID NO: 698418 - RNA, 19 nt, Homo sapiens
  misc_RNA (1)...(19): siRNA sense strand
gaaaugcagauucagaaau

SEQ ID NO: 698419 - RNA, 19 nt, Homo sapiens
  misc_RNA (1)...(19): siRNA sense strand
gggacuaccuaauaaagau

SEQ ID NO: 698420 - RNA, 19 nt, Homo sapiens
  misc_RNA (1)...(19): siRNA sense strand
gcgccugaaucaauaugua

SEQ ID NO: 698421 - RNA, 19 nt, Homo sapiens
  misc_RNA (1)...(19): siRNA sense strand
gaaagccguugaauguuac

SEQ ID NO: 698422 - RNA, 19 nt, Homo sapiens
  misc_RNA (1)...(19): siRNA sense strand
gaaggcagaagacauugaa

SEQ ID NO: 698423 - RNA, 19 nt, Homo sapiens
  misc_RNA (1)...(19): siRNA sense strand
uugaagauuuggcuagaua

SEQ ID NO: 698424 - RNA, 19 nt, Homo sapiens
  misc_RNA (1)...(19): siRNA sense strand
gaagaugggucagcauggu

SEQ ID NO: 698425 - RNA, 19 nt, Homo sapiens
  misc_RNA (1)...(19): siRNA sense strand
gggcagcggucuuaauucu

SEQ ID NO: 698426 - RNA, 19 nt, Homo sapiens
  misc_RNA (1)...(19): siRNA sense strand
uaccagccacuuacaauua

SEQ ID NO: 698427 - RNA, 19 nt, Homo sapiens
  misc_RNA (1)...(19): siRNA sense strand
gagaaguguucauuauugg

SEQ ID NO: 698428 - RNA, 19 nt, Homo sapiens
  misc_RNA (1)...(19): siRNA sense strand
ggacagaagaucggaauuc

SEQ ID NO: 698429 - RNA, 19 nt, Homo sapiens
  misc_RNA (1)...(19): siRNA sense strand
agaagucaaugaaaggauu

SEQ ID NO: 698430 - RNA, 19 nt, Homo sapiens
  misc_RNA (1)...(19): siRNA sense strand
uagaggccauuaagaaaga

SEQ ID NO: 698431 - RNA, 19 nt, Homo sapiens
  misc_RNA (1)...(19): siRNA sense strand
gaaguguucauuauuggaa

SEQ ID NO: 698432 - RNA, 19 nt, Homo sapiens
  misc_RNA (1)...(19): siRNA sense strand
gacaaaaucugcuggaaau

SEQ ID NO: 698433 - RNA, 19 nt, Homo sapiens
  misc_RNA (1)...(19): siRNA sense strand
uugcagaauugcuuuguaa

SEQ ID NO: 698434 - RNA, 19 nt, Homo sapiens
  misc_RNA (1)...(19): siRNA sense strand
guugaagauugcagaauug

SEQ ID NO: 698435 - RNA, 19 nt, Homo sapiens
  misc_RNA (1)...(19): siRNA sense strand
ggaacagcuucuagauugu

SEQ ID NO: 698436 - RNA, 19 nt, Homo sapiens
  misc_RNA (1)...(19): siRNA sense strand
caccgucuccuaccaaaua

SEQ ID NO: 698437 - RNA, 19 nt, Homo sapiens
  misc_RNA (1)...(19): siRNA sense strand
uauguuggaugcaguaaau

SEQ ID NO: 698438 - RNA, 19 nt, Homo sapiens
  misc_RNA (1)...(19): siRNA sense strand
cuauugauccucuguuuaa

SEQ ID NO: 698439 - RNA, 19 nt, Homo sapiens
  misc_RNA (1)...(19): siRNA sense strand
gaaaagcaguaccuggaaa

SEQ ID NO: 698440 - RNA, 19 nt, Homo sapiens
  misc_RNA (1)...(19): siRNA sense strand
gaguggaauucguguguug

SEQ ID NO: 698441 - RNA, 19 nt, Homo sapiens
  misc_RNA (1)...(19): siRNA sense strand
uaaaggaacagcuucuaga

SEQ ID NO: 698442 - RNA, 19 nt, Homo sapiens
  misc_RNA (1)...(19): siRNA sense strand
cgaagacuauagugaagga

SEQ ID NO: 698443 - RNA, 19 nt, Homo sapiens
  misc_RNA (1)...(19): siRNA sense strand
ugaaguauuucuccuugga

SEQ ID NO: 698444 - RNA, 19 nt, Homo sapiens
  misc_RNA (1)...(19): siRNA sense strand
gaagguaaagcuggacaaa

SEQ ID NO: 698445 - RNA, 19 nt, Homo sapiens
  misc_RNA (1)...(19): siRNA sense strand
uuucugagcuggcugcauu

SEQ ID NO: 698446 - RNA, 19 nt, Homo sapiens
  misc_RNA (1)...(19): siRNA sense strand
gucagaacuuuauguaaga

SEQ ID NO: 698447 - RNA, 19 nt, Homo sapiens
  misc_RNA (1)...(19): siRNA sense strand
gaaagaaaugcaggaguug

SEQ ID NO: 698448 - RNA, 19 nt, Homo sapiens
  misc_RNA (1)...(19): siRNA sense strand
gcaguaaauggaaauauag

SEQ ID NO: 698449 - RNA, 19 nt, Homo sapiens
  misc_RNA (1)...(19): siRNA sense strand
gaugaacugucagcuacuu

SEQ ID NO: 698450 - RNA, 19 nt, Homo sapiens
  misc_RNA (1)...(19): siRNA sense strand
gaauucauugccugcuuua

SEQ ID NO: 698451 - RNA, 19 nt, Homo sapiens
  misc_RNA (1)...(19): siRNA sense strand
caacaaguagaggccauua

SEQ ID NO: 698452 - RNA, 19 nt, Homo sapiens
  misc_RNA (1)...(19): siRNA sense strand
gcaggaacucgaagacuau

SEQ ID NO: 698453 - RNA, 19 nt, Homo sapiens
  misc_RNA (1)...(19): siRNA sense strand
uaaacagcuuuguacagaa

SEQ ID NO: 698454 - RNA, 19 nt, Homo sapiens
  misc_RNA (1)...(19): siRNA sense strand
uuacaggcguucaguggaa

SEQ ID NO: 698455 - RNA, 19 nt, Homo sapiens
  misc_RNA (1)...(19): siRNA sense strand
ugacaaagaccagggacua

SEQ ID NO: 698456 - RNA, 19 nt, Homo sapiens
  misc_RNA (1)...(19): siRNA sense strand
gggagaaguguucauuauu

SEQ ID NO: 698457 - RNA, 19 nt, Homo sapiens
  misc_RNA (1)...(19): siRNA sense strand
gauacgauguuggugcuau

SEQ ID NO: 698458 - RNA, 19 nt, Homo sapiens
  misc_RNA (1)...(19): siRNA sense strand
uguugaagauugcagaauu

SEQ ID NO: 698459 - RNA, 19 nt, Homo sapiens
  misc_RNA (1)...(19): siRNA sense strand
ucucauagcauuucagguu

SEQ ID NO: 698460 - RNA, 19 nt, Homo sapiens
  misc_RNA (1)...(19): siRNA sense strand
agucagaacuuuauguaag

SEQ ID NO: 698461 - RNA, 19 nt, Homo sapiens
  misc_RNA (1)...(19): siRNA sense strand
ugcaggaacucgaagacua

SEQ ID NO: 698462 - RNA, 19 nt, Homo sapiens
  misc_RNA (1)...(19): siRNA sense strand
aaacaaaugcgccugaauc

SEQ ID NO: 698463 - RNA, 19 nt, Homo sapiens
  misc_RNA (1)...(19): siRNA sense strand
caccuaaggauacaucuuu

SEQ ID NO: 698464 - RNA, 19 nt, Homo sapiens
  misc_RNA (1)...(19): siRNA sense strand
uaaaagagguuguugaaac

SEQ ID NO: 698465 - RNA, 19 nt, Homo sapiens
  misc_RNA (1)...(19): siRNA sense strand
gaauacauagggagaagug

SEQ ID NO: 698466 - RNA, 19 nt, Homo sapiens
  misc_RNA (1)...(19): siRNA sense strand
gcgaaaugcagauucagaa

SEQ ID NO: 698467 - RNA, 19 nt, Homo sapiens
  misc_RNA (1)...(19): siRNA sense strand
uauagaagaugcugugacu

SEQ ID NO: 698468 - RNA, 19 nt, Homo sapiens
  misc_RNA (1)...(19): siRNA sense strand
gaaacgacaucgagaagaa

SEQ ID NO: 698469 - RNA, 19 nt, Homo sapiens
  misc_RNA (1)...(19): siRNA sense strand
gcacgaacgucggaaacga

SEQ ID NO: 698470 - RNA, 19 nt, Homo sapiens
  misc_RNA (1)...(19): siRNA sense strand
gagaagaacaggauaaagc

SEQ ID NO: 698471 - RNA, 19 nt, Homo sapiens
  misc_RNA (1)...(19): siRNA sense strand
gagcauuccaggagagaaa

SEQ ID NO: 698472 - RNA, 19 nt, Homo sapiens
  misc_RNA (1)...(19): siRNA sense strand
gcuucgaccucaugaacaa

SEQ ID NO: 698473 - RNA, 19 nt, Homo sapiens
  misc_RNA (1)...(19): siRNA sense strand
ggaaacgacaucgagaaga

SEQ ID NO: 698474 - RNA, 19 nt, Homo sapiens
  misc_RNA (1)...(19): siRNA sense strand
gaaugggaaagacagaaga

SEQ ID NO: 698475 - RNA, 19 nt, Homo sapiens
  misc_RNA (1)...(19): siRNA sense strand
agacagaagagaagggaaa

SEQ ID NO: 698476 - RNA, 19 nt, Homo sapiens
  misc_RNA (1)...(19): siRNA sense strand
gggaaagacagaagagaag

SEQ ID NO: 698477 - RNA, 19 nt, Homo sapiens
  misc_RNA (1)...(19): siRNA sense strand
ggaaugggaaagacagaag

SEQ ID NO: 698478 - RNA, 19 nt, Homo sapiens
  misc_RNA (1)...(19): siRNA sense strand
ggaccgcuuggagcaguua

SEQ ID NO: 698479 - RNA, 19 nt, Homo sapiens
  misc_RNA (1)...(19): siRNA sense strand
cagaagagaagggaaaugg

SEQ ID NO: 698480 - RNA, 19 nt, Homo sapiens
  misc_RNA (1)...(19): siRNA sense strand
aggacggccucaagcauga

SEQ ID NO: 698481 - RNA, 19 nt, Homo sapiens
  misc_RNA (1)...(19): siRNA sense strand
ggaaauggcaagggagcau

SEQ ID NO: 698482 - RNA, 19 nt, Homo sapiens
  misc_RNA (1)...(19): siRNA sense strand
gcuuggagcaguuagaaag

SEQ ID NO: 698483 - RNA, 19 nt, Homo sapiens
  misc_RNA (1)...(19): siRNA sense strand
ugggaaagacagaagagaa

SEQ ID NO: 698484 - RNA, 19 nt, Homo sapiens
  misc_RNA (1)...(19): siRNA sense strand
uggagcaguuagaaaggaa

SEQ ID NO: 698485 - RNA, 19 nt, Homo sapiens
  misc_RNA (1)...(19): siRNA sense strand
caucgagaagaacaggaua

SEQ ID NO: 698486 - RNA, 19 nt, Homo sapiens
  misc_RNA (1)...(19): siRNA sense strand
ucgagaagaacaggauaaa

SEQ ID NO: 698487 - RNA, 19 nt, Homo sapiens
  misc_RNA (1)...(19): siRNA sense strand
gggcuucgaccucaugaac

SEQ ID NO: 698488 - RNA, 19 nt, Homo sapiens
  misc_RNA (1)...(19): siRNA sense strand
gcuucgaccucaugaacaa

SEQ ID NO: 698489 - RNA, 19 nt, Homo sapiens
  misc_RNA (1)...(19): siRNA sense strand
aggacggccucaagcauga

SEQ ID NO: 698490 - RNA, 19 nt, Homo sapiens
  misc_RNA (1)...(19): siRNA sense strand
gggcuucgaccucaugaac

SEQ ID NO: 698491 - RNA, 19 nt, Homo sapiens
  misc_RNA (1)...(19): siRNA sense strand
gaaacgacaucgagaagaa

SEQ ID NO: 698492 - RNA, 19 nt, Homo sapiens
  misc_RNA (1)...(19): siRNA sense strand
gcacgaacgucggaaacga

SEQ ID NO: 698493 - RNA, 19 nt, Homo sapiens
  misc_RNA (1)...(19): siRNA sense strand
gagaagaacaggauaaagc

SEQ ID NO: 698494 - RNA, 19 nt, Homo sapiens
  misc_RNA (1)...(19): siRNA sense strand
gagcauuccaggagagaaa

SEQ ID NO: 698495 - RNA, 19 nt, Homo sapiens
  misc_RNA (1)...(19): siRNA sense strand
gcuucgaccucaugaacaa

SEQ ID NO: 698496 - RNA, 19 nt, Homo sapiens
  misc_RNA (1)...(19): siRNA sense strand
ggaaacgacaucgagaaga

SEQ ID NO: 698497 - RNA, 19 nt, Homo sapiens
  misc_RNA (1)...(19): siRNA sense strand
gaaugggaaagacagaaga

SEQ ID NO: 698498 - RNA, 19 nt, Homo sapiens
  misc_RNA (1)...(19): siRNA sense strand
agacagaagagaagggaaa

SEQ ID NO: 698499 - RNA, 19 nt, Homo sapiens
  misc_RNA (1)...(19): siRNA sense strand
gggaaagacagaagagaag

SEQ ID NO: 698500 - RNA, 19 nt, Homo sapiens
  misc_RNA (1)...(19): siRNA sense strand
ggaaugggaaagacagaag

SEQ ID NO: 698501 - RNA, 19 nt, Homo sapiens
  misc_RNA (1)...(19): siRNA sense strand
ggaccgcuuggagcaguua

SEQ ID NO: 698502 - RNA, 19 nt, Homo sapiens
  misc_RNA (1)...(19): siRNA sense strand
cagaagagaagggaaaugg

SEQ ID NO: 698503 - RNA, 19 nt, Homo sapiens
  misc_RNA (1)...(19): siRNA sense strand
aggacggccucaagcauga

SEQ ID NO: 698504 - RNA, 19 nt, Homo sapiens
  misc_RNA (1)...(19): siRNA sense strand
ggaaauggcaagggagcau

SEQ ID NO: 698505 - RNA, 19 nt, Homo sapiens
  misc_RNA (1)...(19): siRNA sense strand
gcuuggagcaguuagaaag

SEQ ID NO: 698506 - RNA, 19 nt, Homo sapiens
  misc_RNA (1)...(19): siRNA sense strand
ugggaaagacagaagagaa

SEQ ID NO: 698507 - RNA, 19 nt, Homo sapiens
  misc_RNA (1)...(19): siRNA sense strand
uggagcaguuagaaaggaa

SEQ ID NO: 698508 - RNA, 19 nt, Homo sapiens
  misc_RNA (1)...(19): siRNA sense strand
caucgagaagaacaggaua

SEQ ID NO: 698509 - RNA, 19 nt, Homo sapiens
  misc_RNA (1)...(19): siRNA sense strand
ucgagaagaacaggauaaa

SEQ ID NO: 698510 - RNA, 19 nt, Homo sapiens
  misc_RNA (1)...(19): siRNA sense strand
gggcuucgaccucaugaac

SEQ ID NO: 698511 - RNA, 19 nt, Homo sapiens
  misc_RNA (1)...(19): siRNA sense strand
gaaacgacaucgagaagaa

SEQ ID NO: 698512 - RNA, 19 nt, Homo sapiens
  misc_RNA (1)...(19): siRNA sense strand
gcacgaacgucggaaacga

SEQ ID NO: 698513 - RNA, 19 nt, Homo sapiens
  misc_RNA (1)...(19): siRNA sense strand
gagaagaacaggauaaagc

SEQ ID NO: 698514 - RNA, 19 nt, Homo sapiens
  misc_RNA (1)...(19): siRNA sense strand
gagcauuccaggagagaaa

SEQ ID NO: 698515 - RNA, 19 nt, Homo sapiens
  misc_RNA (1)...(19): siRNA sense strand
gcuucgaccucaugaacaa

SEQ ID NO: 698516 - RNA, 19 nt, Homo sapiens
  misc_RNA (1)...(19): siRNA sense strand
ggaaacgacaucgagaaga

SEQ ID NO: 698517 - RNA, 19 nt, Homo sapiens
  misc_RNA (1)...(19): siRNA sense strand
gaaugggaaagacagaaga

SEQ ID NO: 698518 - RNA, 19 nt, Homo sapiens
  misc_RNA (1)...(19): siRNA sense strand
agacagaagagaagggaaa

SEQ ID NO: 698519 - RNA, 19 nt, Homo sapiens
  misc_RNA (1)...(19): siRNA sense strand
gggaaagacagaagagaag

SEQ ID NO: 698520 - RNA, 19 nt, Homo sapiens
  misc_RNA (1)...(19): siRNA sense strand
ggaaugggaaagacagaag

SEQ ID NO: 698521 - RNA, 19 nt, Homo sapiens
  misc_RNA (1)...(19): siRNA sense strand
ggaccgcuuggagcaguua

SEQ ID NO: 698522 - RNA, 19 nt, Homo sapiens
  misc_RNA (1)...(19): siRNA sense strand
cagaagagaagggaaaugg

SEQ ID NO: 698523 - RNA, 19 nt, Homo sapiens
  misc_RNA (1)...(19): siRNA sense strand
aggacggccucaagcauga

SEQ ID NO: 698524 - RNA, 19 nt, Homo sapiens
  misc_RNA (1)...(19): siRNA sense strand
ggaaauggcaagggagcau

SEQ ID NO: 698525 - RNA, 19 nt, Homo sapiens
  misc_RNA (1)...(19): siRNA sense strand
gcuuggagcaguuagaaag

SEQ ID NO: 698526 - RNA, 19 nt, Homo sapiens
  misc_RNA (1)...(19): siRNA sense strand
ugggaaagacagaagagaa

SEQ ID NO: 698527 - RNA, 19 nt, Homo sapiens
  misc_RNA (1)...(19): siRNA sense strand
uggagcaguuagaaaggaa

SEQ ID NO: 698528 - RNA, 19 nt, Homo sapiens
  misc_RNA (1)...(19): siRNA sense strand
caucgagaagaacaggaua

SEQ ID NO: 698529 - RNA, 19 nt, Homo sapiens
  misc_RNA (1)...(19): siRNA sense strand
ucgagaagaacaggauaaa

SEQ ID NO: 698530 - RNA, 19 nt, Homo sapiens
  misc_RNA (1)...(19): siRNA sense strand
gggcuucgaccucaugaac

SEQ ID NO: 698531 - RNA, 19 nt, Homo sapiens
  misc_RNA (1)...(19): siRNA sense strand
gaaacgacaucgagaagaa

SEQ ID NO: 698532 - RNA, 19 nt, Homo sapiens
  misc_RNA (1)...(19): siRNA sense strand
gcacgaacgucggaaacga

SEQ ID NO: 698533 - RNA, 19 nt, Homo sapiens
  misc_RNA (1)...(19): siRNA sense strand
gagaagaacaggauaaagc

SEQ ID NO: 698534 - RNA, 19 nt, Homo sapiens
  misc_RNA (1)...(19): siRNA sense strand
gagcauuccaggagagaaa

SEQ ID NO: 698535 - RNA, 19 nt, Homo sapiens
  misc_RNA (1)...(19): siRNA sense strand
gcuucgaccucaugaacaa

SEQ ID NO: 698536 - RNA, 19 nt, Homo sapiens
  misc_RNA (1)...(19): siRNA sense strand
ggaaacgacaucgagaaga

SEQ ID NO: 698537 - RNA, 19 nt, Homo sapiens
  misc_RNA (1)...(19): siRNA sense strand
gaaugggaaagacagaaga

SEQ ID NO: 698538 - RNA, 19 nt, Homo sapiens
  misc_RNA (1)...(19): siRNA sense strand
agacagaagagaagggaaa

SEQ ID NO: 698539 - RNA, 19 nt, Homo sapiens
  misc_RNA (1)...(19): siRNA sense strand
gggaaagacagaagagaag

SEQ ID NO: 698540 - RNA, 19 nt, Homo sapiens
  misc_RNA (1)...(19): siRNA sense strand
ggaaugggaaagacagaag

SEQ ID NO: 698541 - RNA, 19 nt, Homo sapiens
  misc_RNA (1)...(19): siRNA sense strand
ggaccgcuuggagcaguua

SEQ ID NO: 698542 - RNA, 19 nt, Homo sapiens
  misc_RNA (1)...(19): siRNA sense strand
cagaagagaagggaaaugg

SEQ ID NO: 698543 - RNA, 19 nt, Homo sapiens
  misc_RNA (1)...(19): siRNA sense strand
aggacggccucaagcauga

SEQ ID NO: 698544 - RNA, 19 nt, Homo sapiens
  misc_RNA (1)...(19): siRNA sense strand
ggaaauggcaagggagcau

SEQ ID NO: 698545 - RNA, 19 nt, Homo sapiens
  misc_RNA (1)...(19): siRNA sense strand
gcuuggagcaguuagaaag

SEQ ID NO: 698546 - RNA, 19 nt, Homo sapiens
  misc_RNA (1)...(19): siRNA sense strand
ugggaaagacagaagagaa

SEQ ID NO: 698547 - RNA, 19 nt, Homo sapiens
  misc_RNA (1)...(19): siRNA sense strand
uggagcaguuagaaaggaa

SEQ ID NO: 698548 - RNA, 19 nt, Homo sapiens
  misc_RNA (1)...(19): siRNA sense strand
caucgagaagaacaggaua

SEQ ID NO: 698549 - RNA, 19 nt, Homo sapiens
  misc_RNA (1)...(19): siRNA sense strand
ucgagaagaacaggauaaa

SEQ ID NO: 698550 - RNA, 19 nt, Homo sapiens
  misc_RNA (1)...(19): siRNA sense strand
gggcuucgaccucaugaac

SEQ ID NO: 698551 - RNA, 19 nt, Homo sapiens
  misc_RNA (1)...(19): siRNA sense strand
gcuucgaccucaugaacaa

SEQ ID NO: 698552 - RNA, 19 nt, Homo sapiens
  misc_RNA (1)...(19): siRNA sense strand
aggacggccucaagcauga

SEQ ID NO: 698553 - RNA, 19 nt, Homo sapiens
  misc_RNA (1)...(19): siRNA sense strand
gggcuucgaccucaugaac

SEQ ID NO: 698554 - RNA, 19 nt, Homo sapiens
  misc_RNA (1)...(19): siRNA sense strand
gagcauuccaggagagaaa

SEQ ID NO: 698555 - RNA, 19 nt, Homo sapiens
  misc_RNA (1)...(19): siRNA sense strand
gcuucgaccucaugaacaa

SEQ ID NO: 698556 - RNA, 19 nt, Homo sapiens
  misc_RNA (1)...(19): siRNA sense strand
agacagaagagaagggaaa

SEQ ID NO: 698557 - RNA, 19 nt, Homo sapiens
  misc_RNA (1)...(19): siRNA sense strand
gggaaagacagaagagaag

SEQ ID NO: 698558 - RNA, 19 nt, Homo sapiens
  misc_RNA (1)...(19): siRNA sense strand
ggaccgcuuggagcaguua

SEQ ID NO: 698559 - RNA, 19 nt, Homo sapiens
  misc_RNA (1)...(19): siRNA sense strand
cagaagagaagggaaaugg

SEQ ID NO: 698560 - RNA, 19 nt, Homo sapiens
  misc_RNA (1)...(19): siRNA sense strand
aggacggccucaagcauga

SEQ ID NO: 698561 - RNA, 19 nt, Homo sapiens
  misc_RNA (1)...(19): siRNA sense strand
gcuuggagcaguuagaaag

SEQ ID NO: 698562 - RNA, 19 nt, Homo sapiens
  misc_RNA (1)...(19): siRNA sense strand
ggaaauggcaagggagcau

SEQ ID NO: 698563 - RNA, 19 nt, Homo sapiens
  misc_RNA (1)...(19): siRNA sense strand
uggagcaguuagaaaggaa

SEQ ID NO: 698564 - RNA, 19 nt, Homo sapiens
  misc_RNA (1)...(19): siRNA sense strand
gggcuucgaccucaugaac

SEQ ID NO: 698565 - RNA, 19 nt, Homo sapiens
  misc_RNA (1)...(19): siRNA sense strand
gaaacgacaucgagaagaa

SEQ ID NO: 698566 - RNA, 19 nt, Homo sapiens
  misc_RNA (1)...(19): siRNA sense strand
gcacgaacgucggaaacga

SEQ ID NO: 698567 - RNA, 19 nt, Homo sapiens
  misc_RNA (1)...(19): siRNA sense strand
gagaagaacaggauaaagc

SEQ ID NO: 698568 - RNA, 19 nt, Homo sapiens
  misc_RNA (1)...(19): siRNA sense strand
gagcauuccaggagagaaa

SEQ ID NO: 698569 - RNA, 19 nt, Homo sapiens
  misc_RNA (1)...(19): siRNA sense strand
gcuucgaccucaugaacaa

SEQ ID NO: 698570 - RNA, 19 nt, Homo sapiens
  misc_RNA (1)...(19): siRNA sense strand
ggaaacgacaucgagaaga

SEQ ID NO: 698571 - RNA, 19 nt, Homo sapiens
  misc_RNA (1)...(19): siRNA sense strand
gaaugggaaagacagaaga

SEQ ID NO: 698572 - RNA, 19 nt, Homo sapiens
  misc_RNA (1)...(19): siRNA sense strand
agacagaagagaagggaaa

SEQ ID NO: 698573 - RNA, 19 nt, Homo sapiens
  misc_RNA (1)...(19): siRNA sense strand
gggaaagacagaagagaag

SEQ ID NO: 698574 - RNA, 19 nt, Homo sapiens
  misc_RNA (1)...(19): siRNA sense strand
ggaaugggaaagacagaag

SEQ ID NO: 698575 - RNA, 19 nt, Homo sapiens
  misc_RNA (1)...(19): siRNA sense strand
ggaccgcuuggagcaguua

SEQ ID NO: 698576 - RNA, 19 nt, Homo sapiens
  misc_RNA (1)...(19): siRNA sense strand
cagaagagaagggaaaugg

SEQ ID NO: 698577 - RNA, 19 nt, Homo sapiens
  misc_RNA (1)...(19): siRNA sense strand
aggacggccucaagcauga

SEQ ID NO: 698578 - RNA, 19 nt, Homo sapiens
  misc_RNA (1)...(19): siRNA sense strand
ggaaauggcaagggagcau

SEQ ID NO: 698579 - RNA, 19 nt, Homo sapiens
  misc_RNA (1)...(19): siRNA sense strand
gcuuggagcaguuagaaag

SEQ ID NO: 698580 - RNA, 19 nt, Homo sapiens
  misc_RNA (1)...(19): siRNA sense strand
ugggaaagacagaagagaa

SEQ ID NO: 698581 - RNA, 19 nt, Homo sapiens
  misc_RNA (1)...(19): siRNA sense strand
uggagcaguuagaaaggaa

SEQ ID NO: 698582 - RNA, 19 nt, Homo sapiens
  misc_RNA (1)...(19): siRNA sense strand
caucgagaagaacaggaua

SEQ ID NO: 698583 - RNA, 19 nt, Homo sapiens
  misc_RNA (1)...(19): siRNA sense strand
ucgagaagaacaggauaaa

SEQ ID NO: 698584 - RNA, 19 nt, Homo sapiens
  misc_RNA (1)...(19): siRNA sense strand
gggcuucgaccucaugaac

SEQ ID NO: 698585 - RNA, 19 nt, Homo sapiens
  misc_RNA (1)...(19): siRNA sense strand
gaaacgacaucgagaagaa

SEQ ID NO: 698586 - RNA, 19 nt, Homo sapiens
  misc_RNA (1)...(19): siRNA sense strand
gcacgaacgucggaaacga

SEQ ID NO: 698587 - RNA, 19 nt, Homo sapiens
  misc_RNA (1)...(19): siRNA sense strand
gagaagaacaggauaaagc

SEQ ID NO: 698588 - RNA, 19 nt, Homo sapiens
  misc_RNA (1)...(19): siRNA sense strand
gagcauuccaggagagaaa

SEQ ID NO: 698589 - RNA, 19 nt, Homo sapiens
  misc_RNA (1)...(19): siRNA sense strand
gcuucgaccucaugaacaa

SEQ ID NO: 698590 - RNA, 19 nt, Homo sapiens
  misc_RNA (1)...(19): siRNA sense strand
ggaaacgacaucgagaaga

SEQ ID NO: 698591 - RNA, 19 nt, Homo sapiens
  misc_RNA (1)...(19): siRNA sense strand
gaaugggaaagacagaaga

SEQ ID NO: 698592 - RNA, 19 nt, Homo sapiens
  misc_RNA (1)...(19): siRNA sense strand
agacagaagagaagggaaa

SEQ ID NO: 698593 - RNA, 19 nt, Homo sapiens
  misc_RNA (1)...(19): siRNA sense strand
gggaaagacagaagagaag

SEQ ID NO: 698594 - RNA, 19 nt, Homo sapiens
  misc_RNA (1)...(19): siRNA sense strand
ggaaugggaaagacagaag

SEQ ID NO: 698595 - RNA, 19 nt, Homo sapiens
  misc_RNA (1)...(19): siRNA sense strand
ggaccgcuuggagcaguua

SEQ ID NO: 698596 - RNA, 19 nt, Homo sapiens
  misc_RNA (1)...(19): siRNA sense strand
cagaagagaagggaaaugg

SEQ ID NO: 698597 - RNA, 19 nt, Homo sapiens
  misc_RNA (1)...(19): siRNA sense strand
aggacggccucaagcauga

SEQ ID NO: 698598 - RNA, 19 nt, Homo sapiens
  misc_RNA (1)...(19): siRNA sense strand
ggaaauggcaagggagcau

SEQ ID NO: 698599 - RNA, 19 nt, Homo sapiens
  misc_RNA (1)...(19): siRNA sense strand
gcuuggagcaguuagaaag

SEQ ID NO: 698600 - RNA, 19 nt, Homo sapiens
  misc_RNA (1)...(19): siRNA sense strand
ugggaaagacagaagagaa

SEQ ID NO: 698601 - RNA, 19 nt, Homo sapiens
  misc_RNA (1)...(19): siRNA sense strand
uggagcaguuagaaaggaa

SEQ ID NO: 698602 - RNA, 19 nt, Homo sapiens
  misc_RNA (1)...(19): siRNA sense strand
caucgagaagaacaggaua

SEQ ID NO: 698603 - RNA, 19 nt, Homo sapiens
  misc_RNA (1)...(19): siRNA sense strand
ucgagaagaacaggauaaa

SEQ ID NO: 698604 - RNA, 19 nt, Homo sapiens
  misc_RNA (1)...(19): siRNA sense strand
gggcuucgaccucaugaac

SEQ ID NO: 698605 - RNA, 19 nt, Homo sapiens
  misc_RNA (1)...(19): siRNA sense strand
gaaacgacaucgagaagaa

SEQ ID NO: 698606 - RNA, 19 nt, Homo sapiens
  misc_RNA (1)...(19): siRNA sense strand
gcacgaacgucggaaacga

SEQ ID NO: 698607 - RNA, 19 nt, Homo sapiens
  misc_RNA (1)...(19): siRNA sense strand
gagaagaacaggauaaagc

SEQ ID NO: 698608 - RNA, 19 nt, Homo sapiens
  misc_RNA (1)...(19): siRNA sense strand
gagcauuccaggagagaaa

SEQ ID NO: 698609 - RNA, 19 nt, Homo sapiens
  misc_RNA (1)...(19): siRNA sense strand
gcuucgaccucaugaacaa

SEQ ID NO: 698610 - RNA, 19 nt, Homo sapiens
  misc_RNA (1)...(19): siRNA sense strand
ggaaacgacaucgagaaga

SEQ ID NO: 698611 - RNA, 19 nt, Homo sapiens
  misc_RNA (1)...(19): siRNA sense strand
gaaugggaaagacagaaga

SEQ ID NO: 698612 - RNA, 19 nt, Homo sapiens
  misc_RNA (1)...(19): siRNA sense strand
agacagaagagaagggaaa

SEQ ID NO: 698613 - RNA, 19 nt, Homo sapiens
  misc_RNA (1)...(19): siRNA sense strand
gggaaagacagaagagaag

SEQ ID NO: 698614 - RNA, 19 nt, Homo sapiens
  misc_RNA (1)...(19): siRNA sense strand
ggaaugggaaagacagaag

SEQ ID NO: 698615 - RNA, 19 nt, Homo sapiens
  misc_RNA (1)...(19): siRNA sense strand
ggaccgcuuggagcaguua

SEQ ID NO: 698616 - RNA, 19 nt, Homo sapiens
  misc_RNA (1)...(19): siRNA sense strand
cagaagagaagggaaaugg

SEQ ID NO: 698617 - RNA, 19 nt, Homo sapiens
  misc_RNA (1)...(19): siRNA sense strand
aggacggccucaagcauga

SEQ ID NO: 698618 - RNA, 19 nt, Homo sapiens
  misc_RNA (1)...(19): siRNA sense strand
ggaaauggcaagggagcau

SEQ ID NO: 698619 - RNA, 19 nt, Homo sapiens
  misc_RNA (1)...(19): siRNA sense strand
gcuuggagcaguuagaaag

SEQ ID NO: 698620 - RNA, 19 nt, Homo sapiens
  misc_RNA (1)...(19): siRNA sense strand
ugggaaagacagaagagaa

SEQ ID NO: 698621 - RNA, 19 nt, Homo sapiens
  misc_RNA (1)...(19): siRNA sense strand
uggagcaguuagaaaggaa

SEQ ID NO: 698622 - RNA, 19 nt, Homo sapiens
  misc_RNA (1)...(19): siRNA sense strand
caucgagaagaacaggaua

SEQ ID NO: 698623 - RNA, 19 nt, Homo sapiens
  misc_RNA (1)...(19): siRNA sense strand
ucgagaagaacaggauaaa

SEQ ID NO: 698624 - RNA, 19 nt, Homo sapiens
  misc_RNA (1)...(19): siRNA sense strand
gggcuucgaccucaugaac

SEQ ID NO: 698625 - RNA, 19 nt, Homo sapiens
  misc_RNA (1)...(19): siRNA sense strand
gcuucgaccucaugaacaa

SEQ ID NO: 698626 - RNA, 19 nt, Homo sapiens
  misc_RNA (1)...(19): siRNA sense strand
aggacggccucaagcauga

SEQ ID NO: 698627 - RNA, 19 nt, Homo sapiens
  misc_RNA (1)...(19): siRNA sense strand
gggcuucgaccucaugaac

SEQ ID NO: 698628 - RNA, 19 nt, Homo sapiens
  misc_RNA (1)...(19): siRNA sense strand
gaaacgacaucgagaagaa

SEQ ID NO: 698629 - RNA, 19 nt, Homo sapiens
  misc_RNA (1)...(19): siRNA sense strand
gcacgaacgucggaaacga

SEQ ID NO: 698630 - RNA, 19 nt, Homo sapiens
  misc_RNA (1)...(19): siRNA sense strand
gagaagaacaggauaaagc

SEQ ID NO: 698631 - RNA, 19 nt, Homo sapiens
  misc_RNA (1)...(19): siRNA sense strand
gagcauuccaggagagaaa

SEQ ID NO: 698632 - RNA, 19 nt, Homo sapiens
  misc_RNA (1)...(19): siRNA sense strand
gcuucgaccucaugaacaa

SEQ ID NO: 698633 - RNA, 19 nt, Homo sapiens
  misc_RNA (1)...(19): siRNA sense strand
ggaaacgacaucgagaaga

SEQ ID NO: 698634 - RNA, 19 nt, Homo sapiens
  misc_RNA (1)...(19): siRNA sense strand
gaaugggaaagacagaaga

SEQ ID NO: 698635 - RNA, 19 nt, Homo sapiens
  misc_RNA (1)...(19): siRNA sense strand
agacagaagagaagggaaa

SEQ ID NO: 698636 - RNA, 19 nt, Homo sapiens
  misc_RNA (1)...(19): siRNA sense strand
gggaaagacagaagagaag

SEQ ID NO: 698637 - RNA, 19 nt, Homo sapiens
  misc_RNA (1)...(19): siRNA sense strand
ggaaugggaaagacagaag

SEQ ID NO: 698638 - RNA, 19 nt, Homo sapiens
  misc_RNA (1)...(19): siRNA sense strand
ggaccgcuuggagcaguua

SEQ ID NO: 698639 - RNA, 19 nt, Homo sapiens
  misc_RNA (1)...(19): siRNA sense strand
cagaagagaagggaaaugg

SEQ ID NO: 698640 - RNA, 19 nt, Homo sapiens
  misc_RNA (1)...(19): siRNA sense strand
aggacggccucaagcauga

SEQ ID NO: 698641 - RNA, 19 nt, Homo sapiens
  misc_RNA (1)...(19): siRNA sense strand
ggaaauggcaagggagcau

SEQ ID NO: 698642 - RNA, 19 nt, Homo sapiens
  misc_RNA (1)...(19): siRNA sense strand
gcuuggagcaguuagaaag

SEQ ID NO: 698643 - RNA, 19 nt, Homo sapiens
  misc_RNA (1)...(19): siRNA sense strand
ugggaaagacagaagagaa

SEQ ID NO: 698644 - RNA, 19 nt, Homo sapiens
  misc_RNA (1)...(19): siRNA sense strand
uggagcaguuagaaaggaa

SEQ ID NO: 698645 - RNA, 19 nt, Homo sapiens
  misc_RNA (1)...(19): siRNA sense strand
caucgagaagaacaggaua

SEQ ID NO: 698646 - RNA, 19 nt, Homo sapiens
  misc_RNA (1)...(19): siRNA sense strand
ucgagaagaacaggauaaa

SEQ ID NO: 698647 - RNA, 19 nt, Homo sapiens
  misc_RNA (1)...(19): siRNA sense strand
gggcuucgaccucaugaac

SEQ ID NO: 698648 - RNA, 19 nt, Homo sapiens
  misc_RNA (1)...(19): siRNA sense strand
gaaacgacaucgagaagaa

SEQ ID NO: 698649 - RNA, 19 nt, Homo sapiens
  misc_RNA (1)...(19): siRNA sense strand
gcacgaacgucggaaacga

SEQ ID NO: 698650 - RNA, 19 nt, Homo sapiens
  misc_RNA (1)...(19): siRNA sense strand
gagaagaacaggauaaagc

SEQ ID NO: 698651 - RNA, 19 nt, Homo sapiens
  misc_RNA (1)...(19): siRNA sense strand
gagcauuccaggagagaaa

SEQ ID NO: 698652 - RNA, 19 nt, Homo sapiens
  misc_RNA (1)...(19): siRNA sense strand
gcuucgaccucaugaacaa

SEQ ID NO: 698653 - RNA, 19 nt, Homo sapiens
  misc_RNA (1)...(19): siRNA sense strand
ggaaacgacaucgagaaga

SEQ ID NO: 698654 - RNA, 19 nt, Homo sapiens
  misc_RNA (1)...(19): siRNA sense strand
gaaugggaaagacagaaga

SEQ ID NO: 698655 - RNA, 19 nt, Homo sapiens
  misc_RNA (1)...(19): siRNA sense strand
agacagaagagaagggaaa

SEQ ID NO: 698656 - RNA, 19 nt, Homo sapiens
  misc_RNA (1)...(19): siRNA sense strand
gggaaagacagaagagaag

SEQ ID NO: 698657 - RNA, 19 nt, Homo sapiens
  misc_RNA (1)...(19): siRNA sense strand
ggaaugggaaagacagaag

SEQ ID NO: 698658 - RNA, 19 nt, Homo sapiens
  misc_RNA (1)...(19): siRNA sense strand
ggaccgcuuggagcaguua

SEQ ID NO: 698659 - RNA, 19 nt, Homo sapiens
  misc_RNA (1)...(19): siRNA sense strand
cagaagagaagggaaaugg

SEQ ID NO: 698660 - RNA, 19 nt, Homo sapiens
  misc_RNA (1)...(19): siRNA sense strand
aggacggccucaagcauga

SEQ ID NO: 698661 - RNA, 19 nt, Homo sapiens
  misc_RNA (1)...(19): siRNA sense strand
ggaaauggcaagggagcau

SEQ ID NO: 698662 - RNA, 19 nt, Homo sapiens
  misc_RNA (1)...(19): siRNA sense strand
gcuuggagcaguuagaaag

SEQ ID NO: 698663 - RNA, 19 nt, Homo sapiens
  misc_RNA (1)...(19): siRNA sense strand
ugggaaagacagaagagaa

SEQ ID NO: 698664 - RNA, 19 nt, Homo sapiens
  misc_RNA (1)...(19): siRNA sense strand
uggagcaguuagaaaggaa

SEQ ID NO: 698665 - RNA, 19 nt, Homo sapiens
  misc_RNA (1)...(19): siRNA sense strand
caucgagaagaacaggaua

SEQ ID NO: 698666 - RNA, 19 nt, Homo sapiens
  misc_RNA (1)...(19): siRNA sense strand
ucgagaagaacaggauaaa

SEQ ID NO: 698667 - RNA, 19 nt, Homo sapiens
  misc_RNA (1)...(19): siRNA sense strand
gggcuucgaccucaugaac

SEQ ID NO: 698668 - RNA, 19 nt, Homo sapiens
  misc_RNA (1)...(19): siRNA sense strand
gaaacgacaucgagaagaa

SEQ ID NO: 698669 - RNA, 19 nt, Homo sapiens
  misc_RNA (1)...(19): siRNA sense strand
gcacgaacgucggaaacga

SEQ ID NO: 698670 - RNA, 19 nt, Homo sapiens
  misc_RNA (1)...(19): siRNA sense strand
gagaagaacaggauaaagc

SEQ ID NO: 698671 - RNA, 19 nt, Homo sapiens
  misc_RNA (1)...(19): siRNA sense strand
gagcauuccaggagagaaa

SEQ ID NO: 698672 - RNA, 19 nt, Homo sapiens
  misc_RNA (1)...(19): siRNA sense strand
gcuucgaccucaugaacaa

SEQ ID NO: 698673 - RNA, 19 nt, Homo sapiens
  misc_RNA (1)...(19): siRNA sense strand
ggaaacgacaucgagaaga

SEQ ID NO: 698674 - RNA, 19 nt, Homo sapiens
  misc_RNA (1)...(19): siRNA sense strand
gaaugggaaagacagaaga

SEQ ID NO: 698675 - RNA, 19 nt, Homo sapiens
  misc_RNA (1)...(19): siRNA sense strand
agacagaagagaagggaaa

SEQ ID NO: 698676 - RNA, 19 nt, Homo sapiens
  misc_RNA (1)...(19): siRNA sense strand
gggaaagacagaagagaag

SEQ ID NO: 698677 - RNA, 19 nt, Homo sapiens
  misc_RNA (1)...(19): siRNA sense strand
ggaaugggaaagacagaag

SEQ ID NO: 698678 - RNA, 19 nt, Homo sapiens
  misc_RNA (1)...(19): siRNA sense strand
ggaccgcuuggagcaguua

SEQ ID NO: 698679 - RNA, 19 nt, Homo sapiens
  misc_RNA (1)...(19): siRNA sense strand
cagaagagaagggaaaugg

SEQ ID NO: 698680 - RNA, 19 nt, Homo sapiens
  misc_RNA (1)...(19): siRNA sense strand
aggacggccucaagcauga

SEQ ID NO: 698681 - RNA, 19 nt, Homo sapiens
  misc_RNA (1)...(19): siRNA sense strand
ggaaauggcaagggagcau

SEQ ID NO: 698682 - RNA, 19 nt, Homo sapiens
  misc_RNA (1)...(19): siRNA sense strand
gcuuggagcaguuagaaag

SEQ ID NO: 698683 - RNA, 19 nt, Homo sapiens
  misc_RNA (1)...(19): siRNA sense strand
ugggaaagacagaagagaa

SEQ ID NO: 698684 - RNA, 19 nt, Homo sapiens
  misc_RNA (1)...(19): siRNA sense strand
uggagcaguuagaaaggaa

SEQ ID NO: 698685 - RNA, 19 nt, Homo sapiens
  misc_RNA (1)...(19): siRNA sense strand
caucgagaagaacaggaua

SEQ ID NO: 698686 - RNA, 19 nt, Homo sapiens
  misc_RNA (1)...(19): siRNA sense strand
ucgagaagaacaggauaaa

SEQ ID NO: 698687 - RNA, 19 nt, Homo sapiens
  misc_RNA (1)...(19): siRNA sense strand
gggcuucgaccucaugaac

SEQ ID NO: 698688 - RNA, 19 nt, Homo sapiens
  misc_RNA (1)...(19): siRNA sense strand
gcuucgaccucaugaacaa

SEQ ID NO: 698689 - RNA, 19 nt, Homo sapiens
  misc_RNA (1)...(19): siRNA sense strand
aggacggccucaagcauga

SEQ ID NO: 698690 - RNA, 19 nt, Homo sapiens
  misc_RNA (1)...(19): siRNA sense strand
gggcuucgaccucaugaac

SEQ ID NO: 698691 - RNA, 19 nt, Homo sapiens
  misc_RNA (1)...(19): siRNA sense strand
gagcauuccaggagagaaa

SEQ ID NO: 698692 - RNA, 19 nt, Homo sapiens
  misc_RNA (1)...(19): siRNA sense strand
gcuucgaccucaugaacaa

SEQ ID NO: 698693 - RNA, 19 nt, Homo sapiens
  misc_RNA (1)...(19): siRNA sense strand
agacagaagagaagggaaa

SEQ ID NO: 698694 - RNA, 19 nt, Homo sapiens
  misc_RNA (1)...(19): siRNA sense strand
gggaaagacagaagagaag

SEQ ID NO: 698695 - RNA, 19 nt, Homo sapiens
  misc_RNA (1)...(19): siRNA sense strand
ggaccgcuuggagcaguua

SEQ ID NO: 698696 - RNA, 19 nt, Homo sapiens
  misc_RNA (1)...(19): siRNA sense strand
cagaagagaagggaaaugg

SEQ ID NO: 698697 - RNA, 19 nt, Homo sapiens
  misc_RNA (1)...(19): siRNA sense strand
aggacggccucaagcauga

SEQ ID NO: 698698 - RNA, 19 nt, Homo sapiens
  misc_RNA (1)...(19): siRNA sense strand
gcuuggagcaguuagaaag

SEQ ID NO: 698699 - RNA, 19 nt, Homo sapiens
  misc_RNA (1)...(19): siRNA sense strand
ggaaauggcaagggagcau

SEQ ID NO: 698700 - RNA, 19 nt, Homo sapiens
  misc_RNA (1)...(19): siRNA sense strand
uggagcaguuagaaaggaa

SEQ ID NO: 698701 - RNA, 19 nt, Homo sapiens
  misc_RNA (1)...(19): siRNA sense strand
gggcuucgaccucaugaac

SEQ ID NO: 698702 - RNA, 19 nt, Homo sapiens
  misc_RNA (1)...(19): siRNA sense strand
gaaacgacaucgagaagaa

SEQ ID NO: 698703 - RNA, 19 nt, Homo sapiens
  misc_RNA (1)...(19): siRNA sense strand
gcacgaacgucggaaacga

SEQ ID NO: 698704 - RNA, 19 nt, Homo sapiens
  misc_RNA (1)...(19): siRNA sense strand
gagaagaacaggauaaagc

SEQ ID NO: 698705 - RNA, 19 nt, Homo sapiens
  misc_RNA (1)...(19): siRNA sense strand
gagcauuccaggagagaaa

SEQ ID NO: 698706 - RNA, 19 nt, Homo sapiens
  misc_RNA (1)...(19): siRNA sense strand
gcuucgaccucaugaacaa

SEQ ID NO: 698707 - RNA, 19 nt, Homo sapiens
  misc_RNA (1)...(19): siRNA sense strand
ggaaacgacaucgagaaga

SEQ ID NO: 698708 - RNA, 19 nt, Homo sapiens
  misc_RNA (1)...(19): siRNA sense strand
gaaugggaaagacagaaga

SEQ ID NO: 698709 - RNA, 19 nt, Homo sapiens
  misc_RNA (1)...(19): siRNA sense strand
agacagaagagaagggaaa

SEQ ID NO: 698710 - RNA, 19 nt, Homo sapiens
  misc_RNA (1)...(19): siRNA sense strand
gggaaagacagaagagaag

SEQ ID NO: 698711 - RNA, 19 nt, Homo sapiens
  misc_RNA (1)...(19): siRNA sense strand
ggaaugggaaagacagaag

SEQ ID NO: 698712 - RNA, 19 nt, Homo sapiens
  misc_RNA (1)...(19): siRNA sense strand
ggaccgcuuggagcaguua

SEQ ID NO: 698713 - RNA, 19 nt, Homo sapiens
  misc_RNA (1)...(19): siRNA sense strand
cagaagagaagggaaaugg

SEQ ID NO: 698714 - RNA, 19 nt, Homo sapiens
  misc_RNA (1)...(19): siRNA sense strand
aggacggccucaagcauga

SEQ ID NO: 698715 - RNA, 19 nt, Homo sapiens
  misc_RNA (1)...(19): siRNA sense strand
ggaaauggcaagggagcau

SEQ ID NO: 698716 - RNA, 19 nt, Homo sapiens
  misc_RNA (1)...(19): siRNA sense strand
gcuuggagcaguuagaaag

SEQ ID NO: 698717 - RNA, 19 nt, Homo sapiens
  misc_RNA (1)...(19): siRNA sense strand
ugggaaagacagaagagaa

SEQ ID NO: 698718 - RNA, 19 nt, Homo sapiens
  misc_RNA (1)...(19): siRNA sense strand
uggagcaguuagaaaggaa

SEQ ID NO: 698719 - RNA, 19 nt, Homo sapiens
  misc_RNA (1)...(19): siRNA sense strand
caucgagaagaacaggaua

SEQ ID NO: 698720 - RNA, 19 nt, Homo sapiens
  misc_RNA (1)...(19): siRNA sense strand
ucgagaagaacaggauaaa

SEQ ID NO: 698721 - RNA, 19 nt, Homo sapiens
  misc_RNA (1)...(19): siRNA sense strand
gggcuucgaccucaugaac

SEQ ID NO: 698722 - RNA, 19 nt, Homo sapiens
  misc_RNA (1)...(19): siRNA sense strand
gaaacgacaucgagaagaa

SEQ ID NO: 698723 - RNA, 19 nt, Homo sapiens
  misc_RNA (1)...(19): siRNA sense strand
gcacgaacgucggaaacga

SEQ ID NO: 698724 - RNA, 19 nt, Homo sapiens
  misc_RNA (1)...(19): siRNA sense strand
gagaagaacaggauaaagc

SEQ ID NO: 698725 - RNA, 19 nt, Homo sapiens
  misc_RNA (1)...(19): siRNA sense strand
gagcauuccaggagagaaa

SEQ ID NO: 698726 - RNA, 19 nt, Homo sapiens
  misc_RNA (1)...(19): siRNA sense strand
gcuucgaccucaugaacaa

SEQ ID NO: 698727 - RNA, 19 nt, Homo sapiens
  misc_RNA (1)...(19): siRNA sense strand
ggaaacgacaucgagaaga

SEQ ID NO: 698728 - RNA, 19 nt, Homo sapiens
  misc_RNA (1)...(19): siRNA sense strand
gaaugggaaagacagaaga

SEQ ID NO: 698729 - RNA, 19 nt, Homo sapiens
  misc_RNA (1)...(19): siRNA sense strand
agacagaagagaagggaaa

SEQ ID NO: 698730 - RNA, 19 nt, Homo sapiens
  misc_RNA (1)...(19): siRNA sense strand
gggaaagacagaagagaag

SEQ ID NO: 698731 - RNA, 19 nt, Homo sapiens
  misc_RNA (1)...(19): siRNA sense strand
ggaaugggaaagacagaag

SEQ ID NO: 698732 - RNA, 19 nt, Homo sapiens
  misc_RNA (1)...(19): siRNA sense strand
ggaccgcuuggagcaguua

SEQ ID NO: 698733 - RNA, 19 nt, Homo sapiens
  misc_RNA (1)...(19): siRNA sense strand
cagaagagaagggaaaugg

SEQ ID NO: 698734 - RNA, 19 nt, Homo sapiens
  misc_RNA (1)...(19): siRNA sense strand
aggacggccucaagcauga

SEQ ID NO: 698735 - RNA, 19 nt, Homo sapiens
  misc_RNA (1)...(19): siRNA sense strand
ggaaauggcaagggagcau

SEQ ID NO: 698736 - RNA, 19 nt, Homo sapiens
  misc_RNA (1)...(19): siRNA sense strand
gcuuggagcaguuagaaag

SEQ ID NO: 698737 - RNA, 19 nt, Homo sapiens
  misc_RNA (1)...(19): siRNA sense strand
ugggaaagacagaagagaa

SEQ ID NO: 698738 - RNA, 19 nt, Homo sapiens
  misc_RNA (1)...(19): siRNA sense strand
uggagcaguuagaaaggaa

SEQ ID NO: 698739 - RNA, 19 nt, Homo sapiens
  misc_RNA (1)...(19): siRNA sense strand
caucgagaagaacaggaua

SEQ ID NO: 698740 - RNA, 19 nt, Homo sapiens
  misc_RNA (1)...(19): siRNA sense strand
ucgagaagaacaggauaaa

SEQ ID NO: 698741 - RNA, 19 nt, Homo sapiens
  misc_RNA (1)...(19): siRNA sense strand
gggcuucgaccucaugaac

SEQ ID NO: 698742 - RNA, 19 nt, Homo sapiens
  misc_RNA (1)...(19): siRNA sense strand
caacgaaagugaagacaga

SEQ ID NO: 698743 - RNA, 19 nt, Homo sapiens
  misc_RNA (1)...(19): siRNA sense strand
acaggaagaucaagaauga

SEQ ID NO: 698744 - RNA, 19 nt, Homo sapiens
  misc_RNA (1)...(19): siRNA sense strand
gcccagagccuacuagaaa

SEQ ID NO: 698745 - RNA, 19 nt, Homo sapiens
  misc_RNA (1)...(19): siRNA sense strand
gcgugcagcugaaccagua

SEQ ID NO: 698746 - RNA, 19 nt, Homo sapiens
  misc_RNA (1)...(19): siRNA sense strand
ccacuggcgucacguugua

SEQ ID NO: 698747 - RNA, 19 nt, Homo sapiens
  misc_RNA (1)...(19): siRNA sense strand
gggaaggccuuggauguau

SEQ ID NO: 698748 - RNA, 19 nt, Homo sapiens
  misc_RNA (1)...(19): siRNA sense strand
gaagacagacacuaugcaa

SEQ ID NO: 698749 - RNA, 19 nt, Homo sapiens
  misc_RNA (1)...(19): siRNA sense strand
gacagacacuaugcaauga

SEQ ID NO: 698750 - RNA, 19 nt, Homo sapiens
  misc_RNA (1)...(19): siRNA sense strand
ugacagaggaggagguuaa

SEQ ID NO: 698751 - RNA, 19 nt, Homo sapiens
  misc_RNA (1)...(19): siRNA sense strand
aguacaagcugcagaguga

SEQ ID NO: 698752 - RNA, 19 nt, Homo sapiens
  misc_RNA (1)...(19): siRNA sense strand
ggaaggccuuggauguaug

SEQ ID NO: 698753 - RNA, 19 nt, Homo sapiens
  misc_RNA (1)...(19): siRNA sense strand
gaccugauccugaagaugu

SEQ ID NO: 698754 - RNA, 19 nt, Homo sapiens
  misc_RNA (1)...(19): siRNA sense strand
ugaaguccaugcugaggaa

SEQ ID NO: 698755 - RNA, 19 nt, Homo sapiens
  misc_RNA (1)...(19): siRNA sense strand
cagacacuaugcaaugaaa

SEQ ID NO: 698756 - RNA, 19 nt, Homo sapiens
  misc_RNA (1)...(19): siRNA sense strand
gaaugagcccgugguguuu

SEQ ID NO: 698757 - RNA, 19 nt, Homo sapiens
  misc_RNA (1)...(19): siRNA sense strand
ggaagugcccugugacaag

SEQ ID NO: 698758 - RNA, 19 nt, Homo sapiens
  misc_RNA (1)...(19): siRNA sense strand
gaagauguuagacaagaau

SEQ ID NO: 698759 - RNA, 19 nt, Homo sapiens
  misc_RNA (1)...(19): siRNA sense strand
ucauggaagugcccuguga

SEQ ID NO: 698760 - RNA, 19 nt, Homo sapiens
  misc_RNA (1)...(19): siRNA sense strand
agacagacacuaugcaaug

SEQ ID NO: 698761 - RNA, 19 nt, Homo sapiens
  misc_RNA (1)...(19): siRNA sense strand
ugaucgagguccuggauga

SEQ ID NO: 698762 - RNA, 19 nt, Homo sapiens
  misc_RNA (1)...(19): siRNA sense strand
gagauugccauccugaaga

SEQ ID NO: 698763 - RNA, 19 nt, Homo sapiens
  misc_RNA (1)...(19): siRNA sense strand
gaagcuggaccacgugaau

SEQ ID NO: 698764 - RNA, 19 nt, Homo sapiens
  misc_RNA (1)...(19): siRNA sense strand
cagaggaggagguuaagaa

SEQ ID NO: 698765 - RNA, 19 nt, Homo sapiens
  misc_RNA (1)...(19): siRNA sense strand
agaaugagcccgugguguu

SEQ ID NO: 698766 - RNA, 19 nt, Homo sapiens
  misc_RNA (1)...(19): siRNA sense strand
uguuugaccuccugagaaa

SEQ ID NO: 698767 - RNA, 19 nt, Homo sapiens
  misc_RNA (1)...(19): siRNA sense strand
ugaagauguuagacaagaa

SEQ ID NO: 698768 - RNA, 19 nt, Homo sapiens
  misc_RNA (1)...(19): siRNA sense strand
ccacggugauccuggugaa

SEQ ID NO: 698769 - RNA, 19 nt, Homo sapiens
  misc_RNA (1)...(19): siRNA sense strand
cugaagauguuagacaaga

SEQ ID NO: 698770 - RNA, 19 nt, Homo sapiens
  misc_RNA (1)...(19): siRNA sense strand
ggaggagguuaagaacuca

SEQ ID NO: 698771 - RNA, 19 nt, Homo sapiens
  misc_RNA (1)...(19): siRNA sense strand
ggagauugccauccugaag

SEQ ID NO: 698772 - RNA, 19 nt, Homo sapiens
  misc_RNA (1)...(19): siRNA sense strand
ggaagugcccauucaucga

SEQ ID NO: 698773 - RNA, 19 nt, Homo sapiens
  misc_RNA (1)...(19): siRNA sense strand
agauugccauccugaagaa

SEQ ID NO: 698774 - RNA, 19 nt, Homo sapiens
  misc_RNA (1)...(19): siRNA sense strand
ccgaggccauuucugauuc

SEQ ID NO: 698775 - RNA, 19 nt, Homo sapiens
  misc_RNA (1)...(19): siRNA sense strand
ugaauguggucaaacugau

SEQ ID NO: 698776 - RNA, 19 nt, Homo sapiens
  misc_RNA (1)...(19): siRNA sense strand
gugaauguggucaaacuga

SEQ ID NO: 698777 - RNA, 19 nt, Homo sapiens
  misc_RNA (1)...(19): siRNA sense strand
gggaagagcgauccauguc

SEQ ID NO: 698778 - RNA, 19 nt, Homo sapiens
  misc_RNA (1)...(19): siRNA sense strand
aggaggagguuaagaacuc

SEQ ID NO: 698779 - RNA, 19 nt, Homo sapiens
  misc_RNA (1)...(19): siRNA sense strand
gaauguggucaaacugauc

SEQ ID NO: 698780 - RNA, 19 nt, Homo sapiens
  misc_RNA (1)...(19): siRNA sense strand
ggaagagcgauccaugucu

SEQ ID NO: 698781 - RNA, 19 nt, Homo sapiens
  misc_RNA (1)...(19): siRNA sense strand
guacuugcacugccagaag

SEQ ID NO: 698782 - RNA, 19 nt, Homo sapiens
  misc_RNA (1)...(19): siRNA sense strand
gugaagaucgccgacuuug

SEQ ID NO: 698783 - RNA, 19 nt, Homo sapiens
  misc_RNA (1)...(19): siRNA sense strand
gagguuaagaacucaguca

SEQ ID NO: 698784 - RNA, 19 nt, Homo sapiens
  misc_RNA (1)...(19): siRNA sense strand
ccacaggaagaucaagaau

SEQ ID NO: 698785 - RNA, 19 nt, Homo sapiens
  misc_RNA (1)...(19): siRNA sense strand
gaacucagucaggcucauc

SEQ ID NO: 698786 - RNA, 19 nt, Homo sapiens
  misc_RNA (1)...(19): siRNA sense strand
gaugaugggcacgugaaga

SEQ ID NO: 698787 - RNA, 19 nt, Homo sapiens
  misc_RNA (1)...(19): siRNA sense strand
ugggaaggccuuggaugua

SEQ ID NO: 698788 - RNA, 19 nt, Homo sapiens
  misc_RNA (1)...(19): siRNA sense strand
gugggaaggccuuggaugu

SEQ ID NO: 698789 - RNA, 19 nt, Homo sapiens
  misc_RNA (1)...(19): siRNA sense strand
gacacuaugcaaugaaagu

SEQ ID NO: 698790 - RNA, 19 nt, Homo sapiens
  misc_RNA (1)...(19): siRNA sense strand
ugccagacaucaaguugca

SEQ ID NO: 698791 - RNA, 19 nt, Homo sapiens
  misc_RNA (1)...(19): siRNA sense strand
guuguacugcuuugucuau

SEQ ID NO: 698792 - RNA, 19 nt, Homo sapiens
  misc_RNA (1)...(19): siRNA sense strand
gggaugaugggcacgugaa

SEQ ID NO: 698793 - RNA, 19 nt, Homo sapiens
  misc_RNA (1)...(19): siRNA sense strand
uacuugcacugccagaaga

SEQ ID NO: 698794 - RNA, 19 nt, Homo sapiens
  misc_RNA (1)...(19): siRNA sense strand
aaaagaaguuacugaagca

SEQ ID NO: 698795 - RNA, 19 nt, Homo sapiens
  misc_RNA (1)...(19): siRNA sense strand
uccugaagauguuagacaa

SEQ ID NO: 698796 - RNA, 19 nt, Homo sapiens
  misc_RNA (1)...(19): siRNA sense strand
ugacccagcugaggacaac

SEQ ID NO: 698797 - RNA, 19 nt, Homo sapiens
  misc_RNA (1)...(19): siRNA sense strand
cacaggaagaucaagaaug

SEQ ID NO: 698798 - RNA, 19 nt, Homo sapiens
  misc_RNA (1)...(19): siRNA sense strand
cgugaagaucgccgacuuu

SEQ ID NO: 698799 - RNA, 19 nt, Homo sapiens
  misc_RNA (1)...(19): siRNA sense strand
gaauuggggugccagacau

SEQ ID NO: 698800 - RNA, 19 nt, Homo sapiens
  misc_RNA (1)...(19): siRNA sense strand
caacgaaagugaagacaga

SEQ ID NO: 698801 - RNA, 19 nt, Homo sapiens
  misc_RNA (1)...(19): siRNA sense strand
acaggaagaucaagaauga

SEQ ID NO: 698802 - RNA, 19 nt, Homo sapiens
  misc_RNA (1)...(19): siRNA sense strand
gcccagagccuacuagaaa

SEQ ID NO: 698803 - RNA, 19 nt, Homo sapiens
  misc_RNA (1)...(19): siRNA sense strand
gcgugcagcugaaccagua

SEQ ID NO: 698804 - RNA, 19 nt, Homo sapiens
  misc_RNA (1)...(19): siRNA sense strand
ccacuggcgucacguugua

SEQ ID NO: 698805 - RNA, 19 nt, Homo sapiens
  misc_RNA (1)...(19): siRNA sense strand
gggaaggccuuggauguau

SEQ ID NO: 698806 - RNA, 19 nt, Homo sapiens
  misc_RNA (1)...(19): siRNA sense strand
gaagacagacacuaugcaa

SEQ ID NO: 698807 - RNA, 19 nt, Homo sapiens
  misc_RNA (1)...(19): siRNA sense strand
gacagacacuaugcaauga

SEQ ID NO: 698808 - RNA, 19 nt, Homo sapiens
  misc_RNA (1)...(19): siRNA sense strand
ugacagaggaggagguuaa

SEQ ID NO: 698809 - RNA, 19 nt, Homo sapiens
  misc_RNA (1)...(19): siRNA sense strand
aguacaagcugcagaguga

SEQ ID NO: 698810 - RNA, 19 nt, Homo sapiens
  misc_RNA (1)...(19): siRNA sense strand
ggaaggccuuggauguaug

SEQ ID NO: 698811 - RNA, 19 nt, Homo sapiens
  misc_RNA (1)...(19): siRNA sense strand
gaccugauccugaagaugu

SEQ ID NO: 698812 - RNA, 19 nt, Homo sapiens
  misc_RNA (1)...(19): siRNA sense strand
ugaaguccaugcugaggaa

SEQ ID NO: 698813 - RNA, 19 nt, Homo sapiens
  misc_RNA (1)...(19): siRNA sense strand
cagacacuaugcaaugaaa

SEQ ID NO: 698814 - RNA, 19 nt, Homo sapiens
  misc_RNA (1)...(19): siRNA sense strand
gaaugagcccgugguguuu

SEQ ID NO: 698815 - RNA, 19 nt, Homo sapiens
  misc_RNA (1)...(19): siRNA sense strand
ggaagugcccugugacaag

SEQ ID NO: 698816 - RNA, 19 nt, Homo sapiens
  misc_RNA (1)...(19): siRNA sense strand
gaagauguuagacaagaau

SEQ ID NO: 698817 - RNA, 19 nt, Homo sapiens
  misc_RNA (1)...(19): siRNA sense strand
ucauggaagugcccuguga

SEQ ID NO: 698818 - RNA, 19 nt, Homo sapiens
  misc_RNA (1)...(19): siRNA sense strand
agacagacacuaugcaaug

SEQ ID NO: 698819 - RNA, 19 nt, Homo sapiens
  misc_RNA (1)...(19): siRNA sense strand
ugaucgagguccuggauga

SEQ ID NO: 698820 - RNA, 19 nt, Homo sapiens
  misc_RNA (1)...(19): siRNA sense strand
gagauugccauccugaaga

SEQ ID NO: 698821 - RNA, 19 nt, Homo sapiens
  misc_RNA (1)...(19): siRNA sense strand
gaagcuggaccacgugaau

SEQ ID NO: 698822 - RNA, 19 nt, Homo sapiens
  misc_RNA (1)...(19): siRNA sense strand
cagaggaggagguuaagaa

SEQ ID NO: 698823 - RNA, 19 nt, Homo sapiens
  misc_RNA (1)...(19): siRNA sense strand
agaaugagcccgugguguu

SEQ ID NO: 698824 - RNA, 19 nt, Homo sapiens
  misc_RNA (1)...(19): siRNA sense strand
uguuugaccuccugagaaa

SEQ ID NO: 698825 - RNA, 19 nt, Homo sapiens
  misc_RNA (1)...(19): siRNA sense strand
ugaagauguuagacaagaa

SEQ ID NO: 698826 - RNA, 19 nt, Homo sapiens
  misc_RNA (1)...(19): siRNA sense strand
ccacggugauccuggugaa

SEQ ID NO: 698827 - RNA, 19 nt, Homo sapiens
  misc_RNA (1)...(19): siRNA sense strand
cugaagauguuagacaaga

SEQ ID NO: 698828 - RNA, 19 nt, Homo sapiens
  misc_RNA (1)...(19): siRNA sense strand
ggaggagguuaagaacuca

SEQ ID NO: 698829 - RNA, 19 nt, Homo sapiens
  misc_RNA (1)...(19): siRNA sense strand
ggagauugccauccugaag

SEQ ID NO: 698830 - RNA, 19 nt, Homo sapiens
  misc_RNA (1)...(19): siRNA sense strand
ggaagugcccauucaucga

SEQ ID NO: 698831 - RNA, 19 nt, Homo sapiens
  misc_RNA (1)...(19): siRNA sense strand
agauugccauccugaagaa

SEQ ID NO: 698832 - RNA, 19 nt, Homo sapiens
  misc_RNA (1)...(19): siRNA sense strand
ccgaggccauuucugauuc

SEQ ID NO: 698833 - RNA, 19 nt, Homo sapiens
  misc_RNA (1)...(19): siRNA sense strand
ugaauguggucaaacugau

SEQ ID NO: 698834 - RNA, 19 nt, Homo sapiens
  misc_RNA (1)...(19): siRNA sense strand
gugaauguggucaaacuga

SEQ ID NO: 698835 - RNA, 19 nt, Homo sapiens
  misc_RNA (1)...(19): siRNA sense strand
gggaagagcgauccauguc

SEQ ID NO: 698836 - RNA, 19 nt, Homo sapiens
  misc_RNA (1)...(19): siRNA sense strand
aggaggagguuaagaacuc

SEQ ID NO: 698837 - RNA, 19 nt, Homo sapiens
  misc_RNA (1)...(19): siRNA sense strand
gaauguggucaaacugauc

SEQ ID NO: 698838 - RNA, 19 nt, Homo sapiens
  misc_RNA (1)...(19): siRNA sense strand
ggaagagcgauccaugucu

SEQ ID NO: 698839 - RNA, 19 nt, Homo sapiens
  misc_RNA (1)...(19): siRNA sense strand
guacuugcacugccagaag

SEQ ID NO: 698840 - RNA, 19 nt, Homo sapiens
  misc_RNA (1)...(19): siRNA sense strand
gugaagaucgccgacuuug

SEQ ID NO: 698841 - RNA, 19 nt, Homo sapiens
  misc_RNA (1)...(19): siRNA sense strand
gagguuaagaacucaguca

SEQ ID NO: 698842 - RNA, 19 nt, Homo sapiens
  misc_RNA (1)...(19): siRNA sense strand
ccacaggaagaucaagaau

SEQ ID NO: 698843 - RNA, 19 nt, Homo sapiens
  misc_RNA (1)...(19): siRNA sense strand
gaacucagucaggcucauc

SEQ ID NO: 698844 - RNA, 19 nt, Homo sapiens
  misc_RNA (1)...(19): siRNA sense strand
gaugaugggcacgugaaga

SEQ ID NO: 698845 - RNA, 19 nt, Homo sapiens
  misc_RNA (1)...(19): siRNA sense strand
ugggaaggccuuggaugua

SEQ ID NO: 698846 - RNA, 19 nt, Homo sapiens
  misc_RNA (1)...(19): siRNA sense strand
gugggaaggccuuggaugu

SEQ ID NO: 698847 - RNA, 19 nt, Homo sapiens
  misc_RNA (1)...(19): siRNA sense strand
gacacuaugcaaugaaagu

SEQ ID NO: 698848 - RNA, 19 nt, Homo sapiens
  misc_RNA (1)...(19): siRNA sense strand
ugccagacaucaaguugca

SEQ ID NO: 698849 - RNA, 19 nt, Homo sapiens
  misc_RNA (1)...(19): siRNA sense strand
guuguacugcuuugucuau

SEQ ID NO: 698850 - RNA, 19 nt, Homo sapiens
  misc_RNA (1)...(19): siRNA sense strand
gggaugaugggcacgugaa

SEQ ID NO: 698851 - RNA, 19 nt, Homo sapiens
  misc_RNA (1)...(19): siRNA sense strand
uacuugcacugccagaaga

SEQ ID NO: 698852 - RNA, 19 nt, Homo sapiens
  misc_RNA (1)...(19): siRNA sense strand
aaaagaaguuacugaagca

SEQ ID NO: 698853 - RNA, 19 nt, Homo sapiens
  misc_RNA (1)...(19): siRNA sense strand
uccugaagauguuagacaa

SEQ ID NO: 698854 - RNA, 19 nt, Homo sapiens
  misc_RNA (1)...(19): siRNA sense strand
ugacccagcugaggacaac

SEQ ID NO: 698855 - RNA, 19 nt, Homo sapiens
  misc_RNA (1)...(19): siRNA sense strand
cacaggaagaucaagaaug

SEQ ID NO: 698856 - RNA, 19 nt, Homo sapiens
  misc_RNA (1)...(19): siRNA sense strand
cgugaagaucgccgacuuu

SEQ ID NO: 698857 - RNA, 19 nt, Homo sapiens
  misc_RNA (1)...(19): siRNA sense strand
gaauuggggugccagacau

SEQ ID NO: 698858 - RNA, 19 nt, Homo sapiens
  misc_RNA (1)...(19): siRNA sense strand
caacgaaagugaagacaga

SEQ ID NO: 698859 - RNA, 19 nt, Homo sapiens
  misc_RNA (1)...(19): siRNA sense strand
acaggaagaucaagaauga

SEQ ID NO: 698860 - RNA, 19 nt, Homo sapiens
  misc_RNA (1)...(19): siRNA sense strand
gcccagagccuacuagaaa

SEQ ID NO: 698861 - RNA, 19 nt, Homo sapiens
  misc_RNA (1)...(19): siRNA sense strand
gcgugcagcugaaccagua

SEQ ID NO: 698862 - RNA, 19 nt, Homo sapiens
  misc_RNA (1)...(19): siRNA sense strand
ccacuggcgucacguugua

SEQ ID NO: 698863 - RNA, 19 nt, Homo sapiens
  misc_RNA (1)...(19): siRNA sense strand
gggaaggccuuggauguau

SEQ ID NO: 698864 - RNA, 19 nt, Homo sapiens
  misc_RNA (1)...(19): siRNA sense strand
gaagacagacacuaugcaa

SEQ ID NO: 698865 - RNA, 19 nt, Homo sapiens
  misc_RNA (1)...(19): siRNA sense strand
gacagacacuaugcaauga

SEQ ID NO: 698866 - RNA, 19 nt, Homo sapiens
  misc_RNA (1)...(19): siRNA sense strand
ugacagaggaggagguuaa

SEQ ID NO: 698867 - RNA, 19 nt, Homo sapiens
  misc_RNA (1)...(19): siRNA sense strand
aguacaagcugcagaguga

SEQ ID NO: 698868 - RNA, 19 nt, Homo sapiens
  misc_RNA (1)...(19): siRNA sense strand
ggaaggccuuggauguaug

SEQ ID NO: 698869 - RNA, 19 nt, Homo sapiens
  misc_RNA (1)...(19): siRNA sense strand
gaccugauccugaagaugu

SEQ ID NO: 698870 - RNA, 19 nt, Homo sapiens
  misc_RNA (1)...(19): siRNA sense strand
ugaaguccaugcugaggaa

SEQ ID NO: 698871 - RNA, 19 nt, Homo sapiens
  misc_RNA (1)...(19): siRNA sense strand
cagacacuaugcaaugaaa

SEQ ID NO: 698872 - RNA, 19 nt, Homo sapiens
  misc_RNA (1)...(19): siRNA sense strand
gaaugagcccgugguguuu

SEQ ID NO: 698873 - RNA, 19 nt, Homo sapiens
  misc_RNA (1)...(19): siRNA sense strand
ggaagugcccugugacaag

SEQ ID NO: 698874 - RNA, 19 nt, Homo sapiens
  misc_RNA (1)...(19): siRNA sense strand
gaagauguuagacaagaau

SEQ ID NO: 698875 - RNA, 19 nt, Homo sapiens
  misc_RNA (1)...(19): siRNA sense strand
ucauggaagugcccuguga

SEQ ID NO: 698876 - RNA, 19 nt, Homo sapiens
  misc_RNA (1)...(19): siRNA sense strand
agacagacacuaugcaaug

SEQ ID NO: 698877 - RNA, 19 nt, Homo sapiens
  misc_RNA (1)...(19): siRNA sense strand
ugaucgagguccuggauga

SEQ ID NO: 698878 - RNA, 19 nt, Homo sapiens
  misc_RNA (1)...(19): siRNA sense strand
gagauugccauccugaaga

SEQ ID NO: 698879 - RNA, 19 nt, Homo sapiens
  misc_RNA (1)...(19): siRNA sense strand
gaagcuggaccacgugaau

SEQ ID NO: 698880 - RNA, 19 nt, Homo sapiens
  misc_RNA (1)...(19): siRNA sense strand
cagaggaggagguuaagaa

SEQ ID NO: 698881 - RNA, 19 nt, Homo sapiens
  misc_RNA (1)...(19): siRNA sense strand
agaaugagcccgugguguu

SEQ ID NO: 698882 - RNA, 19 nt, Homo sapiens
  misc_RNA (1)...(19): siRNA sense strand
uguuugaccuccugagaaa

SEQ ID NO: 698883 - RNA, 19 nt, Homo sapiens
  misc_RNA (1)...(19): siRNA sense strand
ugaagauguuagacaagaa

SEQ ID NO: 698884 - RNA, 19 nt, Homo sapiens
  misc_RNA (1)...(19): siRNA sense strand
ccacggugauccuggugaa

SEQ ID NO: 698885 - RNA, 19 nt, Homo sapiens
  misc_RNA (1)...(19): siRNA sense strand
cugaagauguuagacaaga

SEQ ID NO: 698886 - RNA, 19 nt, Homo sapiens
  misc_RNA (1)...(19): siRNA sense strand
ggaggagguuaagaacuca

SEQ ID NO: 698887 - RNA, 19 nt, Homo sapiens
  misc_RNA (1)...(19): siRNA sense strand
ggagauugccauccugaag

SEQ ID NO: 698888 - RNA, 19 nt, Homo sapiens
  misc_RNA (1)...(19): siRNA sense strand
ggaagugcccauucaucga

SEQ ID NO: 698889 - RNA, 19 nt, Homo sapiens
  misc_RNA (1)...(19): siRNA sense strand
agauugccauccugaagaa

SEQ ID NO: 698890 - RNA, 19 nt, Homo sapiens
  misc_RNA (1)...(19): siRNA sense strand
ccgaggccauuucugauuc

SEQ ID NO: 698891 - RNA, 19 nt, Homo sapiens
  misc_RNA (1)...(19): siRNA sense strand
ugaauguggucaaacugau

SEQ ID NO: 698892 - RNA, 19 nt, Homo sapiens
  misc_RNA (1)...(19): siRNA sense strand
gugaauguggucaaacuga

SEQ ID NO: 698893 - RNA, 19 nt, Homo sapiens
  misc_RNA (1)...(19): siRNA sense strand
gggaagagcgauccauguc

SEQ ID NO: 698894 - RNA, 19 nt, Homo sapiens
  misc_RNA (1)...(19): siRNA sense strand
aggaggagguuaagaacuc

SEQ ID NO: 698895 - RNA, 19 nt, Homo sapiens
  misc_RNA (1)...(19): siRNA sense strand
gaauguggucaaacugauc

SEQ ID NO: 698896 - RNA, 19 nt, Homo sapiens
  misc_RNA (1)...(19): siRNA sense strand
ggaagagcgauccaugucu

SEQ ID NO: 698897 - RNA, 19 nt, Homo sapiens
  misc_RNA (1)...(19): siRNA sense strand
guacuugcacugccagaag

SEQ ID NO: 698898 - RNA, 19 nt, Homo sapiens
  misc_RNA (1)...(19): siRNA sense strand
gugaagaucgccgacuuug

SEQ ID NO: 698899 - RNA, 19 nt, Homo sapiens
  misc_RNA (1)...(19): siRNA sense strand
gagguuaagaacucaguca

SEQ ID NO: 698900 - RNA, 19 nt, Homo sapiens
  misc_RNA (1)...(19): siRNA sense strand
ccacaggaagaucaagaau

SEQ ID NO: 698901 - RNA, 19 nt, Homo sapiens
  misc_RNA (1)...(19): siRNA sense strand
gaacucagucaggcucauc

SEQ ID NO: 698902 - RNA, 19 nt, Homo sapiens
  misc_RNA (1)...(19): siRNA sense strand
gaugaugggcacgugaaga

SEQ ID NO: 698903 - RNA, 19 nt, Homo sapiens
  misc_RNA (1)...(19): siRNA sense strand
ugggaaggccuuggaugua

SEQ ID NO: 698904 - RNA, 19 nt, Homo sapiens
  misc_RNA (1)...(19): siRNA sense strand
gugggaaggccuuggaugu

SEQ ID NO: 698905 - RNA, 19 nt, Homo sapiens
  misc_RNA (1)...(19): siRNA sense strand
gacacuaugcaaugaaagu

SEQ ID NO: 698906 - RNA, 19 nt, Homo sapiens
  misc_RNA (1)...(19): siRNA sense strand
ugccagacaucaaguugca

SEQ ID NO: 698907 - RNA, 19 nt, Homo sapiens
  misc_RNA (1)...(19): siRNA sense strand
guuguacugcuuugucuau

SEQ ID NO: 698908 - RNA, 19 nt, Homo sapiens
  misc_RNA (1)...(19): siRNA sense strand
gggaugaugggcacgugaa

SEQ ID NO: 698909 - RNA, 19 nt, Homo sapiens
  misc_RNA (1)...(19): siRNA sense strand
uacuugcacugccagaaga

SEQ ID NO: 698910 - RNA, 19 nt, Homo sapiens
  misc_RNA (1)...(19): siRNA sense strand
aaaagaaguuacugaagca

SEQ ID NO: 698911 - RNA, 19 nt, Homo sapiens
  misc_RNA (1)...(19): siRNA sense strand
uccugaagauguuagacaa

SEQ ID NO: 698912 - RNA, 19 nt, Homo sapiens
  misc_RNA (1)...(19): siRNA sense strand
ugacccagcugaggacaac

SEQ ID NO: 698913 - RNA, 19 nt, Homo sapiens
  misc_RNA (1)...(19): siRNA sense strand
cacaggaagaucaagaaug

SEQ ID NO: 698914 - RNA, 19 nt, Homo sapiens
  misc_RNA (1)...(19): siRNA sense strand
cgugaagaucgccgacuuu

SEQ ID NO: 698915 - RNA, 19 nt, Homo sapiens
  misc_RNA (1)...(19): siRNA sense strand
gaauuggggugccagacau

SEQ ID NO: 698916 - RNA, 19 nt, Homo sapiens
  misc_RNA (1)...(19): siRNA sense strand
gagagaacauccagaaauc

SEQ ID NO: 698917 - RNA, 19 nt, Homo sapiens
  misc_RNA (1)...(19): siRNA sense strand
ugacgaggaugaugacauu

SEQ ID NO: 698918 - RNA, 19 nt, Homo sapiens
  misc_RNA (1)...(19): siRNA sense strand
caaacuuccuagcacauga

SEQ ID NO: 698919 - RNA, 19 nt, Homo sapiens
  misc_RNA (1)...(19): siRNA sense strand
ucgacaaguucaaauauga

SEQ ID NO: 698920 - RNA, 19 nt, Homo sapiens
  misc_RNA (1)...(19): siRNA sense strand
uaucgcagcuuucaacaag

SEQ ID NO: 698921 - RNA, 19 nt, Homo sapiens
  misc_RNA (1)...(19): siRNA sense strand
ccagagagaacauccagaa

SEQ ID NO: 698922 - RNA, 19 nt, Homo sapiens
  misc_RNA (1)...(19): siRNA sense strand
ccacagacccagcacguau

SEQ ID NO: 698923 - RNA, 19 nt, Homo sapiens
  misc_RNA (1)...(19): siRNA sense strand
caaauaugacgacgcagaa

SEQ ID NO: 698924 - RNA, 19 nt, Homo sapiens
  misc_RNA (1)...(19): siRNA sense strand
gaagaucugguucgacaag

SEQ ID NO: 698925 - RNA, 19 nt, Homo sapiens
  misc_RNA (1)...(19): siRNA sense strand
ugaugacauugaccuguuu

SEQ ID NO: 698926 - RNA, 19 nt, Homo sapiens
  misc_RNA (1)...(19): siRNA sense strand
agagagaacauccagaaau

SEQ ID NO: 698927 - RNA, 19 nt, Homo sapiens
  misc_RNA (1)...(19): siRNA sense strand
gguucgacaaguucaaaua

SEQ ID NO: 698928 - RNA, 19 nt, Homo sapiens
  misc_RNA (1)...(19): siRNA sense strand
gagucugcguggcguggua

SEQ ID NO: 698929 - RNA, 19 nt, Homo sapiens
  misc_RNA (1)...(19): siRNA sense strand
ggcaguacgcggagaagaa

SEQ ID NO: 698930 - RNA, 19 nt, Homo sapiens
  misc_RNA (1)...(19): siRNA sense strand
gaucugguucgacaaguuc

SEQ ID NO: 698931 - RNA, 19 nt, Homo sapiens
  misc_RNA (1)...(19): siRNA sense strand
cggagaagaaggccaagaa

SEQ ID NO: 698932 - RNA, 19 nt, Homo sapiens
  misc_RNA (1)...(19): siRNA sense strand
cagaggaugacgaggauga

SEQ ID NO: 698933 - RNA, 19 nt, Homo sapiens
  misc_RNA (1)...(19): siRNA sense strand
gagcucgucguccggauug

SEQ ID NO: 698934 - RNA, 19 nt, Homo sapiens
  misc_RNA (1)...(19): siRNA sense strand
guucgacaaguucaaauau

SEQ ID NO: 698935 - RNA, 19 nt, Homo sapiens
  misc_RNA (1)...(19): siRNA sense strand
ggagaagaaggccaagaag

SEQ ID NO: 698936 - RNA, 19 nt, Homo sapiens
  misc_RNA (1)...(19): siRNA sense strand
gugucgauaucgcagcuuu

SEQ ID NO: 698937 - RNA, 19 nt, Homo sapiens
  misc_RNA (1)...(19): siRNA sense strand
uccggaagcuacagauuca

SEQ ID NO: 698938 - RNA, 19 nt, Homo sapiens
  misc_RNA (1)...(19): siRNA sense strand
cacaugagaagaucugguu

SEQ ID NO: 698939 - RNA, 19 nt, Homo sapiens
  misc_RNA (1)...(19): siRNA sense strand
ggaaguggagaaccagagu

SEQ ID NO: 698940 - RNA, 19 nt, Homo sapiens
  misc_RNA (1)...(19): siRNA sense strand
ucgcagcuuucaacaagau

SEQ ID NO: 698941 - RNA, 19 nt, Homo sapiens
  misc_RNA (1)...(19): siRNA sense strand
gagauucuacgagcagaug

SEQ ID NO: 698942 - RNA, 19 nt, Homo sapiens
  misc_RNA (1)...(19): siRNA sense strand
acaaugaggaggaggacaa

SEQ ID NO: 698943 - RNA, 19 nt, Homo sapiens
  misc_RNA (1)...(19): siRNA sense strand
cagagagaacauccagaaa

SEQ ID NO: 698944 - RNA, 19 nt, Homo sapiens
  misc_RNA (1)...(19): siRNA sense strand
ccacaccagcagaggauga

SEQ ID NO: 698945 - RNA, 19 nt, Homo sapiens
  misc_RNA (1)...(19): siRNA sense strand
gcaguacgcggagaagaag

SEQ ID NO: 698946 - RNA, 19 nt, Homo sapiens
  misc_RNA (1)...(19): siRNA sense strand
agaucugguucgacaaguu

SEQ ID NO: 698947 - RNA, 19 nt, Homo sapiens
  misc_RNA (1)...(19): siRNA sense strand
augaugacauugaccuguu

SEQ ID NO: 698948 - RNA, 19 nt, Homo sapiens
  misc_RNA (1)...(19): siRNA sense strand
cgaggaugaugacauugac

SEQ ID NO: 698949 - RNA, 19 nt, Homo sapiens
  misc_RNA (1)...(19): siRNA sense strand
cgauaucgcagcuuucaac

SEQ ID NO: 698950 - RNA, 19 nt, Homo sapiens
  misc_RNA (1)...(19): siRNA sense strand
gagagaacauccagaaauc

SEQ ID NO: 698951 - RNA, 19 nt, Homo sapiens
  misc_RNA (1)...(19): siRNA sense strand
ugacgaggaugaugacauu

SEQ ID NO: 698952 - RNA, 19 nt, Homo sapiens
  misc_RNA (1)...(19): siRNA sense strand
caaacuuccuagcacauga

SEQ ID NO: 698953 - RNA, 19 nt, Homo sapiens
  misc_RNA (1)...(19): siRNA sense strand
ucgacaaguucaaauauga

SEQ ID NO: 698954 - RNA, 19 nt, Homo sapiens
  misc_RNA (1)...(19): siRNA sense strand
uaucgcagcuuucaacaag

SEQ ID NO: 698955 - RNA, 19 nt, Homo sapiens
  misc_RNA (1)...(19): siRNA sense strand
ccagagagaacauccagaa

SEQ ID NO: 698956 - RNA, 19 nt, Homo sapiens
  misc_RNA (1)...(19): siRNA sense strand
ccacagacccagcacguau

SEQ ID NO: 698957 - RNA, 19 nt, Homo sapiens
  misc_RNA (1)...(19): siRNA sense strand
caaauaugacgacgcagaa

SEQ ID NO: 698958 - RNA, 19 nt, Homo sapiens
  misc_RNA (1)...(19): siRNA sense strand
gaagaucugguucgacaag

SEQ ID NO: 698959 - RNA, 19 nt, Homo sapiens
  misc_RNA (1)...(19): siRNA sense strand
ugaugacauugaccuguuu

SEQ ID NO: 698960 - RNA, 19 nt, Homo sapiens
  misc_RNA (1)...(19): siRNA sense strand
agagagaacauccagaaau

SEQ ID NO: 698961 - RNA, 19 nt, Homo sapiens
  misc_RNA (1)...(19): siRNA sense strand
gguucgacaaguucaaaua

SEQ ID NO: 698962 - RNA, 19 nt, Homo sapiens
  misc_RNA (1)...(19): siRNA sense strand
gagucugcguggcguggua

SEQ ID NO: 698963 - RNA, 19 nt, Homo sapiens
  misc_RNA (1)...(19): siRNA sense strand
ggcaguacgcggagaagaa

SEQ ID NO: 698964 - RNA, 19 nt, Homo sapiens
  misc_RNA (1)...(19): siRNA sense strand
gaucugguucgacaaguuc

SEQ ID NO: 698965 - RNA, 19 nt, Homo sapiens
  misc_RNA (1)...(19): siRNA sense strand
cggagaagaaggccaagaa

SEQ ID NO: 698966 - RNA, 19 nt, Homo sapiens
  misc_RNA (1)...(19): siRNA sense strand
cagaggaugacgaggauga

SEQ ID NO: 698967 - RNA, 19 nt, Homo sapiens
  misc_RNA (1)...(19): siRNA sense strand
gagcucgucguccggauug

SEQ ID NO: 698968 - RNA, 19 nt, Homo sapiens
  misc_RNA (1)...(19): siRNA sense strand
guucgacaaguucaaauau

SEQ ID NO: 698969 - RNA, 19 nt, Homo sapiens
  misc_RNA (1)...(19): siRNA sense strand
ggagaagaaggccaagaag

SEQ ID NO: 698970 - RNA, 19 nt, Homo sapiens
  misc_RNA (1)...(19): siRNA sense strand
gugucgauaucgcagcuuu

SEQ ID NO: 698971 - RNA, 19 nt, Homo sapiens
  misc_RNA (1)...(19): siRNA sense strand
uccggaagcuacagauuca

SEQ ID NO: 698972 - RNA, 19 nt, Homo sapiens
  misc_RNA (1)...(19): siRNA sense strand
ggaaguggagaaccagagu

SEQ ID NO: 698973 - RNA, 19 nt, Homo sapiens
  misc_RNA (1)...(19): siRNA sense strand
cacaugagaagaucugguu

SEQ ID NO: 698974 - RNA, 19 nt, Homo sapiens
  misc_RNA (1)...(19): siRNA sense strand
ucgcagcuuucaacaagau

SEQ ID NO: 698975 - RNA, 19 nt, Homo sapiens
  misc_RNA (1)...(19): siRNA sense strand
gagauucuacgagcagaug

SEQ ID NO: 698976 - RNA, 19 nt, Homo sapiens
  misc_RNA (1)...(19): siRNA sense strand
acaaugaggaggaggacaa

SEQ ID NO: 698977 - RNA, 19 nt, Homo sapiens
  misc_RNA (1)...(19): siRNA sense strand
cagagagaacauccagaaa

SEQ ID NO: 698978 - RNA, 19 nt, Homo sapiens
  misc_RNA (1)...(19): siRNA sense strand
ccacaccagcagaggauga

SEQ ID NO: 698979 - RNA, 19 nt, Homo sapiens
  misc_RNA (1)...(19): siRNA sense strand
gcaguacgcggagaagaag

SEQ ID NO: 698980 - RNA, 19 nt, Homo sapiens
  misc_RNA (1)...(19): siRNA sense strand
agaucugguucgacaaguu

SEQ ID NO: 698981 - RNA, 19 nt, Homo sapiens
  misc_RNA (1)...(19): siRNA sense strand
augaugacauugaccuguu

SEQ ID NO: 698982 - RNA, 19 nt, Homo sapiens
  misc_RNA (1)...(19): siRNA sense strand
cgaggaugaugacauugac

SEQ ID NO: 698983 - RNA, 19 nt, Homo sapiens
  misc_RNA (1)...(19): siRNA sense strand
cgauaucgcagcuuucaac

SEQ ID NO: 698984 - RNA, 19 nt, Homo sapiens
  misc_RNA (1)...(19): siRNA sense strand
gaaacuagcucuccaguau

SEQ ID NO: 698985 - RNA, 19 nt, Homo sapiens
  misc_RNA (1)...(19): siRNA sense strand
aaacagaggugaaaugaaa

SEQ ID NO: 698986 - RNA, 19 nt, Homo sapiens
  misc_RNA (1)...(19): siRNA sense strand
gacaagagcuguagggaaa

SEQ ID NO: 698987 - RNA, 19 nt, Homo sapiens
  misc_RNA (1)...(19): siRNA sense strand
gcaagucuguuccagcauu

SEQ ID NO: 698988 - RNA, 19 nt, Homo sapiens
  misc_RNA (1)...(19): siRNA sense strand
ggacugaaguggacuggau

SEQ ID NO: 698989 - RNA, 19 nt, Homo sapiens
  misc_RNA (1)...(19): siRNA sense strand
gcagugugaugaguguuua

SEQ ID NO: 698990 - RNA, 19 nt, Homo sapiens
  misc_RNA (1)...(19): siRNA sense strand
cagcauuucuccaagauga

SEQ ID NO: 698991 - RNA, 19 nt, Homo sapiens
  misc_RNA (1)...(19): siRNA sense strand
gggagaagaugguaaacuc

SEQ ID NO: 698992 - RNA, 19 nt, Homo sapiens
  misc_RNA (1)...(19): siRNA sense strand
cugggaccauuacaaauua

SEQ ID NO: 698993 - RNA, 19 nt, Homo sapiens
  misc_RNA (1)...(19): siRNA sense strand
ggaaauauucaguuugcaa

SEQ ID NO: 698994 - RNA, 19 nt, Homo sapiens
  misc_RNA (1)...(19): siRNA sense strand
gggauaacaaacagaauaa

SEQ ID NO: 698995 - RNA, 19 nt, Homo sapiens
  misc_RNA (1)...(19): siRNA sense strand
gaacuugauuuggaaacau

SEQ ID NO: 698996 - RNA, 19 nt, Homo sapiens
  misc_RNA (1)...(19): siRNA sense strand
cauuuaagcgcaauaguuu

SEQ ID NO: 698997 - RNA, 19 nt, Homo sapiens
  misc_RNA (1)...(19): siRNA sense strand
ggacugggauaacaaacag

SEQ ID NO: 698998 - RNA, 19 nt, Homo sapiens
  misc_RNA (1)...(19): siRNA sense strand
gaaauugaaccuguccauu

SEQ ID NO: 698999 - RNA, 19 nt, Homo sapiens
  misc_RNA (1)...(19): siRNA sense strand
cugaaggaguugcauguuu

SEQ ID NO: 699000 - RNA, 19 nt, Homo sapiens
  misc_RNA (1)...(19): siRNA sense strand
gauggaagccuguguagag

SEQ ID NO: 699001 - RNA, 19 nt, Homo sapiens
  misc_RNA (1)...(19): siRNA sense strand
uguaaaggccuauuugcua

SEQ ID NO: 699002 - RNA, 19 nt, Homo sapiens
  misc_RNA (1)...(19): siRNA sense strand
caagucuguuccagcauuu

SEQ ID NO: 699003 - RNA, 19 nt, Homo sapiens
  misc_RNA (1)...(19): siRNA sense strand
gguggaacuugauuuggaa

SEQ ID NO: 699004 - RNA, 19 nt, Homo sapiens
  misc_RNA (1)...(19): siRNA sense strand
ggagguggaacuugauuug

SEQ ID NO: 699005 - RNA, 19 nt, Homo sapiens
  misc_RNA (1)...(19): siRNA sense strand
guucagacccauauguaaa

SEQ ID NO: 699006 - RNA, 19 nt, Homo sapiens
  misc_RNA (1)...(19): siRNA sense strand
gaagcaacacugccucuca

SEQ ID NO: 699007 - RNA, 19 nt, Homo sapiens
  misc_RNA (1)...(19): siRNA sense strand
ggaacuugauuuggaaaca

SEQ ID NO: 699008 - RNA, 19 nt, Homo sapiens
  misc_RNA (1)...(19): siRNA sense strand
aauugaaccuguccauuug

SEQ ID NO: 699009 - RNA, 19 nt, Homo sapiens
  misc_RNA (1)...(19): siRNA sense strand
ccuugaauccuguguauaa

SEQ ID NO: 699010 - RNA, 19 nt, Homo sapiens
  misc_RNA (1)...(19): siRNA sense strand
ggaaugccuugaucuacca

SEQ ID NO: 699011 - RNA, 19 nt, Homo sapiens
  misc_RNA (1)...(19): siRNA sense strand
caacacugccucucagaau

SEQ ID NO: 699012 - RNA, 19 nt, Homo sapiens
  misc_RNA (1)...(19): siRNA sense strand
gaaaacagaggugaaauga

SEQ ID NO: 699013 - RNA, 19 nt, Homo sapiens
  misc_RNA (1)...(19): siRNA sense strand
ggaagucaucuaaauucuu

SEQ ID NO: 699014 - RNA, 19 nt, Homo sapiens
  misc_RNA (1)...(19): siRNA sense strand
gaauauguggagucacuga

SEQ ID NO: 699015 - RNA, 19 nt, Homo sapiens
  misc_RNA (1)...(19): siRNA sense strand
aaacaugggacugggauaa

SEQ ID NO: 699016 - RNA, 19 nt, Homo sapiens
  misc_RNA (1)...(19): siRNA sense strand
uggagucacugaaggaguu

SEQ ID NO: 699017 - RNA, 19 nt, Homo sapiens
  misc_RNA (1)...(19): siRNA sense strand
gggaagucaucuaaauucu

SEQ ID NO: 699018 - RNA, 19 nt, Homo sapiens
  misc_RNA (1)...(19): siRNA sense strand
ugaaggaguugcauguuuu

SEQ ID NO: 699019 - RNA, 19 nt, Homo sapiens
  misc_RNA (1)...(19): siRNA sense strand
ccaccaacccuaucuucaa

SEQ ID NO: 699020 - RNA, 19 nt, Homo sapiens
  misc_RNA (1)...(19): siRNA sense strand
gaaacaugggacugggaua

SEQ ID NO: 699021 - RNA, 19 nt, Homo sapiens
  misc_RNA (1)...(19): siRNA sense strand
gcaacacugccucucagaa

SEQ ID NO: 699022 - RNA, 19 nt, Homo sapiens
  misc_RNA (1)...(19): siRNA sense strand
ugggauaacaaacagaaua

SEQ ID NO: 699023 - RNA, 19 nt, Homo sapiens
  misc_RNA (1)...(19): siRNA sense strand
ugaauccuguguauaacga

SEQ ID NO: 699024 - RNA, 19 nt, Homo sapiens
  misc_RNA (1)...(19): siRNA sense strand
guaccauccuuccagauac

SEQ ID NO: 699025 - RNA, 19 nt, Homo sapiens
  misc_RNA (1)...(19): siRNA sense strand
cagcaccaguugcccuuga

SEQ ID NO: 699026 - RNA, 19 nt, Homo sapiens
  misc_RNA (1)...(19): siRNA sense strand
uaagcgcaauaguuuccua

SEQ ID NO: 699027 - RNA, 19 nt, Homo sapiens
  misc_RNA (1)...(19): siRNA sense strand
uggcaucgggauacauuua

SEQ ID NO: 699028 - RNA, 19 nt, Homo sapiens
  misc_RNA (1)...(19): siRNA sense strand
gcacaucugggugaaggaa

SEQ ID NO: 699029 - RNA, 19 nt, Homo sapiens
  misc_RNA (1)...(19): siRNA sense strand
uuggcaaucuggaaguuaa

SEQ ID NO: 699030 - RNA, 19 nt, Homo sapiens
  misc_RNA (1)...(19): siRNA sense strand
ggauggacucuacuucaga

SEQ ID NO: 699031 - RNA, 19 nt, Homo sapiens
  misc_RNA (1)...(19): siRNA sense strand
gcguucagacccauaugua

SEQ ID NO: 699032 - RNA, 19 nt, Homo sapiens
  misc_RNA (1)...(19): siRNA sense strand
aaggaaauauucaguuugc

SEQ ID NO: 699033 - RNA, 19 nt, Homo sapiens
  misc_RNA (1)...(19): siRNA sense strand
cauauguaaaggccuauuu

SEQ ID NO: 699034 - RNA, 19 nt, Homo sapiens
  misc_RNA (1)...(19): siRNA sense strand
ucugggaccauuacaaauu

SEQ ID NO: 699035 - RNA, 19 nt, Homo sapiens
  misc_RNA (1)...(19): siRNA sense strand
gcaucgggauacauuuaag

SEQ ID NO: 699036 - RNA, 19 nt, Homo sapiens
  misc_RNA (1)...(19): siRNA sense strand
ccuauuugcuaccagacaa

SEQ ID NO: 699037 - RNA, 19 nt, Homo sapiens
  misc_RNA (1)...(19): siRNA sense strand
uuugggaggucuucguauu

SEQ ID NO: 699038 - RNA, 19 nt, Homo sapiens
  misc_RNA (1)...(19): siRNA sense strand
ccagaagacaagagcugua

SEQ ID NO: 699039 - RNA, 19 nt, Homo sapiens
  misc_RNA (1)...(19): siRNA sense strand
uguaccauccuuccagaua

SEQ ID NO: 699040 - RNA, 19 nt, Homo sapiens
  misc_RNA (1)...(19): siRNA sense strand
aaccuugaauccuguguau

SEQ ID NO: 699041 - RNA, 19 nt, Homo sapiens
  misc_RNA (1)...(19): siRNA sense strand
gugaugaguguuuauagug

SEQ ID NO: 699042 - RNA, 19 nt, Homo sapiens
  misc_RNA (1)...(19): siRNA sense strand
ugucugggaccauuacaaa

SEQ ID NO: 699043 - RNA, 19 nt, Homo sapiens
  misc_RNA (1)...(19): siRNA sense strand
gccugaagaucugauggaa

SEQ ID NO: 699044 - RNA, 19 nt, Homo sapiens
  misc_RNA (1)...(19): siRNA sense strand
acauuuaagcgcaauaguu

SEQ ID NO: 699045 - RNA, 19 nt, Homo sapiens
  misc_RNA (1)...(19): siRNA sense strand
ggcaucgggauacauuuaa

SEQ ID NO: 699046 - RNA, 19 nt, Homo sapiens
  misc_RNA (1)...(19): siRNA sense strand
aacuagcucuccaguaugu

SEQ ID NO: 699047 - RNA, 19 nt, Homo sapiens
  misc_RNA (1)...(19): siRNA sense strand
ugaaacuagcucuccagua

SEQ ID NO: 699048 - RNA, 19 nt, Homo sapiens
  misc_RNA (1)...(19): siRNA sense strand
gcagaaaacagaggugaaa

SEQ ID NO: 699049 - RNA, 19 nt, Homo sapiens
  misc_RNA (1)...(19): siRNA sense strand
cggaagacagcaccaguug

SEQ ID NO: 699050 - RNA, 19 nt, Homo sapiens
  misc_RNA (1)...(19): siRNA sense strand
gcggaagacagcaccaguu

SEQ ID NO: 699051 - RNA, 19 nt, Homo sapiens
  misc_RNA (1)...(19): siRNA sense strand
gcaaaaugggcaagaagaa

SEQ ID NO: 699052 - RNA, 19 nt, Homo sapiens
  misc_RNA (1)...(19): siRNA sense strand
gagaugguacccucugaag

SEQ ID NO: 699053 - RNA, 19 nt, Homo sapiens
  misc_RNA (1)...(19): siRNA sense strand
ugugaugaguguuuauagu

SEQ ID NO: 699054 - RNA, 19 nt, Homo sapiens
  misc_RNA (1)...(19): siRNA sense strand
ucuggaaguuaaaggaaau

SEQ ID NO: 699055 - RNA, 19 nt, Homo sapiens
  misc_RNA (1)...(19): siRNA sense strand
caccaacccuaucuucaac

SEQ ID NO: 699056 - RNA, 19 nt, Homo sapiens
  misc_RNA (1)...(19): siRNA sense strand
ggcagugugaugaguguuu

SEQ ID NO: 699057 - RNA, 19 nt, Homo sapiens
  misc_RNA (1)...(19): siRNA sense strand
uagcagcagcggauguaaa

SEQ ID NO: 699058 - RNA, 19 nt, Homo sapiens
  misc_RNA (1)...(19): siRNA sense strand
ggaaaaccaccaacccuau

SEQ ID NO: 699059 - RNA, 19 nt, Homo sapiens
  misc_RNA (1)...(19): siRNA sense strand
cguauuggcuuuggaacag

SEQ ID NO: 699060 - RNA, 19 nt, Homo sapiens
  misc_RNA (1)...(19): siRNA sense strand
cuuaaagacacagaaauug

SEQ ID NO: 699061 - RNA, 19 nt, Homo sapiens
  misc_RNA (1)...(19): siRNA sense strand
uugaauauguggagucacu

SEQ ID NO: 699062 - RNA, 19 nt, Homo sapiens
  misc_RNA (1)...(19): siRNA sense strand
gugaguggcagugugauga

SEQ ID NO: 699063 - RNA, 19 nt, Homo sapiens
  misc_RNA (1)...(19): siRNA sense strand
agguggaacuugauuugga

SEQ ID NO: 699064 - RNA, 19 nt, Homo sapiens
  misc_RNA (1)...(19): siRNA sense strand
gggagguggaacuugauuu

SEQ ID NO: 699065 - RNA, 19 nt, Homo sapiens
  misc_RNA (1)...(19): siRNA sense strand
uccuguguauaacgaaaua

SEQ ID NO: 699066 - RNA, 19 nt, Homo sapiens
  misc_RNA (1)...(19): siRNA sense strand
gcuaccagacaaaggcaaa

SEQ ID NO: 699067 - RNA, 19 nt, Homo sapiens
  misc_RNA (1)...(19): siRNA sense strand
aacacugccucucagaaug

SEQ ID NO: 699068 - RNA, 19 nt, Homo sapiens
  misc_RNA (1)...(19): siRNA sense strand
ugggaccauuacaaauuaa

SEQ ID NO: 699069 - RNA, 19 nt, Homo sapiens
  misc_RNA (1)...(19): siRNA sense strand
acaucugggugaaggaaug

SEQ ID NO: 699070 - RNA, 19 nt, Homo sapiens
  misc_RNA (1)...(19): siRNA sense strand
caaucuggaaguuaaagga

SEQ ID NO: 699071 - RNA, 19 nt, Homo sapiens
  misc_RNA (1)...(19): siRNA sense strand
ggauacauuuaagcgcaau

SEQ ID NO: 699072 - RNA, 19 nt, Homo sapiens
  misc_RNA (1)...(19): siRNA sense strand
aauccuguguauaacgaaa

SEQ ID NO: 699073 - RNA, 19 nt, Homo sapiens
  misc_RNA (1)...(19): siRNA sense strand
uguuuauaguggagacuuu

SEQ ID NO: 699074 - RNA, 19 nt, Homo sapiens
  misc_RNA (1)...(19): siRNA sense strand
guggagacuuuggcaaucu

SEQ ID NO: 699075 - RNA, 19 nt, Homo sapiens
  misc_RNA (1)...(19): siRNA sense strand
uguuaaauguaccauccuu

SEQ ID NO: 699076 - RNA, 19 nt, Homo sapiens
  misc_RNA (1)...(19): siRNA sense strand
gggacugggauaacaaaca

SEQ ID NO: 699077 - RNA, 19 nt, Homo sapiens
  misc_RNA (1)...(19): siRNA sense strand
aaaguuaugggacugaagu

SEQ ID NO: 699078 - RNA, 19 nt, Homo sapiens
  misc_RNA (1)...(19): siRNA sense strand
uaccauccuuccagauaca

SEQ ID NO: 699079 - RNA, 19 nt, Homo sapiens
  misc_RNA (1)...(19): siRNA sense strand
uccuacaacuggagaagug

SEQ ID NO: 699080 - RNA, 19 nt, Homo sapiens
  misc_RNA (1)...(19): siRNA sense strand
caaaaugggcaagaagaaa

SEQ ID NO: 699081 - RNA, 19 nt, Homo sapiens
  misc_RNA (1)...(19): siRNA sense strand
ccaacccuaucuucaacca

SEQ ID NO: 699082 - RNA, 19 nt, Homo sapiens
  misc_RNA (1)...(19): siRNA sense strand
ccagauacaaguaggaaaa

SEQ ID NO: 699083 - RNA, 19 nt, Homo sapiens
  misc_RNA (1)...(19): siRNA sense strand
cuggagaagugcacaucug

SEQ ID NO: 699084 - RNA, 19 nt, Homo sapiens
  misc_RNA (1)...(19): siRNA sense strand
gaaacuagcucuccaguau

SEQ ID NO: 699085 - RNA, 19 nt, Homo sapiens
  misc_RNA (1)...(19): siRNA sense strand
aaacagaggugaaaugaaa

SEQ ID NO: 699086 - RNA, 19 nt, Homo sapiens
  misc_RNA (1)...(19): siRNA sense strand
gacaagagcuguagggaaa

SEQ ID NO: 699087 - RNA, 19 nt, Homo sapiens
  misc_RNA (1)...(19): siRNA sense strand
gcaagucuguuccagcauu

SEQ ID NO: 699088 - RNA, 19 nt, Homo sapiens
  misc_RNA (1)...(19): siRNA sense strand
ggacugaaguggacuggau

SEQ ID NO: 699089 - RNA, 19 nt, Homo sapiens
  misc_RNA (1)...(19): siRNA sense strand
gcagugugaugaguguuua

SEQ ID NO: 699090 - RNA, 19 nt, Homo sapiens
  misc_RNA (1)...(19): siRNA sense strand
cagcauuucuccaagauga

SEQ ID NO: 699091 - RNA, 19 nt, Homo sapiens
  misc_RNA (1)...(19): siRNA sense strand
gggagaagaugguaaacuc

SEQ ID NO: 699092 - RNA, 19 nt, Homo sapiens
  misc_RNA (1)...(19): siRNA sense strand
cugggaccauuacaaauua

SEQ ID NO: 699093 - RNA, 19 nt, Homo sapiens
  misc_RNA (1)...(19): siRNA sense strand
ggaaauauucaguuugcaa

SEQ ID NO: 699094 - RNA, 19 nt, Homo sapiens
  misc_RNA (1)...(19): siRNA sense strand
gggauaacaaacagaauaa

SEQ ID NO: 699095 - RNA, 19 nt, Homo sapiens
  misc_RNA (1)...(19): siRNA sense strand
gaacuugauuuggaaacau

SEQ ID NO: 699096 - RNA, 19 nt, Homo sapiens
  misc_RNA (1)...(19): siRNA sense strand
cauuuaagcgcaauaguuu

SEQ ID NO: 699097 - RNA, 19 nt, Homo sapiens
  misc_RNA (1)...(19): siRNA sense strand
ggacugggauaacaaacag

SEQ ID NO: 699098 - RNA, 19 nt, Homo sapiens
  misc_RNA (1)...(19): siRNA sense strand
gaaauugaaccuguccauu

SEQ ID NO: 699099 - RNA, 19 nt, Homo sapiens
  misc_RNA (1)...(19): siRNA sense strand
cugaaggaguugcauguuu

SEQ ID NO: 699100 - RNA, 19 nt, Homo sapiens
  misc_RNA (1)...(19): siRNA sense strand
gauggaagccuguguagag

SEQ ID NO: 699101 - RNA, 19 nt, Homo sapiens
  misc_RNA (1)...(19): siRNA sense strand
caagucuguuccagcauuu

SEQ ID NO: 699102 - RNA, 19 nt, Homo sapiens
  misc_RNA (1)...(19): siRNA sense strand
gguggaacuugauuuggaa

SEQ ID NO: 699103 - RNA, 19 nt, Homo sapiens
  misc_RNA (1)...(19): siRNA sense strand
ggagguggaacuugauuug

SEQ ID NO: 699104 - RNA, 19 nt, Homo sapiens
  misc_RNA (1)...(19): siRNA sense strand
uguaaaggccuauuugcua

SEQ ID NO: 699105 - RNA, 19 nt, Homo sapiens
  misc_RNA (1)...(19): siRNA sense strand
guucagacccauauguaaa

SEQ ID NO: 699106 - RNA, 19 nt, Homo sapiens
  misc_RNA (1)...(19): siRNA sense strand
gaagcaacacugccucuca

SEQ ID NO: 699107 - RNA, 19 nt, Homo sapiens
  misc_RNA (1)...(19): siRNA sense strand
ggaacuugauuuggaaaca

SEQ ID NO: 699108 - RNA, 19 nt, Homo sapiens
  misc_RNA (1)...(19): siRNA sense strand
aauugaaccuguccauuug

SEQ ID NO: 699109 - RNA, 19 nt, Homo sapiens
  misc_RNA (1)...(19): siRNA sense strand
ccuugaauccuguguauaa

SEQ ID NO: 699110 - RNA, 19 nt, Homo sapiens
  misc_RNA (1)...(19): siRNA sense strand
ggaaugccuugaucuacca

SEQ ID NO: 699111 - RNA, 19 nt, Homo sapiens
  misc_RNA (1)...(19): siRNA sense strand
caacacugccucucagaau

SEQ ID NO: 699112 - RNA, 19 nt, Homo sapiens
  misc_RNA (1)...(19): siRNA sense strand
gaaaacagaggugaaauga

SEQ ID NO: 699113 - RNA, 19 nt, Homo sapiens
  misc_RNA (1)...(19): siRNA sense strand
ggaagucaucuaaauucuu

SEQ ID NO: 699114 - RNA, 19 nt, Homo sapiens
  misc_RNA (1)...(19): siRNA sense strand
gaauauguggagucacuga

SEQ ID NO: 699115 - RNA, 19 nt, Homo sapiens
  misc_RNA (1)...(19): siRNA sense strand
aaacaugggacugggauaa

SEQ ID NO: 699116 - RNA, 19 nt, Homo sapiens
  misc_RNA (1)...(19): siRNA sense strand
uggagucacugaaggaguu

SEQ ID NO: 699117 - RNA, 19 nt, Homo sapiens
  misc_RNA (1)...(19): siRNA sense strand
gggaagucaucuaaauucu

SEQ ID NO: 699118 - RNA, 19 nt, Homo sapiens
  misc_RNA (1)...(19): siRNA sense strand
ugaaggaguugcauguuuu

SEQ ID NO: 699119 - RNA, 19 nt, Homo sapiens
  misc_RNA (1)...(19): siRNA sense strand
ccaccaacccuaucuucaa

SEQ ID NO: 699120 - RNA, 19 nt, Homo sapiens
  misc_RNA (1)...(19): siRNA sense strand
gaaacaugggacugggaua

SEQ ID NO: 699121 - RNA, 19 nt, Homo sapiens
  misc_RNA (1)...(19): siRNA sense strand
gcaacacugccucucagaa

SEQ ID NO: 699122 - RNA, 19 nt, Homo sapiens
  misc_RNA (1)...(19): siRNA sense strand
ugggauaacaaacagaaua

SEQ ID NO: 699123 - RNA, 19 nt, Homo sapiens
  misc_RNA (1)...(19): siRNA sense strand
ugaauccuguguauaacga

SEQ ID NO: 699124 - RNA, 19 nt, Homo sapiens
  misc_RNA (1)...(19): siRNA sense strand
guaccauccuuccagauac

SEQ ID NO: 699125 - RNA, 19 nt, Homo sapiens
  misc_RNA (1)...(19): siRNA sense strand
cagcaccaguugcccuuga

SEQ ID NO: 699126 - RNA, 19 nt, Homo sapiens
  misc_RNA (1)...(19): siRNA sense strand
uaagcgcaauaguuuccua

SEQ ID NO: 699127 - RNA, 19 nt, Homo sapiens
  misc_RNA (1)...(19): siRNA sense strand
uggcaucgggauacauuua

SEQ ID NO: 699128 - RNA, 19 nt, Homo sapiens
  misc_RNA (1)...(19): siRNA sense strand
uuggcaaucuggaaguuaa

SEQ ID NO: 699129 - RNA, 19 nt, Homo sapiens
  misc_RNA (1)...(19): siRNA sense strand
ggauggacucuacuucaga

SEQ ID NO: 699130 - RNA, 19 nt, Homo sapiens
  misc_RNA (1)...(19): siRNA sense strand
gcacaucugggugaaggaa

SEQ ID NO: 699131 - RNA, 19 nt, Homo sapiens
  misc_RNA (1)...(19): siRNA sense strand
aaggaaauauucaguuugc

SEQ ID NO: 699132 - RNA, 19 nt, Homo sapiens
  misc_RNA (1)...(19): siRNA sense strand
gcguucagacccauaugua

SEQ ID NO: 699133 - RNA, 19 nt, Homo sapiens
  misc_RNA (1)...(19): siRNA sense strand
cauauguaaaggccuauuu

SEQ ID NO: 699134 - RNA, 19 nt, Homo sapiens
  misc_RNA (1)...(19): siRNA sense strand
ucugggaccauuacaaauu

SEQ ID NO: 699135 - RNA, 19 nt, Homo sapiens
  misc_RNA (1)...(19): siRNA sense strand
gcaucgggauacauuuaag

SEQ ID NO: 699136 - RNA, 19 nt, Homo sapiens
  misc_RNA (1)...(19): siRNA sense strand
ccuauuugcuaccagacaa

SEQ ID NO: 699137 - RNA, 19 nt, Homo sapiens
  misc_RNA (1)...(19): siRNA sense strand
uuugggaggucuucguauu

SEQ ID NO: 699138 - RNA, 19 nt, Homo sapiens
  misc_RNA (1)...(19): siRNA sense strand
ccagaagacaagagcugua

SEQ ID NO: 699139 - RNA, 19 nt, Homo sapiens
  misc_RNA (1)...(19): siRNA sense strand
uguaccauccuuccagaua

SEQ ID NO: 699140 - RNA, 19 nt, Homo sapiens
  misc_RNA (1)...(19): siRNA sense strand
aaccuugaauccuguguau

SEQ ID NO: 699141 - RNA, 19 nt, Homo sapiens
  misc_RNA (1)...(19): siRNA sense strand
acaaccugauaauccauuu

SEQ ID NO: 699142 - RNA, 19 nt, Homo sapiens
  misc_RNA (1)...(19): siRNA sense strand
gugaugaguguuuauagug

SEQ ID NO: 699143 - RNA, 19 nt, Homo sapiens
  misc_RNA (1)...(19): siRNA sense strand
ugucugggaccauuacaaa

SEQ ID NO: 699144 - RNA, 19 nt, Homo sapiens
  misc_RNA (1)...(19): siRNA sense strand
gccugaagaucugauggaa

SEQ ID NO: 699145 - RNA, 19 nt, Homo sapiens
  misc_RNA (1)...(19): siRNA sense strand
acauuuaagcgcaauaguu

SEQ ID NO: 699146 - RNA, 19 nt, Homo sapiens
  misc_RNA (1)...(19): siRNA sense strand
ggcaucgggauacauuuaa

SEQ ID NO: 699147 - RNA, 19 nt, Homo sapiens
  misc_RNA (1)...(19): siRNA sense strand
gugccuacacaaccugaua

SEQ ID NO: 699148 - RNA, 19 nt, Homo sapiens
  misc_RNA (1)...(19): siRNA sense strand
aacuagcucuccaguaugu

SEQ ID NO: 699149 - RNA, 19 nt, Homo sapiens
  misc_RNA (1)...(19): siRNA sense strand
ugaaacuagcucuccagua

SEQ ID NO: 699150 - RNA, 19 nt, Homo sapiens
  misc_RNA (1)...(19): siRNA sense strand
gcagaaaacagaggugaaa

SEQ ID NO: 699151 - RNA, 19 nt, Homo sapiens
  misc_RNA (1)...(19): siRNA sense strand
cggaagacagcaccaguug

SEQ ID NO: 699152 - RNA, 19 nt, Homo sapiens
  misc_RNA (1)...(19): siRNA sense strand
gcggaagacagcaccaguu

SEQ ID NO: 699153 - RNA, 19 nt, Homo sapiens
  misc_RNA (1)...(19): siRNA sense strand
gcaaaaugggcaagaagaa

SEQ ID NO: 699154 - RNA, 19 nt, Homo sapiens
  misc_RNA (1)...(19): siRNA sense strand
ugugaugaguguuuauagu

SEQ ID NO: 699155 - RNA, 19 nt, Homo sapiens
  misc_RNA (1)...(19): siRNA sense strand
gagaugguacccucugaag

SEQ ID NO: 699156 - RNA, 19 nt, Homo sapiens
  misc_RNA (1)...(19): siRNA sense strand
cuacacaaccugauaaucc

SEQ ID NO: 699157 - RNA, 19 nt, Homo sapiens
  misc_RNA (1)...(19): siRNA sense strand
ucuggaaguuaaaggaaau

SEQ ID NO: 699158 - RNA, 19 nt, Homo sapiens
  misc_RNA (1)...(19): siRNA sense strand
caccaacccuaucuucaac

SEQ ID NO: 699159 - RNA, 19 nt, Homo sapiens
  misc_RNA (1)...(19): siRNA sense strand
ggcagugugaugaguguuu

SEQ ID NO: 699160 - RNA, 19 nt, Homo sapiens
  misc_RNA (1)...(19): siRNA sense strand
uagcagcagcggauguaaa

SEQ ID NO: 699161 - RNA, 19 nt, Homo sapiens
  misc_RNA (1)...(19): siRNA sense strand
ggaaaaccaccaacccuau

SEQ ID NO: 699162 - RNA, 19 nt, Homo sapiens
  misc_RNA (1)...(19): siRNA sense strand
cguauuggcuuuggaacag

SEQ ID NO: 699163 - RNA, 19 nt, Homo sapiens
  misc_RNA (1)...(19): siRNA sense strand
cuuaaagacacagaaauug

SEQ ID NO: 699164 - RNA, 19 nt, Homo sapiens
  misc_RNA (1)...(19): siRNA sense strand
uugaauauguggagucacu

SEQ ID NO: 699165 - RNA, 19 nt, Homo sapiens
  misc_RNA (1)...(19): siRNA sense strand
gugaguggcagugugauga

SEQ ID NO: 699166 - RNA, 19 nt, Homo sapiens
  misc_RNA (1)...(19): siRNA sense strand
agguggaacuugauuugga

SEQ ID NO: 699167 - RNA, 19 nt, Homo sapiens
  misc_RNA (1)...(19): siRNA sense strand
gggagguggaacuugauuu

SEQ ID NO: 699168 - RNA, 19 nt, Homo sapiens
  misc_RNA (1)...(19): siRNA sense strand
uccuguguauaacgaaaua

SEQ ID NO: 699169 - RNA, 19 nt, Homo sapiens
  misc_RNA (1)...(19): siRNA sense strand
gcuaccagacaaaggcaaa

SEQ ID NO: 699170 - RNA, 19 nt, Homo sapiens
  misc_RNA (1)...(19): siRNA sense strand
aacacugccucucagaaug

SEQ ID NO: 699171 - RNA, 19 nt, Homo sapiens
  misc_RNA (1)...(19): siRNA sense strand
caaucuggaaguuaaagga

SEQ ID NO: 699172 - RNA, 19 nt, Homo sapiens
  misc_RNA (1)...(19): siRNA sense strand
ugggaccauuacaaauuaa

SEQ ID NO: 699173 - RNA, 19 nt, Homo sapiens
  misc_RNA (1)...(19): siRNA sense strand
acaucugggugaaggaaug

SEQ ID NO: 699174 - RNA, 19 nt, Homo sapiens
  misc_RNA (1)...(19): siRNA sense strand
uacacaaccugauaaucca

SEQ ID NO: 699175 - RNA, 19 nt, Homo sapiens
  misc_RNA (1)...(19): siRNA sense strand
ggauacauuuaagcgcaau

SEQ ID NO: 699176 - RNA, 19 nt, Homo sapiens
  misc_RNA (1)...(19): siRNA sense strand
aauccuguguauaacgaaa

SEQ ID NO: 699177 - RNA, 19 nt, Homo sapiens
  misc_RNA (1)...(19): siRNA sense strand
uguuaaauguaccauccuu

SEQ ID NO: 699178 - RNA, 19 nt, Homo sapiens
  misc_RNA (1)...(19): siRNA sense strand
uguuuauaguggagacuuu

SEQ ID NO: 699179 - RNA, 19 nt, Homo sapiens
  misc_RNA (1)...(19): siRNA sense strand
guggagacuuuggcaaucu

SEQ ID NO: 699180 - RNA, 19 nt, Homo sapiens
  misc_RNA (1)...(19): siRNA sense strand
gggacugggauaacaaaca

SEQ ID NO: 699181 - RNA, 19 nt, Homo sapiens
  misc_RNA (1)...(19): siRNA sense strand
aaaguuaugggacugaagu

SEQ ID NO: 699182 - RNA, 19 nt, Homo sapiens
  misc_RNA (1)...(19): siRNA sense strand
uaccauccuuccagauaca

SEQ ID NO: 699183 - RNA, 19 nt, Homo sapiens
  misc_RNA (1)...(19): siRNA sense strand
uccuacaacuggagaagug

SEQ ID NO: 699184 - RNA, 19 nt, Homo sapiens
  misc_RNA (1)...(19): siRNA sense strand
caaagaggcugggcaauga

SEQ ID NO: 699185 - RNA, 19 nt, Homo sapiens
  misc_RNA (1)...(19): siRNA sense strand
gcaaugacaucgcccuuau

SEQ ID NO: 699186 - RNA, 19 nt, Homo sapiens
  misc_RNA (1)...(19): siRNA sense strand
gaucaccucuugccagaug

SEQ ID NO: 699187 - RNA, 19 nt, Homo sapiens
  misc_RNA (1)...(19): siRNA sense strand
ucagauaaccucagaguga

SEQ ID NO: 699188 - RNA, 19 nt, Homo sapiens
  misc_RNA (1)...(19): siRNA sense strand
gcucauccuuuaaguguau

SEQ ID NO: 699189 - RNA, 19 nt, Homo sapiens
  misc_RNA (1)...(19): siRNA sense strand
guccaucgaucaccucuug

SEQ ID NO: 699190 - RNA, 19 nt, Homo sapiens
  misc_RNA (1)...(19): siRNA sense strand
ggaagggucacuacgcaaa

SEQ ID NO: 699191 - RNA, 19 nt, Homo sapiens
  misc_RNA (1)...(19): siRNA sense strand
caucguggguggaaacaug

SEQ ID NO: 699192 - RNA, 19 nt, Homo sapiens
  misc_RNA (1)...(19): siRNA sense strand
ugacaucgcccuuaugaag

SEQ ID NO: 699193 - RNA, 19 nt, Homo sapiens
  misc_RNA (1)...(19): siRNA sense strand
ugacaaggugacugcauua

SEQ ID NO: 699194 - RNA, 19 nt, Homo sapiens
  misc_RNA (1)...(19): siRNA sense strand
caagcuaugugaguucaga

SEQ ID NO: 699195 - RNA, 19 nt, Homo sapiens
  misc_RNA (1)...(19): siRNA sense strand
caucacugcugcacacugu

SEQ ID NO: 699196 - RNA, 19 nt, Homo sapiens
  misc_RNA (1)...(19): siRNA sense strand
gaguucagauaaccucaga

SEQ ID NO: 699197 - RNA, 19 nt, Homo sapiens
  misc_RNA (1)...(19): siRNA sense strand
ccaaagaggcugggcaaug

SEQ ID NO: 699198 - RNA, 19 nt, Homo sapiens
  misc_RNA (1)...(19): siRNA sense strand
gcuaugugaguucagauaa

SEQ ID NO: 699199 - RNA, 19 nt, Homo sapiens
  misc_RNA (1)...(19): siRNA sense strand
gcaaguacaagccaaagag

SEQ ID NO: 699200 - RNA, 19 nt, Homo sapiens
  misc_RNA (1)...(19): siRNA sense strand
caaggugacugcauuacac

SEQ ID NO: 699201 - RNA, 19 nt, Homo sapiens
  misc_RNA (1)...(19): siRNA sense strand
gggaggaguuuguguccau

SEQ ID NO: 699202 - RNA, 19 nt, Homo sapiens
  misc_RNA (1)...(19): siRNA sense strand
gcauuacaccacucaguau

SEQ ID NO: 699203 - RNA, 19 nt, Homo sapiens
  misc_RNA (1)...(19): siRNA sense strand
gcucagggaaguacagaug

SEQ ID NO: 699204 - RNA, 19 nt, Homo sapiens
  misc_RNA (1)...(19): siRNA sense strand
gggucuaguuucccuguug

SEQ ID NO: 699205 - RNA, 19 nt, Homo sapiens
  misc_RNA (1)...(19): siRNA sense strand
uuacaccacucaguauaug

SEQ ID NO: 699206 - RNA, 19 nt, Homo sapiens
  misc_RNA (1)...(19): siRNA sense strand
uggagaagauugucuacca

SEQ ID NO: 699207 - RNA, 19 nt, Homo sapiens
  misc_RNA (1)...(19): siRNA sense strand
ucacagcugcuucguggaa

SEQ ID NO: 699208 - RNA, 19 nt, Homo sapiens
  misc_RNA (1)...(19): siRNA sense strand
gaagggucacuacgcaaau

SEQ ID NO: 699209 - RNA, 19 nt, Homo sapiens
  misc_RNA (1)...(19): siRNA sense strand
cauuacaccacucaguaua

SEQ ID NO: 699210 - RNA, 19 nt, Homo sapiens
  misc_RNA (1)...(19): siRNA sense strand
ggcaaugacaucgcccuua

SEQ ID NO: 699211 - RNA, 19 nt, Homo sapiens
  misc_RNA (1)...(19): siRNA sense strand
aaugacaucgcccuuauga

SEQ ID NO: 699212 - RNA, 19 nt, Homo sapiens
  misc_RNA (1)...(19): siRNA sense strand
gugacggagucucggauug

SEQ ID NO: 699213 - RNA, 19 nt, Homo sapiens
  misc_RNA (1)...(19): siRNA sense strand
ggucacuacgcaaauguug

SEQ ID NO: 699214 - RNA, 19 nt, Homo sapiens
  misc_RNA (1)...(19): siRNA sense strand
gcaguuccgggaggaguuu

SEQ ID NO: 699215 - RNA, 19 nt, Homo sapiens
  misc_RNA (1)...(19): siRNA sense strand
uaguuucccuguuggacaa

SEQ ID NO: 699216 - RNA, 19 nt, Homo sapiens
  misc_RNA (1)...(19): siRNA sense strand
uuaaguguaucgagcugau

SEQ ID NO: 699217 - RNA, 19 nt, Homo sapiens
  misc_RNA (1)...(19): siRNA sense strand
ucagggaaguacagauguc

SEQ ID NO: 699218 - RNA, 19 nt, Homo sapiens
  misc_RNA (1)...(19): siRNA sense strand
augacaaggugacugcauu

SEQ ID NO: 699219 - RNA, 19 nt, Homo sapiens
  misc_RNA (1)...(19): siRNA sense strand
guggaaacauguccuugcu

SEQ ID NO: 699220 - RNA, 19 nt, Homo sapiens
  misc_RNA (1)...(19): siRNA sense strand
ccggguggguggucagaau

SEQ ID NO: 699221 - RNA, 19 nt, Homo sapiens
  misc_RNA (1)...(19): siRNA sense strand
ugcauuacaccacucagua

SEQ ID NO: 699222 - RNA, 19 nt, Homo sapiens
  misc_RNA (1)...(19): siRNA sense strand
guucagauaaccucagagu

SEQ ID NO: 699223 - RNA, 19 nt, Homo sapiens
  misc_RNA (1)...(19): siRNA sense strand
ccaggugggucuaguuucc

SEQ ID NO: 699224 - RNA, 19 nt, Homo sapiens
  misc_RNA (1)...(19): siRNA sense strand
ucgcucauccuuuaagugu

SEQ ID NO: 699225 - RNA, 19 nt, Homo sapiens
  misc_RNA (1)...(19): siRNA sense strand
cggagucucggauugcaaa

SEQ ID NO: 699226 - RNA, 19 nt, Homo sapiens
  misc_RNA (1)...(19): siRNA sense strand
gggccacucacguucaaug

SEQ ID NO: 699227 - RNA, 19 nt, Homo sapiens
  misc_RNA (1)...(19): siRNA sense strand
caaagaggcugggcaauga

SEQ ID NO: 699228 - RNA, 19 nt, Homo sapiens
  misc_RNA (1)...(19): siRNA sense strand
gcaaugacaucgcccuuau

SEQ ID NO: 699229 - RNA, 19 nt, Homo sapiens
  misc_RNA (1)...(19): siRNA sense strand
gaucaccucuugccagaug

SEQ ID NO: 699230 - RNA, 19 nt, Homo sapiens
  misc_RNA (1)...(19): siRNA sense strand
ucagauaaccucagaguga

SEQ ID NO: 699231 - RNA, 19 nt, Homo sapiens
  misc_RNA (1)...(19): siRNA sense strand
guccaucgaucaccucuug

SEQ ID NO: 699232 - RNA, 19 nt, Homo sapiens
  misc_RNA (1)...(19): siRNA sense strand
caucguggguggaaacaug

SEQ ID NO: 699233 - RNA, 19 nt, Homo sapiens
  misc_RNA (1)...(19): siRNA sense strand
ggaagggucacuacgcaaa

SEQ ID NO: 699234 - RNA, 19 nt, Homo sapiens
  misc_RNA (1)...(19): siRNA sense strand
ugacaucgcccuuaugaag

SEQ ID NO: 699235 - RNA, 19 nt, Homo sapiens
  misc_RNA (1)...(19): siRNA sense strand
ugacaaggugacugcauua

SEQ ID NO: 699236 - RNA, 19 nt, Homo sapiens
  misc_RNA (1)...(19): siRNA sense strand
caagcuaugugaguucaga

SEQ ID NO: 699237 - RNA, 19 nt, Homo sapiens
  misc_RNA (1)...(19): siRNA sense strand
caucacugcugcacacugu

SEQ ID NO: 699238 - RNA, 19 nt, Homo sapiens
  misc_RNA (1)...(19): siRNA sense strand
gaguucagauaaccucaga

SEQ ID NO: 699239 - RNA, 19 nt, Homo sapiens
  misc_RNA (1)...(19): siRNA sense strand
ccaaagaggcugggcaaug

SEQ ID NO: 699240 - RNA, 19 nt, Homo sapiens
  misc_RNA (1)...(19): siRNA sense strand
gcuaugugaguucagauaa

SEQ ID NO: 699241 - RNA, 19 nt, Homo sapiens
  misc_RNA (1)...(19): siRNA sense strand
gcaaguacaagccaaagag

SEQ ID NO: 699242 - RNA, 19 nt, Homo sapiens
  misc_RNA (1)...(19): siRNA sense strand
caaggugacugcauuacac

SEQ ID NO: 699243 - RNA, 19 nt, Homo sapiens
  misc_RNA (1)...(19): siRNA sense strand
gggaggaguuuguguccau

SEQ ID NO: 699244 - RNA, 19 nt, Homo sapiens
  misc_RNA (1)...(19): siRNA sense strand
gcauuacaccacucaguau

SEQ ID NO: 699245 - RNA, 19 nt, Homo sapiens
  misc_RNA (1)...(19): siRNA sense strand
gggucuaguuucccuguug

SEQ ID NO: 699246 - RNA, 19 nt, Homo sapiens
  misc_RNA (1)...(19): siRNA sense strand
uuacaccacucaguauaug

SEQ ID NO: 699247 - RNA, 19 nt, Homo sapiens
  misc_RNA (1)...(19): siRNA sense strand
uggagaagauugucuacca

SEQ ID NO: 699248 - RNA, 19 nt, Homo sapiens
  misc_RNA (1)...(19): siRNA sense strand
gaagggucacuacgcaaau

SEQ ID NO: 699249 - RNA, 19 nt, Homo sapiens
  misc_RNA (1)...(19): siRNA sense strand
cauuacaccacucaguaua

SEQ ID NO: 699250 - RNA, 19 nt, Homo sapiens
  misc_RNA (1)...(19): siRNA sense strand
ggcaaugacaucgcccuua

SEQ ID NO: 699251 - RNA, 19 nt, Homo sapiens
  misc_RNA (1)...(19): siRNA sense strand
aaugacaucgcccuuauga

SEQ ID NO: 699252 - RNA, 19 nt, Homo sapiens
  misc_RNA (1)...(19): siRNA sense strand
ggucacuacgcaaauguug

SEQ ID NO: 699253 - RNA, 19 nt, Homo sapiens
  misc_RNA (1)...(19): siRNA sense strand
uaguuucccuguuggacaa

SEQ ID NO: 699254 - RNA, 19 nt, Homo sapiens
  misc_RNA (1)...(19): siRNA sense strand
gcaguuccgggaggaguuu

SEQ ID NO: 699255 - RNA, 19 nt, Homo sapiens
  misc_RNA (1)...(19): siRNA sense strand
augacaaggugacugcauu

SEQ ID NO: 699256 - RNA, 19 nt, Homo sapiens
  misc_RNA (1)...(19): siRNA sense strand
guggaaacauguccuugcu

SEQ ID NO: 699257 - RNA, 19 nt, Homo sapiens
  misc_RNA (1)...(19): siRNA sense strand
ugcauuacaccacucagua

SEQ ID NO: 699258 - RNA, 19 nt, Homo sapiens
  misc_RNA (1)...(19): siRNA sense strand
ccaggugggucuaguuucc

SEQ ID NO: 699259 - RNA, 19 nt, Homo sapiens
  misc_RNA (1)...(19): siRNA sense strand
guucagauaaccucagagu

SEQ ID NO: 699260 - RNA, 19 nt, Homo sapiens
  misc_RNA (1)...(19): siRNA sense strand
gggccacucacguucaaug

SEQ ID NO: 699261 - RNA, 19 nt, Homo sapiens
  misc_RNA (1)...(19): siRNA sense strand
caaagaggcugggcaauga

SEQ ID NO: 699262 - RNA, 19 nt, Homo sapiens
  misc_RNA (1)...(19): siRNA sense strand
gcaaugacaucgcccuuau

SEQ ID NO: 699263 - RNA, 19 nt, Homo sapiens
  misc_RNA (1)...(19): siRNA sense strand
gaucaccucuugccagaug

SEQ ID NO: 699264 - RNA, 19 nt, Homo sapiens
  misc_RNA (1)...(19): siRNA sense strand
ucagauaaccucagaguga

SEQ ID NO: 699265 - RNA, 19 nt, Homo sapiens
  misc_RNA (1)...(19): siRNA sense strand
guccaucgaucaccucuug

SEQ ID NO: 699266 - RNA, 19 nt, Homo sapiens
  misc_RNA (1)...(19): siRNA sense strand
caucguggguggaaacaug

SEQ ID NO: 699267 - RNA, 19 nt, Homo sapiens
  misc_RNA (1)...(19): siRNA sense strand
ggaagggucacuacgcaaa

SEQ ID NO: 699268 - RNA, 19 nt, Homo sapiens
  misc_RNA (1)...(19): siRNA sense strand
ugacaucgcccuuaugaag

SEQ ID NO: 699269 - RNA, 19 nt, Homo sapiens
  misc_RNA (1)...(19): siRNA sense strand
ugacaaggugacugcauua

SEQ ID NO: 699270 - RNA, 19 nt, Homo sapiens
  misc_RNA (1)...(19): siRNA sense strand
caagcuaugugaguucaga

SEQ ID NO: 699271 - RNA, 19 nt, Homo sapiens
  misc_RNA (1)...(19): siRNA sense strand
caucacugcugcacacugu

SEQ ID NO: 699272 - RNA, 19 nt, Homo sapiens
  misc_RNA (1)...(19): siRNA sense strand
gaguucagauaaccucaga

SEQ ID NO: 699273 - RNA, 19 nt, Homo sapiens
  misc_RNA (1)...(19): siRNA sense strand
ccaaagaggcugggcaaug

SEQ ID NO: 699274 - RNA, 19 nt, Homo sapiens
  misc_RNA (1)...(19): siRNA sense strand
gcuaugugaguucagauaa

SEQ ID NO: 699275 - RNA, 19 nt, Homo sapiens
  misc_RNA (1)...(19): siRNA sense strand
gcaaguacaagccaaagag

SEQ ID NO: 699276 - RNA, 19 nt, Homo sapiens
  misc_RNA (1)...(19): siRNA sense strand
caaggugacugcauuacac

SEQ ID NO: 699277 - RNA, 19 nt, Homo sapiens
  misc_RNA (1)...(19): siRNA sense strand
gggaggaguuuguguccau

SEQ ID NO: 699278 - RNA, 19 nt, Homo sapiens
  misc_RNA (1)...(19): siRNA sense strand
gcauuacaccacucaguau

SEQ ID NO: 699279 - RNA, 19 nt, Homo sapiens
  misc_RNA (1)...(19): siRNA sense strand
gggucuaguuucccuguug

SEQ ID NO: 699280 - RNA, 19 nt, Homo sapiens
  misc_RNA (1)...(19): siRNA sense strand
uuacaccacucaguauaug

SEQ ID NO: 699281 - RNA, 19 nt, Homo sapiens
  misc_RNA (1)...(19): siRNA sense strand
uggagaagauugucuacca

SEQ ID NO: 699282 - RNA, 19 nt, Homo sapiens
  misc_RNA (1)...(19): siRNA sense strand
gaagggucacuacgcaaau

SEQ ID NO: 699283 - RNA, 19 nt, Homo sapiens
  misc_RNA (1)...(19): siRNA sense strand
cauuacaccacucaguaua

SEQ ID NO: 699284 - RNA, 19 nt, Homo sapiens
  misc_RNA (1)...(19): siRNA sense strand
ggcaaugacaucgcccuua

SEQ ID NO: 699285 - RNA, 19 nt, Homo sapiens
  misc_RNA (1)...(19): siRNA sense strand
aaugacaucgcccuuauga

SEQ ID NO: 699286 - RNA, 19 nt, Homo sapiens
  misc_RNA (1)...(19): siRNA sense strand
ggucacuacgcaaauguug

SEQ ID NO: 699287 - RNA, 19 nt, Homo sapiens
  misc_RNA (1)...(19): siRNA sense strand
uaguuucccuguuggacaa

SEQ ID NO: 699288 - RNA, 19 nt, Homo sapiens
  misc_RNA (1)...(19): siRNA sense strand
gcaguuccgggaggaguuu

SEQ ID NO: 699289 - RNA, 19 nt, Homo sapiens
  misc_RNA (1)...(19): siRNA sense strand
augacaaggugacugcauu

SEQ ID NO: 699290 - RNA, 19 nt, Homo sapiens
  misc_RNA (1)...(19): siRNA sense strand
guggaaacauguccuugcu

SEQ ID NO: 699291 - RNA, 19 nt, Homo sapiens
  misc_RNA (1)...(19): siRNA sense strand
ugcauuacaccacucagua

SEQ ID NO: 699292 - RNA, 19 nt, Homo sapiens
  misc_RNA (1)...(19): siRNA sense strand
ccaggugggucuaguuucc

SEQ ID NO: 699293 - RNA, 19 nt, Homo sapiens
  misc_RNA (1)...(19): siRNA sense strand
guucagauaaccucagagu

SEQ ID NO: 699294 - RNA, 19 nt, Homo sapiens
  misc_RNA (1)...(19): siRNA sense strand
gggccacucacguucaaug

SEQ ID NO: 699295 - RNA, 19 nt, Homo sapiens
  misc_RNA (1)...(19): siRNA sense strand
caaagaggcugggcaauga

SEQ ID NO: 699296 - RNA, 19 nt, Homo sapiens
  misc_RNA (1)...(19): siRNA sense strand
gcaaugacaucgcccuuau

SEQ ID NO: 699297 - RNA, 19 nt, Homo sapiens
  misc_RNA (1)...(19): siRNA sense strand
gaucaccucuugccagaug

SEQ ID NO: 699298 - RNA, 19 nt, Homo sapiens
  misc_RNA (1)...(19): siRNA sense strand
ucagauaaccucagaguga

SEQ ID NO: 699299 - RNA, 19 nt, Homo sapiens
  misc_RNA (1)...(19): siRNA sense strand
gcucauccuuuaaguguau

SEQ ID NO: 699300 - RNA, 19 nt, Homo sapiens
  misc_RNA (1)...(19): siRNA sense strand
guccaucgaucaccucuug

SEQ ID NO: 699301 - RNA, 19 nt, Homo sapiens
  misc_RNA (1)...(19): siRNA sense strand
ggaagggucacuacgcaaa

SEQ ID NO: 699302 - RNA, 19 nt, Homo sapiens
  misc_RNA (1)...(19): siRNA sense strand
caucguggguggaaacaug

SEQ ID NO: 699303 - RNA, 19 nt, Homo sapiens
  misc_RNA (1)...(19): siRNA sense strand
ugacaucgcccuuaugaag

SEQ ID NO: 699304 - RNA, 19 nt, Homo sapiens
  misc_RNA (1)...(19): siRNA sense strand
ugacaaggugacugcauua

SEQ ID NO: 699305 - RNA, 19 nt, Homo sapiens
  misc_RNA (1)...(19): siRNA sense strand
caagcuaugugaguucaga

SEQ ID NO: 699306 - RNA, 19 nt, Homo sapiens
  misc_RNA (1)...(19): siRNA sense strand
caucacugcugcacacugu

SEQ ID NO: 699307 - RNA, 19 nt, Homo sapiens
  misc_RNA (1)...(19): siRNA sense strand
gaguucagauaaccucaga

SEQ ID NO: 699308 - RNA, 19 nt, Homo sapiens
  misc_RNA (1)...(19): siRNA sense strand
ccaaagaggcugggcaaug

SEQ ID NO: 699309 - RNA, 19 nt, Homo sapiens
  misc_RNA (1)...(19): siRNA sense strand
gcuaugugaguucagauaa

SEQ ID NO: 699310 - RNA, 19 nt, Homo sapiens
  misc_RNA (1)...(19): siRNA sense strand
gcaaguacaagccaaagag

SEQ ID NO: 699311 - RNA, 19 nt, Homo sapiens
  misc_RNA (1)...(19): siRNA sense strand
caaggugacugcauuacac

SEQ ID NO: 699312 - RNA, 19 nt, Homo sapiens
  misc_RNA (1)...(19): siRNA sense strand
gggaggaguuuguguccau

SEQ ID NO: 699313 - RNA, 19 nt, Homo sapiens
  misc_RNA (1)...(19): siRNA sense strand
gcauuacaccacucaguau

SEQ ID NO: 699314 - RNA, 19 nt, Homo sapiens
  misc_RNA (1)...(19): siRNA sense strand
gcucagggaaguacagaug

SEQ ID NO: 699315 - RNA, 19 nt, Homo sapiens
  misc_RNA (1)...(19): siRNA sense strand
gggucuaguuucccuguug

SEQ ID NO: 699316 - RNA, 19 nt, Homo sapiens
  misc_RNA (1)...(19): siRNA sense strand
uuacaccacucaguauaug

SEQ ID NO: 699317 - RNA, 19 nt, Homo sapiens
  misc_RNA (1)...(19): siRNA sense strand
uggagaagauugucuacca

SEQ ID NO: 699318 - RNA, 19 nt, Homo sapiens
  misc_RNA (1)...(19): siRNA sense strand
ucacagcugcuucguggaa

SEQ ID NO: 699319 - RNA, 19 nt, Homo sapiens
  misc_RNA (1)...(19): siRNA sense strand
gaagggucacuacgcaaau

SEQ ID NO: 699320 - RNA, 19 nt, Homo sapiens
  misc_RNA (1)...(19): siRNA sense strand
cauuacaccacucaguaua

SEQ ID NO: 699321 - RNA, 19 nt, Homo sapiens
  misc_RNA (1)...(19): siRNA sense strand
ggcaaugacaucgcccuua

SEQ ID NO: 699322 - RNA, 19 nt, Homo sapiens
  misc_RNA (1)...(19): siRNA sense strand
aaugacaucgcccuuauga

SEQ ID NO: 699323 - RNA, 19 nt, Homo sapiens
  misc_RNA (1)...(19): siRNA sense strand
gugacggagucucggauug

SEQ ID NO: 699324 - RNA, 19 nt, Homo sapiens
  misc_RNA (1)...(19): siRNA sense strand
ggucacuacgcaaauguug

SEQ ID NO: 699325 - RNA, 19 nt, Homo sapiens
  misc_RNA (1)...(19): siRNA sense strand
gcaguuccgggaggaguuu

SEQ ID NO: 699326 - RNA, 19 nt, Homo sapiens
  misc_RNA (1)...(19): siRNA sense strand
uaguuucccuguuggacaa

SEQ ID NO: 699327 - RNA, 19 nt, Homo sapiens
  misc_RNA (1)...(19): siRNA sense strand
uuaaguguaucgagcugau

SEQ ID NO: 699328 - RNA, 19 nt, Homo sapiens
  misc_RNA (1)...(19): siRNA sense strand
ucagggaaguacagauguc

SEQ ID NO: 699329 - RNA, 19 nt, Homo sapiens
  misc_RNA (1)...(19): siRNA sense strand
augacaaggugacugcauu

SEQ ID NO: 699330 - RNA, 19 nt, Homo sapiens
  misc_RNA (1)...(19): siRNA sense strand
guggaaacauguccuugcu

SEQ ID NO: 699331 - RNA, 19 nt, Homo sapiens
  misc_RNA (1)...(19): siRNA sense strand
ccggguggguggucagaau

SEQ ID NO: 699332 - RNA, 19 nt, Homo sapiens
  misc_RNA (1)...(19): siRNA sense strand
ugcauuacaccacucagua

SEQ ID NO: 699333 - RNA, 19 nt, Homo sapiens
  misc_RNA (1)...(19): siRNA sense strand
guucagauaaccucagagu

SEQ ID NO: 699334 - RNA, 19 nt, Homo sapiens
  misc_RNA (1)...(19): siRNA sense strand
ccaggugggucuaguuucc

SEQ ID NO: 699335 - RNA, 19 nt, Homo sapiens
  misc_RNA (1)...(19): siRNA sense strand
ucgcucauccuuuaagugu

SEQ ID NO: 699336 - RNA, 19 nt, Homo sapiens
  misc_RNA (1)...(19): siRNA sense strand
cggagucucggauugcaaa

SEQ ID NO: 699337 - RNA, 19 nt, Homo sapiens
  misc_RNA (1)...(19): siRNA sense strand
gggccacucacguucaaug

SEQ ID NO: 699338 - RNA, 19 nt, Homo sapiens
  misc_RNA (1)...(19): siRNA sense strand
caaagaggcugggcaauga

SEQ ID NO: 699339 - RNA, 19 nt, Homo sapiens
  misc_RNA (1)...(19): siRNA sense strand
gcaaugacaucgcccuuau

SEQ ID NO: 699340 - RNA, 19 nt, Homo sapiens
  misc_RNA (1)...(19): siRNA sense strand
gaucaccucuugccagaug

SEQ ID NO: 699341 - RNA, 19 nt, Homo sapiens
  misc_RNA (1)...(19): siRNA sense strand
ucagauaaccucagaguga

SEQ ID NO: 699342 - RNA, 19 nt, Homo sapiens
  misc_RNA (1)...(19): siRNA sense strand
gcucauccuuuaaguguau

SEQ ID NO: 699343 - RNA, 19 nt, Homo sapiens
  misc_RNA (1)...(19): siRNA sense strand
guccaucgaucaccucuug

SEQ ID NO: 699344 - RNA, 19 nt, Homo sapiens
  misc_RNA (1)...(19): siRNA sense strand
ggaagggucacuacgcaaa

SEQ ID NO: 699345 - RNA, 19 nt, Homo sapiens
  misc_RNA (1)...(19): siRNA sense strand
caucguggguggaaacaug

SEQ ID NO: 699346 - RNA, 19 nt, Homo sapiens
  misc_RNA (1)...(19): siRNA sense strand
ugacaucgcccuuaugaag

SEQ ID NO: 699347 - RNA, 19 nt, Homo sapiens
  misc_RNA (1)...(19): siRNA sense strand
ugacaaggugacugcauua

SEQ ID NO: 699348 - RNA, 19 nt, Homo sapiens
  misc_RNA (1)...(19): siRNA sense strand
caagcuaugugaguucaga

SEQ ID NO: 699349 - RNA, 19 nt, Homo sapiens
  misc_RNA (1)...(19): siRNA sense strand
caucacugcugcacacugu

SEQ ID NO: 699350 - RNA, 19 nt, Homo sapiens
  misc_RNA (1)...(19): siRNA sense strand
gaguucagauaaccucaga

SEQ ID NO: 699351 - RNA, 19 nt, Homo sapiens
  misc_RNA (1)...(19): siRNA sense strand
ccaaagaggcugggcaaug

SEQ ID NO: 699352 - RNA, 19 nt, Homo sapiens
  misc_RNA (1)...(19): siRNA sense strand
gcuaugugaguucagauaa

SEQ ID NO: 699353 - RNA, 19 nt, Homo sapiens
  misc_RNA (1)...(19): siRNA sense strand
gcaaguacaagccaaagag

SEQ ID NO: 699354 - RNA, 19 nt, Homo sapiens
  misc_RNA (1)...(19): siRNA sense strand
caaggugacugcauuacac

SEQ ID NO: 699355 - RNA, 19 nt, Homo sapiens
  misc_RNA (1)...(19): siRNA sense strand
gggaggaguuuguguccau

SEQ ID NO: 699356 - RNA, 19 nt, Homo sapiens
  misc_RNA (1)...(19): siRNA sense strand
gcauuacaccacucaguau

SEQ ID NO: 699357 - RNA, 19 nt, Homo sapiens
  misc_RNA (1)...(19): siRNA sense strand
gcucagggaaguacagaug

SEQ ID NO: 699358 - RNA, 19 nt, Homo sapiens
  misc_RNA (1)...(19): siRNA sense strand
gggucuaguuucccuguug

SEQ ID NO: 699359 - RNA, 19 nt, Homo sapiens
  misc_RNA (1)...(19): siRNA sense strand
uuacaccacucaguauaug

SEQ ID NO: 699360 - RNA, 19 nt, Homo sapiens
  misc_RNA (1)...(19): siRNA sense strand
uggagaagauugucuacca

SEQ ID NO: 699361 - RNA, 19 nt, Homo sapiens
  misc_RNA (1)...(19): siRNA sense strand
ucacagcugcuucguggaa

SEQ ID NO: 699362 - RNA, 19 nt, Homo sapiens
  misc_RNA (1)...(19): siRNA sense strand
gaagggucacuacgcaaau

SEQ ID NO: 699363 - RNA, 19 nt, Homo sapiens
  misc_RNA (1)...(19): siRNA sense strand
cauuacaccacucaguaua

SEQ ID NO: 699364 - RNA, 19 nt, Homo sapiens
  misc_RNA (1)...(19): siRNA sense strand
ggcaaugacaucgcccuua

SEQ ID NO: 699365 - RNA, 19 nt, Homo sapiens
  misc_RNA (1)...(19): siRNA sense strand
aaugacaucgcccuuauga

SEQ ID NO: 699366 - RNA, 19 nt, Homo sapiens
  misc_RNA (1)...(19): siRNA sense strand
gugacggagucucggauug

SEQ ID NO: 699367 - RNA, 19 nt, Homo sapiens
  misc_RNA (1)...(19): siRNA sense strand
ggucacuacgcaaauguug

SEQ ID NO: 699368 - RNA, 19 nt, Homo sapiens
  misc_RNA (1)...(19): siRNA sense strand
gcaguuccgggaggaguuu

SEQ ID NO: 699369 - RNA, 19 nt, Homo sapiens
  misc_RNA (1)...(19): siRNA sense strand
uaguuucccuguuggacaa

SEQ ID NO: 699370 - RNA, 19 nt, Homo sapiens
  misc_RNA (1)...(19): siRNA sense strand
uuaaguguaucgagcugau

SEQ ID NO: 699371 - RNA, 19 nt, Homo sapiens
  misc_RNA (1)...(19): siRNA sense strand
ucagggaaguacagauguc

SEQ ID NO: 699372 - RNA, 19 nt, Homo sapiens
  misc_RNA (1)...(19): siRNA sense strand
augacaaggugacugcauu

SEQ ID NO: 699373 - RNA, 19 nt, Homo sapiens
  misc_RNA (1)...(19): siRNA sense strand
guggaaacauguccuugcu

SEQ ID NO: 699374 - RNA, 19 nt, Homo sapiens
  misc_RNA (1)...(19): siRNA sense strand
ccggguggguggucagaau

SEQ ID NO: 699375 - RNA, 19 nt, Homo sapiens
  misc_RNA (1)...(19): siRNA sense strand
ugcauuacaccacucagua

SEQ ID NO: 699376 - RNA, 19 nt, Homo sapiens
  misc_RNA (1)...(19): siRNA sense strand
guucagauaaccucagagu

SEQ ID NO: 699377 - RNA, 19 nt, Homo sapiens
  misc_RNA (1)...(19): siRNA sense strand
ccaggugggucuaguuucc

SEQ ID NO: 699378 - RNA, 19 nt, Homo sapiens
  misc_RNA (1)...(19): siRNA sense strand
ucgcucauccuuuaagugu

SEQ ID NO: 699379 - RNA, 19 nt, Homo sapiens
  misc_RNA (1)...(19): siRNA sense strand
cggagucucggauugcaaa

SEQ ID NO: 699380 - RNA, 19 nt, Homo sapiens
  misc_RNA (1)...(19): siRNA sense strand
gggccacucacguucaaug

SEQ ID NO: 699381 - RNA, 19 nt, Homo sapiens
  misc_RNA (1)...(19): siRNA sense strand
caaagaggcugggcaauga

SEQ ID NO: 699382 - RNA, 19 nt, Homo sapiens
  misc_RNA (1)...(19): siRNA sense strand
gcaaugacaucgcccuuau

SEQ ID NO: 699383 - RNA, 19 nt, Homo sapiens
  misc_RNA (1)...(19): siRNA sense strand
gaucaccucuugccagaug

SEQ ID NO: 699384 - RNA, 19 nt, Homo sapiens
  misc_RNA (1)...(19): siRNA sense strand
ucagauaaccucagaguga

SEQ ID NO: 699385 - RNA, 19 nt, Homo sapiens
  misc_RNA (1)...(19): siRNA sense strand
guccaucgaucaccucuug

SEQ ID NO: 699386 - RNA, 19 nt, Homo sapiens
  misc_RNA (1)...(19): siRNA sense strand
caucguggguggaaacaug

SEQ ID NO: 699387 - RNA, 19 nt, Homo sapiens
  misc_RNA (1)...(19): siRNA sense strand
ggaagggucacuacgcaaa

SEQ ID NO: 699388 - RNA, 19 nt, Homo sapiens
  misc_RNA (1)...(19): siRNA sense strand
ugacaucgcccuuaugaag

SEQ ID NO: 699389 - RNA, 19 nt, Homo sapiens
  misc_RNA (1)...(19): siRNA sense strand
ugacaaggugacugcauua

SEQ ID NO: 699390 - RNA, 19 nt, Homo sapiens
  misc_RNA (1)...(19): siRNA sense strand
caagcuaugugaguucaga

SEQ ID NO: 699391 - RNA, 19 nt, Homo sapiens
  misc_RNA (1)...(19): siRNA sense strand
caucacugcugcacacugu

SEQ ID NO: 699392 - RNA, 19 nt, Homo sapiens
  misc_RNA (1)...(19): siRNA sense strand
gaguucagauaaccucaga

SEQ ID NO: 699393 - RNA, 19 nt, Homo sapiens
  misc_RNA (1)...(19): siRNA sense strand
ccaaagaggcugggcaaug

SEQ ID NO: 699394 - RNA, 19 nt, Homo sapiens
  misc_RNA (1)...(19): siRNA sense strand
gcuaugugaguucagauaa

SEQ ID NO: 699395 - RNA, 19 nt, Homo sapiens
  misc_RNA (1)...(19): siRNA sense strand
gcaaguacaagccaaagag

SEQ ID NO: 699396 - RNA, 19 nt, Homo sapiens
  misc_RNA (1)...(19): siRNA sense strand
caaggugacugcauuacac

SEQ ID NO: 699397 - RNA, 19 nt, Homo sapiens
  misc_RNA (1)...(19): siRNA sense strand
gggaggaguuuguguccau

SEQ ID NO: 699398 - RNA, 19 nt, Homo sapiens
  misc_RNA (1)...(19): siRNA sense strand
gcauuacaccacucaguau

SEQ ID NO: 699399 - RNA, 19 nt, Homo sapiens
  misc_RNA (1)...(19): siRNA sense strand
gggucuaguuucccuguug

SEQ ID NO: 699400 - RNA, 19 nt, Homo sapiens
  misc_RNA (1)...(19): siRNA sense strand
uuacaccacucaguauaug

SEQ ID NO: 699401 - RNA, 19 nt, Homo sapiens
  misc_RNA (1)...(19): siRNA sense strand
uggagaagauugucuacca

SEQ ID NO: 699402 - RNA, 19 nt, Homo sapiens
  misc_RNA (1)...(19): siRNA sense strand
gaagggucacuacgcaaau

SEQ ID NO: 699403 - RNA, 19 nt, Homo sapiens
  misc_RNA (1)...(19): siRNA sense strand
cauuacaccacucaguaua

SEQ ID NO: 699404 - RNA, 19 nt, Homo sapiens
  misc_RNA (1)...(19): siRNA sense strand
ggcaaugacaucgcccuua

SEQ ID NO: 699405 - RNA, 19 nt, Homo sapiens
  misc_RNA (1)...(19): siRNA sense strand
aaugacaucgcccuuauga

SEQ ID NO: 699406 - RNA, 19 nt, Homo sapiens
  misc_RNA (1)...(19): siRNA sense strand
ggucacuacgcaaauguug

SEQ ID NO: 699407 - RNA, 19 nt, Homo sapiens
  misc_RNA (1)...(19): siRNA sense strand
uaguuucccuguuggacaa

SEQ ID NO: 699408 - RNA, 19 nt, Homo sapiens
  misc_RNA (1)...(19): siRNA sense strand
gcaguuccgggaggaguuu

SEQ ID NO: 699409 - RNA, 19 nt, Homo sapiens
  misc_RNA (1)...(19): siRNA sense strand
augacaaggugacugcauu

SEQ ID NO: 699410 - RNA, 19 nt, Homo sapiens
  misc_RNA (1)...(19): siRNA sense strand
guggaaacauguccuugcu

SEQ ID NO: 699411 - RNA, 19 nt, Homo sapiens
  misc_RNA (1)...(19): siRNA sense strand
ugcauuacaccacucagua

SEQ ID NO: 699412 - RNA, 19 nt, Homo sapiens
  misc_RNA (1)...(19): siRNA sense strand
ccaggugggucuaguuucc

SEQ ID NO: 699413 - RNA, 19 nt, Homo sapiens
  misc_RNA (1)...(19): siRNA sense strand
guucagauaaccucagagu

SEQ ID NO: 699414 - RNA, 19 nt, Homo sapiens
  misc_RNA (1)...(19): siRNA sense strand
gggccacucacguucaaug

SEQ ID NO: 699415 - RNA, 19 nt, Homo sapiens
  misc_RNA (1)...(19): siRNA sense strand
caaagaggcugggcaauga

SEQ ID NO: 699416 - RNA, 19 nt, Homo sapiens
  misc_RNA (1)...(19): siRNA sense strand
gcaaugacaucgcccuuau

SEQ ID NO: 699417 - RNA, 19 nt, Homo sapiens
  misc_RNA (1)...(19): siRNA sense strand
gaucaccucuugccagaug

SEQ ID NO: 699418 - RNA, 19 nt, Homo sapiens
  misc_RNA (1)...(19): siRNA sense strand
ucagauaaccucagaguga

SEQ ID NO: 699419 - RNA, 19 nt, Homo sapiens
  misc_RNA (1)...(19): siRNA sense strand
guccaucgaucaccucuug

SEQ ID NO: 699420 - RNA, 19 nt, Homo sapiens
  misc_RNA (1)...(19): siRNA sense strand
caucguggguggaaacaug

SEQ ID NO: 699421 - RNA, 19 nt, Homo sapiens
  misc_RNA (1)...(19): siRNA sense strand
ggaagggucacuacgcaaa

SEQ ID NO: 699422 - RNA, 19 nt, Homo sapiens
  misc_RNA (1)...(19): siRNA sense strand
ugacaucgcccuuaugaag

SEQ ID NO: 699423 - RNA, 19 nt, Homo sapiens
  misc_RNA (1)...(19): siRNA sense strand
ugacaaggugacugcauua

SEQ ID NO: 699424 - RNA, 19 nt, Homo sapiens
  misc_RNA (1)...(19): siRNA sense strand
caagcuaugugaguucaga

SEQ ID NO: 699425 - RNA, 19 nt, Homo sapiens
  misc_RNA (1)...(19): siRNA sense strand
caucacugcugcacacugu

SEQ ID NO: 699426 - RNA, 19 nt, Homo sapiens
  misc_RNA (1)...(19): siRNA sense strand
gaguucagauaaccucaga

SEQ ID NO: 699427 - RNA, 19 nt, Homo sapiens
  misc_RNA (1)...(19): siRNA sense strand
ccaaagaggcugggcaaug

SEQ ID NO: 699428 - RNA, 19 nt, Homo sapiens
  misc_RNA (1)...(19): siRNA sense strand
gcuaugugaguucagauaa

SEQ ID NO: 699429 - RNA, 19 nt, Homo sapiens
  misc_RNA (1)...(19): siRNA sense strand
gcaaguacaagccaaagag

SEQ ID NO: 699430 - RNA, 19 nt, Homo sapiens
  misc_RNA (1)...(19): siRNA sense strand
caaggugacugcauuacac

SEQ ID NO: 699431 - RNA, 19 nt, Homo sapiens
  misc_RNA (1)...(19): siRNA sense strand
gggaggaguuuguguccau

SEQ ID NO: 699432 - RNA, 19 nt, Homo sapiens
  misc_RNA (1)...(19): siRNA sense strand
gcauuacaccacucaguau

SEQ ID NO: 699433 - RNA, 19 nt, Homo sapiens
  misc_RNA (1)...(19): siRNA sense strand
gggucuaguuucccuguug

SEQ ID NO: 699434 - RNA, 19 nt, Homo sapiens
  misc_RNA (1)...(19): siRNA sense strand
uuacaccacucaguauaug

SEQ ID NO: 699435 - RNA, 19 nt, Homo sapiens
  misc_RNA (1)...(19): siRNA sense strand
uggagaagauugucuacca

SEQ ID NO: 699436 - RNA, 19 nt, Homo sapiens
  misc_RNA (1)...(19): siRNA sense strand
gaagggucacuacgcaaau

SEQ ID NO: 699437 - RNA, 19 nt, Homo sapiens
  misc_RNA (1)...(19): siRNA sense strand
cauuacaccacucaguaua

SEQ ID NO: 699438 - RNA, 19 nt, Homo sapiens
  misc_RNA (1)...(19): siRNA sense strand
ggcaaugacaucgcccuua

SEQ ID NO: 699439 - RNA, 19 nt, Homo sapiens
  misc_RNA (1)...(19): siRNA sense strand
aaugacaucgcccuuauga

SEQ ID NO: 699440 - RNA, 19 nt, Homo sapiens
  misc_RNA (1)...(19): siRNA sense strand
ggucacuacgcaaauguug

SEQ ID NO: 699441 - RNA, 19 nt, Homo sapiens
  misc_RNA (1)...(19): siRNA sense strand
uaguuucccuguuggacaa

SEQ ID NO: 699442 - RNA, 19 nt, Homo sapiens
  misc_RNA (1)...(19): siRNA sense strand
gcaguuccgggaggaguuu

SEQ ID NO: 699443 - RNA, 19 nt, Homo sapiens
  misc_RNA (1)...(19): siRNA sense strand
augacaaggugacugcauu

SEQ ID NO: 699444 - RNA, 19 nt, Homo sapiens
  misc_RNA (1)...(19): siRNA sense strand
guggaaacauguccuugcu

SEQ ID NO: 699445 - RNA, 19 nt, Homo sapiens
  misc_RNA (1)...(19): siRNA sense strand
ugcauuacaccacucagua

SEQ ID NO: 699446 - RNA, 19 nt, Homo sapiens
  misc_RNA (1)...(19): siRNA sense strand
ccaggugggucuaguuucc

SEQ ID NO: 699447 - RNA, 19 nt, Homo sapiens
  misc_RNA (1)...(19): siRNA sense strand
guucagauaaccucagagu

SEQ ID NO: 699448 - RNA, 19 nt, Homo sapiens
  misc_RNA (1)...(19): siRNA sense strand
gggccacucacguucaaug

SEQ ID NO: 699449 - RNA, 19 nt, Homo sapiens
  misc_RNA (1)...(19): siRNA sense strand
caaagaggcugggcaauga

SEQ ID NO: 699450 - RNA, 19 nt, Homo sapiens
  misc_RNA (1)...(19): siRNA sense strand
gcaaugacaucgcccuuau

SEQ ID NO: 699451 - RNA, 19 nt, Homo sapiens
  misc_RNA (1)...(19): siRNA sense strand
gaucaccucuugccagaug

SEQ ID NO: 699452 - RNA, 19 nt, Homo sapiens
  misc_RNA (1)...(19): siRNA sense strand
ucagauaaccucagaguga

SEQ ID NO: 699453 - RNA, 19 nt, Homo sapiens
  misc_RNA (1)...(19): siRNA sense strand
gcucauccuuuaaguguau

SEQ ID NO: 699454 - RNA, 19 nt, Homo sapiens
  misc_RNA (1)...(19): siRNA sense strand
guccaucgaucaccucuug

SEQ ID NO: 699455 - RNA, 19 nt, Homo sapiens
  misc_RNA (1)...(19): siRNA sense strand
ggaagggucacuacgcaaa

SEQ ID NO: 699456 - RNA, 19 nt, Homo sapiens
  misc_RNA (1)...(19): siRNA sense strand
caucguggguggaaacaug

SEQ ID NO: 699457 - RNA, 19 nt, Homo sapiens
  misc_RNA (1)...(19): siRNA sense strand
ugacaucgcccuuaugaag

SEQ ID NO: 699458 - RNA, 19 nt, Homo sapiens
  misc_RNA (1)...(19): siRNA sense strand
ugacaaggugacugcauua

SEQ ID NO: 699459 - RNA, 19 nt, Homo sapiens
  misc_RNA (1)...(19): siRNA sense strand
caagcuaugugaguucaga

SEQ ID NO: 699460 - RNA, 19 nt, Homo sapiens
  misc_RNA (1)...(19): siRNA sense strand
caucacugcugcacacugu

SEQ ID NO: 699461 - RNA, 19 nt, Homo sapiens
  misc_RNA (1)...(19): siRNA sense strand
gaguucagauaaccucaga

SEQ ID NO: 699462 - RNA, 19 nt, Homo sapiens
  misc_RNA (1)...(19): siRNA sense strand
ccaaagaggcugggcaaug

SEQ ID NO: 699463 - RNA, 19 nt, Homo sapiens
  misc_RNA (1)...(19): siRNA sense strand
gcuaugugaguucagauaa

SEQ ID NO: 699464 - RNA, 19 nt, Homo sapiens
  misc_RNA (1)...(19): siRNA sense strand
gcaaguacaagccaaagag

SEQ ID NO: 699465 - RNA, 19 nt, Homo sapiens
  misc_RNA (1)...(19): siRNA sense strand
caaggugacugcauuacac

SEQ ID NO: 699466 - RNA, 19 nt, Homo sapiens
  misc_RNA (1)...(19): siRNA sense strand
gggaggaguuuguguccau

SEQ ID NO: 699467 - RNA, 19 nt, Homo sapiens
  misc_RNA (1)...(19): siRNA sense strand
gcauuacaccacucaguau

SEQ ID NO: 699468 - RNA, 19 nt, Homo sapiens
  misc_RNA (1)...(19): siRNA sense strand
gcucagggaaguacagaug

SEQ ID NO: 699469 - RNA, 19 nt, Homo sapiens
  misc_RNA (1)...(19): siRNA sense strand
gggucuaguuucccuguug

SEQ ID NO: 699470 - RNA, 19 nt, Homo sapiens
  misc_RNA (1)...(19): siRNA sense strand
uuacaccacucaguauaug

SEQ ID NO: 699471 - RNA, 19 nt, Homo sapiens
  misc_RNA (1)...(19): siRNA sense strand
uggagaagauugucuacca

SEQ ID NO: 699472 - RNA, 19 nt, Homo sapiens
  misc_RNA (1)...(19): siRNA sense strand
ucacagcugcuucguggaa

SEQ ID NO: 699473 - RNA, 19 nt, Homo sapiens
  misc_RNA (1)...(19): siRNA sense strand
gaagggucacuacgcaaau

SEQ ID NO: 699474 - RNA, 19 nt, Homo sapiens
  misc_RNA (1)...(19): siRNA sense strand
cauuacaccacucaguaua

SEQ ID NO: 699475 - RNA, 19 nt, Homo sapiens
  misc_RNA (1)...(19): siRNA sense strand
ggcaaugacaucgcccuua

SEQ ID NO: 699476 - RNA, 19 nt, Homo sapiens
  misc_RNA (1)...(19): siRNA sense strand
aaugacaucgcccuuauga

SEQ ID NO: 699477 - RNA, 19 nt, Homo sapiens
  misc_RNA (1)...(19): siRNA sense strand
gugacggagucucggauug

SEQ ID NO: 699478 - RNA, 19 nt, Homo sapiens
  misc_RNA (1)...(19): siRNA sense strand
ggucacuacgcaaauguug

SEQ ID NO: 699479 - RNA, 19 nt, Homo sapiens
  misc_RNA (1)...(19): siRNA sense strand
gcaguuccgggaggaguuu

SEQ ID NO: 699480 - RNA, 19 nt, Homo sapiens
  misc_RNA (1)...(19): siRNA sense strand
uaguuucccuguuggacaa

SEQ ID NO: 699481 - RNA, 19 nt, Homo sapiens
  misc_RNA (1)...(19): siRNA sense strand
uuaaguguaucgagcugau

SEQ ID NO: 699482 - RNA, 19 nt, Homo sapiens
  misc_RNA (1)...(19): siRNA sense strand
ucagggaaguacagauguc

SEQ ID NO: 699483 - RNA, 19 nt, Homo sapiens
  misc_RNA (1)...(19): siRNA sense strand
augacaaggugacugcauu

SEQ ID NO: 699484 - RNA, 19 nt, Homo sapiens
  misc_RNA (1)...(19): siRNA sense strand
guggaaacauguccuugcu

SEQ ID NO: 699485 - RNA, 19 nt, Homo sapiens
  misc_RNA (1)...(19): siRNA sense strand
ccggguggguggucagaau

SEQ ID NO: 699486 - RNA, 19 nt, Homo sapiens
  misc_RNA (1)...(19): siRNA sense strand
ugcauuacaccacucagua

SEQ ID NO: 699487 - RNA, 19 nt, Homo sapiens
  misc_RNA (1)...(19): siRNA sense strand
guucagauaaccucagagu

SEQ ID NO: 699488 - RNA, 19 nt, Homo sapiens
  misc_RNA (1)...(19): siRNA sense strand
ccaggugggucuaguuucc

SEQ ID NO: 699489 - RNA, 19 nt, Homo sapiens
  misc_RNA (1)...(19): siRNA sense strand
ucgcucauccuuuaagugu

SEQ ID NO: 699490 - RNA, 19 nt, Homo sapiens
  misc_RNA (1)...(19): siRNA sense strand
cggagucucggauugcaaa

SEQ ID NO: 699491 - RNA, 19 nt, Homo sapiens
  misc_RNA (1)...(19): siRNA sense strand
gggccacucacguucaaug

SEQ ID NO: 699492 - RNA, 19 nt, Homo sapiens
  misc_RNA (1)...(19): siRNA sense strand
caaagaggcugggcaauga

SEQ ID NO: 699493 - RNA, 19 nt, Homo sapiens
  misc_RNA (1)...(19): siRNA sense strand
gcaaugacaucgcccuuau

SEQ ID NO: 699494 - RNA, 19 nt, Homo sapiens
  misc_RNA (1)...(19): siRNA sense strand
gaucaccucuugccagaug

SEQ ID NO: 699495 - RNA, 19 nt, Homo sapiens
  misc_RNA (1)...(19): siRNA sense strand
ucagauaaccucagaguga

SEQ ID NO: 699496 - RNA, 19 nt, Homo sapiens
  misc_RNA (1)...(19): siRNA sense strand
gcucauccuuuaaguguau

SEQ ID NO: 699497 - RNA, 19 nt, Homo sapiens
  misc_RNA (1)...(19): siRNA sense strand
guccaucgaucaccucuug

SEQ ID NO: 699498 - RNA, 19 nt, Homo sapiens
  misc_RNA (1)...(19): siRNA sense strand
ggaagggucacuacgcaaa

SEQ ID NO: 699499 - RNA, 19 nt, Homo sapiens
  misc_RNA (1)...(19): siRNA sense strand
caucguggguggaaacaug

SEQ ID NO: 699500 - RNA, 19 nt, Homo sapiens
  misc_RNA (1)...(19): siRNA sense strand
ugacaucgcccuuaugaag

SEQ ID NO: 699501 - RNA, 19 nt, Homo sapiens
  misc_RNA (1)...(19): siRNA sense strand
ugacaaggugacugcauua

SEQ ID NO: 699502 - RNA, 19 nt, Homo sapiens
  misc_RNA (1)...(19): siRNA sense strand
caagcuaugugaguucaga

SEQ ID NO: 699503 - RNA, 19 nt, Homo sapiens
  misc_RNA (1)...(19): siRNA sense strand
caucacugcugcacacugu

SEQ ID NO: 699504 - RNA, 19 nt, Homo sapiens
  misc_RNA (1)...(19): siRNA sense strand
gaguucagauaaccucaga

SEQ ID NO: 699505 - RNA, 19 nt, Homo sapiens
  misc_RNA (1)...(19): siRNA sense strand
ccaaagaggcugggcaaug

SEQ ID NO: 699506 - RNA, 19 nt, Homo sapiens
  misc_RNA (1)...(19): siRNA sense strand
gcuaugugaguucagauaa

SEQ ID NO: 699507 - RNA, 19 nt, Homo sapiens
  misc_RNA (1)...(19): siRNA sense strand
gcaaguacaagccaaagag

SEQ ID NO: 699508 - RNA, 19 nt, Homo sapiens
  misc_RNA (1)...(19): siRNA sense strand
caaggugacugcauuacac

SEQ ID NO: 699509 - RNA, 19 nt, Homo sapiens
  misc_RNA (1)...(19): siRNA sense strand
gggaggaguuuguguccau

SEQ ID NO: 699510 - RNA, 19 nt, Homo sapiens
  misc_RNA (1)...(19): siRNA sense strand
gcauuacaccacucaguau

SEQ ID NO: 699511 - RNA, 19 nt, Homo sapiens
  misc_RNA (1)...(19): siRNA sense strand
gcucagggaaguacagaug

SEQ ID NO: 699512 - RNA, 19 nt, Homo sapiens
  misc_RNA (1)...(19): siRNA sense strand
gggucuaguuucccuguug

SEQ ID NO: 699513 - RNA, 19 nt, Homo sapiens
  misc_RNA (1)...(19): siRNA sense strand
uuacaccacucaguauaug

SEQ ID NO: 699514 - RNA, 19 nt, Homo sapiens
  misc_RNA (1)...(19): siRNA sense strand
uggagaagauugucuacca

SEQ ID NO: 699515 - RNA, 19 nt, Homo sapiens
  misc_RNA (1)...(19): siRNA sense strand
ucacagcugcuucguggaa

SEQ ID NO: 699516 - RNA, 19 nt, Homo sapiens
  misc_RNA (1)...(19): siRNA sense strand
gaagggucacuacgcaaau

SEQ ID NO: 699517 - RNA, 19 nt, Homo sapiens
  misc_RNA (1)...(19): siRNA sense strand
cauuacaccacucaguaua

SEQ ID NO: 699518 - RNA, 19 nt, Homo sapiens
  misc_RNA (1)...(19): siRNA sense strand
ggcaaugacaucgcccuua

SEQ ID NO: 699519 - RNA, 19 nt, Homo sapiens
  misc_RNA (1)...(19): siRNA sense strand
aaugacaucgcccuuauga

SEQ ID NO: 699520 - RNA, 19 nt, Homo sapiens
  misc_RNA (1)...(19): siRNA sense strand
gugacggagucucggauug

SEQ ID NO: 699521 - RNA, 19 nt, Homo sapiens
  misc_RNA (1)...(19): siRNA sense strand
ggucacuacgcaaauguug

SEQ ID NO: 699522 - RNA, 19 nt, Homo sapiens
  misc_RNA (1)...(19): siRNA sense strand
gcaguuccgggaggaguuu

SEQ ID NO: 699523 - RNA, 19 nt, Homo sapiens
  misc_RNA (1)...(19): siRNA sense strand
uaguuucccuguuggacaa

SEQ ID NO: 699524 - RNA, 19 nt, Homo sapiens
  misc_RNA (1)...(19): siRNA sense strand
uuaaguguaucgagcugau

SEQ ID NO: 699525 - RNA, 19 nt, Homo sapiens
  misc_RNA (1)...(19): siRNA sense strand
ucagggaaguacagauguc

SEQ ID NO: 699526 - RNA, 19 nt, Homo sapiens
  misc_RNA (1)...(19): siRNA sense strand
augacaaggugacugcauu

SEQ ID NO: 699527 - RNA, 19 nt, Homo sapiens
  misc_RNA (1)...(19): siRNA sense strand
guggaaacauguccuugcu

SEQ ID NO: 699528 - RNA, 19 nt, Homo sapiens
  misc_RNA (1)...(19): siRNA sense strand
ccggguggguggucagaau

SEQ ID NO: 699529 - RNA, 19 nt, Homo sapiens
  misc_RNA (1)...(19): siRNA sense strand
ugcauuacaccacucagua

SEQ ID NO: 699530 - RNA, 19 nt, Homo sapiens
  misc_RNA (1)...(19): siRNA sense strand
guucagauaaccucagagu

SEQ ID NO: 699531 - RNA, 19 nt, Homo sapiens
  misc_RNA (1)...(19): siRNA sense strand
ccaggugggucuaguuucc

SEQ ID NO: 699532 - RNA, 19 nt, Homo sapiens
  misc_RNA (1)...(19): siRNA sense strand
ucgcucauccuuuaagugu

SEQ ID NO: 699533 - RNA, 19 nt, Homo sapiens
  misc_RNA (1)...(19): siRNA sense strand
cggagucucggauugcaaa

SEQ ID NO: 699534 - RNA, 19 nt, Homo sapiens
  misc_RNA (1)...(19): siRNA sense strand
gggccacucacguucaaug

SEQ ID NO: 699535 - RNA, 19 nt, Homo sapiens
  misc_RNA (1)...(19): siRNA sense strand
caaagaggcugggcaauga

SEQ ID NO: 699536 - RNA, 19 nt, Homo sapiens
  misc_RNA (1)...(19): siRNA sense strand
gcaaugacaucgcccuuau

SEQ ID NO: 699537 - RNA, 19 nt, Homo sapiens
  misc_RNA (1)...(19): siRNA sense strand
gaucaccucuugccagaug

SEQ ID NO: 699538 - RNA, 19 nt, Homo sapiens
  misc_RNA (1)...(19): siRNA sense strand
ucagauaaccucagaguga

SEQ ID NO: 699539 - RNA, 19 nt, Homo sapiens
  misc_RNA (1)...(19): siRNA sense strand
guccaucgaucaccucuug

SEQ ID NO: 699540 - RNA, 19 nt, Homo sapiens
  misc_RNA (1)...(19): siRNA sense strand
caucguggguggaaacaug

SEQ ID NO: 699541 - RNA, 19 nt, Homo sapiens
  misc_RNA (1)...(19): siRNA sense strand
ggaagggucacuacgcaaa

SEQ ID NO: 699542 - RNA, 19 nt, Homo sapiens
  misc_RNA (1)...(19): siRNA sense strand
ugacaucgcccuuaugaag

SEQ ID NO: 699543 - RNA, 19 nt, Homo sapiens
  misc_RNA (1)...(19): siRNA sense strand
ugacaaggugacugcauua

SEQ ID NO: 699544 - RNA, 19 nt, Homo sapiens
  misc_RNA (1)...(19): siRNA sense strand
caagcuaugugaguucaga

SEQ ID NO: 699545 - RNA, 19 nt, Homo sapiens
  misc_RNA (1)...(19): siRNA sense strand
caucacugcugcacacugu

SEQ ID NO: 699546 - RNA, 19 nt, Homo sapiens
  misc_RNA (1)...(19): siRNA sense strand
gaguucagauaaccucaga

SEQ ID NO: 699547 - RNA, 19 nt, Homo sapiens
  misc_RNA (1)...(19): siRNA sense strand
ccaaagaggcugggcaaug

SEQ ID NO: 699548 - RNA, 19 nt, Homo sapiens
  misc_RNA (1)...(19): siRNA sense strand
gcuaugugaguucagauaa

SEQ ID NO: 699549 - RNA, 19 nt, Homo sapiens
  misc_RNA (1)...(19): siRNA sense strand
gcaaguacaagccaaagag

SEQ ID NO: 699550 - RNA, 19 nt, Homo sapiens
  misc_RNA (1)...(19): siRNA sense strand
caaggugacugcauuacac

SEQ ID NO: 699551 - RNA, 19 nt, Homo sapiens
  misc_RNA (1)...(19): siRNA sense strand
gggaggaguuuguguccau

SEQ ID NO: 699552 - RNA, 19 nt, Homo sapiens
  misc_RNA (1)...(19): siRNA sense strand
gcauuacaccacucaguau

SEQ ID NO: 699553 - RNA, 19 nt, Homo sapiens
  misc_RNA (1)...(19): siRNA sense strand
gggucuaguuucccuguug

SEQ ID NO: 699554 - RNA, 19 nt, Homo sapiens
  misc_RNA (1)...(19): siRNA sense strand
uuacaccacucaguauaug

SEQ ID NO: 699555 - RNA, 19 nt, Homo sapiens
  misc_RNA (1)...(19): siRNA sense strand
uggagaagauugucuacca

SEQ ID NO: 699556 - RNA, 19 nt, Homo sapiens
  misc_RNA (1)...(19): siRNA sense strand
gaagggucacuacgcaaau

SEQ ID NO: 699557 - RNA, 19 nt, Homo sapiens
  misc_RNA (1)...(19): siRNA sense strand
cauuacaccacucaguaua

SEQ ID NO: 699558 - RNA, 19 nt, Homo sapiens
  misc_RNA (1)...(19): siRNA sense strand
ggcaaugacaucgcccuua

SEQ ID NO: 699559 - RNA, 19 nt, Homo sapiens
  misc_RNA (1)...(19): siRNA sense strand
aaugacaucgcccuuauga

SEQ ID NO: 699560 - RNA, 19 nt, Homo sapiens
  misc_RNA (1)...(19): siRNA sense strand
ggucacuacgcaaauguug

SEQ ID NO: 699561 - RNA, 19 nt, Homo sapiens
  misc_RNA (1)...(19): siRNA sense strand
uaguuucccuguuggacaa

SEQ ID NO: 699562 - RNA, 19 nt, Homo sapiens
  misc_RNA (1)...(19): siRNA sense strand
gcaguuccgggaggaguuu

SEQ ID NO: 699563 - RNA, 19 nt, Homo sapiens
  misc_RNA (1)...(19): siRNA sense strand
augacaaggugacugcauu

SEQ ID NO: 699564 - RNA, 19 nt, Homo sapiens
  misc_RNA (1)...(19): siRNA sense strand
guggaaacauguccuugcu

SEQ ID NO: 699565 - RNA, 19 nt, Homo sapiens
  misc_RNA (1)...(19): siRNA sense strand
ugcauuacaccacucagua

SEQ ID NO: 699566 - RNA, 19 nt, Homo sapiens
  misc_RNA (1)...(19): siRNA sense strand
ccaggugggucuaguuucc

SEQ ID NO: 699567 - RNA, 19 nt, Homo sapiens
  misc_RNA (1)...(19): siRNA sense strand
guucagauaaccucagagu

SEQ ID NO: 699568 - RNA, 19 nt, Homo sapiens
  misc_RNA (1)...(19): siRNA sense strand
gggccacucacguucaaug

SEQ ID NO: 699569 - RNA, 19 nt, Homo sapiens
  misc_RNA (1)...(19): siRNA sense strand
caaagaggcugggcaauga

SEQ ID NO: 699570 - RNA, 19 nt, Homo sapiens
  misc_RNA (1)...(19): siRNA sense strand
gcaaugacaucgcccuuau

SEQ ID NO: 699571 - RNA, 19 nt, Homo sapiens
  misc_RNA (1)...(19): siRNA sense strand
gaucaccucuugccagaug

SEQ ID NO: 699572 - RNA, 19 nt, Homo sapiens
  misc_RNA (1)...(19): siRNA sense strand
ucagauaaccucagaguga

SEQ ID NO: 699573 - RNA, 19 nt, Homo sapiens
  misc_RNA (1)...(19): siRNA sense strand
guccaucgaucaccucuug

SEQ ID NO: 699574 - RNA, 19 nt, Homo sapiens
  misc_RNA (1)...(19): siRNA sense strand
caucguggguggaaacaug

SEQ ID NO: 699575 - RNA, 19 nt, Homo sapiens
  misc_RNA (1)...(19): siRNA sense strand
ggaagggucacuacgcaaa

SEQ ID NO: 699576 - RNA, 19 nt, Homo sapiens
  misc_RNA (1)...(19): siRNA sense strand
ugacaucgcccuuaugaag

SEQ ID NO: 699577 - RNA, 19 nt, Homo sapiens
  misc_RNA (1)...(19): siRNA sense strand
ugacaaggugacugcauua

SEQ ID NO: 699578 - RNA, 19 nt, Homo sapiens
  misc_RNA (1)...(19): siRNA sense strand
caagcuaugugaguucaga

SEQ ID NO: 699579 - RNA, 19 nt, Homo sapiens
  misc_RNA (1)...(19): siRNA sense strand
caucacugcugcacacugu

SEQ ID NO: 699580 - RNA, 19 nt, Homo sapiens
  misc_RNA (1)...(19): siRNA sense strand
gaguucagauaaccucaga

SEQ ID NO: 699581 - RNA, 19 nt, Homo sapiens
  misc_RNA (1)...(19): siRNA sense strand
ccaaagaggcugggcaaug

SEQ ID NO: 699582 - RNA, 19 nt, Homo sapiens
  misc_RNA (1)...(19): siRNA sense strand
gcuaugugaguucagauaa

SEQ ID NO: 699583 - RNA, 19 nt, Homo sapiens
  misc_RNA (1)...(19): siRNA sense strand
gcaaguacaagccaaagag

SEQ ID NO: 699584 - RNA, 19 nt, Homo sapiens
  misc_RNA (1)...(19): siRNA sense strand
caaggugacugcauuacac

SEQ ID NO: 699585 - RNA, 19 nt, Homo sapiens
  misc_RNA (1)...(19): siRNA sense strand
gggaggaguuuguguccau

SEQ ID NO: 699586 - RNA, 19 nt, Homo sapiens
  misc_RNA (1)...(19): siRNA sense strand
gcauuacaccacucaguau

SEQ ID NO: 699587 - RNA, 19 nt, Homo sapiens
  misc_RNA (1)...(19): siRNA sense strand
gggucuaguuucccuguug

SEQ ID NO: 699588 - RNA, 19 nt, Homo sapiens
  misc_RNA (1)...(19): siRNA sense strand
uuacaccacucaguauaug

SEQ ID NO: 699589 - RNA, 19 nt, Homo sapiens
  misc_RNA (1)...(19): siRNA sense strand
uggagaagauugucuacca

SEQ ID NO: 699590 - RNA, 19 nt, Homo sapiens
  misc_RNA (1)...(19): siRNA sense strand
gaagggucacuacgcaaau

SEQ ID NO: 699591 - RNA, 19 nt, Homo sapiens
  misc_RNA (1)...(19): siRNA sense strand
cauuacaccacucaguaua

SEQ ID NO: 699592 - RNA, 19 nt, Homo sapiens
  misc_RNA (1)...(19): siRNA sense strand
ggcaaugacaucgcccuua

SEQ ID NO: 699593 - RNA, 19 nt, Homo sapiens
  misc_RNA (1)...(19): siRNA sense strand
aaugacaucgcccuuauga

SEQ ID NO: 699594 - RNA, 19 nt, Homo sapiens
  misc_RNA (1)...(19): siRNA sense strand
ggucacuacgcaaauguug

SEQ ID NO: 699595 - RNA, 19 nt, Homo sapiens
  misc_RNA (1)...(19): siRNA sense strand
uaguuucccuguuggacaa

SEQ ID NO: 699596 - RNA, 19 nt, Homo sapiens
  misc_RNA (1)...(19): siRNA sense strand
gcaguuccgggaggaguuu

SEQ ID NO: 699597 - RNA, 19 nt, Homo sapiens
  misc_RNA (1)...(19): siRNA sense strand
augacaaggugacugcauu

SEQ ID NO: 699598 - RNA, 19 nt, Homo sapiens
  misc_RNA (1)...(19): siRNA sense strand
guggaaacauguccuugcu

SEQ ID NO: 699599 - RNA, 19 nt, Homo sapiens
  misc_RNA (1)...(19): siRNA sense strand
ugcauuacaccacucagua

SEQ ID NO: 699600 - RNA, 19 nt, Homo sapiens
  misc_RNA (1)...(19): siRNA sense strand
ccaggugggucuaguuucc

SEQ ID NO: 699601 - RNA, 19 nt, Homo sapiens
  misc_RNA (1)...(19): siRNA sense strand
guucagauaaccucagagu

SEQ ID NO: 699602 - RNA, 19 nt, Homo sapiens
  misc_RNA (1)...(19): siRNA sense strand
gggccacucacguucaaug

SEQ ID NO: 699603 - RNA, 19 nt, Homo sapiens
  misc_RNA (1)...(19): siRNA sense strand
caaagaggcugggcaauga

SEQ ID NO: 699604 - RNA, 19 nt, Homo sapiens
  misc_RNA (1)...(19): siRNA sense strand
gcaaugacaucgcccuuau

SEQ ID NO: 699605 - RNA, 19 nt, Homo sapiens
  misc_RNA (1)...(19): siRNA sense strand
gaucaccucuugccagaug

SEQ ID NO: 699606 - RNA, 19 nt, Homo sapiens
  misc_RNA (1)...(19): siRNA sense strand
ucagauaaccucagaguga

SEQ ID NO: 699607 - RNA, 19 nt, Homo sapiens
  misc_RNA (1)...(19): siRNA sense strand
gcucauccuuuaaguguau

SEQ ID NO: 699608 - RNA, 19 nt, Homo sapiens
  misc_RNA (1)...(19): siRNA sense strand
guccaucgaucaccucuug

SEQ ID NO: 699609 - RNA, 19 nt, Homo sapiens
  misc_RNA (1)...(19): siRNA sense strand
ggaagggucacuacgcaaa

SEQ ID NO: 699610 - RNA, 19 nt, Homo sapiens
  misc_RNA (1)...(19): siRNA sense strand
caucguggguggaaacaug

SEQ ID NO: 699611 - RNA, 19 nt, Homo sapiens
  misc_RNA (1)...(19): siRNA sense strand
ugacaucgcccuuaugaag

SEQ ID NO: 699612 - RNA, 19 nt, Homo sapiens
  misc_RNA (1)...(19): siRNA sense strand
ugacaaggugacugcauua

SEQ ID NO: 699613 - RNA, 19 nt, Homo sapiens
  misc_RNA (1)...(19): siRNA sense strand
caagcuaugugaguucaga

SEQ ID NO: 699614 - RNA, 19 nt, Homo sapiens
  misc_RNA (1)...(19): siRNA sense strand
caucacugcugcacacugu

SEQ ID NO: 699615 - RNA, 19 nt, Homo sapiens
  misc_RNA (1)...(19): siRNA sense strand
gaguucagauaaccucaga

SEQ ID NO: 699616 - RNA, 19 nt, Homo sapiens
  misc_RNA (1)...(19): siRNA sense strand
ccaaagaggcugggcaaug

SEQ ID NO: 699617 - RNA, 19 nt, Homo sapiens
  misc_RNA (1)...(19): siRNA sense strand
gcuaugugaguucagauaa

SEQ ID NO: 699618 - RNA, 19 nt, Homo sapiens
  misc_RNA (1)...(19): siRNA sense strand
gcaaguacaagccaaagag

SEQ ID NO: 699619 - RNA, 19 nt, Homo sapiens
  misc_RNA (1)...(19): siRNA sense strand
caaggugacugcauuacac

SEQ ID NO: 699620 - RNA, 19 nt, Homo sapiens
  misc_RNA (1)...(19): siRNA sense strand
gggaggaguuuguguccau

SEQ ID NO: 699621 - RNA, 19 nt, Homo sapiens
  misc_RNA (1)...(19): siRNA sense strand
gcauuacaccacucaguau

SEQ ID NO: 699622 - RNA, 19 nt, Homo sapiens
  misc_RNA (1)...(19): siRNA sense strand
gcucagggaaguacagaug

SEQ ID NO: 699623 - RNA, 19 nt, Homo sapiens
  misc_RNA (1)...(19): siRNA sense strand
gggucuaguuucccuguug

SEQ ID NO: 699624 - RNA, 19 nt, Homo sapiens
  misc_RNA (1)...(19): siRNA sense strand
uuacaccacucaguauaug

SEQ ID NO: 699625 - RNA, 19 nt, Homo sapiens
  misc_RNA (1)...(19): siRNA sense strand
uggagaagauugucuacca

SEQ ID NO: 699626 - RNA, 19 nt, Homo sapiens
  misc_RNA (1)...(19): siRNA sense strand
ucacagcugcuucguggaa

SEQ ID NO: 699627 - RNA, 19 nt, Homo sapiens
  misc_RNA (1)...(19): siRNA sense strand
gaagggucacuacgcaaau

SEQ ID NO: 699628 - RNA, 19 nt, Homo sapiens
  misc_RNA (1)...(19): siRNA sense strand
cauuacaccacucaguaua

SEQ ID NO: 699629 - RNA, 19 nt, Homo sapiens
  misc_RNA (1)...(19): siRNA sense strand
ggcaaugacaucgcccuua

SEQ ID NO: 699630 - RNA, 19 nt, Homo sapiens
  misc_RNA (1)...(19): siRNA sense strand
aaugacaucgcccuuauga

SEQ ID NO: 699631 - RNA, 19 nt, Homo sapiens
  misc_RNA (1)...(19): siRNA sense strand
gugacggagucucggauug

SEQ ID NO: 699632 - RNA, 19 nt, Homo sapiens
  misc_RNA (1)...(19): siRNA sense strand
ggucacuacgcaaauguug

SEQ ID NO: 699633 - RNA, 19 nt, Homo sapiens
  misc_RNA (1)...(19): siRNA sense strand
gcaguuccgggaggaguuu

SEQ ID NO: 699634 - RNA, 19 nt, Homo sapiens
  misc_RNA (1)...(19): siRNA sense strand
uaguuucccuguuggacaa

SEQ ID NO: 699635 - RNA, 19 nt, Homo sapiens
  misc_RNA (1)...(19): siRNA sense strand
uuaaguguaucgagcugau

SEQ ID NO: 699636 - RNA, 19 nt, Homo sapiens
  misc_RNA (1)...(19): siRNA sense strand
ucagggaaguacagauguc

SEQ ID NO: 699637 - RNA, 19 nt, Homo sapiens
  misc_RNA (1)...(19): siRNA sense strand
augacaaggugacugcauu

SEQ ID NO: 699638 - RNA, 19 nt, Homo sapiens
  misc_RNA (1)...(19): siRNA sense strand
guggaaacauguccuugcu

SEQ ID NO: 699639 - RNA, 19 nt, Homo sapiens
  misc_RNA (1)...(19): siRNA sense strand
ccggguggguggucagaau

SEQ ID NO: 699640 - RNA, 19 nt, Homo sapiens
  misc_RNA (1)...(19): siRNA sense strand
ugcauuacaccacucagua

SEQ ID NO: 699641 - RNA, 19 nt, Homo sapiens
  misc_RNA (1)...(19): siRNA sense strand
guucagauaaccucagagu

SEQ ID NO: 699642 - RNA, 19 nt, Homo sapiens
  misc_RNA (1)...(19): siRNA sense strand
ccaggugggucuaguuucc

SEQ ID NO: 699643 - RNA, 19 nt, Homo sapiens
  misc_RNA (1)...(19): siRNA sense strand
ucgcucauccuuuaagugu

SEQ ID NO: 699644 - RNA, 19 nt, Homo sapiens
  misc_RNA (1)...(19): siRNA sense strand
cggagucucggauugcaaa

SEQ ID NO: 699645 - RNA, 19 nt, Homo sapiens
  misc_RNA (1)...(19): siRNA sense strand
gggccacucacguucaaug

SEQ ID NO: 699646 - RNA, 19 nt, Homo sapiens
  misc_RNA (1)...(19): siRNA sense strand
gaaugucgcucaagauuuc

SEQ ID NO: 699647 - RNA, 19 nt, Homo sapiens
  misc_RNA (1)...(19): siRNA sense strand
ggaagacacucauccaguu

SEQ ID NO: 699648 - RNA, 19 nt, Homo sapiens
  misc_RNA (1)...(19): siRNA sense strand
gugagaagcuggacagaaa

SEQ ID NO: 699649 - RNA, 19 nt, Homo sapiens
  misc_RNA (1)...(19): siRNA sense strand
ugaaugcgcuuaucuccua

SEQ ID NO: 699650 - RNA, 19 nt, Homo sapiens
  misc_RNA (1)...(19): siRNA sense strand
gagcuccaaugaacacuuu

SEQ ID NO: 699651 - RNA, 19 nt, Homo sapiens
  misc_RNA (1)...(19): siRNA sense strand
uguaacaguucgucuauuu

SEQ ID NO: 699652 - RNA, 19 nt, Homo sapiens
  misc_RNA (1)...(19): siRNA sense strand
ggacuuggauucagguuac

SEQ ID NO: 699653 - RNA, 19 nt, Homo sapiens
  misc_RNA (1)...(19): siRNA sense strand
cacagaagcuggucauugu

SEQ ID NO: 699654 - RNA, 19 nt, Homo sapiens
  misc_RNA (1)...(19): siRNA sense strand
gaucguagaugugaaugau

SEQ ID NO: 699655 - RNA, 19 nt, Homo sapiens
  misc_RNA (1)...(19): siRNA sense strand
gcacugugguggcacuuau

SEQ ID NO: 699656 - RNA, 19 nt, Homo sapiens
  misc_RNA (1)...(19): siRNA sense strand
caagauuuccugcuggaua

SEQ ID NO: 699657 - RNA, 19 nt, Homo sapiens
  misc_RNA (1)...(19): siRNA sense strand
gcccaggaaucgagaugua

SEQ ID NO: 699658 - RNA, 19 nt, Homo sapiens
  misc_RNA (1)...(19): siRNA sense strand
gaugugagccuccgcauuc

SEQ ID NO: 699659 - RNA, 19 nt, Homo sapiens
  misc_RNA (1)...(19): siRNA sense strand
gagagaagcaaucggacua

SEQ ID NO: 699660 - RNA, 19 nt, Homo sapiens
  misc_RNA (1)...(19): siRNA sense strand
cagaugacccuaucaaguu

SEQ ID NO: 699661 - RNA, 19 nt, Homo sapiens
  misc_RNA (1)...(19): siRNA sense strand
ggaaugucgcucaagauuu

SEQ ID NO: 699662 - RNA, 19 nt, Homo sapiens
  misc_RNA (1)...(19): siRNA sense strand
ccucugaucuucucuaugg

SEQ ID NO: 699663 - RNA, 19 nt, Homo sapiens
  misc_RNA (1)...(19): siRNA sense strand
cagcuggacuuggaaauug

SEQ ID NO: 699664 - RNA, 19 nt, Homo sapiens
  misc_RNA (1)...(19): siRNA sense strand
ggagaagccuuuggaucga

SEQ ID NO: 699665 - RNA, 19 nt, Homo sapiens
  misc_RNA (1)...(19): siRNA sense strand
ccaaugggauccuccgaau

SEQ ID NO: 699666 - RNA, 19 nt, Homo sapiens
  misc_RNA (1)...(19): siRNA sense strand
gaggucacaugagguguuu

SEQ ID NO: 699667 - RNA, 19 nt, Homo sapiens
  misc_RNA (1)...(19): siRNA sense strand
gagugagaauuacuaugaa

SEQ ID NO: 699668 - RNA, 19 nt, Homo sapiens
  misc_RNA (1)...(19): siRNA sense strand
gggaaugucgcucaagauu

SEQ ID NO: 699669 - RNA, 19 nt, Homo sapiens
  misc_RNA (1)...(19): siRNA sense strand
guagagaucguagauguga

SEQ ID NO: 699670 - RNA, 19 nt, Homo sapiens
  misc_RNA (1)...(19): siRNA sense strand
gagcagagguagagaucgu

SEQ ID NO: 699671 - RNA, 19 nt, Homo sapiens
  misc_RNA (1)...(19): siRNA sense strand
gcuauaggcugagcuccaa

SEQ ID NO: 699672 - RNA, 19 nt, Homo sapiens
  misc_RNA (1)...(19): siRNA sense strand
agagugagaauuacuauga

SEQ ID NO: 699673 - RNA, 19 nt, Homo sapiens
  misc_RNA (1)...(19): siRNA sense strand
ccaccuggguuacguuugu

SEQ ID NO: 699674 - RNA, 19 nt, Homo sapiens
  misc_RNA (1)...(19): siRNA sense strand
gaagacacucauccaguug

SEQ ID NO: 699675 - RNA, 19 nt, Homo sapiens
  misc_RNA (1)...(19): siRNA sense strand
uguaucagcuuccucuuuc

SEQ ID NO: 699676 - RNA, 19 nt, Homo sapiens
  misc_RNA (1)...(19): siRNA sense strand
ccgcauuccugaccacuug

SEQ ID NO: 699677 - RNA, 19 nt, Homo sapiens
  misc_RNA (1)...(19): siRNA sense strand
gguaaaggauagugguagu

SEQ ID NO: 699678 - RNA, 19 nt, Homo sapiens
  misc_RNA (1)...(19): siRNA sense strand
ccacagaagcuggucauug

SEQ ID NO: 699679 - RNA, 19 nt, Homo sapiens
  misc_RNA (1)...(19): siRNA sense strand
agaugacccuaucaaguuu

SEQ ID NO: 699680 - RNA, 19 nt, Homo sapiens
  misc_RNA (1)...(19): siRNA sense strand
gaauccagcuagggucaga

SEQ ID NO: 699681 - RNA, 19 nt, Homo sapiens
  misc_RNA (1)...(19): siRNA sense strand
cuacaggauuaguguguug

SEQ ID NO: 699682 - RNA, 19 nt, Homo sapiens
  misc_RNA (1)...(19): siRNA sense strand
cccagacacugcaguuuga

SEQ ID NO: 699683 - RNA, 19 nt, Homo sapiens
  misc_RNA (1)...(19): siRNA sense strand
gaagcuggucauuguggua

SEQ ID NO: 699684 - RNA, 19 nt, Homo sapiens
  misc_RNA (1)...(19): siRNA sense strand
uagggaaugucgcucaaga

SEQ ID NO: 699685 - RNA, 19 nt, Homo sapiens
  misc_RNA (1)...(19): siRNA sense strand
uaacaguucgucuauuugu

SEQ ID NO: 699686 - RNA, 19 nt, Homo sapiens
  misc_RNA (1)...(19): siRNA sense strand
ccugaccacuugccauuug

SEQ ID NO: 699687 - RNA, 19 nt, Homo sapiens
  misc_RNA (1)...(19): siRNA sense strand
gcagcuggacuuggaaauu

SEQ ID NO: 699688 - RNA, 19 nt, Homo sapiens
  misc_RNA (1)...(19): siRNA sense strand
gugguaacgucaccuuuua

SEQ ID NO: 699689 - RNA, 19 nt, Homo sapiens
  misc_RNA (1)...(19): siRNA sense strand
gcggacggcuguuccuauc

SEQ ID NO: 699690 - RNA, 19 nt, Homo sapiens
  misc_RNA (1)...(19): siRNA sense strand
ugacugcuguggacuugga

SEQ ID NO: 699691 - RNA, 19 nt, Homo sapiens
  misc_RNA (1)...(19): siRNA sense strand
uaauccacccucuuucuuu

SEQ ID NO: 699692 - RNA, 19 nt, Homo sapiens
  misc_RNA (1)...(19): siRNA sense strand
gauaauccacccucuuucu

SEQ ID NO: 699693 - RNA, 19 nt, Homo sapiens
  misc_RNA (1)...(19): siRNA sense strand
gcugacugcugucgaugga

SEQ ID NO: 699694 - RNA, 19 nt, Homo sapiens
  misc_RNA (1)...(19): siRNA sense strand
ggauucagguuacaaugcu

SEQ ID NO: 699695 - RNA, 19 nt, Homo sapiens
  misc_RNA (1)...(19): siRNA sense strand
acuuugagagugagaauua

SEQ ID NO: 699696 - RNA, 19 nt, Homo sapiens
  misc_RNA (1)...(19): siRNA sense strand
ggagugauagcuucaugau

SEQ ID NO: 699697 - RNA, 19 nt, Homo sapiens
  misc_RNA (1)...(19): siRNA sense strand
ggugacugcuguggacuug

SEQ ID NO: 699698 - RNA, 19 nt, Homo sapiens
  misc_RNA (1)...(19): siRNA sense strand
ggccaaaucuagcuaugac

SEQ ID NO: 699699 - RNA, 19 nt, Homo sapiens
  misc_RNA (1)...(19): siRNA sense strand
ggaaaaggcucaggaugca

SEQ ID NO: 699700 - RNA, 19 nt, Homo sapiens
  misc_RNA (1)...(19): siRNA sense strand
gcugggaacccuccucuca

SEQ ID NO: 699701 - RNA, 19 nt, Homo sapiens
  misc_RNA (1)...(19): siRNA sense strand
aaaucuagcuaugacauca

SEQ ID NO: 699702 - RNA, 19 nt, Homo sapiens
  misc_RNA (1)...(19): siRNA sense strand
gaucgagaggccaaaucua

SEQ ID NO: 699703 - RNA, 19 nt, Homo sapiens
  misc_RNA (1)...(19): siRNA sense strand
uauccgugcuggacguaaa

SEQ ID NO: 699704 - RNA, 19 nt, Homo sapiens
  misc_RNA (1)...(19): siRNA sense strand
ucguagaugugaaugauca

SEQ ID NO: 699705 - RNA, 19 nt, Homo sapiens
  misc_RNA (1)...(19): siRNA sense strand
caauuugcuuugucuccuu

SEQ ID NO: 699706 - RNA, 19 nt, Homo sapiens
  misc_RNA (1)...(19): siRNA sense strand
gaggccaaaucuagcuaug

SEQ ID NO: 699707 - RNA, 19 nt, Homo sapiens
  misc_RNA (1)...(19): siRNA sense strand
gggagcaauucgauuagca

SEQ ID NO: 699708 - RNA, 19 nt, Homo sapiens
  misc_RNA (1)...(19): siRNA sense strand
aggcugagcuccaaugaac

SEQ ID NO: 699709 - RNA, 19 nt, Homo sapiens
  misc_RNA (1)...(19): siRNA sense strand
ggaccucaaugacaaugcu

SEQ ID NO: 699710 - RNA, 19 nt, Homo sapiens
  misc_RNA (1)...(19): siRNA sense strand
agguagagaucguagaugu

SEQ ID NO: 699711 - RNA, 19 nt, Homo sapiens
  misc_RNA (1)...(19): siRNA sense strand
gacccuaucaaguuuguug

SEQ ID NO: 699712 - RNA, 19 nt, Homo sapiens
  misc_RNA (1)...(19): siRNA sense strand
ucagaugacccuaucaagu
